United States Patent Application Publication US 2026/0103690 A1 - sequence listing, part 81

SEQ ID NO: 399108 - protein, 404 aa, unidentified
MWYVGLDWADTHHDVEVLDEAGKRVGARRFAHSHEGLNALKQFVLSIAAQPENLACIVETNHGLLITFLLEAGIPVYPVNPKTANQLRKAAGAKTDQIDAHLLAKIGRLDLAEMHRLEPDSPIVQELKTLTRDQDALIQTQTRLVNQLTACLKEYYPAALKLFAKLQQRSTLVFLQTYSTPQAAQAASLEEITATLRMGKHTSPTRVAPKIFAEVHRPQLVANPVIVRAKSRLMLSLVKQLLLVIEDIATYDEEIRTLFLTHKDQEMWRSLPRAGKRLAPRLLAEWGDDRSRYADANSVQALAGTAPVPFQSGNYAKAHKRFACLKPLRNALHQFAWQSTMQEAWALDYYQRKRAEGKTHSMAIRALANVWVRIIYRMWVNKTGYQPATFAAAKRAHAPRQHVA

SEQ ID NO: 399109 - protein, 346 aa, unidentified
MKYCKAKSEIKMLGIDLAKQSFQLHGVDESGQTVLRKKLSRNKLTAFIASLPPCLIGLEACGGAHHWARTFTNFGHTVRMMAPQFVKPYVKSNKNDAVDAEAICEAAQRPSMRFVPAKCIEQQDIQSIHRIRSLLVSRRTAQANQIRGLLLEYGVVIPKGIACVRARIPEILEDAENGLTPLFRQLLNALYEEMVHLDQRIDTLEQKLRAICLQSKDCQRLLTIPGIGLLTATAMVAAVSDIAAFKNGRELAAWMGLVPRQHSTGGVTTLMGISKRGDSYLRTLLIHGARAVVRIADKYQDKRNRWISKLEQRRGKNISAVGVANKNVRIAWALLSKKENYNGVAA

SEQ ID NO: 399110 - protein, 338 aa, unidentified
MELYAGIDLHSNNNVLVVLDESDRVIYQKLLHNVLADILAALASYEGKIKGVAVESTYNWYWLVDGLQEAGHTVHLVNTAAVKQYDGLKYSGDFSDARHLAHLLRLGILPEGYIYPREERAVRDLLRKRSQLVRTRTTQILSIQNLLARNLAVQASGNLIKSWQDTDIDALELLSEQKLALKSNLALMHCVDEQITLLEKAILAKGKLKPEYQSLRTVSGVGEVLALTIALETGELARFEGPGNFASYARTVNSRRESNGKKKGEGNTKCGNKFLAWAFVEAAHFAVRYDPAIARFYQRKCAKSLSVVAIKAVAHKLARACYHVMKNGEAFDVKRAFV

SEQ ID NO: 399111 - protein, 341 aa, unidentified
MTNPIIRQNIGIDISKASISVAIAQKRLDQSVVFPSSKSFENTLSGFEKMNRWIAQFTDPTVEVHYTMEATGVYYESLAYWLFENQKPVSVILAKQFKSYAQSLNIQSKTDGIDARILAQMGVERKLSLWSAVSGQMRQLKQLSRERNSLMDEQTAIKNQLHALKHSYQPDQRSIGRIEGRLALIAQQIKEIQQEMSEILANDPPLKERIDHVCTIKGVSLITAIAIIAETNGFALFHSRSQLVAYAGYDVVRRQSGTSINAPTKISKKGNKHIRKTLYFPALSAAMHETAMKKTYQRITEKTNIKMKGAVAIQRRLLVLIYTLFKNNQPYNPNYVPKNAA

SEQ ID NO: 399112 - protein, 337 aa, unidentified
MKYSGIDLHSNNSVVVVIDEADRVVYRRRLPNELGKVLEALQPYWAELAGVVVESTYNWYWLVDGLQAAGYKVHLANPARMKRYDGLKHSDDDTDAVQLAHLLRLGILPTGYIYPVAERGLRDLGRRRLQLVRHRTMHVLAVENVQARETGARMTGDRVKRLDAQKVKALGLPEDVAVGMQANVAVIGTLNEEIAKLEKHLLERLEPRPEYALLGTAPGIGRILGPIILLETGSIERFAAVGNYASYARCVDSARLSNNKKKGEGNVRNGNKYLAWAFIEAANMARRWCPEARRFHDRKRAKTNAIVATKALAHKLARACYHMLKTGEPFDMKRCFG

SEQ ID NO: 399113 - protein, 410 aa, unidentified
MPSSLFVGIDVSCKDNKVQMLHSDGAEITRFSVPNNHPGAKSLSEKITGVMGRNKFDSIVIGLEATSVYGHPLVYFLRQEPSIKALNPRIHVLNPKQVANFKKAYPELPKNDWVDAWVIADNLRFGRITKEVCMDEKFDALQKLTRERYHVARNLTREKNRFLNNLFLKFSTLAQENIFSDKFGATSTAIIEDFFSVDDIAYMDVDKLAEFLNKKSKGRFADPHELAETIKKAARSSYRLPKTVNDSVNQVLAVSLVAIKALKKQLETLDKAIETQFALIPNTLQSIKGVGPVYAAGIVAEIGDVKRFPNHAALAKFAGLAWYEHQSGQFKAENTHMIRSGNRYLKYYLLEAANKVRVHDPEFKRFYELKYARTPKTPHKRALALTARKFVRLVYALLHSNRLYTPPKGE

SEQ ID NO: 399114 - protein, 401 aa, unidentified
MTVRPQLWVGIDVGKTNHHACAVDDAGTVVWAQKLTNEQRAIEQLIDRAHKAAEQVRWAIDLTSPMALILITVLLGAEQSVVYVPGRVVNTMTHGFRGEGKTDAKDARVIAETARLRSDLSKVTLPDELVVELTQLTGYRTDLMADWVRGINRLRGLLGSIFPTLEAAFDYSTRTPLILVTGLCTPSEIRAAGIDGVTAHLVEHKAWPAAIAKTAATAVALANEQELALAGEAGTAALVKRLARKLLELDHEIKDIDKAITERFRDHPYARIIESLPGFGPGLGAEFLVVTRGSLASFATPGRLAAYAGLVPVPKDSGRITGNLRRPKRYNRRLRRVFYLAALSSIRSNGPSRQFYDRKRGERLIHSQALLALARRLVDVLWALLRDDREFTPHAPGTAAA

SEQ ID NO: 399115 - protein, 321 aa, unidentified
MSRVDIHVGIDVAKDRLDVAQRPGAEAWWVTNDERGIADLVARLRALRPTLVVLEATGGIELHVVGALAAARLAVVVVNPRQTREFAKATGRLAKTDAIDAQVLAQFAEAVRPALRPLPDAATQQLSSVVTRRRQVIEMLTAEKNRLRTAAPAVRGHIKEHIRWLEGSLADLDSELEQAIHSSEVWRAQDNLLQSTPGVGPVLSTTLLAELPELGTLNRKEIAALVGVAPLNRDSGTLRGRRTVWGGRSQVRTALYMAALAATRFNPVIRAFYQRLQAAGKPKKVALTACMRKLLIVLNAMARHQTPWQTMDLTLDSQDSC

SEQ ID NO: 399116 - protein, 306 aa, unidentified
MKGIGIDVGKAFLDVAVHGETAVQRYPNTRVGIRRMLKWLAAQGSDLRIVVEATGGYEEAVLEACVAQGLWISRVNPRQARHFAQALGQLAKTDALDAHALAQMAHAFAERLRAHQLAAPWQVELRGWLRRRHQVTEAIQRTRQQAATTLPAIRTLMQRSLAALRREQALIDCTLKKLLQAHASPALQSSKGLGPLFQASALALLPELGQLTRRQIAKLVGVAPLNRDSGQWRGVRHIRGGRAEVRVALYMATLSAVRWEPVMKAHYRQLRERGKVAKVALVACMRKLLTIINARRRDELLATAPA

SEQ ID NO: 399117 - protein, 423 aa, unidentified
MDILYERVAGLDVHKDTVVACLRIMVEGKAQRECRTFAATTEQLAELRRWLEESRCTHVAMEATGVYWMPVFRILGEGAFELIVANAAHIKNVPGRKTDMNDAMWIADLLACGLIKGSFIPEERVQELRALTRTRKQLVREQTRHVQRIDKTLAEANIKLGSVISDIMGASGRRIIQAMINGERQPNKLAELAGKQIKASPKELYDALHGRLTDHHRFLLALHLQQWDVLDETIRRLDAEIAERIERMEAEADGRKIPFRHLIGLLTTVPGVSAVAAPAILSEIGADMSRFRTAGHLVAWTGLCPGQNESAGKRKSSRLRKGAPWLKTMLVQCAWAAKRSKNSYYRTQFFRLQAKRGPQKAICAVAASILTAIYHILKDGTEHRDLGAAYFDRRPMEVQANRLVARLKKLGFTVQLQPTAEAA

SEQ ID NO: 399118 - protein, 441 aa, unidentified
MDTSRNVMPFTELSHFAGFDWASEKHDVVVVDRQGRVLLELEFPDTSEGWATLRAKLAALLAPAQDLGRIGVAIETSRGPAVERLLALGLRVYPMNPKAAERYRDRKAPSGVKDDLLDAWSFGDALRTDGHDWRALLPDDPATQELRILCRDEIGLIHQRTALVLRLEAALHEYYPAARAAFDDWTMPSAWEFILRFPTPQDLERKGKRTWEKFLHTHRLARPESYAMRMAVFAKAGEFVNPSAAVTSAKSLLAISLVKQLQTLQEQLQTYRTRIEEAFAKHPDHDLFDSLPGAGAKLAPRLLGELGANRQVFAAPEDLQCYAGTAPVTLRSGKKCWAKLRRACNKTLRCTVHLWVDESRRYCTWAQAYYQKKREEGHGHAEALRCLGQRWLKILWKMWQDHTSYDEARHALDQTRHGSWVPGLLPQAQATPTPATPMPVA

SEQ ID NO: 399119 - protein, 364 aa, unidentified
MDVHTTNYTLCCYTVDSDDAFAVVNVKPDYHEILKYMERVRSTRGGNCDFICGYEAGCLGYSLYHQLAKHGVACIILAPSTMPQQKGKSIKTDKRDAKNIAKCLAFNLYSPVYVPTAEDDAIKEYIRMRDDVKADLKRTKQQIISFCTRHGFHYEGKSRWTQAYFKWLDSLVFENALYKETLQEYLALYYTLDEKIAVYDARIEELAHQKRYEENVRKLCCFKGVSTHTALSLLVEVGDFHRFRTAQHFSAYLGLVPGESSSGEKVIHTNITKAGNSHLRTLLVESANSYSRGVVGKKSKVMKGKQGGNSPEIIAYADKANERLHRKFYKIAIRSKKNVAKTAIARELSCFVWGMMTNHISRAV

SEQ ID NO: 399120 - protein, 403 aa, unidentified
MDITVSDFMKGRYNLMIYVGIDIAKLNHFAAAISSEGGILIEPFKFSNDYDGFYLLLSKLAPLDQDSIIIGLESTAHYGDNLVRFLISKDFKVCVLNPLSTSAMRKNNVRKTKTDKVDTFVIAKTLMLQDPLRFISLKDLDYIELKELGRFRQKTVKQRTRLKIQLTSYMDQVFPELQHFFKSGVHQNSVYTLLKEAPTPNDIASMHMTHLTHLLQTASHGHFGKDTARGLRILAQKSVGIHDSSLSIQITQTIEQIELLDSQLFHTELEMANLVTCLHSVIMTIPGIGTTNGGMILGEIGDIHRFPTPGKLLAFAGLDPSVYQSGNFQAKKTRMSKRGSRVLRYALVNAAHNVVKNNATFKAYYDAKRAEGRTHYNALGHCAGKLVRVIWKMLTDEVEFNLE

SEQ ID NO: 399121 - protein, 351 aa, unidentified
MNIKRVGIDLAKSVFQVHGVDSQEKVVLRKQLRRAQLLDYFKKLPPCLIGMEACGGAHYWARELQKLGHTVKLMAPQFVKPYVKSNKNDANDAEAICEAVARPTMRFVAIKTIAQQDIQAIHRIRSELVQQRTAKVNQIRGLLTEYGIVVGRRVDVLRNALPQLLEDAENGLTADFRVLLDGLRQDLITLDERVDDLDKKIKTLATSNPAAKRLQQIPGIGPIIATALICAIGDGKQFQRGRDMAAWLGLTPRQHSSGGKERLLGISKRGDAYLRTLLIHGARSALKVAGKKDDPRSRWLQNLCSRRNKNIAAVALANKNARIAWALLSKETDYLPEGEPAFAKPYDSAVP

SEQ ID NO: 399122 - protein, 392 aa, unidentified
MIYVGIDVAKDKHDCFAMNSDGEILIEKMTIQNNFDGFCSLFNSISQFNESFENIKVGLEATGHYSNNILNFLTSKGFNVYVINPLQTNLYRKGQSLRKTKTDKLDARFIATMLITENLKPYSILSYHISELKSLVRHRFRLVQERSKFKTSLSRLITLVFPELEQIVWSTSQNSVLYLLNELPSVKDISECNLKHLTSILEKYSKGKYSRDKAIQIRELARISIGTNSRSLSFELKQVIQTVLFLHSQIDDIDKELKTLIDELNSPIMSIPGISYVSAAFILAEIGDINNFDSPAKLQAFAGLEPSTYQSGKYTATHSVMVKRGSKYLRWALLNATRLVCMRDKTFNEYKNKKLAEGKHYFVALSHTSKKLIRVIYYLLKTNKSYQLSKVA

SEQ ID NO: 399123 - protein, 346 aa, unidentified
MRNIAYLALDVHARNCVLGHMDHDGNFKGNRHFTTSELNIVAALKSVKAKIKYLIIEECTLARWTAQLAAGYVNQVIVCDPKENALIYKSAKKNDNVDTRNLCRLLRLGEFKAVYQPQSDQRAIFKAAVQHYLDLRDQLSALKNKVKATYRRWGVIDVFTDSVYSPTGRETYLQHVGHLPIRSQLQRLYQLIDHCKEAKDAAKKAMKQLGRNYPEIKEFKKMPGIADVGAHIFDGFIQTPHRFATKSRLYRYCKLGVTDKSSDGKPLGYQKLDRSGVGELKALSYRAFMAAMKSDNEVRRFYLQSLKRTQNRKHARLNTQRKILAVLLSIWKKGKPYRAELFSASA

SEQ ID NO: 399124 - protein, 370 aa, unidentified
MNSSTSYVGLDVHKSTISVAVAEDGRGGEVRNYGVVENRADLLVKLVERLGRRGQRLHFCYEAGPCGYGLYRLLSGLGQDCTVVAPSLIPKKAGERVKTNRRDAAMLARLHRAGELTAVWVPDAAHEAMRDLVRARATAARVLGKARQHLTGFLLRHGQIYAGQRAWTVAHRRWLTTVRFAHPAQQIVLQDYIHAVEDAETRIVRLSEQIEQLFGHWSMAPVVTAIQAMRGVAFINAITIIAEIGDFARFTNPRQLMAYVGLVPSERSTGESVRRGGITKAGNNQARRALIEGAWSYRMQARVSRKLHDRIVGLPKDIRDIAWKAQVRLCARYRRLVATGKKTVVATTAIAREMLGFIWAIARQVQPQSS

SEQ ID NO: 399125 - protein, 343 aa, unidentified
MGVDTHKHFHVAAVIAQSGRRLAYKSFDADAKGYRQALAWARSFGEVSQAGIESCGTYGAGLRAHLGRDGIEVFDVYAPDKAKRRRRGKDDAEDAFQAAEAALCGERCGIAKDTSAALESLALLKATYAQTVRQRTATVNALKAAIVSLPDAFRSRLRHMDTSELVATCSAFRTSARGDDAQADMRLALRTLAKRVIHLDGERAVLDKRIKALADRLLPHTSSLFGIGHHGATTLLCAAGLNIERMRSESSFSMLCGTSPVPVSTADSYHHRLNRGGNRKANSAIHTMALTRMRYSEKTQAFIAGKMSESKSKTDAIRILKRYLAREAYAALKRDISVLGLLA

SEQ ID NO: 399126 - protein, 388 aa, unidentified
MSQSFDASRSLTAFEQDSTLVAVIEMSQSKWLVAAVVPGIARQPLKKLDADAGALLKLLQRWREEARKAGREVKRIVCAYEAGRDGFWLARWLQAQAIETYVIHAASIAVSREHRRAKTDRIDTELLMRSFLGWLRGEKRHCSMVAIPTMAEEDARRPSRERESLVGEQTRIVNRIKAVLALFGIGGFNPKLRKAAQKLETLRTADGTPLPENAHAELRRDLERLRLARDQIHIIESERLRRLALAPAAGPHAMVRLIARVFGVGIETADMLVNEALARNLRDRRAVARYAGLTGAPDESGKRRREKGLARAGNGRVRRGMIQLAWRFLIFQKESRLVRWFRARTADGRSTTRKTMIVALARKLLIALWRLVTTGEMTEGLKLRPAGT

SEQ ID NO: 399127 - protein, 357 aa, unidentified
MGEGSWVGLDVHARSVLAGVLDAGSGELRTQNVPVASEQTVAWLSSLPRPVRVAYEAGPTGYGLARACAEAGIACTVAAPSKIPRAPGDRVKTDRRDAERLARLLRLGELVAVRVPDPDEEAARDLVRAREDARGDLMRARHRLSKLLLRHGLVYEGSAWTIGHDAWLRRQRFPSRALTLAFEESYGAVAQAKGRRDALDHAIGALAGEPPFAEVVGRLVCLRGVSTLTALALTVELGDWQRFRPQSLGPFLGLVPSEDSSGERRRQGAITKTGNTHARRLLVEAAWHQRRPMRASAALERRRQGQPVAVRARADASARRLHQRWHALEGRGKRRTIVAVAVARELAGHCWALATME

SEQ ID NO: 399128 - protein, 356 aa, unidentified
MPKIKQLDFAGQTIFCGIDVHKKSWRVNIRNEQFELEDYTQDPCDELLMKRLHKNYPGASFQVAYEAGFSGFGLMRSLTSSGIHCIVVNPADIPSTDRDKKRKTDQIDARKISRHLSKSTLRPIHVPDLEMEHARTLVRQRSKLVRDQTRCKNRVWHLMMFSGLKLNMDKPKDYWSRRFVESIRQLPCPTPYLRQALDTALEEYLLIRKLVGSTTIKIRALSEQKTLVNTQKLIQGIPGIGLLNSMIIITELQDMKRFKTLDKLCSYAGIVPDTGSSGENNIIKGITHRSNLHLRTAIVESSWVIIRKDPAMLYLYKKYCTVMVPNKAIIKIARHLLSRIRYVWTNQVEYEVGLVG

SEQ ID NO: 399129 - protein, 321 aa, unidentified
MKEENDACYVGVDVSKAKLDIYRPDTNAYLQVQNCEEETRDFCKQLKRKRARTIVVMEATGGYEKMLLHQLERCEIEAAVVNPRRVRDFAKGIGFDAKTDPIDAEVISRYGQVVRPAPVVCKSDHEKKHRALVDRRNQLLGLTNQEKNRLKQTGDDDAKESIRAVLGCLKKQLKQIDAELAKMLQVDVENKRVIEILESIKCVGPVLISTLITSLPELGKLNREQIAKLVGVAPINRDSGQKSGKRFIGGGRGNVRRVLDRAAVVGIRHNSVIKAHYTHLKSKGKQSKVAIVACMRKLLSIMNTMVRNDELWREGSKGGAS

SEQ ID NO: 399130 - protein, 385 aa, unidentified
MKGKTFKPTDYEVFGGLDVDKRSISVTFTNHQGFIRSLRMPYSVEHLVNHVRKHFGDQKVAFAYEAGPTGYGLYDGLVAKAYPCLIASPSMIPKAPGQRVKTNRLDSRGLSENLRGGQLRSIHVPCALYRELRHLTQLRDTFVSEMVGMKQRIKSLLLFEGIEFPPAPAGRQWSFMVKDKLRNLECSKTVRFKLDQLLDSLEFSEKQVLKATREIRRFCRNDAELSQCIEYLMTIPGIGWIVASQLVARIGDWRELKNIRQLGGFLGLVPTENSTGERTDRGSITHTGDGRLRSKLIQASWSAIRQDGELREFFRSVCRTHARHLASRVAIVAVARKLSVRISVVLMKQRPYEVRQKVRSTPLTQGETSPQGTTRRQAEPGEKNS

SEQ ID NO: 399131 - protein, 343 aa, unidentified
MDHFAGLDVSVKETSVCIVDDAGKIVREVKVASEPAALLAVLRNAAYRFKRIGLEAGPLSQWLYGGLAEAELPVICVETRHMRAVLKAQINKTDRNDARGMAQMMRVGLYRPVHVKTLRSQKLRMLLTHRKLLQSKAIAIENDLRGTLRNFGLKVGVVGTLKFEARIKELVTTVPDLTVLIEPLLVVRRALREQIGILHRRLLAVVRDDEVCRRLMTVPGVGPVVALTYRATVDVPARFRKSKAVGAVFGLTCSKYQSGEIDRSGRISRCGDEMMRVMLYEAAQSILFHSAKWSWLKAWAMKIARHRGMKKAIVALARRLAVIMHRIWVDGTEFRWTKEVVTA

SEQ ID NO: 399132 - protein, 292 aa, unidentified
MSKKVIGIDVGKKDLYLAHKYFTTTGKVKVKRKKFSNNLKGYKALIEWSKNIAKKEGSKSLHFIMEATGVYYEGIAYFLFEKGFAVSVINPSYIKSFANSSGVRTKTDQKDALVLVEYGEAMKPELWSPPAEEYRVLLNLCRAISSLKNRRDAVANRIESLKSSRVIAQAVLEEEERLFNEINKSIKRLEKQIREHVNKYPSLKKETKLLMSINGVGWNTAVLMVAIMEGGRRFKSAKEAAAYLGLSVQEYTSGTSVKKRSRLSKKGAKDIRKALYFPAITAVLFFKTPKHI

SEQ ID NO: 399133 - protein, 401 aa, unidentified
MAAVRDNAWVGIDVGKTHHWVCAVDADGKTLLSVKVANDEAGIVSLIAAVTALTQQLTWAVDIIGAPSALLLALLAQAGQPVRYASGRVVAAMSAAYVGEGKTDAKDARVIAETARLRRDLAIIDTDTDLVRNLAVLTGHRADLIADRVRMINRLRDLMTSVFPRLERAFDYSSHKGALVLLTGYASPDRIRRIGQTRLAAWLRTRHVRGFADVAARAIAAAKAQSVVLPGQDLTASIIAELAGNVLRLDERLKSLDDQIEELFQQHPQAAIIQSMPGFGPFLGASLLVGAGDLRAFPNAGHLAAAAGLVPVPNDSGRRTGNLHRPLRYSRPLRHVCYLSAQTSMMRAGPNRDYYLKKRANGRTHSQAVIALARRRIDVLWALLRENRTWTATPPQLAQAA

SEQ ID NO: 399134 - protein, 352 aa, unidentified
MNATSLPGVSVMEPRWLGVDVSKESFDAALWLPETFDSRGWRKLPTRKFDRTAQGARECHTWARAQLLKVSEASAAAIRVVMEATGKYSLELGRWFQAADETMAPAVINPRLAKAFSESLAITNRTDKADARTLAYYGAERKPAAYAPPEGPWAQLQDLTRYRQALVEEKQAEENRAGESSCSTLVRQTQARRIKQLDRDIAKLDKQIQKLVDSTPAIHHDAELLDTMPGVGAITAATVLGELGDLRRFKRARQLTAFAGLAPTHHDSGTSVRKKSHLSKNGPARVRRILYLAAMATLRTKEDNPFSRLYYRLTAAGKPHKVASAAVMRKILIVMRAILITNTPYDNSRGGA

SEQ ID NO: 399135 - protein, 327 aa, unidentified
MTCKVGVDISKMKLDVAWLRADGKYRSKVFPNNSSGFAELLRWLQSNLPDGKATAHVCMEATGTYHEALALFLHDQTVAVSVVNPLQVKRFMELEGVRNKTDGGDAKALARFCDRTAPALWEAPSAGVRSLQALVARLDTLLELRQAESNRLEVAHDAVKSSLTAVIASLDESIKDVRMQIRKTIDDDPDLRQRGELLASIPGLGDRTIPQLLAYIGRPERFGCVKALIAYASLTPMIRQSGTSLDKRRGTHPQGHREFRNALYFPAMVAGRYNPLVAEFWQRLKAQNKPGKVIVVACMHKLLAIAYGVLKSGKPFDVNHHPKAVCG

SEQ ID NO: 399136 - protein, 343 aa, unidentified
MKVTRVGLDIAKEVFEVHGVNEHGKAELRRQLRRARVLEFFANLEPCLIGMETGSGAHYWARELQKLGHTVRLMAPRFVKPYRKNDKSDRNDAEAICEAVGRSNMRFVAVKSEEQQVVLSLHRLHAGLKSERDAMANRLRGLLAEFGIVLPKGAARLRGGLPAVISQRRLPVLMNQVLADGLKRLRELDDQVNQQERQIRALALQSESARRLMEARGIGPMTATAAVATIGDAKLFKNGRAVTAWLGMVPRHSGTGGKIWMGPITGRGDTYLRTLFVQGARSVMNTTRGKKDPLSLWVERLRARRGDNIAAVALAAKNVRMVWAMLARGEAYRSPQAAQGAAA

SEQ ID NO: 399137 - protein, 285 aa, unidentified
MPTTELPHALATRFVALDVHRQYLVVGAVDIQQHVVLTPRRFGFAAFAEWASIHLTHADAVVLEATANAWLLYDQLQPLVAEVVVAHPQAVKLIAAARVKTDSRDTIKLASRLSAHLIPAVWVPPQAVRELRALVTHRNRLGKPRTQAAHRLHSVLQRHTIDPPPGIPFALHQREWWLAKAMPLAEKLRVQQAMRLYQTLEELIRESEAELGRLSTCDPWVKQVPFLVQLPGLGVLSALRILAAIGEITRFPSAKHLVGYAGEGGQRSPVGGNQSRGAYHQGGAQ

SEQ ID NO: 399138 - protein, 410 aa, unidentified
MLCVGDDWAEDHHDVELMDEAGRVLAKARLPEGAVGLARLHAMIGAQRGEDAHEAEVLVGIETDRGPWVAALVAAGYTVYAANPLQAARYRQRHAVSGAKSDAADAHSLADMVRTDAHQLRPVAADSPQAEAVKVVARAHKTLIWERTRHTQRLRHGLREYFPAALEAFDDLDAPDALELLGKAPDPASAAKLNRSQIQAALKHARRRDIDTKTTRIQSALRSEQLGRDQVITNAYAATTRSIVAVLTVLNEQVKILQGQVEQHFGRHPDAEIILSQPGMGTILGARVLAEFGDAPGRYADAKARKNYAGTSPITRASGKKKVVLARFVHNDRLIDALMSQAQSALQASPGARAYYDKQKDRGLDHQPALRQLANRLVGILHGCLKTRTLYNEATAWSHYNQDQDQQPAA

SEQ ID NO: 399139 - protein, 349 aa, unidentified
MSEYISFDSHRKYTLAEREEALTGHVVQKRIEHWPGAFIGYLKQCPGDTPVALEATGNWYWIVREIELSGHRALLVHPRKAKLMMGMINKTDKLDVHGLNRLQRNGTLPTVWIPPGELRDLRELTRTRMVLSTHRTRLKNRLSSTLAKYGRRVVGFKDMFAAGARAELESQVQQLPEQTRWGCRMLLEQLDLTQRQIDEQEKRLEDLLRRTPEMEWLDTLPGVGLVLSAVIALEVGDVGRFATAERLASYAGTTPRVHSSGGKTRYGGLRPDVNRYLKWAFIEAANCAALQREKHPERHVTVLYERLRPHKGHPKAIGAVARHLAESAYYVMSRREAYKDPALGRTRKG

SEQ ID NO: 399140 - protein, 360 aa, unidentified
MDSNKPVVGIDLSKRTLEAVRVTGERIERFSGKTDDQGLRALEKWLKKGETVVMEAGSQAFRIARRLAKNIGCDMIVLNPGDVAVIYDSLKKTDKEDALKLARLAQRHPREELPTVEIPTEKQEVIRRLSTEQAHWSEMISMSKNRLHSVFVEAGIVHLTRSHLSRRENRQEAFESLPEVYQAEASRLMRDIDHMEGLVEELEEQIRGALKENLDYTSLVMSMPGVGPILALALLGYLGDGKRFSSAKQVGFFVGLVPKVQISGTMVHYGHIVHTGCKPIRRVIIQAAWALTRSNEGGDLRAFYQRLYPIKGKKKAIVAVARKMTEILYLMVRNGEFYRHSDPANLKKKLKYYGLHSAAA

SEQ ID NO: 399141 - protein, 362 aa, unidentified
MTSTKYIGMDVHKESISIAVRNDAGKIVMECVIETKASMILQFIDGLRGDLHVTFEEGTSAAWLYDLAAWLYDLLKPHVTKLVVCDPRKNRSMREGNQSDKIDARRLAELLRLNHLNPVYHGEHGLRTLKELVRSYLTITKDVGRVMSRVKAMYRSWAIPCTGKQVYTSRHRAEWLGKIREPGVRRRAEFYYQQLDALRLLRQEVRRDLLAESKKHKAWERLCQIPSIGPIRSAELLGILQTPHRFRTKRQLWTYCGLGIETHSSADHRVVEGQLKRAKKQVEVRGLNVNCNHDLKNLFKGAAVVAATKPGPFEEFYAELLAKGMRSEMARLTLARKIATIVLIVWKRGVSFDAQHLKPQTA

SEQ ID NO: 399142 - protein, 327 aa, unidentified
MNSICLSTDSLPVLGLDVAKKSVQAELRTAGGKTVRFGFENNAKGFAQLACVLKEHNVPKVWAGLEATGPYSHALALWLHGAGHRLSLLNPRRVKQYARSAGNRNKTDLMDAAIIADFVCALKPATWQPPMLEVAQLQALVRRREELSLMLQAEKNRLEGVAPNVRSSLERMIATLSAEKARLEKLITQQIRSHQQLSCDHQLLCTIKGIGSLTAAILLAEMARPGQVERARQAAAHAGLVPRRELSGTSVHRNRGLGKEGNRYLRKALYMPALVAIKYNAPLRHFASRLRTAGKPKMSIVCAVMRKLVHIAFGVLKHQKPFNPSLA

SEQ ID NO: 399143 - protein, 320 aa, unidentified
MEANLGIDVAKAKFVVALLTADGKVRHKSCANTPAGFADLAAWLQRQRVSPVHACLEATGTYGDALATWLHDQGHVVSVVNPAIIHAYARTQLARSKTDRIDAELIARFTATQHPPAWTPPAPEIRALQALVRRLDALHGMRTQELNRLAAGVTVAEVRASIDVVVTQLDAQIAHVQQLIRDHLDRHPGLRAQRELLTTIPGIGEATAAVLIAELFDKPYTSARQAAAFAGLVPRIVESGTLRGRSRLSKIGPGRLRKALYFPAVAALRWNPTIRAVRTRLHAAGKPPMVIIGAAMRKLIHLAYGVLKSGRAYEPRCAHP

SEQ ID NO: 399144 - protein, 341 aa, unidentified
MWIIGCDYHPRFQQIAMVNTEGGECGERRLEHVEQAEQFYRSLRGQAVRVGMEASGHARWFERLLAELGMELWIGNPAAIRAAEPRKQKTDARDAEHLLRLLMEGRFERLRIWVPRAEERDLRQLVLHRHRLVEMRTRVKNQLRAVALNEGVGRQPGLWSRKGQEQFRALALPAWTDRRRADNLELLAELMRRTDPLDQAVEQEAARRPEVVRLRTHPGVGPITGLAFVLTMGDPTRFQCGKQVASYLGLIPAENSSGGRQRLGHITKQGNALLRGLLVEAAHSAVRGDVELGRCYRRLAMKKNRSIAAVAVARKLAVRLWWMWLRGLDYGQWRESGSHAG

SEQ ID NO: 399145 - protein, 411 aa, unidentified
MTKEDFIYVGIDLHKETHTAVIIDCYNNKLGEITFANRPADFPKLVTKVKKSNTDGKTVVFGLENAYGYGRPLAVWLIDKGYLVKDVNTAISHRQAKHRGAMYRKSDSDDAEAIALATLNMLDKLPDACPNDAYWSLGQLVHRRDNIMKQRTRLVNQLHEQLCIAYPSYKQFFNDISRPTALYFWEHYPSRKYLKGKSVDDLREELVPVSHNKCSTKTCEKILDAVASDKVKNNDFQDARDMVTLSIVSDLQHYDRQLAEVDKMLEQMYKMLGCTLTTIPGVSIITAVKILSEIGDIKRFANANKLAQFAGIAPLHLSSSGKGKDFATKQGNRRLQATIYFLAIQMVQVSSKGTPRNPVVRAYYEKRKAEGKSSQQALICISRRLISIIYGMLKNGTEYRMPVLENAGEIV

SEQ ID NO: 399146 - protein, 427 aa, unidentified
MLSETERLNTYRQMRSSIRNSEQYLIVGIDIAKEKHHAFFGTAAGKTVCKNLIFSNDRSGFELLVARTEQLRLQHQLTLVVFGMEPTANYHKPLAEYLIHKDALVVQVSGTAVTRNRELLDNRWDKHDRKDAANVADLVGAGKCLFYDNPPQEIYDLRELLSLRRRYRKQESGLRTRIRNNLLALYFPELERRFSTYQQDCLTIISTCFSPSAIAAVSFEEFCQRIITRTKGKRQKAFLEDIWNAAHCSIGRPVDESIQYMAEQMVAQLYQIRTDIADLDRLIFKIASSLPEYQYLISIPGFGPFITAKFLATINDPERFSNETQVIKLAGFDLCASRIGKPAGNAVPVISKKGNAELRFALVQAAIVATTRNTLFIRYLNQKIQGREQEKGILKKMRTKVASKLLVIAWTLMKQHEYFNGEHLKLT

SEQ ID NO: 399147 - protein, 345 aa, unidentified
MENMYYIGLDVHKKTISYCVKDGSGRIHAEGKIPATRFDLDRWMKTLPQPWTVAMEATIFTGWIYDHLRPHAAAVKVAHPLMLRAIAAAKKKNDRIDAKKIADGLRCNFLPECYMAPTAIRERRRTLRYRNLLVRQTVQLKNRISGLLMEAGVNYNKEKLHKVGYFRELLKSNPDIDESLRPLLQLCRETLVRLQKTESALIRSLARDRFLVERVEHLMTIPAVGPITALTWALEVGEVSRFSSIKKAISYCGLCGAEQSSGEHVKRTPISKQRNKHLQCVLVEAAHMAPRLSPELALLYDREKQKGNANRATLAVARKLVAYLVAIDRSQRDFLLVEKENQAAA

SEQ ID NO: 399148 - protein, 322 aa, unidentified
MRYIGIDVSKATFVVAYSSDKGGEIRTFNNTTTGIKQFIGALPKDSSIHCVMEATGNYSAMLLYLLNVAGIAVSMENPLKIKNFARAMLSTVKTDKIDARLIALYGEKMNPQPFKIQGEAILRLRQKRTVIRQLTKQITAMSNLRGSLACLPVPDKGATHTVDETIEFLEKRRDRLQSELTDLVEVEFSRQLALLTTIKGIGITLATALIITTGGFTYFQNAKQVSRYLGICPTYEQSGTSVNIRGHINRNGDAYTRGLLYVAAWTASRFNTKCGETYTRLRQNGKPGKLAIIAVANKLVRQAFAVVTHDKEYVDGFVSNRP

SEQ ID NO: 399149 - protein, 355 aa, unidentified
MDNRKYIGMDVHKEAIAIAVLNAAGKLVMESIIETKANTIVEFLKGLRGELHLTFEEGTWASWLYDLLQPHVKRVVVCNPRRNALLKEGSKSDRVDARKLAELLYTKMLRPVYHRDNGMRAVKELGRSYVTISKDQARVMTRVKALYRSWGIACSGKQIYTVRHRASWLGKIKEPSVRRRAEFYYQQLDGLRSVRRQVRRELLLESGKHKASKLLRQIPSIGPIRAALLLALVQTPHRFRTKRQLWTYSGFGIETHDSAEYRYVAGQLERSKKPQQVRGLNRNYNHDLKNLFKSAATNAVAKSGPLQEFYLALVKRGIRPEMARLTVARKIAAITLAIWKKGVSFDAEHLKQQTA

SEQ ID NO: 399150 - protein, 320 aa, unidentified
MKHKVGKDNTVARFIGIDVSKQWLDVASLPERETRRFSNDGAGQEQLGAWLIQLAPELIVMEATGGFETRVATALAAEGLALAVVNPRHVRDFARAFGILAKTDRIDASVLAAFAEKVHPPVRPLPDEDRRELIDLVDRRRQLVTMRAEEKTRLSQATASARQDIKEHIEWLDERLRRLDIDLTAKLRSSSLWKAKEELLISVPGVGRVTVFTLLARLPELGALNRRAIAALTGVAPFARDSGQHRGRRMIWGGRADVRSVLYMAAVTAARINPVIKSFYLRLKQAGKPAKVALTACMRKLLTILNTMLRTNQSWHAPTT

SEQ ID NO: 399151 - protein, 408 aa, unidentified
MNTLYVGIDVSSKSNVVYLMLPNGDKHSNFSVANSHEGSTLLVKKIYSALTSHSLDTVLIGLEATSVYGDNLVYFLREDATLAPFNRKIHVLNPKQVKKFHDTYNDLPKNDYVDSFVIADCLRFGRINKEVYMGEYRYKALQNLTRARFFAVQNLVKEKQRFMNVLFKKYSTMTQEKVFSDAFSTTALAVYDEFESAEALANMDLHELTDFIIEKGKNRFPDPDAVAKAIQKAARSSYRLPKTVNDSVNQVLSISITSMKALESQIKEFDKAIIALMELLPNVLISIPGIGPVYSAGIMAEIGDINRFDNQASLAKYAGLAWKQHQSGGFEAEVTRLIPSGNRFLKYYLCEAAFSLVRCDKKYSDFYHLKYKEVNRCQHKRALALTARKFVRLVFRLLKDNRLYCPAK

SEQ ID NO: 399152 - protein, 360 aa, unidentified
MTDASRGESKMITAGIDLGDRYSYLCLLDTESGEVIEEGRLRTTPEAFERRFGSESPRRIAIEAGTHSPWTSRLLEGCGHEVMVANARKIRLIYAEGRKTDRLDAEKLARLARLDPKLLAPIEHRGECSQAHLALIRSREALVRTRARLINHIRFVVKPFGYRLPKCSAQGFHKQEVAGRVPESLKPALEPILQTIAELSARIREYERKLATLSEELYPETKLLEQVQGVGPLTALAFVLVVEDPTRFANGRAVGAYARLVPGKDQSGGSDPQRRISRHGNELLRRLLVGCAHYVLGPFGQDSDLRRHGEKIAQRGGKNARKRAIVAVARKLAVLLHRLWISGEVYDPLYNARRAGGRVA

SEQ ID NO: 399153 - protein, 391 aa, unidentified
MSAYFVGIDISKYKHDCCIINAADQSIVAKFTINNDKDGFNKLLTSLQSLSTPEDIRIGFESTAHYALNLELFLEKAHHSFMEVNPVLISEYKKSTSLRRTKTDSIDCESIARWLMTVEYKPHSKGFYHAYSLKSLTRLRDRLIRQRSFYLVKLTNVLDHTFPEFKPFFQERFSKTALYLLETYGSAEKMARMNSASYDNLRRISRGKFTPQKFLELKALAANTVGVNNSIFDTELTCLLTLYKEAAKQVSVLETQITELIEEVHPHYMSIPGIGPLSAAVIYAEYGDISNFSSPAQMLAFAGLEPGISESGTESHKGRMVKRGSSQLRYTLMNCALPLIRFDVTFAAYYAKKRSEGKPHRVAISHVTKKLVRVIFALERQNIDFVAASLR

SEQ ID NO: 399154 - protein, 386 aa, unidentified
MHDSTDLPVPERTGIRGDSATLFVSLELSRSTWVATSLAPGSKKMSKHTLVGGDGRKLLDLLARLKTRAEQRIAAPVKVVAIHEVGLDGFWIHRLLEANGVESHVVDPASIAVPRRHRRAKTDAIDGETLLRTLMAWQRGEPRVCAMTVPPSPSEEDCRRVSRERATLLRERIQHTNRIRGLLFGQGITNYNPLHKNRRECLEELRTGDGRSLPTHVKAEILREIDRLELVLRQISEVEAERDEMLQPAEASSPAALLMRLKGIGAEFATVLYLEGLFRHFENRRQLAAYAGLAPSPWKSGSIDHEQGISKGGNPRLRTTMVELAWMWVRYQPDSALSGWFRQRVGSERGRTRRIAIVALARKLLIALSRYVTHGEIPAGAVMKPV

SEQ ID NO: 399155 - protein, 406 aa, unidentified
MDPTASNNLLEVIPMIIVAVDVAKDKHDCFITNSDGEVLYDSFVIQNNQVGFDDLFQKICSVTDSLQNVKVGLEATGHYHLNLLGYLLDKGLTTCLINPLQTSLFRKSLSFRKTKTDPADARAIARLLMSDRTLQPYSLTSYQNEELKSLTRYRADKVRERAKLKSSVSRLVVILFPELEKLVPTLHMATVYDLLYEFPGASHIASAHLPRLSHLVSETSKGRYGKDDAIRIRNAARQSIGTVFPSKSLELQHTIAHILFLDREIDEIESQIFALLDKHPPKMLDIPGMGPRLAAVIVAEIGDFRRFSSSDKLLAYAGLSPTTYQSGQLTSTYAKMEKRGSRYLRFALFNATKYVCVWDPTFRAYLAKKRAEGKHYNVAVSHAAKKLARLIYHLETTGETYVSKAC

SEQ ID NO: 399156 - protein, 334 aa, unidentified
MSLRLLAIDLGKRSFHIHGIDSDGVIISRKTSRFKLIETIGELAPETIAMEACASAHYWGRGFLAAGHRVLLINPRFVKPFVKGSKNDAADAEGIYEAALRPTMRFVPVKSTEQQDLQSLHRTRDRIVCARTALINHIRGLLGEYGVILPQGAWRFLAQANDAIADAELSDFARALFSDMLDELGSLDFRLEKLDRQLVAICRTNEACHRLSKLPGVGPVVATALVAAVDDGRHFRSGRELAAWIGLVPRQYTTGGKPRLGGIGRRANHYLRRQMIHGARSVMFRLAKHEDRRSQWLKGLAARRGFNRTIVALANKTARAAWAFPTRKEDYVAA

SEQ ID NO: 399157 - protein, 370 aa, unidentified
MLDTTTFIGLDVHARSIKAVSLDVMTGEVRAATFGYDAGAVAEWVRSVDPRARCVYESGVTGFDLQKRLSGLGVDCVVGAVSKMIKPSADRRRKNDRNDAEFLARMLSVGNVVEVWVPDDECEAARDLTRALEDARDDLSRSKQRLSKFLLRHGLVFDERTPTGRRKGNWTRAHWSWIESIRFAEGADNDVLAYYVDAVRRAAEEKARLEGLVEAEARKPRWRRRVDSLRCLKGVDTASAADLVFEAGEFSRFRNARSFAAWVGLTPSEHSSGESDRRGAITKAGNKHLRKTLVEAAWHYLTCSGRPKDLAKGQAPDRVARRHAAKGVRRLVERREALLARGVHGNKANVATARELACWVWAVGLMAEEA

SEQ ID NO: 399158 - protein, 409 aa, unidentified
MDVIIERCAGLDVHKQTVQACVLLLGSDGRLTEQIRCYSTTTGPLLALRSWLQELQITDVAMESTGVFWKPIWNILEGFFHLLLVNPAHMKNVPGRKTDVKDCQWIAKLLQHGLLTGSFVPAHQQRVWRELTRQRTQLVAQTTQVANRIQKVLQDANIKLSSVASQVMGVSGRAMIQAMIAGTTDPATLAGLAKGVLKHKSEQLREALEGYIQREHCFLLKLLMDQLEHLERLIHRLQRRIDAEMAGVAHLVQLLDTIPGVDKVVAQCILAEVGTDMDHFPSDEQLAAWAGMCPGSDMSAGKRRSSRINPANRWLRRSLVQAGWAASHTKDTYLCAQYHRLAGRRGVKRALVAVGHTILVGVRHMLKDNVPWRDLGGDWFNHLRPDRLRRHLLKRLESLGYKVTLEPAA

SEQ ID NO: 399159 - protein, 369 aa, unidentified
MGKYIEVFVAFDVAKKKHAVAIAEGGRTGEVRFLGDVENSPLPIERTIKRLAGRYDRLHVCFEAGPTGYGLYRQIQALGHECMVVAPALIPKRSGERIKTNRRDAVTLARLHRAGELTGVWAPDAAHEAVRDLVRAREAAADDLRRKRQRLLSFLLRHSRIYSGGGHWTLAHRRWLANQKFEHAAQQIVFQEGIDAIEDAVQRLRRLEKQLALIVPEWSMAPVVEAYQAMRGASFLVAVTFAAEIGDLRRFDTPGQLMSFLGLVPAERSTGDTIRRNGLTLAGNRRARRALIEAAWTYRYPARVSETLRARLEALPKPVRDIAWKAQIRLCARYRRLSATGKKLPVVVAAIAREMAAFLWAIGREVAPA

SEQ ID NO: 399160 - protein, 333 aa, unidentified
MVEGTKGSHHKEGSKKMSKNSTVCAGIDTGKYKLDVAIDESADQLQVDNSPAGYRCLSAWLRQRRVERIGIEASGGYEQAVVSFLRADGFVVIVFQPVQVRAYAKFVLQHAKNDNIDAVLIARCTAAATDIHEPPDARLAPLAQRLTMIEQLTQDVAQVKTRREACWDQRIREFWKQEIDRFKRLLQAELKQLVAAIREHRDLSTRLDLIASVDGIGLRTAVAILVRMPEIGRVSREQAAAIAGLAPYDDDSGQRRGLRHIKGGRQRLRQSLYAATLPAAFYWNTQLKALYKRLIAAGKTHKLVLVACARKLLIFVNTVVARGTPWKSAPATT

SEQ ID NO: 399161 - protein, 368 aa, unidentified
MKTVRFVGLDVHKESIVIAVAESDRSEPQVVAEIPNDTARLLKELRKLLRGGAELRCCYEAGPTGFGVHRALCEAGIECIVVAPSLIPKQAGARVKTDRRDAVKLARFHRSGDLTPIHVPDASTEAMRDLERAREDAKNAERVARHHLSKFLLRQGLRYSKGGTWGTQHMAWIRAQQFAEEAHNRVLVDYIHAVERATDRIARLDKDIAELVESWSLKPMVEALQGLRGIRLLSAVVIAAEIGSMQRFATPKKLMAYLGLVPSEHSSGESTRRGGITRTGNRHVRRILVEAAWCYRFRPATSDRLRAHNQRISSSVIAIAWKAQHRLHDRYRRLLARGKNKQQLITAVARELSAFIWDVARQPQLLAA

SEQ ID NO: 399162 - protein, 429 aa, unidentified
MNCTQNKKIEQVKETTMIVGIDVGSEKHYFRAFNWRGIELTRKPVAFSNSMEGFNSFYNTIVELMQENKLEEAMVGIEPTGHYWFDLGQFMGGKNIKFVMVNPHHVHKTKELDDNSPSKNDRKDPRVIAVLVRDGRYFYSYMPTGVYAELRNASNRRFVLVEEQTRTKNRLQKWIAVYFPEYKGIYTHIDAKGGLMVLKQAPTPEEITKLGEEGIIKIWKDAKLRGNGHKKAMKILNAAMRSIGLKAGLTEARMEMQDLIEDYELQTKRLERVNDLIKELCRQVRYADKLLEIKGIGITTVAGFIAEVGDITRFDSTKELQKLAGLELVADSSGKHNGKTKISKRGRKRLRYLLFEAAISVVGKNEEFKEIHRYYTTREKNPLKKMQSLIAVACKLIRVFHVILTKGVSYDASKMLEDIRHPGEQLKAA

SEQ ID NO: 399163 - protein, 428 aa, unidentified
MSQEDGTRLEEFRQFRKEVRGSSEYLLVGIDIAKDKHYAFFGTAQGKTLLRRLVFENNLEGFRKLLAQARRLRDQNGLRRMVFGMEPTGNYHKPLGEHLIECQHLVVLVSGVAACENRKTLDGRWDTNDARDAANVADLMSQGKCLFYEYPVGPLQELRNLLSLRRRFKRVEHGYQVRIRNHLLAKYFPELDRYYKGSSPTDLAIVRWCLDPSVIAGLEYKRFAEMVSSRRGWYSQEKRLQTIWKLAVESVGCEAGEAVEFEAKVMVEGLKQLRESMGQIEEKIQEICSQFSEYECLLSIPGFGRDVASKVLGAVGNPHRFQNGRQVLKLAGFDLCAKRSGKSSESAVPVISRRGKADLRNGLYQAALIASIKNPGFMAYYTEKLRGREREPGIKFKMRVKLAAKLLLIAWTLMKKKESYNPDYLVTE

SEQ ID NO: 399164 - protein, 353 aa, unidentified
MSDYIRIGMDTSKSVFVLHGVDASERAVLRRRLRRGQVKEFFSRLEPTRIGMEACGASHSWARELSALGHEVVLIAPQHVKPYVSRNKNDAADAEAICEAMSRPRTRFVPVKTAQQQAALMLVGTRDALVRRRTQLSNMIRGYAAEFGLVAARGIEKIAALLARIAADAGLPELARDLFAMLGQEYLDLESRLEGIEKQLVAWHRANEQSQRLAEIPSIGPIGASLLTMKTPDPTAFRSGRDFAAWIGLTPRDHSTAGKQRLGGITRAGDEALRSVLVAGATAVIQQVRQGRSQPSPWLAELLKRKPPKLAAVALANKTARIAWKLMATGKRYERGHKTHQTNPAHEPSMANA

SEQ ID NO: 399165 - protein, 317 aa, unidentified
MSKTITIVAGIDVAKAKLDVAIHDGKLRWQVTNDPAGFHDLAGLLRSRKVTRVGLEATGGYERDVVEYLRKAGFNVIVLQPKQVRAFAEFILCRAKSDRIDAGLIAACVAHHRIEREAPDPRIAAFADQLTFIEQTEEDIVRIKVRLEHTRDLKLCRIMLADIERLKSRRAKMIAKLVMALRSHEDLARRIDLVSSVDGIGPRTALAFIIRMPELGRMSREQAAALAGLAPFVHDSGDRKGQRHIAGGRERLRKSVYCAALPAAFRWNTQLIALYKRLTDAGKPHKLALVACARKLVIFANTVLARGTEWSSRPATA

SEQ ID NO: 399166 - protein, 450 aa, unidentified
MSPLALDVVTKTDKTPVLGRMLSKYVGRKTSSIENGITKARNHSRQRGNIMRVVFGIDVSKASSEVAILVNGEKVHGYTIPNDAIGFNRLLGDLKTVHQPEIVFEATGVYSRRLQAFFEDNSYTYTRLNPLESKKQLDSLRVRKTDKIDAEKLAMSQFILNRKPSYVQEALYQELRDLSRFYQNLTEDIVCAKNRLHKVLQITFPELENILSAPTGEQYWNLVITFPCNSFVLESDDATLTAIIRQSTAKRISEKRVTYLVDKLTKLANQSYCAVKKTSPVIEEVKYYAGELLRLSEHRQGVLEEMVALAQSLPEYEILLSIPGIAETTATSIIGELGDIRRFHSANQINAFIGIDLRHYESGNFLAKEHITKRGNPYARKILFKCIHNIASASHTNLCHIADFYEKRKRQSQVTSTKPHTIASIHRLIRTMYYLITHNKLYDYTSTQNR

SEQ ID NO: 399167 - protein, 428 aa, unidentified
MNCNTQNAKIASITEKTLIVGIDVGSETHYARAFDWRNYEYSKKPLKFSNTEAGFLTFKAWVEGIAEKHGKTAVIPGMEPTGHYWFALGKFLQDNGMKPLHVNPHHVKKSKELDDNNPNKNVRKDPKTIATLINEGRFSYPYIPTGIYAEIRSLSNLRFQTQEELTRIKNRVARWFAIYFPEYKDVYGDFKAVSGRMVLKEAPLPEDIRKLGVEGVNQIWRDAKLRGAGMKRAKTLVSAAEHSVGSKEAPEAARYELRNLLNDMDVYAVRMEELLRSIEEKLKEIPYVDKLMEIKGIGLITVSGFVAEAGDIGRFDNPKQLQKLAGYAIVANDSGKHNGESRISYRGRKRLRYVLYEAAISLVGKNAEFKVIHEYYRTRKENPLKKMQSVVAVACKILRVFYAILTKGVDYDPVKLVRDIRRPQLQEA

SEQ ID NO: 399168 - protein, 454 aa, unidentified
MAERKKRKRSTGKLDRVHTHAAGVDVGSTFHVAAISGKVAESPVQAFKSFTADLHAMADWLGSHGVKTVAMESTGVYWIPLFEVLESRGFEVLLVNARDVKNVPGRKTDVNDAQWLQQLHEHGLLRGSFRPREDIARLRSYMRQRDRMIEYAASHIQHMQKALMQMNVQLHHVVTDITGGTGMKIIRAIIAGESDPERLVQFRDMRCKESPQTIAAALSGNYRREHIFALRQAVDFYDFYQAKIRECDGEIETVLESLNATRPAPTEALPPVRHARCRNEPQFAIRELLHVMLGADLSQIHGLGPYTILRLVAECGDDMTKWRTVKHFTSWLSLAPGNKISGGKLLSSKTRRSSSRAATLLRIAAVNVGRTSTALGAFYRRLAARTGKAKAVTATARKLAVLFYNALRFGLRYNDPGANYYEERYRQRVLHNLRRKAEHLGYALVEAPTIEGVS

SEQ ID NO: 399169 - protein, 371 aa, unidentified
MKKNTIFVGLDVHKNSIDIALADSGRDGDVRFYGSIGGDLDSLHKVVRKLQSTGPTLRFVYEAGPCGYEIYRSLKKQGVDCSVVAPSKIPRKSGDRIKNDRRDALNLARLHRSGELTPVYVPTVEDEAIRDLTRGREDAVKALRTARQVLLAFLLRHGHRYSGVSYWSKTHWTWIAGIKMPHRAQQITLQEYVHAVHEQLDRVQRLTRQIQELVPQWNLAPLVKSLQALRGVSLIVAATTVAELGDLARFDSAKQLMAYLGLVPSEHSSGGTVKHGSITKTGNSHVRRALTEAAHTYCHPARESRVLLTRLAGLPQEVRQTAWKAQVRLCGRFRRLVARGKNRNTVVTATARELAAFMWAIARSLLPVIET

SEQ ID NO: 399170 - protein, 425 aa, unidentified
MDFKQNQKINQVTEQTLVVGIDIAKRTHFACFVDDRGRVLRKSFSVSQSREGFELFYQLILNALKEHGKTEVLVGIEPTGHYWLNLAYFLEERGIPLVMANPMHVKRSKELDDNLPTKHDRKDALVIARLLKDGRFSYPRILKDVEAELRVGSTFKSKLTDELGAVKNSIIRWLDRYFPEFTQVFPSFGKMALAVLECTPFPSDLHQKQPDEVLSLYREVEGLKSPQRPKATRLIEVAAHSIGVTEGREMARYEIATLVRRYHQLEQEIEDMTQRLVELVQTSVEYEWLSTVQGLGDPTIVELLAEIGSFSHYEHPRQLIKLAGLTLRENSSGQHKGQKRISKRGRRKLRALLFRTMIPIIRHNKAFRTLHEYYTTRTVNPLRKKQSIVVLCGKLLKVLHGISTKHQAFDAQRMMKDTPSLAEAM

SEQ ID NO: 399171 - protein, 342 aa, unidentified
MEKITIIGLDLAKSVFQIHAITEDGHIAVRRALRRSQVLEFFRHIEPCLVGMEACGSAHYWANAIGKFGHTVRLMPPAYVKPYVKRNKTDAADAEAICEAVTRPTMRFVPVKSPEEQAAGMVLKTRELLVRQRSQTANAMRGHMAELGIIAAAGMTSIAKLIAILRDDQDGRLPHSAKAALLEMADQIERLTERVEVLDSKIIAAVKADDAARRLTTIPGVGPIIAATVRAAVQDPAAFRTGRDLAAWIGITPTANSSGGKERLGKISKRGNKQLRTLLIVGATSILKQARRGSKLPGWVVSLMARRPYKVAAVALANKMARTIWALLVKGGTYQAPSMAKP

SEQ ID NO: 399172 - protein, 408 aa, unidentified
MNPLFVGIDVSSKNNVAYLMKPDGSKHSSFSVQNNLGGAKLLSERIVSALGSMQLERVVIGLEATSIYGDSLVYALREDGRLGRFQRKIHVLNPKQVRKFKEAYSDLPKNDWVDAFVIADHLRFGRINREVYMDDYRYKALQTLTRARFDVIQNLTREKQRFANYLFLKCSGMAQDKDIQNTSATTIALMEHFETVDDLANADLEELTAFITETGRGKFADPDATAKAVRAAAKGSYRLPKTVNDTVNQAMAVSIASMRALKGQVKVLDKAIEQQFEIIPNTLTSIPGIGKVYSAGIIAEIGDIHRFDSQASVAKYAGLVWNRSQSGDFEAEHSRMIKSGNRYLRYYLLEAANSVRRCGSEFRRYYDLKFKEVNKYQHKRALALTARKLVRLVFRLLKDNRLYIPPEG

SEQ ID NO: 399173 - protein, 332 aa, unidentified
MIHDIAVVGIDVSKQYFDIHIHPAGKSFRCGSSPHEITQLARRLWELGPVAVGLEASGGYESRLADGLHAAGLEVYIVAPARVRSFARAIGQLAKTDRIDAAMIARYLAAVRRDLTPYAPDPACRRMHAISAHRRRLLAERSGLVSQLDTIDEPLVRDLIEERLRTIAQDIATLDAAIDDVLTQTPRLRKSHARLRQVTGVGPVLATALLADMPELGKVSAKVAAALVGVAPYARQSGATERNGRCAGAENICATSPIWPYSAPSRSETLFLAASINGSECAASLSNSPSSQPCESSSQSSTQSLDQTRHSHSRSTVACPAHLQRLNFIECD

SEQ ID NO: 399174 - protein, 347 aa, unidentified
MDYFAGLDVSLETINVCIVNAAGDVLLEKKIAAEPAAIVDLLKSFGSPFKRIGLEAGPTSSWLYGELRAAGYGAICLECRHVKAGLSAMRNKTDRNDARGIAQLVRLGWFRQVHVKSEEAQRTRMLLVNRQQLLTKALDIENSVRGSLKVFGLRVGVVARRGFEARALELVADDPILLAITKPMLRVRQVLLEEFERLDRLCQQLARRDPVCRRLMTVPGVGVVVALTYRTGVDAPERFSRSRDVGAHFGLTPKRYSSGQTDYDGRISRCGDEMVRTALYQAANVLLHHGRWSSLRSWAMRIAKRGSVKGAKVALARRLAVVMHRMWTDGTDFRWSDTSRMTAPTAI

SEQ ID NO: 399175 - protein, 353 aa, unidentified
MNDPSSIAWLGLDAHSKNCVLAHLDDQGNEINDWRFPTDPQQLLRYVQAIPATVKRLMLEESNLARWISQLLKPHVQQLIVCDARRNRLISHDANKHDRRDAFALARLLRLNEYRPVWQPTDDQRVLFKRAAQAYENSVLRQTRLKLQLKSLFQHWGLFPTGAIVFSKAGRSAWLQKLPYDALRSQALLLYELLDQALAGQAQARRLLCQSGRLFPEVQRLRTAPGIGLVGAHLFVAYVQDPHRFAKFSRLTKYCRLSIRDRTSDNKPLGFKQLDRQGNGVLKAISYRAFLQAAKRRSGPLWDFYQASLRQTGSTTHARLNTQRKILLVLWTLWLNNKDFDPNLFSRSQPMDV

SEQ ID NO: 399176 - protein, 396 aa, unidentified
MKSVIAVGIDVAKEKLDVSIYDGKKHIIKVYANKEEGIEKLIRDTEKIAKDNPSNDCELHFVMEATGSYHTKVLFELSKLEYPVYVLNPIISKKYSEEQLRRTKTDKVSSKLLAEYAFSSISSYLLGIPNERYNILISSKFDSSERDKLNLKILLRTLEGLKKTRTRVLNQIEALNQYPQGYGIDALASLKKVLEEIEKEIENLENKISDIVNDEKENRDLYKRLKTIPGIGDRSASAIIAYFGSFSTFESPKQVPCYSGLTPLIKESGKSVGSKEVYHISKIGSPYVRQILFMASLSAAKHNKQCHILYERLLKEGKAKKLIYVAIACKLLRQAFGIIKNGRVYDPDFGLLLSEKDKQNNGNKSPKDKERILIQEYPYPYNLLYTEEKYRWVTGY

SEQ ID NO: 399177 - protein, 357 aa, unidentified
MAALSIADVPANVTVGVDTHKHSHIARAKDGLGRHLGQLEIETDPRGYARLLAWAQGFGPVVTFGIEGTSSYGAGLTRFLRAQGQAVIEVLRPMRRDRRFGGKSDPIDADAAAGAVLSGRATAVPKAGDAGVEMVRALKIAKQTAIKARTQAVNAVKGLVVMAPDPIREQLRHLKTPALVRTCSAYRVDGVSDPTSAIKLSLRSICRRYVVLDQEVRALEKELDALTIRLVPQLRQLFGVGQDVAATLVLAAGDSGDRLRSEASFSMLCGASPIPASSGMVQRHRLNRGGDRQANAALHHIVIVRLRHDEATKAYFAKRKAEGKSKKEIFRCLKRYVAREVYRTLVGPREEVIRSAA

SEQ ID NO: 399178 - protein, 345 aa, unidentified
MKQFIGCDVHKKFSLFVALNEKGEASRAVRVEHDRETMRTFLRQWPTNTPIAVEASGHYYWLVDEIEAAGLEPHLCHPRETKRRMGKTHKSDKLDAGGLAMLLRNGTLPEVWIPPAGLRDQREMLRLRMFLVARRTQIKNRIHGALARYNVQLISKDLFSKVGRDELEQRLEELPPHTRQSVEIECTAVDFLEGQIEEVEQHLDAILQPGQEAQLLRTMPCIGRILSSVIALEIGDVSRFPRAENLAGYAGLVPRLIASGGKIYHGRTAPDVNRTLKWAFVEAGNMVPAQSRRLGGRHVLGLYTRLRQRRNHYKAVVAVGRHLAEAAYWILTKGEAYRDPLCRPS

SEQ ID NO: 399179 - protein, 345 aa, unidentified
MSEITLLAIDLAKRVFQLHGANAAGAKVLERRLMRDQVEPFVAGLPPCEIAMEACGSAHDWGRRFAALGHRVRLIPPPEVARLVDRRKKNDWRDARAIALAARLEHVRAVPLKSAEAQAEQFEHRARAQLLKARTALINLLRAMLLEFGIAIPRGPKALKRQRPALETSARFQAIPRSSQALAAELYARIAELDAAVAAADRRIIALVKQRPAARLLLTIPGIGPLNASAFPAAIPDIRAYANGRGFAAALGLVPKQDSSGEKVVLGAITKRGNRYLRALLVHAGRALLVKAMRTEAPQDGLLAWAKALRRRMPWNRAAVALANKLARIVWAVLALNQPYRPRPA

SEQ ID NO: 399180 - protein, 341 aa, unidentified
MMVHVGVDLHKRTSQIAVLTEDGELTQHRLVNDVARVEQFFAPLPPKAPVAIEASGTWWWLVDLLEGLGHQPILSHPKQTKAIAAARLKNDRVDAQRLALLLRGDLLPTVWIPPAALREARELIRHRVQLVWLRGELRNRQVAMLARRNLQPTSSKSWFTTRGQREFERLPLPPLPSRLREDYRALLPMLDAHICQLDREITQRGGDDPRVQRLCTIPGVGPFIATVLVLELGDIARFAHAKQMASYVGLTPRVRASGDRIRSGHITKEGHRLLRWVLVLAATQAVRRPGPLRTWFHAVKQRRGRNVARVAVARRLAEIVYHVWKQECDYFTVVRHGVVRG

SEQ ID NO: 399181 - protein, 347 aa, unidentified
MRFYTEQHKHYCGIDLHTNKMYLCILNQEGETLLHRNIKTEPDTFLQAIRPYREDVVISAECMFSWYWVADLCGKENIPFILGHALYMRAIHGGKSKNDKIDSHKIAALLRGGLIPMAYVYPQQMRATRDLMRRRNHLMRKRAELFAHTQNTASQYNLQIPLGRIANPQNREGLLDRFADPAVKLSIAANLEMIDAYDRVLEVLEKDIINNAKEHDPTAYALLKTIPGVGRIIALDLLYEIEDINRFPRVQDFASYCRLVKCPKESNGKKYGTSGKKIGNAHLRWAFSQAAQLFLKSNEPGKQLYSKLTNKHGKGKALSILAHKLGRAVYFMLKNREAFNMAKFLTE

SEQ ID NO: 399182 - protein, 335 aa, unidentified
MNSVPVFVGIDYHQDSVQVCVLDANGKKLANRSVENDATIVAREAVRFGPPRRVAIEACCGAANMADELVTQRGLPVELAHPGYVARLKQSPDKTDFTDAHLLADLARVNYLPRVWLAPEPIRQLRRLIRHRTQLVRRRRDVKLRIRALLRENRLRCDRAAAWRKDWMTWLKEEAPLSVSDRWIVDDHLLELASLSARILQIETKLVATVEHDPIVAKLLKQPGVGLITAVTMRAEIGRFDRFDNGKQLARFCGVTPRNASSGNRQADAGMVKAGNPELRTVLVELAHRLIHRIKGRWANLAYGMLQRGKPKNVVVAAVANRWVRWLHHELRRET

SEQ ID NO: 399183 - protein, 378 aa, unidentified
MSDFTGFVGLDVHKDTIAVALAGSGRGEVEYLGEVRNDAGVVKALRRRLGERAAGASFCYEAGPCGYVLYRELLAAGYDCEVVAPSLIPRKAGERVKTDRRDSLKLARLHRAGELTPVWVPREEDEAIRDLVRAREDLKAIELKARQRLGAFLLRHGRVYREGKSRWTQRHFEWLGRQRFASPVQQSVHEEYLDTVRDAQARVRGLEARMREALQGWCWRAVVEGLMALRGVDLITAMTVVAELGDLSRFDSPRQLMAYLGLVPSEHSSGARRRPGAITKTGNGHVRRVLIEAAWAYRFPPRKTAHLRRKAAAAPKTVQALAWAAQRRLCARYRHLYQAGKAKPKVCVALARELVGFIWAIACEVQGKPHASRALLGH

SEQ ID NO: 399184 - protein, 497 aa, unidentified
MPTKSSIYSRCNPQLLKLFEEAGHPAKVMCVALDYAKAQHMALICNGLGDLLKAAFVVDNTAQGAAKLLNEVRACAKQRKIRPEHVFFGGEDQPSYAENLLRKLREEKYLVVRVNAWEAKQQRDNFQASSDSLDLLGIARCCLNRRAESVRTLPEAYPNLRIATRDRDKIVRMRTAVTNRIHSYVDRLFPGFLSVSKSGLDPFCKASLELMEDRFSPAQLSRRPRQSLTEWLGRRGVEQAQDTADKLKGLAKDALEPAPEQTVMLQRTLAQLVALYRGLEQSIAMLDREVAHWLARTPGAWLTSIPGFGITLAAGWTAELGPPSQWRAVRQLCSYSGVVPKSKQTGGPGKEAVVGGVQQRCNKRLKNVVLQAVEKVLQFGPEDLRQTAQELEARGAHTEFGIAKRLVRLAKYLAVTGTVYRPKALMDPDTPKATLAAHYQTVWEKLLPKWREKADLHKVFAPEQPLGQWRKMAQELYALELRLPQRKAGPKSGASTP

SEQ ID NO: 399185 - protein, 410 aa, unidentified
MERQVERCCGLDVHKDIVAACVRIGGGPGQRTQQHEQTFRTTTGDLVVLRDWLAAHAVTHVAMESTGVYWKPVYYALESDFTCLLVNAAHIKQLPGRKTDVKDCAWIAQLLEHGLLRGSFVPPAPIRELRDLTRYRKAVIQDRTRVVNRLHKTLEDAGIKLASVASDVLGISGRAMLEALVQGTTDPAMLAELARGRLRGKLPALRQALAGRFRGHHAFLIGQLLAHLDYLDEAIAILSEQVETVIAPFADALTRLDSIPGINQRTAEVIIAEIGVDMSTFPSAGHLASWAALCPGNHESAGKHQSGKTRKGNRWLRTALIEAAAGASRVKNSALQARFRRVLRHRGPKKAVVAVAHALLRAAYHVLADHAVYRELGADYYDRQHRQRVTRRAIQLLERQGYHVTLEPAA

SEQ ID NO: 399186 - protein, 416 aa, unidentified
MEQVTWYVGIDWGSESHAVCVVDAAGQRREERSVDHTADAVQTCLDWIMTFTGATPAQIAVAIETPRGALVDACLARGCLVFAVNPKQLDRFRDRHTVAGAKDDRRDAWVLADSLRTDLAAFQQVHTEDPSVVQLRELSRAEEDLDADFRRLANQLRSQVHRLVPEVLALCPGADEPWFWALLQLAPTPAAQRRLTRARVDHLLRAHRIRRWRGAEVVARLQAPLFPHAPGVVEASVAQICFTLPRLELVHTQRLACGRQLEQLLQQLRDRPREADQRGEHRDIAILESLPGVGRKVAVTMLAEAADPLACRDYDRLRAHVGTAPVTVASGKRRVVSMRRACNRRLRWAAYHWGRTSVQHDAPSTAYYKSLRARGHRHGRALRSVVDRWLRILIAMLRHNTLYDATRFAVTVDNGA

SEQ ID NO: 399187 - protein, 368 aa, unidentified
MQFIGVDLHTNKFTCCYRDSGPDGKGKKVTETFELTEYGLEQFYQTLTVETYVLVEATITTFCFVRLIQPYVKEVIIANTYELKQISLARKNTDKIDADILCRIIKMQVLSGEKAISEVILPPIEIQELRELFSTYRLYKKQSTQIKNRIHSLLKEKLYGFTQEQIFGKKSRKMVRGIETGTVLSFQINELFDLLENLEAHAEILQEKIKEQAEPYLREIQILTSMKGISVFIAIAIIADIIKVDRFKNSKSFTSYLRSAPRVSNSNTSVSIRGTNKKGRKLSASLLSQSLKHVLEASPKLKTWYERLTKYKKAGLVRTGLRRRVISELYQMLKKGEYHYGRDTQKHEAKMLEYRNFLEKRKISVKTA

SEQ ID NO: 399188 - protein, 382 aa, unidentified
MNRIIKIGMDVHSTNYTLCAMEPVLDGEDRIFTNIQVTPDYENVIQFIDNLKERLGSSDSYSIECGYEAGCLGYSLYHQLTKAGVKCTILAPTTMLTQQGKRVKTDKRDAVMIAQCLSYGGYHAVHVPTDQDASVKEYLRMRDDHKLALKKIKQQINAFCLRHGYIYDGHKWSIRHLDWLKKLDLSKLNRETLNEYMTSYEEQTAKIERFDKRIEELAADSDYHENVRKLSCLLGIQTYTALSLIVETGDFKRFRKGNTYAAFLGLAPGESSSGEKISRTGITKAGNSRLRTLLIEAATGICKGKVGHKSKALCARQAGNPAEVITYADRGNIRMRSKYKRMIRHEKKRNVAVAAIARELACYVWGIMTNHIEPREEGKKAA

SEQ ID NO: 399189 - protein, 339 aa, unidentified
MNSMAVGVDIAKQVFQVHYVDRETGEIVNRQIKRAKFLEHFANRAPCLIGMEACGGAHHWARELTKLGHEVRVMPAEFVKAFNIRNKNDAADARAIWLAVQQPGKPVAVKTEMQQAMLALHSMREQLVKFRTMQINGLRGLLTEYGEVMSKGRAALDKEIPAALGRIAARLPAALIDTLREQWNGLARLDEQIAEIERRMREWKQQDRAVKAISEIPGVGLLTATAAVAMMGDPKAFRSGREFAAWAGLVPKQTGSGGKVNLHGISRRGDTYLRTLLIHGARSVLTHTKEPGPWVEQMKQRRPMNVVIVALANKMARMIWAVLAHERPYRNDYVSVKPA

SEQ ID NO: 399190 - protein, 315 aa, unidentified
MDNSTEIYIGIDVSKATLDIATWQPQQSWQVSNTTEGIEKLLQGLKKYSSSLVVIEATGGYERLVVAELVTANIPVSVINPKRARDFARSVGQLAKTDKIDARLLAHYAQAVRPRPRPLRTEDEERLSALMSRRRQVIEILTSEKNRLATAHKTTRNRVQEHIDWLLKELGDIDDEINQFIQSTPLWKQKDQLLRSVPGVGGITSQILLADLPELGTINRQCIAALVGVAPLNQDSGRKRGKRRVFGGRETVRNILYMAAMSAARFKPLIKTFYDRLIKAGKAKKVAIVACMRKLLILLNAIIHQNRPWQPNFQA

SEQ ID NO: 399191 - protein, 332 aa, unidentified
MEEITTVGIDLAKNVFSVHAVGSQGEVVVRRTLSRAKLSELIAQLPPCLIGMEACSGAHEWARRFAASGHTVKLMAAKFVMPYRKSGKNDGNDAEAICEAVARPNMRFVPVKSLEQQSDLSLHRVRQGFVEERTATLNRLRGLLSEFGHVLPLRASEVHRRVPQLLGKLPTRVAACARDLLEHAARLQAKTLEYEHEIKIHVRSNALACRAQTRLGIGPITASALVATVGNGHDFKNGRQFAAWLGLVPRQYSTGGRTRLGHITKRGDPYLRTLLVMGARAVLQRAASLTDPLSRWALAVRKRRGYHRACIASAAKNARGAWALLAKEPVGA

SEQ ID NO: 399192 - protein, 344 aa, unidentified
MKYMGIDYHKQYFVATTMDEKGRVISKEKVSTDRNSIKRYFKKAGSEGEMKAVMEACYGWEYFYDEVDELVDELIMAHPLKTRLIAEARIKTDSIDSETLAHLLRADLIPQAYAPSAETRDQKNLLRYRSSLTAMKVRIKNMVHSVLTRNHIEDKGFQELSDKFGKKGIAYMRAITLKGNDTAILHEYLDLLEETEKRIKLAESRIRAVCRQDELCRLLDSIPGIGDILAVTIRYEIDDIERFISSGKLCSYAGLVPSTYSSGNRTYQGKITKQGNKWLRWAMIEAAQRTPLSDMWLSAFFNRVSTKKGRKIARVAVARKLLEIIYRIWTERRAYYKKPVTVAL

SEQ ID NO: 399193 - protein, 437 aa, unidentified
MKVEGKHCCKKPAFSKAHGELQLAFYLCQYEQIDYCHLCNIRNGLNTDLSLAKKTKVKGKQLKIIIKYMETKESNPINFLYVGVDVHKDQHTAVATNCFGQALLEKEINNSKEEFEKLVKGVKTLAEAKNLKVIFGLEDTSAYGQRLARHLCQENFPVKVVSPVLVDRERRKLTHPEKSDSQDALGVAKALISKIGTLPNFSISKTNEITKELKDLVIDREFLVKEQTRIKNQLHRLFHKAYNSEYRLKFKNPFAVRALRYWLKNPVPAELKESLVLKNQIKRKVRRLKDIRKEVMEIEEEMNILLNQMNQKLETLNGCGLVSASSVLAEIKNIDRFQSSSSLAKYGGLCPKEKSSGKSIKHIKTKSGNRRLNKAIHRIALAQIGRQGNVYGKEYFKKKIAEGKNKAQALCCLKRRIINIIFAMLKHKTAYDYAARC

SEQ ID NO: 399194 - protein, 385 aa, unidentified
MDRTSCSAVSRHTLHCALELSKNSWLLAIQFPDREQPSVYSIEGGDTEKLMAKLTAARDCWAKVIGSLPVITLCYEVGYDAFWLARFLRADGIECLVIDPGSVQVNRRGRRVKTDRVDVKMLLRTLIAWCRGERHVWSLVRIPSIDEEDLRRSHRERSRLVRERTAHINRIKGLLFAQGIRGIKVKSQCKTLAVDKLLTGDGHRLPPRLACEIARELQRLAMVQEQIAEIEHERDTAPTPCEATERKRQLLLQLKSIGPAISALLSREVYYRQFVNRRQVGSFLGLTPSPYNSGEEERCQGISRAGSGHVRAIMIETAWLWIRHQPKSALTRWFVERTAGQSTRMRKIMIVAVARKLAIALWRYVEHGLVPQGAILNPPTTGKAR

SEQ ID NO: 399195 - protein, 476 aa, unidentified
MKIKNIYRNNNQILKETLSMYKPKDILYVPIEIGKFNHKAGIVNFFGDVIINPFEFPYNKHGLDFFLKKLQSAMKISSAKKIFIGCESTGHYHLNLVYHLKQLNLPVESINPRDTSRENPNKNAKSDIIDLNAIARCLISNKGGRQFIPEGIYYNLQRATRTRRKFVQRETSSKNTITSLVDRIFPGLWDKDNSIFSDKWGKASLLLLQHYPHPHQIIRLGEKRLTQFLRKHNTKLGEETSHKIISAAKDCLTKPQEELKMDIFALNAHIKVLLIYQEIIPQLQQEIASLLIQTPGIYLLSVDGISLIYASEFTGEVGDITRFAYAQQIISFAGSSSRKFSSAEYQAENLPITRFGSAFLRTTLNQIALSLNAWCDPFHHYYTKKALEKKDKPGIARIATGNKFVKLAFALMKKEQLYRPKGLLLDEKSYYLGVWKKILTKLDGFDFSQVPPETNYLLKIKKQLQQQYGLRLDFNL

SEQ ID NO: 399196 - protein, 364 aa, unidentified
MGAHASPDRSSDVVYVGQIGTKEADIDKLLRRLHRHASTLVVAYEAGPCGYGLYRTLTDKGVSCMVVAPSLIPKKPGERVKTDRRDAAELARLLRSGDLTAIYVPSIADEAVRDLSRAREASIGVLKDAKLRLKSFLLRHWLHDSGRATWNEAHLRYLAKVVCPTPAQQIVFQESLRAVSEQAERVRRFEDEIVEIAATWRLRPIVDAFQSMRGVQSHTAVTIAAELGDLIRFDNPRQLAAFVGLIPSEYSSGESRRLGPITKAGNGHARRALVEAAWAYRHPAKVSAHLQQRIERCPKPTQDISWKAQVRLCTRYRRMVARGKNPTDAWNAHQHCRHGHRARDSRVPVGDRAGGTNRRLSGRT

SEQ ID NO: 399197 - protein, 392 aa, unidentified
MVISVGIDVSKDKHDCFIVSSEGEVLADVFTVPNNMDGFHCLLQRVQSCAVSQDKIKVGLEATGHYSYNLLGFLLDNGLTTYVLNPLRTNLYRKSLSLRKTKTDRVDARTIASMLLSDAGLKPYTSTAYHNEELKSLTRYRFDKVKERAKLKSSVSRLVCILFPELEKLVPSLHIASVYALLEAFPGAKQVASVHLTKLKALLEAASKGRYKRDMALEIRDAARNSIGSRMPAKSLELQHTIRLIRELDAEIAETEEQIQSILDELHSPITTIPGLGFRMAAMILAEVGDFARFDSPDKLLAYAGMSPSTYQSGQLKNCYPHMEKRGSRYLRYALYNATKYVCQWEPGFSAYLAKKRAEGKHYNVAISHAAKKLVRLIFAMEKSGTPYHLTV

SEQ ID NO: 399198 - protein, 456 aa, unidentified
MNQYFLGIDASKGYSDFVMLDAKKQTIIENFQIDDTFDGHARLYEVLHSFNKENAEATIYAAVESTGGYENNWFQSLLTFQASLPIKTAHLNPLGVSHNSKADLKRNNTDKISARNVAEYMIAHPEKVSYQHQDSLASLRKQWGFITMLTKQSTQLLNQLESLVYNANPEILTYCKDGSPQWVLKLLTSYPTALRLSRAKVKVLARIPYISVDRAKQLIATAKKSVASADDKVTEQLIVATVKQIVHLKKTIKTQSEILAKECQIPEVALLKTFNGIGDYSAIGLMLQIQSVSRFLTSKKISSFFGIHPEYKKSGDGIYKYRMSKKGRKEGRQILFIVAMSAIQTNPLIRDVYQQAVERGMEKMSAMGLCMHKILRIVYGMLKHNKAFDPQIDLKNRQKTSSRKNNVVQDEDRRYQDFDSNAPISRRQKMKRKERKQSQNVSNVEYGISEASVPVS

SEQ ID NO: 399199 - protein, 337 aa, unidentified
MEYFAGLDVSMAETQICVMGRNGAVIHKAKVPSTPADIAAELAQLPTCRRIVFETGRMAPMLYHGLRQLGLPVICVESRQADQALKLLATHKTDHNDARGLAHLARTGFFKPVHVKSLPAHAVRSLIIARKKLVGQRVTLENQIRGLAVVFGVRLPRALSSTFIRQALQASEGIPGLSAAMQGLVAARTAVLAAIVAIDGDIRRMVRASDACRRLMSIPGVGQLTALAFTAAVDDPGRFRRSRDIGAYLGLVPRRHQSGEIDYSGSISKCGDRRLRTLLYEAANVMLTRYKGALKLKEWAFAVAKRSTMRKARIALARRLAIIMHAMLRHGTEFKAA

SEQ ID NO: 399200 - protein, 388 aa, unidentified
MIYVGIDIAKLNHFASAISSDGEELIKPFKFTNDNDGFHLLISKLDLLDKDSLIIGLESTAHYSDNLVRYLVAKNYKVCVLNPIKTSTMRKNNIRKTKTDKVDSYIICKTLMMQESLRFVTFYDLDLMDLKALGRFRQKTIKQRTRLKIQLTSYVDEIFPELQYFFKSGLHQKSVYALLKEAPTPEAIASMHMTHLAHLLKVNSHGRFNKEMAQQLRVLAQKSVGANDSSISIQITQTIQQIELLDSQLDKIEAEMTDIMKFNDSVIMTIPGIGYINGGMILGEIGDIHRYSNPNKLLAFAGLDPSVYQSSNFQAKTTRMSKRGSRVLRYALVNAAWNVVRNNATFKAYYDAKRAEGRSHYNALGHCAGKLVRVIWKKLTDEVEFNLE

SEQ ID NO: 399201 - protein, 347 aa, unidentified
MNYVGIDWAYGRAAWCALKDSGAIEGEGLIAADEDGLAGLALRLGPEVKACVEMMSGAIWVKDKLELAGWSVEVAHARKVRDIAPLACKTDKVDARVLAELCRRELVPAVWVSSLADRAIRERLRRRAHLVKSRTSARNRIFGLLTQFGLRISFTRLRRADAIELLERRGVPAVWRDSIAEHLDQIAALDRRIDPIDRELRPIACADVRAQLLSTIPGVGPLISLTFAAEIGEVSRFSSASKLVGYAGLAPRISQSGERSATGRLSKAGSRSLRWAAVEAANQAWRPTNPFHEHYRRLAARHAKNPAKSAVARKLLIISWHMLSRNQVFQLPRSATAPASSSRFLAA

SEQ ID NO: 399202 - protein, 466 aa, unidentified
MAGREEREHSGSAENTRRRQLQGLPVVRRNVAGIDLGSEQHWVCGATVDGSAREVASFGATTAELLRMAEWLKARRVESVAMESTGVYWIAPHEVLEGQGLQVLLVDTRQLAQVPGRDKKSDPTDCEWIQRLHSCGLLRGSFRPEEAVCMLRTLVRDKASLVAERSDWVRRMQKSLDQMNVRVHRAVSDIDGATGMAILRAIAGGERDAGKLAKFRDARCSKTEQEIAEQLSGHWREDHVFSLQQALKMYDAVQERIAAYEQEILRKLYEMEREEPLGPMAPPLQNTNKARMIKKRGQEAKRQALYRTCGVDMTQIDAIGVETVEVVLSEYGSDLSCFPTEKQFVSHLTLAPRVPKTGGKPVKKKKRNSASTRVAAALRMAALSLRHSPTALGAFYRKIARRRSGDIAVFATARKLATLIYRLLRWGQPYVDEGAAAYENRYRQQRIRSLAATAKDLGYQLTPVTA

SEQ ID NO: 399203 - protein, 366 aa, unidentified
MKKSSTVASSRKQIVQGRKLTIGLDLGDRWSFYCVVDEAGQVILEQRLPTTSEALKQTFGKIPRSLIALETGTHSPWVSRLLSELGHEVIVAHAQKVQWITKSSRKDDRHDARTLARLARVDPELLGPVRHRSVKAQLHLTVIRARAELVSARTALVNAARGLVKSYGQRLPKCGTYQVSRELATALSAELREVLEPLLKEIESLNERIKEYDGRMDKIAKEVYPEVSLLKQVKGVGTQIALTYVLTIEDPYRFAKSREVGCFLGLRPGRRNSGESEPQKGISKEGDRYLRTMMVQGAHYILGPFGADSDLRRWGLKLAERGGKNAKKRAVVAVARKLAILLHRLWVGGEVYEPLRNSQKAMRAVA

SEQ ID NO: 399204 - protein, 345 aa, unidentified
MEIRTIGIDLGKTVFHFVGVNTRGEVVVRKKGSRTQLLRFTSNIRACLIGMEACGGSHFLGRALREQGHDVRLMPAQYVKPYVKTNKNDYIDAEACAEAVTRPTMRFVPIKTDDQLDLQSLHRVRERWVVRRTAVINQIRGMLLERGITIRKGRIHIEESLPGILEDPDNKLSGALRVLLTQLRSEMQYLHGQIEETDKLIARICGELEQCRRLVAIPGIGPITATATVAAIGNGAAFKKGRGFSAWLGVVPGEHSTGGKQKLTGTSRRGNKYLRKLFVQGAHSVMLQSTKQSVGLSMWLSHLTARKRKQVATVALANKMARMAWAVLFKGEAYRPPAVSQVIAA

SEQ ID NO: 399205 - protein, 414 aa, unidentified
MDWIACVGIDWGDKRHAYMIQTREGSKQAGWFGSSAEEVHEWARGLGERFPAGTIIVAVEQGRGSLLYALMAYEYLVLVPINPRASKAYRESLRLSGSSSDPTDAALIGDFAMKHLSELRVWKPDEVRTRKIRLLCEQRRSLVDQRTALTHALSAALKEYFPQVLQWFGEEKSPHLRAFLTHWATLEQARQASADDITNMLKANRRRKASTVAQALIEKIRVAVPLTRDTAVIEAQSMYARSLVALIDPLDQEIAKFDQAIATEWADHPDRKIFDSLPGAGAAMAPRLAAAFGLDRDRYQEAVEMQQYSGIAPVTEQSGRQWWVHARWGFPTFLHQTFHEFAQASLPHSAWARAFYHQQRDRGAGHHEAVRALAFRWIRILFRLWKTGEEYDENRYIETLKRKQSPIVRRLATA

SEQ ID NO: 399206 - protein, 334 aa, unidentified
MQNVTLIGIDLGKHSFHVHCQDRQGNALLRKKFSRTQLINFLGSCKAATVVMESCGGAHFMARRIADLGHEAKLISPQFVRPFVKSNKNDFVDAEAICEAASRPSMRFVPPRTEDQQAMAALHRVRDSLIRQRVKTTNQMHAFLLEFGVSLPRGIAVIRRLAAVLEENDFPPYLARVLSRLHSHYVYLSGEIEEVDKELKTHLAEDETAQRLLTIPGVGPVTASLLAMRLGDGKNYASSRDFAASTGRVPRQYSTGGKTTLMGISKRGDKNLRRLLVQCARVFMQRLEHNPGRLAEWVNRQLARHHSNVVACALANKLARIAWAVTAHQTVFIK

SEQ ID NO: 399207 - protein, 319 aa, unidentified
MGELWVGIDVSKRRLDVAIRPDGGTLICDNDSAAIKKLAGMLASKSPRLIVMEATGGHEYAAAVILSKAGLPVAIANPRQVRAFARAKGKLAKTDPIDAETLAHFGEAMDPPVRAVRDQQLEEIGQLVTRHRQLIEMLVAERNRRLSCVGTAQHDVDVTIRFLEGRLDKVDRQIKALIAEHPDWRSKAELLDSVPGVGPVLISSLVAELPELGTLNRKQIAALVGVAPFNNDSGQSRGRRRIWGGRSHLRAVLYMSAVSGVRFNATIREFYKHLRERGKAPKVAMVACMRKLLLILNAILKTQQPWRSPAVETPIALPA

SEQ ID NO: 399208 - protein, 388 aa, unidentified
MGPVIGLDIAKGMSVFQAFTKRGEAYGKPEVIRHADGGLERLDDVIRQLEEQTGAKPVVVLEATGHYHRVVVDYLERMNVEHFILNPLLSKRSKSAQLRKVKTDAADAFHLAEMYYRGDVKPHRRWADSITELQHMTRQHEFMTAQFVQSKLNARALLDQVCPAYEDVFHDLFSKTSLRVLLHMLQGAVITEEVIRETAGSSHGKAWILSKVARIQAVQLPQKQSVAQRTALLCMVEILLAQQEQLSRLEMKIQEEAEEIPEVELLKTIPGIGDKLAASLIAEIGDAEQFENPKQLVAYAGLDPSVHSSGQFVASNTRITKRGSKRLRRALYLAVQCGVRGSTNERLRAYYDKKRQEGKPYKVTVIACANKLLHHIYAILKKGTPYAA

SEQ ID NO: 399209 - protein, 317 aa, unidentified
MKTVPFEQVILRGCGIDVHKDMVVATISGEGLKTETRSYKTFSSSLTELKEWLLSSGITHVAMESTGVYWKPVYKILECPDMKVWIVNARHIKYVPGHKTDKKDSAWICKLLLAGLLKPSYIPKREQRELRDLTRYRNKLIQHVSSEKNRIVRILEDCNIKLSSVVCSLDGVVANKQIDMLIDKGHVTMDDITCIYHKKLEASPELLYQACEGFIEPHHIYMLQTIRKDMEQTKAIIADLTCRIKEVLSPYENVMELLQKIPGLSRKTVEDLIAEIGVDMEAFPTEKHLASWAGVCPGNNESAGKKKVVEPPMATNS

SEQ ID NO: 399210 - protein, 346 aa, unidentified
MEQYVGLDVSLKLTAICIVDRTGKIEREGVVASDPEAIAAFVKSHAPHVARIGLETGATSTWLWTELNKMELPVICIDARHAKAALKMQINKSDRNDAVGIARIMQCGWYKEVRVKDLDSHAIKALLVSRALLVKIKRDIENQIRGLLKNLGLVIGRAKMNVFAVRAAELAEARPELAAAVEPLLKAREAVGRQIADLDRKVMRLARNDAQVRRFMTAPGVGPITALCFLATVDDPTRFKRSRSVGAYVGLTTRPYASGEIDWTGRISKCGDKMLRSYLYEAANVLLTRVVKWSTLKAWGVRLAKRSGLRKAKVAVARKLAVILHRMWIEGTEFKWSSKEVANQPA

SEQ ID NO: 399211 - protein, 425 aa, unidentified
MLEKIVVGIDVSKAFSDICILSPNNDIIKRLKISNDINGMNSLIYVLEKVEDEYKDRAVIIMEATAHYHQILANFFRKHNYEVIVINPIQSGALKNINIRKIKSDKTDAYNIALLYRIKNYNETITHSDTVNSIKKLCRQHKELTDEIVEHINRLIAFLDISFPDFKKVFADLQGKTPLSLLEKYPTIQEVLSPENKQDIIQLIKENSHKSSSYAEVKYEKLLKAAEKSIEVCIVSLSSAVLIQTTVRVIFSLQEALKAIDDEIKRLSLLDEKFHKEIVLLQSIPGVGEYTACVVLSELGDISNFSKPKELVAFFGLDPGVSQSGTYNRKNNKISKRGSPHVRSILHMLAKSNVYPNRNREYLNPVMRAYFEKKIAEKPYKVVMCAIMRKMVQIIFAVLRNQKSFELRTPEEHQKLIREKSKLVA

SEQ ID NO: 399212 - protein, 356 aa, unidentified
MDSTKYIGMDVHKEATTIAVMNSAGKLVMESIVETKAVTIVQFLEGLRGELYVTLEEGTWAAWLYDLLKPHVTKVVVCNPRKNALLKAGNKSDRIDARKLAELLRAGLLSAVYHGETGLRTLKELCRSYLAISKDLARTMNRIKALYRSWSIPCGGTSVYAPRHRAEWLSKITEPGVRRRAELFYQQLDGLQKLRQEARGDLLAESRKHGATELLRRIPYIGPIRAAVLIALLQTPHRFRTNRQLWAYSGLALETHSSAEYHYVQGQLQRSRRPVALRGLNQNHNHDLKSIFKGAATKAGSAKGPFHDFYAALLAKGMKPTMARLTLARKIATITLIVWKKGVCFDAQQLKQQVSV

SEQ ID NO: 399213 - protein, 342 aa, unidentified
MQVTTIGLDIAKNVFQVHGIDAAEKVVVRKQLRRRQVLEFFKALPACLVGMEACATAHYWARELTKLGHQVRLMPAKDVKAYVKRNKNDAADAEAICEAARRPTVRFVQIKSTEQQGRLMLHRARDLLMRQRTQVINAMRAHLAELGIVAAQGRDGIKELLKIIASEADARLPVDAHTSLVVLAAELQAMQTLIGSIEKRIMVQHRLSEASKRLKSIPGIGLIGATAIAATVPDPKVFGSGRDFAAWIGLVPREDSTGGKQKLGPISKRGDRYLRRILVVGACAVLRYARHKPEKYPWLTKLLERKPFKVVAVALANKMARIAWALLAKGDTYRVPALAAAA

SEQ ID NO: 399214 - protein, 382 aa, unidentified
METATARSANYTTNSQVLYLAFELSNNKWNLGFTIGLGQKPRERVVPARDLPRVLEEISAAKQRFKLPEATRVVSCYEAGRDGFWLHRALVAAGVESLVVDSSSIEVNRRARRAKTDRLDLGKLVTMLIRYHSGETKVWSVVQVPEVKDEDQRQLHRELADLKTERTRETNRIKGLLIGQGISLTTRGQAKIDLDAVRLWDQSPLPEGIRGRIQRAQERVEFLSRQIRELETQRDQELENLTCVGTKRVRQLMVLKGIGPVTAWVLVMEFFGWRRFRNRRQVGALSGLAPSPYQSGDSAREQGISKSGNRRVRARAIEMAWLWVRYQPGSALSRWFQKRFGAGGSRQRRIGIVALARKLLVGLWRYVETGAVPDGAKQKVPC

SEQ ID NO: 399215 - protein, 341 aa, unidentified
MSYYAGIDVSLEQSSVCVLDGEGKIIREAKVASEPEALIAWFGSLGLAMTRIGLEAGPLSQWLFAAMKQAGLPVELLETRHVRNAFKTMPVKTDRKDARGIAELMRMGWFRPVHCKSISAQETRAILTTRTLIEAKLRDVEMSLRGFGLKVGKTTPTNFAERIKELVSEHSNLQVIADALLAVREVLLREFRSFEKRVRTMARHDERARLLMTTTGVGAVISLTYAAAIDDPARFKSSKQVGAHYGITPKRYQSGEIDYSGRISKIGDKSVRTALYQAAHIILTRPVKASALKSWAMQLAKRIGMAKAKVALARKLAVILHRMLVEGKPFDHKLPNQVAAA

SEQ ID NO: 399216 - protein, 309 aa, unidentified
MTTYIGIDVSKLVLDTYHGGQAAQIPNTEKAIRSLLKSLPTDAVLVCESSGGYEALLITLAHAAGRPLARVNARQVRDFAKAKGRLAKTDTLDAEAITEFAQVFHPSPLSLPDPLQQELAGLAKIRSHILIQITQNNNLKETISDKALLNILTGTIASLKKQETKIQVLIAAKIKLSPDLTSRVSRLQEVRGIGFVTAFSLVSFMPELGTLSDTQAASLAGVAPFNHDSGQFRGQRHIRGGRSQIRSVLYMAALVASRYNPILKTLYQRLLLAGKPKKLALTVLMRKLILGWTPFSNQQELKISYGMRV

SEQ ID NO: 399217 - protein, 353 aa, unidentified
MKITTTGIDLAKSVFQVHGVDERGKAVLKKQLKRSQVIAFFANLPPCLIGMEACGSAHHWARQLQVLGHTVKLMAPQYVKPYVKTNKHDAADAEAICEAVGRPTMRFVPIKTVEQQVILTIHRARQGFVKARTAQGNQMRGLLAEFGLVLPQGMSHLRRLPGMLEEGDNALPDSFRQLLARLHEHLQQLDRQVAELEREIQRWHKDNAASQRVAALPGLGALSASALVATVSNGRSFANGRQVAAWLGVVPRQASSGGQVKLLGISKRGDSYLRTLLIHGARAVVRQAILHPERADPWLKRLLARRPKNVVAVALANKNARIAWALLAHGREYQRGFRPTPPRQLAVVASTAA

SEQ ID NO: 399218 - protein, 347 aa, unidentified
MKFYTQTHQHYCGIDLHARSLYVCILDQQGNKLVHKNIKALPQALMRVVQPYRDDLVIGVECMFSWYWVADLCRDEQIKFILGHALYMKAIHGGKAKNDKIDSKKIAMLMRGGMFPQAYVYPREMRGTRDLMRRRMHLMRKRSELLAHIHNTNSQYNLPEINKDLRYMVHRDGIADRFNDPSVQKSIELDLNLLEVYDQQLGKVERYIYQQAKTCDQHSLVLLRTVPGIGKILSLIILYEIHTIARFPSVQDFASYCRLIKCQKESAGKSYGYSGKKIGNAYLKWAFSEAAVLFLRGNPEAQAWLQRMSNKHNKARALTILAHKLGRAVYFILQRQKMFDQERFLNS

SEQ ID NO: 399219 - protein, 332 aa, unidentified
MLNCIGIDVSKASINVHIAKNNQDLVLDNNLKSFRSLFSKLKKIYKKEIKDIIFIFEPTGSYSEALRKYCSDKSIKCFIINPKQFSNYAKALGVEVKNDIEDARVLSKALHLAKEGQVKVPVFNEDVEQIKELMSFYKFTKKQTTQQRNHLEALTSKGGDKFSITELKKSIQASKKQELKIIERVQALIDSTDEYRIAYENIVSIKGVGQIAGIVLLHLFLKYPDANQKQITSLTGLNPIYKQSGTSIQSGYRIAKSGAGLYRGTLFMATLSAIQHDKNFKALYDRLKAKGKHSTSAQIAVMRKIILTALSLYKNNRKYNEDFNSQEASKMQ

SEQ ID NO: 399220 - protein, 376 aa, unidentified
MVKKIADKKRGRVKGCKMNSIVAGIDLGDRESMTTVLSPIGDVADRFSFPMNEEGYAYFANRVPKEARVAFESTIMAYPIMRALRGHGYRDVTVAHPKELAWIVRSKKKNDRVDSLKIAKLHMAGMLPESHLLDRDAQIIRDLLVQRAKLGVEIGRLKNSVIAYLKREGVYETLPSSRDSFSVRRREAIRGLRFNDNRDLILGTMIDRLEFLEKQCIPLEDRVKENARVSDDVKLLMTIRGVDFYLASLIFSFIGDVNRFPSDDHLASFFGIVPTSRDSANVKRRGKMTKDGSSIARWTLSVMVDTVMQYNQPIKDYYLAVKKRTGSGKLAHVATMRKLTRMLYHMLKTRKHWRWEDTLLTERKLAKLRMDGGVVS

SEQ ID NO: 399221 - protein, 341 aa, unidentified
MNKVALVGIDLGKHSFHLHGQDGAGRAVFRKKLSRLQMMRLFGNLPACTVVMEACAGAHFTARELNKLGHVAKLISPQFVRPFVKSNKNDFVDAEAICEAACRPSMRFVASKTEAQQTLSVLHRMRDALVRERTQATNQAHGFLLEFGICLPKGLATMKRLPSTLSEHSLPPQLMQLLMRLHQHFLYLDQQIKELEGQLETQVAEDDLGSRLLSMPGVGPITASLLAVEMGDGRQYASSRDFSASLGLVPRQYSTGGRTNLLGISKRGDKHLRRLLVQCARVYLMRLEHQRGALATWVRGLLIRRHSNVVACALANKLARIAWAIAVKHTRYEAEPDGLTA

SEQ ID NO: 399222 - protein, 343 aa, unidentified
MKDTIYNHYIAIDWSIKNMAIARMTKKSNKITVIDVPSDIEDLQAYLKNLKGTKILAIEETTTSQWLYTELKEYVDRIFICDPNRNKLLSEGPKTDKIDANKLVQLLKAGLMKEVYHSTDKFLYLRRVVSGYEDLVKAGVRLKNQRYSLLRACGKSGDEKIGSTLESQGEQFVLECLDRQIEAYEGEKEGYEKEFEKLARSHPKIKHQKSLPGIGVINAVKIVARVVTPYRFPDKGHYLSYTGLIKLNKESGGRSYGKKNSRFSRQLKSVYKSGVLAAIGGNNPINDYYEHLIQEDGYPEYNARQKACRRLAILSLGVLKSGKKYQPYRRDHLKGSKEGTSGL

SEQ ID NO: 399223 - protein, 361 aa, unidentified
MYASTKSVSSGSAVTVAIDLAKDVFELAFGNADFRIVERKRLSRAAFAGCLSNRAPLDVVMEACGSAHHWARVFVRVGHRVRLLPAQYVRAYVHRNKTDRADAAGLLEAARCGAIRPVPIKSALQQGTQGLHRVREFHKAQRTAAINLARGLLREFGIAIPLGAAKVRPAVLAALEAADNELPMALRHALAAVLDEIQSCEKAMAAIEQALTEIARNDIRCLRLMQAGGVGLLTATAMSAGLGDLARFPSGRHLASALGLTPREYSSGNTRKLGRIGKQGDVYLRTLLIHGARSNLLQAALRRKRGQPLDRTQQWALALAEKKGHNKAAVALANKTARRLWAAEHHGASFNPDHVSRRSAA

SEQ ID NO: 399224 - protein, 416 aa, unidentified
MELIPIFRRVIGLDIHQAKVSACAIIENDDGSVTVELREFGGFKRDRRALAQWAKSIAPDVVVMESTGIYWKSPYAALESVGIIAWVVNARHVKNVPGRKTDVADAQWLATLARSGLLHGSFIPPSTIRYLRLIARQRQKLGGILSSEKNRLHKILSDAGIRLGVVVSDIHGQAARAMIKAIIAGKAISEVLDLAGRLHASREELFEALQPEELSDAHLFVLTEIMAHIEELEARMGRFEQALLQGLSAWQPQLTLLQTIPGIDAMGAAMLLVEIGTEMQTFGSAERLASWVGICPGNNESAGKRKSGKIRKGNAWVRRLLCEFAQAASRSRSALKGKFAALSIRKGHKKSIVALAHKMLRIIFAILKSGKPYHDKTVDYEALSVQKNAPRWLKMLKKHGFLQSDSTVAVSAAVAA

SEQ ID NO: 399225 - protein, 345 aa, unidentified
MKITTIGIDLAKSVFQVHGVDARGKAVLRKQLKRKEVRPFFAQLPPCLVGMEACGSAHHWARELQQFGHDVRLIAPQFVKPYVRSNKNDAADAAAIAEAVSRPEMRFVPIKTAPAQALLAVHRARQGFIKQRTAQANQIRGLLAEFGIVIPTGLHRLFAQLPEILEDGENGLPGLMRQTVARLRDHLRLLDQEVAALDRQIQLWHQTDPTSQRLATVPGIGPLTASALAATFGNAQTFHNARQFAAALGVVPRQHSTGGKSTLLGISKRGDVYLRTLLIHGARAVISNLARKATPDPWLQRLCARRNANIAAVGLANKNARVVWALLTRGETYQPGHRPRQPLAA

SEQ ID NO: 399226 - protein, 407 aa, unidentified
MLFVGDDWAEDHHDVCLQDAAGRVLAARRLPEGVAGITRLHELVAGHQDGDDPSQVVVAIETDRGPWVRALVAAGYRVYAVNPKQAARHREVVAVSGKKDDAFDAAALADMVRTRRHQLREVAADSDEAEAVKVVARAHQKLVWERTRQALRMRSALREYFPAALEAYAPLTLTGPDTLELLAKAPDPAAAARLTIAQISAALKRARRHDVAGKARQIRAALREQHLGQPEIVTEAYAAGVRASAAVITVLNEQVKVMEARVESLFRRHPDAGIYLSQPGIGVITGARMLGEFGDAPGRYADVKARRNYAATSPLTIASGKKKTVHARFIHNDHLVNAMHDQAFAAISASPGARAYYDELRSREIDHTDALRRVANRQAGILHGCLKTGTGYDEHTAWGHRSQPAAA

SEQ ID NO: 399227 - protein, 364 aa, unidentified
MKLVKDIVNRVVRYIGMDVHKDSTTAVVLDAQGNRVMQVTLRTEGTVLVDFVRGLSGRLHLTLEEGTYSAWLHALLSPWVEKLIVCNPRQKALLKHGNKSDPIDARKLAELLRLGSLSAVYHGAPEMRTLKELAASYATLVQDGTRVMNRLKSLYRGRGIRCGGTQVYSPRHRARWLEQLVEPGARQRAKLLYQELDLLLQLRPQARRALLAQSRQHPAQKILRTIPGLGPVRVALLLAWLQTPHRFRNKRKLCGYGGLGLLTRGSAQYRLEKGELVVSPKGVMVRGLNPAHNTHLKDIFKGAALAACQRPGPLREAYERLLREGTQEHLARLTLARKIATLVLTLWKRGERFDAQRLRREQAA

SEQ ID NO: 399228 - protein, 313 aa, unidentified
MIVIGVDVSKDALVAVAIDKSIRIKNSFTVENKREEIEKWLNGLCYKKLLLSCEATAEYHRVLALLALSRKIPLRLLNPIVTKQYTKATVRKRKTDPQDALTIAKLALAGEGRLISSQTFQIAKTHERTAIKLSHTRQRLLLIQQHIQEIDSGDEDSIKQLQVCIDTIEESIKVFRKKAEGEVNAKEVKLLCSIPGIGETISTVLLAEIGDINQFRSAKALVAYAGLDPKVKQSGGRLHHNTHLTKRGSPYLRQMLYTGASIAQRCDKELKTYYEKKRSEGKRYKEATVAVSRKLLNRVYAVLKRKSPYYVSG

SEQ ID NO: 399229 - protein, 421 aa, unidentified
MNAWNEVTHFAGFDWAKDHHDVLVLDNTGKIAAELRFEHTAAGWSLCQQRLAAFPHLAIAVESGHGAAIERLMVLGYRVYPVHPRSSKSYRTRKLPSGTKTDHIDCWALADALRLEGESWHVLNTPEPLVQRLRLLCRDEVALIEQRTALINQLQQALYEYYPAALAAFDDWTSLSAWAFVARFPTPQALVKAGKRQWEKFLHTQKLYHPEWYQKRLAIFAKADEFCGPEAVTAAKSVLATALVKLLQTLELQLASYRLLITKCFKQHPDYHVFASLPGAGPKLAPRLLAELVALQPLADQPQVLQCLAGMAPVSYQSGKVSVVYLRRQCNRFLRATLHLWVDLSRHYCDWARIYYEAHKKKGQSHACALRCLGMRWLKILAAMIRSHTPYDAALHARSQLQHGSWVLQLQPKLSITKDAS

SEQ ID NO: 399230 - protein, 411 aa, unidentified
MDTLHRCCAGLDVHKDSVYACVRRQEGARGAETIRVFGTMTPDLLGLSDWLAAEGVTHVAMESTGVYWKPVYFILEGRFDLTLANALQLKRVPGRKTDVQDCAWIAKLLAHGLIAPSFVPPEPQRDLRELTRQRVKLVGQRAAVSNRIQKVLEDANLKLGSVAADVLGKSGRAMLRALIAGQTDPAVLAELALGRLRKQIPRLRPALTGRVTEHHRFLLRLLLDEVEMVEQLLGRLDERIGAVLAPFFEAARRLMTIPGVNRHVAEVVVAEVGTDMGQFPSPEHLASWAGMCPGNYESAGKRQGGKTPKGNRWLKRALVQAAWAASRAKGTYLAAYYRRLAARRGRKRALVALGHVLLGTMYHLLRRGTDYTDPGGDYFDRRDRDRLTHRLVRRLEGLGLKVTVEPQGQAA

SEQ ID NO: 399231 - protein, 349 aa, unidentified
MKIIGCDFHPGYQQIAMLDLATGEMLEKALSHERKEEVRAFYAGLGGPVRVGIEASGQSQWFERMLAELGHEVWIGDAAKIRASCERKQKTDRRDAELLLRLLAEDRFPRIWVPTAAERDGRQLLLHRHKLVRMRTQVKNQLQALALNQGVQRKRKLWSEVGRKQLESLPLLPWASRRRAELLQLLDQLGASITELDRAVVEQANARPAAQRLMTHPGVGPITALAFTLTMGPAERFQRGKQIASYLGLIPSEYSSGGRKQRLGHISKQGNPFLRGLLVEAAQSAVRLEPEMRRAYQRLAQRKCRGLAKVAMARKLAVRLYWMLRLQVNYAQLIQGSHAGQPGTFRGRG

SEQ ID NO: 399232 - protein, 267 aa, unidentified
MTYVGIDVSKATFVVAYSSAKGSRTNSFKNTIKGIHEFIQTISVAEHHCVLEATGNYSSLLVYLLSEAGIAVSLENPLKIKNFARVMLSITKTDEIDARLIAMYGEKMQPAPYKLRSDTILVLKQKRTVIRQLKKQLVATGNLKGSMEALPFFDPKCKKTIERTIIFLEKQIKELEEELASLAQSEYKKQMDLLTSVKGIGVTLAAALIMATGGFTYFDNAKQLTRYLGLSPTYQQSGTSVNVKGHINRNGDSSLRSQLYVAAFASL

SEQ ID NO: 399233 - protein, 358 aa, unidentified
MKKYVALDVDSANIVAGVYDYLGRLIMKTHLRLEAKVIKEFFKMLSGTVHVTFEEGTQASWLYELIQPLVAEVVVCNPRENKLLKAGNKSDHIDVGKLAKLLRLGDLKSVYQGPRCSQGLKQLVHSYDALVEDTTRTKNRLKAVYRGRGVSTKGEGIYGRAQREQWLEKLATREQRLRAQSLFAQLDYEQQLSKTAETVMCREARKNAGYQWIVSAPGIGRIRAAQILATAITPHRFRGKRQFWPYCGLAVVTRSSGDYEWAENGTRRKRKPIQTRGLNPNHNRTMKAVFKGAAASAILQHAEVKEYYQRLIGTGMRAEMAQLTVARKLAAIVLTVWKKGERYDPKRLNQAAPGVGPQ

SEQ ID NO: 399234 - protein, 318 aa, unidentified
MTFTPIGIDIAKAKFDPAALRHGKYQTKVFHNTPEGFTAFLAWLQTFPAPHVCLEATGRYGDALALFLSDHDLAFSVINPTPIHAFGQAELSRTKTDKRDAKRIARFCHSQRPPLFQPPPPAVRQLQALVRRLDNLVEMRQMEKNRLEGADPTVRTAIETLLATLEAEIATPQNRIREHIDHDPDLRQRRDRLDTIPGVGDATIAVLLPALGDVHRFDRARCVEAFAGLSPQERQSGKWKGHTRLSKIGDARLRKALYFPALVAWRHNPLIRAFCERLKAQGKNGKIIACAALRKRLVLAYGVLKSGQPFDPNYALAA

SEQ ID NO: 399235 - protein, 339 aa, unidentified
MESNKKTYYNQYLAIDWSIVNVEIARMSAQGAKILTKRFAPDIKQIKKYLTPIKGKKIMTIEESTSSHWLYVELLDCVDRIIICDPYRNSLLSEGPKNDKIDARKLCLLLRSELLKEVYHSLDDDYKIRKFVSAYEDLVKAGVRVKNQKSAIYRAEGLRYKKDKIKKQDEILSFIEEQQNTSIRHYEQEKEKYESKFREIKKKNKLIKMLCGISGIGTISAVKIYSKVIDANRFENKYKYWGMCGLVYYKRESGGRNYGRKKPRYSRTLKSVYKTAALAAIGGKNDIRDYYEVLLKQGYSTSEARNQISRYIAKVSYGVMKNRTPYRAYQWRELKKVAA

SEQ ID NO: 399236 - protein, 352 aa, unidentified
MSIIAFDSHKRYTFARVEDNNGEHAQEFRIEHRRGNIAAFLAGRQPGSPVAVETIGNWYWIVDEIEQAGMEPKLVHARKAKMMFGCINKTDRLDAKGLNVLQRTGTLPTVWIAPAAVRDKRELPRTRMVFAADRTKLKNRIHSALDKYGLQDAFEGITDIFGVKGRRVLGGVLDQLPPHSRYTTELLLEHLDQTEQKIKAIEAQMNKLFKETEQHRLLKTMPGIGFILAVVVLQEIGDIGRFACAERFASYSGVTPRVHASGGKVHYGRLRPDTNHYLKWAFSEAGNSVAVNRNRFPARHVSQLYNRLRSRKGHAKAVGAVARHLAEAAYWILTRNEVYRERGLSNVSPTGT

SEQ ID NO: 399237 - protein, 315 aa, unidentified
MGGVNAAIDVGKRQLAIALGSAGECFSEPNEADAIKRLTQRLAAVGCVRVLVEGGSYQNLLVAALRAAELPVVIINPRRVREFARSIGRLAKTDRLDAQVLALYGERLEPAVRELPDGQSQHLRELWVRREQLIAMVVMEQNRLEHASPALQHRLRAHIDYLRQELRQADDDLDQAVRNSPLWDKCEVLRSVPGVGPILSFALLADLPELGRLNRHQIAALAGVAPFNQDSGSARGPRAIQGGRPRLRRVLFVATLAATRCNPVLKPFFQRLRAAGKPHKVALVATMRRLLLILNAMLKTNTQWRVPTCLAPANS

SEQ ID NO: 399238 - protein, 312 aa, unidentified
MSEATIGIDISKDRLDVHRFPAGDEKAFANNRSGLTALLRWLGSGPVTRVAFEPTGRYHRNLERRLGEAGYALVKVNPRHAKRFCEALGVRAKTDRADAAMLARMGAALALQPQPARPEILNELNELIAARRALVKDRTAAKNRAKGMRLAILRRQNAARLAGIGADLAAVDKAITALIAADPALAERRVILLSIPGVSDVTAAALIALAPELGTLDQRQIAALAGLAPITRQSGNWRGRSFIQGGRALLREALYMPALVAIRFNPDLKRTYDRLQGNGKPAKVAITAVMRKLIILANALLRDKRKWSPEAP

SEQ ID NO: 399239 - protein, 373 aa, unidentified
MKKHSKRPQSPRGGAKKKQPRSQASMTIGMDLGDKTSRYCMLDQHGEVVKEGSVATTRKGMVGAFGSMLPSRIALEVGTHSPWVSRLLSGMGHEVIVANPRQLQLITQSSRKDDKVDAKTLARLARIDPELLRPIRHRGEKAQMDLMQIRVRAALVETRTSLVNTMRGLAKSVGERVPACDPDSLDQARLEGLPKPLQQVLGPLAKQVELLTEQIQECDRKLEQIARSEYSETALLEQVYGVGTLIALTFILTVEDGQRFQKSRDVGCYVGLRPKRGQSGNSDPQLRITKEGDSYLRKMLVQGAHRILAARSPDTDLKRWGLKLGARGGRNAKKRAIVAVARKLAILLHRLWVTGEVYEPLRSSPAGVQGQAA

SEQ ID NO: 399240 - protein, 320 aa, unidentified
MSDRFAVGIDADSRTLVVAYHGTKGSFRIANSASAINKWLSSLPAKSRIGVEATNRYHELVVQAGQKADHAVFVLNPRDIKHYAKGVACRGKTDSGDAQVIARYIAKEADNLHEHVARSPAQEQLHVLLQQRDSLVRNKATLHLSLGADAADSAIFGRIFSGLKEAIAMLDREIQRLCRSGEQRDLYRRIMTIPGIGPTVAAFVTHHITRWPLASSDAWVACTGLDPRPNESGARIGRRRLSKRGNASLRQILYMAAMGLTRSKGGKPLYLAIRERGHSSTPSFNILARKLARVAWGVFKSGQDFDPAMLKVGQTCFQQA

SEQ ID NO: 399241 - protein, 402 aa, unidentified
MQVSKKFTHFCGIDIAKDKHVACVIDRDGCKCIRPSSFANTAEGYQRLVDRLKDTAKASSVLIGMEATGHYWYSLHDFLSRCGYTVVVLNPIQTARQVAQAIRKCKTDKYDAVHIAALIRSGNYKPAAIPGELAMTCRQLTRLRYSMIQQYTRIKQLLWSRIHPVWPEYESLFANPFGKTGRTLLRIAPTPRNILQLDHNKLTEMIHKSSHGRFGQLKAQQIRDAAQTSIGMLRGQEGINAAINCLLDQIEALDPVRDGLETQITALAKQLPQYLFTLPGATLLNIVSLYGEVDPIETFKQPSQLVAFAGLDATVFQTGQYDAPQRHISKRGSPFLRKTLWQMAYRALQQEGDLRDFWFKKKRQNKHQFVAVTAVARKLCHVVWRIMIDRRDYIPKGYNPES

SEQ ID NO: 399242 - protein, 308 aa, unidentified
MTDDTIGVDISKDHLDAYRMSDGASRRFANDSAGHTAFVKWLDDAGLRIVYEPTGPYHRAFERRLAEAGFALVKVNPRQARRFAEATGRLAKTDRLDAAMLAHMGALLDLEARPVRSPVLNDLKDLSMARAALVKNRTAVKNRAKNLTLPILKRHNGEQLRQIERQLAAIEVEIRKLIKADPDLANRFDILVSIPGVSAITAFALIIDMPELGTLENTQAASLAGLAPVARQSGKWTGRAFIRGGRANVRQALYMPALVAMRFNPDFKAKYDQLKAAGKASKVAITAIMRRLLVLANALLRDQRKWAP

SEQ ID NO: 399243 - protein, 345 aa, unidentified
MLYVGLDLSRKRLDWQALDQAGEQVAVGAAPPDRDGLAQLARRLGDCEIVAVIESMSGARFVHDELERWGWDVRVADASKARGIAPLACKTDRIDCWVLAELARRDLVPEVWLPDAAVRAERERARFRLYLVRHRVSLKNRVHAILFQHGIPVAHSDLFGAAGRRTLERLRLPEPWQSTVCCSLELIDTLNTEIRDCERELKRLGADHPYVSRLVTCPGIGPVLAYTIASEIGDIARFQSPRKLVGYTGLCPRVDQSGERDRRGALRKNGPTYLRWALIEAAHVAVRCYPPYRELAETMRDRHGRARGGNIAAVETGRRLSEAIWHMLTNDQPFAPAGARYRLAA

SEQ ID NO: 399244 - protein, 312 aa, unidentified
MAKDTIGIDVSKDRLDTFWHSRAEACCLPNSPEGFGQLCDWLGKQEDVLIVFEATGAYHRGLERHLSLTGKPFIKVNPKQARRFAQAIGRLAKTDSVDARMLARMGVVLDLTPQAVEGEDVHDLRELLTARRALVKDQVTAKTRLATALNPLVREQLARRIEDIGADIQALDEVIAQIARQRGTLEERIRRLMTIPGIGRLTATTMLIDMPELGYLESKKITALAGLAPMTQQSGKWQGKERITGGRASIRRAIYMPALVAIRFNRDLHDKYQQLLKAGKAKKVAITAIMRRIIILANTLLRERRDWLPERP

SEQ ID NO: 399245 - protein, 323 aa, unidentified
MQGKVLPEARSANPVYVGIDVCKDHLDVYLHPLALSRRITNSKDGLRRLKRLLGEHPVHLIVMEATGKHHRLAHRSLSQSGLAVAVVNPLRSHLFAKAIGMQAKTDRVDARMLAILGEALGPAARPPAPEAIEALQELVQAHNAATAEHTALVNRHAASQTTFLRTELTRQLKSFDRHLERLAAEIAKRIAADPVLARRQEILLSIPGVGHTVAANLLANLAELGSLDRRAVAALVGVAPFADDSGETTGLRHISGGRASPRRALYWAALSASRCNPEFRTFYKRLVDSGKKPKVALTAIMRKLIVMANSLLKDDRLWAPQHA

SEQ ID NO: 399246 - protein, 357 aa, unidentified
MTTTTTAARTILALDLGKYKSVACLYTGDPATATFLTFVTDCDRLHKLVAKHRPDAVVIEACLLAGWVHDLCHEVGLPCHVANTASEAWKFKHQKRKTDRDDALRLAQLFALGQLPTVTVPPPATRQWRALIAGRQRLVGRRVAVQNRVRAILVGQGLAAPRGAKAWTELGLEGIGQFAKPLADCGPDELWRGLLDLALTELRQVRQLADQAEARLDELAQASGAVQLLETVPGVGPRTAEAIVAHLHEPGRFDSGKQVSAYVGLVPRQYQSGESDRRGRITRRGPALLRKLLVECAWVMLRYNPWARAVYQRLSRGKARKKQAIVALARKLLVRCWAMLRDQTPWRDSPAAEAAPA

SEQ ID NO: 399247 - protein, 436 aa, unidentified
MEEVEDEPLFAERVAGIDIGKAAVMVTIRVPGDGGRRRRQQETREFRAVRKDLLALADWLRCWQVTKVGMEATGDYWKPVYFLLEQAGFDCVLYHASQVKALPGRPETDKLDSVWLARITGRGSLPGSFVPPEDIRRLRTHTRYRRHLTQARTAEKERCEKLLEDAHLKLSSVIRDIHGVSGRDMLTAIIAGERNPRTLAQLARGRMRVRIRELEQALDCSFFTQEHAFILAMMLANIDHLTAQVSELSARIEVLCEPYARQIAQLDGIPGLGIITAQDIIAETGTGMTVFATAGHLCSWARQAPQVSQSAGKRKGKNATGRGNPYTGAAPGEAAIGAGRTQTFPGARYRRLVRHMPRKKAQGAIARTQLVIAHALLSDPGAEYEDPGTGYYERRADIRRRARDHVRSLERPGYKVTIESLSPDPETGELPITQAS

SEQ ID NO: 399248 - protein, 364 aa, unidentified
MTAAQAGRQAASSTVEVVGGVDTHKDTHTAAAVDTAGRVLGSAQFPTDAAGYRALLRWLRGFGTLLLVGVEGTGVYGAGLARSLAAQVVAMVEVDRPDRKARRWQGKSDPVDAEAAARAALARVRTGVPKQRDGRVEALRALRVARRSAVGQRADVQRQIKALIVTAPESLRAQLRKLPDRELIEVCADLRPDRADADDPGTATKIALRSLARRHRRLSVEVADLDELLGPLVAQINPGLLALKGVGAEVAGQLLVTAGENADRLTNEAAFAMLCGVAPLPASSGKTTRHRLNRGGDRAANCALWRIVITRMGTDQRTKKYVARRTTEGLAKPEIIRCLKRYVAREVFLALQSASTEKRPANAA

SEQ ID NO: 399249 - protein, 405 aa, unidentified
MEIIIEKGCGLDVHKGTVVACIMGTGIKKEIRTYTTVTNDLLRLKEWIQEAGITHVAMESTGIYWKPVFNILEDSFEVILVNARHVKNVPGRKTDVQDSEWLCRLLRSGLVSGSFIPPRDIRELRDLTRHKRKLIQAMTAEKQRVEKVLEDANIKLASIASDTFGASGKKIIEELIRGELKAEEMAELSKGRLRRKRGDLKEALVGQVREHHKFMIKVSLKHIRAMEKILSEIERKIQEKIDRRYKEEYALLQTIPGVKGEASTLIAEMGVDMERFPSEGHLSSWAGMSPGNNESGGKKKPGSTTYGNKCLKTMLTEFAWVASKTKDTYLRSKYHSLVGRKGKKKALVALGHKILIMCYHILKYRCPYRELGVNYLDQRRKDKIARSYIKRLNHLGYEVILQEAA

SEQ ID NO: 399250 - protein, 437 aa, unidentified
MEEVTDEPLYRDRVCGIDIGKAGMAATIRVPSDKDPARRAAETRSFGTTRREVLALADWLRCWQVPAVVMEASGDYWKGPFYRLEAEGFECVLADAKQVKNLPGRPKHDPGDSRWLAACLERGAVTSCFVATPEFRIIRLHTRYRRDLTEERTREKQRAEKLLESAAIKLSSVVTDLHGVTGRDIMDHLIAGERSPKVLAQLARARARRKISELEEALEGAEFFTAEHAALLAAMLARIDRVNAEIARLSEVIETLLEPYEEQLQQAESMPGWGRRAAEDALAETGTDMTRFRTGAHLASWAGRTPLDNSSGKRKGKAKSKKGNRYLGGLLGETAIAAGKTQTREGARYRRLARRRGKAKALVAVGNTQLKVYHALLSSPGTRYEDLGPDYYERRAEVSRQVRHHVGKLGALGFDVTLCRIPEPGPEPGGTGNSQTA

SEQ ID NO: 399251 - protein, 352 aa, unidentified
MKYVGLDWAYRTAQWCALDPGGEIAGEGRFAADRDGLARLVLELGDEVEACLEMMSGALWARDELVACGWQVQVADARKVKTVAPLAAKTDKVDARLLAELSRRQLVPALWLPSLDDRELRERLRRRMHLVRLRTSAKGRIFGLQTQWGIRISLRRLRRADGMTLLERAGMPAVWRHSISECLALIDFLDARIVPLDAELRPFAQADPRAVLLDTIPGVAGLLALTIAVEIGEISRFAGPEKLVSYGRLAPRVRQSGEGRPHTGPLNKSGSRLLGWAAVEAAQQAWRESNPWHQLYLDVSRRSRNHNSAKAAVARKILIAAWHMLSRNEPFKPAPRTGATSVPASSRLALAA

SEQ ID NO: 399252 - protein, 330 aa, unidentified
MAHIGIDVSKNKLDCMWVRDLEAGKVKPKVFPNRQDQYPELLRWLQRNTGEAPETLQVYLEATGIYHEPLAYWLHEQGVRVHVLNPAQVRFHAQGMGVRNKTDRKDSMMLARYGIERAPRRWQPEPPEVRELKRLLSRLEALEEDIRREENRLEKAQFSEDTLAQASIDNVLQALREEHRRLQQQIDDHFDAHDHLKRDRALLESIPGIGRVLSASMTAALRSRAFTSARQAAAFHGLVPVLQESGTSVQRPPRLAKAGSGRLRKTLYMAAVVATRYNPDVRRQYHRLLRRGKAKMAAIGAAMRKLLHIAFGVLKSQTPYQPRNDTPCTS

SEQ ID NO: 399253 - protein, 430 aa, unidentified
MSFKTRASLISYFLESGDFMIDLLQYLFVGIDVSKENNQVYAMNFSQEKLASFSTPNHQSGASFLEEKLLDILDRHHLSKIIIAMESTGIYSAHIATYLSASKFLFPFDVKVYVLNPKISRNYRHSFSDMDKTDPKDAYILSDLARVGRCNQLTPFKGPQKIALQRLTRHRHHIAELLAKEKVYALNNVFLKFSEFKGILSNDFSKTAVELLLNYKSVDEIIDVPLEDLVDFVMTSSKNRFADSNQIALTLKAAARNSYRLDKMAYEPINLSLAASFNCISTYQTELKSIDAAILKQVKGLNQNHYLSLISIPGIGPVYASGILAEIGQIDQFDSDDALAKYAGITWRKSQSGNFDAEDTRMTKTGNVYLRYFITEAANMARIHNPVFNEYYQKKFDEVKTHQHKRALALTARKLIRLIFGLLSTDRLYK

SEQ ID NO: 399254 - protein, 457 aa, unidentified
MQDASDSQTRELEGLPVIRRQVAGIDLGSERHWVCAPKVDGNGREVTSFGATTSELVRMAEWFQARHVECVAMESTGVYWIAPHEILEAKGFEVLLVDTRQIARDLGHNKKNDPTDCEWIQRLHSCGLLAASFRPKEDICMLRTLVRDKATLVAESGDWVRRMQKSLDQMNVRVHRAVSDLDGVTGMAIIRAIVEGERDPRKLAQLRDWRCRKSEDQIAEQLGGHWRKDHLFSLQQSLKMYDAIQDRIAAYDQEILRKLAEMGKGMPAGGSVPPVKNPQKARAIQKRGEEVMRQALYRMSGVDLTQIDAIGVETVQIVLSEYGPDLSRFPTENQFVSHITLAPKVPKSAGKPLKKKKRNSASTRVAAALRMAALSLRRSSTALGAYYRNVARRIGADVAVFATARKLATLIYRLLRWGKPYVDEGEEAFERRYQQARIKSLEARAKSLGYQLTPTAA

SEQ ID NO: 399255 - protein, 386 aa, unidentified
MSVIVGVDIAKSKFDYRIITEVNDRLSKGSCQMTHEGFHEFIADPNITKGTMFIMESTGPYHIPLFKFLNDGGYDVHCVNPLLIKKQVMADSLRKTKTDSADALSIAKYGRLHYDMLREQKSRMDDEVKAIARRRQQIAEDISRTKTQLKADLAVAWPEFLSLYVFTDSLLNFLSCYGCPEDVLSATDEDISAALFSKDRGRGLSFGVEDIRKLACGSIGVSYRSDMVKDSAEKLIQLNAREKKLSQALYAHEREVHSKEIEILTSVPGIGRTTACQFMAEIEDIRKFSSYQKLIAFAGTDPGIYQSGQQLTTGHITKHGNASLRRVVYIMATRCTQYNAVIGSYYSKKRTEGFSHRKAMVATANKMLKILYVLLSRGEKFQTQTT

SEQ ID NO: 399256 - protein, 408 aa, unidentified
MPVVYPVCCGIEVHQAQLTACLRRVSPEGQITTERRDFRTTYAELLALSDWLMESHCPVVAMESTGVYWRPVYHVLAGTVEVLVGHARERRPRPGKKPDPADATWIAELLAHGLIRPSFVPPPMISALRDLTRTRVALVQTRTQAKNRVHKVLEDTKVKLSSVVSDLFGVSGRRMLAAFSAGERDANPLAALALGKLRRKLPQLELALAGQCTAHHARLIQGALDLIDLLDRQIAELDQQIGALVHPLRPQITQLDRIPGVDETAARDIVAEIGTDRSRCGAASRLASWASLCPGNNESAGKRRHGRTRKGNRYLRRVLVQCAWAARKTPTFLGRTFRRLEARLGGKKAAIAVAHKIVVLAYHRLAEGTVYDEQRYAHVQPRQEEQWRRRAVKALERLGYQVVLEKVA

SEQ ID NO: 399257 - protein, 353 aa, unidentified
MDKYIGLDMDCKKTVGYTIVPGQSESSATFGPDIESIRRYFRQERKGGYQLHAAFEISGQAGFLYDALLDEVDSLHVANPTKMTWIYRTAKKNDRIDARKMAVLLSINELPEVYMPSREVRQWRQTILHRQKVVQKVGQVKNRLRAALKSEGYGKPAHRGSWWKHANRVWMEQLCDDCVDIGSLWRLQVQNLLDELSLLETQRDRITKYLDGYLDKQSAAKLLMSIPGVGPRTAEAVLAYTDGIERFSNYKKYCAYFGVTPKLDESGSFRRLGHISKQGPAVVRWLLCESGWKVVRHCPGLRAFYERVMAGQQSRKKIAIIALTRKLLCIMRAMLMTGELFNEKLVIEVLKAA

SEQ ID NO: 399258 - protein, 331 aa, unidentified
MKISEVIGIDVSKLVVDVRIHCNQMYCQVKNSSKSFKKMVKWCFKNSPHPDGEIIFVFEHTGLYSHNLAVYLTEQKIPFHMVPGLEIKRSLGIARGKDDKVDATKIARYGYRLREEIRPYRMPSQEVESLKRLLSLRERLVKHRSGFKVSYKEQKRVLVQKENKTLFETQEKMIKYLSKQIDKVEKEMSSIVKSHERLKRQYDLITGITSVGPQTALSIIAFTAGFTKFKNSRKFASYCGIAPFPNTSGTSLKGRPKVSHLANKKIKSLLDQCAKNAIIHNHEMKIYYDKRLDEGKQKMSTINVVRNKLLARIFAVITRNTPYVNTMKYAA

SEQ ID NO: 399259 - protein, 313 aa, unidentified
MKKVSTIAARASRNISQPTLIIGFDLGDRNSWYCVLDESGQIQLEQRVRTNAKALREVFSKMPRSRIALEIGTHSPWISRLLSELGHEVIVANARKVRLIGESRKKDDRLDAQTLARLARIDPELLYPVKHRSAQAQADLMTIRARAGLVRARTALVNTARGLAKSYGERLHGGNVRNMNPEKAEGLSPELQAALEPLLNAIESLSERIVEYNDRIENLAQQRYPQVALLKQIKGVGTLIALTYMLTLEDPHRFRKSRDVGCYLGLQPGRRNSGQSEPQLHISKEGDPYLRTLLVQGAQHILKPFNINCDLRR

SEQ ID NO: 399260 - protein, 334 aa, unidentified
MKKRYFMGIDVAKATFDFCLFSSNGSRLWKGHFSNNSTGIEEYLSQLQARPLKLKQIHFGLEATGVYGKALVGALHQAGLAVSVLNPAQVRFFALSVLRRTKNDSLDAEIIARFCLERKPPATRPLRSIEEQLKVLVHERDSRVAEQGRERNRAKQDPFQLELPKLVSRQRQKRLTQLKKEISQLNNAIFELIEADQSLGRQSQLLCSIPGIAQLTAAKLLAEFAGKEFASARQLAAYAGLSPAERRSGGTFYGQTHLSKIGNAFLRKALYMPAAVARRWCAALKPWVALLERRKLHDLAIRGAIMRKLLHIAFGVLKHQQPFNPALVFIPKTV

SEQ ID NO: 399261 - protein, 366 aa, unidentified
MKKISTVQTFKSEIFKDQKLTIGVDLGDRWSFYCVLDEAGKIILEQKVPTTLEAMKQTFSRMPQSRIALETGTHSPWVSRLLTELGHEAIVAHAQKVQLITKSNRKDDRHDARTLARLARIDPELLGPVRHRSVQAQIHLTVIRARAELVSARTALVNAARGLVKSYGERLPKCGTQQVNRELAAALSTELRDVLEPLLREIESLNERIKEYDERMEKIAKEVYPEVSLLKQVKGVGTQIALTYVLTIENPQRFLKSREVGCFLGLKPGRRNSGESEPQKGISKAGDRYLRTMMVQGAHYILGPFGEDSDLRRWGLKLAERGGKNAKKRAVVAVARKLAVLLHRLWVSGEVYEPLRNSQKAMRAVA

SEQ ID NO: 399262 - protein, 392 aa, unidentified
MIYIGIDVAKSKHDCCILNQDGETLSTFVFTNDKPGFEKLLAEIGIYSSEDDLSDARIGLESTGHYSINLQNYLLQKRLYVRIYNPLSVNLLRKAQSLRKTKTDKSDCKFLAILLFSDDSKSYSQTVLPVSELRNLTRSRHRLVAMRSKLKLSLSRLVTVLFPELPGVVWSVNQKSCYALLSEFPTAKNIASANIVRLTNLLSANSHGRYGRTKAEQIRSLARNSIGLDSRAVGFELQQTIRLIQNIQTEIDLLDAEIKKIMREVSSPVLSIPGIGFVLGAILISEIGNIENFSSPAKLLAFAGLEPAIHQSGQYNANFTPTVKRGSTYLRWALMQAARLVAYRDPTFSAYLKKKLAEGKHFYVALTHVAKKLVRVVFHLLKTNQYFAPQFG

SEQ ID NO: 399263 - protein, 347 aa, unidentified
MPYHAQEEIQVFAGIDVSARALNVAWSRPEKDKETTATFTNTRSGHKALIAFLLRGNQHVRVCLEVTGNYSLDLALALHAHGQFEINVVNPRRARRFAESLGERSKTDPVDAHVLCEYARRMPWVPWQPPSSTALHLRAVMRAVEDLTSILTQEKNREHALAASQALPALVLTELKRHQRYLQNRLVRLRREALQLVARDPQLSRRFQLMQTTPGIGENSALQILGELAVLPDTLDARQWVAFSGLDPRRFKSGTSVEQRPRISRSGSRHLRRALYMPALVALRHDPHLGSFYQHLLEHGKARLQAVVAIMRKLLHAFFAMFRSDQPYDGSRLCPFELANKPVASCG

SEQ ID NO: 399264 - protein, 326 aa, unidentified
MQIAVSFFGADVGKAEIVVADHGRAKPVTKILKNTPSSLSKWLQTLPPGSVLAMESTGGYERMLADLAHERGLKVYVLNPKALHHYAKSQGQRGKTDRLDAIMIARFIASEHERLHPYQPCAQYIERLRQMLRLRRMAVITRTQLRLSSERHHQVHDAQAQVQKALDALTELANSLEDQMLAEIQAEPALAQDFKLLTSIVGVGNLTATALVTTFARIPFTSSDAVVAYAGLDPRPKESGAYIGMRKLSKQGDAILRSLAYNAATAAARSITFKPMYQALLAKGWATTQALNIIARKLLRIAFGVWKSRKPFERELFLANQACVKP

SEQ ID NO: 399265 - protein, 411 aa, unidentified
MDVLHERCAGLDVHQETVVCCVLVSEPGGRCRKEFRTFGTMTADLEALRDWLRERGVSHVAMESTGVFWKPVYAVLEGHVEIVVGNAQHIRNVPGRKTDIKDAEWLGQLLRHGLIRASFVPPPEFRELRELLRFRRGMVQDGVRLRNRMIRRLEGAGIKLAAVASDVFGVSGRAMLRALIDGTQSPAEMADLARRRMRGKLPALAQALDGRLSDSDRFLLDLDLKQLERLEADLSVLDERIEGKMAPYREQQRRLMAIPGVDAVAAATILAEVGIDMAVFGTAKRLAAWAGVCPGNRESAGKTKAAATRKGNPHLKAALFTAAASAVRKKGSYYKAKYDRLKARQGAKRALMAIAHKILVAVFQMLSRNESFQDLGEAYLDRLAEKRVTLRLVERLNALGYQVELKPKAAA

SEQ ID NO: 399266 - protein, 410 aa, unidentified
METIAERCCGLDVHQAVVVACTLVGDAGKRTHKEIRRFGTMTADLARLRAWLAEQGITHVAMEATGIYWVPVYAALEGGFELIVGNAAHMKNVPGRKTDVKDSEWIAHLARHGLIRKSFVPPKDLRELRELLRYRVKLVQSRTAERNRLQRLLETVNIKLASVMSDVFGVSGRAMLAAIVKQDYVAADVAELARGTLKKKTEALRLALDGRIEDHQRFMLGVQLRRLDQVEADITAIDGQLDTRLEPYREQFDRLLTIPGVDRLVAATIIAELGVNMEIFPSEQHAAAWAGVCPGNHESAGRNKRQPVRKGNVHLVTALVQAAVCASRAQNTYLRAKYWKLAPRLGKKRAAMAIAHKILIAAYYMLDRGVNYADLGDAYLDKRNTTATRRALVKRLERMGYSVSLEEKAA

SEQ ID NO: 399267 - protein, 339 aa, unidentified
MKINVLGIDLGKSSFHLFGVDEHGQVVLRQKMTRRKLREFMVNLPPCLVGMEACGGAHYWARVFKGHGHRVRLMSPQFVKPYVKSNKNDFLDAEAICEAVTRPTMRFVPIKSVEQQDIQSLHRARELALSHRNAQANQLRGLLLEYGLVVPQGIGKLRKRLPEILEDAENGLSDATRSLLAALGEELVRLDARVGEFDRQIKAFSQGHEVCRRLMSIPGIGPLIATALLAAVGDASVFKSGREMAAWLGIVPRQRTTGGRAVLLGISKRGDTYLRTLLIHGARAVLRVAHKRDDKRSRWVVALQGRRGPNVAAVALANKNVRTAWALLTRGTTFEVQAA

SEQ ID NO: 399268 - protein, 360 aa, unidentified
MQRKINENSFNGQSFYVGIDYHKKSWKVTILGEKYEHKTMSQNPDPKILANYLKRNFPGGNYQAVYEAGFSGFNACRKLRELGINCIVIHPADVPTNQKERLQKTDKVDSRKLARSLRSGEFEAIHIPDNKLEADRALVRQRFRLVKDISRTKNRVKSLLFQFGIDIPGRFTSQQTRHWSKVYINWLKELPIEQESLKLTLDNYLRIGEIQRKELLTINRQIRILSKTEYYQNNCRLLLCIPGIGLMTAITLLVELGDIKRFKRLDELCNFIGLVPSMYGSGEKMETGKIIKRGRKALKILLIEASWQAVRKDPALMMKFNELTTTMKKNKAIIRIARKMLSRIRHVLVHQEEYELAVVQ

SEQ ID NO: 399269 - protein, 390 aa, unidentified
MPTTTTGNSHRAPHDHRGVMVWTAPYGIECARMRLLQSQTREPSVNQIIRIGMDTSKHIFQLHGVDSAERPVLRRKLRRSEVLAFFAKLPPTVIGMEACGAAHYWARELRKLGHEVKLMAPQHVKAYVKRNKNDGRDAEGLCEAMSRPTMQFVPVKTEEQQAALMLAGVRQQLIARRTQLSNAIRGYAAEFGLTTAKGLDKIEPLLTRIALDETVPALARELLAIHGQDYARLQIELKAIEVKLMAWHRANACSRRLAQIPGVGPIGATALVMKTPDPRAFRSGRHFAAWLGLTPKDHSTAGKTRLGKITRAGDEMLRSLLVAGATAVIQQVRRGRGRPSAWLLALLKRKPPKLAAVALANKVARIAWKLMTTGESYDGARMPGAQAFAA

SEQ ID NO: 399270 - protein, 357 aa, unidentified
MSYIGVDLHSDKFTAAFRDKTNKDILKSYYIDENEIDNFKKGLKKNDYIFIEASTPTFAFTDLLKDRVKKTIVIDPFKFRAIADSRKKTDKIDAKQLARMGKYHIEGDKKFLPEVYVVEKRIRKLRSLFTTYRLLNKEITMIKNRIHSLFKQNLKPYSKKHIFDEIMTGLKPIDLDEEYKIQVEVLFDVLSKLEEKKSEIKKKILLTGEPFIADIDILVSISGISVFVALGLISDYATIERFKNAKQFSKYLRSTPKSEESNKKVKTGKTQKNGRKLSIELMLQSINHFRRESLFIDKFYRRLKKGKGGCKARIAVVRKMFVAIYFMLREREYYRYMNKKLHDKKMREYKRFLAKNK

SEQ ID NO: 399271 - protein, 389 aa, unidentified
MKIYVGIDIAKLNHFAAAISSDGEIIIEPFKFTNDADGFQLLVSKLESFDKNSLIIGLESTAHYGDNLVRYLVAEFYQVCVLNPIKTCQMRKNNVRKTKTDKVDTFVIAKTLMMQDDLRFITFFDLDMMDLKALGRFRQKTIKQRTRLKIQLTTYVDQVFPEIQYFFKSGLHQNAVYALLKEAPSPKEIASMHMTHLANLLKVNSHGHFTKEQAKELRVLAQKSVGANDSAISIQITQTIQQIELLDSQLEKIEAEMTDIMKFNDSVIMTIPGIGYINGGMILGEIGDIHRFSNPNKLLAFAGLDPSVYQSGNFQAKTTRMSKRGSRVLRYALVNAAWNVVRNNATFKAYYDAKRAEGRSHYNALGHCAGKLVRVIWKMLTDEVEFNLE

SEQ ID NO: 399272 - protein, 336 aa, unidentified
MKKFSFFIGVDVSKLTLDVAIINGSEPGSIHHSTFSNTKTGISDLLAWVKKNSSKVKEDLIFCMEHTGVYVLPLCSTLSDKKLLYTLIPALEIKRSIGIQRGKSDKSDSKLIAQYAYLRKESITITTIPDKALLKLRHLITHRDRVMRCKVMFENTKDTELFSDKDTVSTLKKETKLVLSFLRKQVDHLDRQLEKIIKEDPVTNHQYELITSIPGIGLQIAANVIAYTRAFTVFDDPRKFACYSGIAPFPYQSGSSIRGRTKVSHLANKKMKSLLSMSALLVVRNDAEMRLYYDRKVKEGKNKMLVMNAVRNKVVQRIFAVIKRDSPFVPLAKHAA

SEQ ID NO: 399273 - protein, 413 aa, unidentified
MIYCGIDWAERHHDVALVNNTGELLAKRRITDDAAGYQLLMDLLAEYGDTEDAPIPIAIETSRGLLVAVLRTGKRQVFAINPMAAARYRDRHSVSRKKSDPGDALVLANILRTDMHAHRPLPQDSDLARAIAVLARAQQDATWNRQQNSNQLHSLLREYYPSALDAFATWQNGLCRREARELLRLAPTPSQAARLSRTQIQAALKRAGRKRGIEAEADRIRDVFRAEWAHQPPLVENALGKQMLALLIQLEAACTAADDLAKAVEEAFPQHPDAEVILSFPGLGVQLGARVLAEIGDDRSRFADARGLKAYAGASPITRASGKKSSITRRRVKNDRLNHAGYLWAFAAPNGSPGAKAHYRRRRDVHGDWHAAALRNLFNRMLGQLYCCLQEHTLFDELVAFPAPALEAEKAAA

SEQ ID NO: 399274 - protein, 313 aa, unidentified
MAQIAPHVGIDCSQDRLDVHIYPLSIEFSVTNDAAGWFELERRLAEASANIVGLEASGGCERDVCRFLLDHEFSVRRLNAYRVRMLAKAGGHLAKNDRIDAAVIARFVATIPTHPLVRLKHLDRLVELVRARSRLIDERTKLTNQQRQHEDALLRRMDKSRAIRLKAYILVLDRHIADVVEAQSDLKAKKEILRSMKGIGPVSAHALLALLPELGQLTAKQIAALVGVAPFDDDSGKRRGVRSIQGGRTELRNILYMAALTAARHNPVLKAFYDRLRAAGKEAKVALIAVVRKMITILNALVRDGVNWQSAAA

SEQ ID NO: 399275 - protein, 361 aa, unidentified
MQSTTIIAFDQHAATTMAAVLLPGHRTPALHPLTSDAATIGRFVTRFQRHGAVRCCYEAGPCGFELQRTLTAQHVPCEVIAPALIPRRPGDRVKTDRRDAGQLAVLYRADALTAIHIPTDQEEAARDLLRCREDIRTDLLRVRHRLAKFLLRHGRRFTGTKKAWSQRHHAWLRAQTWPLPALAQTHQAYLRAVDETMARLRTVEEDLRGLLDLEPLRTRVQRLRCFRGIDDLTALTIAAELGDPRRFARAPQLMAYVGLVPSEHSSGTKRARGGITKTGNAHVRRVLIESAWHYRHHPFVGRALCARQRGAPPSVVAQAWAAQQRLYRRYRRYAARGKRNQLIVAAVARELTGFVWAALIR

SEQ ID NO: 399276 - protein, 392 aa, unidentified
MKKNNTVVQSVTKPNQRSAKKSVDESPGKKARKEAKEAPGTLTIGIDLGDKTSRYCVLNGSGEVSKEGGVPTSKKGMLELFGAQPRCRIAMEVGTHSPWVSRLLSQLGHEVIVANARQVKLISESSRKDDRLDARMLARLARVDPALLRPVRHRSEQAQLHLLEIRARAALIEVRTSLVNSARGLAKALGERLPKCDADQMGVEQMKSLPAGAQETLRPLLEEVASLTKQIYVYNERIEQIARTDYPETKLLQQVSGVGILIALTFVLTVEDASRFEHSRDVGCYVGLRPKRSDSGESQPQLRITKEGDSYLRKMLVQGAHYILGKRGPDTDLKRWGLKLAAHGGKNGKKRAIVAVARKLAVLLHRLWVTGEVYEPLRHSNAPEARKKQVAA

SEQ ID NO: 399277 - protein, 383 aa, unidentified
MTDYNAFVGLDVHKDTIAVAVADAGRAGKVRFWGEIANTPDAVASMLRKLGGRHSRIHFVYEAGPCGYGIHRQIMATQHHCEVVSPAQTPRKPGDRIKTDRRDAIILARLSRAGELTSVWVPDETHEAMRDLIRLRQAMVKDLRAARQRVKSFLLRHGRVFKGTSWKRSHRIWLGNQSFEHPAQQIAFQSYLNAVDQAQARRDEVDVQIRQFAAEWSMAPVVEALQALRGVAFTTAVTVVCEVGDIRRFAKPRQLMAFLGLVPGERSSGETRRQGGITKAGNVLARAVLIEAAWAYRTPAKIGAQMMLRQEGILAGCERHRMESSGSPVWPLSPLDGARQEVSAGHHGGGAGTGRLYLGHRPYDRAVRSQRCGVIHIQRRSPP

SEQ ID NO: 399278 - protein, 330 aa, unidentified
MKKWNYTIGIDVSKNTLDIHCAEINQHIQIKNGTEGFRVFLKWCNTHKIILNQSFMIMEYTGGYEYKLIQFCESKQIQYSRIPGLEIKRSMGITRGKTDQVDAGRIAQYGEEKHKQLTPDRPLNKGIIKLKELLGFRKRIVRELGGYKASLKERKAMYPELKKDLICKTLESKIKENEKVVAKFDKELMDEIHKDEAMKTNYELIRSIKGIGMVNALMTIAYTENFVGFTNPRSYAVYVGVVPFDYSSGTSIKGRKRVSSIANKELKQELSQAARSAIQWDPELKSYATRKMANKSYGVVLNKIKFKLILRIFAVVKRQEMYVDNYKNAA

SEQ ID NO: 399279 - protein, 387 aa, unidentified
MPQLNDLSRSLVALEQDATLIAVIEMGQSSWLVAGIVPGIDRQPLKKLTADQDGLLQLLHRWRNEAVQAGRTIKRIAVAYEAGRDGFWLARWLRAREIEAYVIHASSVPVSREHRRAKTDRLDTELLKRAFLGWLRGEPKHCSMAAIPTLEDEDARRPSRERESLVKECTRIVNRVKANLARLGIRGFRPSLAKASRQLETLRTPEDAAVPANTLAELRRDINRLCFVRQQIKEIETTRAKRLERAARQGRDAMVQLLARVVGVGVETADMLVQEVFSRNLRDRKAVARYAGLTGAPDESGQKRRERGLAKAGNARVRRGMIQLAWGHLLHQRDSALADWYRKRTADARGGTRKTMIVALARKLLIALWRLATTGEAPAGLLLRPTE

SEQ ID NO: 399280 - protein, 437 aa, unidentified
MEVRVIRRLVGVDLGIASAHTVRVLTEDGREVCRRRCEPTVDSLRRVETAALAGAPAGTVLEVVMEPTGPAWLPIAVFFKARGHRVFRVSSGKAADLRRFLSRHAKSNGIDADTLARLPLVDPAGLYPLELPGTEAAALDRRVRATDRLTVLAAQHKVRIKDLTRQLLPCSPLTGDLGVADLAVLERWADPRALLAAGPARLTALIVKASNGHLGADRAQQWRAAAAAAVELYGDHPAIAWTDLAAEVGTEVRLLRATQAELAAHARERETAYRYADLGGLPRSLPGVGDVGGPVLVAGMGRPGRFPNGAAFKSYTGLAPRAAETGNTDRKGQPMSKAGSSLLRTTLIRAADTARKQDPQLARIYYTQMVERGAEHLKAVCVVAGALAERIWTVMNRQMPYVICDIDGTPVHPGTGETDHRAELHRPRRGPPPAPQQ

SEQ ID NO: 399281 - protein, 441 aa, unidentified
MSHATVVTPEPAWAAFIGLDWGSQKHAWILEPAGGGKCERGVVESTPEAIADWAADLGRRFGSLPVAVALEQKRGSVVNLLLSYPHLVLFPVPASMSAAYRKTFVPSGAKDDPSDAALILDLLLRHRDRLRRLQPDNVDTRLLLMLVEDRRQLVDDKTRLTLRLQDCLKQYFPQMVKWFEVNTALVADLLQRWPDLQHLQRCHDGTLRTFFRQHCYGEELTAKRIDAIRAAVPATNDPAVLEAGSTKARHLSESIATLRTQITRLERRRNELVAQHPDAPIFASFPGAGPATVPRLIAAFGTLRDRYRSAFEVQCDSGIAPVHIRSGKIDLVSMRRACQEFTRQTFHEFAGQSILRCQWAKDCYQAHCKKPGQHHAAVRSLAFKWIRILFRCWKNRKPYDEELYLTSKRRRSALVGPALASVNELKWNTVAGFSKLSEKRA

SEQ ID NO: 399282 - protein, 372 aa, unidentified
MDEYSEVFIGMDVSKSRIAVALAEVGRAGEVRFVGEIEANEAAVTKLVRRLSAKYGKLMFCYEAGPTGYGLYRLIGELGHGCLIVAPSLIPRKPGDRVKTNRRDAVSLARLLRAGKLTRIWTPDERHEAMRDLTRARSAAAADLRVKRQQTGAFLLRLGRIYPGKKTWGGQHWKWLTGQAFAHLEQRIVFDELQATGEARARVVRLERAIEEALPDWSLAPTVTAVMAMRGFDLVAATTILSEAGDLGRFETPRQLMAWLGLVPSEASTGDRVRRFGITKAGNSRARRAMIESAWCYRHPARVGPAKRARVEAAPPAAQSIAWKAQTRLTARYRALIRKGKLKTVAVTAIARELTGFVWAIHRALGAEPIAA

SEQ ID NO: 399283 - protein, 343 aa, unidentified
MQTITTIGLDIAKSVFQVHGVDNDGKVVIRRQLKRRYVLAFFEKLQPCLVGIEACASSHHWSRELQALGHTVRLMPPAYVKPYVKRQKNDAADAEAICEAVTRTNMRFVPIKTPEQQSGLMLHRTRHLFIRQQTSVINAIRAHLAEFGVTAAVGRKGIDELLRVIADPSDKRVPDVVRACLAALGSQLLSLKKQILDFDRMIMAWHRSNQTSKRLNCIPGVGPLLATALVASVADPKTFRSGRNFSAWIGLVPKQHSSGGRDRLGSISKQGDRYLRSLFVAGALAVIRYAKIHGTKYRPWVAALLARRPTKVAAIALANKLARMAWAMMARGERYNYPASLRV

SEQ ID NO: 399284 - protein, 457 aa, unidentified
MRFERVLTRWPPLRLARVVPLSTYRSVSFALAFTRPCLLRGRCVVGVVRWSGRAIGLDVHREFCEVAICEDGVVRSAGRVKTTPEALRVLAGSLIATDRVALEVTGGAWEVARILEPHAERVIVVSPDDTGIAQARAKTDKLDSRTLARLLASGELDAVWMPDERCRVLRRRLARREQLVRSRSRAKNEVHAVLMRRLQGKPPCSDLFGVKGRKWLRSLELPEEETETVRGAMRHIEFLDREIVAVERLIAASMLRSQDARRLLTVPGVNLIAAGTFLAAIGDITRFRNARALVAYLGLDPKVRQSGEEPARSGRISKRGSAAARWALVEATWSVVKQPGPLRAFYQRIRARRGHGRAIVAAARKLAMLFWCLLSRGEDYAHQQPSLTAKKLRRLELAAGASVLKGRPTGVWVTNEKMRAAERQLAEQAEASYQRAVRDWQAATPTKVGASVTPGHA

SEQ ID NO: 399285 - protein, 359 aa, unidentified
MMVIVNPINLKREETVMKITTVGLDLAKNVFHAVCFDEHSKEVKKRMLRRNQLRSFFTQLPPCKVGMEACASSHYWGRELKALGHEVKLIPAQHVKPYLLGNKNDFNDARAIAEALTRPHIRGVALKTTEQQDIQATHRMRSQCLRDRTALCNSVRGLLSEYGIVLGKGIPILRKSIHGLLEDAENGLSLIFRNLLARRYEQLVELDGHIDFFTRELEIQSRQDDACQRLQEIPGYGPIIASAFYSTVGNGEGYSRGRDVAASIGLVPGQHSTGGKNVLLGISKRGDGYLRGLLIHGARAVVIHASKKKDQLSQWINRIVTDRGKNKAAVAVANKMARIGWAVLRNNSHYQAALTVSSL

SEQ ID NO: 399286 - protein, 419 aa, unidentified
MSFKIFKFNCCGLDVHKTWIYACIGITDSNNRTEYKQARFSSFSKGLHQLCVWLAKYNCNDVCMESTGKYWIPVFNILEQHKIRVTLSHPKYTKPMKGNKTDRKDAKWICDLYMCGMVKPSFIPPADIRELRDLVRYRFKLTCMITGEKNRAQNCLTVSNLKLDDVFSDVFGKSSRSITEQILQHPGEKFDVSPFVDSRCKTPIEEIQAAVDGNISKEQDVKLRQCLDHIDELNKHISEVEQEILRLSDKYEAALNLIRTVPGFDKNPMTAIQVLSEIGGDMSVFPTAKHLVSWAGCCPRNDKSDRKIKSTRISCAGSYFKPVLVQIANALIKSKKHFEFTTRYKRIKTRRGHKKAIIARCRMILTAIWHILTDLKPYTSDGFLESRPVKKEKVLTTSQALNLLRQRGYLIKDEPSPVS

SEQ ID NO: 399287 - protein, 405 aa, unidentified
MIDWSAAKHDICVLNENGGVIATTVVPHTADGLLKLEALRQKLGVAPAECLVGIETAHTLVIDFLWARDYSHIYVIPPNVVKSTRGRYRQSGARTDTSDALLVADLLRTDLARLHPWRPDSLLTHQLRNRVGLVSHLTQTAVRLSNRLYAVLMRYYGAGLTIFSGLQTQIALQFLLAYPTPTAADALTFAQFKTFATEQHYPHPHKLAAAFARLKDAHPVSTAQTITVFEAEMQQLAQLLLEVVQAKRSHVRELQLLFNQHPDSSIFSSLPGAADILAPALLTKFGDDRQRFPNAESVQALAGTCPVTEQSGKRRVISFRTACDHDLRAIVQQWAKASLKHSAWAQAYWQQTRPQCRSDSHGYRCLGNRWLAIAWKLWQTHTPYDEAYHLQQRLKRQQPRPAEHQ

SEQ ID NO: 399288 - protein, 340 aa, unidentified
MGDITTIGLDLAKNVFQVHAVDVAGSVVLRKRLRRGQVLTFFAGLPPCLIGLEACATAHHWARELIALGHEPRLMSPSYVKAYVKRNKHDVADAEAICEAVRRPSMRFVPLKTAEQQSALMMHRARDLLIRQRTMLVNALRGHLAEFGFVEAQGLHKVARLIAIVMDEMDGRVPDIARQVLKVIVSQIKDIQTRIAGLETQVLAWHKSNPVSQRLATIPGIGPIIATAIAATVVDPNIFRSGREFAAWLGLVPRQNSTGGKARLGGISKRGDSYLRRLLVNSAHTVLLCSKAAKADPWLRSLLSRKPRLVVAVALANKTARVAWAIMSRSDIYRHATVAA

SEQ ID NO: 399289 - protein, 351 aa, unidentified
MRTSQKVTGIVTTIGIDIGKNTFHLVGFDQRGAIILQQKVSRSQLERRVANIPRCVIGMEACSGSHHIGRQLAEIGHDVRLIPAQYVKPFLKGHKNDYRDAEAIAEAVQRPTMHFVTIKTPEQMDLLALHRVRSRLVGRRTGVINQIRGFLIERGITVRQGPMPLRKALSEILSSDTGALSPRMVGLIADLAQDWRRLDERIAAVSTEIEALAEQDHSCQRLMTVPGVGPIISSAVVAAIGNGTGFKQGRDFGAWLGLVPKQESTGDRTILGKISKRGNKYLRTLFVQAAHVVLERRPSAAMRGLWPWVEQASKRLHRNMLAIALANKLARIAWAVLARGGTYQPRITHAA

SEQ ID NO: 399290 - protein, 342 aa, unidentified
MSVSYVGVDLGSSTFHQVAINHSGAQTLNRELVTSEANLVKAFSDLHGEIHVHLEAGELAPWASEIIRPLVARVVCSHPQTNAWIARDRDKSDRIDAYKLASLLRLNEFKEVHYPREPLRRDFKALVQHYDELTQQQARWKTKLKARLRMQGIIVRGEEVFSGRGRKAVLEQVKSNVVRTAIKQLYAVLDQSIASQTEAQMLMLRAAQALPEIKILRTAPGMGPIGACRFSAYVHTPQRFSSTRKLWKYCRLSVSHRSSNGKPLRRPRLDRMGCGRLKDVSRKAFAAALRSRADNGFKRAYYRALETTHDATHARLTVQRKIVSTLRAMWINQTPYCDELMR

SEQ ID NO: 399291 - protein, 330 aa, unidentified
MVKNVFQVHGIDDNGEIAFNRALRRAQVLAFFERLEPCLVGIEACGASHHWARELIKLGHNVKLIPPAYVKPYVKRGKSDAVDAAAICEAVTRPTMRFVEVKTPEQQAILAVHRTRDLIVRQRTQTINMLRAQLAEFGLVLPQGAYHPLRFAKDCVDGEQPDLPKDAQEVVLDLCDELLFLHAKILRHSRHMTQIAKSEKRVALLRTMPGVGPIIASAIVATVGSGKQFNNGREFAAWLGLTPLNRSSDGKERLGHISKMGDQYIRRLLVLGMTSRIRSIRLEPEKFDPWFADILSRKPSRVAAVAMANKTARMIWAVLTRNEPYKVRTV

SEQ ID NO: 399292 - protein, 349 aa, unidentified
MRYYNSKHKYHCGVDLHSKAMYLCIVDSMGEIVLHRNFPANPEAFLKAVAPYKESLVVGCECTYSWYWLADVCQKEGIEFVLGHALYMKAIHGAKSKNDKIDSEKLARLLRGGMFPLAYVYPEEMRATRDLMRRRLFFVQKRSELMAHVQMTHHQYNLTAPKKSLVYRGNRNELELNFKDPSTNRMLESDLKMIEHYSEEIEKLEWFIPKTAKQNENNALLLALLQSVPGIGDILSLTLLYEIQDIARFPTQQHFCSYSRLVKPEKTSAGKTTGGGGKKIGNHHLKWAFSEAAVLMLAKSEEAKKYHKRLMKKGSKAKALSTMTHRLGKAVYFMLLRKEVFKPSFFFAH

SEQ ID NO: 399293 - protein, 428 aa, unidentified
MSGKETVQAEPEFVAFVGIDWADQKHVWCLQKANSRQREAGELEHRPEAVEAWVGELCRRFGYGPIAVAVEQVKGALVYMLRKYECLHLYPVPSTMSASMREALYPSGAKDDPRDADMLLELLVLHRDKLRRLTPDNEATRRVQNLVEERRKLVEEKTAQLNRLTGYLKVYFPQMLEWFAKLDSKLVCDFLERWPSLEELQKVPSAELKKFFRHRRGRHGELTEWRMQGIGQATPAIRDRAVIEAKQTVVQVIAQLLRTLLEGIATLERKIAEAAEVHPDFFIFQSLPGAGAALAPRLLAAFGSQRDRYSSAEEVQKYSGIAPVTERSGKKKWVHFRWACSKFLRQSFHEWAGHSIAQSVWARAYYQRQRERGKEHHAAVRALAFKWIRIVFRCWQDRVAYDETRYLAVLTKRGSHLTSAFVDVAVSM

SEQ ID NO: 399294 - protein, 365 aa, unidentified
MDARVVYADYDDGRPLVEAYDGPQIVGMDLHRRRSVLVRMTPEGRRLGTARISNSPAQLRKEIAKAGKCPEVVVEATLGWYWAVDALAAAGAKVHLAHPLGVKAFTYRRVKNDERDAADLADLLRMGRLPEAWIAPAEIRELRELTRYRLKLVQRRAGYKDQVHAVLAKLGIPVTCTDIFGVWGNTWLDGLALRQPYAGKVASLRTLISDLATEITLLDAVIADLLAGHDGYRALQALPGIGPVLAAVIVAEIGDIRRFSSAAKLCCWAGLTPRHRESDTKVTRGHITKQGSPILRWAVVEAIQHQPAGSPVRAVKDRIIARRGKEARNIAKTAAARHLLAAAFYTMRDGQARSLAARTAAQAAA

SEQ ID NO: 399295 - protein, 339 aa, unidentified
MQVTTVGLDLAKNIFHVHGVTETGEVAFNRPLRRAQVLAFFERLPPCLIGIEACASSHHWGRELTKLGHTVRLMPPMYVKPYVKRGKSDAVDAEAICEAVTRPTMRFVEIKSEDQQALLSLHRARDFVVRQRTQLINMLRSLAAEFGIAIARGVARAIDFAKGIIEGKQSGFPELAQDVLRVLSRQLVELHNRLRWYEITMRIQARLSRQAQLLQSIPGVGPVTASAVAATIGSGHQFKSGREFAAWLGLTPRNHSSGGKERLGKITKMGDRYLRQLIVVGMTSRVRQVTNHPERADPWLTKLLQRKPARFATVAMANKTARIMWAVLTRNEPYRPHTA

SEQ ID NO: 399296 - protein, 386 aa, unidentified
MQASTVAAPTAGHIGTIFVAIELSQRSWRVALHSPDKDKISHHKLEGGDHAELLALVGRVRERAARALGGVPAVASCYEAGYDGFWLHRLLLAAGITNYVFDPASIAVDQRARRVKTDRIDGERMLRTLMAYLRGEPRVVRIVRVPAAEQEDARRGSRERDRLIKEQTAHTNRIKALLRLRGMAVGNPRRRDWLSWLATQRDWQGQAVPPRMLSEIRHEHARLMLVRDRLDALAQEAAAAEPMPAEAEMTRRSELLRRLKCLGPAFATTLTSEVFYKDFRNRREVGSYFGLTPSPWRSGGIDRDQGISKAGNPRARCAAIELAWLWLRHQPDSKLTLEYRKRTLDAGKRIKRVAIVALARKLMVALWRYLTTGLVPEGAVLKAVKI

SEQ ID NO: 399297 - protein, 408 aa, unidentified
MNTLYVGIDVSSKSNVIYLMLPNGDKHSNFSVANSHEGSTQLVKRILSALTSHSLDTVLIGLEATSVYGDNLVYFLREDATLAPFNRKIHVLNPKQVKKFHDTYNDLPKNDYVDSFVIADCLRFGRINKEVYMGDYRYKALQNLTRARFFAVQNLVKEKQRFMNVLFKKYSTMTQEKVFSDTFSTTALAVYDEFESAEALANMDLHELTDFIIEKGKNRFPDPDAVAKAIQKAARSSYRLPKTVNDSVNQVLSISITSMKALESQIKEFDKAIIALMELLPNVLISIPGIGPVYSAGIMAEIGDINRFDNQASLAKYAGLAWKQHQSGGFEAEVTRLIPSGNRFLKYYLCEAAFSLVRCDKEYSDFYHLKYKEVNRCQHKRALALTARKFVRLVFRLLKDNRLYCPAK

SEQ ID NO: 399298 - protein, 418 aa, unidentified
MQKHNNSGKKSEPTSKRTKLRGPVQRDTKEVLAEVLGKLSGKLSAPAELTRAKENRRGNTVGPNRDRLTVGVDLGDRWSQYCILGLAGETLAEGQLRTTQEDVREFFQALTAARVVLEVGTHSAWVQDVIAERGHEVLVANPRLMEGSKRRKRKSDRIDAHKLARLGRVDPQSLYPIRHRSREVGQDLVVLRARDALVSVRTELINTARGLVKSMGTRLPRCSSPSFAEKVKDAIPVEVREALLPLVQLTEAVNDCIARYDQKIEELGQKKYGHTTLLRQVKGVGPITSLAYVLTLENPQRFASSRDVGPYLGLVPKQEDSGDSQPQLGISKTGDRMLRRLLVGSAQYMLGAFGPDSDLRRYGLRLCERGGKNAKKRAVVAVARKLAVLLHRLWVTGDVYEPLHHTGAETRTAQATAA

SEQ ID NO: 399299 - protein, 453 aa, unidentified
MAKTKKARKHRKLDRSLPEMRPNAGGIDIGATEVFVAVPADRATDSVRSFPTFTQDLHELAEWLQECRVDTVAMESTGVYWIPLFQILEARGIEVHLVNAQHVHHVPGRKSDVLDCQWLQYLHSVGLLKASFRPEQAVCEIRSLMRHRQNLVEMSGVHVQHMHKSLDQMNLQIHHVISDITGVTGLAIVDAIVAGKTNPKELVQLRDHRIKASVETVTKSLVGDYRPEHIFTLKQSLTAYRHYQQLIADCDQEVQQRIQTFNRDDGPIAPAPVDSSNSKTATPPKFDLNSNLERIFGVDLTRIPGFDSRLIQIIFSELGVDLLSKFATGDRFCSWLNLCPKDGSSAGRRIRGPKIRTKNRVAQCFRLAAHCLHHNQSYLGDYYRSQRARHGAVKAIKNVAHKLARIFFHVVTTGQPYDETVFAKLDACHQKRRLHKIQSQAKQMGYSLIPANA

SEQ ID NO: 399300 - protein, 350 aa, unidentified
MKNLKYAVGIDVSMKDFACCLSVINEQQEVKVKATHKFINAPAGFQLLLAWIRKHSKEVLPVVFVMEATGVYHESLAWFLHSRDQPISILLPNKAKSYLKANGAKSKNDSIDAKGLAQIGAEKKLDLWLPPSKQLYTLRAYTRQYQSITEMHTSMRNQLHSVQHGQFQNKEIIKQLKQTIKLLEKQLKEMEQIMANVIKTDTVLNQHYQNISSIKGISLLSFAVIAAETNGFILFDNAASLVSYAGYDVVENQSGKQNGRTRISKKGNSRIRRILHMPALCAVRNDQPQFKNLYERVYERTKIKMKGYVAVQRKLLITMYYLWKKEVPYDPTFNIKNNSPENSGLHVINP

SEQ ID NO: 399301 - protein, 342 aa, unidentified
MNKVAIAAIDLGKHSFHLHAQDDRGHELCRKKFNRVTLIQYLANLESCTVVMEACGGAHFMAQEAAKLGHTPKLIAPHLVRPYVKSNKNDFADAEAICEAATRPTMRFVPPKTQAQQALAMSNSIRESFIKDRTATVNRIHAALLEVGVSLAAGFKAIKELPALLEVSSFSERIKKNLMLLHGHFNYLDGQVKALDKDVECQAAEDDLAARLMTMPCVGPITSTVLAAELGDGKQFKCGRGYAASIGLVPKQHSTGGKTVLLGISKRGDRNQRRLLIQCARVYLIQVDRQKGALADWVRQLIASHHHSNLVVCALANKLARIAWAIAAHHTEFDAGPAAMNA

SEQ ID NO: 399302 - protein, 340 aa, unidentified
MKIETIGLDLAKSVFQVHGVGADGKTELVKRLHRKRMLPFVSKLPPCLIGVEACAAAHHWARTLIAMGHEVRLMPPSYVTGYVKRGKSDALDAEAICEAVQRPTMRFVPVKTVEQQGILMAHRTRSLLVRQRTMAANALPAHLAEFGLVANPGVANLMKLADTTFSKEDQLPDYARTALEILIRRLVELTEEIQALDQALPAWHAENEASKRLAAIPGVGVITATAIAATVTDPGQFRSGRQFAAWLGLTPQQHATGGKTRFGGISKQGDRYLRRLLVVGATAVMRHAKDKTTPIAAWIRELLEGKSFRLVSVALANKLARIAWVVLTRGETYRPYGVAA

SEQ ID NO: 399303 - protein, 337 aa, unidentified
MEYYAGLDVSMEETHLCVLDRDGNVIREGKTWSIPAAIEAFLATGPACRQVVFETGRMAPMLYHGLTALGVPVVCIESRQAYQALKSLKTHKTDRNDARGLAHLARTGFYKPTHVKSLSAHAVRALLAARKKLVGQRVTLDNQIRGLAVVFGARLPRALSPAFKEAALKVSDGVTGLSAAMRGLFAAREAILAAVAAIDTDVKKMTRRSQVCRRLMTVPGVGPLTALAFAAAIDDPARFVRSREVGAYLGLVPRRYQSGEMDYTGRISKRGDVRLRTLLYEAANVMLTRYKASLKLKDWALSIAARSNMRKARVALARRLAVILHAMMRDGTEFRAA

SEQ ID NO: 399304 - protein, 356 aa, unidentified
MNVIHYIGLDVHKKTISYCIKTAAGQIVKEGTVAAERSVLRGWARSLPQPWHGAMEATIFSAWIYDTLKPYAQQLEMGHPAKMKAITAGKKKSDTIDARTIADLVRCNLLPGCYVFSPELRDLRRLMRYRHMMVQQSVRMHNKTAGLLMESGVSFQKTKLQGKKYFADLIKSLEEVPESVKDLLRISRGTKDMFESVQNQLVRRLLADPTLKQRVECLSSIDGVGAITALTWALEVGDPHRFASIADAVSYCGLTAAFRSSAGKQQRGPLSKQRNAWLQSTLIEAAKLAPRWSPQLAQLYAQHLERGHANRATLQVARKLVGYLLSVDKSGQPFQVRTPPKPIPTRKKARRRLAAA

SEQ ID NO: 399305 - protein, 344 aa, unidentified
MEQYVGIDVSLELSSVCVVDASGKILRELKVPSAPEALVQFFQHLEPAPVRIGLEAGPLSQWLFAGLVSAGLDVVLLETRHVKAALSAMPVKTDRKDARGIAQMVRMGWYRPVHCKTLAAQEIRALLVARKQLQAKLLDLELCIRGILRGFGLKLGVVTRSGFAARVRELVDGHPMLEQVAGPMLKARDALRTQFNTLHKQMLAFARRDAVCNRLMTVPGVGPQVALTFRSAVDDPSRFTRSKAVGAHFGLTPKKHQSGETDVTGSITRAGDAMVRTALYEAANVMLSHAARFSTLKRWAVDVAQRRGIRRAKVALARKLATVLHRIWVDGTTFRWGKEAARAA

SEQ ID NO: 399306 - protein, 349 aa, unidentified
MNRTTYGLDIAENVMQLHWVDTETGEIGRKKLVRAKLSEFFARLQPVRVAMEACGSAHHWARVLSSLGHQVELLPARQVRPFVRSNKDDAADARAIWVAAQQSDIRRVPLKSVAQQASLALHRSRQHWVSVRTATINALRGTLYEFGVTLAGGKHAGLKALTTHRAEIDAKIPATIQRLIDGQLATLKEIGRRIDELEAEIGVQQEQLEEAAKLRKVPGIGLLGATALAATLGDGGAWKSGREFSASLGLVPAHSGTGGKARVGHLSKRGDPYLRTLLIHGARAVIARAKHKPKWLEQLLARRPMNVAVAALAKKMARTTWALVAHGREYQREWKSTPPKGCTAQAAAA

SEQ ID NO: 399307 - protein, 344 aa, unidentified
MQVARIGLDLAKYVFEIYCVDAHGRTVIRKTLRRHAVLPFFANLPTCLVGMEASNGAHFWAKAISELGHDVRLISPQFVTPYVKSNKNDRNDAEAICEAVGRPNMRFVPVKSAEQLAVQAVHRIRSRLVADRVRLVNQVRGLLGEQGIAVAKDIGNLRRALARIVGDDECRALNPLVRALMGELREELTELDARIAGYDRKIRELYRNSEICQRLGKVEGIGPVTATALVAAVGDRSSFKNGRQFAAWLGLVPKQRSSGGRARLFGISKRGDRYLRTLLIHGARSALGRVRDKQDPRSLWLGRMRQRRHPNVVAVALANKNARIAWSLLTSDSVYDARLSVRAA

SEQ ID NO: 399308 - protein, 431 aa, unidentified
MKKLSSEPPAQPIVAFVGIDWADQKHDIVWSAATSAAATEHQVVANRPEALSQWVTEMRQRFGPHGRIAIFLEQSRGALIHHLMNYEGLVLYPINPLQMAHYRKAIKVSGDKHDRLDATLLCQFGRLHLDGLKPWQPDDALTRKLALLNEDRRQAIEKRSALANELKSALKIYYPLALELLDNDTSTLLAADLVLHWPTLEVLQKQSQSKLRRFFYAHNCRREQKMLQRLELIQQAQPMIRDSAIIEAAALKVQLLTQQLKSLLPYIALYEKQIAQLFDSHPDGFLFSDLPGAGPALGPRLLTAFGSNRDRFGSSTEAATTFGIAPIRDSSGKRTPKQPGTVCYRHACPKFLRQSWHEFAACSIRSCPWADAYYDAQRAKGKSHHTAVRALAFKWIRIAYACWKNRTPNDPNRYELALAQRGSPFAPTTAQ

SEQ ID NO: 399309 - protein, 422 aa, unidentified
MSYCPVAGIDVSKQFSDMCILSPDNKIFAQEKIYHDETSINRANALLQKAERLFFSKPVIVMESTSHYHLILFQFFSEHGYDVIVVNPLQSNSMKDFSIRKRKTDRVDAFKLAMMYRTKTLRPSQIPQTATRALRQLCRHRAELLNDVSSYKNRLTALLDQTFPGYDKVFSDVGGVTSCAVLVRFPTPTILLVEEESELVEVIAAASKSGYSFAKKKAGLLISAAQKAQTLGIHSCADETLIVCTIQMLRTLSESVLQIETAIDNLLAQIKEMRNNVSLLQSIPGVGSHSAALLLGEIGDISLFKKPKQLAAYFGLDPTERQSGSFRGTKNKLSKRGFPYARAALHMGVVNSICKRGKDSAANPVLLSYYEKKCKNKPAKVAQAASMHKLVFIVFAVLRDQMPFELKTPEQHAVEQGFVKAA

SEQ ID NO: 399310 - protein, 414 aa, unidentified
MDVLHSRCCGLDVHKSSISACILLREAGRVQKHQRRFGAMTQELQELAEWLRQFGVSQVAMESSGVYWKPVWNILEGQFTVVLANAQHIKNVPGRKTDQKDAEWIAQLLQYGLLRPSYVPCEIIRDLRDLTRMRASLSQEASRLSSRIQKVLEDANVKLASVATNVLGKSGRAMLEDIISGEDDAEHLASLALGHLRVKIPQLRLALEGKIRPHHRFLLRRLLDQVQFVEHEIALLDQRLEEIAQQRPELSQAVARWDTIPGIDRVAAWALLAEIGDNMAQFPTAEHLASWAALCPGNHESAGKRLRGTTRQGSPWLCRMACQCAWAAARTKNTYLSSQFRRLAARRGKKRAIIAVAHTIIVIGYHLQKNQSNYEDLGGNYFDRIHSDGLKRYLVKRLQQLGHKVTLEPMEAAA

SEQ ID NO: 399311 - protein, 402 aa, unidentified
MNCVGIDVSHGKSIIVVMRPFGEVVVSPFEVLHTDSELSKLAGLLKSLDGETRVVMESTGYHHTPVAWLLHDAGLYVSVVNAMLVHDYGNNSLKRAKTDKKDAVKLANCGLDHWLTLPRYVPEEDTRLMLKTCYRKYQQYSKVQTMLKNNLISLLDIAFPDANRLFTSPPRADGSEKWVDFVAAFWHCECVCNLSEKAFTAKYHKWCRKHRYKFCEDKTLDIYSSACGHFGVIPKTDTAKLLVEQAVFQIRATSTTLAALKQEMQSLAASLPEYPVVMGMFGIGPALGPPLMAEIGDVRRFHSKKALVAVAGIDAPPYQFGQMDVRSHSISKRGSASLRRTLFLVMSVILQRAPMNEPIYQFMNKKRSEGKPYRVYMMASANKFLRIYYASVKAYLDSAEHN

SEQ ID NO: 399312 - protein, 432 aa, unidentified
MEKIRENAAGIDIGAKQVFVYVEGQKVKAFFTFTEDFEELVRYLLSHNVETVAMEATGVYWYILYELLEQANIDVWLVDGRETKQVPGRKTDVKDCQWIQQLHSHGLLKRCFVATEEIKELRSYQRLREDHIRSASMHINHMQKALTQMNIRLKEVINQIHGVSGMKVIKAILDGERNTETLLQLCDKRIIKNKGQDVLKALNGRYTKASLFSLKQAYDAYNFYQQQIAQCDEQIENVIKKINQGTKNQPLDKKRKPIRHNAPRVKDLGSSMLNIFEGRDATVIAGITDYTWMQLLSETGRDLKRWPTEKHFTSWLGLAPGQNWSGKKRRNKKKKGSPKAGQIFRTIAQGLINSKKIAIGAFGRKLRARKGPAIAIKAMARKIAELYWKVINKGIEYAEAGIKKYEDQIVKNKQKSLRRLAKELNLKVIELE

SEQ ID NO: 399313 - protein, 338 aa, unidentified
MKDIKYFIGLDVHKERTSYCVRDKLGNILIEAETATLYSELKPRLRPYLAYSLIALEASTSYYTLYQTFLKKGYRIKVANTIQLRQLIAKNDKLDAQRLSEMLRLGTLPCSYIPEERIQHLRSMVQMRHALMQEKVRCNNRIQAFLDRNGIVMPPVKAFSKKWKHALMQHLGTGNASMELRYEYNHYVYLEKTNEQADQEIIGYTQTYWKLEYNLLRSITGFGVLLPCYVIAFVHPIERFLSNRKLRRYAGVIPLSKESGDTTSPGRIPKTTSKALLRWALVQAANTIGKTNTRLGRYYRRKKNQKKKSGIAKIAVASTLVDIIYKVLTTKKPYVSTC

SEQ ID NO: 399314 - protein, 341 aa, unidentified
MSELALVGIDLGKHSFHLHGQDKLGRELFRKKLSRQQMMRFFSNLPACTVVMEACAGAHFVARQLLAMGHQAKLISPQFVRPFVKGNKNDFVDAEAICEAASRPSMRFVSPKTEAQQTLSVLHRLRESLVRDRTKSVNQLHGFLLEFGISLPKGLAIMKRLSSVLAEHELPVRLTALLQRLHAHFVYLDEQIKTLDKELAAQLAEDDLGRRLLGMPCVGPITASLLAVEMGDGKQYGCSRDFAASIGLVPRQYSTGGRANLLGISKRGDKNLRRLLVQCARVYMQRLEQQTGPLADWVRSLLMRRHSNVVACALANKLARIAWAMSVRHTEFAAEPGTLNA

SEQ ID NO: 399315 - protein, 462 aa, unidentified
MKRKPSGGKAVPLKKSASPQQSINTQTHPDAAGIDVGAEEFVVAVPPGRCEEPVRTFASFTSGVLALRDWLLECGIKTAAMESTGNYWITLYDVLTLAGIEVYLVNARHVKGVPGKKTDVCDAQWLQQLHAAGLLRKSFRPALEIVPLRFLMRHRAEMVGDAAKQLQLMQKSLTEMNLKLQHVFSDIDGMSAQAIIDAIIAGERDPKKLATLRDKRCRSSVEDIIEALRGDYREEYLFVLAQSQKTYRQLRESIAACDEKLGELAARVECEVSGPLPAVPKNQRQVGKNSPQFAVFETAWKFCGVDLGGVPVISAGLLCALISEVGTREQLLAAFPTPERFASWMGLCPDNRISGGKVLKAKTRKVQSRLAAAFRLGVFGLQRSQTQMGGYLRRMKGKLGKAEGTTAAAHKLARIVHGMIKSQKPYDEKEAFKLSSQSEARRRKALEKQAAALGFVLHPAAA

SEQ ID NO: 399316 - protein, 333 aa, unidentified
MIDALGRHLVDRAFPATGAGYRNLEAWLRSYGTGAAVGVEGTRAHGAELARNLTRSGLEVVEFDRSDRKTRRLRGTSDPIDAYAAASAVASGRATGTPKRRDGIAEAIRALRVPLRSALEARTQAINQARQLLVAAPEAPQAPLRDRSWFALAHACARLRPTDLIDPIGATKAALRHLGRRILNLSHEVEAPNTALQELTARAAPELLALQRVGPDVAGQLLATTGDNPDRLRSDAAFAHLCGVAPIPASTGRKDRHRLNRGGDRAASRALHTIVLTRMSWDPRTRAYVEGRTQQGLSKKEIMRCLERYVAREVYQTLTTPPNTAGPKPAMPA

SEQ ID NO: 399317 - protein, 393 aa, unidentified
MICVGIDVAKDKHDCFILSSEGEVLADVFTIQNNAEGFDTLLQTIRRCVCPGDKIKVGLEATGHYSYNILGFLLDKGLDTYVINPLHTNLYRKSLSLRKTKTDRVDARTIAAMLMSDVDLKSYTDTVYHNEELKSLTRYRFDKVRERAKLKQSVSRLVTILFPELEKLVPSLHMASVYALLSEFPGAKQVAGAHLTHLKAVLYDASKGRYGRDMATTLREAARCSVGSVMPTKSLELQHTIRLIRELDAEIEDIEAAIQSMMDEMQSPITTIPGIGVRMGAMILAEIGDFSRFDSPDKILAYAGMSPSTYQSGQLSLSGAYSHMEKRGSRYLRYALYNATKYVCLWDPVFAAYLAKKRTEGKHYNVALSHAAKKLVRLIYAMEKSRQSYRNAA

SEQ ID NO: 399318 - protein, 343 aa, unidentified
MQSISTIGLDIAKSVFQVHGVDAAGQVVIRRQLKRRFVHSFFEKLPPCLVGIEACASSHYWSRELQALGHTVRLMPPGYVKPYVKRQKNDTTDAEAICEAVTRPNMRFVPTKTIEQQSCLMLHRARHLFIRQQTAVINSIRAYLAEFGIVAPVGRRGVEQLLEVVADKAEDRIPEVARMCLAALGEQLCALKARILEFDRHIIAWHRSNATSQRLDAIPGVGPALATALVASIADPKAFRSGRDFSAWVGLVPKQSSSGGKDRLGSITKQGDRYLRSLFTAGALAVIRYAKIHGPDHRPWLTRLLARRPAKVAAIALANKLARIAWAMMARNERYQEPAALAA

SEQ ID NO: 399319 - protein, 337 aa, unidentified
MKTQPILKAESSFIGIDYHKRYSVFCVLEAQGMILERGASITSARSNLYRWCGDAPGCRVVFEACMNWHWLLEILEEAMPREDIVLANPFKTRIIAEAQIKTDKVDARILADLLRANLIAKVHICGKATRELKEMLRQRCFFVRQRTMVRNRIHRLLGAQHEVKLPQCSDLFGRKGLSFLEKLELPAPASLLLTQQLALLKELAVRIHEDEKALAGLLQETPALNYVRSLPGMGPILAAVVVSEIDGIERFPSAQKLCGYAGLCPSTHSSGGKTFQANCYDIATNGSVGPLSRRLGLPSVARPTSGTSTNASERLARSPTSQSWLPRVYWLESPGSS

SEQ ID NO: 399320 - protein, 404 aa, unidentified
MTKNERVVIGGVDTHKNVHVAAVIDDRGKILDTSQFATTSAGYRQLLKWLRSFGELAKVGVEGTGSYGAGLHSFLASEGVEVLEVNRPNRQMRRRRGKSDTVDAEAAARSALNGEATVVPKSHDGIVESIRALRVAFTSARNSRTRVALQIRDLIVTAPAQLRADIEPLSTVQRVTRCARYRPGDPADPREATKLALRSLSRRYEALTEEMDELSAVLDQLTYKANPALRAARGVGVDVAAILLVAAGDNPERLRNESSFAALCGVSPVQASSGMVVRHRLNRSGNRQANNALWRIAVVRITHDEETKVYAARRLAEGKTKREIIRCLKRHIAREMFAHLTNPAVVPVGTELRTARNAAKISLTTASSELGTYPLRISRLERGLDHDREFAEQYQAWLAQKKAA

SEQ ID NO: 399321 - protein, 373 aa, unidentified
MNYNTVYVGMDVHKETFSLCCYTNEKELAEYSQKVDAHYSKVLNYLEAMRFHYGDDVMFICGYEAGCLGFTLYHQLTSHNVKCIILAPTTMSKPTGRKKVKTDKRDAALIARCLAHHDYSPVHILTEQDEQVKEYIRMRQDHKLALKKIKQQILAFCLRHNYRYDTTKSHWTQAHLTWLRSLEPEGLYQEILTEYLATYDQLTDKLERLDKRIEELASKEDYQENVSHLSCLLGVKTQTALSTLVEVGDFKRFASAQQFASYLGLTPGEDSSGEDQNRLGITKAGNSHIRTLLVEAAQSYTHGKPGYKSKALKARQKGNPADIIAYADKANERLRRRYYQLVLGQNKKANVAKTAVARELACFIWGMMTDNIH

SEQ ID NO: 399322 - protein, 342 aa, unidentified
MKHIAIDLGGRESQVCIRNSDGTIVLEGKHPTDKLEELLKSQEPSRVIIETSAEAFAVADGAKRGSHEPRVVPSALSRVLGVGDRRTKTDERDARALSEVSVRLENLPSVHIPSQTARERRSLCTAREALVSARTQLVNSVRGYLRTQLVRITSGKTETFPRRVRQRLEARSEGLPAMIERLLLAVESLNEQIKAADQELETIAEQDEVCSRLMSMPGVGPVTAIRFVAALDRIDRFENAHKVEAYLGLTPGENSSSERQQRTGITKAGPPRLRWTLTQAAWSLWRTRPKDKNVLWAQEVAKRRGKGVAIVALSRKLAGILFALWRDGTTYDSSYQLNRSEA

SEQ ID NO: 399323 - protein, 440 aa, unidentified
MTKTYYIGLDVHKETIAIAYAAGGAREDAVYHGPCGGSVLSAERALRKLAEKLNVEFTSLKVCYEAGPTGFVLARRLIRYGLDCVLMSPSKTERKPNEKIKTDKRDACKIARLFRNGDITPVRIPPVLDEAVRDVCRARTDASDDLSRAKQRLNAFLLRNGFNYSGKSKWTPAHLRYLRELVMPHDAHKFVLEEYMQAIDTGIERVARLVDRMKQLLLGWEWEAVVRALMACKGFQEVAAMTVISELGDLRRFSHPRALMSFLGVVPGENSSGPKHRQGSITKCGNSHCRWMLVECAQHFRKAPKVGSALTTRQIGQSKEVKELSWRMQNRLHKRYVKLKARGKNENKAIVAIARELSAFIWELQVKLNLPIPGTAAPAPANSDAGRHHGAAAPDPAELRQLDPASSPLNPPRGTSPLPSPRGGGGRPSKKPLPNTGAPL

SEQ ID NO: 399324 - protein, 343 aa, unidentified
MDHFAGLDVSVKETSVCIVDDTGRISREVKVASEPDALLAVLTNPAYHLKRIGLEAGPLSQWLFSALAEAGLPVICVETRHMRAVLKAQINKTDRNDARGIAQMMRAGLYRPVHVKTLRSQKLRMLLTHRKLLQSKAIAIENDLRATLRNFGLKVGVVGTVKFEARIKELVENVPDLVVLVEPLLIVRRALREQVGILHRRLLAIVRDDDVCRRLMTVPGVGPVVALTYRATVDVPARFKNSKAVGAVFGLTPSKYQSGESDRTGGISRCGDEMMRAMLYEAAQIVLVRSTKWSWLKAWAMKIARHRGMKKAIVALARRLAVIMHRIWVDGTEFRWTREAAAA

SEQ ID NO: 399325 - protein, 531 aa, unidentified
MVKTGKTRTKKPRSRSQKFKKAVLGRPQGAIQKRVQSVGPEKFGIVAVDCAKARSKWMLTDFYGNILNSPTNVEHDRSSFQLAMLTLKQAIEKHDLKDLIVAVEMTGTYHKPPMRAFRKAGYETRLVHPFASSFYRQPEHGDDKTDDNDLDAIFRAAVNGFGLMEKPVDAIHHQLQILARHRRDLVKKRSKLQCQIRHHLEQGLPGFGALFGSDDLWKQVTPIPLLQAIAKHGGTVDVVKQAGQKGVTKWLDDAKIRFHKATIERVIVWAANATEPDPMAIFHTRVWTSQLDDWTQKTQQIAAIERDLAGVLVNTPYVLLLSHPGINVVTAAELAGEMGPIENYASARAVCGRAGLFPSRYQSDEVDRTGRLTRFRNAKLRAAWMMIADNMCKCNRYWMVKAEKWKSEGHKSQDIRCRIANRMTRIVFKMVSGRQLYKHPSRLDRGYVMDKLLVFLREHNTSPAIIVRDLKHAADQLPKSGLIDEGTKLQEAALKAQRSRRKEPQELGTLLVAVLARLGIAAKDDDALEST

SEQ ID NO: 399326 - protein, 422 aa, unidentified
MNEDVFYERCAGIDVHKKFLVVCLRVGRKTEVRNFGTLTHEIRDMVAWLKANFCQMAAMESSGSYWKPIYNIFEQEGLPVMVCNAHHIKNVPGRKTDVNDAQWIAKCLSQGMLNPSFVPGREQRELRDMTRFRKSQMEERARNINRLQKFLEGANVKLGSWLSDVEGKSATLLLELVIGKPDFTVGDVATCMHGTMKSTAKELFLSLEGYMTPTQREFFAHIMAVIREQTAQIERTDAMIQRSLSENYKAAVEALDAIPGIGKVSAEQIIAETGTDMSHFKNQHSLSKWAGVCPGNNESGGKRKSGKTPPGNKTLKSTLAQCAKSAKKNKNSFFNAQYNRLVTHRGKNRATMAVAHSLVIAIYFVLCGNQFKDLGADYYMQFNREKKINSHVKQLSKLGVTIPDNILQDFLLRPPDSKERVA

SEQ ID NO: 399327 - protein, 337 aa, unidentified
MAEVTFPQLIQRACGIDVHLKVVVATIDGAGIQRETRSFKTFTSSLNELKEWLLSNGVTHVGMESTGVYWKPVYKVLEDSIPNVWIVNARHIKNVPGHKTDKMDSEWICKLLLAGLLKPSYIPPKEQRQLRDLTRYRNKLIQQIASEKNRMMRILEDCNIKLSSVVSNTSGATATSLIDMLCEGKVLTLDDINSVYHGKLSASPEELLEACTGFVEEHHIYLLQMIRKDIDQTQTLVDDLSERIKRLLSKYENVLELLREIPGFSTKVVEDLVSEIGLDMSHFPSEKHLSSWAGLSPGNNESAGKKKSARITHGNKQVKAVITEAAWAATRTKNTFF

SEQ ID NO: 399328 - protein, 344 aa, unidentified
MQNDTLVAVDLAKSVFQVAVSHHPGQVSKNRRLSRTQFAEFLAQLPKATIVMEACGSAHFWARRMQALHHTPVLLSPHTVTPYVGRNKTDRNDTKGMLEAHRNEEIRPVPVKTLAQQALCSLHRIRAGWIAERTARINTLRGLLREFGIAIPVGAQHAVPNAWLHIEDAESELPDSIRPALAEICTEIRELERRIKMIETQLAALAAQTPAVARLMTIPGIGLIIATALVAFVGDIHRFPSARHFASYLGLTPKEHSTGSRRRLGAISKQGDVFLRTLLIHGARSVLNAATRHKTPDRLHAWARSRHAARGHNKAATAVANKIARIVWAVWKRDQPFHSVPVAA

SEQ ID NO: 399329 - protein, 386 aa, unidentified
MQKAITYVGLDVHKDSIVVSLAEAGLRGRLREVREYGKVLNTPAALKAMATKLAAGGNELRFCYEAGPCGYGVQRQLSAMGHHCAVVAPSLVPRKPGERIKTDRRDAAKLAKLHRASELTPVWVPDPAHEAMRDLVRARLAAVRNIREARQQLSGFLLRNGYHYHRHPWTLMHRRWMADLKFDQPLHYIVLQDCIAAVEASEQRRDRLEAGIIAALPEWSLAPLVETLQALRGIALVSATTLVAELGDIARFSNPRQLMAYLGLVPSEHSSGRSRRQGGITKAGNAAARRMLIEAAWSYRFPARISRYQLSQQKRLPKLIRDIAWKAQERLCRRHRTLMRAGKPKTVVCAAIARELTGFVWAIATETSPANGKKGTGKPATMGAVS

SEQ ID NO: 399330 - protein, 435 aa, unidentified
MNVRFIGIDVHKKRAEVCILDAAGQVVLRTPVAIERGYLESFARSTLQPTDRVALEATTNSWAVARILKPFVAEVVVSNPMATKAIASAKVKTDKVDALVLGQLLRCDYLPRVWEPDEATQQLRELTGRRAALVGQRTAVRNRIHSTLAVRLIVEPERELFGGGGREWLARVEVDAQARLLIDVELTLHDAIETQLATLDAELARRGYVDARVKLLMTLPGVSVAVAQTLLAAFGEVSRFPDGDRAASYLGLVPRVRQSADKCYRGPISKAGNSQARWMLVQAAQCVARHPGPLGHFFRKLAKKKNHNVAVVATARKLAVIAWHMLTKNEPYRYAQPASTEAKLAKLRIAATGTRRRGGTTKGAKKVAARLPGGSKRVKPLAEVYEAEGLPPSSPPPKGEARTVEYPGVAEYAASLLRERLKSRRPEAEPKADAG

SEQ ID NO: 399331 - protein, 391 aa, unidentified
MILVGIDVAKDKHDCFISNSDGEVLFDVFTITNTMDGFSELYEKISSVAEDLSKVKVGLEATGHYSYNILGFVLNKGLTTYVINPLHTNLFRKGQSLRKTKTDRIDARSIALMLLTDSSIEPYSLTSYHNEELKSLTRYRFTKVQERAKYKTSVARLVNILFPELEKLVPTLHQNSVYAMLSEFPGASHIASAHLTRLTHLLYVESKGHYGKDKAIEIREAARASIGSVMPAKSLELSHTISLINVLSIEIDEVEAEIKRIMDEISSPILSIPGISYRMGAMILAEIGDFDRFSSPDQILAYAGMSPSTYQSGQLTSSYAHMEKRGSKYLRYALFNATIYVCNWDPSFSAYLAKKRAEGKHYYVAITHAAKKLVRLIYALETSGERYRIAA

SEQ ID NO: 399332 - protein, 423 aa, unidentified
MKYAALRVLPEVPPGGVCAGIDWASADHAVCVVDMAGRVKDQFAAAHDRAGIAGLTARLGKNGAGEVAIERGDGVLVDTLLAAGLTVVVIGSRQVRNLRSRYGSSGAKDDRFDAFVLADTLRTDRARLRPLAPDSAATAALRATVRARKDLIAHRVGACNQLRAHLEEAFPGAARLFSRLDGPISLAFLAAFPSRQAAAALDEPAIAAWLATIPARGRTAPPGVLAARLAAAPPGTGHDPAQAALTAQLAGTVADLARRIRALDAQITAQLDAHPDAHVFTSLPRAGTLRAARLLAEIGDCRARYPDPASLAGIAGVAPVTRQSGTWISHEFRWNVNRQLRDALCDFADGSRHASAWAEAVYAAARARGKDHPHAIRILARAWVIVIWRCWHDGTAYDPAKHRALQAALAGQAASAGNHHPHR

SEQ ID NO: 399333 - protein, 370 aa, unidentified
MAPASTLFVGLDVHKETIAVAYVGEEREAEVVSLGTIGTRQKDIDALVRKLQGKGKRLHFVYEAGPCGYWLYRYLTKQNLKCWVVAPSQIPKKAGDRVKTDRRDAVQLARLLRSGDLSPVYIPSVEDEAIRDVVRAREDVLKDLKAAKVRLKAFLLRQDIRYEGRANWTAAHLRWLANVVCPTPAQQIVFQEYVRAVSEQTERLQRLEAELLPLVQTWRWAPVVAALQALRGVQFLAAVTLIAELGDLTRFETPRQLMSYLGLVPSEHSSGERRRQGSITKTGNSHARRVLVEGAWAYRYPAKVSRHLQLRLAKVPKAIQDISWKAQVRLCKRYRRLVARGKNVNQVVVAIAREMAAFVWALAREVQVAH

SEQ ID NO: 399334 - protein, 404 aa, unidentified
MIFVGVDWAEAHHDVCVLDEGGAVLGSRRVLDTLEGVRQLHELVADHAEEPGQVAVGIEKDRGLLVVSLVAAGYAVYAVNPLASSRFRDRHQVSGAKSDRGDARVLADMVRTDRHQLREVAGDSDLAEATKVLARAHQSAIWSRQRHLNQLRNALKDYYPGALEAFGTDLASNDAVAVLTAAPTPAAGRALGTGELEALLRKGGRQRNVAARARQLRDALCRGQLEQPGIVADAYGAVTASELRLIAAATAEVATLEEALSAAFEQHPDAKVVLSLPGLGTVLGARVLGEFGDDPNRYASAKSRRNYAGTSPVTRASGLSRVVLARVSRNRRLVATCDQWAFCALTSSPGARRYYDELRQRGKTHRVATRALGNRLVGILHGCLEDHVPYDEATAWRHRAQLAA

SEQ ID NO: 399335 - protein, 353 aa, unidentified
MFYIGIDIAKKNHEASIIDSSGKSLSKSISFPNSTKGIEKFNNFIAEFGVTTNNCIIGMEATGHYWISLFSYIVDLGFTCYVINPIQSDAFRKMYVRQTKNDSVDSFIIAQIMRFGEFSISNFSDENTFALRNLTRYRFALVDECSDWKRKLIAILDQVFPEYSSLFSNIYGVASKELLSKYPLPEDMLSIPAEELGDLLCKCSKGRLGINKAEEIQSCARETFGIKFAKRSFSFQIKQIISQISFLEEQLKEIEIEISCLLEDICPIITTITGIGSVLGASIVSEIGNISRFERANQLVAYAGLDTRVKQSGDFSATNTKLSKRGSPYLRRSIWLAATVAAFKDPALSIYYK

SEQ ID NO: 399336 - protein, 400 aa, unidentified
MLSIGIDVSKGKSTVCGMKPGGEIVYAPFEVQHTREGMSELVSLLRSSGEEVRAVLESTGSYHCPVVAALLENGIFVSVVNSLRMKRFCSQSIRKVKTDRIDAMQIALYGLAYWQELQPARLPEDTYRELQLLARQYYQMTSMLIKAKVDFNAICDQVLPGMQELMSDHAGRHKLSDFVLRYHHTAHILKMGETRFRKDYCKWAEKKGYRNHERMAALIFATAQNGIPVLPDAPSTQIVITEAIRVLHTVEASRDAILTQMQALAKTLPEYSLVREMPCIGDTLAPRLIAEIGDVRRFHSKRALIAYAGIDAPPYQSGKFRANNRHISKRGNRYLRKTGYEVMQSYVMHKPANDPIFTFIEKKRGEGKSGKLAMVAGLNKFLRVYYGKVTELYRSLPAIE

SEQ ID NO: 399337 - protein, 294 aa, unidentified
MSRDTKYIGMDVHKEAVVIAVRNSTGQLVMESIVETKASSLLQFIHGLQGELHVTWEEGTWAAWLYDLLKPHVHEVLVCNPRRNALLKEGSKNDKVDARKLSDLLRTGMLRPVYHGEHGLRTLRELARCYQTISQDQSRVMNRVKALYRGWGIGCAGTQVYAPRYRQEWLEKIEHAGVRRRAELLYQQMDSLQALRRTLRSELLAESRKHKASKLLRQIPCIGPIRAARLLALMQTPHRFRSKRQLWTYSGLGIETRDSAQYRFVRGQLQLAKKPQQIRGLKDPATLCCTSITL

SEQ ID NO: 399338 - protein, 336 aa, unidentified
MKLMPVGVDIAKNVMQVHFVNTDTGEMFNKALKREKFLEFFTNRSPCLIGMEACGGAHHWARQLMRLGHTVKLMPGEFVKAFNIRNKNDIADAQAIWRAVQQPGKAVAIKTEQQQAMLALHRIRSQLMKFRLMQTNALHGLLAEYGEVMRKGHSSLVRNVPDILARLSGRLPAALIDSLREQLGEVERTDTRIKDIERRIRELSKNDPGVKAISEIPGVGLLTATAAVASMGNADAFRSGREFASWVGLVPRQTGTGGKIQLLGISKRGDKYLRKLLVNGAHSVIQNAREPGPWVTDLLKRRPINVASVALANKMARIIWAVLAHGRPYRKEAALN

SEQ ID NO: 399339 - protein, 345 aa, unidentified
MEQISRIGMDTSKHIFQLHGVNTAEEPVLRKKLRRKEMFAFLEKLAPTVIAIEACGASHHCARLLRSFGHSVKLIAPQLVKPYIKRGKNDAADAEALCEAMSRPTMRFVPVKTAEQQAALMLVGIRDRLIRNRTQLSNAIRGYAGEFGLTAARGKAHLAPLLQRIHADESLPALARELFAAQAEEYAQLQAQIDKVDARLIAWHRADECSRRLTKIPGVGPIGAVLLTMKTPEPRLFQSGRQFAAWIGLTPKDHSTAGKVRLGGITRAGDEGLRSVLVVGATTVIQHAQRGGRPSPWLTELLKRKSPKLAAVALANKTARIAWKLMITGENYAAKAAPARLAGAA

SEQ ID NO: 399340 - protein, 406 aa, unidentified
MELVPIHKRVIGLDIHQAQITACAITKEAGGETRIEQRQFGAFKRDRRALAAWAARLDPDEVVMESTGIYWKSPYAALEAEGIRATVVNARHVKQVPGRKTDVGDAQWLATLARAGLLRGSFVPPAKLRELRLIARQRQKLVGLLSSEKNRMHKVLTDAGIRLGVVVSDIHGQSARAMIKGLLAGQPPEEVLKLASRRLKASREKLHDALQGELTASHVFVLDELLRHIEGLEAGIARFDARLLGELASEMNALALLQTLPGVDAIGAAMLLVEIGSDMSPFGSPDRLASWVGVCPGNNESAGKRKSGRVRKGNLYVRRLLCEFAHAASRTKSAFQSKFQSLIIRRGYKRAIVALAHKMLRTIFFMLKRGEHYRDSATNYEQLSVQRNASRWIKALTRFGFIPAAA

SEQ ID NO: 399341 - protein, 386 aa, unidentified
MKRDDLSRSLVAFDQASTLVTVVELGLRSWLVAGLVPSLTRQPLKKLRSDPDALLGLLLRWRDQATKAGGRIKRIVVAFEAGRDGFWLARWLRARGIEAHVIHPTSIPVSREHRRAKTDRLDTGLLMRAVLGWLRGEPKHCSMAAIPTVAEEDSRRPNREREKLVGEQTRATNRIKSTLIRFGIRAFKIKLRQASKHLEELRGQEGEPLPPNTMAELRRDLARLQVIRAQITEIERARLERLKRGPRQGTNPMIRILTRVLGIGIETADVLVHEVLTRKLRDQRAVARYGGLTGSPDESGTKRRERGLARAGNARVRRSMIQLAWRWLMYQKTSALAQWYQARTAGAKTGLRKAMIVALARKLLIDLWRYVTIGKVPAGAVLRPAT

SEQ ID NO: 399342 - protein, 343 aa, unidentified
MYIGLDVHKKLSYYSMVDGDGTEVKKGRFPTTCEGLDEFASKLPEGAKVAIEASTSGIFAYERLDEGGIEVHLAHPVYVKPFAKKHVKTDKVDARVLAQLLRMAYLPESYVPGKEIRDQRVMIRHHASLVRLRTSIKNRVHALLAIEGIQTSEFSDLFGKRGMEFLRGVKLRQVRRKALDNYLEVLKALEERIEEMEDILKEKTKITDEAKWLMSIPGIGYHNALLILSELGEIERFSNPKSMVSYSGLAPKVEQSGDYTRYGHINKHSNGFLRWAFIQSARAAVRSSKPNRFQRIYNKIKARRGEKVAIVATARHMAESVYWVLTRKEYYKENKAIRASYFS

SEQ ID NO: 399343 - protein, 458 aa, unidentified
MKAKTRTVGIDLALKHSHMAFIRDEAGGPLGQSFSFPRTSAGFNQLLEKALAGMPETARLTVVMEPTSLAWVPLATYLSLKGHIIYLVNPRRVSDLRKFYSRRKKSDRLDAKVLSNLPNFEEDILTELYLSTGELNALKRHSQQRDKLKQSIGDQKNRIQAVFTEANPTALEAFGEDKFSRVGRAFLRKYINPLKVKGLGLKRFTQVLERKAYGELKESTVNRLFEACCDTINIYREALEKDKLPFSYEQIQEEINLELDLMEFKEAQVKKLDKKIANLYQQVDPRGDLKSLRGVGDVHAPIILGYAGYIGRFGNARSYCGFTGLVPGKKQTGGIDRKGLKITKEGPNLLKKTYYMVGETARHWDLEMAERYHRLIGRGLHHKQAITAIGRISAARAYAVMKRMELARKGLIKPEEVPYKLRDLEGREISAQEAREQILIRYPSKNSLKKRGRAATAD

SEQ ID NO: 399344 - protein, 344 aa, unidentified
MNKKWFIGIDVSKKTLDASIFVAGELINRFPHVQVRNDGQGFRDLLRWAKDQGVKANDALFGLEFTGYYSDALEQFLSGKSISYAMLPTTAVKHYQRGTRDKNDKTDSAKIADYLFRFYGTECIKLRVLPSRAMQQLKALKSERKFYVQQRVACENRQKVARSDQEREGLQRMIDGFSGEVERVEKQIEEVVASDKEIYANYRLLTSIPGIGFVNAVNTIANTQNFTAFETARQYAKYVGVAPSEHSSGTSVHWRRRPSPHADLQAKADLSMAALHAIELSAEMRQLYERKLGNRPKDKDIQKKALNAVKFKLIREMFSVAKQARNFELRGPDKAQAEAHSTEE

SEQ ID NO: 399345 - protein, 407 aa, unidentified
MRLFVGDDWAEDHHDIEVMDETGRVLAKKRLAEGAAGIARLHALIGRYLPGDVADAEVVVGIETDRGPWVAALIAGGYTVFPVNPMQACRYRERHGVSGAKSDGGDAHMLADMVRTDWHQLRPAAGDSPQAEAVKVVARTHKTLIWDRTRAVQRLRHQLREYFPAALEAFEDLDAPDALELLAKAPDPAQAAKLTRAQVSAALKRARRRNIAGKTGVILAALRGEYLGQPPALTAAYAATARSLIAVITALNEQVTTLEQQVREHFGQHPDAKIYQSQPGLAAILGARVLGEFGDDPHRYADAKSRKNYGGTSPITRASGKKKVVAARFIRNSRLTDALMAWAFASLNASPGARAFYDRQRAKGIEHNDALRRLANRLVGILHGCLKTRTCYDEAAAWSHREPSLAA

SEQ ID NO: 399346 - protein, 370 aa, unidentified
MNPIYIGVDFHSREQTICYLKTETGELVIKELKHQDKEQLRAFYQQFLGQVIVGLEASGYSPWFEALLEELGCEVWLGDPVEIRRRARWRQKSDRRDAELIWDLMVHHEFPRLYQPPLASREVLRMLRYRQKLIKMRTMAKNSLQAIAMQAGLAKGSRLFSTAGQEEFGNATMSPVLQWQRDHWFSLLKPLNEQLLETMVWFKAQSKDDNQIKRLRTHPGIGLLTSLCLRHTLQPVSRFRNQRKVVAYAGFDPMIRTSAERAIYLGISKAGSRMLRYLLVEAVHTAVRYDEDLKRFYKRVAERRGRAKAKVATARKLLIRAYIMMRDEIDYAEFRRRAVAVRLARRSQVNPPTSGGLPGVLIGQSTSPGV

SEQ ID NO: 399347 - protein, 409 aa, unidentified
MDQMLERVAGLDVHKKTVTVCVRVPGARGARRQEVRTFGTTVPELLALREWLETQGVTHAAMESTGVYWKPVFYILEEAVTCLLANAAHIARVPGRKTDVQDCVWIAQLVEHGLVRGSFVPPAPIRDLRDLTRARKALSHDRTRAANRLHKVLEDAGIKLASVANDVLGVSGRAMLEALVGGTTDPTVLADLARGKLRAKPAGAAARAHRPLSVASRLPRRPTLGAAGFLGGGDGASERADRRGHRPLSGRARAPGYDSRSEPPDGRSLRRRGRVDMRQFPTAKHLASWAGLCPGNRESAGKHKSGTTRKGDRWLRTALVEAALSASRATDSALAGRYRRVMRHRGHKKAVIAVAHAILTSAYHVLARQIPYHDLGPDYYDHRHAERVRRRAIAALERQGYRVTLQPAA

SEQ ID NO: 399348 - protein, 368 aa, unidentified
MGKLITSFVGLDVHKDSIAIGVAPAGREVPHFVGTVAPQWSALSKALGRLGKAKELQIVYEAGPCGYTLARELRSHGFACEVVAPAKIARRPGDRIKTDRRDALLLARTARAGELVNVMIPDERDEALRDLSRAREDAVRARLKARQQLKALLLRHGHRYTGKSSWTAAHERYLAGLTFAQPAQQIAFAEYRSAVREAHERVERFTEALRGQLEHWRMRPVVEALMSLRGIDLIAAVTLVAEIGDFQRFARPSELMGFLGLVPSEYSSGSTRRQGAITKTGNGHARRVLVEAAWNYRFPARLSRTLQVRQEGQPKNVRTIAWKAQLRLAQRYRHLAARKLALNKICVAIARELSAFVWDIARQVKPNA

SEQ ID NO: 399349 - protein, 371 aa, unidentified
MRFYSSQHQFYAGIDLHARSMHVCVLDAGGTVVYDRNLACHFPTLLQAIAPYRGDLVIGAECMFGWYWLADRCAENHIPFVLGHALYMKLIHGGKAKNDRLDAAKIARLLKGGNFPLAYVYPQGMRETRDLLRRRMYLVHKRAELITHLEILNAQNNLPPFGKKLSYAGNRAELHIPERFAHPSVHMSATLDLDLIDKLDELIAEVELYLTRTAKVDDVQMYHRLRTIPGVGPILALVLLYEIHDLARFEEVGQFLSYARLVRCEHESAGKKLGWGAKKIGNAHLRWAFAEIACLFLRASERAKQWKQKQEQKHGSGKALGILAARLARSVFHMIRKQEAFDAKRFWSGQVSGEQPVASRKKPAKSRRKAS

SEQ ID NO: 399350 - protein, 371 aa, unidentified
METGEGRFVGIDLAKKTYVARIESNGEGPAVILTGKNDAKGYAKLCKTLSSADRIAIEAGALGFWMARLLKEKVGCEVYVLNPGQLAIIYKSTKKTDLEDAAKLAWILRRFPPAELPVVPLPSPGEERQRQIVSELHFQKKIRTKLVNRLHSVFVRVGKTDVVKKDLETSNLRKETVKHLSGRELVEANRLTEQIDLVERQINETERDASGALVEDEKTKLLLTVPGVGEITAMAFLAYIGDGSRFACASQVSNYVGMTPRVYASGETVRLGRISKRGCSAIRSIIVQSAWAAVRAKNNRFRMKYDELKDRIGKKKAIVAIARRMIEVMWIVVRKNEQFRDYDEKSYKRKLRILYKKAQDGKTTQETKKAS

SEQ ID NO: 399351 - protein, 340 aa, unidentified
MKNGLKLLGIDIGKNSFHLIGHDAGGHQVLRKCFNRNRLLQFAAQIEPCTIAMESCGGSHWLARKLASLGHRVKLIAPQHVKPYVTGNKNDFIDAEAICEAASRPSTHYVAVKTVEQQVLSVQHRLRQSLVCHRTEAINRVHGFLLEFGIALPATKAAIAKVPELIDDSRSDLPLQFKRVMEHLLEDIHRLDTEIKACDAQIKQQLAQDDAGTRLMTIPGIGPITASAFVADLGDASNFRASRDLSAFLGLVPRQFSTGGRPVLLGISKRGDRHLRTLLVQGSRPLMIRIERRDDALGQWVRDLLARKHPNKVACALANKLARIVWAVLRRGSTYNASMI

SEQ ID NO: 399352 - protein, 350 aa, unidentified
MLIIGCDYHPSFQQIAFVDTETGELGERRLVHREEAEQFYGKLREQSVAVRVGMEASGHARWFERLLRELQFELWIGNAAEIRTKRVRKQKTDRQDAQLLLRLMMEDRFPRIWVPDSENRDLRQLLWHRHRLVQMRTRVMNQLHVVALNEGLRRKKALWRPAGRKELESFVLAPWASRRRQDLLDVLDQLTPKIQSLSHVLEEEVEKRPVTRRLMTHPGVGPLTALAFELVIGTPQRFHCGKQIASYVGLVPTEESSGDRRRLGHISKQGNVLLRFLLVEAAQVTVRSQAQWRSTFFHLAMRRGRKIAKVAMARKLAVHLYWMWRQGRDYGQLQKLGSHAGVPGNRHGVQ

SEQ ID NO: 399353 - protein, 411 aa, unidentified
MVKENFIYVGIDLHKETHTAVMIDCYNQKLGEITFPNRPADFPKLVTKVKKCNTDAKEVVYGLENAYGYGRPLAVWLIDKGYFVKDVNTAISHRQAKHRGAMYRKSDSDDAEAIALATLNMLDKLPDACPNDAYWSLGQLVYRRDNIMKQRTRLVNQLHEQLCIAYPSYKSFFNDISRPTALYFWEHYPSRKYLRGKSVEDLRKELVPVSHNKCSTKTCEKILDAVASDKVKNIDYQDARDMVTLSIVSDLQHYDSQLAEVDKMLEQMYKMLGCTLTTIPGVNVIIAVKILAEIGDIKRFSNANKLAQFAGIAPLHLSSSGKGKDVATKQGNRRLQAAIYFLAIQMVQLSSKGTPRNPVVRAYYEKRKAEGKTSQQALICISRRLISIIYGMLKNGTEYRMPVVENAGEKL

SEQ ID NO: 399354 - protein, 344 aa, unidentified
MIYYAGIDVSLRTVNICLIDDAGELVAETKLASDVQDIVAYLDDLEFDVESIGLEAGTLTQYLTYGLQAAGFNVVVMEARQVKGALSAMRNKTDKHDARGIAQILRSGWYNQVHVKSIESHHIRMLLSSRRAVLSKCVDLENEVRGLFKVFGLKLPPKLGHGAFDDKVRDIIEADEALSHALLPLLEARLALYRSFRELDNRTRKMAHADAVCQRLMTVPGVGFITALTFKAGVDDPARFKHSRTVGAHFGLTPRRSQSGEIDIDGHISRAGDPDVRSALYTAANAMLTRSAKWSSLKAWGMHIAKTRGHRRAVVAVARKLAVILHRIWIDDTQFRWGTEAARS

SEQ ID NO: 399355 - protein, 331 aa, unidentified
MTNAAREAAADARPVDYIGVDMAKARFEWGVHGARSTQGAGNDAAGFETLLADLHPRRVGLIVIEATGGLEHALASVLLELGLPVAVVNPRAAREFARSMGHLAKTDAIDALALAHYAHTLANKADQAGVRLRPVPEHLEALQVMVLRRKQLMDMRTAELNRRGGAMRVLRKSIDAVIKTLNEQIAALDKDIGAHLDEHFKELDQRFECIKGIGPTTCASVIAFMPELGRISNARAAKLAGLAPLNNDSGNSRGKRSIWGGRKLVRSALYMATLSAVRFNPVIKAFYQRLIAAGKCRKAAMTACSHKLLRILNAMARSGKPWNAELHGVAA

SEQ ID NO: 399356 - protein, 289 aa, unidentified
MRIIGCDLHARQQTIAMLDTTTGEVSTLTLMHEDNQVREFYSQLPRPVLVGIEATGSMHWFLNLMDELGIECRVGHPATIRAAEPRKQKHDRRDAELILKLLVEKRFPAIWLPSKELLDLRALLLHRHQWVRIRTRIQNALQAIALANGLRRGPSLWSYDGQAKIAFLPLLPHASYRRSALQGLYRKMEEEIENLTQQVAEQADQRCRSRLLMTHPGVGPVTALATEVFLGDPRRFVDGKALASYVGLIPGERSSGRRQRLGKITKQGSPLLRFCGVRPALMQCGAIRT

SEQ ID NO: 399357 - protein, 332 aa, unidentified
MEKDPLYCAIDVSKERLDVAGAALALPERVDNNHAGYRRLIQAAKKYPGVVHFVFEASGPYHLGLALALWEAKLALSVLNPARVRYFAKAQGKAKTDPLDKEVIGAFAQALRPEPTPAPDPVRRELVELLQRREGLISSRAGEQNRLGQSHHRLIERQIRRLVRQLTEQIEQIDRLMKELVGSCAELKAKVEQLCQVKGVGQLTALTLLITLPELGSLGRNRISRLVGLAPLNDDSGKQSNKRFIQGGRKRPRSALYMAGLSASRHNPVLRDFYQRLLKAGKPKKVALTALMRKLLICLNAPLHQQLEQKASKQDCLYPDFSDTDFGLIFGC

SEQ ID NO: 399358 - protein, 342 aa, unidentified
MDYYAGLDVSLEASSVCVVDGTGKIVREAKVASEPEALILFLRSLGCELTRLGLEAGPLSQWLYAGFKEAGFQVELLETRHVRDAFKAMAVKTDRKDARGIAQLLRLGWFKPVHCKSAAAQEVRALLTARKLVQSKLYDIEMSLRGILRGFGLKIGPATPKRFAGRVAELTRDHPALKAIAKALTAVHEALLRELCVFEKQVRLLAKSDKRVRLLMTTPGVGAIVALTYVSAIDDPGRFSSSKRVGAHFGLTPKKYQSGEIDITGRISKTGDGGVRAVLFEAAHIILTRPLKTGALKSWAMKLSRRAGMKKAKVALARKLAVILHRMWRDETAFDAAKASAA

SEQ ID NO: 399359 - protein, 419 aa, unidentified
MTSDFEWYAGIDWASEQHRVCLLDGGGRPAGEREFAHGGDGLAELCAWLIAMSGSEPQKIAVAIETPHGPVVEMLIEHGFAVHSINPKQLDRFRDRFTVAGAKDDSRDAHVLGHSLKTDAHGFRRLKVDDPVIVELREWSRLGDDLKQERNRLANRLRQQLWRYYPQMLELAGDDIAADWLLALWDEAPTPASAAEISTQAIASLLEAHRIRRFDAAEVLRILRQRPLTVAPGTIAAASAHIRILAERLRLVNRQVKEANRKLDRLCRKLEQAGESEAGNRPEQRDVAILRSLPGVGRINLAALLTEASEPLKRRDYHALRLMSGVAPVTRRSGKVCLVIRRLACNARLERALYHWARVASQRDPISQKRYAALRRRGHSHGRALRTVGDRLLALACTLLRRQVLFDPDYHCKEVAAAA

SEQ ID NO: 399360 - protein, 352 aa, unidentified
MKTYYGCDAHKRYSVFASVNEKGGPGFSLKVDHDRALYRRFLGTLPAGSAIAVESVGNWYWMIDEMEKAGHYPLLAHAAKAKLMMGQINKTDKLDARGLARLLRNGTLPSVWIPPRELRDQRELPRLRMTLVRIRTIVKNRIHATLSKYGIQISEVSDIFGLGGRALLQDRLGELPPQTRQSMEVQLKLLDEVEEKILGTEDQIKAVVAATPAIKLLLTMPGIGPILAVVVAMEIGDVKRFPGPEHLASYAGTVPRIRSSGGKSYFGRVRPDVNRYLKWALVEAANIVVINQSRWAGRHVTRLYQRIREGKGHAKAVVAVARHLAEAAYWILKKNEPYKEPGTTNSISSTRK

SEQ ID NO: 399361 - protein, 399 aa, unidentified
MNRNRTVAGLDVHKDSIYLCIMGHDEAIIFEKTYGVLTPELRQMCNDMVDRGVSEAAMESTAVYWVPVWNELCESMELKLVNPYFIRQLPGRKSDVRDAQWIAECLLKNLIKGSFVPEPIVQDMRKLNRRIFDLQEDLTYYSNKLDAALQRCGFRLSNYVAKITGKSYRKAVESIASGVTDPDELIKCVHGRIINKHGRETMLAAMTGSFSTTDITVIRQYWELLAIYTRQSEECQSKLTALCEAHFPTEYKRLQTIPGVKERAATAIIAETGVDMKTFATAASLVGWCGLKPRNDVSNGRYKSRKITHGNKYLRKILIEISWTASRTRNCFFSNFSYIQVTQKHKSKMKIQVAIARKILVAVWHMLSKQEDFIDLYLKRLEEQRLMEEKIRQLESKMA

SEQ ID NO: 399362 - protein, 612 aa, unidentified
MSTPTPLDRIGVGIDTARYGHRVAFLRPDRQPAAKPLTVLENRAGYQALHDRLEQLHQQHPQAHFHVRIDAAGQYAANLEHFLRGLALPITLSIGEPKRNKDYQKAHFPKRTTDDTESQAMARFAVVELPAATAPVSPALTLLREVAGRLQAKVKQSTQAINRLHNLLARVFPELATLTDDVSAAWVLHLLDKYPTAQRLGHARLATVQQIPYLAPELAAQLHLVAHQSVACLSGPVAETLVRDLVAQVRHTQRAEEQMRGLLSEAYADLPASAHLQVVTVPGIGVATAAVLIAQTVAIERFATPAQFVGYFGVFPEENTSGVDKYGKPVPPGTMHMSRKGNDLVRHYLWNAARSAIVHNPAIGALYRRLKATGKRGDVALGHCMRKLLHLVYAVWKTNRPFDEQHFAWDAPTATVPPAAPAAAVDAGPAHPTPAGAASASPACPEAGTTTPASVAPPVAATNETAVGHKRDVPAEEVVTTATPTVAPPPPPVKTANRPARPQVDFAFLRQQVSMEQVLRHLGLLDRLRGRGQQRRGPCPIHAPAGDTQPTFSAHLGKQIFQCFHASCRAQGNVLDLWAAVHKLPLYEAALHLAETFQLPRNREEEPVGGTR

SEQ ID NO: 399363 - protein, 355 aa, unidentified
MESTKYVGMDVHEQTISIAVMNSAGKLIMESIIETKAITILQFIQGLRGDLHVTFEEGTWAAWLYDLLKPHVTKVVVCNPRKNALLKEGNKSDRIDARKLAELLRNGSLSAVYHGENGVRTLKELSRSYLTISKDLGRVMNRVKALYRSWAIPCAGTQVYAPRHRPEWLSKITEAGVRRRAEHYYQQLDALQALRHEVRKDLLVESQKHHATKLLRQVPCIGPIRAAQLVALMQTPHRFRTKRQLWTYSGLGLETHGSAQYRYVEGQLQRSKKPQQLRGLNTNHNHDLKNIFKGVATMASISSGPFHGFYEALLAKGMQPTMARLTLARKIAAITLIVWKKGARFDPQHLKQQAA

SEQ ID NO: 399364 - protein, 333 aa, unidentified
MPRRARKPKEEYNRMQTQVRYLGVDVSKDILVVAFERNRWRFPNSKAGYCKLIAQIQKQVGTVHVVCEATGPYHLPMCLALQESGLPLTVANPAWIKYFGRSEGVLAKTDPIDASLIERYANARRPPADPPIRREQIGLTELVNHRAQLVASRTALLNTSAQVLDPSVRKEIARAIAALDRCIVAAERRLKEMIEADPSWKAKLAILTSVKGIGFTTAAALLAKMPELGLLNRGQCAALAGLAPYDNDSGTFTGQRSICGGRSDVRAALYMAAVTAARHNAVLRGFYERLIQAKKPFKVAITAVMRKLLLYLNSLLKTAAIDGRSDLSIIAPV

SEQ ID NO: 399365 - protein, 340 aa, unidentified
MTITTVGIDLAKNVFAVHCVDQHGKTVLVKPKVSRAALPELIASLPPCVIGMEACSGAHYWARLFRQYGHEPRLMAAKFVSPYRMAGKSGKNDAADAQAICEAVRRPHMRFVPVKDESQQAMQCLHRIRQGFIEEKTATYNRLRGLISEFGVIAPQSTDALRHMVSEQKSSLPLQVQQCVNDLLEHIDRIEDNITEYDRILSRMAKTDHRSQRLMELKGIGPTTACALVASIGNAHDFKNGRQLAAWLGLTPSQYSSGGKSKLGRITKAGDSYLRTLLVQGARSVLIGAEKRTDLFSRWVCSLVDRRGYWCAVVAIAAKNARLCWASLHYGDDFRLYSAS

SEQ ID NO: 399366 - protein, 359 aa, unidentified
MSTITLGMDLAKRVFSVCEMDAAGHVLRRQELKREAFAAWLGQQPAGTVVAMEACSGAHHWARRCVALGLQPRLIAAQFVGPFRKSRTTKNDRNDAEAIATATRQGNMRFVPVKSVEQQARLAWHRVREGYKAESLAIGNRLRGLLAEFGLVVANSDVALRRVLADLEAQAGLPGELRELLRDLAAHWAQVRARLDACDAHIDAHARQDARCIRLRSMVGIGPIAADAVVATLGSATDFAMAGSWAAWLGLVPMQHSTGGRARLGTISCRGDAYLRTLLIQGARSSLQRAKAAATEQATPEQLWIRMLDRRMPFGKVLVAIANKHARQAWAMLARDVDYDPHACLQHPRHHQTNTVQAA

SEQ ID NO: 399367 - protein, 427 aa, unidentified
MGVCTMEDERNWFVGVDWASETHHVRVSDARGRKLGARAFAHSGEGLAAMAAWILEVTGAPPEAVFVAIEVPYGPVVESLMERGFRVHAINPKQLDRFRDRFSPAGAKDDTRDAEVLGDALRTDPRCFRALQPLDPVVVELREASRMAEDLKQERNRLGNRVRELLWRFYPQMLGLTDDVAAPWFLDLWRLIPIPEKATRVREVTVDRLLKRHRIRRLSAADVLEALRRPAILLAPGTVSAAVSHREAIAKRLDLVNRQMLAVDERLDRLTQSLAGAQERAGGQRPEPCDVTILRSLPGVGRIVLATLLAEAVEALQRRDDRALRCLAGVAPVTKRSGKSRIVLMRQAAHVRLRNAVYHWARVAGQHDPRSQAKYAALRARGHGHGRALRSVADRLIGVACAMLKAKTIFDPNLASQRAQNLGKPTC

SEQ ID NO: 399368 - protein, 337 aa, unidentified
MLIIGCDFHPGFQQVAIFDNRKAGIEQKRLGHRQEAEEFYRSLKGQAVRVGMEACGHYPWFERLLASLGIELWMGDAARVRAAVVRKQKTDRADAEHLLRLLMEDRFPRIWVPSLEVRDVRQLLVERHKQVQARTRTKNQLQALALGQGVQKKRKLWSEAGRGELEKLELLPYARQRRQHLLQTLDQLEAEITELNRQVGEEVRRRPEAVKLMTHPGVGPVTALAMVLTLGPAERFENARKVGSYFGLIPSEHSSGGRQQMGPISKQGNPFLRFLLVEAGQSAARHDQELRRFYERLARRRHRALAKVAVARKLAMRLYLMLREDWNYAQLRKAVCR

SEQ ID NO: 399369 - protein, 462 aa, unidentified
MNNAFIGIDVSKGYMDACLMEQQGKVVKRFEKFYDTRLHHDLFIRNIEELLKQGYSNIYCGLESTGGYENNWTRTISENSLNGKVSVVRINPKRIHHESRTNMTRTVSDPVSAFTIADHLRKNLNQFKDNPVLSTEMYNARKCYKFICLLQKQKNQVSNHLEKVIYENLPELARWCKSGVPKWMIELLKQYPGKERISKARVITMAKIKGLTGSKAALIKTKIANGIGATEDKYSSHLIKSLVIELASIDSKIVSEKAYLIQHYQDENIDLLRSVPGIGIQSAVTLLIEIEDYTRFKDASSMAVYFGLNPVFRASGDKSGKTKMSKAGRASFRHIMYNVARNSVMHSEYFKSIYTKHRSHGMHHNQAIGVIMHKVTRVVFGILKSQKSFDKQADLKNIEKSTPKRKEQNQVTKAIITETKILEVAQSAPCSARYLKKEKAKLQSQDHKMTKNEIMETQPLQI

SEQ ID NO: 399370 - protein, 422 aa, unidentified
MRVVHPICCGVDVHKTFLVATIITTTKEGAPIYQKKRFSTFNKSLREFREWLLSNNCHDVCMESTGKYYIPVYNLLENDFNVTVANPKWVAAIKGNKDDVKDSKWIGDLFRVGYVPNSFIPAKPIRILREYTRYRYKLVCCKSSEKNRFQNAFTVCNITLDAVVSDMFGKSATAILDYIVNGESFDPMHCVSLLHRSMLKKADQVVEAVEGFEMTEEQKQRIRFVKSHLGFIESLIEEMDRKIDLMVAPVENAISLLSSIPGLGRSNAITVLSEIGTNMEQFSSSQRLCAWAGLAPSNNQSAGKKKSVRISRAGVYLKPALVQAAHAAVKANASSYYRVKYERIVKRRGKKRAIIAIARMILTAVFHMLKTGEAWNPSDLARFDMPQELFERQQKQAINQAVNFLVKHGVVLPEHIRLPVSA

SEQ ID NO: 399371 - protein, 414 aa, unidentified
MKLFVGIDVSSQELEACFMNSDGDKVETLKVKNDLHGASHLRDRIIAAADKHSSSEIHIGLEATSVYSWHPAMFLHEDPALKERKAKVFTINPKLVSKFREAYPDLDKTDRLDAWIIADRLRFGRLTTTIVMQEQYVALQRLTRMRFHMVHSLTREKQYFLQNLFYKCNAFTSEVESSVFGHALMEMLSEKYSLDDMATMDVADLADYLRDKGRNRFPDPDNVARCIQKAARASYRLSKVVEDSIDLVLGTSIQTIRSIQAQLKDLDKAIERILEGIPGSKCLRSIPGIDKVYAAGILAEIGDIERFDDQAAVAKYAGLTWRRHQSGPFEAEDTKRIRSGNRFLRYYLVEAANSVKNRDPEFGDYYRKKYKEVPKHQHKRALVLTARKLVRLVDVLLRNGQLYTPRRKVNSAKD

SEQ ID NO: 399372 - protein, 358 aa, unidentified
MSIVAHLYSFFIGVDTHARNHAYSIVTNTGILVETRSFPTTSAGIKRALTWAGRRTSGDLDTLWVVEGAASYGAVLTGHIAAAGYPVVEAGRMDAKARHGVGKSDELDSRRIAASVLPLDADQLRWPRHGEGVRQALRVLLAARDAMTTERTRMINSLTALVRTIDLGIDARKSLTSDQVDEIAKWRTRNEDVDLSTAREEAIRLAKRVLVLNDDLQTNHDRLTELVEASPAAPLLDEPGIGPFSAAVCFTAWSHPGRVRNEAAFAALAGVNPIPASSGNTRRHRLNRGGDRQLNRALHTVVMNRMVHDERTRNYVARHYGEEPTKKSKREIKRNLKRYLARRVYKILNALDTVPQPA

SEQ ID NO: 399373 - protein, 322 aa, unidentified
MGLPNQLCIGIDVSKATLDVAGHHDMAQFKVSNDPEGIETLLKILANQPVALLLLEATGGLEMAVVCSLQAEGFDVAVVNPRQARDFARAMGYLAKTDRIDARVLAQMAEVVNRHPEKSRFIKKMPDAERQILTAMVVRRRQLIAMSVAERNRLHPAHPQNRRSISIILQALEDELARIDAEMDRHISLHFKDPADRLCAIQGVGKVTVAALLAEVPELGHLNRREISALVGVAPVNRDSGTMRGRRTISGGRAGVRTALYMSALVATRHNPVIKAFYTRLVGAGKAKKVAIVACMRKLLTILNAMFRKSEKWDESYHFVTS

SEQ ID NO: 399374 - protein, 410 aa, unidentified
MTERFVGIDVALREHRIAVLDRDGEAVGQSFTIAASKDGVATLLRTLDARDATAAQTLIGLEASGHLWENLEAALVSTGYRVIVLNPLQTRRYRDVVRRKAKTDDIDAHVIAGLLRSGAAQASYVPDEQIQSLRELARLRARLMADRQDYLRQLVAQLDVVLPEHRAVLGDLLTARARGILAQFPTAQHLATANPRAIRRAAEDAGARGFSLDDATGVRDSARRSLYSGKAAAARAHVVRTLVSQLERLTSAIDEVDRAATALLPPSEPGTGPSDAELLQTIPGIGPQTAATLLGELGALTRFTDARALVAYVGFYPVINESGDRAATPRLSRVGSRIARHSLYLAAVNAVRRSGEWRTIYLRKKAQGKTAKQALVVVAVKLLHAVYAMLKHRQPYNPSRLLVAPATIGS

SEQ ID NO: 399375 - protein, 456 aa, unidentified
MAKKIQYRALNVQHLSLQTLLDDVQGASRVVVGVDVAKKKFLAALCVSQDDTRRVIRFEHPTQTAVFVDLLCGLQKAGRVVEVVMEPTGTYGDALRYQLGLRSIPVYRVNNKHVHDAAELFDRSTSKHDAKDACLISWLHLNQRSTLWKELPEERRRVRALTAQRELYDRPLRELVAQMEPLMARHFPELETFFELGRRKTAFVLLEKYGSPAELGKAGVEQVAAFLLKSVYKADLEVVKALVHAAQTTTGAPLVADEVQLVQLMASEILRLFKQREQVDARIASIVKDVPAVQAMRPCLGAVTAAVIYAHLGAPNDYSCAAALEKAAGLNLVEKSSGTTVGSKHISKRGAGIVRKYLFLAAMRLLQTDPVAKAWYQARTSFRADTKIKAVVALERKLCRALFHVAAGQPFDTTKLFDTRRLPSLNVNSETTIEAAKHFGSAGLVNADSQPEAAMN

SEQ ID NO: 399376 - protein, 354 aa, unidentified
MNYVGVDIHKRYSVLVAVDERGRELARGRISGNSVHAFAQFFEALQGPDKVVLEACWNWGRIYDVLSEIEQVEEVVLAHPLKTRLIAEAQIKTDSLDALALATLLRGNLIARAHVPSKATRARKELLRQRLYWARLRTRVRNRVHAVLDRQRELEMPQCSDLFGRKGLNALSKLRLAEPDAILLGEELDLLKLIDSQIKAQEGRIVAFNANEQATQYLQSLPGMGKILAAVAAAEIDAIERFDGAAKLCAYAGLVPTTYGSGGKVHQGHLLKSRNKWLQWAFIEAAWVAVGCSSYFGGIYRYHRARGKKANIAITIVARRMCRIAFTLLKERRNFQEQHRTFPGRSAVRLTAAA

SEQ ID NO: 399377 - protein, 412 aa, unidentified
MQYAPAVLPDEPANGLTCGIDWARDDHAVSILDRHGRQVHRSTVEHSAAGLRELVAVLARTGVSEVAIERPDGPVVNALLDAGITVVVISPNQLKNLRGRYGSAGNKDDRFDAFVLADTLRTDRARLRPLVPDSAATAALRATCRARKDLVIHRVAVANQLREHLNRVFPGAVGLFADLDSAISLKFLARFDRQERADWLTPIRLGAWLKSAHYTGRTDPAILHVRLIAAPRGATGQEGTAHAHITGALVATLTSLVEQITVLSEQIEQQLAAHADAHIFISLPRSGTVRAARLLAEIGDCRARFPTPEALMGLAGVAPSTRQSGKMRSVGFRWACDKQLRDAVCDFANGSRHANPWAADVYDRARARKHDHPHAVRILARAWLYVIWHCWQTNTTYDPAKHQALQALQNHS

SEQ ID NO: 399378 - protein, 387 aa, unidentified
MSTTTHSLQNKTGPRTDPNAIFVSLELSRSRWLVTSLSPGSETMSKPSVTGGDGGALLDLLARLRARTEERTGASARLVVIQEAGLDGFWIHRLLTASAIESHIVEPASIAVPRRHRRAKTDIIDGETLLRTLRAFKRGEPRVCSMVVAPSPAEEDRRRISRERRTLVKERMEHVNRIKGLLASQGIFGCEPMHKDFRNRFEGLRTGDGRPLGPRLKAEIIRELERIDLVLRQIATVEAERDALVQPDGIHAKAPAAVLMKLKGIGPEFAAVLWLEGLFRRFANRRQLAAYAGLAPSPWPSGSVDREQGIAQSGNPRLRTTMVELAWLWLRSQPDSVLSCWFRERVGSERGRIRRITIVALARKLLVALWRYTTLGELPKGAALKTA

SEQ ID NO: 399379 - protein, 318 aa, unidentified
MAIYIGIDVGKKSLQLYLPQVDKSMAISNDESGYAKLLNCLHKYYAQLSDLIVVFEPTGGYEQHLRTYLKKNKINFTTVHPNKVRNYAKAKGWLAKTDKIDSQLLHDYATVFSLPVKIDYSTDSQQELHNLVKRREQLILCRNQELARLDKEISLEVERSLNQHLSFLDRQIEQIESSIETLSNDAPEIKNKIDRLTSIPGVGITLATTVVCEAPELGSIEFNQLTALIGLAPYARSSGQYDGKRNIFAGRGNLRRVLYMAAVASLRCNKKLQAFYERLIGNHKPPKVALVAVMRKLLGFMHALVKNNTFWVSNHVLA

SEQ ID NO: 399380 - protein, 451 aa, unidentified
MPGNKIVRLDALKHINLNAAGIDVGDSQMYVAVPEDRDEQFVRVFGTFTRNLLSLAQWLKDCHITTVAMESTGVYWIPLFEILVEHGFDVLLVDARKIKNVSGRKTDIQDCQWIQQLHTYGLLHGSFIPEQNMRALRDMVRHRANLLRYRASHVQHIQKILQQMNLKLTNVISDITGTTGMHILRAIVEGKTDPAYLASFRDPHCKKSQTEIELSLQGNYRAEYIFQLKQILDLYDYYSSLVTQLDAHSETMYAQLPSLINPKEHPLKPLKRNVHKKTKNAPAFDLRTQLYRICGVDLVQVDGLNTSTVQDIITDIGTDMSKWKTSKHFCAWLRLAPNNKITGGKVFLSHTPTSKNKANKALRLAAFSLANAKCALGAFYRRIRAKYGAPMANIATAHKLARIIYKMLKDKVEYRDPGEDYYYEKFKVRLIRTLKDKASSLGLQLIPAPTQ

SEQ ID NO: 399381 - protein, 413 aa, unidentified
MEMEVIVERCAFLDVHRDTVMACARTPDGAGGRSEEVAEFGTTTSHLLKLADWLAERRVTLVGMEATGVYWKPVHWVLEGSVPEVWVINARHMRNLPGRKTDVADAIWGASLLEHGLVRPSFIPPEPFRALRDLTRYRKSVIEERARESQRLHKVLEDAGVKLSSVASSVLTKSGREMIDALIGGQRDPEALAEMAKGRMRSKIPQLRDAMAGRFNEHHALLCQAMLARIDQADATVEVLGARIEELLGPYEAAVTLLVTIPGVAHRSAQVILAEIGADMSRFPTAGHLASWAGMCPGNNESAGKHRAGRTRHGSKWLRKALVEAGQAAGRTKDTYLAAQYAQIRGRRGSQRAAVAVGHSILVIAWHLLSTGEPYNDLGGDYFDKHRNNAARQRRLVAQLEAMGHRVTLEPAA

SEQ ID NO: 399382 - protein, 405 aa, unidentified
MNAVGIDASKGKSMVTILRPFGEIVSSPHEVRHTSDQIDELIREIRSLEGETRIVMEYTGRYHESMAHQLSNAGLFVSLVNPKLIKDFDNDSLRKVKTDKADSVKIARYTLDKWHKLKQYGAMDELRNQLKTMNRQFGYYTKLKTAMKNNLISLLDQTFPGANAFFDSPARSDGSQKWVDFVDTYWHVDRIRSMSLAAFTEHYQKWCKRKGYNFQPDKPAKIYESVSNIIPVLPKSEATKFIVRQAVNQVNTASVAVEELRTRMNDIASQLPEYPAVLAMKGVGTTLGPQLMAEIGDVTRFTHKGALTAFAGVDPGKNDSGSHSQKSVPTSKRGSAPLRKTLFQIMDSLIKTMPQDDPVYAFMDKKRSQGKPYYVYMTAGANKFLRIYYGRIKEYLTKLQETPKN

SEQ ID NO: 399383 - protein, 457 aa, unidentified
MPQPKRSRSRTGLSAVHPAAAAIDIGATMHVAAVGPDRDTEPVRTFQTFTDDLHRLADWFARCGIKTVAMESTGVYWIPVFEILEQRGFEVMVVNARDAKHVPGRKTDVSDAEWLQRLHEYGLLRPSFRPQAEIAGLRAYLRQRERLLDYAAAHIQHMQKALMQMNLQLHHVVSDITGVTGMNIIRAIVAGERDPNVLASHRERGCHASVETICQALVGNYREEHVFALSQAIELYDVYQTKVAACDKQIEVILKRLKKSAIPPASKLLPPRHRSRQPNAPSFDARAALHAILGVDLTQIHGLGPYLALKLVGECGTNLTAWPTAKHFTSWLGLAPHNKISGGKVLSSKTRRTSNRAASLLRLAAVSVGRTDTALGAFYRRLAARAGKAKAITATARKIAVLFYNTLRHGMSYADPGATYYEERYRRRVLGNLQRRAKSLGYVLHQADRDPTQMVVS

SEQ ID NO: 399384 - protein, 355 aa, unidentified
MTYSRKDLILGVDTHKDFHHAAVINHVGKSIADRKFDATSAGYSDLIAWATGVGRIGRAGIEGTGSYGAGLTRELTRRGIPVIDVIAPDKQLRRLRGKTDQIDAYNAARAVLNELATAVPKTQDGFVEALRVLRTSRRLLVKQRTESMNQLQCLIVSAPADLRVSLAKLKAKNLALRCSKIPVRKADDLVMTETKNVLRSLGKRYLELLTEADRLMKRLGAIVKEHAPELLAVHGVGPDVAATMLIVAGENVDRLNSESAFAHLIGTAPIQASSGKTNRHRLNRGGHRQGNSAAYRIVMVRMKSHEKTRDYVVKALARGKTKREAMRLLKRYVAREIFQILITIRERHQQAAISA

SEQ ID NO: 399385 - protein, 316 aa, unidentified
MEVTPIFVGIDVSKARLDVAMRPTGERESVANDKAGIKALIKRLANIPSTLIVLEATGGFERPVMHALVSADLPVVVVNPRQVRDFAKATGQLAKTDSIDADVLAHFAQAVRPALRPLPDTVTLELRALTARRRQLTEMIVAERNRLAMASKTVSKRIHAHIRWLQSELEQVDKDLDRSIRHSPIWKHNEDLLLSVPSIGPLTTRVLLAELPELGQLNGKQISALVGVAPFNRDSGTLKGRRSIWGGRAPVRSALYMATWVATRRNSAIRKFYTRLLAAGKQRMVAMVACMRKLLTILNSMIKHNSRWSETTLQST

SEQ ID NO: 399386 - protein, 397 aa, unidentified
MIAVGIDVSKSKSTVAILNGDGSIRAKPFDVHHVADELQALVDYIIRTSEPTTILMEPTSHYHYPLLKAFQEADFPVCLINPYQMKKYGDTELRKAKTDKRDALRIAQYALEKSYSLVPYTPQDQKYEDLRFLSRQYSQRISTLTVAKVQLLSLLDETMPGITTILPLKSRDPDNCVLLRFIKRFKSFDVIRKMSKTRFLDSYQVLVKKTKDRFAGAKGLAIYELVLNSVTTRGENPLSAMTQDQCVDLVSTSQKAADEINLQMRIIAETMPEYKILRSMAGVGDRLGPIILGEIGDIRRFHSGKALNAYAGNDAPPYQSGQFESRNRHISKRGNPALRKACFEVMQALKLTKPQDDPVYLFLLKKEQEGKPYNVAKMAAVNKFLRIYYARAMELYK

SEQ ID NO: 399387 - protein, 356 aa, unidentified
MTSLTELREVVDVVIGVDTHVHTHSAAVVDTATGGVLDEITVEATAQGYAELVEFANNHATLRAWAIEGTGGHGAGLSRHLLESSEIVIELDRPKRAARRHGAKSDPLDAIRAAREAMARPRLGTPRSGGERQALSVLLAARRSAINASTEAQQQVFSLVIAAPEPIRVRFRGQKLAAMLNTAAKLRVQSSWDVETTSTVVALRTLARRAHAMLKEARELQKAILTIIRSWRPDLLEEFGVGPIVAATVLCAWSHPGRIHSEAAFAMLAGVAPIPANSGQVTTRYRLNRYGDRSLNTALHTVVQIRIQYQQSTRDYVARRTAEGKTSREIKRCLARYVARDLYRLLESGPLMLDEA

SEQ ID NO: 399388 - protein, 339 aa, unidentified
MQISIIGLDIAKQVFQVHAADAEGRRISQVRLRRAQVLDYFRELPPCLIGMEACATAHHWARELIALGHEVKLMPPAYVKPYVKRNKTDAADAEAIAEAVTRPTMRFVAVKSVEQQSKLMLHRVRELLVRQRTMLATALRAHLAEFGIVAPQGIHRVEKLAAEVRNSAVPPLAQEVLSILVDELASIWRRLDAIDERLVALHRTDQVSRRLALILGVGPITAMAIASTVPDPSVFRSGREFAAWLGLTPKSHSSGGKDRLGRISKRGDRYIRHLLYVGAGNAIRFSKARAATGEAWIRGLQERRPPKVVIIALANKMARIAWALMVRGDSFRSPAVATA

SEQ ID NO: 399389 - protein, 464 aa, unidentified
MRTDKRLWRNRKAKKELARRLQSENPGLEVVHAHAAGIDVGNGAHYAAVRPDRDLQPVRRFECFTADLYRLADWLQNCGVKTVALQSTGVYWIPLYDILEERGFEVYLVNARHTKNLPGRKSDVQESQWLLKLHTYGLLNNSFQPSSKIRILRTYWRQRLQHVTGAATCVQRMQKALTQMNIQLANVISDLSGVTGQLIVRAIVAGERDPQKLTELSHPRIQASRGEIAKSLEGNWRQELIFVLQQEIEMYDTYQRRVAECDQELQKHLRAFADTVAPVQQELPPKKKKKQNKNNPHFRLADELQRITGVDLTRIDGVDVMVAQTLVSEVGLDMSRWKTEAHFASWLGLCPDNRISGDKVLSRETRHVLNRADNALRLGASTLLRSQTYLGAQYRRLRSKLGAPKAITAMAHRLARLVYRMLKYGQQYVDKGAEYYERRNRQQQIEFLKKKAARLGLQLTPVYP

SEQ ID NO: 399390 - protein, 405 aa, unidentified
MIEPIVKRIAGLDVHKMVVVGTVLIEEEDGSIKQETREFGTFKRDRCQMCQWLKDHDVELVAMESTGIYWKSIYATLEKAQILAYVVNARHVKNVPGRKTDVSDSQWLAALARVGLLRPSFIPTKDLRELRIISRQRTKINVTLSAEKNRLNKVLDDAGIRLGGVASDIDGVSAQKIIEGIIDGKPIEELIACARGRLKAKTDDLRACLDEELSERHIFLLKALQKHIQFLKSELEDIDAYLFAAMSPYQKQWEILQTLPGVDKVAAMVLIIEIGIEMERFGSADQLSSWAGMCPGNNESAGKRKSGKTRKGNQAIRSILCEIANAARRTKSQFKSKYESLVIRRGHKRTIIALGHKILRVIFVMLKNVKPYFDPGIDYEELIVSRNAPRWLQALKKFGYLPQTV

SEQ ID NO: 399391 - protein, 391 aa, unidentified
MYSDGSKHSSFSVPNNRNGAKIIVDRVTSVLLLQDIPQVVIGMEATSVYGDNLMRFLRESGSLGRFERNLHMLNPKQVKKFRDAYSDLPKNDHVDSYVIADHLRFGRINKEVYMDDYKYQALKMYTRARHQLVQELTREKQRLLNTVFISFSGLTQEKIFSDKFGATSMALIEEFSSLDELAYMSTDELVDFIRKKGKNHFDDPEEIAEAVQRAAKNSYRPPQVIADAAKQMLAISMNTIRLLQKQIKEYDKAIEKMLEAFPQTLTSIKGIGNIYAAGIIAEIGDINRFPSQAGLAKYAGLVWTQHQSSDFEAEDKRMIQGGNHHLKYYLCEAANALRRCDPEFKRFYALKYKEANKHNHKRALDLTARKLVRLVYTLLKTNRLYIPPEEY

SEQ ID NO: 399392 - protein, 401 aa, unidentified
MKEFSAATVRQETATALGAVLQARGAGTYPAYIGLDVHKETITVAVARGGRDGPESRGEIANRPKAVAKLVARLSEEFDGEALLFCYEAGPCGYVLYRQLLELGHDCQVVAPSLIPKKPGERIKTDRRDAAKLAQSLRSGDLTAVWVPDEEQEAMRDLSRARDDMKAQERKARQQLNAYVLRHGHAWPSNKTRWTHTHYHWLESLRFSHDWQQVVLQEYIDAVKATSQRVADITAQMERVLPQWSLAPVVDSLIALRGIDKLAAMVLLSELGDVSRFDSPRQLMAYLGLVPSEHSSGARRRQGAITLTGNRHARRMLVESAWSYRFPARQTMHLKRKAKGASDEAKVIAWRAQKRLCGRYRTLTQAGKNTKLVCVAIARELAGFIWDIVRQEMPRLAPQAA

SEQ ID NO: 399393 - protein, 440 aa, unidentified
MEKIRTNVAGIDIGAKKVFTAIEGQPVVSHFTFTEDFMLLRDYLLKHKVETVAMEATGVYWVILYEILEEAGIDVWLVDGRQTKQVPGRKTDVKDCQWIQELHSYGLLGRCLVVDTDIKELRSYLRLREDHINTSAMHINHMQKALTLMNIRLKEVLSQIHGASGIAIIEAILNGERDKYVLVSLCHKSVLKNKKELIIKALEGKYTEAGLFALKQAYDGYKFYLRQIEECDKRINAVMNRIGQSGKGQDVKKKRKAIRHHKPVVEKLAPNLINIFDGKDATVISGITDYTWMQLLGETGFDLTKWPTEKHFTSWLGLAPGQNNSGKMRRNAKKKGRPKAGQIFRTIAQGLINSKSIAIGSFGRRLRGRKGPSIAIKAMARKVAVLYWRVMVKGLDYAEKGIIHYEEQLLANKMKTLNRLANELNIEIVGNKQVTQICHW

SEQ ID NO: 399394 - protein, 405 aa, unidentified
MARVFVGHDWAEAHHDVFIEDETGRRLGGGRLPEGVEGVARFHALVADHVEDPVDVIVATETDRGLFVGSLVAAGYTVLAVNPLSVSRYRERHSTSGAKSDPGDAKVLAELARTDHHHHRPIAGDSELVESIKVLTRGHQSLIWARQRQLNQLRSTLREFYPGALEAFAELASSDALAVLAVAPTPSLGRQLSRSKIASALRRGGRQRRVEERAAEIQTALRATQLAAPAPVSEAMGAVVTALVAVAGELTAQIAGLETELADRFDEHPAATVIRSLPGLGMILGARVLAEFGDDPNRYLDAKSRKNYAGTSPITRASGKSHVVLARYARNKRLADACYLWAFTALSASPGARHFYNQRRAGGDTHNRALRALANRLVGILHGCLRHHAPYDEHTAWGHRTTIAA

SEQ ID NO: 399395 - protein, 345 aa, unidentified
MLYIGLDVHGKWTTVAGFDPRTGETLQVDKMSNNRDSLREVLGALKGPLHGAMESGTNSWAMYRELLPYFETLVVAEPAKLWNRQTDRGAKTDRRDAMRMAEKLYRCEIEPLYIPDERTQDLRVLVRGKIRMSRWVTRLTNEVGSLLRSWGYVGERSLLSKSGKARIDEAELPAHSARVLQLFNEMLEKARAIEDELQKAIEEEAAADADCVILKSIPNVGAFTALLVRAEVGDIQRFSKPSSLVSYCGLSPRTFQSGERCYYGGLGNWGNRWLKYGLGLLANRVAASKKDNNLHRLYWRVSLRSHRNDGKIAVARKVTEIVYHLLKKRECWKESVEKEDRDFAT

SEQ ID NO: 399396 - protein, 411 aa, unidentified
MDTVMERCAGLDVHKDTVAACVRFPGPSGERAQEVHTFGTTTTELLALRDWLVAHGVTLAGMESTGIYWRPVYYVLEDAFECWVLNARHLRNVPGRKTDVRDAEWICQLVEHGLVRPSFVPPREIRELRNLTRYRKAQIEERTREAQRLDKVLQDAGIKLSSVATDILGASGRDMLAALVAGTRDPEILSELARGVLRKKIPQLKQALAGRFGPHHALIVGTILSHLEFLDEAIGNLSAEIEQVIAPFGLAVEMLRSIPGVQQRTAELMIAEIGVDMGRFGSSARLASWAGMCPGNNESAGKHRSGKTRKGSKWLRSALTESARAAARSKGTYLSAQYHRLKGRRGANKATVAVGHSILVAAFHILDRGEPYADLGADYFVHRHNPERHANRLVRLRALGYDVTIEPVAAA

SEQ ID NO: 399397 - protein, 402 aa, unidentified
MYNAVGIDVSKGKSTVAVLQPAGVIIRKPFNVNHTSSELDELAKYIGSLEGETRVVLECTGRYHEPVVKTLSESGLFVSAVNQHLIKNFGNNSIRKVKSDPADAKKIARYTLDNWIELRQYSSMDNTRTQLKTLNSQFSFFMKQKVAAKANLIALLDNTYPGVNKLFDSPVRDDGSEKWVDYAYSFWHVDCVRKIGLKIFTERYQAFCKKHHYNFQPAKPAELFLASKDLIAVFPKEASYKLLIQQSIQQLNLASSHVEELRSKMNELASTLPEYATVMGMYGVGKTFGPQLIAEIGDISNFSHREALTAFAGVDPGVDQSGTHNSKSNKASKCGSNRLRKTLFQIMSTLLQTSPENDKVYQFLAKKRAEGKPYYVYMTAGANKFLRIYYGKVKECIRNLEQ

SEQ ID NO: 399398 - protein, 404 aa, unidentified
MYNAVGIDVSKGKSTVAVLQPGGVVIHKPFDVPHTSKDLNQLSEYLVSLDGDTKIVMECTGRYHEPMANALHKAGLFVSVVNPHLIKNFGNNSLRKVKSDPADARKIARYTLDNWAELRQYVDMDNTRTQLKTLNSQFSFFMKQKVAAKANLIALLDNTYPGVNKLFDSPVRDDGSEKWVDYAYSFWHVDCVRKIGLKTFTVRYKAFCRKHHYNFQPSKPEELFHASKELVAVFPKEKNYKLLIQQSIKQLNLASEHVEQLRREMDALASSLPEYSTIMNIYGVGKTYGPQLMAEIGDVSRFTHREALTAFAGVDPGVDESGQRISKSNRASKIGSGRLRKTLFQIMSTLLQNAPVDDPVYRFLDKKRSEGKPYYVYMTAGANKFLRIYYGKVKECLRNLEQND

SEQ ID NO: 399399 - protein, 384 aa, unidentified
MNKHSMIFIGLDTHKEFHEVACCEEQRGAAPVHYGRIPSSKVSVKKLLRQFESKYPGATLHVVYEAGPCGYWIYRLITSLGHCCYVVAPSLIPKKPGERIKTDRRDALKLVRSLKSEDLTPIYVLEPEDEAVRDLSRAREAAMKDLKEAKYQLKALLLRNNIRYEGTANWSKKHLRWLTELILPHPAQQIVLQEQLQTIEERIRRLERLDNELTHHVHQWRYYPVVKAVQAMRGVRLLVAVGVVAELGDLHRFDHPRKLMAYLGLVPSEQSSGGKRHLGAITKAGNGRARRLLIEGAHSYRYPANVSTELQLRQEGLPKDIVDIAWKAQLRLCKRYQRMSKKGKHYNLIITAIAREMAAYIWAIAKEVVLTPVNPKLRLSRVPA

SEQ ID NO: 399400 - protein, 337 aa, unidentified
MKYCGIDLHSNNSVVVVIDDEDRVVAQRRLPNDLSRIVEFVAPWRDELVGVVIESTYNWYWLVDGLQAAGFRVHLANTTAIKQYDGLKHSGDEADARHLAHLLRLGILPTGTILPKEERAVRDLARKRIQLVRGRTTHILAIENIMARQLGGRMTSNQIKRLSADDIDRMPISEDVGLAMKANLAVIGALDAQIEVLEQRLRERVKPRPDYALLTSVPGIGPALSTTILLETGAIDRFAGVGNYASYARCVDSVHTSNRKKKGEGNVKNGNKYLAWAFVEAANFARRTCPEAKRFYERKKARTNTIVATKALAHKLARACYHILKEGRPFDVTRCFA

SEQ ID NO: 399401 - protein, 354 aa, unidentified
MSQTPSTAIAVIGIDIGKNSFHVVGHDTRGTVVLRQKWSRGQVEARLANMPPCLIGMEACVGAHHLSRKLASLGHDARLMPAKYVRPYSKGPKNDFNDAEAIAEAVQRPTMKFVATKTAEQLDLQALHRVRERLVSQRTGIINQIRAFMLERGIAVRQGIGFLRTELPTILATRTDALSPRMLCVIEELAGDWRRLDQRIDRLSGEIEALARQDQACSRLMTVSGIGPIISSAMVAAIGTGDVFSKGRDFGAWLGLVPKQISTGDRTILGKISRRGNRYLRVLFVQAAWVVLVRIKNWERYGLRSWIEAAKKRLHHNVLAIALANKLARIAWAVLAKGRAFELTRTNDAGVRPA

SEQ ID NO: 399402 - protein, 391 aa, unidentified
MDKAWLGVDAGKEFHWAHLLDASGQQLLSRRVENDEGDLLKLIEEAQSLAEEVLWAVDQPGGGAALLLALLWERDQRVLYVPGLSVDRARDAYRGESKTDAKDARVIADQARMRPEFGELTPSEGELAELQLLLARRRDLITDQTRSITRLRETLLSLFPALERSLDLTNKGSLTLLCHYQTPAAIRRAGRKRLADYLRNRSVKGADTLAHKALTAAKSQSVTLPAEGVAAAICAELAKEVLSLKERLQTLDKELAGRFFARPEARILSSLPGMGPILGSEFLVSVGDLSAFESADQLAAYAGLVPAAHDSGKRIGNHRRMRGGNKVLKRVFYQSAFASLRSSPHSRAFYDRKRGEGKKHTQALIALARRRVNVLWAMLRDGTTFEAPSAA

SEQ ID NO: 399403 - protein, 375 aa, unidentified
MSKHTELFVAFDTSKLRNAVAIADGGRASEVRFLGEIENTAAATTKLVHKLEAKYQRITFCYEAGPTGYELQRHIQGLGHECIIAAPSMIPKKPGDRVKTNRRDAVSLVKLLRAGDLTAVWVPDRRHEAMRDLTRARETAVIDLCAKRQRVSAFLLRQGRWYSGGKKTWTKAHMNWLASQQFEQPERRIVFEEMMFAIRQAQERVERLEQAIRAAVPEWSLAEMVTAFMAFRGIDLVSSAGLLAELGELSRFPTAPELMGYVGLGCSESSTGDSIKRGPITKAGNRRARRTLVECAWSYQHPPRVGVAKQAKIAAAPPKVREIAWKAQCRLNRRYRALLRRGKPKTVAITAVARELAGFLWAAARDVAGAEHAAK

SEQ ID NO: 399404 - protein, 330 aa, unidentified
MNYSHFVGLDVGKKSFDASLVSLDQELSHHTFPNTPEGIEELLHWIKQHGVEVETALFCAENTGSYVIDLCLSSYQYHFPLALECPLTIKKSIGLQRGKNDRIDARRIAQYASLHYRKLRLYELPDKDLVRLRNWLVIRDNLVKQKVSSLKLLELTRETSRLADLMVPTTFLENQICQIKEKISYVEEEMEKIITENITLSTNYRLLTSIKGIGPVNAIVLLCVTDNFQRFSDPRKFACYSGVAPFEYSSGTSIRGKTKTSHLANREVKVYLTRAAITAIAWDPQIKAYYKRKIAEGKHKASVINAVRAKIIARCFAVIKRKTPFVTLSA

SEQ ID NO: 399405 - protein, 357 aa, unidentified
MGNASTLHVGLDVHKESIAVAYAPEDGATAPVPLGAIGTRQCDIDALVRKLQSKSARLVFVYEAGPCGYWLYRYLTRKGLTCFVVAPSLIPRKPGDRVKTDTRDAVTLARLARSGDLTPVYVPAVPDEALRDLARAREDALHDLNAARFRLKALLLRNDVRYAGRANWGAEHLRWLARFVFPTPAQQIVFQEYVRTVTERTELLRRLEAELLEQAKTWRLSPVVEALQALRGVQFTVAITTIAELGDLTRFDTPRQLMSYLGLTPSEYSSGERRRLGGITKAGNRHARRVLIEAAKAYRHRAKVSEQIHARRAQVRLCGRYRKLLARGKHPNTVAAAIARELAAFMWAIAKARPVPA

SEQ ID NO: 399406 - protein, 327 aa, unidentified
MMFIGIDISKEKIDLSWLRDQLTNKIKTKVFKNKHQDFVKIEKWLLNTTKSVASELVITLEPTGVYHEALMYFLHEQGFNIILANTGKAKKYADALNIIHKTDKSDATMLAHYGCAKHVVVDYWQPEALEVRELKALIRRLDALESNRQREANRLEASEFSNVSARVRQSIKVTIAFLDDEIKQLKSDIDDHIDNEPGLKRNRKLLESIPGIGPVLSRELTYLFAAKKFNKAKEAAAYCGLIPRYNESGKLKGRTTISKLGPARIRCKLYMAAIVAGQWNKRIKRHKLTLINNGKTPMQAVCANMRKLIHICFGVIKNQEEFKLQES

SEQ ID NO: 399407 - protein, 460 aa, unidentified
MHLIRWRTVVSKRPARSAGLPVINEYAAAIDIGARFHVAAVAPDLCEQPVQTFQAFTGDTERMADWFLSLGIKTVAMESTGVFWVPVYEILETRGIHVIVANARDARSVPGRKSDVNDAQWLQRLHACGLLRASFRPGRDIAALRAYLRLRERHLEYAAAHIQHMQKSLTFMNLQLHHVVTDITGVTGMKIMRAIVRGERDPDVLAKMRDIRCKASEGTVRAALIGNYQPEHLFSLKQALDLYDFYQARVDECDAEIERVLVTLKNDMPNPESPLPKPRHKARQPNAVNFDSRPLLYQLTGVDLTQIHGIGPYLALSMISECGTDLSRWPTVKHFTSWLTLSPGCKISGGKVLSARTKKTANRVASHLRLAAIAVGRTNSALGAFYRRLAARIGKAKAVTATARKIAVLFYNAMRFGMAYEDPGADQYERNYRERVIKQLHHRAAHFGFRLEEVARPSVS

SEQ ID NO: 399408 - protein, 423 aa, unidentified
MKVVYPICCGVDVHKKFFIATLITSEGITPHYQKKRFSTFNNSILQFKRWLLDNNCTDICMESTGKYWVPVFNLLEDSINVTVANPKWVKAVKGNKDDIKDSKWIGDLFRLGLVPGSFIPKKSIRILREYTRYRFKLVSCKSSEKNRFQNAFTVCNVALDAVVSDMFGKSASSITDYLVNSDSFDPEYCVSLLQKSLKKKADAVIESIEGYQMMPEQKYRVRMIRNHLDFIEQSIHELDDMLNVLASPYESAIQLLCTIPGVDRTSAITVISEIGTDMSHFSSSKRLCCWAGLTPGNNESAGKKKSVRITRAGVYLKPALVQVAHAAVKSKDNSYYRIKYERITKRRGKKRAIIAIARIILTAVYHILSTGEIFNPCDLYQVDMPLELRDKHKQKALKKAVKLLIAQGIIKETDILGSFLQPA

SEQ ID NO: 399409 - protein, 408 aa, unidentified
MFYIGIDWADDHHDIYIIDEEGSKIDSFRIEHNPKGLSFLRERIRSLQVSKSQLLFAIETHKNLLVDFLLDEGYTIYSINPKSVDRYRDRYRVSGAKDDTFDAMVLANIIRTDREQHRAIIPNSDLARELKVLTIDEQRLVRLKTRLINQLQACLKDYYPSALELFSQIDQEITLDFLLKFPCPATISVKELKKFLEKHHYPQAEEKAQEVYNKLSGHQIFVEELTIRTKSRLMLTLVKHLKMLLSELSEYQKEITRLFEKHSDSGIFKSLPGAGEKMSPRLLTEIGDNRDRYQEAKNLQCDAGTSPVTIKSGKMKVVHMRLACRKSFKNTLYQYSFSSMNESIWAKRYYEEQRKKGKTHTEALRALGNKWLKIIFYLWKNNVKYNEDRHFADIMRCQLKEVKTFPLT

SEQ ID NO: 399410 - protein, 414 aa, unidentified
MQEWKDFTHYAAIDWARDHHAVIIVNGQGEIAADFEFPHSLEGWTSFRQQTAAWPALAVAIETSQGAAVDQLLQHGYVIYPVNPVAAHSYRQRKAPSGTKTDHLDAWALADALRVDGHGWKQLQPMDPLTQQLRLLCVDEVSLIEQRTLLVNKLQQALVEYYPAALEAFDDWTCEHTWDFITEFPTPHALVKAGPRRWHKFLHTHKLWRPQTVEKRLAVFARADQFQASEPIIQAKSRLALSLCKLLRTLAQQLEHYRKEIEKLFQEHPDHDLFGSLPGAKKVLAPRLLASIGSDPQRYGNHNVLQCFAGTAPVQYQSGQICKAQARWACDKFLRHTIHLWANCFRKATVWGQTYYETKRQRGMSHACALRCLGQRLLKIIFKMLTDKKPYDAELHAQNQLKHGSWVLQMPACE

SEQ ID NO: 399411 - protein, 350 aa, unidentified
MEHHAGLDVSLEETSVCIVDGAGKIIRETQVASEPEALVGYFLALEIKVVRIGLEAGPLSQWLHAALTEAGFEVVLLETRHVKAALSAMTVKTDRRDARGIAQLLRMGWYRPVHCKTLPSQEVRAIITARKTLLGKLIDIELSMRGILRGFGLKVGAVTRKSFEIRVRELMEGQLTLTAIMEGMLNSRATLITEVSKLHKAILRIARADGVCVRLMTAPGVGALTALIFKTAIDDPTRIAKSRDVGPLFGLTPGRYQSGETDIIGRITKVGDVMVRTALFEAATVMLTRSTKKSRLKAWALDVAKRRGTKRAIVALARKLGVVLHRMWVDLTEFRFAKKEAAVPALITAK

SEQ ID NO: 399412 - protein, 404 aa, unidentified
MVVVATVSRTVGEGEVNEEIQYEGRRFGSGTSEREHLIAWLQERGVEQVVMESTAQYWKPLWLDLEPHFGQLHLAQAHSNKAPKGRKNDFGDARRLARRLLAGELILSFVPDAEQRAWRTMTRSKLQLVRDRVRLQNQLEALLEEMRIKLSSVVSDLLGLSGRRILEALAGGQTDSVKLAELGDDRLKCSRAELVDALRGRAEPMHLQILKLYLERLKLLDRQIQDLEQMAAQALHRHEQVVIRLAETPGLGVDSAQQIIAEVGVEAKAFPSAAQFASWVGTIPGSEESAETNHSSRSPKGNQFLRRILTQAAQAAIKKKGCHFQNVFRKLLPRLGYKGALWAVAHRLCRLVWKILHDRVRYIEQGSETNPQANKRRAQKLAKALRKLGYNVAITPIAAPQAVG

SEQ ID NO: 399413 - protein, 341 aa, unidentified
MGAIGIDTHKATLAACAVDALGMAHAERTFDNDPAGHRALLEWARAADPNAVIGVEGSASFGAPAARFLIAAGRSVREVPPQLSRRERIRTRRAGKSDPGDALAIARVTLRESDLPLVRLADRSLEIQLLVAAREDVVTEMTRVRNRLHADLRVLVPGYGASVTSLTTVRHQRTVARLLRSLAGVQAELARGRLGRLQALGTDEHTLAAQIGTRVDGHPLLALPGAGALVTARLVGEIGDVRRFRSADAFAALAGVAPIPASSGQTQRMRLNRGGNRQLNRALYTIALSQAFHHPPAMAYIARKRAAGKTWREALRALKRQLVRTVFRLLQAGARSLDLAA

SEQ ID NO: 399414 - protein, 343 aa, unidentified
MQTVTTIGLDIAKSVFQVHGIDAAGQVVIRRQLKRRYVLAFFQKLPPCLIGIEACASSHHWSRELQALGHTVRLMPPAYVKPYVKRQKNDATDAEAICEAVTRANMRFVVTKTPEQQSGLVLHRARHLFIRQQTAVINAIRAHLAEFGIIAPVGRHGVEELLNVVADPNDKRVPEIARACLLAFGAQLRRLKEQILEFDRMIRAWHRSSETSRRLDDCPGVGPVLATALVATVADPKSFRSGRNFSAWIGLVPKQHSSGGKNRLGSISKQGDCYLRGLFVAGALAVIRYAKIHGTKHRPWLTALLARRPTKVAAIALANKIARMAWAMMAKGERYKEPIALAA

SEQ ID NO: 399415 - protein, 352 aa, unidentified
MAKNGFDKLMSVGIDIGKDVFHLVGCDYDGQLVLRKKIKRMALITTFEELPHCIVGMEACLSAHFVSRTLRKMGFEPRIIPAIYVKPFNKGQKNDYNDAEAIAEAALRPNLKTVTEKTQEQLDLQALHRVRSRLVSRRTATMNQIRAFLIEQGITVRKSVAALRTSLQAILDNRSDEISLRMRRLILGLQQDWIWTDKRIEMTTSEIKSVSETEASCQRLMTIPGIGPIISTAVVAAVGTGEAYDRGRDFAAWLGLVPRQYSTGGRTILGRITKRGSRYLRMLFVQAAQVIMMRPKNWPKFSFGPWLEAAATRMQHNKLGVALANKLARIAWSVLNSGKDFDWKEKEFATAI

SEQ ID NO: 399416 - protein, 401 aa, unidentified
MKNIAGVDVHKNLLEMAYRKAGNIQVETIPYTPDGIARIIRILKRLGIKSVFMELTGDYYYPLYYALKGAGIKVNVMNAYKIKRPEPNKTDEKDAIWLLKIGETRLFRASYIPERGILALRILIRERTWLTDKIADFKRKVTSLCWRLGIRIQNLASILRSKKRRQVLLNVLDGKSSEQKYNELAGVVRSILKQREVRAHIVILRSYLQAIDFLENEVARIDRELASLASKFKTEVEILMSVPGISFILAVGILAEIGDISRFPTPSNLASYAGLAPVIRESAGKMYLGRASKKSNKHLRRHMFMAAMAAIRSKSPKIKTFVERLSSRGKHFKVIAVAVARKLLTIIWHLLTRGIPWSKEDFSKTVKFPRRRGCKIPTKEAILMFERAGQEVMFRRYEESP

SEQ ID NO: 399417 - protein, 343 aa, unidentified
MKLSRVGIDLAKNVYQLHGVDRSGKMVWKRRLKRHQWFKVLLDTVGPECEIGMEACAGAHHWGRELQSRGYTVKLIPPQFVKPYVKSNKSDAKDAEAICEAMSRPNMRFVTVKRVEQQDIQATHRIRAELMTQRTAKANQIRGLVAEYGLVAPKHLSSLRAAIPCWLEDAENGLTGDFRALLQGVWEDLHVLDDRVGEMDKTIKRLADNNEDCVRLQQLRGVGPMISTAMIATVGDARQYHKSRQMAAAIGITPKQHSSGDRDRLLGISKRGDVYLRTLMIHGARAVVARATHKDDRLSRWVTNIANKKHPNVAAVALANKTARMAWAMLRNETDYDPDFALR

SEQ ID NO: 399418 - protein, 341 aa, unidentified
MQITTIGLDIAKNVFQVHGIDATEKVVVRKQLRRSKVIAFFEALPPCMVGMEACASAHYWARELRKLGHEVRLMPAKDVKAYVKRNKNDAADAEAICEAVRRPTMRFVRVKSAEQQGGLMLHRTRDLLMRQRTQVINALRAHLAELGITAAQGREGLKELLKIIASDADERLPADAHASLVVLAAELQAMQTLIGSIEKRITAQHRGNEASKRLESIPGIGVIGASAIAATVTEPTVFRSGRDFAAWIGLVPRQDSTGGKQKLGPISKQGDRYLRRILVVGAVAVLRYAKQNPEKYPWLTQLLARRPFKVVAVALANKMARMAWALLAKGGTYRAPALAAA

SEQ ID NO: 399419 - protein, 436 aa, unidentified
MRGCRCSMIMGFTKPIEHFNLQRKKVITMNTLYVGIDVSSKSNVVYLMLPNGDKHSNFSVANSHEGSTLLVKKIYSALTSHSLDTVLIGLEATSVYGDNLVYFLREDATLAPFNRKIHVLNPKQVKKFHDTYNDLPKNDYVDSFVIADCLRFGRINKEVYMGDYRYKALQNLTRARFFAVQNLVKEKQRFMNVLFKKYSTMTQEKVFSDAFSTTALAVYDEFESAEALANMDLHELTDFIIEKGKNRFPDPDAVAKAIQKAARSSYRLPKTVNDSVNQVLSISITSMKALESQIKEFDKAIKALMELLPNVLISIPGIGPVYSAGIMAEIGDINRFDNQASLAKYAGLAWKQHQSGGFEAEVTRLIPSGNRFLKYYLCEAAFSLVRCDKEYSDFYHLKYKEVNRCQHKRALALTARKFVRLVFALFKDKRLYRSAE

SEQ ID NO: 399420 - protein, 353 aa, unidentified
MVALWVGLDVGDYHTHICVIDEYGTVQLETSVETQPSNIASTLSDFPRHSIKKIVMEAGLPCSMICRHLRALSYPAAIFDARRIARILSLSGSKTDKNDARGIAQIARVAESALKEVHVKTPDIERLRGELVLRDSLVRQRVAAETAMRNTFRVYGVKLKSTSSSAVLRARVSEALKSLGDHGIALGGQVTPLLDLCCSLRSCVASMDLRLKAIAQKNEVTRRFMEIPAVGPICALSFYTAVGEPDRFARSKDIAAYLGLAPRVRQSGNSSRLGRVTGYGNKLTRSHLVMAARSLNRKNTIALSDLRTWGEGVMERSGSSKARVAIARKLATIMLAMWRDGRSFQPFREADQM

SEQ ID NO: 399421 - protein, 345 aa, unidentified
MKKVVAGMDLHSNNVVIGIMDMDGKRMASQKVPCELEEVVKFLAPFKKRLEKVAVESTYNWYWLVDGLEALKYPVVLANPAGMEQYNGIKHADDTNDAFFLAELLRLKILPTGHIYDAQLRPVRDLLRRRLKLVHHRTALMLSFKSLYARTTGREMNLSQLKELEITQAQALYTHPANQLIAGMQIKHIEQISESITKIEKGVLASARELPFYAKLLTLPGVGRILGMTITMEVGEIKRFADSGNFASYCRTVEAKRTSNEKKKGANNSKCGNKYLAWAFVEAANFAKRYDEQCRKWYDRKAAKTSNVIATKALACKLAKAAWYLMAEETPYDPARMFGQAAKTK

SEQ ID NO: 399422 - protein, 352 aa, unidentified
MRRPKHQVSIGEDLFVGIDLHKNRWYVTIRTVDLEVFSASIPGTWEALQRVLARYAGHQLQAVYEAGYFGFRLHDRLVAHGIPCLVTPPSLVPQEYGNRVKTDRRDSSKLAHLLAKGMLKRVWVPSEEELYHRQVIRRRRQLVRDRVRTQSRIKAELRFYGIQLEEPRGRWTQIYFETLRRFRFGNRWMQESFNCLLEQYEFLSGQIDKQTQLLRELSETALYRERVEILQSIPGIGLISAMELLLELQDVSRFRRAEQLAAYVGLTPSQYSSAEKVRMGRITGIGKNTLRSLLVEASWTLIRKDQAMREKYGRIKIRSGGKRAIVAIARTLFLRMRRMLLDKQAYTLQLAA

SEQ ID NO: 399423 - protein, 415 aa, unidentified
MTDQITIPQKRFIGLDVHKHYLIALGVDAELNVVLPAQRVELFRLEAWMKKTLTKQDAVALEMTTNTWEIYDELSPCAHSVTVVHPPHVALITRSQVMNDKMAASILARLLAKGLLVSIWVPPVEVRELRALVAQRSKMTRLATQAKNRLHAILQRHHIVPPEGNLFHADQTEWWCALPVGKLEKINLQSDLDTLRFAETQLTRLASTMNQLAVKDERVTRLIHLPGFGAVVALTVLAAIGEIARFEDAKHLVGYAGLGARIHDSGLTTRTGRITKAGRRDLRAALVEAAQVAANSHPHWKAELARLEPRLGRNKAIIAIARKLLVAVWFVLSKQTTDRFAQPEMVARKLMQFAYKVGKHNRPVNQSAAQFIRQQMDALQIGADLSAIPWGTKNRSIPLPPSALLENKMSDVPNT

SEQ ID NO: 399424 - protein, 465 aa, unidentified
MARTKQSTSKFRTKQKGRAQLKPQDWTLGLSVVHPKAAGIDVGNAEHWVAVPPALDPDPVRKFGCFTVDLMALADWLQQLGIETVALQSTGVYWVALDDILSARGIRVFLVNPRDTKNLPGRKSDIQECQWLLKLHVYGLLRNSFRPEEEILRMRTYWRQRQQHIGDAARCIQHMQKVLTQMNLQLANVISDISGSTGQAIVAAILDGERDARKLAELRDPGIKASAEEVAQSLVGNWREELLFVLRQEWEGYRAMQQRIAECDEQLKQHYRTMAEKADPQQLPPCRRAKRPHGNVPLCFDLRSELYRVTGVDLTAIDGINVLTAQTVISEVGMDMRRFETEAQFVSFLNLSPNNKISGGKIIGHDKRKARNRAGLALRFAALSLIRSETYLGAQYRRLRTRLGTPKAQKAMANKLARIIYRMLKHGEAYVDKGREYYEQKYRQQQIRMLQKKAAEFGLQVTEAA

SEQ ID NO: 399425 - protein, 376 aa, unidentified
MTTATRPEPSVSEPTVYVAFELSAKQWKLAMTSGVGVAPWLRTVPSGDLAAVARAIAQARRRFVLLPSAPAVSCYEAGRDGFWIHRALTVQGITNRVVDSASIEVSRRARRAKTDRLDALQLVAMLVRVSQGECGVWREVRVPSVAEEAARHVSRERTALTQERTRLTNQLRSWLTTWGCALPARRTGAWWTTVRDWAGAPLPVSVQARLARTQARWVALEAQIDALDEQQAATTAATAPDTPLGRLVRVKGVATTSAAVLLDEGLVWRAFRNRREIGGLLGFAPTPYQSGDRRHEQGISRAGNHRLQATSVQLAWQWVRWQPDSPITHWYQTRFAAGGSRLRRIGIVAVARRLLIALWRYATAGVVPVGAILKRV

SEQ ID NO: 399426 - protein, 364 aa, unidentified
MHSINNIELSSLEETRCQFNGGKCTIKLGIDVHQDFYVVVEQVGGSNPKPPQRFAKEAFLHWATRLKQKSSAEVYAVYEACGFGFSLQRKLSALSINCYVVCPQKLDEQNRRVKTDGLDAKALCLKLDRFVQGNRDALAIVRVPTEEEEQLRAIHRQREQLVGARKRLEAQGRSLMVNHGVEPVQNWWKPRTFAALPAPQWMKELLANSQPILVALQQKISALTVELQSAASPDQPRGLGKMTSVVIDREIGDWNRFNNRRQIASYTGLCPGEYSSGNTRLQSCVTKQGNPRLRAALVELAWRLVRFQRDYKAVRKWRQILAKGALATGAARKKAIVAVARQLAVDLWRIKTGRLSAEELGLIN

SEQ ID NO: 399427 - protein, 294 aa, unidentified
MTYAGLDVHARSTHAAAVEVRTGELRRARFAGGVTEPLAWLAGLPGPVHACYEAGPTGFGLYRAAVEAGLRVEVVAPSKTPRAPGDRVKTDRKDAELLARLLLAGQLRPIVVPSCEVEAARHLCRAREQVRGDLMRCRHRVSKLLLLHGRVYGEPTTWNRPHRQWLARQRFDQPATELAYLDTLAAVDGLVARKTVLDERLSHLALDGEWGPTVARLRCFRGIDTLTALVLSLEIGDFARFARPGQLASWLGLVPTLDQSGESRTSGAITKCGSSFARRLLVEAAWQYLRQPRI

SEQ ID NO: 399428 - protein, 358 aa, unidentified
MLINQQMMTNIAKQAVGIDVAQEELVASLGRMSHDTGIEIYAYKTFANSISGFKSLVSWVDKLSLGELNVRYVMEATGVYHESLAYYLSDQGKQVSIVLPNKISNYFKTLDIRTITDKTASQAICRFALERRLEDWQQPRKLYRVLKQLTRERDQLIVERTALKNQMHAEVSEAFPNQSSVKRLSERIELINRHELEIKTELSRTVKEDSELSKKISLITTIPGVGRLTALVVLAETNGFELIKSKKQLIGYSGLDVKVKDSGTSIKGKPRISKRGNRHLRKAMHMPALAAIRSNGPHKDMFLRLVSGHGIKMKAVVAVQRKLLALIYTIFKTGKPYDKNYEKNIINKEIIVRAATIK

SEQ ID NO: 399429 - protein, 350 aa, unidentified
MARFGSLARLRTQAAVTAKLVRKLATKYERLTFCYEAGPTGYGLHRQIKALGFGCAVVAPSLIPKRRGDKVKTNRRDALSLAKLLRADELTPVWVPDGRHEAMRDLTRARETAMLDLRTKRQHVSAFLLRLGRPYPESNKTWTRAHVSWIASQKLDHPQQRLVLEEMMLAIRQAQDRLVRLEQAIAAAVPEWSLAPLVTALMAMRGIDTISATTLLSEIGDLSRFQTPTELMAYLGLVPSEASTGDTVKRGPITKAGNRRARRMLVECSWSYQHPPRVGQAKQPKVDAAPLAVREIAWKAQCRLHRRYRMLIRKGKLKTVAIVAIARELAGFIWAVARAVSTMPIAAATT

SEQ ID NO: 399430 - protein, 419 aa, unidentified
MNKIETKKQRIVNAKTLIVAIDIGKTTDTGYCRCPSGEECKPFEFSNNAEGFRKLWDRICWMKTSHHLEEVVVGFESTGAYGEPLVHYLRQKPVKLVQVNPMHTKRMKELQGNSPGKTDRKDPKVIADIIGLGHALSVVIPEGAAAELRRLTLARERSIERRTALYNQLQDLVFIVFPEFLQVMKDIKTHTAQYLLRHYPTPQDMVACGSEELIRILRQVSRGKLGKVRAQALYDAAVQSVGLQEGRRGILLETEEILSGLEACKRFIEKMEEEMVPYLEQIPYSDSLLSVKGIGKITVAGLIGEVGDFRQFHTLREVMKLAGLDLFEISSGKHKGNRHISKRGRPLLRKLLYFAAINTIRKGGVMHASYQRYLERGMPKIKALIAIARKLLGILFALVRDHSQYVENYSPKEVLKLAA

SEQ ID NO: 399431 - protein, 345 aa, unidentified
MQHTTIAVDVAKSVFEVAVSQRPGKVSSRQRLTRPRFARFLREQEPATVVMEACGMAHHWGREAQASGHTVRLLPPRDVRPYVRGNKTDRSDASGLLEANRNEAIRPVPVKSVEQHALAGLHRMRSAWMATRTARLNTIRGLLRELGLMIPAGARQVVPRVWDLISEADSRLPEPLRVVLAEAAREVAELEGRIGEVEAQIEGLAKQSPLVRRLRTIPGVGLLTATAIVASIGDLRRFPSARHFASALGLTPREYSSGHVRRLGRITKRGDPYLRMLLIHGARSVLHHAKRSPAPDRLRSWALERERLRGHNKAAVAVANKLARICWAVAVREDDYHSRSATDAE

SEQ ID NO: 399432 - protein, 405 aa, unidentified
MEFVVALDVSIGKSYSVIYQDQRCLYEEEIAHNQLGFQQLFDHIQTLPGSVTVVFEATGIYSKPVETFCQRNALRYCILNPLEAKKQLELGTLRSWKTDKHDAHLLAQSHSLHRREENQTQSIIYQHLRDLSRFYQEIEEEIKRMRMYLHNALQLSFPELEQFFSSRITPYALSLIALFPHPDLVLRSSITKIKNQLINHTLKNISQNRAKQKAVEIMSYAHSSYPAVSIESVQTQKVRYYARQLLHLLEEKERVSKELIEEAKNLPEFDLFLSVPGIGEISAALVMGKLGDLSRFSNHKKVNAFVGIDIRRYQSGKYHGQDHINKRGNPKGRKILYLIIRNMIRQQKAAPNHIVEYYYKLKKQPTPKKDKVAVVACMNKLIKCMYSMARNHTEYDYSHAVSMDQ

SEQ ID NO: 399433 - protein, 347 aa, unidentified
MRFYTKEHRYYCGIDLHARSMYLCILSKDGEIVLHRDMRAEPEPFLAAIAPYREDIVVSVECIFTWYWIADLCGRENIPFVLGHALYMKAIHGGKTKNDRIDSRKIAGLLRSGMIPMAYVYPSGMRATRDLLRRRNHFVRKRADLLAHIQNTLSQYNLPEFGKKLTNKVNFESIIERFHDPEVKRSIAVDLELIEHYNHIITNLERYITRVAAGHDPQALHLLKTVYGIGNILALVILYEIHDIERFPRVQDFASYARLVKCTRESAGKRHGSSNKKIGSMHLKWAFSEAAVLFLRKNPKGMAYKKRLERKHGKSKALTILSHKLGRAVYYMLKRGKAFDMELFLRV

SEQ ID NO: 399434 - protein, 466 aa, unidentified
MENNYILYVGMDVSKGKADAAILKVSDRRSVKPKFLRKKLSFKFVKSEVASFLETVRSYSDVNCTSICFALEVTGIYSTNVYDYIKANLYENESIKFLNTDFVNQWRIAHNIAKSDPLDAQTISTIIGTDSDVQYVNDNVFENKNGYQDLKALVHRHYQIKKIYSQEINRLIAQCDCLFPELQYVFEPKSAAFIAVLSSYPTTHDIINASRIEVFDVVYEATKHRCSMDKVDKLFELCQDTLVPDDISSYGKSIILDLVENIKNIKGQLKSIERYIKDIASLNPAYKLLLTITGCGPITAATVIAETGNIRRFKNADCFVSYSGTSPRNKRSGTSVETMGKISKKGSRYLRHAIYMIAEFARRHNPVLKHQFERIKNGNKKRHKLANIAIANKIARYIYSIMKNKSSFVILHDHIMRLPEETRDTFFNSISLDFPKNTRKQIYQYSDINGELHRFVYIKTDEMIPA

SEQ ID NO: 399435 - protein, 442 aa, unidentified
MKYNQNFKIMQITDKTLVIGVDIAKKIHYARTFDWRGIELDRTISFKANSTGFSEFMKWAKKTAEKNGKDKIIVGIEPTGHYWYTFAQALLVEGIMVVQVNPYHVKKAKELDDNSPSKSDRKDPKTIAMLVKDGRYQIPYIPTGKYAELRKANNLREEWLKKMWSIKNKMQRWLDTYFPEFLKVFSDREGKAAIMTLERMCLPSKIVGHTAEEIVSIWREEIKRAVGIKRAQKLIAIANSSVGIKEGLKMAEYEMQLLLKEYLEVRKILDELEKHLEDIVLNIPGAERLLEVKGIGIKTVAGFLAEIGDITRFSHPKQIIKLAGLNLRENSSGEHKGETKITKRGRSRLRAILFRAILPLAAKNQEFNTLHKYYTTKKENPLKKKQSLIALCNKLIRIAYTLITMDVAYDPAKMMEDCSAPRCQDTISKILSYIFLPSFVSF

SEQ ID NO: 399436 - protein, 343 aa, unidentified
MSMVRSVIGGVDTHADFHVAAAIDGNGAMLGIESFPADAAGYEELLGWLASFGAVTLVGVEGTGSWGVGLARFLHDHEVETVEVDRPNRQKRRKRGKSDPIDAEAAARAALSGEASVTPKTRNGPIEQMRVLLVARRSARTQRIQTLNQLRHLVFCGPEPIRVRFKDRYKTGLVSEAANMRPRNGSDPVTFTTNVVIRNLARRIQALNTEMASIDQMLSDLVAATAPSLLELHGVGLDSAATLLVTAGDNPDRLQSEGSWAHLCGVAPLPASTGKTPRHRLNRGGDRQANAALYRIVLTRMSNHPETRRYVTRRRNQGRNTTEIMRSLKRYAARQVFKHLQMA

SEQ ID NO: 399437 - protein, 381 aa, unidentified
MVNPTTLPDRTLEQACTMVLFMALELSDKKWKLALSDGTKRRIVTIAAGDLVALGEAVAKAKARFGMHGVVPIVSCDEAGRDGFWLHRYLLHCGVANVVVDASSIEVNRRARRAKTDRIDVEQLLRLLIRYHHREKRVWSVVHVPSVEEEDARRLHRDLERLKKERTGHHNRIQALLVSQGSRLQPRHDLLERLEAARLWDGSALPPDLQAEVRREEARLRLVDEPIRALEAEQARRLEAAATPCHQQIAHLMRLRALGLTSAWVFVMEYFGWRQFHNRKEVAALAGLTPMPYASGDSARDQGMSKAGNRRIRTLMIQIAWGWLRYQPHSALSIWFNTRFALGGKRMRRIGIVALARRLLIALWLYVQSGAIPEGASLKPL

SEQ ID NO: 399438 - protein, 412 aa, unidentified
MSQMLVGIDVSLRSHHVHFMHGEGHTLADFSVRNDVEGADTLIQKIVRTAEKNQTNQLKIGMEATDQYSWHLAHYLKAQCKKVLPHLQTAIYMLNARKVARFKKGYDTLPKNDKMDAWVIADHLRFGRLPHEMQETLIYDALRRLTRTRFHLVHEIARNKTYMLNQLYLKFSGLRQDNPFSDTFGTTSIAVIEELDPGKIADMPLEELVEFLQEKGKNRFVEPEEIAKYLKQLARNSYRLDKMMADPVNLSLSVILSTIQHMESQVKRLDKEIERMMKGIPQTLTSIKGIGPVYAAGLIAEIGDIHRFDDHHALAKYAGLVWTQYQSGEFEAENTSRMRTGNKYLRYYLVQASDAIRKHDTEYKAFYQKKYHEVPKHQHKRALVLTARKLVRLVHSLLRTKQLYIPKEERRE

SEQ ID NO: 399439 - protein, 401 aa, unidentified
MAKLWAGIDAGKAHHHCVVIDADGARLLSQKIPNDEPALLELIADVLKLAGGDEVIWATDLNHGGPALLIALLVAHGQNILYIPGRVVHHASRLYRGEGKTDAKDAAVIADQARMRRDLQPLRAGDEISTGLRILTARRADKSADRVRAINRLQAQLLEYFPALERAFDYSRSKAALLLLTRHRTPEGIRRTGQARLQAWLKKHGARSSAAVAQAAVDAAKSQHTTVPAQHVGELIVAALAEEIITLDKELADLDALISEKVIEHRHARALLSMPGFGPVLAAEFLGATGGDLEVFETADRFAGVAGLAPAPRDSGRITGNHHRPRRYDRRLLRVFYLSGLSALKSCPASRAYYDRKRAEGKTHIQAMLSLARRRLNVLWAMLRDGTTYTPVSAQAARLAS

SEQ ID NO: 399440 - protein, 339 aa, unidentified
MKLYAAIDLHSNQQTLVVLDEQDRQVHRRRLPNVLEVVLAELAPFQRELEGVVVESTYNWYWLVDGLMATGYRVHLANTAALEQYEGLKHGDDDSDARWLAHCLRLGLLPEGYIYPRESRPVRDLLRKRAQLVRQRTADILSIENLTSRNSGVQINANRVKQLTVEEVRRQYGQEDLALPLESTLAVIEVLDQQIHRLEKRVKGKAKLAAEFQPLLTVSGVGEILGLTIMLETGDIRRFARVGDYASYCRCVESLRFSNGKKKGSGNRKCGNKYLAWAFMEAANFAIRYDATIKRFYQRKKARSNVAVARKAVAHKLARASYYVMRDRTPFQVEKCFGG

SEQ ID NO: 399441 - protein, 354 aa, unidentified
MKMAAQAGKGSYAGEQVFVGIDVHKESWHVTVRSSGEEIFNGRIPGQYQSLKRILDRYRDSRIKVAYEAGPFGFSLLDRLTLDGVETIVVPPSLIPVESGNKVKTDKRDSRKLATLLESNMLKHVHVLTPEEREHRDLLRTRRQIVEHRNDVARQIKSKLMFYGIRSPYTSTARWSLQYVAWLKTITFETSYLKEAFELLIQTYEYLTRQIARINRTVVLLCRDKRYRGRIKLLCTAPGIGRLTAIELLVELQDMTRFKSAEELASYIGLTPSEYSTGERTRQGRITRCGNKRVRTYLVESTWVLITKDAQLRAKYLRLKNRRGGKRAVIAIARTFLIRLRRMLLDNVPYRMAA

SEQ ID NO: 399442 - protein, 354 aa, unidentified
MKILALDCGKNKSVFLDYQTANGPKEYGKVLTRSADIHDLLVARKPDVLVLEIGPDAGWMYDIAAALNIATKVVNTNDERWQWKKTRNKNDRKDTLKMAQMTEMDSLPTVHMPDPKVRQWRSLIQYRHGLVDRRTSIKNSIRATFERQGQRLPAGYKAWTEAGVKEWSKEARPLADCPAQELWRGSLHEELEQLKSLEKSIEIVEKKLDELAAADARIKQLKTAPCVGPRLSELVVATLDDAKRFKNGKQVGAYAGLTPRQWQSGNSCREGHISRMGNPILREVLVEVCWLGIRTNKWMKQVYEDVRRGSNKRKKIAIVAVARRLLVRLWAMLRDGTDWKEPKARTVAPEAAPA

SEQ ID NO: 399443 - protein, 391 aa, unidentified
MLICGIDIGKNNHEASIIDETGRLLAKSLRFTNTTSGGEKLLDYFNSCNPEGDVIVIGMEATGHYWLSLYCFLFDKGYQVNVINPIQSDAIRNLFIRKTKNDAKDSFLIAETIRIGRFSTTELADEDILSMRQLCRHRMDLVDYIADQKRKIIGVMDRVFPEYQTLFSDMFGKTSTELLNKAITPEEILEIPTDELASLLKSSSRGRFGQAKAEEIQTLAKTSFGITIGTSALSMQLRQLLEMIEVLERQLTELETEIEIYLHKTNPIIISCPGIGNVLGAIILSEIGDISRFPDGKRLVAFVGIDPSVRQSGEFVGTQNKMSKRGSPHLRRAIWLAANVAAFHDPVLSAFYQKKRAEGKHHYTALGAVSRKLTLIIYAVLRDNKPYVPNC

SEQ ID NO: 399444 - protein, 316 aa, unidentified
MSAVQLFVGIDVAKAQLDVALRPTDERWAVANDDPGIATLVARLQVRHPTLIVLEASGGYQRAVVAALATAGLPVAVVNPRQARDFAKATGQLAKTDALDARALAHFAEAVRPIPRPLPDAQADELRALLTRRRQLVAMRTTEQNRLGSAPRRLQADIQAHIAWLNERLAALDDDLGTTLRASPVWREREELLRSVPGIGPVCARTLVLDLPEWGMLSRQRLAALVGVAPVNRDSGTLRGSRTIWGGRAHVRATLYMSTLVAVRYNPVLKAFYDHLRAKGKAAKVALTACMRKVLTILNAMVKHQKRWQPREVPSA

SEQ ID NO: 399445 - protein, 316 aa, unidentified
MGGQGVYVGVDVSKARLDVAMRPSDEFFSQANDKRALSRLLKRLKPLDCTRVVVEATGGYESLLVAALYAAGVPVVVVNPRWVRHFAKGMGWLEKTDRIDAKLLALYAERAELKPQQLPDEATRRLSELCARRGDLLEMLESERNRLEHASSTVRHTINRHIDYLRKQLKRIERDIDGAVRGSVLWRHQAELMDSVPGVGPTLRACLLAWLPELGQLNRGEAGKLVGVAPLPDDSGTSRGVRRIYGGRAPLRKVLFMATMGAMLHNPHLRAYYDGLRARGKLHKVALVATMRKLLLILNAIIKTDTPWSESCLENT

SEQ ID NO: 399446 - protein, 454 aa, unidentified
MKKANSAPQPKAQAALQIVFPNAAGLDIGASEIMVAIPPDREGVTVRGFGTYTPDLAALADWLKEGGVTHVAMESTGVYWIPIFELLEERGFEVIVVNARHIKHPPGRKSDVMDCQWIQQLHAHGMLRGSFRPEADMCTLRAYLRHRDNLLEDRAKHIQYMEKALLQMNLQLGQVLSDLTGETGLAILHAIVGGEHDPLVLSRMRHGNCKHSQEDLIKALTGHYRKEHLFVLKQALAMFETFSQRLRECDQEIEHLLEEIKPELPDDFPPLPPDPKPNSHSKNAPSYDARALLYPLVGVDLMAIPGMNEILLQKILAEVGLDMSRFPTVKDFCSWLGLAPHNAISGGRILYSHTLKNHNRAGQCFRLAARAVSRGKTVYSEFYRHIRARSGAKEANVATAHKIARTFYFMLLRGQPFLAPDLQTFLQVQREKDIRRLQARAAKYGFCLQPVEVA

SEQ ID NO: 399447 - protein, 425 aa, unidentified
MHFINAVELDQKAVFGHLEEPLIVAPILEARRGKSHVERCPVGDLSRNLFDQCAGGTAMEVVYPRCSGLDVHKRFVVACLSVVEKGQRQKELRRFSTMTNELLVMKEWLKAAGCTHIAMESTGVYWKPIFHLLEGEFEIVLVNAQHMKAVPGRKTDIKDADGIADLLQHGLLKASFIPSSEHQAVRDLTRTRMRLLQERTRLINRIHKVLEDANLKLASVGTDIMGVTGLAILTALLAGEEEPEHLARLARGSLIRKQDQLPAALEGKLLPHHHVVLEELLPLITTINRSIARFDREIAERLGRFDALIERIDAVTGLSRRSIEVLLGELGWDMSHFPDAAHAASWVGVCPGNHETGGKQLSGRTRQGNRWAKSVLIQAAHAAGHTQTYLGEPYRRISARRGAKKAAMAVGHSILVIFASFGEDW

SEQ ID NO: 399448 - protein, 346 aa, unidentified
MLVRNLFYKLLKCKVMQINETIGIDVDKLNLVVRVHTTQLENVFGNNLNGFKQFDKWIKQEVKLPKENILIAFEHTGLYSLQLSVFLKEQQYLYAVLSGLELKKSLGIKRGKTDKIDAKNIALYAYRCKEEIKPYQLAEESLLKLKRLITLRDRLVKQRRGYKTSLKEIKKILTRAEDNVLFETYETMIKCLNKQINKVDEAMMQIINSDEELSRIYSLITSIRGVGFVTSALMIAVTDGFRRFHNSRKFATYSGIAPFPYQSGTSIKGKTKVSQLANKKLKSILSLCAISAIRYNRELKAFYLKKISEGKGKRSVINIIRNKIVARIFAVIRRGTPYVDIYKYAA

SEQ ID NO: 399449 - protein, 391 aa, unidentified
MTYIVAIDLAKYHHECLIISQNGKVIFKSFSFDNNAQGFDFFLSFLSQLSNSNKIKIGFEATGHYGDNLKNFLIKSGYDFMEIHPVLINRFSKASTLRKTKTDKVDVSIICSYLNSVDYEPYSTESYHMKYFKSLTRSRDSLVKERSLQLQRMTNVLDIMFPEFKPFFKNSLKSATAQYLLINYSTPGKISRMNQISYKKMSSKLRRTISYAKFTKLKELAQNTVGTENHLTEFQLNNYLSLYQTLNTMIQNTDTLILEEFSRKESYLQTIPGIGPISAATIMSEIEDINKFSNPNQLVAYSGLDPAFYQSGETEFTGRMVKRGSSLLRQCIMNCAQSSLMYNPTLYDYYHKKRQEGKAHRVALSHVAKKLVRIIFTLETKKIEFDSNLMR

SEQ ID NO: 399450 - protein, 350 aa, unidentified
MMVIVGIDAHKRTHTAVAIDEAGRKLGEKRTTSTTTEANLELLRWADAFGKERRFAVEDCRHLSRRLEADMLAAGEELVRVPPKLMAHARDAARTYGKSDPIDALAVARAAWREPSLPRACLDGPSRDLRLLVDHREDLVRERTSQVNRLRWHLHELDPSWDPAPRLLVRFKHLDALGARLDGLGGTVAWVARDLVARIRELTVAANELERRIVEQVSRLAPALLGLAGVGGLTAAKIVAEVADVRRFHSKDAFARHNGTAPLPVWSGNLVRHRLSRTGNRQLNAAIHRIAVTQMRIHDGAKLYLGRRIAMGNTKTEAIRALKRQLSDVVYRTLMTDAVSTQVARFGEAA

SEQ ID NO: 399451 - protein, 343 aa, unidentified
MTLQSEKTVPVSKPLFAGIDVGAEELILVIRKNGTSYKAQKFANTPADRARLVKKLVNLPGSRVCLEATGVYHFDLSLALHDAGVALMVVNPKSSHHFAQVLMKNSKTDAVDADTLAHYAERMDFVAWTRPSEEKIALRSFARRIDALTRQKAAAKNQLHALSASAENPDAVLRDVNLSITQLEKRIAHLTQAARVLIGKQADLERAFRLLTSVKGIAQTSAIALMGELLLLPPGLSHRAWVKFAGLDPRAFDSGKSVHKQARLSKAGNRHIRSALYMPALSAKQHDPYVKAYFQHLVDNGKKPLQALCAVMRKLLHAIHGMLKQDKPFDNTRFYAIPAGAGK

SEQ ID NO: 399452 - protein, 329 aa, unidentified
MKKNWFVGIDVSKKWLDVAIFVENSDLKGYTHTRVNNDKQGYRELLRWLKENGVDASTCTYGMEHTGFYSDGLQHFLDKKGCRYTMLEPAVIKHYPIQPREKNDRLDAAKIADYLYRFRDTIQLSRVPDKTMEELRKLHRERKFYVEDRVCYLNRRQVVDKDEAKRLDKMIELLDKQIDTIEEKIRQIIQNDEALMENYLYLDSIKGIGFVNAVNAIVITQNFTVFKTAREYASYIGVAPHTKTSGTTVRWKPKPRKHCDLTAKADISQAAKIAVVHDVELKKFYERKCNGKDDADTVRKAMNAVKFKLVLRMFAVVRQKHAYKQLTMI

SEQ ID NO: 399453 - protein, 462 aa, unidentified
MKKPTKPTDKKTLTLPKHLPRHLQRLNLNAAGIDIGSKSHFVAVPEGSDEEPVREFDCFTSDLNRLADWLISCGVTTVAMESTGTYWIPVFEILESRSFEVKLVNSYHVKNVPGRKSDVMDCQWIQQLHTYGLLEAAFRPPEQICALRAYIRHRMNQVRYASAHVQHMQKALTQMNLLLQNVVTDITGVTGMRIIKAIIDGERDTRVLAAMRDKRCKNSIETIAKSLQGNYRPEHLFSLKQAVATFEFYQAQIADCDREIEILLATFDSATEDTKPPGPKAGKSGKARDTPHAFTLQNELYRVTGVDLTRIDGIDTNTAVKVISEIGFDMDRWKSPKHFASWLGLSPGSKITGGKRLSGKTKKVVNRAATALRLAACSLSRSRCALGAYYRRMKGRLGAPKAITATAHKLARLVYSMLKYGTDYTDVGQDYYEQRYKSKVIQNMKKRALELGFDLVEIPSAI

SEQ ID NO: 399454 - protein, 369 aa, unidentified
MEHCTEVFVGIDVAKARNAVAVADGERGGEVRYLGELAATPEAMRRMVQRLASRHQQLHFCYEAGPTGYGLYRLITSMGYPCTVIAPSLIPKRAGDRVKTNRRDAIELAKLLRAGELTAVWVPDEAHEAVRDLIRARTAAVEILRVHRQQVSALLLKHGTSYPGKKTWGARHLKWLQEQRFDHPAHQIALQEMVDAVRVAKERVARLEHAIEEFLPQWVLEPVVRALQALRGVDLIVAITFVTEIGDMRRFDNPRQLMAYIGLVPSERSTGDTVRRGGITKAGNTRMRQLLVESAWSYRYAPKVGARKLYLLEKTTPAVRDIAWKAQSRLSARYRALTTKGKKSTVVCTAVARELVGFMWAAAREAQPA

SEQ ID NO: 399455 - protein, 344 aa, unidentified
MEIRSVGIDLGKTSFHLVALGDRGKVLVKKKFTQKQLITFTANLQTCLIGMESCSGSHFLGRALREQGHEVKLIPAQFVKPFVKSHKNDFVDAEAIAEAVERENMRFVPIKTDDQLDLQSLHRVRERLMTRRTALINQIRGFLLERGIVFAKSPLRLREALPEVLENANEDLSPRMPNLIAIQWSEWKDLELQIAEMNDEVERIASSDDACRRLRQIPGIGPLVATAIVASIGNGAASRKGREFAAWLGLLPNQHSTGGKSKLGAISRRGNCYLRKILIHGARAVVLRSKRDRIAMGAWMTSLAIRAPRNILIVATAHKLARIAWAVLSTGQDYRADVPAAAAA

SEQ ID NO: 399456 - protein, 342 aa, unidentified
MNVTTYGLDVAKRVFQMYWVDGDTGEIMNRRFGRGDLVQYLSRRPPGRVALEACGSAHWWARKIRALGHDVVLLHAKFIRPFVQTNKTDAADARAIWTAVQQPGMRTVAAKTEDQQAMLGLHRIRSLLVKFRTMQVNQLRGLLYEFGASFRAGRAAGLTEIRSRMPELEEALPGMLMCCLQDQLQRIDELQTQIDQLELRIAAWQKHDAACRAIADVPGIGRLTATALVATMGDAATFRSGREFAAFLGLVPRQSGTGGKVRLGAISKRGDPYLRTLLIHGARSALYHTKVPTAWMSAIQARRPANVAAVAVAGKMARTAWAILARGQAYQRDHMSVRPRPA

SEQ ID NO: 399457 - protein, 393 aa, unidentified
MANLTPIGLRRSLLSYDFWWFLRQKGATARHVIYDGQWRGSDRSPLGHRGPFPSVVAPVLSYDLNGYLGFGPARQDKVRKRQMNYIIGIDISKDTLDVHRLADGQHMQVLNGIRGFAELFRWIEPHPTALIIFEATGPYHRQLEQALCVKGIPFVKVNPKQARRFAQASGKLAKTDRVDCEMFAKMGAALQLMPKPISAENLYDLRDLLAARRALIKDRTAAKARNATVTHALVKRQLEKRLRQIKCDIAKIDAAILEMARQDLCMTERLDILSSIPGVGVTTALIILVERPEIGELDGKQVASLAGLAPMSQSSGKWQGKARIQGGRPNLRHAIFMPALVAIRFNADLKAKYDQLVAAGKEKKVAITAVMRKLLVLANALLRDQRMWSENQG

SEQ ID NO: 399458 - protein, 343 aa, unidentified
MDYFAGLDVSVKDTSVCIVDGTGKIVREVKVASEPQALLVVLRNATYCFKRIGLEAGPLSQWLYGALAEARLPVICVETRHMQAALKAQINKTDRNDARGMAQMMRVGLYRPVHVKTLRSQKLRMLLTHRKLVQSKAIALDNDLRGTLRNFGLKVGVVGTVKFEARVRELVENLPDVAELVEPLLIVRRVLREQLGILHRRLLAIVRDDDVCRRLMTIPGVGPVVALTYRATVDVPVRFRKSKSVGAVFGLTCAKYQSGEIDRTGAISRCGDEMVRTTLYEAAQILLVRTTKWSWLKAWAMQIARRRGMKRAIVALARRLAVIMHRIWVDDTEFRWTRNAAAA

SEQ ID NO: 399459 - protein, 316 aa, unidentified
MNTKINQNINVGVDTGKFQLDIYIRPLDIYFTVKNDETGIKEAVKQLKKHKPERIVIEATGRLEMPFIMACADAGLPFTIANPIHVKRFAGAIGQRAKTDKLDAQLIAHYSEAIKPALSKLKPDTMQAMSDLVSRRNQLLGMQTMEKNRLQNLPKSLAMTIKPVLTMFKNQIRKIEDKIVKLIESNPEYQAKNMILQSMKGIGKIAAASLISNLPELGHINSKQASALIGVAPMNRESGRYKGKRKIQGGRPQVRTVLYMSMMSAMQSNPVFKATYQRLLAAGKPKKVAIIACIRKMIVILNSMLRDGVMWEAPNS

SEQ ID NO: 399460 - protein, 391 aa, unidentified
MSQHCHFDASRSLTALEQDTTIIAVIEMSQSKWLVAALVPGVEHQPLKKLDAQEEGLLKLLHRWRTEAGQAGREIKRIVVAYEAGRDGFWLARWLRARDVEAYVIHPTSIAVSREHRRAKTDRLDTELLMRAFLGWLRGEIRHCSMVAIPTIEEEDARRPNRERHNLVTEQTRLVNQMKAIFTRFGIRSLRPTLRKVEEKLKGLRTAEGTPLPENTRAELFRHLARLRVVREQIRAVEQERLRKLAAAPAAESDPHAMVRLIARVLGVGIETADMLVNEVLLRHWRDRKAVARYAGLTGSPDESGRRRRERGLARAGNARVRCGMIQFAWRFLRFQKDSALAKWFAARTADRRASTRKTMIVALARKLLIALWCLVTKGEVPQGVILRPAS

SEQ ID NO: 399461 - protein, 343 aa, unidentified
MQVSTIGLDLAKNVFQAHGVSAEGKVVLKKQLRRGQVLSTFAKLPPCLVGMEACAGAHYWARELRKLGHDVRLMPARDVKAYVKRDKTDAADAAAICEAVSRPSMRFVALKTPEQQGRLMQHRVRDLLLRQRTQTINALRAHMAELGLVAATGRQGLGLLLAILADAKDERLPQDARASLKLLASQITALQAQIDTLDKRLHAQHRQCPASRRLETIPGIGVIGATALAATITDPKAFKSGRDLAAFIGLVPRNNSSGGKQRLGPISKQGDRYLRRILVVGAHSILKQARTRPDKHPWLARLMTRKPGKLAAVALANKTARIAWAVLARGETYRAPTAPAAAG

SEQ ID NO: 399462 - protein, 369 aa, unidentified
MDKVIRAYVGLDVHKESIAVAVGDAAGGVARFVGTISHDVAQLLKVLGRLGQQGDLEVVYEAGPTGYGLQRALVAAGHACQVIAPSLIPRRPGDRVKTDRRDCVRLAELARAGELKPIWVPSPEDESIRDLARAREDAVNARTQVRHQLKGYLLRHGLRYPAKTAWSKGFYRWLGTLSFDGRPAQIAFAEYQQAVQAADERVARLTEALSSSIEGWRFATVVAALQALRGIDAVSAIGLVAEIGDIGRFVHPRQLMGYLGLVPTESSSGERIRKGSITKTGNAHARRLLTEAAWSYRFKPRIGYRAQVRQERLDEPLRQLAWKAQLRLTARFARLQARGLQINKICVAVARELAGFIWALARASAPARA

SEQ ID NO: 399463 - protein, 344 aa, unidentified
MILIGIDPHKSTHTAVAIDSSGNKIAHRRFPVNAGTFGQLMAWSQRWPERRFAVEGARGLGRGIAQQLAADGEHVVDVPSTLSARARMLATGGGRKTDAADALHVAHVALFRPDLRQVRSEDQATILRLLTERRDDLVNERTRLLNRLHVLLRDLVPGAAPIDLSAEKAAQLLRRVRPVTATDCCRRDLARDLLADLRRLDRAIKDNEHQMRDAVDASRTTLTNLPGVGIVLAAKILGHVGNIDRFPTEHHFASYTGSAPLEASSGNNTRHRLNTGGNRSLNCVLHIIATCQIRDIGPGQDYYRRKVSEGKTPAEARRALKRRLSNVIYRTMRRDQRNLLPEAA

SEQ ID NO: 399464 - protein, 359 aa, unidentified
MRNAEIHANSLLEVRRMYNAVGIDVSKGKSTVAVLQPGGTVIRKPFDVSHTSQNLNELADYLSSLDGTTKIVMECTGRYHEPMVKALSEAGLFISIVNPHLIKNFGNNSLRKVKSDPADARKIARYTLDNWTELRQYSGMDNTRTQLKTLNSQFSFFMKQKVAAKANLIALLDNTYPGVNKLFDSPTREDGSEKWVDYAYSFWHADCVRKIGLKAFTERYMSFCKKHHYIFQQDRPEKLFNASKELVAVFPKEKTYKLLIQQSIQQLNLASEHVERLRREMNELASTLPEYSTVMGIYVVGKTYGPQLIAEIGDVSRFTHREALTAFAGVDPGVDESGQHKSKSNRASKVGSARHCFRS

SEQ ID NO: 399465 - protein, 314 aa, unidentified
MYTEKSQIEFEQIVERGCGIDVHKSIIVATIRGTGIKEETRTFNGFTSSIEELRDWLKTNNITHVAMESTGVYWKPIFNILEIDFVIILVNARHIKNVPGHKTDKKDSKWIAKLLLSGLLKGSFIPKKPIRELRDLTRYKRKIIEQVAAEKNRIQKILEDANIKLSSVISDMDGSTATKIINAMISGVEDIDELLKFRHGKIQSSKEELASALKGNLTTHHKFMLQTIKMSITEKESIITLLDKQIDNHLKENELEFDAKLLTSIPGVGKEGAAYMLAEIGNEMDQFPDENHLSSWAGISPGNNESAGKKKVVE

SEQ ID NO: 399466 - protein, 356 aa, unidentified
MLYLGIDQHARQITISLRDDHGDVRLARQVSTQPEKITAFFQQLTRDRRRDGERFVAVLEVCGFNDWLIRLLLDYRCHKVILIQPEDRKKCKTDRRDAAALSELLWVNRERLLQGQPVRGLRQVEIASTADREDRRLTTLRKEAGGARTRLINKVKQILRRHNLQWQMPTKTFPTVAAVAWLKGLALPEIDRLEMDHLLADLEQAEKRLKDLERVIARRCAASAGGKVLSSMPGVGGGFTALSLACRVGQVERFPRARSLANYWGLTPGCRNSGESDQRLGRITKAGSPTARWLLAQLVHKVLRRDARLRDWFRRVKRRRGPTVARVAVMRKLATIIWHVLSKRKTYAECRAPAAA

SEQ ID NO: 399467 - protein, 437 aa, unidentified
MTKNKNQAKKTVCLQSLPLIHPNAAGIDVGAKEHVVAVPADRDPEPVRSFKAFTPDLYELADWLKGCGVETVALESTGIYWITLYEILEERGFQVRVVNARHVKNVPGRTKTDVLDCQWIQKLHSFGLLSGSFRPDQQIRTLRSLMRLRDNLVVNSTQSVHHMQKALFEMNVQLSNVISDIVGESGMRILEAILAGERDPEALARLCSTRIKASRQTVAKSLHGNWREELLFALRVAMDSYRFAQSKIAECDERIGQHLAQFEDRAVLDTPPASLKSELHRICGVDLTKIPGIKEQAAQIIISEVGLDMTRWNTEKQFASFLGLCPNNSISGGKVLRRSTRKVYNRAADALRLCSQSLTHSKTALGAKYRRLKGRLGAPKAIVAMAHHLARLVYRMLRYGRHYVEKGMAEYEIRFRLQRLKWLKREAKSLDMQLLPA

SEQ ID NO: 399468 - protein, 350 aa, unidentified
MVILSIDLGKYSSVCCWHTRGKEPVYERIETSPPSLKEAMVREKVDKVVIEVCHLAGWISDLCQGLNLTLEVASTQDERWRWKRVKRKTDRIDALKLAKLCFDGELTLVHVPARPVRQWRGLVIHRHRLIERQTQIKNSIRALFESQGQRLPAGASQWKSRTFRELLKSYAMPLERCGMDQLWKGQLQGELLMLRMLMRQTAKVEAKLDQLAGADEQIERLLSIPGIGLRTAEMVKVMLDDPKRFKHARQVGSYSGLTPRQYESGLMQRNGKISKAGPALLRKLLIQVAWGMLRNNPRGKALFNRICKGHKTRRKLAAVAVGRHALVWCWGVLNGDQNWNWKPKEELLAG

SEQ ID NO: 399469 - protein, 342 aa, unidentified
MQVTTIGLDIAKNVFQVHGIDAAEKVVVRKQLRRRQVLEFFKALPPCLVGMEACATAHYWARELTKLGHQVRLMPAKDVKAYVKRNKNDAADAEAICEAVRRPTMRFVQIKSTEQQGRLMLHRARDLLMRQRTQVINAMRAHLAELGIVAAQGRDGIKELLKIIASEEDARLPVDAHASLVVLAAGLHAVQTMIRSIEKRIMVQHRSNEASQRLETIPGIGVIGATAIAATVPDPKVFGSGRDFAAWIGLVPREDSTGGKQKLGPISKRGDRYLRRILVVGACAVLRYARHKPEKYPWLTQLLARKPFKVVAVALANKMARIAWALLAKGGTYRVPALAAAA

SEQ ID NO: 399470 - protein, 361 aa, unidentified
MAGTMTWVGLDVHARSTQAAAINAITGELSRMRFGVGTEGPLAWLGELPGPVRACYEAGPTGFGLYRAAVAAGIGMQVVAPGKTPRGPSDRVKTDRKDAELLARLLLAGSLARVVVPPPEVEAARELTRAHDACRRDLMNARHRVSKMLLRHGRVYPKSTTWTAEHRRWLSLQHFDERASELVFADLLAAVDGLSSRKAAIALRLSELATDEQWWPTVAQLRSFRGIDTLTALSLHLELGGDWRRFERPTALSSWLGLTPRLNQSGESSRQGAITKTGSMLARRLLVESAWHYSRAPRLGATLANRQQGQPDHILQIANRAQQRLHRVNRRMRARGKPHNVVVVACARQLACFLWAAATAD

SEQ ID NO: 399471 - protein, 385 aa, unidentified
MQKLNDLSRSLSPLDPDGALIAVIELSLSSWLVAGIVPGVERQPSKKLAVDESALLKLLHRWREEAAKAGHRIKRIAVAFEAGRDGFWLARWLSARDIEVHIIHASSVAVSREHRRAKTDRLDTELLKRSFLGWLRGERDHCKMVAIPTTKDEDAKRPNREHESLVGEQSRIVNRMKAALIRLGIRGFNPKLKKAAGRLEDLRTPEGEPIPPNTLAELRRDMERRRLISDQIRQIEDARLERIEQAPGDGPHAMVRLLARVIGVGIETADMLVQEVLSRNMRDRRAVARYAGLTGSPDESGTKRREKGLARSGNARVRRGMIQLAWRFLMFQKESALAQWFRARTETARGTRKTMIVALARKLLIALWRLVREGVVPDGVVLRPA

SEQ ID NO: 399472 - protein, 379 aa, unidentified
MEVPMVKHGHKRCDQLPVLHPDAAGIDVGASELFVAVGADRDPQPVRRFPTFTRDLHALADWLQQCGVRSVAMESTSVYWIPIYQILEARGLEVCLVNAQHVKNVPGRKTDVSDCQWLQYLHSVGLLRASFRPPGAICAVRALWRHRGSLVQMAAEHIMHIQKALDQMNLQIHRVLTEITGLSGLRILDAILSGERDPLILARLCHKRVKSSESTVAKSLEGDYRPEHIFALRQSLAAYRYYQQLVLETDQEIQRQMVELEAADNALAKMPKRTKRLPYQRQGHEPRVFDLRSELYRIFGVDLTNVPGISAMTSQTFLCEVGTDVSRFRNASAFASWLGLCPERKISGGKVLFTKSRRVRSRVAIALRLAARSLHHAKD

SEQ ID NO: 399473 - protein, 474 aa, unidentified
MKAKCRPMQGKWHEMNRKQRRDTMRKIQSDDLSLEVVHPDAAGIDIGNESHYVAVPPSRDSQPVRRFGCTTAELKAMAGWLKQSGIRTVAMQSTGVYWIAVYDVLEAAGLEVYLVNARETKNLPGRKSDVQESQWLMKLHTYGLLRNSFRPPQEIRTMRTYWRQRNDLVRAAGRHIQRIQKTLTQMNIQLANVLSDVSGMTGQTIIKAILEGERDPHKLAAFRDFRVKASEEEIARSLEGHWQEDLLFVLKQEQDGYEFCQKQMAECDRRLKQYLQQREDRSQGATLPEEKRKERLRKKKKGNAPGFDLRAELFRMTGTDLSQIDGIDVTTAMTILSEAGWDMSKWETEDHFVSWLRLCPDNRISGDKIIGKGRLPTNNRVTLALKMAASTLRLSNTYLGAQFRRLRTKLGAPIAIKAMAAKLARLVYRMLRYGMQFVDRGAKFYEAQHRNQQISYLKWKAAKLGFKILEASAA

SEQ ID NO: 399474 - protein, 416 aa, unidentified
MNELKCWFVGVDWASENHRVRITDGCGKRLGERDFAHGGAGLAEMAAWLTSVTGAEPSAIYIAIEIPHGPIVETLLERGFNVYSINPKQLDRFRDRFSPAGAKDDSRDAEVLADALRTDMRAFRRLALAEPLVVELREWSRMTDDLNGERNRLCNRLREQLWRYFPAMLELEQDLGAEWFLDLWELVPTPDKAMRIRDTSIARILKSRRIRRLTAAEVSAVLRKPPVTVAPGTIEAASAHIRVLTERLRVVNRQLKDAHRQLDRLCGLLAEPTESEPGQANEQRDAAILASLPGNGRIVLATLLAEGWEALQRRDYHALRTLCGAAPVTKRSGKTCIVTRRLACNPRLRNALYHWARVAVQHDPRSRAKYAALRLRGHGHARALRSVGDRLLNVACAMLRNGTQFNPSLESQKNPC

SEQ ID NO: 399475 - protein, 410 aa, unidentified
MDSAYYVAGIDVHKRMVAVVVANARDRELTFTCRRFGTTVSELRQLRAWLQEQAVQEAAMESTAQYWKPVWMALEGACRLHLAQARSNRGPRGRKTDFRDAQRIVSRLLSGDLVLSYVPDAEQRGWRTLTRTKHQLTRDRVRLQSQLESLLEECQIKLSSLVSDLLGVSGRRILRALADGETDPGRLAALADRRLQASPAALQDAVSGTVHPLHRQLLTLALARLELIETQMEAMDQLIATALTAHQAAITRLAELPGLGVDSAQQILAEIGPTAAAFPSASQLASWVGVCPGRQESAGESSSNRSAKGNRTLRRLLTQLARAAVRKEGTHLQLVFRRLVARMHYNRAIWAIAHRLCRLIWKVLHDGVRYVEHGMAPTPLLLKRRRQRLVSQLRQLGYEVTLTSVAPSVA

SEQ ID NO: 399476 - protein, 345 aa, unidentified
MQPMYYIGLDGHKRKISYCVKDSGVKVYAEGSLPATRFDLDHWMKTLPQPWTAAMEATMFTGWIYDHLKPHAAALKVAHPLMLRAIVAAKKKNDRIDANKICDCLRCDFLPECYMASTAIRERRRTLRYRNLLVRQMVQMKNKTSMLLMEAGVSYNKQRLHKAGYFRELLATNPDIDEGLVPLLRLCRETVVRLQRTESALVRSLERDSLLMDRVERLMTIPAVGPITALTWALEVGDAQRFSSIKKAISYCGLCGAEKSSANTVQRTPLSKQRNKHLQTTLIEAAKMAPRNSPELAMLYDTEKQKGNANRATLAVARKLVAYLMAVDRRQRDFQVVETSSGIAA

SEQ ID NO: 399477 - protein, 411 aa, unidentified
MDVLIERCAGLDVHRDTVVATVRRPGPGGTRRSETRTFTTMTGQLDMLADWLTEQKVTLVGMESTGIYWKPVYYVLEDRFPVWVINAEHLRNVPGRKTDVADSVWIAQLSEHGLVSPSFVPPRNVRLLRDVTRHGRRLTEERTRAIQRLEKVLQDAGIKLTSVASTILGKTGRAILAALLAGEEDPAVLAELAKGRLRPKIPVLREALTHRFRLEHHGALIAQMLAHIDFLESSILETHQRIEVLLRPVAATVELVMTIPGVGRRVAEVLIAEVGLDMTVFPTAGHLASWAGICPGNNSSGGKHRPGRTRHGSVWLRIALTEAAHVAARGKGTYLAAHHAQIRGRRGTQKAIGATRHDILIAYYHIVRDNVPYQDLGPDWNNRRRSTEQQTRRLVRQLERLGVNVTIESMS

SEQ ID NO: 399478 - protein, 361 aa, unidentified
MQHDSTRRTAPHTGNATGLTVGLDLGDTYSSLCVLDEEGNIVEEGRVRTTASALTRRFQGLVPSRVVLEVGTHSPWVSRLVAALGHEVVVANPRAVRLIAESDHKQDRTDAEHLARLGRLDPHLLAPIRHRGQKAQEDLAFIRSRHSLVRARTALINHVRGAVKAHGGRLPACSAPAFPRKVVASLPEGLRPALLPHLELIALLTRQIAATDRQVEALCTERYPETTLLRQVPGVGPLTTLTYVLTLEDPSRFRRSRDVGPYLGLTPRQRQSGARSPQLPISKAGDCYLRQLLVGCAHYILGPFGPDSDLRRWGLRYAPPGARNAKHRAVVAVARKLAVLLHRLWVTGEVYQPLRQGEQVA

SEQ ID NO: 399479 - protein, 426 aa, unidentified
MDRTMDRGIGVWIGVDWSDSSHEVCVVDDQGVRVRRFEVANSAEGLESLVVEIRSCGTVRGVAIESTRHLVVAKLIQAGFPTYLVNPKMTKAWRDGWRVAGAKDDKFDAWVHAEGLRHHHAQLRRLAPDDEATRRLTFLVEDEMRLIDMRTALVNQLQATLKIYYPVALEWFSDWTAPTAADFILRFSTPEKLRSASARTIYGFLKKHHIGFSMPIWQKRVENRAQKSPWPSDAATIDAKSELAISLAKMLRTLNATLNTYRTKVEPLFANHPDAGIFSSLPGAGPKLAPRLLACFGANRDRFDSASALQQLSGTVPVTESSGKKRDPKVSCRWACQKRFRTTMHLYAFQSTLRCSWAAACYEAAKSRGKDHAHALRIVAAKWLKIIFRMWQDRVPYDDARHSAALAARYSPIPTHLATAQQAGTG

SEQ ID NO: 399480 - protein, 317 aa, unidentified
MTELKSPLFIGADVAQDAVVVAAHGQSTSRSIGNTPTALKAWLKALPPGAQIGLESTGSYHERLALLAHRAGFTVYVLNPKDVRHYAHAVGKRAKTDHVDALLLARFIAHEHADLHPWQPPTREQRHLDKLLKRRATLVKAQGMLRQTLAHLSPLKTESKAMLASLAKLIATIDRTLEQAVAANPGLQAKADCVQSVPGIGLLTGTALVNLFSRLPSARADALVAFTGLDPRPCDSGKKRGTRRLSKRGPGELRRLLFNAAMSAAKTRVWKPFYERERAKGLPTTAALVCLARRLVRVAFALYRNNAHFNPEAIHCA

SEQ ID NO: 399481 - protein, 346 aa, unidentified
MMIIGCDFHPSWQQVSWLDTETGETGEQKLVHASGDAKSFYARLPRPVLIGMEATGNSQWFIEVVQDLGHEIWIGDAAQIRASYVRKQKTDKRDAAHILKLVVEGRFPKLWTPDREQRDLRQLVLHRHKLVEIRSRVKNELQHLSLNRGLQRQAKLWSQAGQKLLRELPLHRWAACRREDLLGLLAMLHQQIGKLDEAVQQAAEEHPQAKLLMTQPGVGPNTALAFVLTMGEVSRFPRGKQVASYLGLIPREESSGGRQKLGAITKQGNQLVRSLLVEAAQIAVRFDPGLRKQYLHRCHQKPKGVAKVAAARKLAVRLYWMLRTQKPYPEIVRIESSPRVALVGAS

SEQ ID NO: 399482 - protein, 318 aa, unidentified
MKQAEVFVGIDVAKARLDVALHPSGATWTVPNSEAGIAGLVAQLQQQPVTHIVLEATGGLEIPLLGALGAAGLPAVAVNPRQVRDFAKALGRLAKTDRLDAQVLALFAERVRPALRPLPDQATQALSALVARRRQLVEMLTAEKNRRGQASPAIQADIATHIAWLEARLERLEKELGQHLKQSPLWRAQDDLLQSVPGVGPVLSRTLLADLPELGTLDRKQIAALVGVAPLNRDSGTLRGARTCWGGRAPVRAVLYMATVAATRCNPVIQTFYRRLCAAGKAKKVALTACMRKLLTILNAMLKHRTPWGAPAAGAEPA

SEQ ID NO: 399483 - protein, 342 aa, unidentified
MDHYAGIDVSLECSSVCVVDATGKIVREDKVASEPEALIGWFRQLGFELTRVGLEAGPLSQWLYAGMKAAGLAVELLETRHVRDAFKAMPVKTDRKDARGIAQLTRMGWFRPVHCKSMGAQEARAMLTARKLVQSKLFDVENSLRGILRGFGLKVGKTTELRFAGRIRELVSGHPSLEAIAEALLSVHAVLLCEFKAFEKRVRSMARSDTKAKLLMTTPSIGPVVALTYAAAIDDPKRFKSSKAAGPHFGLTPRKYKSGETDVSGRISKIGDASVRTALYQAAHIMLTGPIKGCSQLKGWAMRIARRAGMKKAKVALARKLAVILHRMLVTGTPFNVSSAVA

SEQ ID NO: 399484 - protein, 370 aa, unidentified
MDNITYVGLDVHKATVCVAVAESGRGGEVRQIGVFENRPELLIKLAARLSNGGRRLSFCYEAGPCGYGLYRLLTGCGHDCVVVAPSLIPIKAGDRVKTDRRDAVMLAKLHRAGELTPIWIPDAAHEAMRDLVRARATAGRVLSKARQHLQSFLLRHDQIYRGARAWTLAYRRWLTTVRFAHPAQQIVLQDYIHAVHDAEARLDRLTRQIEELLPSWSMAPVVAALQAMRGVALVVAVTVVAEVGDFRRFANARQLMAYLGLVPSEHSSGASVRRGGITKAGNVLARRVLIEGAWTYRMPARVSRKLHDRNEKLSPAIRDIAWKAQIRLCARYRRLAAASKPKVVVTTAIAREMVGFIWAIAGIAQPTLQA

SEQ ID NO: 399485 - protein, 364 aa, unidentified
MDTHKKEHRVALVYPNDEKIIEFSVKNAPAEIRKMVKNIKGNAPGKVKFCYEAGVCGFTLQRRIEALECKCSVIAPSLTPRKPGERIKTDRRDAKKLLGMFMADMLTEIYPPDEQQEAACELTRCREAAQENLKRIRHQLQKLLIRHGYVYTDGEHWTQKHLRWLDAVDFEQPLLREVFDCYFTEMRHCLQRVKTLDRELEKLAQSEPYRELTGALRCFYGINTLTAISIITEVFDFGRFASARDFMSYLGLTPSESSSGEKQHKGAITKTGNKRARRLLTEAAWHYRHAYTVSKSLNKRRDGQPQWAIDMADRAGVRLRKRYHRLVNRGKLPCKAVAAIARELAGFIWSVLIEYEARKKKKAA

SEQ ID NO: 399486 - protein, 353 aa, unidentified
MTGTKYIGMDVHKESISIAVRNDAGKLVMECVIETKANVILDFIHGLRGELQVTFEEGTWATWLYDLLKPHVTKLVVCDPRKNSRQGNKNDRIDARELADRLYMNKLSSVYHGGAGVRTLKELARSYLTISKDLARVMSRVKAIYRSWGIPCAGKQVYAPRHRAEWLAKISEVGVLRRAEFYYQQLDALRVLRQTVRRDLLTESKKHKATKLLCQIPAIGPIRAALLIALIQTPHRFRTKRPLWKYSGFAIEMHSSADYRSVKGELQKSKKQISVRGLNRDCNHDLKNLFKSAATIASVKPGPFQEFYAALVAKGMRPEMARLTLARKIATIVLIVWKRGVSFDAKYLKSQTA

SEQ ID NO: 399487 - protein, 349 aa, unidentified
MLHAGLDLSRRSLEVHLLAENGSTVSTMSVPPDLDGLRGLVRKAALLPGGRQVLAVIESMNGARFVHDTLELEGWQVEIADAAKVKGLAPLACKTDRIDAWVLAELSRRDLVPSIWLPDPATRSARELARWRLHLVRHRTALKNRVHATLVTFGHPCPVADLFGLKGRDLLRRLQFPEPWLGDLEAALRLIDTLNFEIATLENELKAEGADHPYVRLLLSVPGISWVLAYTIASEIGDINRFASPVKLCGYTGLCPRVYQSGQSDHRGALSKNGPKYLRWALIEAATHAASHPLYAERYQYMARRLGRQRGKKVARVDLAGRLAEAIWHMLTTGEVFAPAGLKASKAAA

SEQ ID NO: 399488 - protein, 417 aa, unidentified
MKTVAGIDIHKSMQAVVVRLVRNGQVVYEQRKFGGTVSEILMMRDWLQELGVEEVAMESTAQYWRPVWYWLEGKFGLHLCHPLQNRAKGGRKSDFRDARRLADRWSAGELDDSFVPGAEQREWRALTRARVQYKRAITIMRNHVECILERDSIKITSVVSDVFGASGWAVLEKLAAGERRLDELVKGLRGQLQKKEAMIREALAGKLTSSGLLLLRNCMQNVAQLRRQVESINEELGRQMKAYTKELVRLTKVPGIDLYAAQELLAEIGPKAAAFPTADQFASWVGLCPGSKQSAGVNYSSRSAKGNPYLRRLLCQVAWGAIHTKNSFFKGLFARLKPRIQGKGAAWAVAHRIGKVVWLLLHDEVEYIEKGTGVNPQNLARKFRRIVKELARNGMDPRELLAQAVTSKATLRASATA

SEQ ID NO: 399489 - protein, 407 aa, unidentified
MELVALYKRVIGLDIHQAQITACALIEEADGSTHVEQRQFGGFKRDRRELADWVASLHPDEVVMESTGIYWKSPYAALEAVGIRAKVVNARHVKNVPGRKTDVGDAHWLATLARAGLLRGSFVPPAKLRELRLISRQRQKLVGQLASEKNRLHKVLTDSGVRLGVVVSDLHGQSARAMVKAIIAGEPPSEVLKHASRRLKASREELFDALQGDLSASHRFVLDELMQHIEEIEARIARFDARLLAELESERNTLALLQTIPGIDLIGAAMLLIEIGTDMDAFGSADRLASWVGICPGNNESAGKRKSGHVRKGNLYVRRLLCEFAHAASRTTSVFKSKFQALVVRRGYKRAIIAIGHKILRTIFFMLKRREHYRDSATDYEALSVQRNAPRWIKALTKFGFISPAST

SEQ ID NO: 399490 - protein, 428 aa, unidentified
MNITYKIDKIKKNNWLNISFDVSKDDLYMYSEMGEGTITCLEDSFANKPEIILVKLEDMYQTALHAGYEGIHIICEPSGGYECKLMLLAAQQGHATSYVSGEASSKFRIVEGNSNDKSDQRDPKVIFKLAQYGKLLRHRILESSYEQLRHLNRMHEQEQELKTYIRNQLHHELKVLFCERDWKEAFWYGVSGRAVLKLYQGSPYKIIKAGRSRFAQRMKKAVKGIRSSTIERIWTNAAQSVKLDYNESIIELLSKRIKQLLQDFELHERRLQEIKEQMAAIYQNLLDQGEQLPPVVKGFVSIENLARIVGETGPFSDFKSAKQIKRYAGMNICIRESGQFKGLRKLSKKGRPRLRLILGQSIFHLIKKDRILGAYYHSLKERHAMNGTKAMSMVSRKLVDVLFALSKPGSVFDEKRLFVCKGQYKKAA

SEQ ID NO: 399491 - protein, 411 aa, unidentified
MQMLYERCSGLDIGKDEVVACVRTPDGDGGRRQEVRTFKTFTRQLQALSDWLAAEGVTNVVMEATGQYWKPIWYVLEEREFELMLVNARQARILPGRKTDVGDAAWLCELLEHGLLRGSFVPPKEIRELRDLTRYRKRLVQLHSSECQRIQKVLTDASIRLDSVASDVLGVSGRAMLRALLDGERDPQVLADLAKGRLRPKIPQLIEALTGRFGDHHCLLIRLSLDHVEQLEKAMARLDEEVDRVMAPFSVALELLDSITGVGKRAAECIIAEIGVDMARFPSAGHLASWAGMCPGNNITGGKRKSGTTTKGDKWLQEILVECAWAASHTRNSYLGAQYWRLSRRIGKKKAAVAVGHSILVVAWHLLSEGCLYQDLGGEFFVRHDQDKARRRAVAQLESLGYRVTLDQAAA

SEQ ID NO: 399492 - protein, 338 aa, unidentified
MELYAGIDLHSNNSVVTVLDEQDRTVFAKRLTNNLAAIIAALRSCAGTVRGVAVESTYNWYWLVDGLQDAGFAVHLVNTAAVKQYDGLKHGGDFSDARHLAHLLRLGILPTGYIYPREQRAVRDLLRKRSQFVRQRSAQILSIGNLIARNLGTHAGGNEIKRWQPEHIDAMPLLDEQKQALMANLAVMRCLDCQIDALERSILAKAKLREDYQALKTVSGIGEVLALTIALETGEVGRFDSPGHFASYARTVDSRRESNGKKKGEGNAKCGNKHLAWAFIEAAHFAVRYDAAIKCWYQKKCANGLAVVAIKAVAHKLARACWHVMKDGKPFEVSRAFG

SEQ ID NO: 399493 - protein, 408 aa, unidentified
MRVVGLDIHRVFAEAVMLDDGKIIRLGRIGMTRDHLGAFARTLTHDDHVVVEATGNASAVVEVIAPHVGRVVIANPRQVRMIAHAKIKTDTIDATVLAKLYASKFLPEVWVPDAKTLALRRQVTRRNQIVRQRVRLKTITQSILHANLLPQCPHADLFGNRGRSWLLAQDLPTDERDAVERHLREYDRLGDDLRAVERELARDALQGATIKRLMTVPGIDMVVAIGLAAAIGPITRFKGPDQLVSYIGLNPSVYQSGEGRPQHGRITKQGRTHARTMLVEAAWQAVRGPGPLRAFYQRIARRRGNHIAAVAVARKLAVIVWHMLTKNEDYAGVRPALHAKKLRDLELRSGLPARRGQRGAGYEYNLTRTRLEEKRRAEQAEIAYRRHVEGWTKRGRRAPTDAANEERL

SEQ ID NO: 399494 - protein, 389 aa, unidentified
MSETFDASRSLTVLEQDNTLIAVIEMSQSAWLVAAVVPGFKRQPLKKLDADAEALLKLLHRWRKEAGTAGRQIKRIAVAYEAGRDGFWLARWLRMRNVDAYVIHPTSVAVSREHRRAKTDRLDTELLMRAFIGWLRGEKRHCNMVAIPTVDEEDARRPNRERGNLVTEQTRIVNQIKAILARFGIRTFRPTLRKAEEKLEKLRTAEGMVLPHNTRAELCRYLARLGVVRQQIRAIEQGRLRQLAMAPAEQEGPHAMMRLIARVLGVGIETADMLVNEVLSRHLRDGKAIARYAGLTGSPDESGKRRREKGLARAGNARVRCGMIQLAWRFLRFQKDSALAQWFRARTADGRGSTRKTMIVALARKLLIALWRLDTTGELSDGIVLRLAS

SEQ ID NO: 399495 - protein, 344 aa, unidentified
MDSMYYIGLDVHKKTISYCVKDAGGQIHAEGTVASTRTDLDCWMKTLPQPWTAAMEATIFTGWIYDHLRPHAAQVKVAHPLMLRAIAAAKKKNDRIDAGKIADCLRCDFLPECYMVSTEIRDRRRTLRYRHILVRQMVQLKNRISGLLLETGVSHNKQRLHKVGYFRELLTTNKEVSESIRPLLQLSRETIVRLQRTEYALVSSLARDPLLKERVKRLRTVPGVGPISALTWALEIGDVARFRSVKQAISYCGLCGAEKSSADMAKRTPISKQRNKHIQSVLVEAAKLAPRQHHELAQVYEKEKQKGNTNRATLAVARKMVAYLLAVDRREREFVMAEDKSTAA

SEQ ID NO: 399496 - protein, 351 aa, unidentified
MSHTLNSTVTVIGIDIGKNWFHVVGLDVCGGIVLRQKWSRSQVEVRLANMPACLIGMEACVGAHHLSRKLKALGHDARLMPARYVRPYSKGQKNDFRDAEAIAEAVQRPTMKFVATKTVDQLDLQALHRVRERLVSQRTSIMNQIRAFLLERGIAVRQGQWFLRAELPRILAMPPDVLSPRMARIISGLAADWRLLDERIEQLSGEINELAKQDSGCERLMSIPGIGPLISSAMVAAIGTGDVFSKGRDFAAWRGLVPKQISTGDRTILGKISKRGNRYLRTLFVQAAWVVLVKIKPSRWEGHGLKHWIEAAKKRLHRNVLAIALANKLARIAWSVLARGRAFEASKLQAA

SEQ ID NO: 399497 - protein, 412 aa, unidentified
MQTLIERGCGLDVHQATVVACLLIVRKDGKVQKQMRTFGTTTRELVGLREWLLSEGCTHVAMESTGVYWKPIYAILEGALEIVVANAQHIKKVPGRKTDVKDAEWIADLLCHGLLRSSFVPPKPIRALRDLMRYRRKLVESQAAERNRLLKVLETANIKLANVATDVFGMSGRLMLRALIAGKATPQEMAELAKGLLRKKIPELELALEGKLEEHHRFLLELQLQRLEAAEKDLAVLEQRIRQMLEPYAAQLALLDEIPGVDWTLAAVIIAELGVDMRVFGSVSQLASWAGVCPGNNESAGKRKSSRIPSGNVYLKSGLVEAANAAARAKGTYLRDKFFRLKARRGYKRAVVAIAHKILVAIYHMLSQQVSYNDSGDLYLDKLNKNHLTRNLVHRLERLGYAVTLTLQQEAA

SEQ ID NO: 399498 - protein, 460 aa, unidentified
MNRKRSKSRVDRTMPMMHPNAAAIDVGATLHMAAVRADRATEPVRSFGTFTTDLHRLVDWFTECGVETVVMESTSVYWIPIFELLDARGFTVFLVNARDAKHVPGRKTDVSDAQWLQRLHSYGLLRASFRPKGQIAELRAYVRQRERLLEYAASHVQHMQKALTEMNLQLHHVVADITGSTGLRIIRAILAGERDPEVLACLRHYSCHSSAETIAKALTGSYRTEHLFALEQALALYDAYHEKASACDVRIEAVLKELCIHRGRGIGSVAPAPRRRHRTDQANALAFDVRAALFALLGKDITTIDGLGPYLSLKLVAECGDDLSSWPSAKHFTSWLGLAPSNKVSGGKMLSSRTRRSGGRAAALLRLAAVTVGRTDTALGAFYRRLSSRIGKAKAVTATARKVAVLFYNAVRHGMEYVDPGASSYETRYRTRVVNNLHRRAKAFGFVLQPLEPKAGAVVS

SEQ ID NO: 399499 - protein, 338 aa, unidentified
MKLYGAIDLHSNNNVTVLIDEQDQVVYQKRLPNDLPLITQQLSGYQDALQGIVVESTFNWYWLVDGLMDQGHRVHLANTAAIQQYEGLKYTDDHSDARWLAHILRLGVLPEGYIYPKQERAVRDLLRKRGQLVRQRTANLLSIQNLITRNTGSSIRSNRIKTLDAEAVDALLPNEDLALAVKANLAMIQCADGQIDILERTVTDRVKLRAAFGFLKTVPGIGQILALTIMLETGEIKRFPTVGDYASYCRCVGSQKLSNGKKKGSGNTKNGNKYLAWAFVEAANFAIRYNARIKSFYQRKKAKSHGVVAIKAVAHKLCRACYYIVKDQVPFDIAKAFA

SEQ ID NO: 399500 - protein, 440 aa, unidentified
MSNRTEKQNVPQRKASAKDTVLWVGIDWADQKHCVATRRPDGSDSKLHWVDQKPQKLDEFFLELQKQHLTGHIGVVLEQSRGALRYALLKYSFLELYPINPRCLADFRKAMAASGAKGDPSDADLLCELGCKHGERLRALELEDEATRQLELLNEHRRGIVDEQTGLSNQLGSALKCYYPLILELFADHLVAPIALDFLERWPNLAALQKAKPGVLRAFFHKHNGRSEEKIQERIKAIGEAKPLTNDAVVIACYQLQVQTLIERLRAVQAGIAQYDERIKVVFASHAKARVFSSFPAAGPVLAPRLAAAFGTSEANFPAPDAMLCWSGVAPIQIQSGKSKVVHCRWARPKFLHQTFVEYARTSVLFCPWAREFFKSRTEKGWGKFRIYRALAFKWIRIMWRCWKDNVEYDEAKYLAGLQKRGVQLYASLYAAPDAKKPNE

SEQ ID NO: 399501 - protein, 351 aa, unidentified
MDTITRVGVDLAKNVIQIHAVDAAERVVARRAIARNRFLSWFANLKPRLIAMEACSAAHYWARKLRALGHEVRLIPPQFVVPYRGVHVKNDALDAEATCEAASRPHMRFVPVKSPAQQSVLVLHRMRTGFVEERTALVNRLRGLLAEFGVFLPQGIGQLRKHFVDRVEDGNNELAGPARQALMRGWEQMQALDDEIAWFDRQIAEHASHDPQAQRCMDVCGVGRLTASAAVATVVDARQFKNGRQMAACLGIVPRQKSSGGKQRLGRITRQGNDYLRTLLFQGARSAILTAHRRDDRLSRWIVQLQARVGYYKTLVAVANKHARILWAVLAKGERFDPSYAPARTRMAAGA

SEQ ID NO: 399502 - protein, 366 aa, unidentified
MKKNTIRTKRSRTEQKKEKLTVGMDLGDRSSRFCVLDGEGKILQESSVATKSKAIRAIFGGMERCRIALEVGTHSPWVSRLLSELGHEVIVANAREVKLISASSRKNDRVDARTLARLARVDPELLRPIRHRSREAQEHLMVIRVRATLVETRTMLVNSARGLTKATGERLPSCDSDQMTADRLADLPEGLRETLRPLLEEVESLTEKIHALDGKIEQIARDEYPETALLYQVFGVGTLIALTFVLTIEEKQRFQKSRDVGCFVGLRPRQGASGENDPQLRITKEGDVYLRMLLVQAAHCILSRRGPDTDLKRWGLQLCARGGKNAKKRAVVGVARKLAVLLHRLWVTGEVYEPLRNPAPSAGVAA

SEQ ID NO: 399503 - protein, 330 aa, unidentified
MDTNLSLVCVGIDIAKDKFDACLVPALGKRKLKEFTNTPDGFAKLLRWAGHLAPSSAFHFCMEATGSYYEALASYLADANQLVSIINPSCIHHAARAQGAGNKTDRADAGVIADFCRKESPPIWRRSAPEVRTLVAMMRRLHSLKDLLNQEQNRLADPGLTNQPEVLASLNKSVGFLKGEIDRLLAQVNDHIEKHPGLRADRELLTSIPGIGELTAAWIIAELPDVRMIGSAQSAAAYAGLAPREYSSGTSVHHRTHLSKRGNVYLRRAMYMPAMAAARYNPAVKALYDRLIAEGRPRMVAIGAAMRKLLMLAYGVLRSRKEFQYTPAQS

SEQ ID NO: 399504 - protein, 311 aa, unidentified
MYYIGIDVSKKDLSVFNGKDLNFTNKEGLKSFKKYLKKKYNLSEVAIIFEPTGIYSFYLKEFCAENSIKAYIINPKQSHNFARALGIRPKNDKIDARTLYKFRKLIDLNDIKVPVIDQQVKTLSGYLVSYQFALKQRISLSNHLESLQDKRLIALIKKDLKRAKKLEDNLFNDILEYVSKNQNLKEDYQRFLTISGVGDKMAIALLTLFKTYQGTNRAQITALAGLDPVRRESGTSVKYREKISKNGKGIYRKIFYLPTICATVHNQKIRVFYQRLLANHKTKKLAIIASMRKLLLIAHAMYRDKTEYIAV

SEQ ID NO: 399505 - protein, 375 aa, unidentified
MKVLYERVAGIDVHKDMVKVAIRSPGEKPWTRKTEILEFRTFYGVLQEMARELRRRGVTHVVMEASGVYTEPVYYALCEQDFEQVAVINPAHAKALRGHKTDAKDCARLAELFECGLLRGSYIPPAELKEMRDLTRYRMKTVQARTSEIQRLGKALESAGIKLGSVASSITGVASTAMIEALIDGERRGGVLADLAIGRMRAAGKLTDLSMALAGRFTEHHALLCRLHLDRIAVFDDAVDGLDKRITGKAARWQREAGLLTSVPGFGDVVAQAWLGEIGPAPHRHFATHEKLASWVTLCPGNNISARKRKHGRTGDAGTYIKPMLVQAAWAAIRVRGRLQARYSRLVRRFGGDKNPGAKKKAITATCSKSCSHSA

SEQ ID NO: 399506 - protein, 344 aa, unidentified
MGEVSTIGLDIAKSVFQVHGADSSGVVVIRKRISRLKLLEFFAALPPCLVGIEACPSAHHWGRELQALGHTVRLMPPSYVKAYLKRSKNDANDAAAICEAVTRPSMRFVPIKTKEQQTALMLHRTRQLLVRQRTMLSNALRGHLAELGIVSAKGRNGIGELLRIIADGADNRIAPATRAILDVIARQYSAIGAEIRSIDKSILAWHRSCEASRRLEEIPGIGPIVATALVAEIGDWREFRSGRSLAAWIGLVPKQHTTGGKDKLGSITKQGNRYLRWLLVAGAMAVIRYAQKHGTERRPWLGRLMERRPTMVAAVALANKIARMAWAIMVRGERYQEPKLLVAA

SEQ ID NO: 399507 - protein, 408 aa, unidentified
MKTLHKRCAGLDVHKVEVVACLRLVARGKASYEVRRFPTTTKGLIKLAEWLEAAQCTHVAMEATGVYWKPVWHMLEGRFTLILANAAHIKGVPGRKSDVNDATWIADLLAHGLIRASFVPPQPIQELRDLTRTRKQLTREIVQHTQRIQAVLEEANVKLSSAITDILGMSGRRILKAIVAGETDPAKLAELGGPQLAASRSDLADALHGRVREHHRFLIGQHLKTIEQLEATIAAFDTRIEAALRPFRDTIERLKEIPGLSQTSAAILIAEIGADMNQFPTAGHLLSWAGLVPRLDESAGKRRSTRVRKGAPWLKPVLVQCAWAAARKKNSYFQAQFLRLKARCGPKKAVVAVAASLLATAYHMLADGTCYQDLGADPFARRDPARIVAKLANRIRSLGYAVDIRAAA

SEQ ID NO: 399508 - protein, 385 aa, unidentified
MARVDDLSRSLVAFDEHSTLVGVIEMSEKNWLVGGLVPGVTRRPLKKLEPDGEALLGLVARWRDEALKAGRPIARIVLAYEAGRDGFWLARFLRARGIEAYVMHPTSVAVSREHKRAKTDRLDAAMLLRALLGWLRGERGHCQMVAIPTLAEEDAKRPSREREALVKECTRIVNRMKGALARLGIRGVKPEQRRVARRLESLRTPEGTPIPPQTLAALRRELARLALLHEQIKTIEQARLERLEAAPQEGPHPMLRLLARVVGVGVETADMLVHEVLSRQLRDEKAVARYAGVTGSPDESGSKRREKGLAKAGNARVRRGLIQLAWRFLLFQKDSALTQWYREKVATGMRKTSAIVALARKLLIMLWRMATTGEVPDDLVLRPAA

SEQ ID NO: 399509 - protein, 343 aa, unidentified
MDHFAGLDVSVKETSVCIVDDTGRIVREAKVASEPEALLQVLRSLDYSFKRIGLEAGPLSQWLFSGLAEAGLPVICVETRHMRAVLQAQINKTDRNDARGIAQMMRAGLYRPVHVKTLRSQKLRMLLTHRKLLQSKAIAIDNDLRGTLRNFGLKVGMVGTGRFEARIRELLEALPDLAELVEPLLIVRRTLREQIGILHRRLLVVVRNDDVCRRLMTVPGVGPVVALTYRATVDVPARFRSSKAVGAVFGLTPARYQSGEINRTGAISRCGDEMMRTVLYEAAQSVLTRMEKWSWLKAWAMKIARRRGMKKAIVALARRLAVVMHRIWIDGTEFRWSREVAAA

SEQ ID NO: 399510 - protein, 415 aa, unidentified
MDVLYSRCAGLDVHKDTVVAGVRLAGGGAVKTEVRTFSTTTPGLLALSAWLAQHGCTHVAMEATGVYWKPVWHILSDGEFTLILANAAHVKNVPGRKTDVADALWLADLLAHGLIRPSFVPEAPTQDLRALLRTRKQLVREQASHVQRLQKTLEDANLKLGSVLTQIMGKSGRAILEALVDGEADPDALLALVQRGVKAPPEKLRTALQGRVTVRHRFLLRLHLAQVDALAAAIAEIDAEVDRDLDPFRQAVRLLSTIPGVSDLTAQVIVSEIGIDMSRFPTAGHLISWAGLCPRNDESAGKRRSTRLRKGAPWLKTTLVQCAWAGARKKASYLQAQFQRLRHRRGPKKAICAVAASILTAAYHMLRDGTFYQDLGPDHFRRTSPEAQANRLARQIAKLGFTCTLAPAQEREVSV

SEQ ID NO: 399511 - protein, 407 aa, unidentified
MEVLYPRCAGLDVHAKTVVACVRIASGATVTYAHRTVSTNTRALLELTDWLTAQGVTHVAMEATGVYWKPVWHVLEGHATLVLANAMHIRNIPGRKSDTNDATWISDLLALGLIRSSFVPPAPIQDLRDLTRTRKQLVRAIARHTQRIQKTLEDANVKLTEVISDILGASGRAIVTALVAGETDPEKLAGLTSGRLKATRAELVEALHGRVTAHHRFMLQLHLTQIAALDAAVADVEARIREALVPFRAAVNLLTTMPGVSETAAAVIMAEIGDDMTRFPSAGHLLSWAGLCPRLDESAGKRRSTRTRTGAPWLKTTLVQIAWPAARKKHSYFQAQFLRLKTRRGPKKAIVAVAASMLTAVYYMLRDGTEFHDLGDQYFVHHDKARLTNRLLKRLRDLGVEVEVRAA

SEQ ID NO: 399512 - protein, 357 aa, unidentified
MSQKLNSAIAVIGIDIGKNSFQVVGHDRRGAIVLRQKWSRGQVETRLANLPPCLIGMEACVGAHHLSRKLQLLGHDARLMPAKYVRPYSKGQKNDFRDAEAIAEAVQRPTMKFVATKTAEQLDLQALHRVRERLVSQRTAIINQIRAFLLERGIAVRQGLRFLRAELPEILAKRSDVLSPRMLRVIEDLAGDWRRLDERIEGLSGEIEGLAQQDQACLRLMTVPGIGPIISSAMVAAIGTGDVFCKGRDFGAWLGLVPKQISTGDRTILGSISKRGNRYLRALFVQAAWVVLVKLGPKHWERYGLKSWIEAAKKRLHHNVLAVALANKLARIAWAVLNKGRAFACVKTTDATASQPA

SEQ ID NO: 399513 - protein, 410 aa, unidentified
MAQPVWAGVDAGKADHYCMVINDDAQRLLSQRVANDEAALLELIAAVTTLADGGEVTWAIDLNAGGAALLIALLIAAGQRLLYIPGRTVHHAAGSYRGEGKTDAKDAAIIADQARMRHDLQPLRAGDDIAVELRILTSRRSDLVADRTRAINRMRAQLLEYFPALERAFDYNKSRAALILLTGYQTPDALRSAGGARVAAFLRKRKARNADTVAATALQAANAQHSIVPGQQLAATVVARLAKEVMALDTEIGDTDAMIEERFRRHRHAEIILSMPGFGVILGAEFLAATGGDMAAFASADRLAGVAGLAPVPRDSGRISGNLKRPDATTGACCAPATCRPWSASAPTPPRAPTTTENAPKENATPKPSSPWPAAASTSCGPCCATTLSTTPQPLPRRLDNVIENLLDDY

SEQ ID NO: 399514 - protein, 347 aa, unidentified
MRFYTKQHQYYCGIDLHARAMYICILDQEGNKLVHKNIKTDPNRLLRIIAPYREDIAISVECMFAWYWVADLCAKENIPFILGHALYMKAIHGGKAKNDRIDSKKIAALLRGGMIPMAYVYPREMRSTRDVMRRRNHFMRKRAELLAHIQNTNTQYNLPEFGKILARKRNREGVAEHFDDPSVRESMQANLALIDFYDQLLNDLERFITKNAKRHDVNAYHRLRSVPGIGKILSLIILYEIHNINRFARVQEFASYSRLVKSANESGGKRYGSSGNKIGNAHLKGAFSEAAVLFLAKSEDGKKYFAKLERKHGKGKALTVLAHKLGRAVYFMLKRKTAFDIKLFLSS

SEQ ID NO: 399515 - protein, 413 aa, unidentified
MEWVACAGIDWGDKKHAYMVQTADGKKQDGWFGSSPEEVHEWARGLGERFPGGTIIVAVEQGRGSLLYALMAYEYLVLVPINPRASKAYRDSLRLSGASNDPSDAALIGDFAMKHLTELRVWRPDEERTRKIRLLCEQRRSLVDQRTAFTHTLSATLKEYFPQVLQWFGDEASPYLREFLTHWETLEQASRASVDDITNVLKSRGRRKASAVAQALIEKIRIAVPLTRDTAILDACSMYARSLIALLDPIDEEIAKYDQAIAAEWADHPDRQIFDSLPGAGAVMAPRLAVAFGLERSRYDAAAELQQYSGIAPVTEQSGRHWSVRARWGYPTFLHQTFHEFAQSSLPHSVWARAFYHQQRDRGAGHHAAIRALAFRWIRILFRLWKTGEEYDEQRYIEVLKRKRSPIIRRLAA

SEQ ID NO: 399516 - protein, 453 aa, unidentified
MAQRNARVSLKPGKSRAALTITHPNAAGIDIGSTSHYVAVPADRDDTPVREFPSFTVDLNALADWLKGCGVDTVAMESTGVYWIPLFELLESRGFTVLLVNARHVKNVSGRKSDVLDCQWLQQLMSYGLLSGAFRPTDQVCVLRSLWRQRVMLLKSQGRDVQHMQKALTQMNVQLANVISDVAGETGQKILRAIVAGERDGQVLGSMKNARIRASIDEIAKSLQGNWRGEHLFALKQALNAFDFIGTQLAECDREIEQQLQRLQAHDGEPAKGKQRGRARNAPKFDLRTQLFKMCGVDLTRIDGIDVTTALAVISETGADMSRFPTVAHFASWLGLCPGTKITGGKLMSSKTKRCANRAALALRLAAAALRSSQSALGAYFRRMCSRMDKPKAVTAAAHKLARLIYTMLTKGTEYTDKGQDYFEERYRQRVMHHLAKRAEKLGFQLTPIRNAA

SEQ ID NO: 399517 - protein, 341 aa, unidentified
MKKFIRVGVDLAKNYFQIHALASEGAPAVTRKMTRVKMREFFSQIEPCLVGMEACGTAHYWARELKAMGHEVLLMPPAYTKPYVKRGKNDAVDADAICEAMSRPGMRFVPIKSPEQQATLMLHKTRELLVKQRTMSVNALRGHLSEFGIVAAKGIGRVDELLDLAESDATLPNAARASVKVLAQALEGLDKAIDDLEKEISSAHAQNEMSRLLDKVPGIGKLIASVIAASVPDPSVFKSGRDFAAFLGLTPRQNSSGGKQTLGGITKQGNRYIRKMLVLGATSLLNVVGKRKGALRDWIVGLLAKKPARLVTVALANKLARILWAMMKTGECFRTEMFAKA

SEQ ID NO: 399518 - protein, 450 aa, unidentified
MAKRKKKGKTVKTLHTLQPNAAGIDIGATEIYIAVPEDRCSETVRHFGTFTEDLHQAAQWMKQCKIESIAMESTGVYWIPVFQILDRYGFDVSLVNARHVKNVPGRKTDVQDCQWLQYLHSVGLLRGSFRPGQDICAVRSLLRHRDTMVKSASSHVQHIQKALTQMNFQIHNVISDIVGVTGLAIIDAIVAGERDREKLADLTNPRIKADRQTILKSLEGDFRPEHLFTLKQALSSYRHYQQMIRDCDLEIGNHLNSFDSHPDFDETSLPPSNRSKRKSKDTEPAFDLKSHLHRLFGTDLTQIDGVSTLTGQVILTEIGPDLSMFPTANHFCAWLGLSPQNKISGGKILSSKTRPGSNRAAHALRLSANALFRSKSYLGNYYRRMRSRHGAPKAITATAHKLARIIYHLIKNRKPFDETVFAEQERKHQERMKRSLIKRAKSFGLQVVPA

SEQ ID NO: 399519 - protein, 385 aa, unidentified
MAAVMIGVDPHKASHTAVAIGAAGEPLGQLRVRASAAQAEGLVAWAAPWPERTRAVEGAAGLGYLLARQLVAAGGHVLDVQPKLGARVRLLATGATSKNDPSDARSVAVAALRSPARRVVRAEDHAAVLKVWSRRHHDLGRARNQVACRLHAVLCELIPGGFAKEITAGQAAHALESIEPSGAVETARCELAAEFPGDLRRIDAQMRDTRKRLAAAVTASGTTVTGVFGVGPVIAATMIGYVADVARFPGRDRFAACNGTAPIEVSSGNRKIYRLSRRGNRRLNYVIHIWPRSPRSATGTATAGPTTTRSSPKAKLPGKPSAASNGKSATPSTAACGPTPAGPQPQPQPRAREGNRGPPLSPARPAHTPKTGSSAQPLPSPTPPL

SEQ ID NO: 399520 - protein, 441 aa, unidentified
MSSLPVLDPRAAFVDVGSEQMHVSIAGGPPEVFGTVTTQLHALRDWLLAREVRSVAMEATGVYWLPLYGVLEQAGLEVVMVNGRQTKNLPGRKSDVQESQWLLKLHTYGLLRNSFHPAAEIRVTRTYWRQRGDHVRAISTCIQRMQKALTQMNLQLANVISDLSGWTGMRIVRAILAGERDPQALAALSHPGIRAPRDVIAKSLEGTWQPDLLFLLQQEVAMYDAYQQRIAECDQALERHLEGFADKVTDPPSADEPLTSPPRPGPKRRRKAGSHAPQFDLGRELHRISGVDLTRIHGIDVGVAQTLISEVGLDMARWKDEHHFASWLGLCPDNRITGGKVIRRGTRPVTNRASTALRIAATTLLRSQSYLGAQYRRLRSKLGAPKAITAMAHKLAVLAYRMLRWGHEYVDKGMQYYEDRHREQQIRLLKKRAAKLGLVVV

SEQ ID NO: 399521 - protein, 372 aa, unidentified
MNYNTVYVGMDVHKESFTLCSCKYEDEKASHYQRTPASYKNVLRYLAFLRTIYGEDTRFVCGYEAGCLGYSLYHQLENFNVECVILAPTTMLEQRSKRRIKTDKRDAEIIARSLAQHNYSPVHIPTETDNQTKEFIRMRDDHKAELKKIKQQILSFCLRQGYQYDGSGNWTAKHVKWLRSLKPAGLYKEILDEYLLTYTILTDKLNRLDQRIEELASEEEYKEPVSKLTCFLGIKTHTALSVIVEVGDFQRFASARKFAGYLGLVPGQHSSGDDRNGLGITKAGNTHVRRLLVESAQSYTRGKIGYKSRVLRSRQAGNSPQVINYADRANERLRRRYYKMVLKDGKKYNIAKTAIARELACFIWGMMTDNIY

SEQ ID NO: 399522 - protein, 441 aa, unidentified
MRIMYERCCGLDIHKSSIAACALITEKGKPQEETRRFGTMTGDLRELAGWLQQKGIRHVAMESTGVYWKPVWNILEPAGFELLLANAQEVKVVPGRKTDQKDSQWIADLHKHGLLRKSFVPPRTIRDLRDLTRTRAILTQEHSSVCNRIQKVLEDANIKLGSVASDVFGVSGRAILRALMKEEKDPEVLAELSKGTLRKKIPQLRRALEGQITAHHRSLLTGHWNRMEFLERQIADLETQIAQRMKPTPEEMALTIQNAAEGAPLPLSPREEAIQLWMEIPGVGWTAACSMVAELGVNMDQFPSAAHVASWAGLCPGNNESAGKRLSGKTRKGNVWLRRTMCEVAWAASHTKDSYFAAQFRRIASRRGSKRALVALAHSILVTAYHILKHKRHYMELGGDFFDVINRDKVRNRLVQRLTKLGFEVQLKPKDAVEKVTSVTN

SEQ ID NO: 399523 - protein, 363 aa, unidentified
MSLEHHRQEPSAIQTNLGAIFVSLELSRSTWLITSLARFSELKQKALARTGKSFPIIVIQEAGLDGFWIHRVLQSEQIESHVVDAASIATSRRRRAKTDRIDGEALVRTLLAYKRGEPRVCAMVRAPTPEDEDSRRLCRERKALTTERVQHVNRIKGLLFSQGVSDYEPLRRNRRHRLDELRTGDGRPLPPHLKAHIGRELDRLELLLEQIKVVEAERDALLTSVAKTEGTPAPPAMLMGLKGIGPEFAAVLWSEGLFRSFANRKQVAAYAGLAPTPWQSGAVAHEQGVSKAGNPRLRTTMIQLAWLWVRHQPHSALTRWFHERVKRNGGRLRKTIIVALARKLLVALWKYVNSGVVIEGAIV

SEQ ID NO: 399524 - protein, 352 aa, unidentified
MQCIAFDSHKHYTWALVQDEAGKVLREQRINHTRGALQSFLEAFDPGTPVAVETIGNWYWISDEIEAAGMVPLLVNARRAKVMSGSINKTDKLDARGLNRLQRSGTLPTVWIPPRDLRDARELPRTRMVLVRQRTKLKNRIHANLAKYGLRTDGATDLFGVRGRQILSQCLEELPVQTRFATESLLDELDHLNAKIGELEERMHELFGEIEALEHIKTLPGVGFILGVVILTEVGDVARFPSASHLASYAGMTPRVHASGGRVRYGRTRPDVNHYLKWAYAEAANVSMMHRRRHPQRHVSRLYTRVKSRRGHPKAIGAVGRHLAEATYWMLTKHEPYRDPAVEQAEESKREA

SEQ ID NO: 399525 - protein, 445 aa, unidentified
MHYKRLLSLIDSVSSYLSVGLDVGADFTWMSIALPNGSFIGKPFKIIHSDPRSRDLAVTKIKEAQETYSLKSRCFLESTGIYHIPLLCFLRDKGFDCSVINPIITKNSTNINIRKLHNDKFDSKKAALVGLNVSLKTSILPDDSVVDLRNLVRDYYYFKDLQSAVALKLTAELKVSFPAYAKVFSKVTTQSSLKLLSSYPLPEDMLAASKEDIVDIIRSTARFGEAYALRKYDAIISAAQDAAVFGRALPSNAVRIRLYIDTYQEYQKHLDALLKALHETVEKLQDTLIYDQICLLQSLYGIGFLSAVVLVAEMGDFKLFSSPKKLYAYFGLDPAVKQSGKLNGDKVHMSKRGSSLARRVLHMAALNNVKVAKGSGTPVNPVVYDYFTRKCSCKKKPVAMGAVMHKICNIIFAMLRDNKPFEIITPEEHCRRFAAEHPDKIRKAA

SEQ ID NO: 399526 - protein, 313 aa, unidentified
MNSEEKVYVGIDVGKENLDLAVLGASGTKQYQNNLQGIRALTRRLKKQTVALIVVEATGGYEYEVVTRMCKAKLPVALVNPTRVRRFAQAGGQLAKTDSLDAHVLANFGKSMQPEVWTLKTEVEEQLNQLITRRRQLVGMLTAEKNRLGTAHELAQGSLKRHILWMREELAEVETAMREILNAEPEYQQKMTNLVSVPGVGEVTALTLVAQLPELGLVNRQQIAALAGVAPLNHDSGRHKGKRRTFGGRSNVRTALYMAALSASRHNPVIKAFYERLLAKGKEKKVALTACMRKLLVILNAIARDQQPWQCAA

SEQ ID NO: 399527 - protein, 412 aa, unidentified
MAVVMNQDSGFDIWCGLDVGKTGHHACPLDAAGRKVFDKPLPQDQKRLEELFDKLQTHGRVLVIVDQPNTIGALPIAVARSMGIQVAYLPGLAMRRAADLYPGNAKTDARDAFVIADTARTMPHTLRRVDAGEETLAELKVLVGFDEDLAAEATRLSNRIRGLLTQIHPALERVVGPRLTTKQGLAVIEQLGGPQAMAAASKSKLLRVISKAYPRGAQEFADAITTALAEQTVIVAGTAAAEQVLPQLAASLRQTLDQRHALAAQIEQVVDAHPLAEVLTSMPGVGVRTAARILLDVGDASQFPTAGHLAAYAGLAPVTRRSGTSIRGEFPARAGNKHLKRALFLSAFAALRSDPTSKAYYDRKRAQGKKHNAALICLSRRRCDVLFAMLKNREPYRAPTPTREPSPLPLAA

SEQ ID NO: 399528 - protein, 366 aa, unidentified
MKKISTVAMRGNEIFRELKLTVGLDLGDRASHYCILDEAGNVILEHSLPTTPKGIHEVFSRIPRSRAALETGTHSPWVSRQLAQLGHEVIVAHARNVRLIGESSRKDDQLDARTLARLARIDPALLGPVRHRSAQAQIHLTVIRARAALVSTRTALVNAARGLTKSYGQRLRKCGTGQMNREIAKGLSQELRDALEPLLGEIESLNERIAEYDGRIEQVAKEVHPEVALLKQVKGVGTLIALTYVLTLDDPHRFRRSRDAGCFLGLRPGRRNSGMSEPQLHISKEGDRYLRTLMVQGAHYILGPFGQDSDLRRWGLKLAERGGKNAKKRAVVAVARKLAVLLHKLWVSGEVYEPLRNNHKVVSAVA

SEQ ID NO: 399529 - protein, 371 aa, unidentified
MSRKHTAKEFDKSSKWLAIGVDLAKYDNTVVGISEDGEVQIIERISTADLLELASEIQPTTFAIEPCNGANILSLNLQAQGHEVKTISGAAVKDWVKVHLASQKTDRNDALALAHLSRDTMLKPIRTKTVAEMRMQSIYAARKQLVKCRTSILVSLKGMSQAWGILFSAQRRNLKKMKESLEDKVELLSQPVVNALIQMIDSVACLDKEIEALEIVMKEQLSQDVRAQRIQSTLGIGFVGTHRLLSTCGDPNRFKGPKSFAAYYGLVPNNKSTGHNYRVGKCSCHGDAEMRSCLYQSAAVLYMQNVKNMLPDCALKQWIDKKVSQKMIWGKMIIALAAKLARILWALLKYDTYFNLSKAGLSRTMLTQQTN

SEQ ID NO: 399530 - protein, 337 aa, unidentified
MEKKFKYFVGVDVSKETLDYSVVKENKEEFSFQSENTNKGIKSFIKELKTKGIKDLSEVLFCAEHTGIYNNRLVYFLNENAGTLWLESAIHIKRSIGLKRGKNDKVDAQRIALFAYKNCEDAKIFAAPREIIKQLKVLTGLRGKLVKSIKGFKVQLNEIKSFEGKSLAKNYGAHCKGTIAALQKDLKNIEAEIKKIIRSDEHLNRLFKIITSVDGVGAVIATEVIITTNEFKNINDPDKYACYSGVAPFDHVSGTSVRGKTRVSSMANKAVKTLLQMGAISTLKMKGEFRQYYDRKLKEGKNKMSIINAIRNKIIHRIFACVRDMRPYQKIYSYKFV

SEQ ID NO: 399531 - protein, 318 aa, unidentified
MAQKTTLVGIDIAKGKVDVAIRSVAAEAWFADSAEGRRGLLDWLKDRAVYKAVMEASGGYERSWADLLRKAGLEVAIVDPKRVRHFAKSAGRLAKNDPIDARMIAWFGEVFDDTPGQPQDADRQELDQMVTAKLGLVRLQTQIDSWGEHEQPKAVQKVHQAVLKVVATQLAKLEGLIAAKIEKTERFAQRAEIIQSVPGLGEAAAAGLIAFLPELGRVDRQAAAALLGAAPFDDDSGERRGERHIKGGRRKLRNLLYMPIMGAATQHNAVLKAYYQRLIAKGKKAKVILMACMRKLIGILNTMLMRGEKWDPTRHAIA

SEQ ID NO: 399532 - protein, 411 aa, unidentified
MLYVGIDWADDHHDVCCTDDTATTLAQFQIAHSTEGFATLHTQIAQHQTDPAAVLVALETTRGLLVYDLLCQGYQVYAINPKAVNRYKDRHVLSAAKDDRLDALAMAHLLRTDRHRFKPLAPAPAHYRLLDRLCLDLRKLIDEKTRLSNQIVSCLKEYYPQAVGLFRDVASPISLAFLQAFPDPDTVRQTDRSAFAAFFRAQHYTHPQRVDALYERTHAPTPEADPVVVQAAKMRLAALVAQLAVVRTHQGTYEHTIQTILEEVPEAQPLATLPGIDKRLVPELVAALGPNRPEEPKRFAAASDLAKLSGCAPITRASGKRHTVLRRRACDKRLRRTFYDWAMASLSWSRWACAYYDHHKAQHQAHATILRGLGQKWAKIVYAVWSSGDPYDEARHIEQLKRHEVVWALSL

SEQ ID NO: 399533 - protein, 402 aa, unidentified
MPKLQLPGGTMRISVGIDIAKEVHCVTAIDADGVVQIDRKLLNTQTDIASLADQLGALGGTVRIGLDVVGGIAGLAEAMLAAAGFSLLQCPAWPSTAPGRAPPGGENKSDPREARTIADQVRTRSDLRPIEPATELDLEIRLLVGRRRDLVDAQTQRLARLHDLLVGIFPSLERGLDLTAKGPLQLLTRYVIPAELRAAGKKRLVRHLKAAGGLPKVEALADRALAAAAEQSITIPAERMTARLVRELATEALASRTRLIELDRELEALLQRHPDATLIRSLPGMGVVLTAELIAEAGNLSRFRSPDALASASGMAPILRQSGKTRFLRRPAGGNKGLKRVFYQSAFCSLGHDDSRAFYDRKRREGKRHHQAVIALARRRINVLWAVLRSRKPFQTGFKTAA

SEQ ID NO: 399534 - protein, 322 aa, unidentified
MKYIGIDVSKATFVVAYSSDKGGEIRTFNNTTTGIKQFIGALPKDGSIHCVMEATGNYSALLLYMLNVAGITVSMENPLKIKNFARAMLSTVKTDKIDARLIALYGEKMNPQPFKIQGEAILRLRQKRTVIRQLTKQITAMSNLRGSLACLPVPDKGATHTVDETIEFLEKRRDRLQSELTDLVEVEFSRQLALLTTIKGIGITLATALIITTGGFTYFQNAKQVSRYIGICPTYEQSGTSVNIRGHINRNGDAYTRGLLYVAAWTASRFNTKCGETYTRLRQNGKPGKLAMIAVANKLVRQAFAVVTHDKEYVDGFVSNRP

SEQ ID NO: 399535 - protein, 348 aa, unidentified
MMLIGCDYHPSWQQICWLDTATGETGEKKLEHASGEAERFYRQLPAPALIGMESTGNCQWFVEMATTLGHDVWIGDAAKIRASEVRQQKHDRRDAALILKLLTEGRFPRIWTPSGEEKDLRQLLIHRYKLVRIRAQAKTELQHLAMNQGVTKKRKLWSKAGEKVLRELPLKPWASRRREDLFKVRGMLDEQIAPLDQAVAEAAEKNEKTRLLMTQPGVGPITSIAFVFTIGDVSRFRRGKQVASYLGLIPREYSSGGKQRLGSISKQGNWFLRMMLVEAAQGAVRYDPEFRNEYLHRCHRKAKGVAKVAAARKLAVRLYWMLRTNTGYPEVVRVESSSRVPLVVRQGG

SEQ ID NO: 399536 - protein, 486 aa, unidentified
MKTTRERTQERAKAAAGSAPSKSQRMNRKQRRELARKIQADDVNLEVVHPDAAGIDIGNECHYVAVPSKRDSEQPVRRFGCVTAELKAMAEWLKQCGIRTVAMQSTGVYWIPVYDILEAAGLEVYLVNARETKNLPGKKTDVQESQWLMKLHTYGLLRNSFRPTAEIRRMRNYWRQRNDLIQSAARHIQRMQKVLTQMNVQLANVISDVSGVTGQAIVKAILDGERDPYQLAELRDPRVRATKEQIARSLEGNWQEDLLFILRQEHEAHGFCEKQIAACDQELKEYLNEREDRSQGAHLEEEKRRNRRMKKKGHKPQQFDMREALFRMTGVDLTRIDGIDVMTASTVISEAGWDMSKWRTEDHFVSWLRLCPDNKVSGEKVIGKGRLPTNNRLTTALKIAATSLKQSETYLGAQFRRLRTRLGSPVAIKAMAAKLARLVYRMLRYGMRYVDRGAQIYEEQHRQRQIMFLKRKAAELGLKFVETAAA

SEQ ID NO: 399537 - protein, 340 aa, unidentified
MRLVGCDLHATQQSIAMLDRDTGEIVEKTLTHEGETIRTFYASLPTPVVVGIEATGSMGWFLRLMEELAIECRVGHPTAIRKAETRRQKHDRRDAALLLQLLDEGRFPAIWMPCTEYRDLRALLLHRHQWVRMRTRVQNALHAIVRAHGVRRGHTLWNRDGQAPLLSLPLASHTAHRRSELQALYQHLAEQIDRLDERVKDVAEKGSRATLLMTHPGVGPVTALATEVFVGDPTRFLDGKALASYVGMIPREYSSGKRQRLGALSKQGNPFLRFLWCEAAAHAARRDPDLHRFYRRKVVQKGFAKARVAAARKLGIRLWIMLRDQIDYAEFCRRGLARQS

SEQ ID NO: 399538 - protein, 351 aa, unidentified
MKKVLKQVLGIDVAQKELVVTLGRLLDDLSEELYAYKVFKNSEVGMKLLVDWVKKLSDSTVCVHYVMEATGVYHQKLAYYLSEYGHHLSIILPNKISNYMRSLEVKTITDKTCSEAIAKFGLGRKLDNWEKPKKVYRSLQQLTRERDQIVNERSAVKNQLHAEKSEAYPYEKSLDRLKARIAFLNAQEKEIKKDISEIVSEDRDLKEDVKIMCTIPGVGELTAVIVLAETNGFELIRSKKQLASYAGFDVKEKQSGTSVKGKPKISKKGNRHLRKAMYLPSLSAVKWDERFKAIYARILARNGIKMKGLVAVQRKMLEMMYTLFQNKTAYDKKYLEKENSVQIQDQHAITG

SEQ ID NO: 399539 - protein, 325 aa, unidentified
MSSKEDVLGIDISKAKFDVALLKGEHKIKSKVFANTPLGFAELQEWLNSQAVSNLHACMEATSIYGNALARFLVAAGHKVSIVNPSRPKAFGRSELSRTKTDRADAKVIARFCAALHPAAWTPPAVEVEQLQALVHRLDCLTAMQQQEQNRLETVDSILVDAISTHIDFLKAQIADTKQFIRKHFDQHPHLKAQRDLLTSIPGIAETTATAILAEIRDVSTFDSAAQLAAFAGLTPQEFSSGSSVRGKPRLSKIGNSRLRKALFMPAIVARRYNPLILAFCDRLLAKGKSKMAVVGAAMHKLLRQVFGVLKSQKPFDPNFLPISP

SEQ ID NO: 399540 - protein, 349 aa, unidentified
MGMLAEQVDHVIGVDTHRDSHTAAVVDTTGAVEAETTIPADAFGYKRVFAFGRTHAPGRRAWAIEGTGSFGAGLTTYLLEQGEWVAEIDRPARPARRNGAKSDELDAARAAREALSREHLAQPRRRGDREAIRVLLTTRHGAVVARTKAICHLKALLVSAPEGLRLHFRNMTSDEQLVRCARLRTLPSQTTEHRCTILALRSTARRALALEGDASDLESEIGRLVRNIAPGLLAEPGVGAISAAQILCSWSHLGRLRSEAAFAVLGGVAPIPASSGQTVRHRLNRGGDRQLNRALHTVVLSRLAHHPETRSYAARRRAEGKTPREIKRCLKRHLARRLFKLLEASAADA

SEQ ID NO: 399541 - protein, 414 aa, unidentified
MVIWKLYTMEAVYERCCGIDVHKRIIVATMRKGRHIETRQFGTYTSNLRELSAWLKESGCQMVAMESTGVYWKPLYNIFDLEGIHAMVVNARHMKAVPGRKTDVKDSEWIADLLQHGLLKASFIPDRDQREYRDLTRYRKSRVEERAREINRLDKILESANIKLSSAITNLLSASGLRYLDLVTGEGEITREAVAAAYDTRLKADVEEIYKTLQGATSPVQKLLIKEILRVIREQTAQIERIEEMINRHSEETYQAAARELETIPGIGQRSAQQILAEIGTDMSRFPSAGHLCSWAGLCPGNNESAGKRKSGRINHGNKTLKATLVECAHASLRNKNCYFCAQYNRLSIRRGGKRALIAVAHSMLIAIYHVLCGEPYHDLGGDYYSQFNRERKIAGHLQKLEKLGWTPPVPAAN

SEQ ID NO: 399542 - protein, 352 aa, unidentified
MSIVAETVEHVVGIDTHARTHTYCLVHTRTGAVMDTATFPTSKSGNARAISWIHRRSPGSVLAAVEGTSSYGAGITAALLEQGFDVAEVRPAARSAHAHAGKSDLLDAEAAARSAIGRDYNTLARPRQTGARAALRVLLASRSIIDQQRTANRNALTALLRSVDLDVDARKPLTDAQIRVIAAWRIGRGATAAAAAASGIARREARRLAVTVLEQTELLKDNHRQLHQLTEQLAPGLQDLPGLGPVTAAIIVCAYSHHGRVRSEAAFAALGGIAPLPASSGNTSRHRLSRSGDRQLNRAFDIAVRTRMSYDPATRAYVTRRRTEGRTNREIRRCLKRYVCRSVFRQLQASMA

SEQ ID NO: 399543 - protein, 323 aa, unidentified
MFYLGVDVAKAKLDCMLLDTSNSKLKSKSIPNTAAGFAQLLEWLVKQKVAKPHVVMEPTGMYHENAALALADAGLVVSLVNPAQLRAFAHALGVKTKTDKADSAVLARYGATQNPMPWQPPSASARRLKALLTRRDAVADDLQRELNRQEANDFSPAPEAVGESIAQSIAFLKAELKRLETMIAAHIDNDPDLRNKKELLESIPGVGPRVSGHMTALFAGRTFERAEQLAAYLGLVPVEWQSGSSVRGRPRMSKAGPAYLRKVLYMPAVVARRCNPHIKALNDRLLAKGKSKMAVIGAAMRKLAHLCFGVVHTGKPYDPKFAI

SEQ ID NO: 399544 - protein, 355 aa, unidentified
MSQEKYIGMDVHQASISVAVMDARGKLIMECLLETKAATILEFIQGLRGTLALTFEEGTSAAWLHDLLKPHVSRLVVCDPRKNALLKDGNKSDRVDARKLAELLRTNQVKPVYHGKHGTRALKELGRSYLTITKDVTRVMNRIKAVYRSWAIPCAGTSVYTPRHRAEWLAKLVEPGVRIRAEHLYQQLDSLEPVRLEARRELLLESRKHAAVKLLRQIPSIGPIRAALLVALLQTPHRFRTKRQLWAYSGFAVEIHDSGEYRSVRGKLQRNRERITVRGLNDNHNKDVKSLFKSAAISASTRPGPWHDFYVTRVERGMRPTMARLTLARKIAAITLTMWKKGVSFDPKQLQRQAA

SEQ ID NO: 399545 - protein, 403 aa, unidentified
MDRTAGIDLASEEHRLLVVADDGRPLEQRRISHSEDGLQALVRRLLELRVTRVALERPNGLVVDRLLEAGITVVPIHPNQVAAARDRYRSGGGKSDGFDAYVLAELARTDMHRLRVLEPDGDETRALRALTRARDGLVAQRVALANQLRAQLEAFWPGAARIFADVDSPIALAFLERYPSPEDARVLGAKRLGAFLARNGYCGRRSGDELLHRLREAPTGRSGELETEARRQIVLGLVVVLKAIVEQIKLLTSEIRGAVEAHPDGQIFRSLFRDPRSVVTAAELLAEIGDRRHRYDTRARLEARAGQCPVAIESGKKKVASFRWACNKTLRDAVSVLADSSRKHNPWARKIYADAIARGCDHPHAIRILGRAWLRVIWRLWHDRTPYDPNRHGSLNRLLAGQG

SEQ ID NO: 399546 - protein, 359 aa, unidentified
MLLRFLGLFQAPFFPFCVQKNKVMEKIVIGVDVSKEKLDFCFHQSEKILQEMIVENTTSAILRSLKKMLKEFRLEVSDLLICAEYTGQYTYPLSCACDELQVSLWLENPAQIKHSSGVQRGKNDKLDARKIAAYAMRFHDRKKLFLLPEKNIVSLKQLISERDMYVCDKAKYQGQLTDQKRFMSSEDYQKKAGRLKSLLKELDDSITQIDIQIARLIDRDETLRRQHELLCSVDGVGDRTAVKMIVETNAFKNFDNARKFCCHAGVAPFEYTSGSSIRSRNRISNRADKSIKALLHMAALVVATRKKDGELREYYVKKVSEGKNKMSVLNAIRAKLVLRMFAVIKNNKLYQKNYEFSFA

SEQ ID NO: 399547 - protein, 329 aa, unidentified
MEKRYYVGLDVSKDATAICVRRADGGVQRVCEVATEPDAICAALDDLKCNVVRVVLETGRMSNWLHGELTRRRLPAICVDARQAHAVLSQMHNKTDANDAAMLADLARTGFYRKVEVKSRHAQERRALLLARDAAIGARRNVENTIRGLLASFGLRLPTQPRTYEGRIRSVLEGQAALAPIILPLLAVRTEALRQAAALTKELVRQVKASDACRRLMTVPGVGTVTAATFVATIDAPGRFAKSRSVGAYAGLTSRRHQSGAIDYGGRISKRGDRLLRTMLYEAANALLCRVKLGKGQALKNWAMAVKQRTMQRDKQDENPASIKVRTRG

SEQ ID NO: 399548 - protein, 369 aa, unidentified
MGDVTDIFVGIDVAKVRNAIAIADGERGGEVRFLGEVDASEESMRRVVKRLAAKHSRVQFCYEAGPTGYGLHRLITSLGLSCIVVAPSLVPRRPGDQVKTNRRDAISLAKLLRASELTAVWVPDEGHEAMRDLVRGRAAAVETLRVHRQQVSAFMLKHGRIFPRKKGWTMRYLRWLQEQQFDHPAHQIVLQEMVEAVRLSKERVDRLGQTIEEFVPNWSLAPMVRALQALRGIDLIVAVTFVTEIGDVRRFESPRQLMGYLGLVPSERSTGTTVRRGGITKAGNGRVRHMLVESAWTYRHPPRIGTKKLYLLQQVTPRVRDIAWKAQTRLTGRYRALSGRGKKTTVVCTAIARELVGFMWSVAREAQIN

SEQ ID NO: 399549 - protein, 414 aa, unidentified
MAEEETISWFAGVDWGSERHQVCLLDARGGTVGEREFPHSGEGLAELGDWLLSMASAASTVAVAIEVPHGPVVDALIDRGFVVYAINPKQLDRLRDRFSVAGAKDDRRDAYVQADSLRTDRRLFRRLQVADPRLIELRAWSRLAEELGAERVRLSNRMRHQLWRYYPQMQKLTKDLAAPWFLELWAIASTPAKAGRLRKSTVERLLTQHRIRRMDAETVLRILREPAIKVAEGVAEAASIHIRSLVARLRIVNRELREAERKLDELCTAVSEIEQTSGESLQRRDVAILRSMPGIGRINLGTLLSEASGPLSRRDYEGLRTLSGAAPVTKRSGKSLIVVRRYAAHVRLRNTVYHWARVATQRDPRCRARYTALRKRGHSHGRALRGVADRLLALVCVLLQRQTLFDPYFGRPTA

SEQ ID NO: 399550 - protein, 311 aa, unidentified
MTTIICGVDVSSQFLDACVPQAQAHRRVARSPEGIADLAGFCRQHQVELVVLEATGGYERLVHALLWLHQIPCAVVNPRQVRRFAEGLGVLEKTDRLDAAVIARFGAVAKPIPQPPASAAHRRLAALTTYRRQLVEARVALLNQRRLLEEPVVLASLDRRLRELQAEIRRFEEAIAGCVAADPLWQALAQAFASIKGVAGRAVAVLLSELPEIGTLDQKAVAKLIGLAPLANDSGKRQGRRPVRGGRAGVRSLLVLLASLVVRHNPDFAAIHARLIAAGKPRMVARVAIARKLLVRLNAKARDVRAAFPAA

SEQ ID NO: 399551 - protein, 420 aa, unidentified
MQVAQDDQEIIARVAALDIGKAEVVCCVRVPGQGPRARRMQEVRTYTTMTRSLLAMADWLTELGVTRVVMEATSDYWKPPFYLLENTFETWLVNARDVKHLPGRPKTDRLDAVWLCKVAERQMLRPSFVPPPAFRELRDLTRYRVDLITTRTSEKQRVEKLLEDSMIKLSVVASDIFGVSGRAMMAALVAGERDPKVLADMARGSMRGKTARLEEAFTGRFTDHHAFLLRTMLARIDGINTDIDIVQGRIDEQIAPFAAAVTRLDEIPGIGITTAQVIIAEVGLDMTRFPTPDHLASWARFAPGISESAGRKKGGSSTGKGNRYLARALGEAAVGAGRTKTFLGERYRRIAKRRGKKRAIVAVGRSILMIVWELLSDEEKRFIDLGPGYYDSRVNRNRSTRNHVRELQALGYKVTLEPAA

SEQ ID NO: 399552 - protein, 410 aa, unidentified
METIYERCAGLDVHKKTVVACTRVLAVNTTRTFGTMTADLLELSDWLVSQGVTHVAMESTGDYWKPIFNILEGTLEVILVNAQHLKTVPGRKTDVQDAEWIAQLLQYGLLRASFIPPVAQRELRDLTRYRSTFIRERVNLVNRIQKLLEDANIKLAGVATDVMGKSGRAMLDALIAGITEPELLAALAKGRLRAKREQLLKALEGRVKPHHRFILTELLCQIDSLDETIAHFDEQIRIACAPFEKAVELLDTIPGLSRQSAETIVSEMGSDMSRFQDADHLAAWAGVAPGNNESAGKRYSGKTRKGNKVLRTSLVQAAHAAVRVKNTYLAAQYRRLAGRRGKKKAIGAVAHSILVMAYYMLSRQEPYREAGADFFDRLNSETTAQRLLKRLQQLGYAVEAHKSPVGLTVS

SEQ ID NO: 399553 - protein, 397 aa, unidentified
MTSFEDVRARQIEMRRANLWSRGVPLRVPKVMTGSKPKDQEVGPMHGSAMALPTITVGLDLGDRYTQFYQLDAATGAIKAGRLRTRPDVLRDHFICTPRRIVLEVGTHSPWVSRLLEELGHQVLVANPRKLRLIYGGTRKTDRLDAEALARVGRLDPQLLGPVRHRGRQAQADLGRLRARECLVRARTQLVNHVRSAVKTVGGWLPATSTASFAHKVEPHLPDELRPALTPLLREITELTAQIRHADRALETLARTQYPETDRLRQVAGVGSLTALCFVLTLEDPTRFRSSRSVGAYLGLCPRQRDSGTHTSQLSITKAGDPMLRRLLVTAAQYILGPFGPDCDLRQWGLRLAARGGKNAKKRAVVAVARRLAGILHRLWVSGDRYQPCRARNRAAA

SEQ ID NO: 399554 - protein, 338 aa, unidentified
MVYGAIDLHMRSSQIRIIDDAGVVLRNQGVPTTRERLTHAFATHGPMRILLETGTESEWVAQALEAAGHEVIVADPNYAPMYGELHRKVKTDRRDVAALAEANRRGWYRPAHRTSAAQRDTKQVLRSRRFLVQARSGAVSLLRSLLRQSGYRLGTGSCETVPARVARLTLPPALAATLAPLCRQIAALTTEIHAIDARLQTRTASDAIIARLRSVPGVGLIVATTFRTFVDRAERFGHAGQVSAAIGLVPREDSSAERRHRGHITKAGPRELRSLLIQAAWVCWRHGGSGTLRAWADRLAARRGRRIAVVALARRLSRILFALWRDDTTFDGKTLATT

SEQ ID NO: 399555 - protein, 431 aa, unidentified
MPNRLQVGLDFSLKRADMCLLFPDGELLDAHLPFANSWPGFQEAKAFLLDAFDRFEFDGLDVSGEATGYYWLPFFYQLAADPDLAEHDLALFLLNPRWVKWFKKSFSPDDKTDQKDPFYIAERVRTRRPEVPWQPLSTLPLRFLTRYRFHLAQDLTRQKNYFLALLFLKASAYTRCRPFADTFGVTSQAILSDQLDLAELASLPLPDLATRLAQLSHHRLPDPTRNASRLQQALQDSFPLDPALAQPLQTVLDLALAHINFLDLQLDLIEDHIRAALPAYPAIQQLSTIPGVGLVYSSGIGAEIGDTQRFLDGRKWDKKRKRYRPRSLRDAEDAIAKLAGLWWPRNASGDFEAQDRKLAKSGNRYLRYFLIQAADKMRQHIKEYAQFYDRKFHEVPKHQHKRALVLTARKSVGLFVGLLHRNQAYRSQEPA

SEQ ID NO: 399556 - protein, 456 aa, unidentified
MPGRKQTRGRSSGRLSTINPDAAGLDVGSTFHVVAVPGDRDERPVRTFRTFSGDLHRLADWLKETGIKTVAMESTGVYWIPVFEILEARGLEVLLVNSRDVKHVPGRKTDVNDAQWLQQLHQHGLLRGSFRPRDGVVRLRAYLRHRERLVDYAASHIQHMQKALMQMNVQLHHVVSDITGATGMRIIRAIVSGTHAPDELAEFRDVRCAASEDTIREALTGNYRPEHVFALRQALELYDFHQAKIAECDTEIEAVLRTLNEARATPEEPLPSARHGKARNEPAFDARPALYTLLGADLTQIHGFGPYTVLRLVAECGDDMRKWPTAKHFTSWLSLAPGNKISGGRLLSSKTRRSSNRATALLRIAAVNIGKTQTALGAFYRRLAARTGKAKAVTATARKLAILFYKALRFGMSYVDPGASYYEERYRQRVIHNLHRRARHLGFALVADPAVSEGVS

SEQ ID NO: 399557 - protein, 341 aa, unidentified
MREQQYVGIDLHRRRSVLVRMNDAGEVLAVSKIDNDPVSLSMAVAEAGPDPEVILEACYGWYWAADLLQAEGARVHLVHPLGLHWDSRRVKNDVKDATELAHRLRRNDVPEAWIAPPAVRELRELVRYRAKLTALRTSAKAQIHAVMAKLGILPPQAEMFGPTGQVLLDEMDFPGPYGLRVESLRDLLEIYDRELALVEREIAGWLKDDVGYRAIQALHGIGPITAAILVAEIGDIHRFASARHLCSWAGMTPKLKESDTNSNRGKISKQGSTLVRWALVEAVARYHGGAPIAPTYRRIAERRGGKIGNKIAKVAAARKLLTLVYYGLRDGEIRCLYNEAV

SEQ ID NO: 399558 - protein, 358 aa, unidentified
MNSQKYVALDVDSANIVAGVFDSKGKSIMECFVKTNSTAVRQFFKLLDGTVHVALEEGTQAGWLYDLIRPLVAEVIVCNPRRNKLLQSGNKSDRIDVKKLAKLLRLGDLHSVYHGDQAIESLKQLVHGYQMLVEDSTRAMNRLRAVFRGRGIKCNSTAYNQDKRQEWIDKLDIKAAQMRIRYLYKELDCLMKLRNEAETAMCRQARTHSAYKVIISVPGLGPVRTAQIIAVIGSPHRFRTKRQLWPYCGLAVVTRSSADYEWVGDRARRRKKPPQTRGLNNNFNRTLKAVFTGAALTAIGSNKEFKQYYQRLIDKGIRPEMARLTVARKLVAITLTLWKKGEKYDPERLNQAAGTGDQ

SEQ ID NO: 399559 - protein, 362 aa, unidentified
MSDGSKDQPQMTAGLDLGDKYSYLCLIDTVSGEVMEEGRLRTTPEALGRRFSSEQPPMRIAIEAGTHSPWVSRVLEECGHEVLVANARKLRLIYANKRKTDEIDAENLARLARLDPKLLYPLKHRGEDSQAHMALIRSREALVSCRTQLVNHVRGTVKSLGHRLPKCPARSFHKKAPSHIPEALRPALGPILEQIASLTERICEYDRLLETISKEHYPHETELLRQVEGVGTLTALTFVLTVEDPYRFEKSRSVGAYLGLVPAQDQSGDRNPQKHISKEGDEMLRRLLVGSAHYILGPFGGDSDLRRHGQKIASRGGKNAKKRAVVAVARKLAVLLHSLWMSGEIYEPLRNAHRSGGRQEAA

SEQ ID NO: 399560 - protein, 323 aa, unidentified
MSPVIGIDVAKRSFDVAIELTNGKHRTKAKLSNDAKGFQALQAWLQTHAQPESWIAMEATGTYHQALAEFLHARGYRVCVLNPAQTAAYARSQLSRVKTDRSDAKLIASYALRHREQLRRWHPDPPALKQLKALVRRRQDLQQMLQMERNRLDVAPAQVKDSIQVHLADLQHHIAQIEQAIDDHIDQDPTLRGQRELLVSIQGIADTSAALMLAELGDVRRFADASAVTAFAGLNPCLQESGDRKGHVCISRTGSPRLRAGLFMPALVAMTHNPVIRALKQRLSERGKAGKQIVCAAMRKLLHLVYGVLKSGTAFDPKRGLAC

SEQ ID NO: 399561 - protein, 346 aa, unidentified
MGQITRIGMDISKNFFELHCVDAAEKVVKKTTLKRSNVLVFFAKLESVRIGIEACGTSHYWARALTELGHEVVLLPPQYVKAYVKRGKNDAIDAEAICEAMSRPSMRFVPVKSEEQQAVQMLAGLRSREVTRRTQLANAIRGHAGEFGVAVPKGLARIEPLLKQLIENPHLPALARELFEELRQDFVATDIRIKRLDQRLLAWQRGNEQCQRLREIPGIGPLIASLLTIKVPDIGHFRSHRDFAAWIGLTPKNHSTAKKNRLGAITKAGDEVLRSALVVGATAVIQQIKRGRRKASPWLAKMLAKKPAKLVAVALANKMARVAYVLMATGQCFDRNRFEGICAEAA

SEQ ID NO: 399562 - protein, 415 aa, unidentified
MRVIRKRCLGLDLHKKQITAHLRVHRGSSQEPEGLGKRFGTMPDELEELREWVREQQITDVVMEATGVYWMHVYELLEGVTTPAVVNAAHVKKVPGRKTDQTDAEWLSELHAHGLLRLSFIPPKEIRELRALTRYRTKLVAIRTAAKNRTIKLVEMAGVKLSSVVSSSFGKTGRAILDALCSEVRPDAAKIATLAKGTLRKKVPELERAVRHPLTDQQRELLKMHLHAYDAVDAQVAETELKLTQLAQPYSAQIAMLDLIPGINPLSAITLLAETGIDMSVYRDERHLTSLAGLAPGNAISADKRRKVSVRAGNRYLKRILVQVAWAASRKKDSFQRMRFMRLQTRIGRNKAIVALARQILVVVYHVLSTGKPYQERGTAFYDRYNKEKSIARYTKRLAQLGFIVQLTKKDEPTE

SEQ ID NO: 399563 - protein, 424 aa, unidentified
MANLPILDAHAAFIDVGSEQMHGSVAGGAPRVFGTVTAQLHALRDWLKAQDVRSVAMEATGVYWLPLYGVLEAAGFEVCMVNGRQTRNLPGRKSDMQDCQWGATLHAHGLLRAGFVPPADIRRLQDYMRLRADHIEMAAAHVQHMQQALERMNIKLHDVIAKLTGVSGLAVVRSILDGERDPQRLLLLCDTQIQRAKAERVKQSLLGTWTEEHLFALRQALQSWEHYQDQIAECDRRIETLLHDIDPGDPNHTTALAARPSRPGVNAPDIADLRVMLAHMCGGQDLTQLPANTEYSVLQVVAEVGTDLTKWRTEKHFTSWMGLAPGSHQSGKRKRSVKRNRNRAGRLFCVIARSLSRSKDIALGGFYRRLAARRGGLVANIAPARKLAVLFWRVMVKGIHYVEYGLKQYEAKVLDSKQKALRGG

SEQ ID NO: 399564 - protein, 356 aa, unidentified
MRGRNQGERVAVRGKEVFVGIDVHKESWQVTVRTEGEEVFHGRIPSQYHALQKILGRFRGSKIKVAYEAGPCGFGLHDQLKEDGVEGIVVPPSLIPIESGNKVKTDKRDSRKLARLLEGNLLKRVYVLTQEDRADRELLRTRRQIVEHRNDVARQIKSKLLFYGIRSPFSAKAGWSKKFIRWIKDLNLKWGSVKVSLQSLIELYEYLSGQIVGLNRKVGELSRSDKYRGRVKLLRSVPGIGILIGMEILVEIQDMARFQRADELASYIGLTPSEFSTGQYVRQGRITRCGNKRVRTCLVESSWHLITKDPWMRRKYDRLKQWKGGKRAIIAIARNLIIRIRRILLNQEPYVIGAVA

SEQ ID NO: 399565 - protein, 367 aa, unidentified
MFNERTAIGLDVHARSVRAAAVDTSTGEVIEARLPATTVEVVAWVAQVAARLGPVHASYEAGPTGFGLARKLDAAGIAVTVAAPSKIIRPAGDRIKTDARDALLLARLLKMDELTAVRVPTEAEESARDLVRARDDARVELMAARHRLSKLLLRRGIVYAGTNTWSRDHDRWLRAERRAGLDNAGIGTLAAFDAGYDAITQIVARKDRLDREITVMATDSEFTAVTTRLGCLRGISTLTGFALAVEIGDWHRLTGSSIAAYLGLVPSEHSSGGSRSLGPITKTGNTHARRLLIESAWYHKHPYRIGKVMRDRWANAPATSAVRGDAGNRRLHHRWMVLAAKHKKHTVANTAIARELAGWCWSLAVMD

SEQ ID NO: 399566 - protein, 364 aa, unidentified
MEAPVKDHRTSVGLDVHARSVVACALDRDTGEVFERRLTPDYQDILDWLRSLPGRVVVTYEAGPTGFGLARFLLAAGVLCLVAAPSKLQRPSGDRVKTDARDAAHLCRLLHLGQIIEVTVPSAEQEAARDLVRAREDCRGDLMSARHRVSKLLLRQGIIYSGGRTWTGKHQTWLRTQRFDAAPLQLAYDTAVDTMLATVDRRDRLDDAITELAADSAYTPVVTRLGCLRGVSTLTAFGLAVEIGDWGRLTGRSIGAYLGLVPTEYSSGTSRSQGPITKTGNGHARRLLIEAAWHHRQPYRPGVDLRRRWDAASPAARARGQQANRRLHTRWCRFDARHKRPVVANTAIARELAGWCWSLAVLDT

SEQ ID NO: 399567 - protein, 349 aa, unidentified
MHSTTVAVDLAKNVFELAVADADGKISERVRLNRARFSAFFVHRAPCRVLMEASGSAHYWARRIGEHGHAVQLLPAQYVRQYVRRNKTDRADAAALIEAARCAAIRTVPAKSLEQQQLMVLHRLRSQWMSTRQRYLNTLRGVLREFGIVVPLGARVARTRIAHYLAQPPQELPAAARPLLAQMLSEVKELEHHIEQIERELNGLTRADPVVQQLRQIPGIGLLSSTAIRAAVGDVQRFPCGRSFASWLGLTPREYSSGERRRLGGISKRGDAYLRTLLVHGARSALLAAHRQQRTGRPLDHLRQWALQCERLRGHNVATVALANRLARIVWATWKHGRAFDGNWSCSTL

SEQ ID NO: 399568 - protein, 352 aa, unidentified
MERYIGLDAHSESCTIAVMDAHGKRLRAQVLETRAEVLIDFVTALGGSKQLCLEEGQLAEWLVEVLSPHVDEIRVTQPKKHAGRKSDADDAWTLAEQIRVRARGTYVFKPLQKQRPLREAVRAYTVAAKELTRAKNRLRALFRSRGVPELSQKLYQPKHRAEWIAKLPREFRPRAEWLGEMVDAMTKLHSLAEYQLESVAKMSVDVRRLTDLPGIGVIRAAQIVAIVVTPERFRTKRQFWSYCGLGIVTRSSSDWERNTSDASWSRRKRVEVRGLNRNRCSLLKSVFKGAALAAISNPTPLLARYDKLIADGIEPHLARLTIARSIAAAALAIWKKKEVYDPSRYIAPTAPA

SEQ ID NO: 399569 - protein, 343 aa, unidentified
MEKIITIGVDLAKSIFQVHAINDVGDVVLQKALKRRDMIAFFEKLPRCLVGLEACSSAHHWGRMLRELGHDVRLIPPAYVKPYVRRQKNDAADAAAICEAVARPTMRFVPIKTEEQQAALMLHRARALLLSQRTALICAIRGHMAELGLIAPRAVRNMGPLLDVLADDADESLPPLARAALRPLADQLTHIDVQLARLDRELQKWHRANPVSQRLATIPGVGPITATALAASVTEPSMFASAREFSAYLGLAPRQNSSAGKTRLGRVSKMGDRYIRTLLVNGAVSLLSPTRKRSCALDVWAKVLTEKSKPTKLVALALANKMARIAWALMRRGEAFRDPALAA

SEQ ID NO: 399570 - protein, 344 aa, unidentified
MDHYVGLDVSVRETSVCVVDETGKLLKEAKVPTEPGSIASLLAKGGYVCKRVGLEAGPMSQWLYAELAAAGLPVICVEAQHMRSALAAQRNKTDRNDARGIAQMMRVGLYRPVHVKTLQSQERRLLLTARKLLQAKLLDLEADLRGTLKNFGLRVGVVGKGGFRQRVRELIEGREALTAVMSALLEAHAALQTQYNILHKRLLDLVRDDPLCRRLMTAPGIGPVIALTFQATVDVPTRFPKSRLVGAHFGLTPKRYASGETDHNGRVSKCGDAMMRTALFEGAQALLVCTRKWCSLKAWGMAIARRRGTKRAIVAVARKLAVILHRMWLDGTEFRWGKEVSTAA

SEQ ID NO: 399571 - protein, 348 aa, unidentified
MSKSSQYVGLDVSLKETSICIIDDGGKIVWRGRVDSTPEAIATAVKQHAPNAVRIGLESGQLSSWLFHELKEAGFPVICVGARHAKAALSLKVNKTDANDAFGLAQIMRVGWYREVTVKGLDCQAVRALLVARAQIVSQITTLKNCVRGILKTFGRVLPKGLRSQFPGRVRAAIDGHPVLGAIIEPTLRVLEAMRAQLLVYDRAVIQRARSDDTARQLMSAPGVGTVVALAYTTGVEDPARFKRSSSVAAYFGMTPRRYQSGEVDHAGRISKCGDGMVRGLLFEAAKVLLSRSARPSALKTWGEALGKRVGAKKATMAVARKLAVILHRMWTTGKTFQWNAEAASPAA

SEQ ID NO: 399572 - protein, 407 aa, unidentified
MLFVGDDWAEAHHDIEIVDETGRRLIWARLPEGLAGISRFHELVADHLDPDAGPEQVLVGIETDRGPWVQALIAAGYTVYAINPFQASRYRDRHAASGAKSDPGDAHVLAELVRLDRAHHRPLAGDTLLAEHVRLAARAHQSMIWMRQRSTNTLRSLLRECYPAALAAFADDLAGRDALAVLAAAPGPTAGRGLTPTRVAGLLRKAGRQRNLDQTATQIVTALRAEQLPVRAGLEPVNAASVAALVAVITTMVAQTRVLEEQVRQGFGQHPDAEIYLSQPGLGPILGARVLAEMGDDPHRYADAKARKNYAGMAPVTRASGTKRAVLARHARNRRLADALYQQAFSALNTSPGARAYYDTRRARGATHHQALRAVSNRLVGILHGCLRHHQPYNETTAWHTETTLAA

SEQ ID NO: 399573 - protein, 338 aa, unidentified
MAILTIGIDLAKNVFAVHGVNEAGKPEFVRPSVARAKLHALVAALPPCVIGMEACSGAHHWARLFAADGHTVKLMAPKLVAPYRMSGKRGKNDGADAAATCEAVQRPNMRFVPIKTEEQQSRLMVHRARQGFIAARTATVNRIRGLLSEFGIVLPLKAEIVRREAAAHLEDLPGYANTVIGDLLSEVHHLDERIKQYDAHIRTMARDCTAAQQLMQLMGIGETTATAIVAMVGNAREFDSGRQFAAWLGLVPGQYSSGGKARLGRITKAGDGYLRSLLVLGARAVLNAATDKTDSLSRWAVKLAERRGYWKAVVAIAAKNARMAWAVLAKGEAFKLPQ

SEQ ID NO: 399574 - protein, 354 aa, unidentified
MEYGAIDLHKRESQVRIVTADGEAIDRRILTTRDRLTAIFWGRARMRMLIEASTESEWVARHLESLGHDVIVADPNYGAMYARRSRRVKTDRRDAAALADACLDGNYRPAHRRSAQQRIVQSMLNVRRELTDSRTRAILIARAITQAEGVRIRSGRTETFLDRLAALELPASMRSTLLPLRSVIEVLDDELAAADDQFAKLVAEDPVAKRLMTVPSIGPITASAFVAALDDAARFDGAAQVTSYLGLVPREYSSGEHQRRGRILRSAHPHVQSLLIQAAWRMSRSSDKRTAGLRAWADAITHRRGKKVAMVALARRLARILFAMWRDNAEYQAKHIRVITGTAPAIVEGETAVV

SEQ ID NO: 399575 - protein, 342 aa, unidentified
MVYVGMDVHRKRTQVAVLDERGVEVLNRNLPNDPGELTPLLMSLGDDVSVVFEAAYGWGWLADLLGDLEIDTHLAHAKNVKAIASARLKNDKVDARTLAHLLRTDLLPEAWLAPRDVRDLRALLRHRARLVRYGTSLKTRIHAVLADQGIRLEVSRLWTGPGRAWLNALDLPTLQREIVEDLLVVLDATMTRVKRLEREIKELAQPDERVTALQKLPGIGLLSAMTLVAEIGDIERFPTARKLCAWAGLTPQVRNSDRTIRHGHITKQGSAWVRWVLGEAAQVAKSKPPFAMTYASIAKRRGNNIATIAVARKMLARSFHILKEVNQGQLSEEASVSGALAV

SEQ ID NO: 399576 - protein, 343 aa, unidentified
MDEYDGRQFVGIDLHRRRSVIVRQSESGEQLSAVRIVNDPVALGLQLEQAGSDPEVVLEATYGWYWAVDVLQAGGARVHLAHPLGVKGFRYRRVKNDVRDAGDLADLLRMGRLPEAWIAPPETRELRELVRYRAKLVAIRSGLKAQIHAVLAKAGVLIAASDLFGVTGRQRLARVPLGSAYAERVRSLLELIDILDGHEARFAAMIAERLHTHHGYQAIQQVPGIGPVLAAVFVAEIGDVHRFAGPAQLCSWAGLTPTHRESDTVVRRGHITKQGSKLVRWAAVEAIQRQPDTTKIALDRQRIEARRGRNIAKIAAARKLLTLVYYGLRDGHIRAVAHRQAAA

SEQ ID NO: 399577 - protein, 311 aa, unidentified
MDATVVGMDVSKNQLDVHIRGQNESFVVPRDAEGLAALIERLRPLEPLAIGLEATGGFETFVAAGLASAGLPVVVVNPAQVRAFANALGKRAKTDPIDAAVIAHFVEATAPEMRPLRDDETRLLADLVARRRQIVAMIVAERQREMHAPARVKKSIVRLLKALRRELDSLDGDIDESVKGSPIWREKEDLLASVPGIGTTIARTLLAELPELGTLDRRKIAALVGLAPWTRQSGQWRGKSFIGGGRASVRAALFMGAMVAARYNPALKAFRDKLVAAGKPKLVAIIATARKLLVILNAIVRDKKPWADQTA

SEQ ID NO: 399578 - protein, 448 aa, unidentified
MSKSKTKNETVKRISQLTVINPTAAGIDVSDKEMMVAYPIGAGQLEVRCFGCFTSDLHLIAKTLRKFSITSVAMESTGVYWIPLFLLLQEYGFEVCLVNAKHVKNVTGRKDDESDAEWIQKLHSCGLLTASFQPDNLTRTLRSIVRHRKCLERTCSSYINRIQKTLELMNIKIHTIISDIDGKTGLLIIEAILAGERNPEILADLRDRRIKASRKEIIKSLEGHYTTEHLFELRQCYQLYCTHREMIGECDKEIEKQLIDQVASKNEGVIPDIPELKRKATKKHKLPFNATAYLNEIFGVDVTEVFGISELSALAILSEVGTDMSKWKSGNHFTSWLGLAPNTKISGGKVISSRIMKKKHHAGQAFRMAANGLKNSKSPLGDYYRRIKGKAGAGKAVVATARKLAIIFYIMVANQQAFDPRALIEYQEKSKQKKINQLKRKLELLEAA

SEQ ID NO: 399579 - protein, 348 aa, unidentified
MRFYTQTRAHYCGIDLHARSLYVCILDHNAEVLVHKDIRASPDALQRLIEPYIGQLVIGVECMHCWYWIADFCKERQIEFILGHALYMRAIHGGKAKNDRIDSHKIAMLMRGGNFPLAYVYPKEMRATRDLLRRRGKMVRYSGQFKAHVSNTATQYNQPPPPKGSLRQIKGRAEMSDLLTDPAAQRSVNLDLSLVGFMDKEIQQLERFVERQATDHFTKEVKLLRTIHGIGKILALTILYEVGDITRFDTVQQFASYSRLVKCKAESAGKQYGTQGNKIGNMHLKWAFSEAAVTYLKGNDEGKAYLAKLQRHMSKAKALSVLAHKLGRCVYFMLRSDQVFDEKRFLQG

SEQ ID NO: 399580 - protein, 362 aa, unidentified
MGIDQHKRYSHITIIDEVGDVVEERKLYHQDKEGILNYFKSFRPQETKVVLEATGNWYWLADLLESANLPHILAHPYKTRIIAESKIKTDSISSFTLAQLLRAGLIPQSYLATRNIRSLRELLRYRISLVKVRSSLKCRIHSILDREGIDTPKFSDLFGKKGLIWLKSLSLAYPLSCSLEGYLNLIERLNSLIDETEKSIKLTIKEDPLAQLLLTIPGIGFFTAYLILCEVVDINRFLTPKKLSSYIGIVPSIHQSGNFSHTGKITKQGNKYLRWALIEASQKAIIKDPYLKAIYDKITYKKGKQSARGRSTLGGKAKVAVANKLAHIIWGVLKYRKPFHQRWILRNRPKKRLIYSCPGQAR

SEQ ID NO: 399581 - protein, 343 aa, unidentified
MIMEYFGLDVHKRYTVFTRLDERGTLLGQGRVTNDAESLASLLAQSVEPAKVVLEAGGIWPVFTDALEDHAAEVVLAHPLKTRASASARIKTDRIDSATLAHLLRTDLVPRAYLAPRSLREVREVLRYRVQLVRLRTAVKNRVHALLAMRGLMSPASDLFGHAGRRWLASLALPPVPRRAVDGFLSILDALNVQIRLIEREIRQRVRQSPEARRLWSIPGVGRFGALLILAEIGDVHRFPDARHLISYAGLAPSVHSSGGRTYHGRITKQGSPLLRWILVEAAVAASRQEGDLRERFRRVAQRKGPKTARVALARHLLTIVYHVLADGTPYHAHTSAVAPLAA

SEQ ID NO: 399582 - protein, 346 aa, unidentified
MTEQNYPNQNYPILGIDVSKKQLDVCVLQADEQRMSLKVNNTPTGFNKLMQWLKKKNVEPAAAGLESTSVYSMGIAVSLHEQGMVVYLANPSQVHSYMRAEMRRAKTDKADAEAIANFIAAMSKKLHPWQPIPQHYQELRDLVRYLHQITRSRATIKNRMDKISYTTSAAKERVRKLINADLAHYDKQISSIKKDIRKCISKHPDLKCRYERITTAPAIGEITAVTYMSEVPNVKVFSCAKKLVAFTGISPRISHSGIRHPESQPISKMGDAILRQAVYMAALTAKKHNPNMTGFAARLRDDGKKKPKVVTVAVARKLLHLLYAMDKNETSFDPNYQKQHQIKGTI

SEQ ID NO: 399583 - protein, 360 aa, unidentified
MIVQGTSVGLDVHALSVVAHAIDEETGKIARARLCPDHREVLGWLHQLRGPVRVTYEAGPTGFGLARAINNSAGMECLVAAPSKLQRPAGDRIKTDAKDAAHLARLLRLGEITAVTVPAPEIEAVRDLVRARDDARADLMRVRHRLSKLLLRQGIVYSGGTPWTCVHEAWLRKQRFADHHLKAAFDHSFDAVLAATAARDRLDEQILDVAASARFADPVNRLGCLRGISALTGLALTVEIGDWSRFTGSSIGAYVGLVPSEFSSGTSRVQGSITKAGNTHVRRLLIEAAWHHRKSYSTSGPSLRARWAKVDPALRARGHAGNRRLYGRWQGFTERKKNPLVANVAVARELSGWCWSLATM

SEQ ID NO: 399584 - protein, 317 aa, unidentified
MNNNNTLYVGLDVHKESITVAYAINSEPVELMGKIGTSPTDIQNLCKRLRSKSSQVSIVYEAGPCGYGLYRRLVKSGFDCMVCAPSLIPKKPGERVKTDRRDAIRLVRSLRAGDLSAVYVPGIEDEAFRDLARAWASARDDLRHARQRLKSFLLVHGVHYVGRADWGPAHRRWLSKYSFESPWRQLAFDEHRRTIEDRQAQCERLESALKEAVTEWRLYPVVEALQAMRGIQFITAVGLISELGDLTRFEHPRQLMSWFGITPSEYSSGGSRHQGSITKAGNSYARKLLVEAAWSYRHPARISPAIKKAGKFTPPRH

SEQ ID NO: 399585 - protein, 406 aa, unidentified
MLPFDSTPNRFIGLDIHKEYLVAIGVNQNQKQVFGPHHVPIPRLESWIQKHLTQQDAVVLEMTTNTYTVYDLLKPYVHSVTVVHPPHVALIVRAQVKTDKKAALTLAQLHAAGLLLPAVWIPPVEIRDLRAVLAQRFKMARMHAQAKNRLHAFLRRNNIFPQVEGMDIFAPEMRGWWEARPGTAMEKFRIQADLDALAFAKQQVARLQDHLNQLAPKNELVPLLVQIPGIGALTALTILAAVGDISRFPSAKQLVGYAGLGARVHDSGLSYSTGRITKAGRRDLRNAMVEAANHAVRSHAHWQAEFKRLEPRLGRSKTVVAIARKLLVVVWHLLAEETADRFAKEVQVARQFFGFAYKVGVGNLPDGQSAKEFTRNQLDRLGIGQDMTHLPWGSKRFQLPPSKLLK

SEQ ID NO: 399586 - protein, 406 aa, unidentified
MDKPSVETAVLKTDRGGKRLYFVGIDISKFKHDCAIVDELGDVITPSWSFQNDYEGFSLLRELLGALDGEKKIGLESTGHYGQNLKLFLENNGFSFMEFNPLLINRFVRSKSLRKTKTDSIDALMIAQYMMTVEYKPYPPSFYTLKKLKSLTRFRDSLIRQRSRQMVELTNILDKVFPEFKPFFKGRFSATALYILSHYASPEKISNMNSKSYEPLRRLSRGRFSMVDFVELKTLARNTVGSAHDYLLQEMEITIDIYDQLQSKVEEIELQINDCVLGLAPPMLTIPGIGVASAAVILAEFGDLSKFSSPSKLLSFAGLEPGYFQSGISESTGKMVKHGSSHLRYAIMNCAQTVINNEPTFAVYYAKKRAEGKEHRVALTHVAKKLLRVIYTLQTKDLSYNPDLVR

SEQ ID NO: 399587 - protein, 335 aa, unidentified
MDFCYFIGIDIAKDTLDWAVHTQQGPQLSTHTSNTLAGIKTALAEFKALPGWDSRQVVFCMEHTGIYNAHLLELLDQLKLAIWLESSLQIKQAGGMQRGKTDKVDAQRIAQYAYRFRDQIRLWEPPREVIQKLAFLSATRQRLNQAYNLLSVPVAEQETFISKSLQKALKGNVKKSLTALKEEQKAVEQEIKQLIQADSRLKELFDLMISVPGIGPVIATELLITTNEMQTINEPKKLACHAGVAPFEYRSGSSVRGKTRVSHQARKRLKSLVHMGTMSAIQVKGDLQDYYVRKLAEGKHTMLVLNAVRNKLIHRVCAVVRRGEKYDKNYATALA

SEQ ID NO: 399588 - protein, 406 aa, unidentified
MRLFIGDDWAEDHHDVEVMDAGGRVLAKKRLPEGAAGMARLHELIGIQLGEDAQDAEVLVGIETDRGPWVAALVAAGYVVFPVNPLQASRYRERRGVSGAKSDGADAHMLADMVRTDWHQLRPAAGDSAEAGAIKALARMHKTLIWDRTRQLQRLRHQLREYFPGALEAFDDLAAPDALELLAKAPDPARAARLTRAQVSAALKRARRRNIADKTTAIITALRSAQLGQPPALTAAYAAAVRSLIAVITALDEQVTVLQGQVEAHFGQHPDAEIYLSQPGLGSLLGARVLAEFGDDPHRYASSKARKNYAGTSPITRASGKKKTVMARYIRNDRLIDALMAQAFTALNVSPGARAFYDQQRAGGAGHNDALRRLANRLVGILHGCLKTQTLYNEATAWSHRRKLAA

SEQ ID NO: 399589 - protein, 313 aa, unidentified
MILALRYVGIDISKKYLDIFDEADGVPRRIANATQAITQQVARWQCDALVVFEATGIYDLALREALRQAGIRFARINPARARDFARASGLLAKTDPIDARMLAAFARAMQPAPEQVADPARNALARLAKRRDQLVLMRAQEKNRRSEADDRAMAERIGRLIEVLDSEIAEIEADISALIKAEAEIADDAKLMRSLPGVGPVACMQLIAQMPELGRVGPKQLAALAGLAPFNVDSGTFRGKRKIAGGRKRVRDALYMAALNAVRRADPFKAFYARLRQAGKPAKLALIAVARKLLTVLNAIMRDRKPYLQTKPT

SEQ ID NO: 399590 - protein, 344 aa, unidentified
MSEVIIIGLDIAKHVFHAHGADGKGRAIFSKRISRGKLLDFFAAQPSCTVALEACGGAHHWARQLTQLGHEVRLIPPAYVKPFVKRQKNDAIDAEAICEAAQRPSMRFVAVKSEQQQAAGLVFRTRDLLVRQRTQLINAIRGHLTEYGWIAPKGPSHVAMLTDLIEEEEMASSLPKAAHAMFRLMLDLLAELNGKVADLDQEIARRAREDEVSRRLMTVPGIGPISATAIAALAPPAETFAKGRDFAAWLGLTPLQRSTGGKQKLGATSKMGERTLRRLLIIGSSAVVQQASKRGAPRGSWLEQMLARKPRMLVTVALANKMARIVWALLVKCENYRAPVAAKA

SEQ ID NO: 399591 - protein, 414 aa, unidentified
MLKIVYRVCCGMDVHKSFVVACIASTNEYGVTTYKSKRFSTFTGDLRRCANWLSENNCKDVCMESTGKYWIPIYNILERTCNIVLAHPKYVKAIRGKKTDKRDAKWIADIFKHDLVAGSFIPPADIRQLRDLVRYRWKLTNFITGEKNRAQNCLTVSNFKLDDVFSDVFGKAASAITARILENPTEKIVDVSGFRTKGMKATNEQVLAAVDGEMCAEQAEKLRIIRSHMGSLELCKLNLESLILSTAEKYLPQLNLVMTAPGIQSFAAIGIISEIGVDMSVFPSSKHLCSWAGLTPQNSESAGKKKTTRISRAGAYIKPLLVQCALCAIRAKQFPEVRNRYLALKKRRGHKKAIIAIARMLLTAIYNMLKKNEPYNPELYRKGDQPPAHREVSVDEAIFILQRQGYLVTAPPTP

SEQ ID NO: 399592 - protein, 339 aa, unidentified
MKKYVLFIGIDISKKWIDVALTPDGQKDQMHHQRFSNKLKGFKKMMRWIMKFIRQQNLAPCFLFCMEHTGVYTFPLCYFLQEQGFDYVLDSALRIKRSLGIKRGKDDKADSMDIARYIYLHHKELKASVLPAKVLMDLKNLLAYRNRLVKKCQAIKVAASETKAFMPDDSIMNWIMEDSEEIINLLKSKIKKVESRINELVSQDREIKRIFDLATSVKGIGPINALQMIIHTNCFKAFDTARQFACYIGIAPFHKKSGTSLNIEAKVSPLGHKKLKALLTNGVMSAIQNDKELKAYYERKVAQGKIKYKVLNAVKNKLVSRVFATVKRGTPYVELSNYI

SEQ ID NO: 399593 - protein, 430 aa, unidentified
MKSNTQNKKIEAITEKTLVIGIDVGSETYYARAFDYRGIEYSKKPFKFSNTEAGFVTFKEWILDLKEKHEKDKVVPGMEPTGHYWFNLGKYLQDNEMKPVLVNPHHVKKSKELDDNNPTKNDRKDPKVIAGLVREGRYMIPYLPDGVYADLRTASNIRFQLQSELTRIQNRISRWFNIYFPEYKTVYGKPDAKSGMLILKKAPLPKDILTLGVEGVNQIWRDAKMRAVGKARAKTLIEAAEHSVGSKEGAVSARMEIRMLLEDYESRNMRLQEVMVLIEELVKQIPMAEKLLEIKGVGIKTVSGFLAEVGDISRFNSPKELQKLAGLALVENSSGKHKGETTISRRGRKRLRYLLFEVAMSLVAKNPEFRELHNYYTTRRLNPLKKMQSLMAIAAKLIRVFFAMLTKGVDYDPKKMVSDIKRPAVYLQAA

SEQ ID NO: 399594 - protein, 420 aa, unidentified
MSKQNVELAAFIGLDWADQTHVVTLQEAGSDRRRENFTLDQTPEALQTWIHQLRIRFGGRPVAIAVEQVRGALIYALMHVEFLHIYPVNPQTLAKMRQAFYPSGAKDDPRDADLLLEVLLTHRQHLRVWVPDDVLTRSIQLLTEGRRHLVDERTALTNQLTAALKTYFPQALDWFGDMHTARACAFLHRWPSLQQLKRASSSSIRKFYQSQGYRGHDKLEQLLGNIKQAQPLTEDGAVLLASTMMVQALVTQIPSLTESIEGYDQQIASLFAQHDDSTLFGSFPGAGPALSPRLLAAFGSDRNRFEFAAEMQQLSGIAPVTEKSGKSCWIHWRLACSKFLRQTFHEFAGQSILGSLWARAYYDHQRQRGKSHHAAVRALAFKWIRIIFRCWKNRTLYDETLYCKSLQLRGSSLAVALTTK

SEQ ID NO: 399595 - protein, 356 aa, unidentified
MSYDVKYIGMDVHKEAIVIAVLNESGKLVMESVIETKASSILQFLHGLRGELHVTWEEGTWAAWLYDLLQPQVQHIVVCNPRRNALLKEGSKSDKVDAQKLADLLRTGMLRPVYHGENGLRTLRELGRSYQTISKDLTRVMNRLKALYRGWGIACAGTQVYAARAREEWLSKLPQAGVRRRAELLYQQLDGLQALRREVRPEFLAESRKHKAAKLLRQIPCIGPIRAARLIALMQTPHRFRSKRQLWTYSGLGIETHDSAQYRFVSGQLQRSKKPQQLRGLNRNHNHEMKEIFKGAATRASCGRGPFREFYTGLLAKGMKPEMARLTLARKIAAITLTLWKKEERFDVEQLKTQAA

SEQ ID NO: 399596 - protein, 429 aa, unidentified
MEEVEDVELVVERIAALDLGKAGLEACVRVPSPQRPGRRMQELRGYGTTTAQLLEMVAWLWQWRVQRVVMESTSTYWKGVYYLLEAEGFECWLVNAREVKNVPGRAKTDRADAIWLAKVAERGMCRPSLVHPPEIRRLRDLTRYRRALVQDRTREQQRIEKLLEDAQIKISSVLSELHGVTGRAMMEALIAGQRDPRALAQLAKGRARKKTEWLEEALRGFFTEHHAAILRMMLDNTDRISAQVASLDARIEEEIGPFSAQAARLAEIPGVDAVAAAELIAEVGVDMTRFPSDTHLVSWAKFCPQTHQSAGRSRSKGRGRGNPWLAGTLGRIAFANSRADTFLGARYRRLARRRGKQKAIVATGNSVLTVVYYLLSNPEATFCDLGPGYYESRINVHRRARDLATQLQALTGQHIVIRDGKAVITDAAA

SEQ ID NO: 399597 - protein, 367 aa, unidentified
MKKDNTAKESVMVRKRVHRKLTVGIDLGDRSSRYCVLDEQGEVLAEGAVATNRRGFAQVFGSKPRSRLALEVGTHSPWVSRYLADLGHEVIVANPRRVRLITDSTRKDDRLDAKTLARLVRIDPELLSPIRHRSEQAQADLMVIRARALLVEARTMLVNAARGLTKSYGERLGNCGTGQIREGLAESLSEALQNALKPLLAEVESVSQRIREYDEQIENIGKSRYPETALLKQVHGVGTLTALTYVLTVDDPNRFRRSRDAGAYFGLRPRRRESGDSRPQLRITKEGDAYMRKLLVQCAHHILGPFGPDSDLRRWGLELAAHGGKNAKKRALVAVARKLAVLLHKLWVTAEVYEPLHVRRAGKAVAA

SEQ ID NO: 399598 - protein, 384 aa, unidentified
MKKTKGTLSKDDNRKGIILHLAFDLGHSKWKLAFSDGEKKRTVNIEARDLEAFQEEIRKARIRFGLERDAKILSCYEAGRDGFWLHRYLLSCGIENVVVDSASIEVSRRKRRAKTDRIDAMNLLKMLLRYHGGEKGLWSVVHVPSVEDEAGRHLHREMDCLKKERTMHRNRIKSLLIQQGIAVKNPSRMKFLEDLKTFKMWDGHALPGDLITRIMREHGRLRMVEDQLYSLTREQATRLEEADTISLRKVSQLMTLRGIGMNSSWKFVMEFFGWRNFKNRREVGSLAGLTPTPYDSGGKRREQGISKAGNKRIRTLAIEMGWVWLRYQPQSKLSRWFLKRFASGGSRMRRIGIVAVARRLLVDLWRYLQYGLIPEGAVLKAAGS

SEQ ID NO: 399599 - protein, 350 aa, unidentified
MLIIGCDYHPGFQQIAFVDTETGECGERRLAHREEAEQFYRKLSERSLRVRVGMEASGHARWFERWLSDLQFELWIGDAAEIRTKRVRKQKTDRQDAQLLLRLMVEDRFPRIWVADADNRDLRQLLWHRHRLVQMRTRIMNQLHVVALNEGVRRKKALWRPAGRSELESLLLAPWAKRRRQDLLDVFDQLTPKIQELTRALEEEVEKRPVARRLMTHPGVGPLTALAFELVIGTPERFHCGKQIASYVGLVPSEESSGDRRRLGHISKQGNSLLRFLLVEAAQVTVRSQPQWRNKFFHLAMRRGRKIAKVAMARKLAVHLYWMWRRGWDYGQFAKLGSHAGEPGNRHGVQ

SEQ ID NO: 399600 - protein, 320 aa, unidentified
MSDHSAIGIDADSKTLVVARHGTKGSARIANSASAITKWLSSVPAKSRIGVEATNRHHELVVQAAQKAGHAVFLLNPRDIKHYAKGVACRGKTDSGDAQVIARYIAREADNLHEHIARSPEQELLHVLLQQRDSLVRNKATLHLSLGSDAAESATFGPIFSALKEALAMLDRKIQHLCRSGEQRDLYRRIMTIPGIGPTVAAFVTHHITRWPLANSDAWVACTGLDPRPNESGARIGRRRLSKRGNASLRQILYMAAMGLTRSKGGKPLYTAIRDRGHSSTASFNILARKLARIAWGVFKSGRDFDPSMLKVGQACFQQA

SEQ ID NO: 399601 - protein, 435 aa, unidentified
MSNILFENLFISVGIDVGADFSFMSIALPNQTFVGKPFKILHSDLNSLSMAVSKIKEAEEMYSLESRIFLESTGIYHFPLFCYLRDKGFLVSIINPIITKNSTNINIRKVHNDKFDSKKAALIGLKPDLKVSLIPPDLVLDLRNLSREYYDLIDNRSAYVNKLQGELRMVFPQYLKIFSKITVNTALTLLEKYTSPDAFLNASKDEIIASIRSTARFGALYAEKKYNAIIKAANDAKAFGYSVNSNFKRILLYIRFIRQYDKEISAILSDMHELVDSNEDTDFVRQIHLIESFKGAGFLSAVSLMCEIGDFSAFQSPKQLFTYFGLDPAVNQSGNFEGNKISMSKRGSRIARRVLHTMSLISISRNKDGSAKNPVLRNYYLKKCQSKPKMVALGAIMHKVCNIVFAILRDEKEFEIITPEEHQKNYLKARCDIAA

SEQ ID NO: 399602 - protein, 376 aa, unidentified
MHDDSTLYVGLDVHKDSIMVAYSVDMGDVELLGKIGTTQIEVDRLCKRLRCKARHICVVYEAGPCGYGLYRRLIDKGFDCMVCAPSLIPRKPGERVKTDRRDAIKLVRSLRAGDLSAVHVPTMEDEAFRDLARAWSSAREDLKQARCRLKSFLLQHGVNYFGRADWGPAHRRWLSTFSFDSGWQQLAFNEHRRTIEDRFAQCERLETALREAVADWRFYPAVLALQAMRGINFTSAVGLVSELGDLSRFEHPRQLMAWLGVTPSEHSSGGKRRQGSITKTGNSYARKLLVESAWSYRHPARVSIDIQRRHEGIPKAIIDRAWDAQLRLCRRYRKLVARGKIAHVAIVAVARELAAFIWDIGRLGMAMARPQDVHRV

SEQ ID NO: 399603 - protein, 344 aa, unidentified
MKIKLIGIDLAKNVFQLCALNQANKVLFNRSIRRARFHSSIAKLEPTIIAMEACSSAHYWGRAFEAMGHQVLLVPAQHVTPFVRGGKNDARDALAICEAAQRPGLHPVPIKSIEQQDIQLLHRLRQRQVQHSTALANQIRSLGREYGVIFPAGIKSLIKRLPEALEDGSNELSPVARYALADQHQCLIDVRKAMVTFHQQIVQLAEHHPAYVKLLLLPGIGPLVASAYIAAIGNGRQFKCGRQVSAWLGLVPRQYGTGGQIQLKGVTKNGDRYLRTLMMHGARAVISCGLKTRPELAHWVQPIIDRQGFNKAVVALANKLTRISWVIVTTGEPFDMKQAFKPAA

SEQ ID NO: 399604 - protein, 411 aa, unidentified
MDTNPVFLRYLALDAHKHYVVIGGVNAACELVLPPRRLDWAELEAWFHAHLLPTDKVVIEATTNTWTLYDQAARYAGAVVVAHPPHIKLIGAALVKTDKRDVQVLAKLLALNLIPEVWVPPQPVRELRELVAHRERLTRARTQTTNRLHSMLQRHNLAAPPGDPFAAQHRAWWNSLDLSATEKLHVRQDLATRDHLTTQIAEVEQELARLSTVSPWAAHVPFLIQLPGIGLLTAMVILAAVGDITRFPHAKHLVGYTGLGTYVHDSGKTHRHGGITKHGRADLRHAMVEAAWVAARTHPHWQAEFERLAKRMPANQAIVAIARKLLVVVWHVLHDHEVDQNAQVDKVAAKFFVWSGRLGKTARGPFTPRQFVRWQLMQLGLGADLIQIRFGGQLRSLPSVEELATLTATVT

SEQ ID NO: 399605 - protein, 379 aa, unidentified
MRRVCGLDVHKDSVFMCILSENGEKVQEKYGVLTKELDTLRDVLVANNVGEVAMESTSIYWMPIWRVLESDFDLKLVNPYFIKQLPGKKSDVKDAEWIATCLQKELIKGSFVPDAAIQRLRQYNRRIFDLNKDISYKLTKLDMALQRCNIRISNYVSRTDSKSYKKVVDKLASGITDPQELEKCIHGRTVNRFSKDIITASLTGVINETDIDIMSQLKSEIDLAERHKSECLMKMREICMENYPKQLENIKSMPGVKEQSATAIIAEIGVDMKMFLTAAAIVSWCGLRPRNEESAGKIKSRKIVHGNKYLRRTLIECAWAASKTQGCFYNKFSYTQVSIRKKNVLKVRVAVARKMLVTIWNILSKGEAYREILDCTLPQ

SEQ ID NO: 399606 - protein, 407 aa, unidentified
MGITCGIDWVEAHHDVALVDAVGTTLAKCRIDTGLPGFTALVALIAEHTDEPKSVAVAIETDKNLIVAALQAAGFTVYAINPRAVARYRERSAQAGGKSDPGDAIVLANILRTDLAVHRALPRISEGGLAVKALARQHQEAIWARQLTVNRLRSALIEFYPNALKAFPVLTHKAALEILASAPSPAHGLKLTHKRVVILLRRSGRGDRAGLAETILKELHEPALRQPPSVEAALSHAVIGLINVIKTMEAAIATLEVAMAAEFDQHHAAELLRSAPGLGPVLAARVLGEVGDDTARFSTAGGLRAFAGTAPITRASGRSKSVRTRHVKNKRLADACHWWAFAAITRSPGARAHYDRRRAAGDRHNAALRNVANKLLGRLWWCLVNDLAWDDDAAWPTRTNTREPVAA

SEQ ID NO: 399607 - protein, 324 aa, unidentified
MRQNGKRIWRGKCPSDPTLLADVLRKRAPTAKRVVFETGPLSVWFYHVLTAEGLPAICIDARHAKAALDMAPSKTDANDADGLAQLAEAGFYREVRVKQYDSMLTRTLVAARCQRLKSMTELANQIRGLMKIFGLVVPKGAGRVFETNVRRLLAGNSGLERIVLPLLEAWRSLRVRAAELDRQLVATARESASCQLLMSIPGIGAVTSASFTAAIEDPENFRTSRSVGAWLGLTTRRYQSGEVDYDGHISRRGDKHLRGLLYEAATVILTRSRADSALRSWGLKLREKIGFKRAAVAVARKLAVIMHTMLKTGTLFDRAARTTA

SEQ ID NO: 399608 - protein, 403 aa, unidentified
MNAVGIDVAKGKSTVTIRRPGNEVVLPPRDFLHSKTEIASLIEIIKGLEGETKACMEHTGRYYEPVATWLSDAGIFVSAVNPILVRDFGDDSLRAPKTDKADAKKIARYTLDRWAMLKQYGRMDEIRNQLKTMNRQFGFYMDQKTAMKNNLISLLDQTYPNADHFFTSPARSDGSQKWVDFVHTYWHVDCVRGKSLEAFTEHYKNWCKRKGYNFSATKAKDVYDTSSDLIAVFPKNTNTKLLIRQAVAMLNLASETVESLRKEMDQTASTLPEYPVVLAMNGVGPTLGPQLMAEIGDVTRFTKRGAITAFAGVDPGKNESGQYSQKSVRTSKKGSPHLRKTLFQIMDSLIQRSPEDDPVYAFMAKKRAEGKPYYVYMTAGANKFLRIYYGRIKEYMTSLTESE

SEQ ID NO: 399609 - protein, 348 aa, unidentified
MDITTVGVDLAKQVFAVHGVDRHGKVVVKKMLRREQMMAFFAKLNTCVVAMEACGSSHYWARRLAELGHTVRLIAPQFVKPYVKGNKHDAADAAAICEAASRPSMRFVAVKSPESQAVLALHRVRDGVIKARTAQANQLRGLLAEFGLIVPQGMARLIQEVKDMIADDDNGLPPLMRNLAQRMLSHLLELDRQMQEMDNQVRELSRQSSLCRRLEQVPGIGPITATALAATLSEQIREFKNGRQLAAFLGLVPRQHSSGGKQRLQGISKRGDSYLRRLLVHGARAVLYHTMNKVEHASSWLALLAARRNPNVACVAQANKTARIVWAMMFHEREFRSDFSMDKEIGAA

SEQ ID NO: 399610 - protein, 372 aa, unidentified
MVVVVGIDVHKGTHCAVALDQVGRPIGAPRTVRATDAGHRQLLRWAQSLTEQLPPVDSVEVVEVVESVEVVFAVEDCRHVSGRLERALLDAGQVVLRVPPKMMAQARSSARTRGKSDPIDAQAIAMVALRTPDLPRAEHTGVSRDLKLLVDQRERLVRHRTGLQNLLRWHLHELDPDLDPPSRALDRIVQLDRVQDRLTAMPEHGPSSHAMLRRLALETLADVRALTIRVNALEREITALVCTVAPRLLALPGCGALTAAKIVGETANPARFRSEARFAMHAGVAPIPASSGKTNRHRLARGGNRQLNAALHRIAVTQARLNGPGRDYYQRRRQLGNTKMHALRALKRRLARIVYGLLNPTTTAAAAPPQAA

SEQ ID NO: 399611 - protein, 403 aa, unidentified
MNNVAGIDVSKGKSMVSVLRPFGEVVAKPFSVGHTGSELKELADYLKSLDGETRVVMEHTGRYYEPVARFLHDEGVFVSAVNPKLIKDYGNNTLRKVKTDKADSRKIARYGIDNWAELRQHTPMDTIRMQLKTLNRQQSLYTKTKTMMKNNLIALLDQTYPGVNALFDSPVREDGSQKWVDFATAFWHVDCVRNMSLTAFAERYRKWCKRHGYNFRQSKAVEVHAGAQDLIAMLPRDALTKTMVRQAIDALNAVSASLERLKAEMQALAAQLPEYPVVMAMHGVGDSLGPQLMAELGDVTRFTHRNAITAFAGVDPGADQSGTYEAKSTRVSKSGPPELRRALFLVMDCLLKTMPQDDPVYRFMDKKRAEGKPYLVYMTAGANKFLRIYYGRVKEYLASLEGN

SEQ ID NO: 399612 - protein, 340 aa, unidentified
MTITTVGIDLAKNVFAVHCVDQNGKAVLVKPKVSRAALPELIAGLPPCVIGMEACSGAHYWARLFRQYGHDVRLMAPKFVSPYRMAGKTGKNDAADAIAICEAVQRPHMRFVPVKDESQQTMQCLHRTRQGFIQERTATYNRLRGLVSEFGIIAPQSTDALRHIVSDQRETLPVQVRLCIDDLLAHITNIEEKIAEYDRVLSRVAKTDHRSQQLMELKGIGPTTASALVASIGNAHDFKNGRQLAAWLGLTPSQYSSGGKSKLGRITKAGDSYLRTLLVQGARSVMIGAENRTDSFSRWVCSLIGRRGYWRAVVAIAAKNARLCWASLHYGDDFKLYSAT

SEQ ID NO: 399613 - protein, 415 aa, unidentified
MALKIVYKICCGIDVHKTFVVACIASTNDNGVTYYENHRFSTYTSGLKSLLQWLLERNCKDVCMESTGKYWIPVYNILESVCSIVLAHPKYVKAIRGKKTDKKDAKWIADLFKHDLVTGSFMPPADIRQLRDLMRYRFKLTCFKSSEKNRLQNCLTVSNIQLGNVVSDTFGKSAQAILDKLLENPADTSFDLEPLVYKSLKKKIPQLRDAIDGFITPEQAGKLKIIKSHYENLESRKAELEELILALAAPYQQELTILQTAPGISSEFTAIGIISEISTNMEAFPSAKHLCSWAGLTPTNNESAGKKKSVRVSKAGCYIKPLLVQCANAVVTSKKHPEMRNRYLRLKKRRGHKKAIIAIARMLLTALYHMLKNGENYNAKLYQKSDLPPVNHEITVAQALIIAQKQGYKIKTTTA

SEQ ID NO: 399614 - protein, 330 aa, unidentified
MTNVSELTTEALFVGIDVSKDTLEVALSENAKTQTFGNDSAGVAALLGQLKPVAHRIAVVLLEATGGLEQVAAAALCAHGFAVIVVNPRQAHAFAKALGHLSKTDSIDAKALAQFARTLHNSDKRERLLYRLPTPEQELLLAMVTRRAQLIGMRVAESNRLASAHVSQRKSIERHIKILDKQIGQIDDDAQRHLRSHFQDKLALLKGLKGVGVGTQTMLMAALPELGSLKGREISKLVGVAPLNCDSGKFKGKRITWGGRHHVRAALYMAALTASRHDPVIKAFYERLTLAGKPKKVALVACMHKLLTIMNAVIKSAQPWQASYPQPNNV

SEQ ID NO: 399615 - protein, 313 aa, unidentified
MNRIICGVDVSKDWLDAHVRPSGARARFRNDAAGIAELAALCAGHAVELAVMEASGGYERLAYLLLSEFGQPCAPPLNARNVRRFAEAMGFLEKTDTIDAGVIAHYAEARAVQPAAPPSPAQQRLKALVSRLSQVTGDLVANRQRRAAASSAETLDSIDEVIALLKRQQRSLSGEIASLINDDPVWARLDAALRAVKGVAGRTVAMLMAQVPEIGLFSNKAIAKVVGLAPIANDSGGRQGHRPVRGGRAAPRSILFLVAGIAARYDPHLKAFHDRLQKAGKPKMVIRIALARKLLVILNAKARDARNEFANAT

SEQ ID NO: 399616 - protein, 366 aa, unidentified
MKIMHWIGIDDHADKWTIAHFKGEEDKPADQFELVPDATGYRKLIKFAKELGGEVRIVYEAGPCGYELYRRLSKAGLKCDVAAPSLTPRKPGDRVKTNRRDAAKLARYLRANMLTLIVVPDKERESLRDLVRARHAVQKDLLSIRHQISKLLLRYGHRYREGKTAWTDQFWVWVRKIKLEGEYSQFVLDEMILTHTQRLERRIRYDQEIEAAAKKPEYASYVAALSVLRGIDRLSAMTILSELGDLRRFATAPQLMGAVGLVPSESSTGDTITRYSITKTGNAHVRHIAVEAAWQYQRRITTGPKITKRRKDQPKALVDIAEKCDLRLNRKFHRMTSRGKLSTIAAVAVGRELIGFIWAIGQIVHP

SEQ ID NO: 399617 - protein, 463 aa, unidentified
MPVRASARMPMVNRNAAGIDIGATSHWVCVPEDAVGEGGSPVREFGAFTKGLDELVEWLLQCGVKTVVMESTAVYWIPLFQKLEAAGLEALLVNARHVRHVPGRKSDCKDCQWLQRLHSYGLLNGSFRPGDDICRLRTLMRHRDNLTKSCGAEVQHMQQALNQMNIHLHHAVSDLNGETGLRILEAILAGERDARKLVELRDAQCSKSTPEELAEALQGDWREEHLFVLRQSLENYRHLLRQMEICDAEVEKALAKVIVNPVAVVGERPPNPLAAQPKPKRQKKFKRLKSSTGLKRDVTAELTRICGVDLTRVIGLNVLGVLILISEIGVDMSRWRNAKAFCSWLGLCPGNKISGGKILNSRTVHVVNRVSILLRTVAPSVGRSDSWLGIFHRRMRARLGPAAANTATARKLACMIYHLLKYKEDYIDVDCLVYQEKIHKSRITKLSRQAEELGLELVKKEAA

SEQ ID NO: 399618 - protein, 418 aa, unidentified
MLTAEWFVGIDWASQAHEVCVLDREGRICERREVKHTAAALHAFVEALIERAGGDRSRVAIGIEVPRGAVVELLVERGFAVYAINPKQLDRFRDRFTAAGAKDDRRDAQVIGDSLRTDPQAYRLVRLDDPLVIQLREWSRVDEDLGVELTRLTNQLRDLVYRSSPALLALCPAANEPWCWALLREAPTPAAQRRLSLRRLERLLRDHRIRRLEATQVREVLQRPPVYTAPGVVEAVADHIALLLPRLELVAGQHREAERRLARLLDTLAEAPPAGDQREHSDVAIVRSMPGVGTRVAARMLAEASQPLVDRAYHVMRACTGVAPVTKQSGRRRSVSMRYACNMRLRHAAYHWARTGAQTDPASCAYYATLRARGHSHGRALRSVADRLLRILITLLRRGQIFDPHHGQPSPLPVPAGA

SEQ ID NO: 399619 - protein, 406 aa, unidentified
MSGRCSKLRQVQVTQPGRKSTMTNRSESFKIVPHDYDIFTGMDVDKRSMLTTFTDHGKLLSSKRMPYRSQHLLNYVQKYFPGKRIAFVYEAGPTGFGLYDELVANGHRCLVVAPSMVPSPPGKRVKTNRIDSKKLSEGLRGGQLEGIHVPTPKYRDLRHLVQLRDTQSRQLTATKCRIKALLLYEGIPFPSENGKWSLRVIAQLKQLPCSGAVRFKLNQLINTLKFHFESASTAQKEIRRFCQEDPELQESIRLLTSIPGIGSIIATHLVARLGDWREINNVRQIAGFLGLVSREDSTGDRVRRGEITRVGDSRLRNKLIQGTWVAIRRDAELRAFYRRIYQRNPKNVAAKKAIVAVARKLTTRIYAVLKERRPYEFRPDNSRAPLTAEETACLRERLAGAQSEQP

SEQ ID NO: 399620 - protein, 444 aa, unidentified
MAFRKREDEVFPNAAGIDIGASSHWAAVPRHLAEAAGDEPVREVGAMTDDLNALARWLVKLGVDTVAVESTGVYWIPVFEVLEQHGLKVWLVDARQMKYVPGRKSDVQDCQWLQKLMSLGLLRAAWRPDADVCVLRAVARQRETLITEQASWVQRMQKTLVLMNIQLTEVISDVMGQTGQAIIRDIVAGQRDAKALARHRHRRIKASEADIVKALTGNWREEHLFVLKQALAMYDDIARHLAECDARLDQLLDARAGQDVDIGKLPRAGSKARTEHDIRQRLANWAGVDLTRINGLGVTTVMKLLSEIGPDVSRFANVKHFCSWLGLCPGTKISGGKVLSSGTKRSANRARQALKIAAQALHRSESALGAFYRRLCARMDKPKANTATAHKLARMVYFMLTRGEAFVDQGQQRYEEQQRQRSIAALKRRAAALGFQINPVEMAA

SEQ ID NO: 399621 - protein, 400 aa, unidentified
MRVVFGIDVSKASSEVAILVNGEKVHGYTISNDAIGFARLLGDLRTVHKPEIIFEATGVYSRRLQTFLDDNGYAYTRLNPLEAKKQLDSLRVRKTDQIDAEKLAQSQFVLNRKPTYVQEEVYQNLRDLSRFYQNLTEDIVRAKNRLHRVLQVTFPELENILSTPSGEQYWNLVIAFPCKDCVLELSNDELSKSIRLSTSKRISDKRVAYLAEKLIALANQSYCAVKKTSPILEEVHYYAKELLRLSEQRQAVLDQMVELAQPLPEYDILLSIPGIAETTATSIIGELGDIRRFQSANQINAFIGIDLRHYESGNFLAKEHITKRGNPYARKILFKCIHNIASASHTNPCHIADFYEKRKRQSQTTSTKPHTIASIHRLIRTMYYLIMHNKLYDYASTQNR

SEQ ID NO: 399622 - protein, 356 aa, unidentified
MIASANSGCGRKPAHSQPQILGGVNFALTIFQLYWVDPETGETHSRRLSNTHLISFLSNRSPGKVVLEACGGAHWWARKIIRLGHEAILLHPKYVRPFVRTNKTDAADARAIWTAAQQPGMRPIPVKTEAQQAILGLHRIRSELVDSRTRQVNQIRGLLGEYGLHFVLGRKAAMAQFVTRLSEIEQTIPAPLWRLLSRQLQRLRQLDAEILAAEQEIAAWLKTEPAAQCVDAIPGIGPITATALVATMGSPQAYRSGRAFAASLGLVPTQSGTGGKVHLGHISKRGDPYLRKLLIHGARIVLTRSKRRPCWVEALLVRRPTNVAIVALANKMARTAWALLAHRRVYEPGYVSARPV

SEQ ID NO: 399623 - protein, 410 aa, unidentified
MVKENFIYVGIDLHKETHTAVMIDCYNQKLGEITFPNRPAAFPKLVTKVKKCNTDGKEVVYGLENAYGYGRALAVWLIDKGYLVKDVNTAISHRQAKHRGAMYRKSDSDDAKAIALATLNMLDKLPDACPNDAYWSLGQLVHRRDNIMKQRTRLVNQLHEQLCIAYPSYKQFFNDISRPTALYFWEHYPSRKYLKGKSVEDLRKELVPVSHNRCSTKNCEKILDAAASDKVKNNAYQDARDMVTLSIVSDLQHYDSQLAEVDKMLEQMYKMLGCTLTTIPGVNVITAVKILAEIGDIKRFSNANKLAQFAGIAPLHLSSSGKGKDLATKQGNRRLQATIYFLAIQMVQISSKGTPRNPVVRAYYEKRKAEGKTSQQALICISRRLISIIYGMLKHGTEYRMPVVESAGEK

SEQ ID NO: 399624 - protein, 374 aa, unidentified
MVRFEDHLNEGTPFMIVIGADTHKRNHMLVAVDGLTGAARGQLAIPASDVGSLDALRFAVAVDEDRVWAIEDCRHVSARLERALLAAGERVIRVPAVMTGQTRKISRQAGKSDPIDARAVALAVVRDGVDSFSIAFTDEHALEIRVLCDYRDQIITERTRMINRLRWHLVTIAPELEAQLGQAALKGPRVCARLSRQLARLTPSPQLRVARALLRRIIEIIREEHELLAELEGLINAHTPQLLAQPGCGTVTAAILIGHTAGAKRFPTDGHFARHAGTAPVPASSGNTQRHRLHRGGDRQLNRAIHIIALSRARTDPETRIYLNRKHAEGKTKREAIRCLKRHLARRIWRLLYAAETAPPELTNRKNPQIPITT

SEQ ID NO: 399625 - protein, 330 aa, unidentified
MDEQRTVFVGIDVSKDRLDVHRRPSGEAFCVPREGKGMDDLVIRLQGLSVALVVLEATGGFEATVAAALAGVGLPLCVVNPRQIRDFARAMGRLAKTDTLDAEVIALFAERVRPQARPLREPERVHLAELVGRRRQIIEMIGMETNRGRQAIDKPLARRLARHVAYLQKELDAIDHDIGDAIKHSPAWREAEALLKSVPCIGDVTARTLLAELPELGTVSRHQVAALVGVAPINRDSGLMRGRRAIAGGRTSVRAVLYMAALTAIRRRSPFRAFYDQLTARGRPKKVALVAVMRKLLTILNAILRDHTPWRPLNRAGLENLDRSISGFSA

SEQ ID NO: 399626 - protein, 400 aa, unidentified
MLSIGIDVSKGKSTVCGMKPGGEIVYAPFEVQHTREGMSELVSLLRSSGEEVRAVLESTGSYHCPVVAALLENGIFVSVVNSLRMKRFCSQSIRKVKTDRIDAMQIALYGLAYWQELQPARLPEDTYRELQLLARQYYQMTSLLIKAKVDFNAICDQVLPGMQELMNDHAGRHKLSDFVLRYHHTTHILEMGETRFRKDYCKWAEKKGYRNCERMAVLIFATAQNGIPVLPNAPSTQIVITEAIRVLHTVEASRDAILTQMQALAKTLPEYSLVREMPCIGDTLAPRLIAEIGDVRRFHSKRALIAYAGIDAPPYQSGKFCANNRHISKRGNRYLRKTGYEVMQSYVMHKPANDPIFTFIEKKRSEGKSGKLAMVAGLNKFFRVYYGKVTELYRSLPTIE

SEQ ID NO: 399627 - protein, 355 aa, unidentified
MSQIPNTAIAVIGIDIGKNSFHAVGHDARGAIVLRQKWSRGQVEARLANIPPCLIGMEACVGAHHLSRKLASLGHDARLMPAKYVRPYSKGQKNDFNDAEAIAEAVQRPTMKFVATKTAEQLDLQALHRVRERLVSQRTGIINQIRAFMLERGIAVRQGIGFLRTELPTILATRTDALSPRMLRVIEELAGDWRRLDQRIDGLSGEIEALARQDQACSRLMTVPGIGPIISSAMVAAIGTGDVFSKGRDFGAWLGLVPKQISTGDRTILGKISRRGNRYLRVLFVQAAWVVLVRIKDWERYGLKSWIEAAKRRLHHNVLAIALANKLARIAWAVLAKGRAFELTRTDDAGVVRPA

SEQ ID NO: 399628 - protein, 426 aa, unidentified
MTARALFVKGINMAEEETISWFAGVDWGSERHQVCLLDARGTIAGECEFPHSGEGLAELGDWLVSMAGDASTVAVAIEVPHGPVVDALIDRGFVVYAINPKQLDRLRDRFSVAGAKDDRRDAYVQADGLRTDRRLFRPLQVADPRLIELRAWSRLAEELRRERVRLSNRIRHELWRYYPQMLKLTDDLAATWFLELWARAPTPAKAGRLRKSTVKRLLKQHRIRRTDAETVLCILQEPAIKVAEGVAEAASIHLRSLLARLRIVNRELHEAERKLDQLCTTVSEIEQTSGESLQRRDVAILRSMPGIGRINLGTLLSEASGPLSRRDYDALRTLSGAAPVTKRSGKSLIVVRRYAAHVRLRDTVYHWARVATQRDPKCRARYSAMRKRGHSHGRALRGVADRLLALACVLLQRQTLFDPYFGRPAA

SEQ ID NO: 399629 - protein, 334 aa, unidentified
MENIALIGIDLGKNSFHIHCQDRRGKAVYRKKFTRPKLIEFLATCPATTIAMEACGGSHFMARKLEELGHSPKLISPQFVRPFVKSNKNDFVDAEAICEAASRPSMRFVQPRTESQQAMRALHRVRESLVQDKVKTTNQMHAFLLEFGISVPRGAAVISRLSTILEDNSLPLYLSQLLLKLQQHDHYLVEQIKELESQLKRKLHEDEVGQRLLSIPCVGTLTASTISTEIGDGKQYASSRDFAAATGLVPRQYSTGGRTTLLGISKRGNKKIRTLLVQCARVFIQKLEHQSGKLADWVRDLLCRKSNFVVTCALANKLARIAWALTARQQTYVA

SEQ ID NO: 399630 - protein, 415 aa, unidentified
MKFEKDTSGIKRYIAFDIHKEYALAGGQNAQQEWVMAPRRIGMEKLREWAKANLRAGDAVVIETTTNVWDVYDIVEPLVSYVVVAHAGGVRQIAEARVKTDKKDIERLIRLLIADIVPEVWVPPVEVRELRGMISYRNRLVKMSTMIRNRLQSLVHRHNLILPKGMLRDKGWWEAQQVSALEEIQIRQELAMLDEMEIHQGEVDAELGRQSLGEVWGQQAMRLLQLSGFGVIVTMTVLSAIGDVTRFESAKKLVGYSGLGAGVHDSGKEHIEKRITKSGRKELRWALVEAAWRAIRISPYWKEQYEKYLRRMRKPNQAIVVIARKLLVVVWHVLTKEETDEHVDEEGLAYKMLVLAWDLDENVRMGLSYKQFAKYALMKLGVENDITRFVRKKVPRRLAPREEVLRRMAELGIAQ

SEQ ID NO: 399631 - protein, 339 aa, unidentified
MDKRDFSGMEVSAQELVVSLEREGRRAPLQSFANDSKGHQAVIRYLRRPGRTVRICMESTGVYGLDLALALARAGFEVMVAHPRAVRHFATALMQRSKNDGLDAVVLLEFAQRMPFQAWVPPRPMVLQLHALSRRLEALKDTQEAEKSRLHAALVTDTTPAALRRDLERSLRSLRRAIARLSTEAVKIIDQDPGLKLRFDLLISAKGIKETSAIPLLAELAVAPPDLDVRQRVAYAGLDPRQHSSGTSVHKKVRISKHGNAHLRRALYMPALVAIRHQPNWRAFYEHLRARGKLKMVALIAVMRKLLHAIFGMFKHQKAFDGAKVYALPEPKISLEVAA

SEQ ID NO: 399632 - protein, 349 aa, unidentified
MSEIATIGLDIAKNVFQLHAVDRSGKIVLRKALRRSQVQGFFSRLPPCLIGMEACATAHHWARTLMAFGHDVRLIPPAYVKPYLRRQKNDAADAAAICEAVTRPSMRFVPVKSPQQQSTLMLHRARDLLIGQRTALINALRGHFAELGIVVAQGARNTRQLLAFLHEEANLDFPTAARIALQPLATMLLGIETQIARLDKAILAAHRSDPISVRLAAIPGIGPIVASCLSASVPDASLFQGSREFAAYLGLVPRQHSTGGKARLGSISKMGNRHLRKLLVVGAHAALYSMKSGKTRTDLADWARSLLAKKPFKVVAVALANKIARIAWAVMARNTAYEPGNTGAAVSAT

SEQ ID NO: 399633 - protein, 411 aa, unidentified
MQDDTTAPTGGVDWATDTNEQCIVDAAGDVVLRRNTTHDAAGIRRLVEGFLRHEVRQVAIERPDGPVVDALLAADLEVVVITPRQVKHLRARYGAAGNKDDRFDAYVLADVLRTDGQRLTPLTPDSAQTLALRSAVRARTDLVEARVALCNQLRAHLRVVFPAVVGLFADLDSPISLIFLTRFPTADKAAWLSQRRLGAWLAANGYCGRTPTKVLLERLTTGPDGLTGDPAAAAAHTTLAYVETLKAIRGQITTLEAQIREQLALHPDSHIFTSLPRSGQVRAAKLLVEVGDARGRFPTEASLAALAGAAPSTRQSGRHHVVTFRWACDKKLRDAVIDFAADSRRASPWAAAIYDRHTTAGKTHQHASRILARAWLRVIWRCWQDGVAYDPTKHGGAHQFLAQNEDASLAA

SEQ ID NO: 399634 - protein, 340 aa, unidentified
MIAVGVDTHKNRHIAVALDRLGQLLGELSIQACAAGYLELQLWARALAEGGQQLVFGIEGAGSWGAGLCEHLQLAGCSVLEVERPRRRERRTGKTDRIDAISAAKRVLSDEGTSTPRQQGTRRALAALLVARRSATCERTRLLNQLQSLHATAPVALRERIGEGTGKQLERRLGVMRTRTGAPMDERAIFAVMRDLAARSRALAIDARRYERELTELVASLDQTLLGEVGVGPISAAKLLVCDPARFYSEAAFARCNGTAPLPASSGKTVRHRLSRGGDRQANNAIHTIALSRSLHHPETRAYLDRRISEGKTKREAMRALKRHLSRTLFKRLVEVPLTS

SEQ ID NO: 399635 - protein, 342 aa, unidentified
MYVGLDVHKDFCQACFLDEEGIVVKETSFSTNKNGLEDLVEATRNSKVVMEASGSSLHIYDALSETCTVTVAHPSKVKVIASARIKTDKIDARILAQLLRADMIPKSFIPVKKHRQARLLVRHRASLVRARTRIKNQIHALLTKEGVKVPFKEAFGKKGILFLHDVELGEMQRISMNSLLSLLESFNEQIRGFEKRIRDMASQDAYAKRLVEMKGVGHLTALAVSSEVCDVSRFPSYKHFCSFLGLVPSIRQSGNVERRGHITKQGNNLIRWLLIQDARVAVKHSERFKRKYHRLLAKGVDENKAIVAIARNMAVIMYLMLVRNEPYRDESKGGKSVTSLGR

SEQ ID NO: 399636 - protein, 343 aa, unidentified
MQVTTIGLDLAKHWFQVHGVDASGVVAVRRKLRRGEVLSFFQSLPACVVGMEACATAHYWARELTKLGHTVRLMPPAYVKAYVKRNKNDAADAEAICEAVGRPSMRFVPVKDAEQQSVLMLHRARNLLVRQRTMLVNALRAHMAEFGIIAPQGLRHVELLTKEVAHAQERLPELVRSILQLIVDQLHDTMARVREIETRLAKWHRQSKVSQSIATVPGVGIMGASAIAATVADPSLFRSGREFAAWLGMTPRQNSSGGKERLGRTSKRGDKYIRSLLIAGAVAVLRHARNRPTRDGAWVRALMERKPTKVAAVALANKTARIVWAVMMRGDGYRAKQSLGQPA

SEQ ID NO: 399637 - protein, 355 aa, unidentified
MDNLRYIGLDVHRDTISAAVLNREGQLMMQSVVPTRASAILDFLHGIRGTLHVTFEEGIHSAWLYDLLQPRVARVLVCDPRKTRLLKSGNKGDLIDARKLAELLRNDALSPVYHGELSSLEVQRRTRSYTMLTEDTTRIMSRVKAVFRGQAVPYHGKSIYRPDRRESYLAQLPTEGLRQRVELLYQELDAVHRLRLRAKREMLAECRKHPAMKWLQSVPFLGKVRTAVLIGRVQTPHRFRTKRQFWSYCGLALETHDSAQYHVLHGQVERKPRFVQVRGLNWNHNHDLKDVFKSAATMAAVREGVFRDYYCGLLAKGIRPEMARLTLARKIAAITLKIWKEGGTFNAEQVKPQAA

SEQ ID NO: 399638 - protein, 482 aa, unidentified
MSTQKKHSNQPGEQKTAAGRGKRGRNRKGMCLEDRPLLEANAAGIDIGAREIFVAVPPDRDEQPVRVFSTFTEDLEKMAKWLVSCGVTTVAMESTGVYWIPLYDVVEKHGVKPCLVDARGMKNVPGRRTDWHECQWIQFLHSVGLLRAAFRPEGAVCAVRSMMRHRTELVEMTSQHIQHMHKALTQMNVQIHHVISDLTGVTGLAIVDAIIGGQRDPMTLAKLRDPRIKASEETICKSLVGNWRVEHLFTLQQSRQSYQHYQEQIAACDEEIEKLLVAFAPRVDPAERPLPPDRKKKQRGRKKKKAVNSKTGFDLRTESYKLFGVDLTQIPGLMAMVLTLFSEVGRDMSRWPTAGQFVSWLALCPDNDISGGRVLWRGMRKVHNRAGELFRMAAYSLHHDASPLGDYLRRMKSKLGPAGATTATAHKIAIVFYTMVKKQVEYDATLWEQRDAEREKRFEAKLKRQAQQLGYKLVPIEEKPAA

SEQ ID NO: 399639 - protein, 314 aa, unidentified
MAEVKLYAGIDVSKKWLDVAIEPTNRTWRVLNDMEGITTLSQQLKEIGPQRIVVEATGGYETRLVRELCMANLPRSHVNPLRVRRYAEGMNWFAKTDKIDSKVLANFGEKANPRLTTLPGDVEKRLAALLKRRKQVLDMLTTERNRLENVDPDIREYIESIIATLKEQLAELDREIDQLTKTTPEIKQKKALLTSVPGVGRITSAMLIAKLPELGICNRKQIAALVGTAPFNNDSGNKRGRRRTKGGREDVRCVLYMATLTASWCNPVIKAHYQNLIESGKLPKVAIVACMRKLLVILNAMIRTQTAWKTSPAS

SEQ ID NO: 399640 - protein, 315 aa, unidentified
MSEHTPVTVGVDISKDFLDANIHPSGATKRFANDAKGHRALIAWLQGHQVERVVFEATGAYHRSFERTLAAAGLPMAKVNPRQARRFAEATGKLAKTDAIDAAMLARFGALLAPQTREPVSQTLDEMKELHNARTALVKDRTAALNRQKQMHSAILKRLVMQRLKQIVRQLKAIDAALAALRDGDTALKARFDILMSIPGIGAATAFAMLIEMPEIGTIENPQAASLAGLAPMARESGKWSGKRSIRGGRANLRQAIYMPALVATRFNPDFKAKYQAMIEAGKPAKVAITTIMRKLVVLANALLKAGRRWVPKTA

SEQ ID NO: 399641 - protein, 484 aa, unidentified
MHLRITNISTLTFDVYSFSSESAGALEIANEYSGYAVTPARYIAFAELKQSTSHIITLSHREVLMNSLTNQQFTAFIGIDWADTKHDICLQPANSEQREFDQLPHKVNCIEQWAYSIHQRFGGTIAVALELSKGPIVYALQKYDFFVLFPVNPSTLAKYRQAFKPRRAKDDPTDAEYALELLLHHRDILKPLKPQSVQMRTLLYLVEQRRRLVGDKIRLTNRLRNTLKQYYPQTLDWFADSDTIVFCDFLTRWPTLTQIKRARKASLETFFKEHNVRFHKLIEERICSIKAAVPLTQDVAVITAHQLQMEVLVNLLRVALQAIERYDKEIAAIAPTLPDYALFSALPGAGPTLAPRLLVAFGEQRDRFQGADELQKYAGVAPVTERSGNKSWVHWRWQCPTFLRQTMVEWAAQTINKSFWAGAYYRQQRDKGCSHQTAVRALAFKWIRILYRCWQNRTPYDESKYLNALKRRDSPLLKQVATTS

SEQ ID NO: 399642 - protein, 356 aa, unidentified
MSREVKYIGMDVHKEAIVIAVLNTRGHQVMESIVETKASSILQFIHGLQGELHVTWEEGTWAAWLYDLLKPHVHQVLVCDPRRNALLKEGSKNDKVDARKLADLLRTGMLRPVYHGEHGLRTLRELARTYQTISQDLNRVMNRLKALYRGWGIACGGTKVYAPRYRDEWLAKIEHAGVRRRAELLYQQLDGLQGLRRTLRPELLAESRKHKASKLLRQIPCIGPIRAARLLALMQTPHRFRSKRQLWTYSGLGIETRDSAQYRFVRGQLQRAKKPQQIRGLNRNHNHEMKDIFKGAANRASCGVGPLRDFYVALLDKGMKPEMAKLTLARKMAAIALTLWKKEERFDAEHLKTQAA

SEQ ID NO: 399643 - protein, 391 aa, unidentified
MLYIGIDIAKNKHEASIIDSNGKLVSDSFSFSNSIKGLEKFQKLISSFSIDSNNCIIGMEATGHYWLSLYSFLIDLGFSCIVINPIQSDAFRKMYIRQTKNDSVDSFVIAQILRFGEFSVSHFSDEDTFALRNLSRFKFALVDETSDWKRKLVAILDQVFPEYSSLFSNIYSVTSKELLSKYPLPKDMISIPANDLAILLSKCSKGRFGIDKAKEIQDKATNSFGIKFALKSFSFQIKQIIAQISFLEDQIFEIEDEISSMINSLCPVITSITGIGDVLGATIFSEIGNISRFERANQLVAYAGLDVAVKQSGNFNATDTKISKRGSPYLRRAIWLAASVAAFKDPALSIYYQKLRQRGKAHGTAIGAVARKLTNIIFAVLRDNKAYVPNI

SEQ ID NO: 399644 - protein, 413 aa, unidentified
MDIIYQRVAGLDLHKETIVAAVRCIDPAGKLQTDLRTFGTMTRDLLELSDWLSTHGVTHVAMEATGVLWKPVWNILDGRFELLLVNPRELKQVPGRKSDVKDAQWIAQLLQCGLLRSSFVPGRPQRELRDLTRHRAQLQGEHTRAANRIHKLLEDANIKLGVVASDILGVSGREMLDALVAGEEDAAKLAQSARGRMKSKIPQLELALQGKFGDHHRFMLKQLLSHLDHLDQQIAQFNARIEELMVPFVDQELQEKLDAVPGVDANTIQNVVAEIGTDMDQFPSDAHLASWTGICPGNEESAGKRKRSRTTKGNRWLRRALTQAAWAATHTKDSYLGAQYHRLAGRRGKKRALVAVAHTLLVIIYHIIKYRVDYQDLGPDYFLRLEPERQKRYLVKRLEQLGYEVQLAEKHAA

SEQ ID NO: 399645 - protein, 365 aa, unidentified
MTTRQRSTSSSTDPPVRREVVLGVDTHGEVHVAAVVSPLGKILGTESFPATVAGYRRLLVWARRRGTVRRAGVEGTGTFGAGLSRYLLTQQIQVFEVNRPDRTARRLLGKSDPLDAQAAARAVLSGRTRAQAKSGDGPVQGARIYKLAKDSAVKARTQAINQLKAVLVIADPALRERLSSLGNAELFRTCATLSPPDGGGDEDAVVQATHMTLRMLAERIEQLTGQINELNQRLTRLVERHAPQLLVPMGIGPDSAVTLLITMGDNPERLNTEASFAALCGVSPIEYSSGRRITRRLNHGGDRQANAALHRIVFTRLRHDPRTQAYYERRTQEGKTRREIIRCLKRYAAREVFNLVRPVSRAPVL

SEQ ID NO: 399646 - protein, 436 aa, unidentified
MRGCRCSMIMGFTKPIEHFNLQRKKVITMNTLYVGIDVSSKSNVVYLMLPNGDKHSNFSVANSHEGSTQLVKRILSALTSHSLDTVLIGLEATSVYGDNLVYFLREDATLAPFNRKIHVLNPKQVKKFHDAYNDLPKNDYVDSFVIADCLRFGRINKEVYMGDYRYKALQNLTRARFFAVQNLVKEKQRFMNVLFKKYSTMTQEKVFSDTFSTTALAVYDEFESAEALANMDLHELTDFIIEKGKNRFPDPDAVAKAIQKAARSSYRLPKTMNDSVNQVLSISITSMKALESQIKEFDKAIKAQMELLPNVLISIPGIGPVYSAGIMAEIGEIDRFNSQAALAKYAGLAWKQHQSGGFEAEVTRLIPSGNRFLKYYLCEAAFSLVRCDKEYSDFYHLKYKEVNRCQHKRALALTARKFVRLVFRLLKDNRLYCPAK

SEQ ID NO: 399647 - protein, 383 aa, unidentified
MSQAKRSRKSRDLTKVHPAAAAIDIGATIHVAAVGPERDSEPVRTFRTFTDDLHRLADWFSARGIKTVVMESTGVYWIPIFEILEQRGFEVMVVNARDAKHVPGRKTDVSDAQWLQRLHEYGLLRASFRPQAEIAGMRAYLRQRERLLDYAAAHIQHMQKALTQMNLQLHHVVSDITGVTGMSIIRAIVEGERDPAVLASHRERGCHATVETMCQALVGNYREEHVFALTQALELYDVYQTKVTACDKQIQAILTRLKQTAPPPANKLLPVRRRSRQPNAPGFDARAALHAILGVDLTQIDGLGPYLALKLVGECGTTLTAWPSAKHFTSWLALAPHNKISGGKVLSSKTRRTSNRAASLLRLAAGTVGRTDTALGAFYCRRG

SEQ ID NO: 399648 - protein, 331 aa, unidentified
MKNYQLAVGIDVSKKTLDVFIYNHSKHRVFDNTRSGYISLIKWVGKFSENEKSVLYCFEHTGNYSLKLAIFMQTNGLDYVQENPIVIKRSSGLVRTKSDRVDAQMIARYAWLHREELVCSSIRDESLLELGRLLSLRDQLVRNRTGLMGTLEELTGLLSSPSTDVSCKSLKHTIAYLSKQILKLEKQIDQLLKREEELGKNYRLLTSLKGVGRILACQLIYHTCNFERFSSWRQFSSYCGTAPFEHSSGTSVFKRAKGHPMSDRKMKSLLSMASVSAIQHDGELREYYQRKVAEGKPKMIALNNVRNKLLSRAFAVIKRGTPYVDLCKYAA

SEQ ID NO: 399649 - protein, 446 aa, unidentified
MMQKVMAMTSIHHSRRTLMNCTQNEKLNQVTPHTLIVGVDIAKFKHVARAQDDRGKILGKALVFTNTKEGFEAFFSWLEEMQHKHEKSDVLVGMEPTGHYWLNLAYTLKERLVSFGVVNPLHVKRSKELDDNSPTKNDIKDARVIAQLIKDGRFSYPRLPMDEDAEIKAGITIRNQIVGDLQVLQGRVHNWLDKYFPEFLTVFKDWSGKMALATLEHIPLPGQLNQTIPERVAEIWSTYGGVQRPSLKRIQRLQEAAARSVGLNVGLQMAQREIATNIKRYKMLKEELCALEKELETLVLTLPGIAEMLTVPGVGMVTVIELYSELGDIKNFKNPRQILKYAGLNLRESSSGKHKGQARITKRGRAKLRALLFRTVMPLVRHNRAFKALHQYYTTRQENPLRKKQSLIVLCGKLVRVLHTVGQKQCPFDEERMIQDIPHLSLALKV

SEQ ID NO: 399650 - protein, 370 aa, unidentified
MSSLARTAGPVHVGMDTSKNTIMVAVLWPDEEIPVTERILNDEPSVRRLLGRLADKADGPQYLRCCYEAGPGGYDLYRLLDSMGIACDVVAPSLIPKGSGDRVKTDKRDSRRLARLHRAGELTPVRVPSRDEEAVRDLARARTALLEDRKTAQKRLTAILMRHGRTWRGPAYWTRAHRDWIAAQKFAEPALATAVGCYRAALETRETELAAIEAELLPWVSREPLAEPAARLMCYRGIAELTALTLAAEVVDWRRFPAARAFMGFTGLCPAEDSSGDTARRGHITKAGPQPVRTALVESALAYRHPPAIGAVLRRRQRGASPDTLARSRKAQRRLHARYIHLASHGKTPPEAVTAVARELAGFTWAEMTS

SEQ ID NO: 399651 - protein, 351 aa, unidentified
MKKIFIGIDVSKKTIDASVIIPSLTDDRPILQVYGKFDNRPSGFRKMVAMVRKASTGIDTSEWVFCCETTGGYDVALCDYITSKQLLIWREHAAEIAKSRRDHGKDDRKDSQLIAEYAWRNQDKVRAYTPKTTEILNLRHLLLYRRQLVEMRKQLITRANELKQIAERCNELKFMYKDSQKLIKDITERIRNCEEKMRDLMSHSGPLAANFSHIMSVTGIGLVSTAAILIYTNNFNDITSYKKFASYCGIVPFYEDSGATVHKRDYIGHKSNSMVRAYLTQAAQVASRYNIDMIDYKIRMTAQGKPLQVIITNIANKLLRTVFSLIKNDCDYEPKHELKRQQRIASGAIAG

SEQ ID NO: 399652 - protein, 426 aa, unidentified
MEVLFPRCAGIDVHKRTVVACRIVLTDDGEWLRETRTYGTTTEDLLHLSDWLAAGDCTHVGLESTGEFWKPVFNLLEGTCEVWLLNAQRVRAIPGRKTDVRDAEWIAELLRHGLVQPSFIPPRHQRELRELTRQRTNFVRGRATLVNRVQKVLESTNLKLTAVVSNIAGVSGRAILAALLDGEEDVTVLAELARGKLRKKRDELERALRGRLQPHHRFLLTELLAQIDGLDDTIARFDAEIVRLCTVNEEARVVELLDTIPGIGRAMAELLIAEIGVDMTKFPTPAHLAAWAGVAPGSNESAGRQRSGRTRKGNAWLKTALVQAAHGAARMQGTALAAKYRRVAARRGAKRAIMAVAHRLLIIAYHVIARREPYRELGADYLEHRRPSRTVDRLVQQLRDLGVEVSLMTEAAGPTSRADVILAATS

SEQ ID NO: 399653 - protein, 332 aa, unidentified
MSIIGCDLHSRYQVIAMLETETGEITTRRLEHEGGEVKGFYAGLGKPALIGIEATGYTQWFERLVAELGHELWVGDPAEIRARAVRRQKTDTRDAEHLLDLLLSKRFPRVWVPTPEERDFRQLLKHRDKLVKMQTSVRNQLHFLAMSQGVCRKQKLWSARGRQELEELGLGPWASRRRQELLALLDGLGPRLEELDRAVKAEATRRCEAVRLMEQQGVGPVTALAFVLTVGPVERFASSRKLVSYLGLNPREDSSGGHQRLGHISKQGNEMLRWLLVEAGHTAARLDPELRRVYQRLKFRRGGKVAKVAIARRLAVRLYWSLRRYAAGSHVR

SEQ ID NO: 399654 - protein, 322 aa, unidentified
MTHTTTTIGIDVSKQYLDACCHYDQQTLRVPNHPQGITALLAWISQRTTCPLIVIEPTGGYELTLQTMLLDQGLSLAKVNARQVREFARAKGRLAKTDAIDAAVLADYGHVMTPRTLVGPSPEQHELAQVVQRRRQVVELATIEKTRLEKVTDELATQSIQRMLRVLKEEIREMDARLATLMKRHQSLAHAHDVFKPIKGLGPLTVATLLAELPELGRIGNRQISSLVGVAPHNVDSGTRRGTRRIRGGRIRIRCALYMAVLSAIQHDPDMKQFYQHLVDEGKKPKKVALVAVMRKMLVRLNAKMREYYLQIDGSPWQGQAV

SEQ ID NO: 399655 - protein, 433 aa, unidentified
MSQKTPQTQEPTSYWVGLDWGKSEHSVAVVNDARQLVETFTVGTDLDGLEELKRRLGALGEVRGVAIEATPYPVVSYLHAEGFALYLINPKVSKNWRAGRSAAASKNDALDSHTLAVELSRRHEELEPYAPADPKVEELAGLCQTRRSLVNQRTALIQRLTQDLNAYHPGALAFFSDWSSPAAWKFVQKYPTPKKLARARKDVLKRFLKRNGIGLKPCWLERIDKCSQAARWPAPPNARALEHEALATAAQLIALEEHIRRVADEIAQCFEQLPEAKLMESLPGAGQALAPELTAMAAQAASKPNRLQALRPLTGVAPVEDKSGKRRVTKMRRRCRRYWRNTLHLFAQHSTKYCAWAKAFYELCRQRGDTYATALRKLADKWLKIINRMLAKKQPYDEQRYIQALRKSRSPVYQRLVEKGLVENPVENSPAKT

SEQ ID NO: 399656 - protein, 429 aa, unidentified
MEQIPQPIVKAEPEPEFAALVAIDWADQKHYWSLRVAGQEGLQRGTLDNTPEAVEVWIMALHVRFGGRPLAVALEQRRGALAVMLSKYAHVHLYPVHPTTLAKFREAWYPSRSKSDPSDADLLLEILTTHRSRLRRLDPDTVEMRFLQSLVENRRKLVDERTALSNRLTDLLKLYFPQILGWFNDVASPVVGDLLQQWPSLQDLQQVQPAKLEKFLRDHHCSEIPERLTQIRQAIAATHDRALLDSAPYLVAAWVRQMAVLRESIRQLEKRIAELAAQQEDWPIFQSLPGAGAALAPRLMVALGTQRDRYSSAGDLQSFSGIAPVKEASGNTQWVHFRWACPKFLRQTFHEWAACSIAQCEWAKAYYEQQKTRGKQHHVAVRALAFKWMRILYRCWKDRQPYREEIYLASLAKRRSAMVKALAQASQLP

SEQ ID NO: 399657 - protein, 404 aa, unidentified
MEVLYPRCCGLDVHQKTVVACLITPESKGTRTFKTMTRDLLQLADWLVAEGVTHVAMESTGVYWRPVYNVLEALGLTLLVMNAQHIKAVPSRKTDVKDAEWIADLLRHGLVVGSFIPERPQRELRELVRYRRSLIRQRAQMVNRVQKVLEGANIKLSSVASNIMGASGRAMLEAISKGVEDPRILAGCAKGRLREKRPELEEALRGLVGPHQRTMLQSQLRMIQFLDEEVSRMDEEIADRMRPMEEALERVDSIPGMGRRTAEDVLAEIGDNVSRFPTAAHLASWAKVCPGNNESAGKRKTGKTGHGNPWLRDTLVEAAWGATRTKGTYLAAQYHRLAARRGAKRAIMAVAHSILIIVYSLLRNGEEYRELGGNYFDERNRAATVRKAVHRIESLGYQVELQPA

SEQ ID NO: 399658 - protein, 293 aa, unidentified
MLIHYIDIAKRNFVIAVSSLSKTKTETNNPKGIAHTIEYLKKHKVALVVTESTGGLEIPAAKAIRRAGIAMIIANPRQTHQFAQSQPLTKTDAKDAKMPAFFAQMKAQKEDWQTMPYHPPTEAEEVLEALVNRRNQPADMRTAEKNRLHQVHETQVGSVKQLIAHFDRLIDELDKQIDDHTHTHFDGKAQVAEQIKGIGSITTATLMAMLPELGRLSHKRIASLVGIAPHPRESEETKFKAAALAEGLRCVRHCIWLPWQRHVLNRLFGISTNARCPRVSRIRLPLRHVCANC

SEQ ID NO: 399659 - protein, 324 aa, unidentified
MIDGILGIDVCKNTLDVSISSYTKVRTKSFTNSPDGWRHLLDWLIAQKIQRVHACLESTGRYSLGIACALYEADHVVSIINPAQIRDFVRTKLGRNKTDGVDASHIREYCELFKPSPWAPPSEAHRRLGELQTIRSGIIAGLTEWKNRRNSGIVDAEAQALADATISHFTSQLGAVDKAIALTIDNDCDLRSKRDLLLSISGVGETLAGVVLAELPGPDVLRSSAEVVAYAGLNPRRHQSGTCIDRATRISKIGNAVLRAALYMPALSAMRYNSAIVALVTRLKSRGRLKPKQIVVAAMRKLLVLCFGVLKTGRPFDAAIAMGG

SEQ ID NO: 399660 - protein, 345 aa, unidentified
MKHYAGLDVSVKETSVCIVDEAGDICREVKVASHPEDLVQVLKDPVWPLERIGLEAGPLSQWLFSGMVEAGLPAICIETRHAKAFLKAQVNKSDRNDARGIAQMMRVNLFRPVHVKTLASQKHRALLTARKLLQEKAHSIENDIRGLLRNFGLKVGAVGAVKFDERIRELVEDVPELADIMGPLLTSRKQLRGAFMTLHRKLLSIVRDHAVCRRLMTIPGVGPVVSLAFSSTIDVPARFKKSKAVGPALGLTPVLKQSGESHRVGRISLCGDDMMRHLLYEAAQVMLTRVLKWSWLKAWAMNVARRRGRQKAIVALARRLAVIMHRMWIDGTEFRWTREAAPAAI

SEQ ID NO: 399661 - protein, 368 aa, unidentified
MAEITRALIARVGVDIAKSVIQVHAVDAAGRRVVARSLRREQFLAWCEQLPKGCLVAMEACGGAHHWARRLVAMGLNARLIAAHFVAPYRLEGKGGKNDANDAAAICEAASRPRMRFVPIKTAEQQGLMVLHRLREGFKEDRTACINRIRGALTEFGLVFGKSPKVLRAALPEVLEDAANELSGVARMALQDAFEHWRHLDDHMRWCDRQIGQHVRSSATARRAARINGIGEIGASAFTAGVGDFAQFASADQFGAWLGLVPRQNSTGGKPSLGRITKRGDDYLRTLLVQGAKSVVMSAHKRDDPTSRWLQQLIARVGWQKACVAMANKNARILWAVMTREHEFDARHVSVKPQAKSPKPAPPVPACA

SEQ ID NO: 399662 - protein, 316 aa, unidentified
MNKLVVQNLNVGVDVGKDFLDIHIRPLGEYLKVSNDKKGIGEAIKRLRKLTVERIVIEATGRYEIAFVSACAKAALPFSVVNPIHVKRFAGAIGRKAKTDKLDAALIAHFSEVIQPALSTLKPENIQKMADTVARRNQLLEMQTREKNRLQIMPKTVQSSIKAILTVLKKQIQKMDDELADLIESCPEYQAKSELVQSMPGIGKVSAAALISYLPELGMMNSKQVAALVGVAPMNKESGRYKGKQVTQGGRHQVRTVLFMAMMSAMQCNAKFKATYERLVAAGKPKKVAIIACVRKMVVILNSMVRDGVIWEEKAA

SEQ ID NO: 399663 - protein, 484 aa, unidentified
MAKRKKSTFERLTKGPLNRKQRRELERRLVSDDPGLRIVHPNAGGIDVGNESHFAAVPADRDAQPVQEFGSWTADLHRMGKWLQSCRIDTVAVQATGVYWIPLYDILTEHGIRVVLVNAQHTKNVPGRKSDVQESQWLMKLHTYGLLRDSFRLAENLEGVRTIWRLRDRHVKEAGRAVQHMQKALTKMNIQLANVISDISGVSGQAIIEAILKGEQDPYRLADLKHERIQASREEVARSLEGNWRKDVLFELQQAVDSYQFAHRQMQECDGKLETYLAMLPTRVIDVADQPNLQPTAVARKAQKPKKPKGNAPAIDLAAELKRISGVDLTSIDGIDVMGAQTILSELGTDLTAFATEHQFASWLGLTPSKDISGGKVIGRSRRKVQNRVAMSLRMSASTLLNSKSYLGARYRHLRKHLPTAAAAVKAMAHYLALLVYRMLTKGQAWVDRGAAKFEQKRTEWELSSLKSKALANGFKLVPIDEAH

SEQ ID NO: 399664 - protein, 343 aa, unidentified
MELKRVGVDLAKHVFQVHGVDRREKPVWQKRLSRDRWLQVISTTVEPDCEIGMEACAGAHHWARRLQAAGFRVKLIAPQFVKPYVKSNKNDARDAEAICEAMSRPSMRFVSIKTVAQQDIQATHRVRSELISQRTSKGNQIRGLVAEYGLVAPQQLASLRAAVPDWLEDAQNGLTVRFRRLLNGLWEDLKALDRRVAELDQEIKSIAESDPDAKRLQQLRGVGPMIATALVAAVGHADQFANGRQMAASFGLTPKQHSSGDKVRLLGITKRGDAHLRTLLIHGARSVIRAAKSKDDRLSQWVTGLAERRHPNVAAVALANKTVRIAWAMLRHGTDYQPNRMAA

SEQ ID NO: 399665 - protein, 330 aa, unidentified
MLYGGMDLHKKSSEIVLKTKDGEKIKEGEVKSEKEPIKEFFESIDKKIKLAIEATPQSQYFYDLIEELGIDVVLSNPLKTRLIAEEKVKTDTVDANALCDLARGNLLPTCYVPEKDIRELRGIARTRVSLGKVKGNLKNHIRGVLDRKKIEYPGGDLFNKKGVRWLKKLDHPLINPWIPLFETALEQCDKVERKIGKKAEKHDEIELIESIPGIATYSAAVIYGEIADIDRFSSEKKLYSYAGLTPSIHQSGEVEYHGEMTKRGSKYLRWVTINAIGNHNRFCPNSNISQYYRRKKKEKPTKIARVNGARKLLQAIYWMLKNNDKFRAEG

SEQ ID NO: 399666 - protein, 438 aa, unidentified
MSNKVIFNLDDLFISVGIDVGADFSWMSIALPNQQFVGKPYKILHNKMSSLTTAVSKIKEAEELYSLESRIFLESTGIYHYPLFCYLRDKGFNCSVINPIITKNSTNINIRKVHNDRFDSKKAALVGLKPDLKVSLMPSDLALNCRNLCREYYDLMDNRSAYVNKLQGELRMAFPQYLDIFSKVTTNTSLTLLETYSSPSAFIEADKQEIIGIIKSAARFGLTYAQNKYNAIIQAAHEANEFGYIIDSNIKRIRLYISFIRKYDEEIANILHSMHELVDTNEDTDFVKQIHLIETFKGAGFLSAVSLMGEIGDFCAFSKPKQLFAYFGLDPAVKQSGKFEGSKVQMSKRGSAIARRVIHTLALQSISTSRTGEAKNPVLRDYYLGKCGAKPKLVAMGAVSHKVCNIIFAMLRDNKPFEIITPQEHIKQYNAAKCDIAA

SEQ ID NO: 399667 - protein, 461 aa, unidentified
MLTPISGHLHVGVDIGSRCHAVAIGLSDGRLLEEFEIAHSAAGFEDFFSRIEAQSESHPYPVVVAMEGYGGHARPLDSLVAERGWSLFNVNNLKLARFKEIFPAAAKSDRIDTRKTLELLQLREHLPLAADVLQEVMARPEENDVLKRLTRRRRRLVNERVRLTSVLHSDLQAAAPGLVEITRDVANLWFLNFLTCRKDLRKLVRIRRASLLKLPAIGACYADRIQAWQNCACFSRDAGLVGTMIRQDALRVLDLKRQIKALDDEIARVAETSGAARRLASIPGFGAVCSAELAGEIGTIARFKSEASLALYLGMAPLDHSSGKLRGSKSPKHVNTRAKAAMINALDRHRKEVLQSQRYYETKRAGGKTHNQAIRALGRHLCRVIFKMLRSDRPYRIDPRGDPADDQINASAREPASDSGNQPSNPPAADRENGPPEGEPSKVRSSPLAAIGSPACTAGPP

SEQ ID NO: 399668 - protein, 341 aa, unidentified
MSQASTIGLDIAKWVFQAHGADATGRVVFRKRLVRAKVLEFFAGQPPCLVALEACGGAHYWARELGKLGHTVRLIPPAYVKPFVKRQKNDVADAEAICEAAQRPGMRFVPVKDEAQQANTVVFRARDLLVRQRTQCINALRGHLAEYGHVVPQGPAHVDSLVALVEDPKSSVPESARGILQVLIRTLNALEEQLKELDGEIARRAKTDPVARRLMTIPGIGPIAATAITALVPAPEGFRAGRDFAAWLGLTPLQKSTGGKHKLGAISKMGERTIRRLLILGASAVVRWASRRGAAAGSWLARMLARKPRMLVTTALANKMARIVWALLVKGGTYRAPAVAA

SEQ ID NO: 399669 - protein, 366 aa, unidentified
MKKTSTVRVNGNMIFKGHKLTIGLDLGDRWSNYCVLDEAGEVLMEQKLATTPEAMKQTFEKIPRSLLALETGTHSPWLSRLLKELGHEVLVAHAQKVELITKSKRKDDRHDARTLARLARIDSELLGPVRHRSAKAQIHLTVIRARAELVSARTALVNGARGLAKSYGDRLPKCGTEQVSRELAAELSAELREVLEPLLKEIESLNERIKEYDARMEKIAKESYPQVALLKQVKGVGTQIALTYVLTLEDPRRFAKSRDVGCFLGLKPGRRDSGQSQPQMHISKEGDPYLRTMLVQGAHYILGPFGEDSDLRRWGRRLAERGGKNAKKRAVVAVARKLAVLLHRLWVSGEVYEPLRNSHQAMRAVA

SEQ ID NO: 399670 - protein, 428 aa, unidentified
MADHLNNKPYGAWIAIDIAKDFNAVLSETKEGKRQHFRMANSAADHDRFIAFLKSLPPPCIIGFEATGNYHRALGHRLVAAGFEVCFISSVASARYREVMFNSWDKNDPKDAAVLLELLKQGIIQRYVDPLIAGHHDLQELSKTYYQVTLSRTRLQHSLLTHYLPLYFPEMGKWWNSTRADWWINYLLHFPIPSAVTKHSQEAFCQIASPVIGRKVNKAAKLIELYETALHSIGLPVEADSLACKTFQIQLRRYQEINACRKQLEETAQAVLADNPDSAILQSVPGIGPINALTILAEGGDLRRFSHHRQFLKYCGFDLAKNQSGNYRGQEQISKRGNARLRLALWMAVNTAIAQPENSFQQKYSRYIKGAPQDKDLQRKARTAVAAKMARVVYGLVKSKQMYQGYYEKALPSGSIPLCRAVEAARTS

SEQ ID NO: 399671 - protein, 428 aa, unidentified
MPQGSGMQGATLAHVTTSTIDPTLTEAAATEVFAGIDWGGSFHQICLIDEDGKVLRQQRVPHDAAGFDELDRLLTCHRARLRVAIERAEGLLVEHLHLLGVEIFCVSPKISARARERYRMAAAKSDAFDAFVLADTLRHEHRHWRALTPPSPVLAELRAISRDRDRIVIAQQATENRLRAVLEAYHPAPLHLFSTLDRDITLDFITDYPTPEQAGRVGTARMDGFCRRHGYSGRTQPEVLVERLRPHLLSAGEGTAAGKAFSANLFTEQLRMLNTHLRAYDKRLDELLERHPDTPIFTSFPGVGPVVAATLISEMGDDRHRFPAPGALLAEAGLSPVTRASGRTRQVRFRYASNRRMRHMIDWWMFTAIREDDWTRQAYDHARARGQGKYRALRGLGSRWTRILWRCWTDHTRYDPAIHHRNPEPTTA

SEQ ID NO: 399672 - protein, 365 aa, unidentified
MQKISTMRTMGKKIFQGQLTIGLDLGDRSSSYCVLDAAGEITLEQKLPTTPEGMKQTFAKMPRCRLAMETGTHSPWVSRLLTALGHEVIVAHAQNVRLIVKSRRKDDRMDARTLARLARIDPQLLSPVQHRSAQAQLHLTEIRARAGLVSARTALVNAARGLVKSYGERLGKCGTFQFRQETATGLSAGLREALQPLLLEVESLNERIKEYDRRIERMSKERYPETALLKQIKGVGDVIATTYVLTIEDPHRFRKSRDAGCFVGLQPGRRNSGESEPQLHISKQGDEYLRTLMVQGAHYILGPFGEDSDLRRWGQKLAERGGKNAKKRAVVAVARKLAVLLHRLWVSGEVYEPLRNSQKAIKAAA

SEQ ID NO: 399673 - protein, 345 aa, unidentified
MNTAGVLYGGLDLHGDNVFCSLLNGARQVVFERRLPNDLPTIRDTLKPFQKRIQTLAVESTYNWYWLVDGLRALRYDTRLANPARMEENIGLKAANDKTDARFLARQLITGSLPEGFIYPAETRGLRDLLRDLLRRRMRLTNVCTGEWLSLEGLVARHTGQDLGITELKTAEIEKLLMGHPEAILMAQAGFRHIAFLEREIKELEKSVLAVLPDQAAYQRLMTVPGIGPVLARTILLETGPIERFRHAGNYASYCRAVRSEHTSNNKKKGEGNSKCGNKYLAWAYVEAANFAVRYSPEMRAWFQRKQARSGKRVIAVKALACKLTKACYFMLRDHTDFDVKKLVG

SEQ ID NO: 399674 - protein, 397 aa, unidentified
MDYDVVIGLDVGKAAHHACALDRGGKRLLDREITNTESSLRAIFTSMAAKGRVLVVVDQLHSIGALPVAVAQAMGVAVAYLPGLSMRRLADLHPGNAKTDARDAYVIAHAALTMPHTLRTLDVPSEAQADLAMLLGYDDDLAAQVTAAINRLRGLLVQIHPSLEKALGDNVAHAGVLHLLIKAGGPDGLRTMGKARIDTALRKYAPRIHERLATEIWDGLAAQTVIVPGTSAAAKVLPGLAAQILQLRDQRKEIAKDVEKVLDAHPLAEILTSMPGVGVKIAARLLAEIGGDVTAFPTAAHLAAYAGLTPVTKRSGTSIRGEHPNRGGNKRLKNAMFMAAFTSLRADPASRTYYDRKRAQGKKHNAALICLARRKTDVLFAMIRDHQPYTPSQLAAA

SEQ ID NO: 399675 - protein, 413 aa, unidentified
MTANTLFVGIDIHRKSNTCCLMDGQGNSLSQPFNVENNLPGSQTLIKQIAHQVIQGNFDSILIAAEATGWYWWHLFYTLYHDPFLNQWPLELYPLNPRLTANFKKTYSDLDKTDLIDAFVIADRLRLGRDLPHPFYYDDLYLPLRFLTRHRFHLIHRLAQEKAYCLSFIYLKFSEYTSIKPFANTFGAASKAVLQEFASIEEIAAIPFDELTRFINQKGKRRFSDPARNAHKLKLVAQHSYPLPQTLQQPINLILEMNLQLISFLEQQEKMINQAIAEYMQAIPHTLDTIPGMGPVFSAGIIAEIGDLARFDFDQAKVAAYAGFKWRRRQSADFEAEETSLSRKGNRYLRYYFCEAANRVRMCAQEYAAYYWRKYQEVRKHQHKRAIVLTARKLIRLVVRLLTTHQPYQPGRQ

SEQ ID NO: 399676 - protein, 326 aa, unidentified
MAMLSFCGIDVSKDRLDVMVLPEQQSFSVGNDAAGWAELIARLRGFTIAAIGLEASGGYERGAMRALLAAGLPACQVNPFKLRQFARASGVLAKNDPLDTRMIASFVAIMPTRPARPRSPALERLAEMLAVRRQLNADKVAAGNAARLLEDPMLQRLSRRRIARLAADIDMLDRHLVEIVETDAALAYRYRLLTSMPGVGLVVACTLIALLPELGTMSRKQVAALVGVAPYAFESGKFKGRRCIWGGRAPVREALYMAAMSAGNWNPVLKAFRKRLKGAGKMAKVVIVAVMRKMITMLNAMVRDDVVWADHLHGRHSVPTAWQPLR

SEQ ID NO: 399677 - protein, 410 aa, unidentified
MKRIHDRVAGLDVHRDSVVACVELFDGHSVEIDKARFATTATGVRQLGEWLAEREVELVVMEATGVYWRPVYYGLEDRFGELWLVNAYHVKNVPGRKTDMSDAEWLADVAAHGMVRSSFVPPPEIRGLRELTRYRKTQIRARAQEIQRLEKLLQDAGIKLTSVASRVWSQSSRAMVEMLIAGETDPAVLAELAKGRMRPKIPALIDALENHWMSHHSVVARRILAHIDFLDDTIDTLSTDIVERVDPFDAAVELLKTIPGVSELTAQTIIAEIGVDMSRFPTAGHLAAWAGVAPASHESAGKHRPAGTRHASGHLRDNLIEAAHAAARSKGTFLSARYTRIVRRRGPNKAAVAIAHSILVAAHHMLTTGEIYQDLGADYYTKRRDPQREIRRHIAQLEAAGYTVTLTPAA

SEQ ID NO: 399678 - protein, 347 aa, unidentified
MTTLEAVRGITGGVDTHRDVHVAAALDPLGGVLATESFPADAAGYQALLKWLETFGDVTKVGVEGTGSYGSGLASYLCRSGVEVIEVDRPDRQKRRRSGKSDPLDAVEAARAAQSGRATGSPKSKDGAVEAIRVLVVAKRSARQARVKALIQMRHLGFTAPEQLRCRFKGLTVPAMVGEGIKLRPTRSGDPVMSATKASLSSLAHRISALDDELGELDERIEALLVKTVPDLLDLFGVGPDTAAALVMAAGDNPERLYSEAAWAHLCGASPIPKGSGKSSGRVKVHDGGDRQANSALWRIVMVRIAHDPKTKIYFERRVKEGKTKPEVIRILKRYVAREVYRYLPRG

SEQ ID NO: 399679 - protein, 343 aa, unidentified
MKLTRVGADLAKHVFQVHGVDGAERAVWCKRLKRNRWIEEIEQIVEPGAEIGMEACGGAHHWARLLQSKGYRVRLIAPQFVKPYVKSNKTDANDAQAVCEAMSRPSMRFVAVKTIEQQDIQAVHRVRASLISERVAKANQLRGLAYEYGLVAPREIAALRRAVPAWLEDASNGLTVRFRALLSGLYADLQALDERVRELDKEIRAIGQENEAVGRVQQLRGIGPLIASALVALIGDARQFKNGRQVAVALGLTPRQHSSGSKERILGISKRGDSYVRTLLIHGARSALRTAAGKNDRLSRWALALAQRSHSNVAATALANKMARVAWAMLKHGTTYEPNGLAA

SEQ ID NO: 399680 - protein, 428 aa, unidentified
MLKINPLSTLYVGIDVSSKSNYVCALDFYKNKYINSSFANNQPGAEELAQKLLECLKKHPDLNTVVAALESTSVYSIHIANYLSSCEELMPFKPYVFVLNPKCTANYKKSYIGLGKSDPIDAFVIADYARAGNIETEPWRGSQFLALKRLTRHRLHLVECITREKTYLVSNLYLKFSELQMLDKDDQPFCDIYGATSSSVLTEYLSPEEIIEASEEELVSFLANKSRNRIKDISKTAELLKKAARDSYRLDKALYEPLNVSIASSFNCIETFKKEIKAIDAAIEREIKGLNPNAFIILQSINGIGPVFAGGIVAEIGDISAFTSSDALAKYAGLCWRSNQSGDFDGEDTPMIKAGNRYLRYYLGEAANSMRKHNVEYGAYYRKKFNEVPKHQHKRALALTSRKFVRLVYGLLARNQLYSGVSLDTSNE

SEQ ID NO: 399681 - protein, 312 aa, unidentified
MTMLCAAGVDVGRDFLDVGLAPVGQVFRTPNSPQGVQLAVRRLTRAGVSRVVLESIGSYGARLVRALAEAGFEVGVVDPKRIAALRLAEGRWAKTDRLDAALIARFALIMSDAARPVPGPKAMEIRALSTRRRQLVEMIAMEKTRLKQALDVVVADSCRRAIAQLAAERARIESQLRDELLATPEGSERARLLQTIPGIGPIISMTLLADLPELGSLDRKAIASLAGLAPHPNQSGTRTGSSHIHGGRPCVRAALYMAAVSAVRSDKGFKSEYLALRQAGKPAKVALIAIARRIVVAANIIVRTGQNWTKKP

SEQ ID NO: 399682 - protein, 311 aa, unidentified
MYYIGIDVSKKDLSVFDGKDLKFANKEGLKSFKKYLKKKYHLSEVAIIFEPTGVYSLYLKEFCAENSIKAYIVNPKKSHNFTRALGKRSKTDKIDARILYQFHKHIDLKDIQVPQIDQQAKTLASYLVSYEFALKQRISLSNHLESLRDKGLIALMKKDLKRAKMLEDKLFHDIKEYVSKNQNLREDYQRLLTISGVGEKTAIALLTLFKTYQGTNRAQITALAGLDPVRRESGTSVKDKAKISKNGKGIYRKIFYLPTVCATVHNQKIRVFYQRLLANHKTKKLAVIASMRKILLIAHAMYRDKTEYIAV

SEQ ID NO: 399683 - protein, 318 aa, unidentified
MTIQDGKCYIGIDVSKAILDVYVLPFKKYMQFKNDFKGIQKLTEKLKTFSQACIVMEATGGYEKPIALSLQKAGFSVSVVNPRPIRDFAKALGKLAKTDRIDAEVIALFAEKMQPQANVIYNESQQKLAALNARRRQIIDMITMEKNRLDKASDELKKSIQRIIKALERELQAINEALEKSIQNDADYAQKNALLKSIKGVGSVVAAGIIADLPELGNVSAKQISALAGLAPYNRDSGTLRGKRTIWGGRASVRSTLYMATLVATRHNAQIKSFYERLCKTGKQKKVAITACMHKLLIIMNAMIKHNESWRTATVIEI

SEQ ID NO: 399684 - protein, 347 aa, unidentified
MKIRRVGVDLAKNVFQVHGVDQHEQPVWQRSVKRAQWLGEIQKHVPQTAEIGMEACAGAHHWARALESRGYRVKLIAPQFVKPYVKSNKTDRNDAEAICEAMSRPSMRFVAIKSVEQQDIHYVHRVRSELVSQRTGKANQIRGLVGEYGLVAPVRLGQLRMAVPLWLEDAENGLTPRFRRVLAGLWRDLTALDERVGELDQELKELAEEHPAARRLQQLRGVGPVIATALVAALGDGSGFRKGRDFAVSLGLTPRQHSSGGKAHLMGISKRGDSYLRQLLVHGARAAVRTAKLHDDALSCWIQNLNARKHTNVVVVALANKTARMAWAMIHNDVDYEPQLAASAATS

SEQ ID NO: 399685 - protein, 388 aa, unidentified
MQTVAYRPEAPNAIRNDLGAIFVSMELSRSTWLITSLSPGGGDKMSKHGMPAGDVGALLARFAELRRKAFTRTGESLPIIVIQEAGLDGFWIHRVLQQEGIEGHVVDPASIATSRRRRRAKTDRIDGETLLRALLAYKRGEPRVCAMVKAPTVEEEDRRRLCRERKALIEERVLHVNRIKGLLFSQGVSGYEPLRRDRRRRLDELQTGDGRPLPKHLKTQIGRELDRLELLLEQIKAVEAERDALLGARQVATPALAAMLLNIKGIGPEFAAVLWSEGLFRHFDNRRQVASYAGLAPTPWQSGSVDREQGVSKAGNPRLRTTLIQLAWLWLRNQPQSALALWFKDRVSRNGGRLKKTTIVALARKLLVALWKYVPAGVVIEGAIVKSA

SEQ ID NO: 399686 - protein, 413 aa, unidentified
MTDTRYAFYVGIDWASAAHQVVVLDHERRPVADRSVAHTGAALDECATWLATMAAGHSEQVGIAIEVPRGAVVETLLERGFHVFAINPKQLDRFRDRHTVAGAKDDRRDGLVLADSLATDQPAFRRLRPEEPAVIQLRELTRVDEDLQDEERRLSNRLREQLQRVSPPLLAFCPGADEPWVWALLAQAPTPEQGRRLTRAAVARLLAEHRIRRVTADEIVAQLRTPPLFVAPGTVAAVAEHISLLVPRLELLRAQRRHCAGRIERVLKDLEMPAEGQEGHRDATIFRSLPGAGRVVVATMLAEASRPLADRDYHALRAQGGVAPVTRQSGQRHAVHMRHACNPRVRQALYHWARVSTQYDPATRRHYDALRGKGHSHGRALRGVADRLLALLVAMLKAGATYQPERRRAWATA

SEQ ID NO: 399687 - protein, 386 aa, unidentified
MPRKTTQQQFIEKSSVLYLSFELSSKKWKLGFSIGLGQKTRIRSMDAGVLTTLKAEIELARKRFKLPEKYRLLSCYEAGRDGFWLHRYLAMQGITNLIVDSASIEVNRRKRRAKADKLDADTLARMLIRYDYGEHRIWSVVRVPSVEEEDRRQLNRELATMEKEKTRTNNRIRGLLATQGIRIKGKLDLSDSQLGRIRMWDGRPLAPGLKDRIRREWERLVFLTEQILALTGERQKVLHKEDSTEVAPDIEKIQQLQKLKAIGPVGSWVLVREFFGWRHFKNRRQVGSLAGLTPTPYQSGDTNADQGISKAGIVPVRQIAIELAWGWLRYQPGSKLTHWYNERFAKAGKKARKVGIVAVARRLLVELWRYLETGVIPEGAELKTAM

SEQ ID NO: 399688 - protein, 409 aa, unidentified
MHETQPVVGSGDVVVIGVDPHKASVTIEARDTREILRASGTFPTTTPGYRAMIQVARQWPRRIWAVEGARGVGRALVARLLAGGERVVDVPAKLSARSRVFDTGQGRKTDAHDAHAIVMVALRDHQLREVMIDEDLEVLRLLVDRRDELAAARTQALNRAHRLFAELVPGGAPTKKSVTQYQALLAGIRPRDGAGRVRRRMLAEELTEARRLEVRVKEITAEIKAAVLARGSHLMDLPGIGPAGAGRILADVGNVARFPSRHHFASWTGTAPIDASSGAHQRHRLSRAGNRRLNHVLHIAATVQMRHHDTTGRVYYDRKRAAGKRPLEAMRCLKRRLSDVVYRQLVIDAVGVQMATIEAGPGGHSGATLQSSAAGLPPHTGTSDQPLPGPATTTLDPPIRSRQVPITAG

SEQ ID NO: 399689 - protein, 469 aa, unidentified
MKKTNRNKKTPGGSARSRRQRTHKGELKPLRIRQDAAGIDMGATELYVAVPPGKDAESVRRFATFTRDLHAMATWLDQCGVRTVAMESTGVYWIPVFQILEERGFEVCLVNAQHLRNVPGRKTDVCDCQWIQQVHSLGLLNASFRPAQQVCAVRSMLRHREGLVQMASQQILLMQKALDQMNLQVHHVLSDITGVSGLAILDAILAGERDTAKLAALREPQVKASAETIVKSLEGDYRPEHLFTLRQSLTLYRFLQSQISECHEKIREELRAWDSRVDPTDHPLPPAGKPIKVEGLTTEQANNVREQSYRVLGVDLTQVDGINGHFLQVFLSEVGPDLSRFRSASAFASWLKLSPNREVSGGKVLKTRTERSGSRMAKAFRMAAHALLKSQSALGDRFRRFRTKLGAPKAITAMAHKLARIVYHLVTTGEAFHPAILLQQEEQQRAYQESRIRKAAARFGYKLVAAEAS

SEQ ID NO: 399690 - protein, 397 aa, unidentified
MPTTKPNVYAGIDTHAKTHHVAVIDELGRHLDDHEFPTTAQGLTAIYAFLVSFGTLIRVGIEGTASYGAGVTALLRSYDITVREVIRPNRQARRNGKSDPIDAYAAAKTVAADDTLPIPKLLNGPIDTIRVLLKTRHSAVKARTTAIRQIRSFLVTAPYRVREAYEHESARQLITGILKATPRHDDVFLSTLQLLARRHETLATEEADIEATLAPMITTIAPALIAMKGAKTVTAAQLLITLGENAERIHSKAAFAALCGVSPIPASSGKTNRMRLNRGGDRQANRALHTIALNRMSNDGRTRSYVAKRVGEGKTKREIIRCLKRYIANEVYRHVTRPQEVPAIDDLRPLRQSKKITLQTIAEEFGVWPMKVSTIERGKSRDDEFASRYRKFLLNAA

SEQ ID NO: 399691 - protein, 345 aa, unidentified
MSPIQHVSTVGVDSHKDTLAAAGVDTAGTEVFTVEIPNTTQGMDDLIGRVDDYEVVWGIEGTGGYGRALCDRLINDGRLVVEVPTRITGRYRQQAGHAKTDKGDAVAIAQAVVGDHGCGVTHELAPEALRVLVSLRQTLVRDQTAGINRIRARLVELDPDTERSMKRIRGITMFTRLAQWPDNTTGDQYRAALVSVIRVDGINCVTRLRQIQALEKAIAQVMPRAGVALTEIVGIGTVGAATIIANTRDIARFPTEGHYGRYCGTAPLDASSGRQEHHRLNRFGNRAINITLRTAILTQLKHNGQAASYVARRMTEGKTKKEAIRAAKRQLNKKVYRTLKQYDLT

SEQ ID NO: 399692 - protein, 339 aa, unidentified
MFYVGLDVSVARTSVCIMDALGQIVREQSVASTPEAIAGAIRAAGTNVERVGLEAGINSGWIARGLLDAKLPVIVIDATHAAAALKTGFRNKTDKNDARGIADLMRVNKFRAVWVKSPGAQRDRAMLTVREQLRRQSLDTRNTIWSILQVEGLKPPKLTNPAFDALVARSLEDEVLAPLLRPLVAVAEHVDRQVAELDKMIATRAKASAVCKLLMKVPGVGPLVAMTYTAGVDDPARFGNSRSVGAHFGLTPRRFQSGEMDWSGGISRAGDASVRRALYQAANVLIHHSGGWCALKSWAVRLAKRRGLGKAKVALARKLAVVLHRIWLTGEDYRLTAAV

SEQ ID NO: 399693 - protein, 400 aa, unidentified
MDERQRFRWFLGVDVSKETFDACCIHMKGESLFSLSTSMNRKGFEELITQLSGLSVSQESVLVGMESTACYHVNLCSFLISLGYTVIVINPLLISNFVKLQLRKTKTDKKDASVIAQFLRLNRDSLCQTLVSSDFSELRDLSRQRESLVDQTSLIKSDIKRLLSVTFPELERMAGVFTKSMLRLLCQYPSAASIRQLKRSQIAKILIPGSYGKQTAASVDRIIKAAQGSIGTTSPAKEVILKQKASLLMQLEQHLQEHTAILKELCQAKIQQDMGVLTSMKEIGEKSAMNFLIEMGGDIKQFERHQKLIAMAGLDPALYQSGKIDRKGKISKRGNRHLRRIIWLMTTKVIQFNERFKKYYLKRIKDGLPYKMAVIATAHKLIRVMFAMLTNRTLFNARMN

SEQ ID NO: 399694 - protein, 311 aa, unidentified
MTLPQDIIGVDIAKCWIDTYTLSTRKHERILVTKQALARFARAAKGTLVVVEASGGYERPLTEALRHAQVDCARVNPRQAREYARATGRLAKTDRVDAEVLARMGRALELAPTPPADPDRTRLADLVARRDDLVALIRAEKNRAGTTRDTWVAREIAQLLKVLQGHLTAVEGQIATHVETRAALAAESRRLTSVPGIGPALSAVLIARLPELGHLDHRKITSLIGLAPHACDSGLHRGKRRIWGGRADVRRALYLAAFIASRYDPTFKAFRKRLQDAGKPVKLAITACARKLLTILNAMLRNGQDYRKQTA

SEQ ID NO: 399695 - protein, 336 aa, unidentified
MKKKFNYYIGIDVSKLTLDVTVLYEIDHEEKTDYYRIENTEKSIAQFVKKKLCQYAPDQMLFCMEDTGIYSLPLAYYMSEHKLTYWLVPAVEIKRSKGISRGKTDKIDSKDIAFYSYTHMHKFRPSVMPAKTVQQLRLLFTEREKALKALALFSTTAENKDFASKEVFHAVASANRSIIKRLKQTLKQLEKKMLDIIASEEKLNRQYQLITSIPGIGMQTAIYILIATKGFDAFENWRQLACYAGVAPFPYQSGTSIQGRNKVHHLADKKLKSLLNMCAIVAIRYDRELQCYFERKVKEGKNKMLVINNIRCKLLARVFAVVNRDTPFVNTCKFAS

SEQ ID NO: 399696 - protein, 416 aa, unidentified
MLIVGCDIGSETHYIRAIDIRGRELSRKAFEFGNTAEGFEAAKAWMLELAVQNRKSQIVLGLEPTGHYWFTLAAWLITAGISVVQVNPYAVKQSKEIEDNSQLKDDRKDPKLIANLVKDGNYGMPYLPEETYADMRKLSMFRDQLTEDRIRNINRLHRELKIYFLEYMDAFGKIDGTFALEVLKVSCIPSEITELGTEGLRNIWHEAKLRGRGYSRASEIVEYAEKSVGLKDGSSVGRETVKWFAKEIMKLDEQLAWIENTLHKKCMEIPYAENILEIKGVGENILAGIVAEMGDISRFDDVKEIQKLSGMSLVACSSGKHKGQTKISHRGRKRLRYWLFQAARSAVSHAEEFKELHVYYTTRADNPLKKMQSLIVIACKILRVIYTILKTGKDYDPQKMLKDIKRPKAALAAKAA

SEQ ID NO: 399697 - protein, 358 aa, unidentified
MAVTGGTRRNVGGVDTHKDLHVAAVVDEQDRVIGTRSFATTRQGYRQMLAWMRSFGELQRVGVESTGSYGAGLLRFMQQAKVAVLEVTTPDKHDRRRRGKNDDLDAQNAAHAAFAGQRTVTPRSRDGMIESLRVLMACRKTAVSARRVALQMIHNTIVCAPDGLRDQLRSLSRMPLVRTLASWRPDLTAYRDLDSAYRIGLKSLARRYLELHDEIAELDVMIAAIVDELAPNLVARNSIGRIGAAQLLLTAGDNPERLRSEASFASLCGVSPVPASSGKTVRHRLNRGGDRAANSALHIIAIGRLRTDQRTKDYVARRIAEGHSKLDAIRALKRYLAREVFTLITQRRREINATRIAA

SEQ ID NO: 399698 - protein, 345 aa, unidentified
MKIVGCDLHTRYQQIAMLDDETGELVERRLEHANGEAKQFYESLSGSVRVGIEATGHTRWFERLLAELGHELWVGDAARIRAAEVRKQKTDARDAALLLELLLSGRFPRLWRPSSEDRDLRQLLWHRQQLVWMRTSIANQLHALAMGEGLCKKKQLFTKQGRAELEALNLDPWASRRRQELLRMLDQLDVSLKQFDEAVNEQAAQSAEAKLLMTHPGVGPVTSLAFVLMVGPVTRFPRSKQLVSYLGLNPREHSSGGKQKLGSISKQGNPMLRGLLVEAGHTAARLDPELRRDYQRLRLRRGGSVAKVAIARKLAVRMYWMLRRQENYTQLVRMQGSSRGTLVQQ

SEQ ID NO: 399699 - protein, 340 aa, unidentified
MDMTTLGIDIAKSVFQLHGIDADGAVVVQKKLRRGAVVNFLGKVGPCLIGMEACATSHYWAREIAALGHEVRLIPPAYVKPYVKRQKNDAADAEAICEAVTRPNMRFVPIKTEEQQSVLVLHRARDLLMRQRTMILNAIRGHLAEFGIIAAQGPRQVMGMIARLRDDGDASLPEIARSALLALGAHLEALAGEIRALERQLIVWHRADPTSQRLETIPGVGLITATALAASVSDPSVFKSGREFAAFLGLVPRQNSSGGKDRLGRISKMGDRYLRKLLVVGATSVIRRAGSNPTKTGAWVRSLMERKPARVVTVAMANKTARIAWAVMTRGEAYRASPIA

SEQ ID NO: 399700 - protein, 355 aa, unidentified
MNKYSVGIDISKNDFHACFSGIDNNQQVKVLRSGTFKNNRKGFVELAKWVKDTAREKIVPVVIIMEATGVYFENCALYLFKSGFSVSVILPNKAKKYIAALGIKTKNDKADAKALSRMGAEQALQLWQPMDDYFYELRALTRLYQTLQESITATKNQLEAAELSMYPSKTIIRSLKKLISETEKQLLIIRDKIYKHLASNGSVATKVNNIAEIKGIAALTIAVLAAETNGFLLFENASQLVSYAGYDVIESQSGLRVGKTKISKKGNARIRRALHMPALNVVRYKVKKFDIFFERNFQRHGIKMKSYVAVQKKLLTTIYALWKKGEKFDPEYDLKNTTGDEEAVQSSRPNFTEVR

SEQ ID NO: 399701 - protein, 435 aa, unidentified
MQKIRTNVAGIDIGAKKVFTSVEGQPVVSHFTFTQDFLQLKDYLLKHGVKTVAMEATGVYWVILYAILEEAGIDVWLVDGRQTKQVPGRKTDVKDCQWIQELHSYGLLNRCLVVNTDINELRSYLRLREDHIESSSMHINHMQKALTLMNIRLKEVISQIHGASGIAIIEAILNGERDKQVLVNMCHEKILKTKKEAVLKSLEGRYTESGLFALKQAYDGYKFYLGQIEQCDSKIDVIMNRIGNNGKPQNQTTDKKLKRKPIRHHAPRIDNLSANLIKTFEGKDATLISGITDYTWLQLLSETGNDLTKWISEKHFTSWLGLSPGQNNSGKKQRNAKKKGRPTAGQIFRTIAMGLINSKNIAIGEFGRRLRGRKGPGIAIKAMARKLAVLYWRVMVKGLDYVETGIKKYELQLQQNKLKTFNRLAKELKIYSADN

SEQ ID NO: 399702 - protein, 341 aa, unidentified
MELFAGLDVSVRTTSVCVMTAEGKVVREGKVETDPGALAAFLSEHGARYGRVGLEAGPLCQWLYAGLAKAGFPVFCIETRHAQAVLSAQINKTDRNDARGIAQMMRVGLFKPVHVKTLASQEVRALLGGRRFLQASMIDIENSIRGLLRNFGLKVGLVTRSSYEARIRELIEGETNLEAVINPMLAVRRTIREQYAALHRRMMLLAKKDGVCRLLMTAPGIGPFVALTYRAAIDEPARFRRSRAVGAHVGLAPRTHQSGELDRRGSITKSGDISVRTALFEAAGVLLRSTTRPSPIKAWGMKIAKRRGAARAITAVARKLAVILHRMWTDGTPFRWTAIAV

SEQ ID NO: 399703 - protein, 318 aa, unidentified
MSLVAPVFVGIDVAKAELVIAIRPSGERWTMANDGAAIQTLVQRVRSHAPTLIVLEATGGYERATVAALAAAQLPVVVANPRQVRDFARATGQLAKTDRIDAAILALFAERVRPAPRALPDDAAQALDGLLTRRRQVLEMLIAERNRLEHAVPAVRRSITQHIRWLERQLDDVDRDLNDTIQASPVWRAKENLLRSTPGVGPILSRTLIGELPELGMLPRKQIAALVGVAPLARDSGTLKHKRLVWGGRAPVRAALFMGALVGTRCNPVLRAFYRRLLAAGKPKKVALTACMRKLLTILNAMMRTNTMWRDVDPAPTI

SEQ ID NO: 399704 - protein, 343 aa, unidentified
MQTITTIGLDIAKSVFQVHGVDADGQVVVRRQLKRRYVLAFFQKLPPCLVGIEACASAHHWSRELQALGHTVKLMPPAYVKPYVKRHKNDAVDAEAICEAVTRANMRFVVTKTPEQQSCLTLHRTRHLLMRQQTSVINAIRSHLAEFGIVAPVGRNGVEQLLGVVADLNDKRLPEVARACVAALGAQLRVLKVQILEFDRMIRAWHRSSEASQRLDQVPGVGPVLATALVASVADPKAFRSGRDFSAWIGLVPKQNSSGGKERLGNISKRGDRYLRSLFTTGALAVIRYAKIHGTRHRPWLTSLLARRPTKVAAIALANKLARMAWAMMAKGEHYKEPVALAA

SEQ ID NO: 399705 - protein, 347 aa, unidentified
MLIIGCDFHTRSQHIAMLDTETGEIVERRLEHENGEARRFYESLKEPALVGMESTGYALWFTELLAELGHQLVVGEAGKIRALEPRKQKYDRRDAAHLLSLLVRGDFPRIWLPSVEDWDVRVLIEHRHQLVQLRTRVKNGLQAVALNYRLARRAKLWTARGRKELAALPLREGMARRRSDLLPLLAQLDHWIEELDQRLEREAEQRTAARLLMIHPGVGPLTALGTVLILGPVERFPDARHVTSYVGLIPSEESSGGRQRFGRLSKQGNRLLRFLVVEAAQTASRSDPGLRRVYRRLTFRKGKASAKVAVARKLMIRLYIMLRDQIDYAEFCRRGSHAGMLGRVALA

SEQ ID NO: 399706 - protein, 439 aa, unidentified
MIFNLVSWFCQTNQKRSIAMKSVKTKKVKKFNPKSLIVTADIGKGTHYGYFRAPDGLEVEPFEFYTTRKSFDKFYRRMQRFADNHQLEEIIFGFESTGPYGEPLFHYLKDKPVKLVQINPMHTKRVKELTGNSPNKTDRKDPRVIADVIALGHVLTLVVPQQAAAELRRLSHARQRSIKKRIAAKNQLNDLVYILFPEFTKIFKDITCKSALYLLENHPLPENIAAVEPQRLTSMLKRISRGRINAEKVGQLLAATHGSVGLKQGQDAICLEIRQLIAEICVHDNFIAQLEEQMHQGLKQIPYSGSMLSIKGISVVTVAGLIGEVGDFRQFKTISEITKLAGLDLYEISSGKRQKGRRRISKRGRALMRKLLYFAAINTIKAGGIMHDSYHKMLKRGMKKTKALVAISRKLLAIIFALVRDNSVYVDNYRRKHEFKMAA

SEQ ID NO: 399707 - protein, 343 aa, unidentified
MQTITTIGLDIAKSVFQVHGVDAGGQVIVRRQLKRRYVLTYFQKLSPCLVGIEACASAHHWSRELQALGHTVRLMPPAYVKPYVKRQKNDATDAEAICEAVTRANMRFVPTKTPEQQSGLVLHRARHLFIRQKTSVINAIRAHLAEFGIVAPVGRHGVEELLNVLADPNDKRVPEIARACLSAFGAQLRRIKEQVLEFDRLIRAWHRSDEMSMRLDEAPGVGPVLATAVVATVADPKSFRSGRNFSAWIGIVPKQHSSGGKNRLGNISKQGDRYLRGLFVAGALAVIRYAKIHGTKHRPWLTALLARRPTKVAAIALANKLARMVWAMMVKGERYKEPVALAA

SEQ ID NO: 399708 - protein, 427 aa, unidentified
MLNNDYNKQHERRQRIKKTTLVMGIDIGADFNAVGFMNKEGNVLGRLPKVYNSREGFDKFVRTTEELKTKHGLKDVLIGLEPTGHYWRKIAYFAKDQGYAVRFIRTTSLKHERELNESSSAKSDIKDALTLTNLTREGKYIDTVIEDGVSRQLRTLAKVREKILRQNTGAKNTLHAVLDDYFPELKKLFYAMNTKGLWAVLENCPFPEDVLKFEKTAIADIITKASRSKTDGARKAVALYLAAETSIGLKRVGDADRYRLTVYLNEVKRTERMLQEIKKEMKELLKHLLAAQYLLSIPGAGHLSAAVFLGELGNPAYFHHAKQIIKYAGYDPQESDSGKKIGRKVISKKGRWLLRKFLYLMSLRAVAHSKFFKAYYERRLETKNRFGQLLKKKEALCAVAIKLIKVIFALLRDKREFQDTVSFAFAA

SEQ ID NO: 399709 - protein, 291 aa, unidentified
MKKHSKVTTKRSVKPELTVGLDLGDKSSRYCILNCDGELMEEGKVRSTEAGLRKQFGDEPRMRIGLETGTHSPWVKRLLTELGHEVIVANARKVRAITANESKNDRNDAEILARLAACDPKLLFPIQHRGVEKQQDLNLIRTRAALVRARTMLINAVRGLVKSAGGRLPSCSSDSFADKARASVPVELRAACEPLLDQIAHMKLTIRAMDKQIEALGEKYPEIAVLRTVPGVGPLVAACYVLTMNSPDRLHTNRQAGAFLGLRPRQSQSGDSDPECRISRTGNTYLRSLLV

SEQ ID NO: 399710 - protein, 340 aa, unidentified
MRKLYAGCDFHGNSNFWGIRDETGEKVLHKKLPNDLVLILAMLEPFREELVGIVVESTYNWYWMADGLMEKGYPVHLANPSAIQQYEGLKHADDKHDAFWLAEMLRLGILPEGYIYPKQERPVRDLLRKRGHLIRLRTSMVISLENIICRNVGRKVSANDVKRLGEDRVTPYLEGQEDLALAGQVSKNTVDFLSEQIQEIEKAVLKRVRLKKSYRLLLTIPGVGKILALVIMLETGPIRRFATVGDYGSYCRKVPSQWTSNEKKKGSGNRKSGNRYLAWAYAEASEFARRYYPGPRAYYQRKIQKTNAAVAHSALAHKLARAAYYIMRDQVPFRMEKLFG

SEQ ID NO: 399711 - protein, 341 aa, unidentified
MKSMHYIGFHKKMIAFCIKSKDGRIIDHGIVTANRQSLLEWVQTVPQPWMVAMEATLFTGWIYDLLRPYATATKVAHPQMLKAITAAKKKNDAADAEKIADLLRVDLIPECYMAPTELRELRRILRYRNYIVRMAVKEKNKISGLLMEVGAIYAKRRLHGKRYFHQLLDTIEDVPKSVIDMLTLSRSNLELFMAVQKKLVTALRANPLIRDRVKRLMTIPGIGEVTALTWVLEVGEPERFASIRKAVSYCGLCAAQKQSAGKEYRGPISKKRNKHLQTMLVEAAKLAPHWNPQLAEIYKKELTKGHRNRATLAVARKLVAYLLCVDKSKQVFQLRVEAEAA

SEQ ID NO: 399712 - protein, 407 aa, unidentified
MDLLKTVFGIDVSSRKSNVCIMVNGQKVNDYAISNDMVGFNQLLDDLKQVTNPQIIFEATGVYSRRLQAFLNMHELRYVMMNPLEAKRKTKDDLHQNKTDKLDAMYLAKLQSEHPQRLAYVQSEEYQELMANNRIYEQASHDLITNKNRLHKAIQLTFPEIEHVMATPRGKNYWSIVLRFPHPDIVLETKEADIIDFLKSLSGIGKKRANDIMQKLIRLAKVACPAVKKDSAYVHGLKIAINNILSAEEECQTALQEMAKLAPKRDLEILTSIPGIGENTALRIISELGDIRRFKNPNQLNAFVGVDPQVYESGNLTAHLSISKRGTAIGRKVLYLAINQIQSAKKAGNPCHIADYYEKRKRSSETASHKKAAIASIHKLLRTIFALIKNDQLYSYDVAKHNQRLLS

SEQ ID NO: 399713 - protein, 319 aa, unidentified
MTNHKTLGIDISKKKFDVALLCNGKLKNKKFTNDTKGFQLLLQWLARFEGLEAHVCLEATGIYGEALSEHLYDSGLKISVVNPARVKGFAQSELLRNKTDKTDAGLIARFCHAMQPLLWSPLPKEIRRLRDLTRHLDALQGMRQQEKNRIEAASDVIKEHLIRHVDYLDNEIKNIKSAINQHIESHPELDARKNLLATIPGIGDATIRVILSEFGDVTRFKNAKALSAFIGVAPRVRESGSSLRGRSTMSKTGRSQLRKAFFMPALVALRYNPIIVELKERLTRAGKPKMAIVGAAMRKLVHLIYGVLKNEVPFNEKFA

SEQ ID NO: 399714 - protein, 345 aa, unidentified
MKKILKQALGIDVAQKELVVSLGRMHEDLSIEIYAYKVFPNTKNGFLTLVSWVQKRVDPNTKVRYVMEATGVYHESLAYYLAQEECEVSIVLPNKISNYFKTLEVKTITDKTASETIARFGLERKLDLWKRPKPVFKKLRQLTRERDQIVQDRTMAKNQLHAEQAEAEPHPTSVNRIKKRIALLNKQEKEIQQEIAKMAKEDLEVSGSIEVIRSITGVGLLTTVTVLAETNGFELIRNKRQLTSYAGFDVKEKQSGTSVRGKARISKRGNRYLRKAMHLPALTAIKHSDRFKAIFVRLVSKHGIKMKAAVAVQRKLLEMIYTIYKTKSLYNEDYLKMNYEQTLTT

SEQ ID NO: 399715 - protein, 416 aa, unidentified
MNAVGIDVSSRKSTVAVLRPLGEVVCLPFDVTHDIAGLASLVEKLKAIDGETRVVMEHTGRYYEAVAKALHEAGFFVCAVNPLLIKEYGANSLRRVKTDKADAIKIARYALDNWADLRDFTPMDAIRYDLKTLNRQFQLASKQRTASANNLIALLEQSFPGIRKCFDSPVRSDGTQKWVDFAHSFWHVDCVRKQPFPAFCERYRKWCKRHAYLFKLSNAEEVYALAKRAVVLTPKSKVVKVLVQEAANQLISISRSVEVYRAEMDRLAAMLPEYPVVMAMYGVGKSYGPQLMAEIGDVRRFERKQALVAFAGIDPMPNQSGDKNVRSNKSSKRGSPYLRKTLFNVIRTYLQCAPQDEPVFQFLNRKRAEGKPFYVYMLAAANKFLRRYYAKLRDYFASLDTLQPAAPIPTILKATL

SEQ ID NO: 399716 - protein, 338 aa, unidentified
MKNTKYYIGLDVHKERTTHVVRDRIGNILIEGETATLYQELFPILKPYLAASVIGLEASTSYYTLYHQFLKHGYTIKVANTIQLRQLITKNDKLDAKRLSEMLRLGTFPCSYIPDDKIQRMRSLLQVRHSLMEEKVRCNARIQAFLDRNGVVMPSYRAFSKKWRNALMQFMGSGDVSMELRYEYDHFVFLEKKLEQLDQELQGYARKNWTREYNNIQSITGIGPVVACYVIAHVLPIQRFSSNRKLRRYVGVVPTSKDSGNKTSKGRIPKTSSRRLLRWALIQAANSIGKTDTNLGRYYRKKKKQKKNAGIAKVAVASSLVDILYKVLTTNKSYGVDC

SEQ ID NO: 399717 - protein, 387 aa, unidentified
MRWSSSAARGLHHSTTVMITNNNDDASEGKPSTGPATAAAVLTEEVFLGIDAASVRQVVARFVLGEGVKPAEGMTTATLLARVAKWRKAGAEVHCVYEAGPTGFALARQLLALGASCLIVRPRRLDRHGRRRKTDPLDAQHLAEDLAAHRFGRKGLLCPVRLPSEAEELRRLAVRERETLSRSRHQLLNAAKGRALALGHALPKEWWRPRVLPKLLPDLPAALARQLQRTAQAAAAMKEQLDAVETELTCDAPPAPTGVGALTVGVLEREVCDWHRFKSAKKVASFAGLCPSEDSSGQRRRLGAIDKHGSPRLRFWCQETAWRLFKFQRTYRGVLWAREKLRTAHGSRAKQIAVALARRFLVDWWRIRTGRATAAELGFVFKAPPAA

SEQ ID NO: 399718 - protein, 394 aa, unidentified
MFIVGIDISKRSHMVRVIDSEGRTVYKPFSIRNSCSGCSVLLERLRKLTNHKSEFLFAMESTAHYWLALYTRLRKEGYQVVVLNPIQTDAMREMLMEDNKTDEIDTLVIAETIRFGRYRASSVPQEKLLALRELCRNRFYLIDMGSDLKRKITALLDQVFPEFESQFSKIFGKTALAVLRQYPTPEKLSRAQTGKLTEVLQTASNGRFGEWKARQLKELARDSFGIPDCEGTYSALLLLYLDQFQSLQDAAAVLEKRIAELFSQFDSTLTSITGIGPVLGAVILSEIRDISCFASAYKLAAYAGLNPKVKQSGDKKSSAVHMSKRGSPYLRRAIWMAGAIAVQYDPMFKAYYEKKSAEGLRYMNIIGHVSKKMTSVIFAVMRDNKLYEPVLPAA

SEQ ID NO: 399719 - protein, 341 aa, unidentified
MTEIKRIAIDTSKSVFTLHGVDAAGRAVLRRNLRRGELLRFFERLPPVEVALEACGGSHHWGRALSAFGHQVRLIPPQYVKPFVKRSKNDRNDAEAIAVAAAQPSIGSVPIKSVEQQAAAMLLSVRELLVRQRTQLVNAMRGHAAEMGVVAPLGEKGFKELQAAIATADDAVVPAAAKQAIALLGREVERIEGRLRAIEAELMQQHKANPLSRRLAAIPGIGPIGALNLALRVDQTQFASARHFAAWLGLVPRECSTAGRQRLGGISRAGDERLRQLLVLGATAVIQHARPGRPATSQWLLNLLSRKPRKLAAVALANKMARIVWAMMTSGEAYRPRPVVA

SEQ ID NO: 399720 - protein, 460 aa, unidentified
MSSIQRRLDYTDFGRSKQSGFFARGKKSLSYMSTVIPVPVQDRKYVLSVGLDWADQAHAVCQRTWVDGQRQVFQIGADPASVEAWLTQLKALAGPQGRIAIGFEQNRGALFEMLPLHSDWIDLYPLNPLTVSKYREAFFTSGAKDDPLDSQLIEELLYHHLDRLRPYQAPEPELRELDLLCQQRRKAVDAAVACANELCSLLKVYYPLALDLHQELRCSLSLHFLKRWPTLEQLKKAKPQTLRSFYFQHHCRSQSLIAERLEKIARAQAVTEDPALIRPLVLSLQRLVNQLFTLQASIAAFDKAIQALFAQHPDHHLCESLPGAGPQLAPRLLAAFGSNRALLTHPSPMQKKSGTAPVLDRSGQGKTISRRWCRSKFLCQTFHEFAAHSIPYSTWAKACYQQLLARGKSHNAAVRALAFKWIPIIFRLWQDRSPYDENLYLQALRNRRSPLSQKIPYPNV

SEQ ID NO: 399721 - protein, 420 aa, unidentified
MHVLTDKPFTACIGIDWADSKHDACLQAAGSEQREFTRFSHQVDSIEAWAHSMHQRFGGPIAVVLELSKGPIVYALQKYEFFVLFPVNPSMLAKYREAFIPSRAKDDPTDAELALDLLMRHPERFKELQPQSVEMRTLVSLVEQRRRLVSDKIRFTNRLRNTLKQYYPQTLEWFDHIDTPIFCDFISRWPTLLQVKRARRSTLERFFHAHNMRFAHVLEARLRSIKDATALTLDEAVVTPHRLQALVLIDQLRVTLQAIQRFDDEIAALASKHADYPLFSALPGAGPHLAPRLLVAFGEQRERFRNAAELQQYAGIAPVTERSGKKHWVHWRWQCPTFLRQTFVEWAAQTINKSFWAGAFYSQQRAKGCSHQAALRALAFKWIRILYRCWATRTPYNEAKYLRALERRESPLLQQFATPK

SEQ ID NO: 399722 - protein, 380 aa, unidentified
MDVHSTNYTLCAMEPTIGSEDRIFGEVQVAPDYKEVVCFIESLKMKLGLSDDYSIECGYEAGCLGYTLYHQLANAGIKCVILAPTTMLTQQGQRVKTDKRDARLIAQCLCYGGYHPVYIPTGEDDAVKEYLRMRDDHKLALKKLKQQINAFVLRHGHQYAGTKWTIKHVTWLNKLELDPIYRETLNEYMATYEEQEAKIERYDKRIEEIAAEERYQENAKKLGCFLGIRTHTALSLIVETGDFKRFAKGNTYAAFLGLAPGEHSSSTNVNRLGISKAGNTHLRCLLIEAAKGICKGAIGHKSKELRSRQHGQSADVIAYADKANTRLRSKYYKMIRHGKKKNVAVAAVARELACFIWGMMTGNISAARSTGTSVPVVSQG

SEQ ID NO: 399723 - protein, 320 aa, unidentified
MLLLGIDIAKDKFDVALLLASGKYKTKVFANSTKGFTSLQQWLVDQQALHVHACMEATGVYGDALALFLADAGHVVSVINPAQIKAFAQAELVRNKTDAVDARLIARFGALHQPPAWTPPPRSVRDLQALVRRLDALNDLHQQEANRLDVCEDTVRASIESVLATLDIQIQEIRQKIQDHIDHDPDLRGKRDLLESIPGIATATSAQLLVYLGQEERFHKAKEFAAFAGLTPRRVESGSSVNLKSRLSKMGDSRLRKALYMPAVSAMRHNPVMRAFAQRMLANGKPKKVIVCAIMRKLIHLAFGVLRSGQAFNPDWALAS

SEQ ID NO: 399724 - protein, 418 aa, unidentified
MDDGMASVGCDIAQTVVCAPFVLGVAPGAIVAGFDVHRRQITVDALDTLTGELWRGQLDSTPAAVERWVARFRGRIVHVAVEACTGWLFVCRALERAGAVAHLAEPVETSALRGRKRRAKTDRADAKWLRQLLCEGRLPESWCPPEHVRQWRSRARLRNALLAERTSWIQRIRATLYHHGVAGAPDDLRTLQGRQFLSGLELPLDASERIRVALEIIDLLEIQLAGIERDLRALARHQTGCRALMSQYGMGELSSLVTLVELGDVTRLHASRQAVRMAGLDIGVHRSDRHAQLGKLTRQGSAPLRWALYEAAQSACRPKSPDYADYHALKNRGLSHNRASLTIARKLARRSYHLLRALGPAALDPPDTATPPASSSSDRGTHAQRGGPQKTERPQSLHRNDRSTITSPAATTRGRGPR

SEQ ID NO: 399725 - protein, 369 aa, unidentified
MIARVGVGLTRVNVDGSPHGSRSSKTVSELGAPSMRSTENPNSRLGVASPHSQGRDMERSLFVGIDVAKDHLDVHAVPTDAAFRVTHDAAGLATLCERLVAWAPTLIVLEATGGHEVTVVAALASAGLPVAVINPRQIRDYARATGQLAKTDALDARILAKFAAAVRPEVRPLPEPQTRALDEAVTRRRQLIEMLGAEENRQRLVRDRRVQGQIEAHITWLKRAIKELDRELQATIRASPLWRDAEAVLRSTPGVGPVMTTTLLAELPELGQLSRHKIAALVGVAPLNRDSGQFRGRRMISGGRASVRRVLYMATLSAIRRNPVIKTFYDRLCANGHPKKVACIAAMRKLLTILNAMLRDGRRWHAQIA

SEQ ID NO: 399726 - protein, 391 aa, unidentified
MICVGIDVAKDKHDCCILDSDGTIRADCITIPNNMDGFKQLLQTIRDCTKKSDKIKVGLEATGHYSYNILGFLLDNDLAVYVMNPLHTNLYRKSLSLRKTKTDRVDARTIATMLLSDVDLKSYTDTAYHNEELKSLTRYRFDKVRERAKLKQSVSRLVTILFPELEKLVPSLHIASVYALLSEYPGAKQISEIHLTKLTNLLATASKGRYGKDKAIQIRDAARTSIGSVMPAKFLELKHTIKLIRELTSEIDEIEVSIQKIMDELNPPILSIPGVGIQSAAMILAEIGDFSNFESPDKILAYAGCSPSTYQSGKLTNCYAHMEKRGSRYLRYALYNATKYVCHWNPVFAEYLAKKRAEGKHYNVALSHATKKLVRLIYALQKSGKAYLVAA

SEQ ID NO: 399727 - protein, 435 aa, unidentified
MPVASPTTRGQPTMRRKKTHMDTFEQLTHFAGFDWAKDHHDAVILDRQGNTVAAWTFAHSAEGWAQWREKVKAYPALGVALETSHGAAVEQLLASGVTVYPMQPKAAQRYRDRHVPSGSKTDQSDAWCFADALRVDGQGWRALAPADPLVEELRLLCRDEVELITQRTGLVNQLQAALYEYYPAALEAFEDWTQAYAWALVEQFPTPRELVKAGRRRWENFLHVHKLWRGQTLEKRLEIFARADQLCGGEAVTRAKSRLVMSLVKLLRTLQTQLEAYRAEIEKLFAQHPDHDLFGSLPGAGDKLAPRLLSEIGSDRAHYPDAQALQCVGGTAPVSFQSGQIRKAKIRWHCNRHLRHAVHLWSDCSRKFCAWAAAYYLAQRQNGKSHACALRCLGQRWLKILWKMWQSGQCYDEALHALNQQRHGSWVLQLKAEKT

SEQ ID NO: 399728 - protein, 412 aa, unidentified
MELTPIYKRVIGLDVHQAKISACAVAEQADGKVTVETREFGGFKRDRRALAEWAKSFDPEVVVMESTGIYWKSPYAALESVGIAAWVVNARHVKTVPGRKTDVADAQWLATLARAGLLRASFIPQADIRYLRLIARQRQKLGGMLSSEKNRLHKLLADAGIRLNVVVSDIHGQAARAMVKALIEGQTIAQILDLAGRLRASRADLFEALQPEELSGAHLFVLTEIMAHIEELEARMGRFEQALLAGLSPWRPQLVLLQTIPGIDVMGAAMLLVEISADMHSFGSAERLASWVGICPGNNESAGKRKSGKTRKGNAWVRRLLCEFAQAAARSRCALKDKFAALSIRKGHKKSIVALAHKMLRIVFAVLKSSQPYHDRAVDYEALSVQRNAPRWMKMLLKHGFLEAGASPVTTA

SEQ ID NO: 399729 - protein, 407 aa, unidentified
MRLFVGDDWAEDHHDIEVMDEAGTVLVKRRLPEGAAGMTQLHALIGRFLPEDAEDAEVVIGIETDRGPWVAALVAAGYAVFPVNPLQASRYRQRHGVSGAKSDGGDAHMLADTVRTDSHQLRPAAGDSPEGQGIKVVARAHKTMIWDRTRATQRLRSQLREYFPAALEAFEDLDAPDVLELLSKAPDPDRARRLTRAQVAAALKRARRRDIAGKTDTILAALRGEHLGQPAALTAAYAATARSLIAVITTLNAQVKILEDQVRDHFGRHPDAEIYLSQPGIGAILGARVLGEFGDDPRRYVSAKARKNYGGTSPITRASGKKKVVAARFIHNDRLIDALMSWAFASLNASSGARAFYDEQRAKGLDHNDALRRLANRLVGILHGCLKTRTPYDEATAWSHRESSLAA

SEQ ID NO: 399730 - protein, 391 aa, unidentified
MNTTTKTGSTTASTTTILAIDLGKYKSVACVYDEAGGEFRFTTFDTTRSEMHRLLTRERPAVVIIEACLLAGWVHDLCAELGIRCLVANTASEAWKFKHLKRKTDRDDAQRLAQLYLLDQLPTVTLPPAAVRQWRSLIACRQVLVGRRIAVQNRIRALFVAQGLPAPRGAKAWASTGLAGMATWAKPLGDCAADELWRGLLELSLTEYLQLCELIDQAQTKLDALGKQSADVVLLQTTPGLGPRTAETVAAYLHDAPRFQTAKQVSAYSGLVPRQHQSGEMDRRGRISKRGPALLRKMLVECAWCMIRYNVWARGIYQRLTGGGQRRKKQAIVALARKILVRCWAMLRDRKPWHDPQTGPKATVSPSKQRRRAEAQQRRQAKQPAALTATQ

SEQ ID NO: 399731 - protein, 368 aa, unidentified
MSALMIKDISSKGISVPSLVNCLNRVLHLGLDMHYRQVTAAMQENGGRIKAAGKMSHVDFLNWVRKKLAEGWEIHSCYEAGACGYWLHRELVKVGVKNLVVVPKAMGQGGKKQKTDKRDAGELCDCLDRYLRGQDKALSVVAVPTEEQEEKRALIRYHRQIMADRGRCEARGKGLLCAQGIEVQGRWWHGDTWLEVQSDPRLKDWMKEQLIGWRNKILSTEEEQGALRERIAALAPAILPKGVGAYSAAVLHYEMRGFERFTNRRQVGSMTGLCPGIHQSDGRGKEGSINRCGIGIVRWTLVEMVWRLRIWQPQYPPVRRLATGLVKGKRARKRLVVQAARRLAIDLWRLSTGQTTPEKLGLIMHSAK

SEQ ID NO: 399732 - protein, 346 aa, unidentified
MTMIAQRFDYVIGVDTHARTHTLVVIDGAGVRRKSDTFPTSAPGLRRAEAWIGRNAPGRTLVAMEGTGSYGALFAERLEQAGFPVAETRPPRRQARRNGKSDDIDAELAARFALTLPAREIAAPRRNSGNRAALQVLLTGRRHRTRERTATVNMLTALLRTHDLGVDARTALSSGTITAVAGWHARRSDGPAAATIRAEAADLARRIRALDSELTTNSVGLTRHVTALAPWLLEETGIGPVSAAQLLASWSHHGRVRSEAAFARLAGTAPIPASSGNTSRHRLHRGGDRHLNQALWTIAFNRTNTDEATRDYVARRTAEGKTRKEIIRCLKRYIARSLFRKLQNMP

SEQ ID NO: 399733 - protein, 355 aa, unidentified
MTVTIVEEARPVTCRTAITGGVDTHADTHVAAALDPVGGLLGVGEFPATAAGYARLLGWLGGFGTVCLVGIEGTGSYGAGLARHITAAGIRVVEVDRSDRQDRRRQGKSDPLDAVSAARAAQSGRARGAPKGRDGAVEAIRTLMVARRSAAGERTRTINQARALVLTGPDDLRARFARHKPAALITGLAALRPRPGDVAGHAARIALRELGRRAQFLDGQLVRLDELIIPLVTARAPGPLAIYGAGPRTAALLLIAAGDHPERLRSEAARAHLCGAAPIPASSGKVTRHRLNPGGDRQANHALWRIVFTRLGSDPATRAYAERRTAEGKSKAEIIRCLKRYVAREVYRQLRPAAG

SEQ ID NO: 399734 - protein, 355 aa, unidentified
MTHSITAFQDRVCVGVDLHKDTLTAAVLDPRSGETRFRKIACKCRNAIRAFFGELPRPHAVAIESVGFYRWLFDELEPIVDALYLADATQCRALAGRRVKTDREDALNVAELLAAGRLPVAYAAPAPVQELRHWTRHRHHLMRQHAAVLIRTKSILALVNRPGPNPASRTKAPALLRYIKAQRANMPATLVTQLELAADQMVLLERQIDGIDDRLKRTLDAAPFRDAALRVRSFPGVGVVIAATILAEVGDFGRFTHRDAVARYAGLDPAVYNSADSVRTGRIAKRGSRDLRWALVQAAWVARRCDDNVKRLHQRLTKRCGSKRAIVAVARRMLRWMWHAERRGEHYRFAGVREG

SEQ ID NO: 399735 - protein, 341 aa, unidentified
MPIVTIGIDLAKNVFAVHGVDETGKAMLIKPRVPRDQLATLIAQLPACLIGMEACSGAHHWARLFQQHGHTVKLMAPNLVAPYRMSGKRGKNDAADAAAICEAVTRPSMRFVPLKDEHQQATLCLHRTRQGFVEERTATYNRLRGLLSEFGVVLPQSPEKLRRYITEHLDTLPGWAKRSISDLLEHAGHIEDRLLDYDRAITEIARKDARSKRLMLLRGIGPTTASALLASIGAGHDFRNGRQVAAWIGLTPGQYSSGGKARLGSITKAGDAYLRGLLVNGARAVIASLGEKQDRFSRWVRTLVERRGYWRAAIAIAAKNARLAWASLKYGENFKLELTAE

SEQ ID NO: 399736 - protein, 341 aa, unidentified
MLYVGLDFSRKRLQWSAFDESGVEAARGVVAPERDGLFELAERASRHGRPVLAAIESMTGSRFVHDQLELLGWDVRIADAQRVKGLAPLACKTDRIDARVLAELAWRDLIPEVWLPDPAVRAERERARFRLHLVKHRTALKSRIHQTLVAYGVPCPVSDLFGVGGRRLLRELELPEPWRGNVDASLTLIDQLSGQIDSCEAELRRLGATHPYVRQLVTVPGIAWILAYTIGSEIGDISRFRTPAKLVAYTGLCPRVYQSGERDRRGPLAKNGPRYLRWALIEAAQHAARTAAYRELYQSTKKRLGKQRGSRVAAIVVARRLAEASWWMLTRDQPFAPASAA

SEQ ID NO: 399737 - protein, 362 aa, unidentified
MRNITIGIDLAKSVFSTCTVDATGRVVQRQDLRREAFASWLVQLPAGTLIAMEACSGAHHWARRGIDHGLQPRLMAAQFVKPFRKSQAAKNDRNDAEAIATAARQGNMRFVPVKSIDQQARLAEHRVREGYKADALAASNRLRGILAEFGIVVARSDAALRRLLARLDELAIPASTREALDQLQRHWSSLREHETTCSRRILAQSHDDERCTRLRRIIGIGPLTADALVATIGNGHDFRNGRQLAAWLGLTPSQHSSGGKARLGTISCRGDGYLRTLLIQGARSSLQRAQAVAVAKATPEQIWIRDLASRLPFGKVVVAIANKHARQAWAMLARGEDYDAHAWLKHPMVQRPASKRRQQACS

SEQ ID NO: 399738 - protein, 413 aa, unidentified
MKKHTYRAQKVNNMNWQQVQEQTLGETLVLAVDVAKVQQYALLTNQEHTQTWLMQWRHLEHTPYLIEQLKALEIPITVVMESTSTYGDSLRYQCRQAGFTIYQANAKKVHDAREIYDGVPSLHDAKAAWLIAKLHKDGATKPWCEPTEEERRMNALRLEYELHQDQLRRNQNRLEAYLSRHWPEVLTLMPLDSVTLEQLIKNYGSPQEVAVQSEQAALDMRGWGKSGLSAEKIANVIASAQNTMGEPCIEAEGQFLMALASELQHSRQQKQTTKQALEAIVENDEALREMGRTVGKVTTAVLISLHLDPRRFATPKSYQKALGVNLTEKSSGQINGRLRLSKRGSATARKFLYLAALRLLVNDPMVGKWYEAKKDDCAKLKTVIALMRKLPLALWHIARGERFDAGKLLKAAV

SEQ ID NO: 399739 - protein, 338 aa, unidentified
MFIIGIDPHKGSHTAAVIDDREQLVGEMSVCADRRQRDRLLRWAAPFEPRLWAVEGATGHGALLAQQLVASGETVVDVPAALSARARLLDSGHKDKTDAHDARSAAIVALRHRNLRAVTLEDSRQILRLLARRHHQLTAARTRAICRLHAVLAEMIEGGLSKNLSAKRASVELRKVRPHDAIGMERKRIAVEFLVEVRRIDLALVELHRRVIDAVKAAGTSVTEVFGVGPIVACYLIGYSGDVHRFPSAGHYARYNATAPIEASSGPRVRHRLNPNGNRQLNHAIHIAALGQISHDTPGRAYYLAKQADGKSRKEAMRCLKRRISDAVYRQLRSDLDA

SEQ ID NO: 399740 - protein, 377 aa, unidentified
MSKLLFVGLDVHAETIAVAVAEQGGEVRSVGGIANRLESVRKMVHKLGPVQHLRACYEAGPTGYVLYWQLTQLGVACEVIAPSLVPSKVGDRVKTDRRDAEKLARCHRAGELTAVCVPSAAQEALRDLVRAREAAKKDQLKARHRLGKFLLRHGRQRPEGIKAWTKKHREWIKSHVRFEEAALEVTLADYVEEVDHVATRIVKLEKAIDEAIRQAPPELRAVIEALQALRGVAQTTAASIVSEVGSLSRFPTAPQLMGYSGLVPSEHTSGNRVQRGGLTKTGNGHLRRVLVEAAWAYQHRPNVIGHLARRQKDLAISEEAKQIAWKAQQRLHKRYKAMAARGKNKNQIVAALGRELLGFIWAIGVKTEQQQTLAKAA

SEQ ID NO: 399741 - protein, 337 aa, unidentified
MSFATLGIDISKDTLDVALYQDDSYRLATFTNEKDGYRRLAKWLKKHKAKECRVGIEATGRYGEAVAMYLYERDYSVSVVNPARIKAYGASMLKRNKTDREDAKVIAHFCATQNPGVWAPPPPEIQELQALTRRLEALKADRTRELNRKQSGVQSKTVLADIDAHIDFLKNQIAIIEQRIRDLLDQHPDLREQHDLLTSIPGIGDITAARLIAEIPDVNDFQSANQLAAYAGLTPRNHNSGSSVHRRGRLVKTGNKRFRTALFLPALAAMRFNPIVQALVERMQTNGKNRMTIVGAVMRKQLTVMRAILISGKPYDPAFRGCGKLSGQPVRERAIST

SEQ ID NO: 399742 - protein, 373 aa, unidentified
MIVIGTDTHKRTHTCGAVDAFTAAARGELTAAARTGSFGKLLRWARALDPERVWAIEDCRHVSGGFERFLIARGERIVRVAPKHMAGARRSSRERGKSDSIDAFSVARAALKEGIENLPGAQLDGAALDIRLLVDHREDLIAARTADQQRLRWHLHDLWPELEIPAGALDTNKWLGKISRRLARAPQATRVRVARELVRQITARTTRARELEAELAALVESYAPQLLAERGCGPLTAAKLIGEIAGADRFATDAKLARTGGAAPIPASSGNTNRHRLDRGGNRQLNCALHRLAVNKANWDPDTAAFLARKQAQGQSRKEALRSLKRHLARRVWRLLRSTTAPNATLPPTDIPDSPKARETIPGTAPHPMTCIS

SEQ ID NO: 399743 - protein, 401 aa, unidentified
MGISDSLLPKEGEDKRGSWEGSMNANLGLRCNVMKGCPRRGRMVCVLTMNVLTERRQPVNIVPLVALDIHKKFSFAVVLDHDGNKLNERKLQHDDRQALADFFKSFPKGTEVVMEATFNWPWLADAAKALGLTPILAHPPRARQMAKGLPKTDRRDATFLGKLRLAHTVFPEAWGAPPEVRMQRDIFRLRLELVKSRTALKNAVHGQLLKLGIQTDNAPADLFSPSGRKFLELLDLAPNQRFLLQTKLDTIDGITREIKILDEAIVSGVKEDPRAEILFSIPGIGRLSAYAILAEIGDIDRFLNSRALASYAGVLPKNKESAGHDYGKRTGGPCNDHLHWVAVECTTGAINSSRAMRSLHSRVRARNPKAAGKARIAVARKIIELVWTLLKRGEKYREPNV

SEQ ID NO: 399744 - protein, 311 aa, unidentified
MTEHTIGVDISKSHLDVFDAERREAKRFENSISGFRAFEKWLGKAHIARVVYEPTGPYHRNFEERFCDKLPLVKVNPLQARRFAEACGTRAKTDALDARGLARMGGTLELEPDIPVAKVTRILKDLQVARAALIKERTRLNNRAHVQTNPVLKRQTKARLALVEKQLCELDREIDALITADKTSARRRQIVQSIPGLGSVASAAILTYLPEIGTLDRRQVGSLAGVVPYNRDSGQWRGKSFISGGRKPLRDALYMPALVAMRYNPDLKAKYEALRAAGKPAKVAIVAIMRKLIETANALVKADRIWVPKTS

SEQ ID NO: 399745 - protein, 410 aa, unidentified
MEVLHSHCAGLDVHKDSVVACVRHMVDGKVTTGVKTFQTTTEALIALSDWLSAEGITHIAMEATGVYWKPVWHILSDGEFALVLANAAHVKNVPGRKTDVNDATWLADLMAHGLIRPSFVPDEPTQQMRDLLRTRKQFTRERSRHAQRIQKTLEDANIKLDSIITDILGVSGRRMIEALIAGQTAPEALAKLADGRLHATRAELEASLRGRVTPHHRFMLRLHLNQIDALDTALACIDQEVDANVEPFRVAIEMLSTIPGLSSLSAEVIVSEIGIDMSRFPTEAQLIAWAGLCPKNDESAGKRRSNRIKKGAPWLKTTLVQCAWAATRKKGSYLQAQYLRLRSRRGPKKAIVAVAASILTAAYHMLKNGTLYQDLGANHFDQRAKGKHVLRLVNRLQNLGFAVHITPMAA

SEQ ID NO: 399746 - protein, 379 aa, unidentified
MNVMRFYDGQHGFYAGIDLHARRLHLCVLDATGKVVRDVNIAATPDAFLAAIAPFRGDLVVGCECMFAWYWLADCCTREGVPFVVGHAYYMRLIHGAKAKNDKIDAHKIARLLRGGNFPLSYVYPKGMRETRDLLRRRTWLVRHRAGLLTHLQILNAQYNLPPFPKKLGYAANRQDMDVAARFADPSVRTSAAADLAVIDCLDGQIAGLELYLTRAAKVDDVQTYHRLRTIPGVGPVLALILLYEIHDIRRFTGAGQLLSYARLVRCAHESDGKVLGSGGHKIGNAHLRWAFGEAACLFLRGSERARRWKEKQVRKRGEGKALAVLAARLARAVYHIWRKGEAFDEERFWGGPARGQGKEDKTGSSSLCRAGEVADAAG

SEQ ID NO: 399747 - protein, 453 aa, unidentified
MGKSNKKAIKIGFHEGLPQIRANAGGMDIGASEVWVDVGGKDPEPVRRFETFTADLQEMGDWLKRCGIETVAMESTGVYWIPICQVLESKGIEVVLVNARYAKNVSGRKTDMLDCQWLRILHSYGLLEASFRPARDIGVLRAYMRHRQMLIEYAAAHVQHMQKAMTQMNLQLQHVLSDITGATGMRIIRAIVDGERDRNRLAAMRDVRTKANETTIAKALEGDYRAEHLFALKQSLELFDSYQKQIEACHQQIADHLRSLESKADPAAGLKPARTTKKKRRNQPDFNIREEAFRISGVDLTEIDSIHESAALGLLAEIGVDLSPWKTEKHFASWLTLCPNNKISGGKVLHRSTRKSASRARDILRLCAQSLLVSRSALGAYCRRMCARLGKPKGIIAAAHKLALLVYRTLKFGRRYVDIGQEQYEEKYKERALKQLARKAQHFGFQLVPSSQQ

SEQ ID NO: 399748 - protein, 335 aa, unidentified
MEFTYFIGTDVSKNELDFAVMRGKTLLFHKEIANTEQAINLFIKDLIKQPGFDWAGAVFCMEHTGIYNNHLLASLHKKKANIWLESAIQIKRSSGNVRGKNDKVDAIGIADYAYTKRDKVRLWNPKREVIQQLTDLTVTRTRLIEAKKMLKTPLQEQDSFSAKRVIKQSAVVCSHTLKAIDADLKRADNAIDGLIAKDPELKRLFSLVTSVTGIGKVTATQILITTNEFKNISNPKQYACYAGVAPFVEESGIFKGKGRVSHMANKKVKTLLHMSAIVAIQYNQDLKQYYQRKVNEQKKNKMSVINAIRNKLILRIFACVNHNSYYENNYQKLLA

SEQ ID NO: 399749 - protein, 355 aa, unidentified
MREEKYIGMDVHQATISVAVVDVHGKLIMECLLETKAATIIEFIQGLRGTLSLTFEEGTSAAWLHDLLKPHVNRLVVCDPRKNALLKEGNKSDRLDARKLAELLRTNQLKPVYHEEHGMRTLKELGRSYLTLTKDVTRVMNRIKALYRSWAIPCSGTTVYTPSHRAEWLAKIAEPGVRVRAEHLYQQLDSLQPVRLQARRELLRESQKHAAVKLLRQIPSIGPIRAALLVALLQTPHRFRTKRQLWAYSGFAVETHDSGEYRNVRGKLQRNRERMTVRGLNDNHNKDLKNLFKSAAISASTRPGPLHDFYVARVEKGMRPTMARLTLARKIATIALTMWKKGVGFDPQQLHRQAA

SEQ ID NO: 399750 - protein, 389 aa, unidentified
MKNTIVHHEGAASLEDAVGKVKLSGSIIKIGLDVHARLYVAVAQYDHLLPKPARRFAPMEFVPWVEQLLRVGHTVHVVYEACGFGFGLYRELKALGAHCYVIAPRKLDEHFTRVKTDPRDATTLCQRLSRYLDGNTRELAVIRVPTQEEEQDRHVSRQREQLLRLRQKLEAQGRSLLISQSLPSPAHWWKNQTWSRLRKLLPGWICIRLEVHRPPLLTLQKQIDALSAQLEAAAPADVPLGIGKLSTVVMTREICSWERFRNRRAISCYTGLCPGEHTSGTKRMPGSVTKHGNPHLRAALVECAWRMVRFEPNYPPVKKRLSVLAKGARATGAQRKKAIVAVARHLAVDLWRIHTGRCSAAQLGLSSAETSSCSRGTEKEARTASTIIT

SEQ ID NO: 399751 - protein, 341 aa, unidentified
MNKPSTICIDLAKNVFQVALFNQHGKLKSNQKMSQAKMVTFIAQYPASMIYMEACGSAHYWGRYFQNNKHHVHLLPPQIVRMYRAGNKNDANDALAIYEAAQRPEIHFVSVKTTEQQDIASVLHLRESYIKQRTAVANRIRGFALEYGIKFPQSITKLRALLPLELEDPNNGLTSSARFVLHQLLNQLIELDKPIQEVTDYLIAYAKQIPACQLLMTLRGVGWIVASALYARMGDASAYKCGRDASASIGLVPAHSGSGGHNKLLGISKKGDRTLRAVVVHGARSVVSNIKDKSDQLSCWLRALLERNHFNKVVIALANKTVRMACAMLKSNQPYQEKLPA

SEQ ID NO: 399752 - protein, 341 aa, unidentified
MKNKSFIGIDISKNVIDASIFCEGTPIKDFPHAVFNNSRKGFGEMCTWLKKNHVVLSNCLFGMEFTGSYSMELEKFLNARNYQFCMLSTHVVKHYPMGPKDKSDKIDSAKIADFLYRYNGTECVKPYKMPDKTMQRLKTLMNERKFLVEQRTCFMNRRQLCSTKEDAQLYDGYIRKLGHDIENIELEEQKLLATDDSLLTTYKNLLTIPGIGFVNAINAIVITRNFTAFETARQYASYVGVAPHSHTSGTSVRWRPRPSARCDGQAKADLSMAATVAVQYDAELQSFYNRKLGGKQDSDTKRKALNAVKFKLVLRMFAIGKQNRKWEPLDSKSSNEKLAIS

SEQ ID NO: 399753 - protein, 356 aa, unidentified
MNEGSWVGLDVHARSVTAGVIDGVSGEVRSLRVPPGNAETVAWLETLPAPVRVVYEAGPTGYGLARACAGAGISCVVAAPSRIRPAADRVKTDRRDAERLARLLRLREITPVRVPDPEEEAARDLVRAREDARGDLMRARHRLSKLLLRHGAVYDATAWTRTHDAWLRRQRFQSGPLGIVFDECYGRMLDAKTRRDALDKAIAELAATPPYVDVVERLVCLRGVSTLTAFALTVELGDWRRFRPESLGPFLGLTPSENSSGERRRQGGITKTGNTHARRLLIEAAWHQRRPQRMSTVLTRRRDGKPPAVQAQADRSARRLHGRWHALEARGKPRSIVVVAVARELAGHCWALATME

SEQ ID NO: 399754 - protein, 392 aa, unidentified
MIYVGIDIAKDKHDCFITNSDGEVLFKSFTISNNPDGFETSFQKIQSVSDDLTKVKVGLEATGHYSYNLLGYLLDKGLPTYVINPLHTNLYRKSLSLRKTKTDKVDARTIASMIMSDVNLKSYSDTSYHNEELKSLTRYRFDKVKERAKLKTSVSRLICILFPELEKLVPTLHMASVYALLSEFPSAHAVASAHLTRLINLLSQSSKNRYGKDTAVMFREAARNSIGSNMPTKSLELKHTIKLIQELTSEIDEIEAAIKQIMDEEIQSPILTIPGISYRMGAMIIAEIGDFCRFDSADKILAYAGMSPSTYQSGQLDNCYSHMEKRGSRYLRYALYNATKYVCHWDKSFGAYLEKKRSEGKHYNVAISHAAKKLVRLIFAMEKSRKAYLPTA

SEQ ID NO: 399755 - protein, 344 aa, unidentified
MSNLDSCGIEVSAKELIIRLRRQGELEPLRSFTNTPEGREMLRRYLSEAGRVVRVCLESSGLYGLDLALLLSAAKGMEVMVANPRAVRHFATALMKRSKSDPVDAGVLEEFAARMPFRAWSRPSPAALALHALARRLHELVEIQTAEKNRQHAAGISETTPTAVRRDLARSLRAQQRAVERLTRAARKLIAQDPQLRERYELLDSIPGVGETSAVQLLGELAVLAPDLEARQWVAYAGMDPRQYTSGSSVHKKPRISKAGNKHLRHSLFMPALVAVQHDPYFSAFYQHLLAQGKFKMQALVAVMRKLLHAIHAMFKHHQPYDGSKLFRLPPVPAQEVPSAAVLA

SEQ ID NO: 399756 - protein, 380 aa, unidentified
MKKIRFVGLDVHAETITVAVAEPERNGEVRSLGSIPNRPESVQKLIKKLGPVDQLRACYEAGLTGYVLYWQLTELGVKCEVVAPTLVPVKAGDRVKTDRRDAEKLARSYRAGDLTAVWVPDAAHEALRDLVRARLAAKRDQLRARHRLSKFLLRHGRRPASGVRAWTAAYLNWVKKGVQFDQPAQNATLTDYLHEVEHAQERIVRLEQAIDDAIKTIPERMRAVVEALQSLRGIAKISAVTVMAELGEVSRFETPRQLMGYSGAVSSEYSSGERTRRGGITKTGNTHLRRIVIEAAWAYRHRPCIGATLKARQKTASQKVKDIAWKAQHRLHRRYVHLTAKGKIKQKVVTAVARELLGFIWAIAVEVEQGYNAREPKRAA

SEQ ID NO: 399757 - protein, 342 aa, unidentified
MEEVTIIGVDLAKNVFQVHGAAADGSVVYRKKLSRPQFARFMGKHPACEVAMEACPSAHHWARELTKYGHRVRLIAPHYVKPFLKRQKNDAADAEAIVEAALRPTMRFLEPKTAEQQARAVAFRTREQLVKQRTEAVNALRSHLYEFGYIAPVGIGYVPRLERVVADPDACIPDLARDICRMLLEQIAQLTARINTVKARIAAMSNEAEMPRRLQTMPGVGPITALAVETFAPPMEQFRRGRDFAAWLGLVPRQHSSGGKQKLGKTSKMGQRDIRRLLVIGATAVIRWASRRGAPAGSWLERMLARKPIPVVAVALANKMARGIWAMLSRDENYRGPVLIGA

SEQ ID NO: 399758 - protein, 351 aa, unidentified
MKTQQTALSKLFIGIDIHKRSWKVHCSTDLFCGKSFSMSPDPEQLLNYVLKHFPGHEIIVAYEAGCCGYSAHRCFEGYGWRSLVVNPADIHRKGKERHTKTDRIDAQLISRELKDGRLESIIVPDTEREELRSLFRRRNDLVKDFRKIKSYIKMQLLYFGIKEPEEFDNDHWSHKYREWLDAMVFEHPTAKSTLESRMRFFRFVDQELRDVSTQLRRYCKTHYKKDYMLLRSIPGIGGIVACGILCELGDLRRFNNVKHLAGYIGLAPSVHQSGGNQKVMGMTPRAHRLIRSYFVEASWQAIRADPVMQGYYRKHMGKNVKSIIIKVARKLLSRTLAVIKTEIPYTIGVIE

SEQ ID NO: 399759 - protein, 339 aa, unidentified
MKNIKVLGIDLAKNVFQLHGTDGTGKRVLSKRLSRAKLSEFLANLPPCLIGIEACGSAHYWARLFDSLGHTTKMMAPQFVKPYVRSNKNDKNDARGIAEAVTRPDMKFVPIKRIEQQDVLLLHRARQLVVKQRVAQANQIRGLLAEYGVIIPKGITHIKSMREILENNTDKITAKANQIFLRLYEQFNQYSNQIQIYNKEIEQLAEQDVICKEIMKIEGMGPLSATAAMATIGDAKVFKNGREVSAWLGLVPKQHSSGNTIRLSGISKRGDRYVRSLLIHGGRSVVKNCENKKDHRHIWVANKKQRCGYNKAAVAVANKNARIIWAILATGETYRNVNV

SEQ ID NO: 399760 - protein, 381 aa, unidentified
MRNVCGLDVHKDNVFVCIDKENGEKIQFKTGILTKELDALRDTLVANDVTEIAMESTSVYWMPIWRILENDFKLYLVNPYAIKQLPGRKSDIKDAEWIVTCLRKELIRGSYVPSSEIQQLRQYNRRIFDINKQSVYIQNKIDAALQRCNIRIGNYISNVRAKSYCEIVDMLSEGKTSPELLIVKVHKRTINKWGRETILAALEGVVNKTDCRILKQLKEELDMLRRHKVECLVMLRDICMENYKEQILDIQTIPGIGEQGAMQIIAETGVDMKAFMTAAMLVGWAGLKPRNDESNGKFKSRSTTHGNKYLRKILIECAWGASRTQGCFFNKFSYHQTMVRKKNRQKVQVAIARKILVVIWNILEKGVVYSDVLEKDKTKDN

SEQ ID NO: 399761 - protein, 363 aa, unidentified
MLIIGIDYHPSFQQIAFMDQETGEYDERRLNHSDGEAERFYRELKQRRVSVRVGMEATGYSRWFERLLAELGFEIWIGDAAEISRQRVRKQKTDREDARLLLRLLRENRFPRIWVPSPENRDLRQLLWHRHRLVQMRTRIMNQLQAVAMNEGYRWKKKLFSEQGRTQLEKLSLAPWASRRRKELLELLDQLDPKIAELTTAVEQEAQQRPEVLRLMTHPGVGSITGLVYVLVIGTPDRFPCGKQIGSYTGLIPSEDSSAGRQRLGHLSKQGNALLRYLLGEAAQAAARCNPHWRRRYVYLAMRRHKNIAKAAMARKLAVQLYWMWRNGWNYSQFVEFGSHAGKLATGHGLKKSVVHLIGHPAP

SEQ ID NO: 399762 - protein, 350 aa, unidentified
MQLHTIGIDLGKTVFHLVGLNPRGEVVVRKKFSRKQLLHFTANLQVELIGMEACGGSHFLGRALREQGHEVRLMTAQYVKPYVKTNKSDYIDAEAIAEAVGRPKMRFVPIKSDDQLDLQSLHRVRERWVMRRTAVINQIRGLLLERGITLRKGRCHVDEALPGILEDASAKLSGALRVLLAQLKLELDHLQTRIDEADAVIKKTAGENEACRRLVAIPGIGPVTATAIIAAIGNGAAFKKGREFAAWLGIVPGEYTTGGKQKLLGISKRGNSYLRRLFVHGARAVLQQSAKQSSGLSSWLAQLTTRTHRNVATVALANKLARMAWAVLAKDEPYRPPTLADAATASLACR

SEQ ID NO: 399763 - protein, 313 aa, unidentified
MGTYAGVDVAKAMLDVAVHEGATWQYTNTERGIAALVEQLQRSAVTLVVLEATGPYHHSVTAALLAAPIPVAVVNPRQIRDFGRSLGLLAKTDRLDAQLLARFAAVVQPPVRALPDEATQQLAALVARRRQLVEMKVAEQNRLGVARSARIKKSLQRLVKVLEAELADLETDLNDHVRQSPAWLEAEDLLRSVPGIGPQTARTLLAELPELGRCTGREIASLVGVAPHARDSGTAHRKRHCWGGRASVRRVLYMAAVTAMRCNPVCRALYARLTAAGKPPKVALVAIMRRLLLILNAILKTKQRWQAPVPATA

SEQ ID NO: 399764 - protein, 311 aa, unidentified
MMTPGCYVGVDVAKKHLDVATAPATVSTRFTHDEGGLSALVAHVRTVGPTLVVLEATGGYETDVAAALALAGVPVAVVNPRQVRDFAKALGRLAKTDALDADVLARFAAHVRPEPRPLPDAAQQDLTALVARRRQLVEMLTAERHRLALARARVKRDVQTHIHFLEQRLKATTTDLRDCVQASPVWRAQDNLLQSVPGIGPTTAATLIADLPELGRLSRQQIAALVGVAPLNRDSGGRRGPRVTWGGRAVVRAPLYMATRVATRYNPVIRAFYQRLRAAGKPPKVAAVAAMRKLLTILNAMVKAQRPWQPA

SEQ ID NO: 399765 - protein, 338 aa, unidentified
MQITTIGLDIAKNVFQVHGIDAAEKVVVRKQLRRSQVIAFFAALPPCLVGMEACASSHYWARELTKLGHEVRLMPAKDVKAYVKRNKNDAVDAEASCEAVRRPTMRFVRPKSAEQQGRLMQHRARDLLMRQQTQVINALRAHLAELGIVAAQGREGLKQLLAIIADERDERLPIDARASLIVLAAQLQALHTMIGSIEKRLTVQHRANEASKRLQSIHGIGIIGASAIAATVADPKAFRSGRDFAAWIGLVPRQDSTGGKQKLGPISKQGDRYLRRVGAHSVLRRAKHNPEKYPWLTQLLARRPFKVVAIALANKMARIAWALLASGGHYRPRLAAAA

SEQ ID NO: 399766 - protein, 336 aa, unidentified
MERQYIGVDLHKQFFQACAVNGTGDRLWEMRVPRTDGGMTLFQARCNPMTSIAVEASGPTWAFVDALAPTGAAVCVVDPRKTRLKAGFAAKTDRLDARRLGDALRRESVVSIYVPPPAIRELREVCRGRHQVIRLRTRLAQMIRSLLLRSGVPDVPVRRVFSRRGLEWLETVTLPPDAAASLGRLRHVLVAIQAEAAAADATVIARAMADPIASALDAMVGIGPVLGLTIRAEIGDVTRFRRGAELASYAGLVPRVDASADRYWSGRITREGSPWLRWALVEAARHAIRRPDAIGRWARQLAIRKGTFKARVALARRLCDDIVRQWPRTAEVDRRV

SEQ ID NO: 399767 - protein, 315 aa, unidentified
MRSTVAQSVGVDISKDALDVAIHPGGENFRITNNPEGHRALIKRLKGFDIARIVFEATGAYHRLLQQALVEAGLPWVKVNPRQARRFAQATGKLAKTDRCDALLLARMGTALDLEPGAPASKTVEAMKELVNARDALVKDRVAALNRQAIAVSPLIKRQLAQRLRQINGQIEAVDKHLKMLRDADSDLCQRFDILTSIPGLGEATANVLVVETPELGRLENAQAASLVGLAPLARDSGKTHGKRSIRGGRPRARQALYMPALNAIRCNPEFKAKYKAMVKAGKPAKVAIVAIMRKLLILANALIRGQRKWTPAAP

SEQ ID NO: 399768 - protein, 437 aa, unidentified
MKKKIRKINHSAAGIDIGSSEIFIGLENKPVISFPTFTENYIQAINYLVENKITSVAMEATGVYWFALYEMIEQAGIDVYLVNGRAMRNVPGRKSDVQDCQWLQELHSYGLLRRCFIPDDITRQLRTYTRLRKDHLSLATQHIQHMQKAFDSMNIKLHNVISQINGLSGLRIVKAIIDGERSPEKLAQLCENSILKKKKNLVIASLNGNFRDDYIFALSQAVEAYEFYLQKALECDKKIEELLNLITKDKEDPPNIKKPKPIRHNKPQIDNLHLLLMKLTDGKDPSQVTGLTDKTLLELIAETGTDLSRWPSEKHFTSWLCLAPGKHQSGKKNKNRNKKGHTKAGQIFRNAAFALTKSKHTAIGAFYHRIKAKKGPLIAIKATARKIAVLYYNVMTKGIEFVEKGITAYQQKVKEQRLKYISKQAKQLGYSLSPMIT

SEQ ID NO: 399769 - protein, 386 aa, unidentified
MVIIGVDPHKRLHVASVVEPATNGQVAVLQVEASLAGYRRLLKWGGGFGERRWAVENARGLGRHLAQWLLARGEVVVDVPSTATARVRELSRGGRRKNDVIDAAAAASVAALQGEANPVLAEDLSTVLALLDERRNNLSTQRTRLVNQLHAMFRDLVPGGAPTDLTATIASGLLTRVRPAGPVEAARKQLARDLVAEIRDADQRLKALTVQIADTVAATGSWLTEVDGVGPVVAARLLARTRRASRFPTAAAFASYAGVAPVEVSSAERVRHRLPRGGDRQLNFALHIVALTQVRMRSSSGRAYYDTKIAAGKTHNEAMRCLKRRLADHLWRLMIRDEGSQAAGPGGHQGATLQSSAAGSTPTASSSEKSLPEPATPDSTTGRSAA

SEQ ID NO: 399770 - protein, 339 aa, unidentified
MAILYVGIDLAKNVFAVHGVDEHGKPALVRPSVSRAKLHELIATLPACTIGMEACSGAHHWARMFKQHGHAVRLIAPKFVAPYRMSGKRGKNDAADAMAICEAVQRPNMRFVPVKSQDEQARLCVHRVRQGLVEQRTATINRTRGLLSEFGIVLSQKAATVRREAAAHLEDLPGWANTAIGDSLSELYRLDERIAEYDRHVVLMAREDERSRALMRLSGIGSTTASALVSTIGNARDFKNGRQLAAWLGLVPGQYSSGGKTRLGSITKAGDGYLRTLLVLGAKAVLAAAKSKDDRLSRWAIALEERRGYWKAVVAIAAKNARMAWAVLAKGENFKPLEA

SEQ ID NO: 399771 - protein, 409 aa, unidentified
MEVVHARCAGLDVHKKSVYGCVICCEANGEKQQEKRNFGTVTAELLSLADWLREHAVTHVVMESTGVYWRPVWAILEGQFELMLVNPHHVKAIPGRKTDAKDCEWIAELLQHGLVRSSFVPPTEIQDLRDLTRYRVELTQAQNRVANRIQKLLQQANVKLSSVASDAMGASGQQMIEAMIAGEQDPARLADLAQRRLRAKIPELRLALEGRVRDHHRFLLREFLEEWRALGARIRRVEEEIDRQMAPFEEAVTLWQSIPGVDRVTACNLVAELGVNMAQFPSAQHLASWAGLCPGNNESAGKRMSGTMRDGNKWLRRTLCQAAWAVTRKKDCYLAAQFRRLAARRGMKRAVMAVAHTILIIVYTMLKTGRSYHDLGGNYLEHTNRDQLQRYFVKRLQKLGLTVTVAPAV

SEQ ID NO: 399772 - protein, 342 aa, unidentified
MGKNKHAAGHHVLGIDVSKATFDAGVAGPDSAEDLRTIRVNAYPRTLEGARECLTDQGGPGPLESVVMEATGSYSKQLAGWFRECRPDLPVFIVNPIRVKRFGECLGVRTKTDAQDARVIACYGVGRKFWPSDDRSPELQELDRLHKDRDALVQMVASEHQRLSDAVRCEVAREVHRRVIQQLEAAIHDLDRAIQGQVEAAPDLHHQVELLESIPGVGFLTATKVLASVGDLLRFERSRELSAFVGLAPQERLSGTSVHGRTRMSKKGNPRVRKALYMAAMSAMRKGPFQVIYQRLLEKGKVPKAALGALMRRMLVVMRAVLKSNLPFDPSLLGRGPAKVSA

SEQ ID NO: 399773 - protein, 342 aa, unidentified
MTVTLIGIDLGKHRFHLHGQDALGRLVLRKKLSRQQMLRMLVNVPACRVVMEACAGAHWIARRLAAMGHDAKLISPQFVKPFVQGNKNDFADAQAICEAASRPSMRFVSPRSESQQTISAAHRVREALVRERTAAINQIHGFLLEFGISLPKGPAIIKRLPAVLAEHEVGLPPRLLALIERLREHIKYLDEQVKGVERELAQQLAEDERSQRLLDIPGIGPITASVLAVELGDARQFANARQFAASIGLVPRQYSTGGKPTLLGISKRGDKNLRRLLVQGARTIMQRIQTRTDALGEWVRAMLCRRHSNVVACALANKMARIAWAILAKGTHYQARPAVSAA

SEQ ID NO: 399774 - protein, 344 aa, unidentified
MEHFAGLDVSVKETSVCIVDDTGKIVREAKVASEPEALLAVLKNPAYHFKRVGLEAGPLSQWLYSALAEAGLPVICVETRHMRAVLKAQINKTDRNDARGMAQMMRVGLYRPVHVKTLRSQKLRMLLTHRKLLQSKAIAIDNDLRGTLRNFGLKVGMVGTVRFEARIRELVESLPDLAALIEPLLIVRRTLREQFCILHRRLLAIVRDDEVCRRLMTAPGVGPVVSLTYRATVDVPARFRKSKSVGAVFGLTCAKYQSGEVDWDGRISRCGDEMMRVMLYEAAQSMMRSKKWSWLKAWAMQIARRCGMKKAIVALARRLAVIMHRMWVDGTEFRWTREQSAVAA

SEQ ID NO: 399775 - protein, 405 aa, unidentified
MPYCVGLDWGSVEHAVGVLDETGKVVLSRAAPHDKAGLATLRKDLARLGPPQDIAIAIERPSGLIVDTLVAAGHPVVPIHPNVVKACRPRYSAAGGKSDRGDAVMLADILRTDGPRFRVLQPASDDIKALQAQTRCRDEMVADRVALVNRLSGLLDSFWPGAARLFCSLDTAIARAFLRRYPTPRAARTLTEKRLAAFLAGQAYSGGKSPAALIARLCASPAGLCGPREAQAKGELVGQLVGLLDALIAQTATLTRRIEEAVAAHPDGRIVMSFPRAGRVCAARILAELGDVRDRFQTSGQLAAEAGVCPVTHASGKRRNVVFRWACNHRLRTAVTCFADNSRHQSRWAAKLYADARKRGCRHPHAIRILARAWIRILWRAWKDRKPYDAEHHAAAKKLAQAIGG

SEQ ID NO: 399776 - protein, 361 aa, unidentified
MNATTVAVDLAKSVFQLAVADEHWRVVETQRLTRTQFERWFANRNVSLVIMEACGSAHHWGRWLNGLGIEVRLLPAQYIRAYVKRNKTDAADAAALLDAARASDMRPVRIKSVEQQALQGMHRIRSLWMGTRTSRINALRGFCREFGITIPVGARTGIEAISRVLADPGTAVPDLIRGTAKLLLEEIRLLESRIAQLERELAALARLSPACTTLLSIPGIGLLTATAMVAATSGDVSHFKDARHFSSWFGLTPKEYSSGSIRHLGRISKKGDRYLRMLLTHGARSVLRSSKVAQDAGREVCGVRRWALGVQARSNHNKAACALANKLARICYATLRDKEPFAEEGPRLSKKINRESFVMPA

SEQ ID NO: 399777 - protein, 374 aa, unidentified
MNGSLTSFMLNPITALTEQVIDNKAQGTKKAKRIVLGIDVHLRGYQVASKEDNQAIGAVHNFGNQSEVLLWIEKLKRRVEQIEVVYEAGPLGYSLYRELSAQGISCRVCAPDSSVQKRTRRKTNAIDARELAGRLFNYLNGNQQALQLVRIPSIEQERRRLKSRQHDQLVKERKRLAAQGNSILLSQGWGGIKNWWRPRIFERLSQVVVPEIKELLEVWLELLHKLDEKIQQAKAQQKRSQKGPRPKGLGAGSLEQLESELLDWKRFSNARKIACIAGMVPSEWSTGEGQRLGSITKVGLPAVRRILVEAVWRMQRLQPDYEPFKKWRAALEGKNAASKKKAVVAIARQLIVDLWRLKTGRVSAQELKLVMVGG

SEQ ID NO: 399778 - protein, 360 aa, unidentified
MTTQPGSRHVVIGVDTHKLTHHGAVLDADTGKLLADKEFSATRTGYRGLLAWVCSYGTLVKAGIEGTGAYGAGLQRHLMAAGVTVIEVSRPNRQDRRHRGKSDPIDAINAARAVLSEAATTTPKLRDGFVETVRQIRATRRSAVKARRAALHQIHGLLWCAPEDLREKLSDYDRAALVRRCARLRIPASAHLDDPSITARRMLRRLARRIQVLDQEIAEANEELEAILATHTPTLLTLSGVGTEAAGQIVTTAGENMERLKSEASLARLCGVAPIPASSGNTTRHRLHRGGDRDANSSIHLIVVNRLRWHEPTKQYLARRTLEGKTKKEIIRCLKRAVVRELYRALQADLTQPKLTLDTA

SEQ ID NO: 399779 - protein, 457 aa, unidentified
MTRRKHSRPARDIAPVHPHAAAVDIGATLHVAAVRPGCDPEPVRTFGTFTTDLHRLADWFEQCGVETVAMESTGVYWIPLYEILDQRGFEVVIVNARDAKNVPGRKTDVSDAAWLQRLHEYGLLRASFRPKGEIATLRSYLRQRERLLDQAAAHIQHMQKALTEMNLQLHHVVADVTGVTGLRILRALVAGERDADTLAAYSDPRCKAPAETLRAALVGNYREEHVFALAQALELYEIYQAKVAACDQQIEAVLERLKAANPPPAATLPPARPRRRQANEPGFAVREALHAILGADPTQIDGIGPSLALTLVGECGTDLSAWPSAKHFTSWLSLAPHNKISGGKVLSARTRRSGSRAAALLRLAAVAVGRTATALGAFYRRLAARVGKAKAVTATARKIGVLFYNMLRHGMDYADPGASAYEARYRQRVLSNLRRRAKSLGYVLQKADPASAAIAVS

SEQ ID NO: 399780 - protein, 371 aa, unidentified
MNHVTSIGLDVHARSVTAVALDSITGEVRSQKFGYSPAEIAGWILQLDSPKAVYESGVTGFHLVRELREMGVDCIVGAVSKMHKPASDRRKKNDRNDAEFLARQLMAHNIVEVFVPDVETEGARNLSRALEDVRDDLTRAKHRLTHLLIRWGYAWNEFNEDGKRRGSWTHAHWEWIRGIELPDAAARESLDYYISEVRHIESQKKAIEKRVAQCASRPRWRDRVEALRCMKGIETVTASALAVEAGVFSRFDSARAFASWLGLVPSEHSSGERASRGGITKAGNSHLRKLLVEASWHYTRATKERKRSLYDESVPASISNHAAVGVKRLVERRRHLSCELRKRPVVANVATARELACWIWALGRMSEGALA

SEQ ID NO: 399781 - protein, 405 aa, unidentified
MNAVGIDISKDKSMMAALQPMGYVVLKPKEYPHTGTGLEHLALDILALGEDTRVLMEATGRYHEPVAAVLRKYGVWVSVINPLFIKQSGGGSIRKVKTDKADAMKIAKYALDNWVDLREYIPMENSREQLKLCSRQYNLYMKNVTALQNNLISLTDKTFPGVNELFSSPDRADGSQKWIDFMMTFWHCECISLVSETAFTERYRKWCKRRGYHFSALKSAELYAGSTRHIATLPKNSSTKFLITTAAKELAFAKATLAAMRTEMTRLAQQLPEYETVRAMYGVGEKTAPQLIAEIGDVRRFPRRSSIVGFAGVDPAADDSGKHISKSNPTTKRGSPHLRKTLYQIVCAYLRKAPANEPVYQFLDKKRAEGKHYFVYMTAAQNKFLRIYYARVKECLNTTDSLYTP

SEQ ID NO: 399782 - protein, 351 aa, unidentified
MPHKSTVHAVTAIGIDMGKNTLHMVGLDLRGAIVLREKVSRGRVASRLANLQPCLIGIEAGMATHYVARELAALGHDVKQVPPTYAKPFRQGHKNDFRDAHAVAEAVQRPTTRFVPAKTNEQLDLQALHRVRSRLVSERTAVINQIRGFLLERGIIVRQGLRFLRQQLPDILAKRTDVLSPRMVRIITDLAGDWRQLDERIETVTNEIETLAKSDDNCRRVMTVPGIGPIISSAMVAAIGSGAAFARGRDYSAWLGLVPKQMSTGDRTILGRISKRGNGYLRTLFMQAARVILLRPANWPKHGFGAWLIRAAQRLHPNVLAAALANKLARIAWTVLAQERSYEARVTKAAA

SEQ ID NO: 399783 - protein, 369 aa, unidentified
MLIIGCDYHPGFQQIAYVDTETGELQEQRLPHPEEAERFYRDLAAREARVRVGMEASGHGRWFERLLAELNFELWVGDAAAIRAKRVRKQRTDRQDAQHILNLLVEDRFPRIWVANWENRDLRQLLWHRHRMVQARTRVMNQLQAVALNEGLRCKKRLWREQGRQQLESLTLAPWTSRRRRELLELLDRLNPTIAELNQVIEQEAEKNPEAQQLMTHPGVGARTALAYVLIMGDANRFSRGKQIASYLGLVPTEESSGDRRRLGHISKQGNCLLRFLLVEAAQVTVRTDAEWRSKYFHLAMRRGRKIRQGGDGQTVGSGFVLDVASKMELRAVAKVRFARGTAWKSLWCAVNHRRNDWASRSSSRRSLK

SEQ ID NO: 399784 - protein, 343 aa, unidentified
MKIHALGIDLGKTVFHLVGLDASGQVVVRKRCSRTQLLAFTANLEVQLIGMEACSGAHFLGRALRAQGHEVRLMPAQYVKPYVQTNKSDYIDAEAIAEAVQRPRMRFVPIKTEEQLDLQALHRVRERWVMRRTAVVNQIRSLLLERGLTLPKGRSHLDEQLPRILEDAELNLSGSFRVLLAQLKLELEQVAARIEQMDRVIQKTAKENEACQRLTEIPGVGPVTATALIGAIGNASAFGKGRALSAWMGIVPGEYSTGGKQKLLGISKRGNKYLRRLFVQGARSVLQQRHKQAPGLRDWLARLLGRTHQNVVVVALANKLVRMAWAVLCKNERYRAPVLAMTN

SEQ ID NO: 399785 - protein, 420 aa, unidentified
MAHPPTQEFAAFVGLDWADTSHAVCLQAAGSDTRESSVLAHTPEAISAWAGTLRHRFGGQPIAVCLELTKGPLVSALRAHDFWVLFPVNALTVAKYREAFTPSRAKDDPSEAELQLELLVKHRDTLQQLRPQSATMRTLDQRVDFRRRLVEDQVRLPNRLTRALNNYFPQVLHWFADKDTTIFCDFLTHWPPLKAVQLARRATLERFFRQHHVPTRIIAQRLEAIQTAMPLTTDAGVVTPHVCLVRALVAQLRATLQAIEDFDHAIAQLAPTHPDFALFQALPGAGPVFAPRLLVAFGEQRERYASASDLQQYAGIAPVTERSGNTCWVHWRLQCPKFLRQTFVEWAGESIRHSFWARAYYAQQRDKGKTPQAATRALACKWIRILYRCWQTHTPYDESTYLNALVRRGSPLIHNLANVS

SEQ ID NO: 399786 - protein, 451 aa, unidentified
MKKNKVKYSMKDLAALEQINLNAAGIDVGAAEIYVAVPPGRDEVSVRVFATYTADLAAAADWLSQCGITTVAMESTGVYWIPLYELLESRGFEVYLVNARHLKKVTGRKTDISDCQWHQQLHTYGLLAASFRPPEHICAVRALVRQREMLIRYRAAHIQHMQKALQQMNIQLTQVLSDITGVTGLQIIRAIVAGQHDPQQLAQYRQSQCQKSQEEIVKALEGNYRQEHLFVLGQALTLYDFYGQQLAECDQELAAMYQAFEPAEPATDPPDPKRGKRRKNQPFFDLAQELYRLTGVDLTQIDGLDALSVQTILSEVGTDMSPWPTVKHFTSWLRLAPNNRITGGKVKSRSSGKTDNRASTAFRVAAQSLARSDSALGAFYRRIKAKHGAPTAIVATAHKLARIFYFMLKRREPYRGGSSAEYEQEHKERSIRYLQRKAAKLGFQLVSLEAT

SEQ ID NO: 399787 - protein, 347 aa, unidentified
MKVLIGVDPHKVSLAVAAVDEATGELLGRVGFSQDRSGLRRLERWVKRFPERRWAVENARGMGRHLAGKLAAAGESVVDVPPKLSARVRVLSSGNARKNDGVDALATALAASRNERLATVVSEASSEVLRLLSERRGDLVAERTRALNRLHGLLRDLLPGGVAGKLSADRAARILRSIRARGGASTCMRRRLASEVLRDVRTLDRKIADLDVRIEAEVDACGTTLTEIFGVGPILAATIIGTVGDVARFPTKAHFASYSGTAPVEASSGEVVRHRLSLAGNRHLNYALHMVAVCQARSQARGGAYYRKKIYEGKSSKEALRCLKRRVSDAVFRSLVADSKAPSRSAA

SEQ ID NO: 399788 - protein, 346 aa, unidentified
MKFYTGQHKFYCGVDLRARTMFLCVLDERGYPLLERNIKTEPELFLKSIAPYREDVVVAVECMFTWYWLSDLCSREKIPFVLGHALYMKAIHGGKAKNDRIDANKLAVLLRGGMFPKAYVYPPKMRSTRDLLRRRMFLTRKRAALITHIKCTFAQYNLPEPEQNVSRVSQREGVAEQLPDPGARRNVQLDLDLLDFYDQTLTKLEQELTVIAKDHDPNSYFRLRSVPGIGKILSLVILYEIHDINRFPSVQDFASYCRLVKPAKESGGKRLGSGGAKIGNVHLKWAFSEAAVLFLRKNEAAKIYRARLVKRHGKAKSLTILAHKIARAVFFILKRRTVFEAETFFA

SEQ ID NO: 399789 - protein, 381 aa, unidentified
MYYIGIDISKFKHDCAVIDDSGEIVTPSWSFTNDAEGFSQLKLLLNSLDTETRIGLESTGHYGMNLKLFLESNNFSFMEFNPLLINRFVKSKSLRKTKSDSIDCMMIAHYLMTVEYKPYPSSFYHTEKLKSLTRFRDSLIRFRSRQLVELTNILDKVFPEFKPFFGSRFSVTALYILSNYSSPEKIANMNSKSYEALRKLSRGRFSTVDFAKLKQLAKNTIGTTEDYLLLQMQIVLDIYRQLDSKVDETEVSIKECVSDMNPPMLSVPGIGIESAAIILAEFGDFSKFKNASQMLSFAGLEPGYFQSGTSETTGKMVKHGSSYLRYALMNCAQTVVNYEPTFAMFYSKKRAEGKPHRVALLKSCYVSSTHCKLKTLHMMPI

SEQ ID NO: 399790 - protein, 314 aa, unidentified
MESPLIYVGIDVAQDHLDIATTSDEAWSIKYHPRALTSLVRRLNKLAPQRIVVESTGKLEQELVVVLADAKLPVVVVNPRQVRDFAKATGVLAKTDRIDAHVLARFGEAVKPEVRPLADEATRDLMALVARRRQLHQMLRSEQQRLLRVAKSLRKSLEQHISYLQKQIEQLDDDLHDRLTQTPLWQEQLDLLQSVPGIGPTTAATLIAELPELGRLSRHEIAALVGVAPFNRDSGKWSGKRSTWGGRAAVRSALYMATLVATQHNVTIKAHYQQLVVRGKAKKSALVACMRKLIVILNTMLKTHQPWTIKPTVA

SEQ ID NO: 399791 - protein, 480 aa, unidentified
MNVKARRTKKQVNVENQAITLLSKEELDRKIEAIKKELRSYTWRDLETNGKFAKNDKLSFITDDMLIAGCDIGSETHYIRAIDVRGRELSSGAFEFSNTSEGFENAKAWVLALAAKNDKKQIVLGLEPTGHYWFALAAWMISNGISVVQVNPYAVKQSKEIEDNSQLKDDRKDPKLIANLVKDGNYGMPYLPEKVYADMRRLSMFRDQLTEDRIRNINRLHRELKIYFPEYMDAFGKIDGAFTLEVLKVSAIPTDITALGAEGMKNIWHNAKLRGRGYSRANEIVSYAKKSVGLTDGTDAGREAVKWYAEQILRLDEQLAEIESALHEKCREIPYAENILAINGVGENILAGILAEMGDISRFDDVKEIQKLSGMGLVACSSGKHKGQTKISHRGRKRLRYWLFQAAKSAVSHADEFKQLHEYYTTRSNNPLKKMQSLVVIACKILRVIYTILKTGTTYDPQKLLKDMKHPAASQAPMAA

SEQ ID NO: 399792 - protein, 330 aa, unidentified
MEKVLQFVGADLSKKTIDLVIHPTKNHLCIENSKLGFKQMIRWLKQSRKDLSDIIVVMEHTGLYSYCFEKFLFEKGIQFSKVNPVDIKFSIGVTRGKSDKVDAARIAQYGAEKPDRLKIQTQISKALESLKMLNTSRDKLVRTRAGLKTSIEEFRNMGMSDREPALRAQLRVINTLDKEIKHLDNQIQLTIHQESELKKTYSLLTSIPGVGAVVATNVIVKSENFKRFSNSRKLACYSGIAPFEHLSGTSIRGKTRVSHMADKSMKTLLDLAAKTAIRCDPEMRAFFEKRTAMGKPKMSTINIIRNKVVGRMFAVVNRQTPYVIRLIEAA

SEQ ID NO: 399793 - protein, 377 aa, unidentified
MNRRRTPKVVDATPVEPLKQMNLSAAGLDIGSQAIYVCVPADRDAHPVQVFGPFTRDLYALADWLTSCAVESVAMESTGVYWIPVYEVLEQRGFEVYLVNARHLKDVPGKKTDVLDCQWIQQLHTYGLLRASFRPAKDICALRALVRHRENLVRYRSAHIQHMQKALQEMKVLLTQVVSDITGVTGMCIIRAIIAGERDPQVLAQMRNQPCKHSEDEIAAALQGHYKREHLFVLKQALAQYDFYDRQIRECDAELEAMYAELPPAEQDGDDVPPPPRPRCTKRRKNQAYFDLATALYRAVGVDVAAVDGLDALLAQEILTRIGFSVDAWPTVKHFASWLCLSPNNRKSGGKVLSRRTQKTKNRVSQAFRIAVIGHIV

SEQ ID NO: 399794 - protein, 343 aa, unidentified
MHITSMGIDLGKTTFHLVAMGERNKILVRKKFSRAGLLAYTANLPVSLIGLEACAGAHFLGAALREQGHQVRLIPAQFVKPYRKSNKNDFLDAEAIAEAVTKQNMRFAQIKTQEQLDIQAMHRVRDRLVQRRTALINEMRGFLLERGITFAARPIHLYKNLLAVIEDAEQNLSPRMRWLLQRLWQEWKQLDADIKTITDELERLSKEDPLCRRLRQIPGFGPLVSTATVAAIGNGAAFRRGRDFAAWVGVVPRQYSTGGKQKLFGISKRGNVYLRRMLIHGARAVLLRIKYDTAGFGQWVHRLEARAPRNKVIVAIANKLARIAWAVLSSGNEYRHQPLHSAA

SEQ ID NO: 399795 - protein, 412 aa, unidentified
MSLALPEALFFTGIDWAAATHAVCVMDAAGKIMTEFTIEHSADGIAALIRRLARYGDPADMPAGIERPNGQLVDLLLEAGHPVVPVSPNAIKTWREGEVLSGAKSDAGDAAVIAGYLRLRQHRLRVAAPYSDQTKALRTLMRTRDDVVVMRVAATNQLSALLDAHWPGARAIFADVESPISLAFLTRYPTPAAARHLGEKRITAFCASQGYSGKRPAAVLLARLRSAPAGTTGPALTVTLRDAVLALVAVLTALNTAVKDLDRSAAARLGEHPDGEIFTSLPRSGQINAAQMLAEWGDCRQAYGGPDAVAALAGCTPVTKESGKHRAVHFRWACNKRFRKAMTTFADNSRHASPWAAKIYNDARAAGKDHPHAVRILARAWIRVIWPCWLNHTPYDPARHGAAAALTEPIAA

SEQ ID NO: 399796 - protein, 349 aa, unidentified
MPKSNTAVVTIGIDPGKNTLHLVGLDARGGIVLREKVARAKIVSRLANVPPCLIGIEVGMGTHYVTRELLALGHDVRQVPPVYAKPFRQTHKNDFRDALAIAEAVQRPTTRCVPPKTDEQLDLQALHRVRYRLVGQRTAIINQIRCFLLEHGLTVRQRLHWLRHALPDILAQRTDVLSPRMVRILEDLAQDWRHLDDRIEAVSGEIEALSRNTELCRHLMTIPGIGPIISSAVVAAIGNGTAFTRGRDFAAWLGLVPKQISTGDRTILGRITKRGNRYLRMLFMQAARVVLLRPRNWMKNGYGPWLAAAAQRLHHNVLATALANKLARIAWSVLVQHRVYEARLSPAAV

SEQ ID NO: 399797 - protein, 408 aa, unidentified
MRIFVGDDWAEDHHDVHLMSNDGVRLEARRLPEGLEGIQTLHELVAAHADDPAEVIVGIETDRGLWVTALVAAGYQVYAINPLAASRYRDRHNVAGAKSDKGDAKMLADLVRTDRHNHRRVAGDTEQAEAVRILARGHQNLIWVRTRHTNMLRNALRDYYPAALKAFTDLADRDALAVLAKAPTPAQGAHLSLSQIEAALKRGGRQRNLRSRAIEIQAGLRAGQLTAPDAVADAFAATTIAAVGIITELNRQIIQLETTLAASFEQHPDSDIYHSLPGFGVVLGARALGEFGDDPNRYANTKSRRNYAGTSPLTIASGKNKAVLARHVRNRRLYDAIDQAAFCSLTQSPGCRTFYDEHRTAGDRHHQALRALGNHLVSILHGCLEHRCLYNEDIAWGHRATTSAPRAA

SEQ ID NO: 399798 - protein, 318 aa, unidentified
MLIIGCDFHTRFQKIAMMDTTTGELVTRRLEHGTGEAERFYAALAAPVRVGIEATLATQWFEKMLRHYGHELWIGDAAEIRAAMVRKQKTDDRDALHILDLLIQNRFPRIWVPSPAERDVRQLVRHRHKLVRFRTSVMNQLHALAMGQGLCLRKKLWTTVGRQKLESLTLDPWASRRRRELLELLDQLDPSIGELDRAVISEAESRPTAVCLMQQVGVGPVTALAFVLTVGPVSRFPNSKKLVSYLGLNPSEESTGGRQRLGAISKQGNTMLRCLPVEAAQTSARLDPELRRNYQRLKLRRGNSGVATPRGDTFAEKP

SEQ ID NO: 399799 - protein, 408 aa, unidentified
MTSRAKQPERYVALDVHRNYVAVGAVNAQQEVVLAPRRLSLDELLPWAQQHLHVSDAVVLEAMSNAWHVHDQLSPLVGSVTVAHPLLVKMITASRVKTDRHDVLRLARLLAANLIPAVWVPPQEVRYLRRIVAHRRNLVRQRTQLRNRLHGVLEQHNIFPPEGDMFAAERRCWWEALPLPSIERLLVLHNLALLDALTPLIVQVDQEIMQLSTSERWQSNATRLVQLPGISVINAMTLLAAIGDISRFPGPKQLVGYAGLGASVHDSGQVHRGGRITKQGRTEMRSTLVEAAWMAVRYSPYWAERFETLARRIGRGKAIVAIARRLLVTVWHVLADESVDRHADPQAVARKFMHWGDDCRREARRGLSRVEFVRRRLTDLGLASQVPKFTYVGQVYELASSQPASAEG

SEQ ID NO: 399800 - protein, 338 aa, unidentified
MKKNYFVGIDVSKHTLDVAFITEQNVVKLPACWKVFDNNDKGLSAMKNWLKSNDVAFDASTLFVIENTGLYHRRLVNFCNKYGLPLCIENGAQVKWSLGIARGKSDKVDSRRLATYAVRFADRLKPAAVLHEGIQAIKDLITLRNRHTIQLSSLRSCLKELKATSNIQSVNELEKIHLSLIKAMKATIQKIEAAIIKKIQANELTKRQYELLLSIRCIGPVTATYLIACTNAFTMCSNGKQLACYCGVVPFEYQSGISIKGKHRVHKMANKNLKALLHLCAISAIKYVEEIKSYFNRKVEEGKHKMSIINAIRNKLVLRAFAVIKNDRPFVENQCMAA

SEQ ID NO: 399801 - protein, 351 aa, unidentified
MIIIGVDYHPSFQEIASLDKETGEYDERRLNHGEAEADKFYRDLKQRGVGVRVGMEATGQSRWFERLMTELDFELWIGDPAAIKAARVRKKKTDREDARLLLRLLREDRFPRVWVPNPENRDLRQLLWHRHRLVQMRTRVMNQLQAIAMNEGVRLRKALWSKGGRAKLESLELAPWAARRRQDLLELLDRLTPKIEPLSVAIEQEALKRPEVKRLMTHPGVGPITALAFMLIIGTPERFRCGKQLGSYLGLVPSEDSSGGKQRLGHISKQGNSLLRFLLVEAAHAAVRHDPDRKRRYLHLAMRREQGIAKVAMARRLGVRLYWMWRKGWDYQQVLQFGSHAGDLVLVRGVQ

SEQ ID NO: 399802 - protein, 355 aa, unidentified
MKYYTSTTQYNCGIDLHARQMYVCVMDRQGKKLVHTNVKNNDFGFFLKLVEPYKHDLTVCCECMFGWYWLADACQAAGLTFVLAHALYVKAIHGGKNKNDRIDSEKLTHLLRSKLIPPSSVYPSEKRPLRALLRQRLFYVWRRAELLARIYSHQLAHNRTPAKQTRRVRDSWEEQLLAAEDNPLRQLALKNDLAMIKHFDHQISQLEEELQRQTKKVASREYALLQTVPGIGESLGLTILYEVGDIERFPTVKDFLSYCRLVKGTVASAGKIKGLRGAKLGNPYLRWAFGEAAVIAKRDHFLIRPLAQRLEQQRGGNKFKANTVVAIKMARAVYFMLKNKTVFDPERLVAALAKK

SEQ ID NO: 399803 - protein, 424 aa, unidentified
MKVTYQTCCGVDVHKSFLVATIIKTTTGIEPSYQKKRFSTFNNSILDFKSWLLENECHDVCMESTGKYWVPVFNLLEDQINVTIANPKWVKAVKGNKDDTKDSKWIGDLFRLGLVKSSYIPCRLIRILREYTRYRYKLVSCRSSEKNRYQNALTVCNIALDSVVSDIFGKSSSSIIDYLLEQSGTMINHEEIASKLLKSLKSKEDAVIESIEGYQMTDAQKYRMRLIRAHMDYITAEINDIDKQIESLISSDPDYDKAIRLLTTIPGVKHDSAITIISEIGIDMSQFCNSKRLCCWAGLTPSNNESAGKKKSVRITHAGVYLKPALVQCAHAAVKSDKSPYYKTKYESLVKRRGKKRAVIAIARMILIAIYRMLSTGEVWNPSDLYKIDMPAPLAEKQKAKAIKQAKKLLQKEGLLPPDEPLAS

SEQ ID NO: 399804 - protein, 332 aa, unidentified
MLKLLSRWRAEAEQKGHRITRIAVAFEAGHDGFWLARWLAAQGIESHVIHASSVAVTREHRRAKSDRLDTELLKRGFLGWLRGERGHCKMVAVPTLAEEDAKRPSRDRETLVGEASRIITRVKAAFVRLGIRSFNPKLKAAAARLGTLRTPEGEPIPPNTLAALKRDLERHRIVKQQIREIEQARLALLEKAPAKGPNAMVLLLARVVGIGIETADMLVQEVLSRNMRDRRAVARYGGLTGSPNESGAKRREKGLARSGNARVRHGMIQLAWRFLLFQKDSALAQWYRQRTADAPSTRKTLIVALARKLLIALWRLARDGVVPEGVRLRPAA

SEQ ID NO: 399805 - protein, 402 aa, unidentified
MKVCGLDVHKDSIFCSIYDGKTSSEVKVFDSTTRFIYEMGEYLMTEGVNQVAMESTSIYWIPVWNILMEMGFELTLVNPFLIKQMPGRKSDIKDAQWIATLLHKNLIRGSMIPNSTIQELRFYSRKYMRMQQDKCKLLTKMDRIMVMANIRISSCVSKLTNKSVIIVIEALIKGETNPDNLVKLVYGNTKNKQSGKLREALTGYIMDHHRKSLKWEKESYDILERQILECIKEMERICNEHYKDEMLLLQTLPGVSKISAICLIAETGADMSVFDNSGKLTGWAGLRPRNDESAGKFKSKAITKGNKYLRAILIQVAWGASRTKGSYFMEKYHRLAMRKSNKKAIVAIGRKILVIIWNMLKEKKPYNPNLVSIYDPIKIERQLAYHRKEMEKAAKLLHKEII

SEQ ID NO: 399806 - protein, 430 aa, unidentified
MKSNTQNAKIEAITEKTLVLGIDVGSEMHYARAFDYRGIEYSKKPFKFSNTEAGFVTFKEWILNLKERHEKDKVVPGMEPTGHYWFNLGKFLQDNEMKPVLVNPHHVKKSKELDDNNPTKNDRKDPKVIAGLVREGRYMIPYLPDGVYADLRTASNIRFQLQAELTRIQNRISRWFNIYFPEYKTVYGKPDAKSGMLILKAAPLPEDILTLGIDGVNQIWRDAKLRAVGKARAKILIEAAEHSVGSKEGAVSGKMEIRMLLEDYESRNTRLQEVMVLIEELVRKIPMTEKLLEIKGVGIRTVSGFLAEVGDISRFNNPKELQKLAGLALVENSLGKHKGETTISRRGRKRLIYLLFEVAMSLVSKNQEFRELHNYYTTRRLNPLKKMQSLMAIAAKLIRVFYAILTKGVDYDPKKMVSDIKRPAVYLQAA

SEQ ID NO: 399807 - protein, 327 aa, unidentified
MNATRIGLDIAKPVFQVHGVDKLGQIVLRKTLKWDQVMRFFAHVPVGLMGLEAGGGSHDWARELTRLGHEVKLIAPQFVAPYRKSGKNDKNDAEAICEAVGRPNMRFVPIKSEEQQAVLMIHRARELAVSERTALVNQIRGLLGEFGVVVAQGRERFEKELPLILANLDNGLPTLARETFTELAARLRELNEWITRDDRRLQQIARESEPARRLMTVEGVGPVTATAVVASVGEGHEFHSGRQFAAWLGLTPRQSSSGGKTRLGGISKRGNVYLRTLLIHGARSALLLTGSRPDRKSQWVEALKARRGPNIAAIALAAKHARIFWAM

SEQ ID NO: 399808 - protein, 351 aa, unidentified
MQENQEYVGVDVSKDTLDMLVYSTSEIRSYTNNDAGIAKATTWLKQLKPAITVMEATGGMEVSLYIALQEANLPVAVINPRQIRDFAKSVGILAKTDKVDAKVLARYAATIQPEARPLPDEEARRLDTLVTRRRQLVGMITAEGNRFATTRDKMMKQRIHAHIDWLKQELAAIDKDMSQMMKDNPRWRAKDKLLRSVPGVGPVLSTTLIAELSELGRLNRKRIAALVGVAPLNRDSGKHRGKRSIWGGRCSVRQPLYMATLTAVRFNPKIRSFYEHLLANGKEKKVALIACMHKLLTILNAMVKHSSYWSCTYPDLNNSVIPVPTKTVARWERIKVRVNFAFSSVILVFNF

SEQ ID NO: 399809 - protein, 469 aa, unidentified
MNHRRLVGIDLGIATAHTVRVLDGEGTIVAKRMAWPTRESLAAAEAAALAGCPDGTRLEVVIEPTGPAWLPIAVFFCGRGHLVFRVSSQKAADLRRFLSRHAKSNGIDADTLARLPLFDPAGLQPIELPGAARAALDRRVRAADRLTRQAAERKRRIRDLTRQVLPMSPLGADLGVTDLAVLERYADPRALAGLGLEQLTELIARASRRQQGAERAGQWLDAARASLDLYAGHPAVDYAGLAAEIATEIRLLRAVQAEAAAHAAERETRYRQVDPAQLARTLPGLADVGGPALTSCMGNPARFAHGKQFRSFTGLTPKASETGETDRKGQPISKAGPSLLRTTLVRAADNARRQDPQLARIYYQQMTERGKDHLGAICVVAASLAERAWTVMRRGTPYIICDSDGQPVSPAQAKAIIAERWTVPPDVRARRRSKKKGKAPQKVLAGQYARGGLPPTTTPRHGDLVKKSA

SEQ ID NO: 399810 - protein, 410 aa, unidentified
METIIERPAGLDVHKAQVTACVRVPGEGGSREQHVAEFPTTVRGLLTLADWLAAHRVSQVTMEATGVYWKPVWAILEGQFELLLVNARHVKQVPGRKTDVSDAAWLCRLAEAGLLRASFVPPKPIRSLRNLTRYRKTQIQERSREANRLHKALEDTGIKLDCVASDILGASGRAMLGALIAGTTDPAVLADLARGRMRTKIPALREALEGRFDDLHALWIGAILAHVDFLDEQIDRLSDAIEEQVAPFASAVELLCTIPGVQRRTAEVIVAEIGIDMSVFATAKELASWAGQCPGNDQSAGKRRSGRTRKGSKWLDWALEESAMAAVRAKDVHLAAQYQRLRPRRGHKKALGAVKHSIIVSCWHMLTTGECYRDLGGDYFARRDPARTTKRLVAQLEALGHAVTLQEVAA

SEQ ID NO: 399811 - protein, 323 aa, unidentified
MNKDIKYFGIDISHLVFDVTDSDGNYYQFKNKLSGFKKFLKLLDSKSHCVMEATGYYHYQLAYYLFEEGIKVSVENPLVVKRFIQMGLSKIKTDKSDSKLICAYAEQVELKLWAGSSKEVQETLQITRALSVYTKQRTMLKNKLHGESVLGEPSKFVVRSLKRSLKQLDKEIKALEDKLLILVKASHQDLFTRIKTIPGIGRKTAIMLIVLTGGFERFSSASELCSYAGLTPVIRQSGSSVKGRPRISKMGNQKLRNLLFMCSFTACKYNKACRDLYERIVAKGKSKKLALIAVCNKLLKQAFAIAKSGLIFDKEYKSTLVKN

SEQ ID NO: 399812 - protein, 367 aa, unidentified
MEKSSKVFVGMDVHKESIEVTLAEQGGEVRRLGQIGGDRGSLLKMARKLQSKGGERVFVYEAGPCGFWIYRELAAIGERCMVVSPALVPKRAGDHVKTDRRDSERLASLARAGELEAIHVPDIRDEAIRDLVRGRDDAVIAQRRVRQQLKALLLRNDIRYVGRTSWTGAHRRWLSELKLPEPAQRIVFEEYVDAITVATGRLERLTRAIETETLAWRFAPVVAALQAMRGIQFVHAVTLIAELGDLTRFGSARQLMGYLGLVPREASSGEHRRQGSITKAGNSYARRALIEAAWAYRHPARVTRIIATRQTGLPKTACDIAWKAQLRLSAKYRRLNARHLHHNKIVVALARELSGFVWAIGQCVKPQ

SEQ ID NO: 399813 - protein, 351 aa, unidentified
MTKTCNRARPAYVFGVDIGKTVFHLVGLDRDGAVIQRTKFRRETLLQFFERAVPTIVGMEACPGSQWLARKLQKLGHDVRIVPAKFVKPYIKSNKNDLIDAEAIAEAVTRPTMRFVQVKTTEQVDTQALHRIREQFVSRRTKMICQMRAFCLEYGVALRPGAGCFKLDLPAAVANTDNDLTPTMRRFLTDLMEDLSALEHRIDAVTKEIEALAAKDDTARRLMSIPGIGPLSATAIIAAAGDGRQFRKARDLSSWLGIVPKQMTTGGKPTLLGISKRGNPYVRKLVIHGARSCLINLNRQRDRLGAWLDTLEARMHRNKVAVALANKLVRIVWVILTKPGATYSRTDPRFA

SEQ ID NO: 399814 - protein, 463 aa, unidentified
MSRKTTRKTQKKVVALVEGEGRRKSGPIMGVDVHKSVLAWCVVSETSLLDEGELPNTLEGIKKLQAVIKKRQVDSVAMESTAQYHFKLLYTLIAAGTKVLLANPQQTKDTQGKKTDKLDAKRIAIAHRDGRLKPSVISPQEIMSLRKAMRAHTRLVEDQTKIKQRLLQVFHQKDAGFNTMLATDWGTNVLMGLFDKDDMDSLVDAHLPKGRAKQRDDLIAALARFKDSMDEVERQVFRSELEMLRFIEFQKERLQLVYCQICKQNPAFTRTMRLLISIPGIGPDTAAKVIAEIVDIAYFPSPKQLVKWTGLAPRVHQSGHRKNITGRIHKGGNKHLRRAVVLACQNIYARVDAGNPLHVFVRRKKEEKDAYWLALCAAARKLLVMIWYMWTGGKPWMPRKSATSLEVSVKRVIASKLAMLDRSIRRYEKVKDKLARDTTEALRAADPGGLSPKRLVLALLESV

SEQ ID NO: 399815 - protein, 403 aa, unidentified
MNNVAGVDVSKGKSMVTVLRPFGEVVAKPFSVGHTGSELKELANYLKNLDGETRVVMEHTGRYYEPVARFLHEEGIFVSAVNPKLIKDYGNNTLRKVKTDKADARKIARYGLDNWVELRQHTPMDTIRMQLKTLNRQQGLYSKTKTMMKNNLIALLDQTYPDVNALFDSPVREDGSQKWVDFATTFWHVDCVRAMSLTAFMERYRKWCKRHGYNFSQSRAIEIHMEAQDLIAMLPKDALTKTMIRQAIDALNAVSKSLEQLKVEMRTLAAQLPEYPVVMAMRGVGNSLGPQLMAEIGDVTRFAHRGSITAFAGVDPGADQSGTHEAKSNRTSKSGPPELRRALFLVMDCLLKTMPQNDPVYRFMDKKRAEGKPYLVYMTAGTNKFLRIYYGRIKEYLASLEGN

SEQ ID NO: 399816 - protein, 416 aa, unidentified
MARVVNIVYPVCCGIDVHKSFLVACIATTDGRNYTTHQIRRFSTFKGDLQRLADWLCANNCKDVCMESTGKYWIPVFNVLEKTCNVCLTHPKYVKAIKGKKTDKKDAKWIAELFKCDLVRSSFIPPPLTRHLRELCRYHAKLTYMNSSEKNRGQNCLTVCNFKLDDVFSDVFGVSATRVLDKLIEFGHSDFDVAPLLNKRCKATPDQIKAALDGELSEAQALKLKLVRQHMDNLETLQTTLEASAAQFAAPYQPQINLLMTVPGIGSQFTAIRILAEIGVDMSVFETAKQLCSWAGLSPQNNESANKKKTTRIARARAFLKPLLVQCALAVVSSKKYPWLKDKYQTLKKRRGHKKAVIAIARKLLSAIWNMLIKNEVYNHELYQKSDPPPVNRVLTPEQAFDLLRKHGYQIAVSVA

SEQ ID NO: 399817 - protein, 367 aa, unidentified
MKQQTSATSETLIEGRNIIDFTGKTIYVGIDVHQKDYQVAKVYDGICLGNHRMAANSEALIEHLRSHYQGADFKCVYESCAWGFNLQRKLTAANMECMVVHAADVSTNDKERKRKTDKVDALKLARNLAAGELKAIHVPDETIQKERNLIRYRTRLVGDINRSKNRLKSLLKYQGIEIPAPYLKNNWSRNFMAWVEDQAAKDDLLKYRLLLMLEQMKLLRQLLLKIERKLGVLRKGKYESKAKLAMSVPGIGPLTAMLFLLEVGDVKRFKGFDTLNDFVGFCPDTASSGETDRDKGISARRHKQLRSALVEAAWQAIRIDPAMMNTYQMLTKRMKGSQAIIRIARKLLRRLRAVLLTGIEYQKGVVA

SEQ ID NO: 399818 - protein, 279 aa, unidentified
MEITTVGLDLAKNVFQVHAISNTGEVIVRRALRRAQVMPFFSKLPPCLIGMEACGTSHHWARELVALGHEVRLMPPAYVKPYVKRGKTDAGDAEAICEAVTRPTMRFVPIKSVEQQAALALHRTRDLLVRQRSQLVNMVRGLLAELGIDIPKGITHALAFVRRAVAGDVGDVPVLAASVIGALAEQAIEVQGRIRQLERDLLAWYRANDLAQRIATVPGVGLLGATALAATVTDPTHFRSGRQFAAWLGLTPLNNSSGGKERLAQRWGISICGVSWSPA

SEQ ID NO: 399819 - protein, 377 aa, unidentified
MACDFLEYVDALPSAQFRPSIDIEDRLTRKGPHMSLTIGLDIAKHIFQVHAVNDSGEPVVRRKLRRSEVLAFFAKLEPGVIGIEACGTAHYWGRALSELGHEVKLMAPHYVKPYVKRSKTDAADAEAICEAVERPTMRFVPIKTTEQQAIQMVHRARSMLVRQRTMLVNAIRSHLAEFGLVTGLGLAKTAALVAEVLKAGEDECPIPEVARTVVRCLTQQVGLLDKQIRRLDVELLAWHRSNAASKLLASIPGVGIVTATAIAATVPDPAYFESGRAFAAWLGLTPRANSSGGKDRLGRITKMGSQYIRTLLVVGATAVVRSARIKDGSWLSEWARSLLEKKPARLVTVALANKMARVAWAVLTRGQQFRPSLVAAG

SEQ ID NO: 399820 - protein, 410 aa, unidentified
MIYVGIDWADDHHDIVITDDSAKTLNQFRINHTPDGFTLLHTTIASHQKSPADVLIAIETNRGLLVHELLRAGYTVYAINPKAVNRYKDRHVLSKAKSDILDAQALAHLLRTDRHRFKALVPLPEDYRLLDRLCGDLRKLVDEKSRIINQIISCLKDFYPKALEIFSLDSQIFIDFLKTFPDHNTLSACKKKTFLAFIKKHRYPYPDKIDEFWKTIQSPTLQPDNIAARAGKLRLLMLLDQLENLKTHLNYYEQEIQKILNNLPESNSIKSLPGVGNRLAPELVAALGPNNKDSRHRFHSAGEIAKLSGCVPVIKQSGKWEKVSIRYACVRPRRRTFSDWAFTSLKASSWARAYYDYHKARNQSHFTILRNLGKKWIKILFAVWSTGTSYDEALHIQNLKARNIPWAMTL

SEQ ID NO: 399821 - protein, 376 aa, unidentified
MSKYTKIVALDQHRDAITVAIAGPGREKPRLYGQIASTPAALVQLAQRLDDGHTRLRFCYEAGPCGYGAYRQLTAMGHECTVVAPSLIPRRPGERIKTDRRDALRLAQQHRSGELTPVWVPGVEQEAVRDLVRCREDLKHTVRQLRQRLHGFLLRHGRVYPGLSKGTQAYWRWLETQRFASPYQQVVFQEYVDAVRQMEARVAALETEMERARQEWSLAPLVDGLVALRGVATITAMTVAAELGDLTRFDSPRQLMAYVGLVPSEHSSGGTRRQGGITKAGNAHVRRVLAEGAWCYRFPARKTPALQRQAERTTPAVQALAWKAQKRLCARYRHLSNRGLPKGKVCTAIARELLGFIWAIAWELKPAAALPLRRRA

SEQ ID NO: 399822 - protein, 343 aa, unidentified
MNKFAVAGVEVSADVLVVALDNGQLRSSEFPNTAAGHQQLLRWLRKQAAQVRLCMESTGLYGLDAALVLQQQPGVEIMVANPRSVRHFGCAMMQRSKTDPIDARLLAEYAQRMPFQPWQPPSRAGRQLCALARAIHQLTEINSMQKNQLHAAGSTATTPKIVLRELERSLANHQRSIQRLTRQALQLIASDLQLQQRFDLLLSFPGIAETSALQLLGELVLLSADCNVRQWVAYAGLDPRQYTSGKSVEKKVCISKVGNRHLRRALFMPVLVAVRRNPQFRAYYKRLLAQGKLKMVALVAAMRKLLHGIYGVFQSLQPFDADKLFSLPTLTPAQTEFTEKRAC

SEQ ID NO: 399823 - protein, 404 aa, unidentified
MELTAVYRCVASLDVHQAKLTVCVLSEDAQGEVVTELREFGGFKRDRREMAAWVASFQPDLVVMESTGIYWKSPYAALEWHGLNLAVVNARHVKQVPGRKTDINDAQWLAILARSGLLRGGFVPPRQFREYRLIARQLQKLTGIASGEKNRLHKLLTDAGIRLSVVVSDLYGKSAKAMITGLLDGETPEQLLAHADPRLKATPDELREALEGDLSDSHRFVIRELMTHIDELEAGILRFRQTLLSHLSDYQVILQNLQTIPGIDEFSAAMLLVEIGDDMSAFGSPDKLASWAGVCPGQNESAGKRKSARARKGNPYVRRILCEAANAASRTRCGLQEKFKGLLIRRGRKRAIFAIAHKLLKTVFLLIQRGDYYRDAKTDYEALTVQRNAPRWLKKLIQYGYITP

SEQ ID NO: 399824 - protein, 320 aa, unidentified
MTTIKPTLGIDISKNKFDVALFINNKLKHKKFPNHLKGYTALLDWLKHQTAANVHVCMEATGIYGEALAEFLYDAGLRISIVNPGRVKGFAQSEQLRTKTDKVDAGVIARFCAALEPDVWQPQPAEIRQLRDLVRRLEALHAMHQQESNRLEGAREFIAEQLQEHIDYLNAEIKKVKKMIQQHINNHPDLKQRKALLESIPGVGEATINVILSEFANIMQFKNAKALAAFVGVAPRIRQSGTSLRGRGTMSKMGRSALRKAFFMPALVSLRHNPIIIELKLRLTAAGKSKMAIVGAAMRKLIHIIYGVLKNGVPFDEKFA

SEQ ID NO: 399825 - protein, 317 aa, unidentified
MLCAGVDVSKPHLDLALLSTTAKPTRLRFPNTPEGRQALLAALAHHRPAWVALEPTGAYHLPLLKLLAEKGFQVALVNPYHLAAFRTATGERHKTDRQDALLLARYALVYQESLRAYTLPPKTLQELKALVGYREDLAQRERAILNQLEAVEWAGSEEILPLLQRELACVKELLGEVEARIQALLAALPEAEVLLGLPGVGPQVAAAVLALLPPHLWGRAKAAASYAGLIPEREVSGKSVDRSRLSRKGPPLLRRKLFMGALVAVRHDPEMRAFYHRLLSRGKRKKQALVAVAHKLLRRMMGRLREYYAGQSLQGVA

SEQ ID NO: 399826 - protein, 446 aa, unidentified
MIMERSTTAKIWKATISERPDPDPQGPRECLSSDLSSAAEFVALLLERDGRDFIEACISEGETHRSYVRLVSALACEVVAIRGRKSMDLAESAVNGVSVTLGVDTHKDAHVAVALDGLGRRLGALSVPATTEGYKAIVGWARGHGSVERAGVEGTGSFGAGLARYLKDEGVEVREVVRPKRRDLHRSGKSDPIDAAAAARAVLAGTATGRPKGADGEVEMIRVLRAARRSAVKARAKALNQIRALLDTAPEEMKDGLRGLSSSKLVRKASCFRPGECPCDVLSATKLALRSVARCCRTLSEEISELDSQLDRLVAEAAPELVAVKGVGTDTAASLLIAAGYNPGRLDSEASFAYLCGVAPIPASSGRVVRHRLNRRGNRDANRALYVVAFTRMSNDERTRAYVARRTGEGKSKKEIIRCLKRYIAREIYKILAPPSLRENPMFSGP

SEQ ID NO: 399827 - protein, 328 aa, unidentified
MAKHTMICAGIDTGKRKLDIALDRSPEQQLRIDNTPEGYKVLLDWLRRRRVKRIGIEASGGYEQAVVAELRRRQFVVVVFQPAQVRAYAKFHLQRAKNDKIDAVLIAACTAAVKTIHAPPDARLQPLAEHLTMIDQIGEDIARLKNRLETCRNPRFQQTWEEDIARLAKRKKIELKALVATIREHRDLAERLDLIESVDGIGQPTAVAILVRLPEIGRITREQAAALAGVAPYDDDSGEQVGIRHIDGGRQRLRRALYTAALPASLRWNPQLIALYRRLIAAGKEHKRALIACARKLLIFANTVVARGTPWDRERPAVASMSAVPQAA

SEQ ID NO: 399828 - protein, 319 aa, unidentified
MAQNDLVVAGIDVAKDKVDVCIRSLSLRRTFAATDEGRRELASWLRRNKVGKAVMEASGGYEREWAKALRDAKIEVRIVDPKRVRSFARSAGRLAKNDTIDAEMIAWFAETFDQARGQAYDATREQLYQMVHARQALKDMQSKLTSQGEHAVPAAVQRSHAEISKTIAVELVKIEDEITALIEATPYFAELAEIIESVPGLGRTTAAALIAAMPELGQANNKIVASLLGVAPYDDDSGRRRGERHIKGGRRRTRNIFYMACLGAATRHNPVLKAFYDRLVAKGKLKKVALTACMRKLISILNIMIELRQKWDAKRYSVS

SEQ ID NO: 399829 - protein, 348 aa, unidentified
MKKVMAGIDLHSNNLVIGIMDIEGQRVASRKLPCELGEVTKYLSPFKDRLERVAVESTYNWYWLVDGLRAQGYPVVLANPAGMEQYSGIKHADDTNDAFFLAELLRLNILPTGHIYDAQLRPVRDLLRRRLTLVHHRTSQMLSFKSLYTRTTGQEMALRELKQLDVRKAQELYEHPANQLIAGLQIQQIEHLSGAIEKIEKAVLACARELPLYTKLTTLPGVGKILGMTVTMEVGDIKRFAGPGEFASYCRTVAAERTSNQKKKGDNNAKCGNRYLAWAFVEAANFAKRFDEQCRKWYDRKAAKRGTTIATKALACKLAKAAWYVMAENTDYDAGRMFGQPSERSINT

SEQ ID NO: 399830 - protein, 351 aa, unidentified
MMIIGVDYHPSFQTIAFLIEETGEYGEQELNHSDGEAEKFYRELKQRGTSVRVGLEATGYSRWFERLLAELGFEVWIGDAAEIKTKRVRKKKTDREDARLMLKLLLENRFPRIWVPSPENRDLRQLLWHRHRLVQMRTRIMNQLQAVAMNEGYRWKKKLFSAQGRALLEKLSLAPWASRRRKELLELLDQLDPKIVELTAAVEHETKKRPEVVQLMTHPGVGPITGLAYVLVIGTPERFPSGKQIGSYVGLIPCENSSAGRQRLGHISKQGNTLLRFLLVEAAQAAARCNPDWRRRYLHLMMRREKRIAKVAMARKLAVRLYWMWRNGWDHSQLVEFGSNAGKLVISHGVK

SEQ ID NO: 399831 - protein, 349 aa, unidentified
MTEQRRSYAGECVYVGVDVHKETYTVTCVCHQQIVKTATVQAEPAGLAASLLRWFPGATLYSAYEAGFSAFVLHRVLTTAGITNIVVNPASIAVAANDKVKTDRRDAKKLAIDLADGRLRGIYIPTEAEELARLLPRTRAQIVEHRATIARQIKAKLHQFGLIAPSSRRMISNRYLREIAAWSLAPELRVSLTLLAEQWRFATRQLIEIRRLLQEQAAAQAELETVYRSVPGIGAVVARTLATELGDMTRFANERALCSYTGLTPSAYASGASVRRGPMSRQGSGRVRHLLIETAWRALPRAMVLQEIFDRIAATRGKKRAMVAIARRLTGRIRACFRQGTTYAVGTYA

SEQ ID NO: 399832 - protein, 349 aa, unidentified
MQAETALALEAEMKYCGIDLHSNNSVIVVIDDEDRVVARKRLPNELARIVEFVASWRDELAGVVVESTYNWYWLVDGLQAAGFEAPLANTAAIRQYDGLKHSGDEADARHLAHLLRLGILPTGTILPRDERAVRDLARKRIQLVRGRTTHILAIENIMARQFGGRMTSNQIKRLSADDIDRMPIAADVGLAMNANLAVIGALDAQIEVLERRLRERVKPRPEYAFLTSVPGIGQALSTTILLETGPIDRFASVGNYASYARCVDSVHTSNRKKKGEGNVKNGNKYLAWAFVEAANFARRYCPEAKRFHERKKAKTNNIVATKALAHKLARACHHILREGRPFDVTRCFA

SEQ ID NO: 399833 - protein, 351 aa, unidentified
MLIIGVDYHPSFQQIAFLDQETGECGERRLNHSDGEAERFYRDLKQRGVSVRVGMEATGYSRWFERLLAELRIEVWIGDAAEIKTKRVRKQKTDRQDAQLLLKLLLENNFPRVWVPSPENRDLRQLLWHRHRLVQMRTRIMNQLQALAMNEGKRWKKKLWSEQGRAQLEKLQLAPWASRRRQDLLELLDRMNPTIEELTAAVEQEAKKWPDVLRLMTHPGVGPLTALAFALIIGTPERFHCGKQIGSYVGLIPSEDSSGGQQRLGHISKQGNALLRYLLVEAVQAAVRCDSDWRRRYLHLAMRRERQIAKVGMARKLAVRLYWMWRNGWEYSQSVEFGSHAGQLVTGHGVN

SEQ ID NO: 399834 - protein, 407 aa, unidentified
MEVLYERCAGLDLGKDALVACVRIHGREIQQECRSFGMTTRELLALSEWLAGHGVTHVAMEATGTYWKAVWHLLEPAFALVLANAAHVKGVPGRKSDVNDAMWIADLLAHGLIRGSFVPPEPIQDVRDLTRTRKQLVREIAQHTQRIQKTLDIANLKITGLISDILGVTGRSILRALIAGETDPARLADLARGTLKGKRAALIEALTGRMTAHQRRLLKLHLHLIEQLEAAVAELDQQLGETLAPFHEAVKRLDGVPGINTIAAQAILGEIGLDMTRFPTHQHLVSWACLCQRLDGSAGKRKSTRTRKGACWLKTVLVQTAWAAVRTKDSYLRAQFLRLRARRGPKKAIVAVAASILTAIYYIVRDGVDYHDLGGRYFETLDQGHITKRLVQRLERLGYRVELQVAA

SEQ ID NO: 399835 - protein, 406 aa, unidentified
MNENGKRYIGLDVHKHYLIALGVDENLEVVLPARRVELSHLEGWMKKTLTRQDEVVLEMTTNTWQLYDELVEYAGKVTVVHPPHVALITRSQVMNDKIAASILARLLAKGLLVGIWVPPQEVRELRGLVAQRQKMTRLATQAKNRLHAVIQRHHLMPPEGNPFAKTNNGWWASLSLGRLEKMNLQSDLETLQFAAKQEARLQAEMTGIAAENAELGRLLHISGFGVITSVTVYAAIGDISRFEDAEHLVGYAGLGTRVHDSGMTTRTGKITKAGRRDLRVALVEAAHVAANSHPHWKAELARLQPRLGYNKAIVAIARKLLVTVWHVLARKVADRFAEEEKVSKKMLHFAYEVGKEKRAGKSAAQFTREQMDTLGMGQDLTSIPWGSKKPIPLPPSKLKKGERRPK

SEQ ID NO: 399836 - protein, 317 aa, unidentified
MTESVKVNVGIDVSKDFLDVHVGNVALRRVPNRSSGLSVLKRILSRYSVSLVLCESTGGDENLAVTYFQSLGYDVCVINPRQARDFARSMGRLAKTDRIDAQILCRLADVIDASPERTRFIRPLTDERRQHLVSMVRRRRQLCDLMTAERNRRAKTDDYGSESISTVLDFLTDEVARIDRDIAAHVGSCFSDISSLLQTFTGIGPVTASTLLGELPELGKLNRRQITALVGVAPFNRDSGYMRGRRRISGGRSSVRNVLFMAALSSVRFNPVLKAFFTRLVAAGKPKKVALVACMRRMVCILNAMLRDGSRFEVAVG

SEQ ID NO: 399837 - protein, 349 aa, unidentified
MRFYNQPHRFYAGGDLHARTLFLHILDDQGRTRFEQNLAASPERFLEAVAPFRDGLVVGVECMFAWYWLADLCADEHIPFVLGHALYMKAIHGGKSKNDRIDAGKIATLLRGGMFPQAYVYPRELRETRDLLRRRTFLVRQRAQFLTHIQNTNSQYNLPPLTKRLSYARNRTDPAIVERFPFESVQRSMRSDLKMIDVLDDETRELELYLTRHAKIDDPQTYHLLKTIPGIGPILALILLYEIHQIERFPEVGNFLSYARLVRCAHESAGKVKGFGNKKIGNGHLRWALGEAACLMLRCHEPAKRWLQRKGKKVGKPTALGTLAAKLGRTVFHLWRKQQAFDARKFLTS

SEQ ID NO: 399838 - protein, 349 aa, unidentified
MADKLIVGIDVSKDWLDLCASNAAGVERIANTREAVAAWLERVAPGLIACEPTGGYERTLIAAARERGIPFVRVHPNDVVAFRKSRGIKAKTDAIDARLILAFVCDKAARAELRPSLIGDDRLQALAARRRQLVDALQAERCRLDAAALPAVRASLEAVIAVLRQSLETLEAELAEAIAAHPPTAELAKLLQTIFGIGPVAAITLIADLPELGLLSAKQIAALVGLAPHTKRSGKTRYRETTGHGRPGVRRVLFNAARAAVRHPSLFKDFYDRLVTDNRRPGKVALTAVMRKILITANAVARDRQPWRGRPAAGTPCRPHAEQTARRAGRVKTAAAPRAVARSASLEAA

SEQ ID NO: 399839 - protein, 351 aa, unidentified
MMIIGVDYHPSFQTIAFLMEETGECGEQELNHSEGQAEKFYRDLKQQGISVRVGMEATGYSRWFERLLAELGFEVWIGDPAEIKTKRVKKHKTDREDARLMRKLLLENRFPRIWVPDPENRDLRQLLWHRHRLVQMRTRIMNQLQALAMNEGYRWKKKLFSEQGRAQLEKLTLAPWASRRRQELLELLDRMNPTIEELTAAVEREARKRPAVQRLTTHPGVGPLTALAFVLIIGTWERFPRGKQIGNYVGMIPSEDSSAGKQRLGHISKQGNSLLRFLLVEAAQAAARVHPDWRRRYVHLAMRRHKSIAKVAMGRRLAVRLYWMWRNGCEYSQSLEFGSYAGQLGLRHGVK

SEQ ID NO: 399840 - protein, 382 aa, unidentified
MTESSDYESVQVFIGVDVGKDTHHAVAINRSGKRLFDKALPNDENKLRSLISDLKQHGQILLVVDQPATIGALPVAVARSEGVLVGYLPGLAMRRIADLHAGEAKTDARDAAIIAEAARTLPHALRTLKLADEQIAELSMLCGFDDDLAAQTTQASNRIRGLLTQIHPALERVLGPRLEHPAVLDLLQRYPSPEKLASLGEKKLAAQLCKLAPRLGKRLAADIAQALAEQTVVVPGTNAAAVVLPRLALQLITLRKQRDEVALEVEQRVLAHPLYPVLTSMPGVGVRTAARLLTEVACRAFASAAHLAAYAGLAPVTRRSGSSIRGEHPSRRGNKALKRALFLSAFAALSITDIKCQRCGSAWQKLCTALSGLLKNPSLTAK

SEQ ID NO: 399841 - protein, 446 aa, unidentified
MKQEAPEEFAAFIGLDWADSKHDVCLQAAGSAKREYCILTHTPEAIDAWVSTLRTRCNGHPIAVCLELNNGPIVSALRTYDFLVLFPINPLTLARYREAFTPSRAKDAPTDAALQLALLLTHRDKLPPLKPQSPAMRALAPLVAHRRRVVNDRVRITKRLTSTLKNYFPHVLPWFQDKDTAVFCDFLRRWPTLKAAQLARRSPLETFFRDHHVRSADIIGKRLQAIKTATPLTSDAGVIAPHVLFVQTLVSQLRVTLDAIETFDHAIAQRAQSHPDFPLFQALPGAGPVFAPRLLVACGEQRARYASAAELQQDAGIALVTERSGKKSWVHWRLQYPQCVRQTFVEWAAESIRHSFWAQLYYQQQRDKGKAHQAAVRALAFKWIRILYRCWQERTPYDEATSLQALTRRGSSLLQNLAKGERCRTDARMIRRETVQSEQFFANTGY

SEQ ID NO: 399842 - protein, 532 aa, unidentified
MATKRNSRKNRTNGLAQLGKPNGIIQPRVQEVGPQRFGIVAIDCAKARSKWMLCDFYGKVLVPPTEVEHARTQMQLATVQFKEACEQHDIRDAIVAVEMTGTYHRPIQRAFRKAGVETRLVHPFASKHYRQPAHGDNKTDDHDLEGIFRAAVNGFGLLEPTWDETYLLLQLFSRHRRDLVEKRAKLQCQIRQYLERCLPGYAALFPKDNLWCRPTPIAIARHATSAEAIRGARIPGVTRWLRDEKLRFHARTVEKIVAWAGNAADADPLAEHLSRVWQTLHDDWRSKSEQICLLERELAGILVKTPYVLLLSMPGINVVSAAELAGEMGPIEHYAHAKAVTGRAGLFPSRYQSDQVDRADGPLARLRNARLRAAWMRVAENLIKCNAHYRGKFQLWKQRRVDSRDIRCRIANRAVRPVFQMVSGRKLYRHPSRLDRGYVMDKLLAFHREHETPPARIVRDMQQAVRQIPKHAHPEEAGPLQTAYARCRRSRRKGPQAIGTILVTVLAQLGVSGLESEAEAQGPIANVFERST

SEQ ID NO: 399843 - protein, 348 aa, unidentified
MSITMIGLDTAKSVFQIHAVDAAGKPQLKRKLRREEVIPFFEQQERCTVVLEACGAGHHWARVLTQLGHEAKLLAPEAARPFVKKGKKNDAADAAALCPAASRPEAMFVPVKSPEQQGVLALHSVRTLLVKQQTMLANAMRGLATEFGLVVAKGIHKLDELEAQVQAEASMPATAKQAFAELHGQSQATATRIAGLEAQIVAHARQDATARRLATIPGIGPITASLITATVGDSIGSFKSARHFAAWLGLVPRQHSTGGKTRLGRITKAGNSEIRRLLVLGATSMVFRAGQWNSAAGAWLRGVLERRPMRLATVALANKMARIAWAVMTRGETYQAKGRAPAAAAAVA

SEQ ID NO: 399844 - protein, 376 aa, unidentified
MQDSTFIGLDVHKATISVAVARGERGGEVRHWGTVSHRPDHVRKLVEKLAAGEGRLRFCYEAGPCGYGLHRQLVEMGHDCIVVAPSLIPVKAGDRVKTDRRDAAMLAKLHRAGELTAVWVPDAAHEAMRDLVRARATAMRLLGKARQHLQGFLLRHGRIYPGKKGWTVAYRRWLTTVGFQHPAQQIVFQDYVDAVSDTEARVERLTGQIADLLPSWSLVPVVAAVQAMRGVAFIVAVTVVAEVGDFHRFDNPRQLMAYLGLTPSEHSSGNTVRRGGITKAGSGLARRALIEGAWSYRMQARVSRKLHDRIEGLPKAVRDIAWKGQLRMCQRYRHLVAAGKAKVVVTTAIAREMVGFIWAIARAVTSPPVCETHAQG

SEQ ID NO: 399845 - protein, 343 aa, unidentified
MNEAITIGIDLAKNVLQVHGVDAEGGVVFRRQLRRGQVLGFFEKQVPCLVGMEACATSHHWAREIAALGHEVRLMPPRYVKPYVKRNKNDAADAAAICEAVTRPTMRFVAVKTAEQQSVLMLHRTRELMVRQRTMLVNAIRAHMAEFGIVARVGLPQVRELLAVIADEEDERIPVLARRCLEGLAAQLASLQEEILAAERRIHAWHRASAVSRRLESIPGIGPITASALAATITDPSVFKSGRELAAWIGLVPRQASSGSRERLGRISKQGDHYLRWLLVAGSMTVIRHAKRRGTANPWLAELIAGKPTKVAAVALANKLARIAWALLRDGGTYRKPAASAAA

SEQ ID NO: 399846 - protein, 413 aa, unidentified
MDRLIERCAGLDVHKATVTACVRVPGETGGRHQDIRTFSTTTAGLLTLRDWLQSYGVTLVGMESTGIYWRPVYYLLEDDFTCWLLNAQHLRNVPGRKTDVADSAWICQLVEHGLVRPSFVPPREIRELRDLTRYRKAQIQERTREAQRLEKTLQDAGIKLSSVASDVLGVSGRAIVQALVQGTHDPEVLASLARGALRRKLPELSEALEAHFGPHHALIASEIIAHIDYLDEAIERLSADIERVIAPFAEQVALLDTIPGVNRRTAETLIAECGADMGTFPSHRHLASWAGMCPGNNESAGKHRSGRTRKGSKWLRHALVESAGAAARTKGSYFSAQYGRLKGRRGHKRAILAVGHSLLVIAYHVLERGQPYSELGEDYLLLRDSTEVYTRRLVRQLERLGHRVSLEPLPASA

SEQ ID NO: 399847 - protein, 316 aa, unidentified
MKTKTETKPAPTYVGVDIGKAGLDVSFAGQSPCRYANSAAGIAELLKALKKLKQPQVVCEPSGGYERDLLEALWAAGLAVSLVHAARVRAFARAQGLLAKSDPIDAVVLREFGELLRPGTLAAPSPERDRLAALVQRREQLVNLLSMEDQRLAQSRDATVRKMSERLLKELETQIEQMDEMIAAQIDADATLKNQSERLQQVQGIGPVTATTLLAEMPELGTLSRNESGALGGVAPYIKDSGDHRGRRTIRGGRVKVRRVLYMAALVATRYNPILKTFYARLLAAGKPKKVALVAVMRKLIVLLNHLLKNPNFKLA

SEQ ID NO: 399848 - protein, 352 aa, unidentified
MTKALWAGLDVGVETTSLCVVDAAGTPLHECVCRTDLKEVVSQLRFLRRRRRARVGIEAGSGIALARGLRNLGYSVDIYETRQLSKFLRVRRNKTDATDARGIAEAGRIGAFISKVYLKDIECQTLQSWLTIRRHIIRQRVSATNLLCRQIEYYGGRVSRPNNLTRLRGAVRDELKKVFGTSTSEAAAELKFLLSVCEHLMVHEYETDSRLRRLAKSNDLCRRFMTIPGVGPICALSFYATVGEPGRFTRSSDVGPYLGLTPQVHESGLTSRKGHISKMGNSATRCLLVQSANLFMRHSQPDCTLRRWVEQLERRRSRGAARVALARKLATIMIAMWRSGEAYQPTWIAIPY

SEQ ID NO: 399849 - protein, 429 aa, unidentified
MKKKNIYMNQNQDLLTLFEEGGSSAKVMCVPIDYAKKDHTVMFCNGHGDILRKPFSIKNSPEGLDYLVKQVTRSCLHRSINPKHVFFGGEDVGSYADNFVSTLRSKGWLVAGVNAHDAKKQRTNMQASTDVLDLMGIATMLINRRANCDRPQSGIYLNLRNLVRHRAKLVKMTTQVRNQIHMVVNRLFPGFLDEKKSGITPFTKSSLYLMENRFNAPQIRQRRKEKLIEVLKQHGMPQPEQRAAQLQGYAQKVLMTPNEYMGTLQLMLFHHVRHLKCLQDNIEQLEKEIAVWLAQTQGAFLTTIRGIGIVLAAGVTGEIGDPNKQKPVNNLVSYLGIIPRVKQTGGPEGKTSTDKVAKRCNHNLKNYVVQSGMHLGLHGPTDLMADHKRRDAAGQHADFGMGQRYVRMAMSLMRNCQVYIPPPPSKQRS

SEQ ID NO: 399850 - protein, 341 aa, unidentified
MTLVMGMDQHRAQISAEWIDTITGEISRARVAPADRAGVRKFLTQFKDAGLEVALEATTGWRFVVEELERIGADVHLAEVVQTAGLKGRGKRPKTDWADARHLRELLLIGRLPESWIAPAHLLDLRARVRCRHTLLHQRTEWQQRMQAVLYHHGAPQSRGLLKLANRERVAALKLPAAAREQLTIALQLIDAIDLQLAPFDLSLRAYARKQPGCRTLKDQIYGIGELTSVTILAELGDTRRFQNSRDAVRYGGLDITIRESDQRRAPGHLSRQGPPALRWALYEAAQAARRPSSPDRAYYEQLAARIGGNRACIAISRKLLKRSYHLLRALGDQALEPVTT

SEQ ID NO: 399851 - protein, 355 aa, unidentified
MQKYKVSFKGQNIYVGIDVHLKTWHVTTLTESGCKYSFAQHADAKELFDRLNKKFPEAHFKSAYEAGFCGFSVHYALTELGVENIVVHAADIPTTGKEKALKTDAVDSEKIAWALKRDELTGIYIKDRRYMDDTNLMRLRQRFIMDLSRQKNRTKHLLYTQGVTYPERFRNNRTHWSRNFMKWLREEVELLSEQKLSLMLLCEQVENTRKAILKVTREIRRLSTTDRYKENFNLLMTVPGLGLITSMSMLTELDNDIMRFPNERSFVSMLGLIPTCHDSGDKKVNGEKINRGNKHLGPLIVEACWVAIQRDIELSAYYSNCCLSMKPHKAIIKVARKLACRAYAVLKTKTRYALP

SEQ ID NO: 399852 - protein, 426 aa, unidentified
MDVVHPRVAGIDVHKKIIWVAVRLPGDRPGERTVITKSFRTFWRQLQKMASWLAELGVTDAAMESTGVFWWPVYHALAGAGIEACVCNAAHMRNVPGRKRDIAGCQWIAELHEHGLLRASFIPAAEVAALRQRTRYRKRLIEQRTSEGQRLSKALEDGGIKIDSVASELLGKSGRAMIEALIAGERNPGVLADLARGVLRRKTDELQMACDGRFTASHAQMCRLHLDAHDHLTAKIAELDVLVADAAAPFQRLIARLVTIPGIGPRTAQVIVAETGGDMSRFATSARLAAWAGLAPGDNESAGKRKKAAARKGNQHLKTAMTESAWTVGRTATRPGARFRRLARRFGRGNEKKAAFAVAHTLICIAWAVLRYDADYADAGADYYQQRDARNHDHLVRHHQQALARLGYHVTLTPPDDGSPPPAQAA

SEQ ID NO: 399853 - protein, 387 aa, unidentified
MYYVGIDISKYKHTFVIASHIGEVIQKPMDFDNSHLGFAQFLDKLKPFDSNQLKIGFESTGHYSANLKQFLHNQGYSFYQLNPHLVKKFSLSLSSRKAKTDKIDCLAIAKFLMTIDSKSFTPLSYHISFLKSLTRHYYRLNKYIGKTKVELVNYLDKAFPEFTRYFSSIYAKTPLTILLKANSLNSIANMTQSRFDSLNKLSRGKFNYSKYIKLKQAARFSVGVKDKFYWSLLHLTIKRILTLENEKDSIEDHINLIMKDIKSPITSIPGMGTTSAAIILSEIGDIFKFSNSRSLIAYAGLDNSVHQSGLESNYGRVSKRGSKYLRTALYNVSFPIVNNSKLFYDYYFDKKSRGKSHTLSLIWVSRKLLRIIYFLLKNNQEFCDQVI

SEQ ID NO: 399854 - protein, 320 aa, unidentified
MQTVTTIGLDIAKSVFQVHGVDAAGQVVVRRQLKRRYVLAFFEKLPPCLIGIEACASSHHWSRELQALGHKVRLMPPAYVRPYVKRQKNDAADAEAICEAVTRANMRFVATKTPEQQGCLMLHRTRHLFIRQQTAVINAIRAHLAEFGIVAPVGRNGVEELLGVVADASDKRLPEIARACLAALGAQLRMLKAQILEFDRMINAWHRSNETSKRLDEIPGVGPALATALVASVADPRAFRSGRDFSAWIGLVPKQHSSGGKDKLGGISKQGDRYLRSLFTAGALAVIRYAKIHGAKHRPWLTALLARRQRPSSAAALTMP

SEQ ID NO: 399855 - protein, 402 aa, unidentified
MNAVGIDVSKGKSMVAIMRPFGEIVSAPFEIKHTASDIHSLVELINSVEGESRIVMEHTGRYYEVLAHQLSKANLFVSAINPKLIKDFDNDSLRKVKSDKADAVKIARYALDKWQNLKQYNVMDELRNQLKTMNRQFGFYMKHKTAMKNNLIGILDQTYPGVNTYFDSPARSDGSQKWVDFASTYWHVDCVRKMSLNAFIVHYQNWCKRKKYNFSQSKAEEIYGKAKELVPVLPKDAITKLIIKQAVDQLNSASTTVESLRTLMNETASKLPEYPVVMAMKGVGTSLGSQLMAEIGDVSRFTHKSAITAFAGVDPGVNESGSYEQKSVPTSKRGSSDLRKTLFQVMDVLIKTHPQDDPVYQFLDKKRAQGKPYYVYMTAGANKFLRIYYGRVKEYLSSLPES

SEQ ID NO: 399856 - protein, 319 aa, unidentified
MAKRVEEVTLGIDASKATLEAAGNRFEKICVVDNISASIDRFLDQFTGSVVIAVEATNTFHELLVERALARGFAVYIVDGYKLDKYREAVGVRAKTDEKDAYLIHRYLLAERDHLRPLNPESLQGRQLWRLLKRRAKLVKLRSQLDLSLRDLNLQVPELDQALAGIDRLIKRLTSLAKGQAKAFEWNDAIKRLRTIPGVGPLNALALRVMFSRGQFSNGDRFIAFLGLDIRVRDSGKFKGRRKLTKKGDPEIRRLLFNAARAAAKSYPAWTEQKRQLMARGLSEIQVSVILARKIARIGFALLKTGASYEFSKNACTSP

SEQ ID NO: 399857 - protein, 414 aa, unidentified
MLSPEIRCVVGIDVAKQAHVVCAVEAPSGAIRHKPSRIEASAEGFTLLCSWLATWGAPQQIVIGLEATGPLWEPLCEHLTHAGYTVLVLNPRQTASWAASLGLRAKTDGIDAHTLARGLLAGLARASTLPSESVQALRTLTRARRDLIQHRTATRQRLHDDLVTLFPEFVGFLPTLPGRHDLGAPAVLTLLSRYSSAQALAQVALDELTTTLDHLSEGRWGAAQAQALQALAQRSTASSRALAARSLVARTLAQQLQELALHVAEVEAAIAALLQDDADGQRLQDLPGIGPQTAATIRAELGDVARFACVDEVVAYAGLDPRTYQSGAFLGQKHLSKRGPGALRHALYLAAFVAARCAPEWHERYQRLLDRGRAKKEAFTILARALLRVIFHLLRTGEPYDPAVLKPPSAPTAA

SEQ ID NO: 399858 - protein, 418 aa, unidentified
MEDWLGGITCLLLKTYLKEEEILNNLYVGIDVSKESASAQGLDATGRKSFYLKFKMDSDGFSELLETIMTHCKEKTKVMVAMESTACYHVNLFSFLISKGINAIIINPLLISNFSKLALRKTKTDKKDALVIAQFLLTQKDSLAQHAISSEMADLRDIARQRESLVDQMTAIKHEIKQLLTMTFPELEGIVGLFTKSMLRLLCKHPSAAAIESTSHCDIAEILIPGSMGRNTTDTVKAIKQAAGRSVGTTRAAREMIIKQKASILVHLDEHLQQITSVLIEHCQSIMQEDIEVLRSIKGIGDKTAINFLVEMGGDITLFANHKKLIATAGLDPSVCQSGKYEGISKISKRGNRHLRRVIWLMATKVIIFNDFFKSYFTKRKKEGLPYKKAVLATAHKLIRIIFAMLSNKTLFTANASS

SEQ ID NO: 399859 - protein, 345 aa, unidentified
MPIVGGLDIHRKQITFDYLDTETGEVKRGQVTPADRAHLRAWLARFAGRGDVAFALEGCTGWRYVAEELAAVGVAAHVAEPADTAALRGRKRHAKTDKTDSRHLRELLAEGRLPECWIPPSLILECRALLETYHDLRAEHTAWVQRIHAVFFHQGAPALGEAALRTARDLQALRASAAAHLSPAGQLQVATALEMTGALEARLAVLRHELLDAARHLTGAKVLAERLYGVGPATALAMTCWLGGAGRFSSSRQAVRFAGLDVTVWSSDRKGPPGRLSRQGPPVLRWAVYEAGKTHARASAPDHRYYAAVKDRQDGKRAAISEARKLLRQACHILAELGDDALTAA

SEQ ID NO: 399860 - protein, 416 aa, unidentified
MKIVRPICCGMDVHKNIIVATIGITNKKTRITEYIQETFSTLNSDLLNLKQWLINHKCFDACMESTGKYWIPIFNILEDEINIYLTHPKYVKAIKGKKTDKKDSKWICDLFKHDLIKFSFIPPKEIRALREISRYRYKLVGMRSSERNRYQNCMTVSNIGIGSVFSDPFGKSAQAIMKEVLESDIIEDEKILKCIHRSCKNKDKILDSIKHCNIETDQRFKMNESMTHMEELQVHINNCEIEMMKRAAPMFDQFMHITQLPGISTLSAILIISEIGVDMKQFESDKQLTCWAGLAPANNESANKKKSVRISKAGQYLKPLLVQCALGAIKDKEGYFGIKYSRIKKRRGHKKAIIAIARMMLVSIYHMILTGEKFNPSDYESFKNPKPPIKQQDLTEESAIEFLKKSGFDVSKLTKP

SEQ ID NO: 399861 - protein, 450 aa, unidentified
MHEASSSVLRLAPSTGVSGSDGIQRRIRKDRPRIDKRGHKHRHRGSPDVVSCERRTMRFIGIDIAAEKHVVAVVGEDGGIQVKPTSFTEDLDGYQKLFELLGAAEGSLVAMEATGHYWQNLFAALVGSGFQVALLNPLRTRRFADADMPRAKTDAIDAVAIARFAREKRPAATPLPDEATLELREAVRLRDRYVQDLGDRVRQLHRALDLTFPEFCRSVGKLDSELATALLRECPTAAQFAKKSARKLAEIVYDGRHQVGDGLALELVRAAKISVGRHQGPMYRMQVEDACEDIHTLRQRIRRLERDISDTLDKHQVGRLLTTIDGIGDTTAARLIAEFGDIAKFESGAALGAYVGVVPLISQSGKRQSQRAPSCTLGDARLRAKLWMPTLAAVRHNPWLAAFYGRLIARGKLPKVALTAAMRKLLTAVYSVAKNRRPFIPMLPIATTTP

SEQ ID NO: 399862 - protein, 414 aa, unidentified
MLKIVYRICCGMDVHKSFVVACIASTNENGVTTYKSKRFSTFTGDLRRCAAWLAENNCKDVCMESTGKYWIPIYNILEPTCNIVLAHPKYVKAIRGKKTDKRDAKWIADIFKHDLVAGSFIPPADIRQLRDLFRYRWKLTSFTTGEKNRAQNCLTVSNFKLDDVFSDVFGKAASAITAHILENPTEKITDVSGFRTKGMKATNEQVLAAVDGEMCEEQAEKLRIIRSHMDSLELCKLNLESLILATAEKYLPQLDLVMTVPGIQSFAAIGIISEIGVDMSVFPTSKHLCSWAGLTPQNNESAGKKKTTRISRAGAYIKPLLVQCALNAIRAKKFPEVRNRYLALKKRRGHKKAIIAIARMLLSAIYNILKKNEPYNPELYRQTDRPPAHRQVSVEEAIFILQRQGYLVSSPSTS

SEQ ID NO: 399863 - protein, 386 aa, unidentified
MHDGTNLPVPERTASGGDCATLFVSLELSRSTWVATSLTPGSKKMSKHTLAGGNGRELLNLLARLKTRAEQRIAAPIKIVAIHEVGLDGFWIHRLLEANGIESHVVDPASVAVPRRHRRAKTDTIDGETLLRTLMAWRRGEPRVCAMTVPPSPSEEDCRRISRERAVLLRERIRHTNRIRGLLFGQGITNYNPLHKNRRECLEELRTGDGHSVPARLKAEILREIDRLELVLRQISEVEAERDAMLQPAEASSPAALLMQLKGIGAEFAAVLYLEGLFRHYENRRQLAAYAGLAPSPWKSGSIDHEQGISKAGNPRLRTTMVELAWMWVRYQPDSALSCWFRQRVGSERGRTRRISIVALARKLLIALWRYVTHGEIPAGAVTKPV

SEQ ID NO: 399864 - protein, 317 aa, unidentified
MNASPVYVGIDVCKAHLDVALRPTGAASRHPNTPAGVAALVASLSPLSPARIVVEATGGWERPLAEALRAAGLSVAVVNPRRARDFARSAGRLAKTDALDAAALAHFAESLRPEPTPAPDPEAEELEALTDRRDQLVAARTAEKARLPLARPAQRPSIERHLEWLGGEIRDLEEEIERRLQASSEFREKARLLRSVPGVGRLTAPALLARLPELGRLSGKQLAALCGVAPLNRDSGSYRGRRGTWGGRADVRKALFMAAFAGLRHNPVIRAFFDRLCAAGKPKRVALVACMRKLLLILNSLLKHGQVWSPTEAVTAP

SEQ ID NO: 399865 - protein, 347 aa, unidentified
MRFYTQQHKFYCGVDLHARSMYVCVLDQEGNALVSQNIASAPEPFLQLVLPYREDLAVAAECMFTWYWLADVCAREGIVFVLGHALYMRAIHGGKAKNDRIDAHKIAALLRGGMLPQAYVYPRSMRAMRDLMRRRNYLMRQRAELLAHITNTNHQYNLPALGVRPARPGERDNLAEHFADPPVRKSVELDLSVIDHYDEELPRLERYLEANAQAHDPLALAIVRTIHGMGKVLGLSILYEIHNIERFARVQQFLSYCRLVKPTKESGGKILGHSGRKIGNAHLKWTFSEAAIGFLRANPPAQALRARLMARHGKGKSLAIIAAKLARAVYFMLKRREAFDTERFFAH

SEQ ID NO: 399866 - protein, 342 aa, unidentified
MTTFAGLDVSQAKTTVCIVDERGLVTWRGSCATSPGAIAQTLATRASSLERVGLESGPLAPWLVHELRTLALPVVCLDARHARAALSVQINKSDANDADGLAQIVRTGWYREVEVKSVAAHLVRAALGVRKQLVGMRTEMINQIRGLMKIFGLILPKGSGARFETSVRARLAEHAELGLVIEPLLAAWRAIDGQVATLEHQLVRRARRQEVCHRLMTVPGVGPLTALAFVTTVDDPARFRRSSSVGAYLGLTPRRHQSGERDVSGRISKCGDRLTRSYLFEAANVLLTRVERWSSLKAWAIRLAKRSGAKKAKVALARKLAALLHRLWQDGTTFRWTTEATA

SEQ ID NO: 399867 - protein, 334 aa, unidentified
MENIALIGIDLGKNSFHIHCQDHRGKAVYRKKFTRPKLIEFLATCPATTIAMEACGGSHFMARKPAELGHFPKLISPQFVRPFVKSNKNDFVDAEAICEAASRPSMRFVQPRTESQQAMRALHRVRESLVQDKVKTTNQMHAFLLEFGISVPRGAAVISRLSTLLEDSSLPLYLSQLLLKLQQHYHYLVEQIKDLESQLKRKLDEDEVGQRLLSIPCVGTLTASTISTEIGDGKQYASSRDFAAATGLVPRQYSTGGRTTLLGISKRGNKKIRTLLVQCARVFIQKLEHQSGKLADWVRELLCRKSNFVVTCALANKLARIAWALTARQQTYEA

SEQ ID NO: 399868 - protein, 311 aa, unidentified
MTILTSQTVVGIDIAKAEIVVYRADLETIEAVENDRAALKRWLKTLPAQSAIAVEATNIYHLETVDLAHAMGHQVYVVDAYRVSHYRRGVGQRAKNDPCDARVLARYLTNEQSKLRLWNPPPKAYTVLKSLLHRRATLIQNHTGLMLSWADEPLLKKERTAQQKAFERSDKVIQKLLRKVSKEAGIEDNIDRCKAIEGVGELTATGLATTYMRGDFANSDAFIAFLGMDLTVDDSGKKNGPRFLSKKGDPEIRRLAYNAAMAACRSTKWKPFYESYLARGFSKTQALVALARKLCRVAFTLMKNQGEYRSV

SEQ ID NO: 399869 - protein, 410 aa, unidentified
MRRIVGMDIHRTFAEVVFWEEGRLRPAGRIDMTRSGLEGFGRLLTKEDEVVVEATGNSMAVVRVLSPFVGRVIVANPLEVKAIAHAHVKTDKIDAGVLASLRAADFLPEVWLPDAETERRRRLVARRNQVVRHRTRIKNEVHAILHAHLIPPCPHADLFGHRGRVWLTRQQLPDDERAAIDRHLRELDRLGEDLAVLDREIAQAVVNDPAVKRLLTISGINLTVAAGLVAAIGDIQRFDSPQKLVSYVGLNPRVRQSGLGLAQYGRISKRGRSHARALLVEAAWAAAKAPGPLRAFFLRVRARRGHQVAAVAVARKLAVLCWHLLTKETDYLWARPALVAHKTRAMELQAGAPMTKGNRRGVAYAYNIKDLRDHEIAMAQQAQQAYEEFVSRWQPRRSKTAPPPAKAAPA

SEQ ID NO: 399870 - protein, 411 aa, unidentified
MIEKQFAAHIGLDWADEKHDYCLRVASSQTLEYGIFEHTPALIEQWALALKDRFKDRPIAVCLELKSGPIVSCLSKYDFIHLFFVAPQALANYRKVFTQSGAKDDPSDAFLQFDYLTKHFSDCQEVTFDRQDTRILEQLTEHRKSFVNEKVKLTNKITTALKAYYPLALAIFTDLDTSIFCDFIERWPNLSKLKKARRSTLETFFKSHRSGRVDLINRRIALINTAIALTDDDAVIKPYQRYLLGLISSLKPLLETIKAYDTEITIIFEQHEDRDIFASFPGTGDILAPRLLAAFGSDRNVFSSADEVNRCAGIAPVIERSGKKIWIHWRFKCHKFLRQTFIEWTNQTIKYSFWARAFYDEKRAQGKSHQATIRALAFKWIRIMFRCWKNHTAYDEATYLFALEKRNNKMA

SEQ ID NO: 399871 - protein, 340 aa, unidentified
MGQVVTIGLDIAKSVFQLHGIDAAGAVVMRKRLTRSRMRTFFEKQPPCLVGIEACGSSHFWGRELSSLGHDVRLIPPSYVKPYVKRQKNDAADAEAICEAVARPNMRFVAIKSPEQQAIMIAHRTRSILTRQRTQLSNAIRGHMAEFGLVAPQGRNGLEMLIAIVGDAADGRLPLQARTSLRMLIAQLRLVNEQILDSDRQIIANARSTDVGRRLMGVPGIGPVLASALVAAVGDPKSFRSGRDLAAWIGLVPRQNSSGGKERLGAITKQGDRYLRQLLVVGAVAVIRYAQRNGARRPWLVRLLARRMPKVAAVALANKTARMVWAIMTSGERYREPIAA

SEQ ID NO: 399872 - protein, 323 aa, unidentified
MDKDTKFLGIDISKDVFDVMDVKDRHLQFQNSFKGFKALKKILSPDNVCVMEATGYYHLKLAYFLLENKFKVSIVNPLSVKRFAQMKLSKIKTDKSDAKMIRLYAQNNVVKLWKGNSKNQMEMLQIARLLDNYTKQTTALKNKIHGEETLGKPSALVLKSLKRTLKFIQKEKNLLEERLTELVKQDHAAMLTNLRSIPGLGLKTATMLIVLTDGFSRFDSAAALCSYSGITPVIRTSGTSVKGRPRISKMGNQKLRNLLFLCSFTASVHNKACKDVYQRITNKGKSKKLALIAVSNKLLKQAFAIAKSGIPYDEDYRSVLPIH

SEQ ID NO: 399873 - protein, 418 aa, unidentified
MTKKLDTTFIQVVHPVCCGLDVHKKKVSACLITIDEHGQEQYEIQEFGTFTNDLLEMKEWLTDNDCPIIAMESTGVYWRPVHNVLEGYMEVILVNARHIKNVPGRKTDISDSKWLAGLLRHGLLRGSFIPPKEIRQWRELTRLRRTYTESLADYKRRIHKLFETANIKIDSVVSDLFGVTGRNLISLLCNERELSLANIEKSAKRGLKAKSEELHRSIQGFFEDHHRFQLIGIMEIIESFEKKITEITERLDNLTSGHQDLLDRLDEIPGIDKKSAQSIVSEIGVTLDDFICMAALASWAGLCPGNNESAGKRKSGRTSVRSHPFKTILIEVAWAAVKKKGSYYRAKYFKLKARRGPKKAIVAIAHRISKAIFNIIKHGDTFKDLGEDYLSAQTRQRTINNLKQKAKQLGYELVPCMN

SEQ ID NO: 399874 - protein, 412 aa, unidentified
MTTLYPCLAGIDVHKKMLAVVVREVREGGNQYEKRKFGTTRKEIEHLAAWLQQQKVSEVVMESTAQYWRPVWYGLEAHFRLHLTHPLKTLAPRGRKWDFRDAQRLADRWASGDLEESFVPGAEQRQWRWLTRRRVQLRRLIGVVRNQVEGLLEQGGIKLTAVASDAFGVSGWAMLQLIAKGETDVTVLVREARGALCKKEAQLKEALAGRLEAAYRVLLKQNLEQVELMRRQIAEINDELALAMREHTATLVRLSKIPGVDLAAAQELLAEVGPAAATFPTPEQFASWIGVCPGSQQSAGVCYSRRSAKGNRYLRRLLCQVAWAAVHTKDTFYGALFARLKPRIEAKGAVWAVAHRIAKVIWLLLHEGVEYQEKGPAVPNPRTLLRKFRRLVQEFARAGLDAKALLEQGATE

SEQ ID NO: 399875 - protein, 349 aa, unidentified
MKATTIGFDLAKNEFQVHGVDAAGKPVVRKQLRRAQVLPFFARLSPCTIGIEACGSAHHWARKLTELGHTAKLMAPQFVKPYVKANKTDAADAEAICEAVARPNMRFVPVKSVEQQAILAVHRVRSGLVAERTAQLNRLRSLLAEFGLIAPRGRRALMERLPVLFADETLPGVARTLFERQSARIRQLETEISAEEAVILNWHRNNELSKRLDAVAGVGPITATALVASFGEGREFDNGRQMAACLGLVPRQHSSGGKTRLLGISKRGDTYLRMLLVHGARAVIRTLERRAKAAGNPTDRWLAKLLARRNPNVAAVALANKTVRVIWALLAHGRTYDRNWSGHRAVAAA

SEQ ID NO: 399876 - protein, 344 aa, unidentified
MQIARIGLDLAKYVFEIHGVDARGKTIVRKTLRRHAVSTFFANLPPCLVGMEASNGAHFWAKALSELGHDVRLISPQFVTPYVKSNKNDRNDAEAICEAVGRPNMRFVSVKSAEQLAVQAVHRIRSRLVADRVRLVNQVRGLLAEHGIVVAKDIANLRRALARIVDDNEDRTLNPLVRGLMAELREELTELDTRIAGYDRKIRELYRNSQICQRLGKVEGIGPVTATALVAAVGDRRSFKNGRQFAAWLGLVPKQRSSGGRARLSGISKRGDRYLRTLLIHGARAALGRVRDKQDPRSLWLGKMRQRRHPNIVAVALANKNARIAWSLLTSDSVYDADLSVRAA

SEQ ID NO: 399877 - protein, 331 aa, unidentified
MFPVGIDVSKNTLDLCMLYDGIKGRIKTRNIQNNRHSVENILRWLRLQHCSPEDVHVVMEATGVYHERLATELHDAGFRVSLANPHRSREFARGMGIMTKTDKVDAYMLACYAFLKKPHRWEPPAPEIRYLGALLRRRDVLLGDALREENRLEKYLSTDTPADIISSCRRMAQLLREEVSNIERQIKAHIKASPALRRDYTLLTSIKIGCPQLGMHMLVVLRSHNFVSAEQAAAFLGVVPIEKRSGTSVRRRPRMSKIGPPQLRAKLYMSALCGKIYNKRMRNIYDEMCLRGKPKMVAIGALMRKLVHWCYGVLKTGTVFNDEDLKPALST

SEQ ID NO: 399878 - protein, 408 aa, unidentified
MKLFIGINVSSTDLETVMISSEDNGIVFQGKFANDITGASEIKDQILKLAQPARFDQIVIGMESTSIYSFHPAFFFKNDAELAKFNVQVVVINPRQTKRYHDIFEDNKNDHIDAFYIADYLRVGRYTIGIVRQENYSALQRLTRTRYELTQSLVRAKQHFLHNLYYKANNLAIGKQKTSVFGATMMNLLIEDMTLDEIVNTPTEALADYFSHKGRGRFADPQGLAKDIQKAVRSSYRLGKVMNDSVDTVLAIYAKEIKTFQKMIKELDDAITQIVDVIPEEQILQSIPGIGPVYAAGIIAEIGQIDRFEDETKLAKYAGLTWKQNQSGKFESTTTPLLRTGDSYLRYYLIEAANRVRREDSVFKEYYSRKYQEVQRTPTKRALVLTARKLIRVIFYLLKNHQIYKPKE

SEQ ID NO: 399879 - protein, 362 aa, unidentified
MDIEVLGIDLGKTVCSLAGLDAAGAVVFRKRLQRHRLLDFLDRLAPCVVTMEACGGAHHIGRFCLQKGHEPRLMSPLYVRPYVKVHKNDDRDAEAIAEAATRPTMSFVGIKSEEQLDLQALHRARERLVSDRTRLINQGRGFLMERGIRVGAGRHVFQKELTRLTTEGSDDLSRRMLMLLSDMASELDLINNRIAAIDAEIKTLAKADADMQRLMEIPGVGPTIATALVAAVGTGSSFGKGRDLAAWLGLVPRQITTGGKAKLIGISKHGNRYLRKLFIHGARTVLHLVRDRASLITAWATDFNETRPHSALGYQTPKAFAEYLTTATDTRAAPNESSARMSVAPPAPIGVSTDLNPEFWTV

SEQ ID NO: 399880 - protein, 402 aa, unidentified
MRYFVGVDWASLAHAVCVIDEDGQIVMRVAVDHTSEGLNKLVEALRRFGNPAELGIAIERPSGLLVDSLVESGFVIYPIHPNVVKASRPRYSAALGKTDPGDAYLLADLLRTDGHRFRALCPLSDETRALRALVRARSDLVGARVGLANQLRALLESFWAGAVAIFGEIDSPIALAFLLEYPTPASAARLAQKQLAAFLSAQSYSGRRSPEELLQRLRSAPAIQLGLAEMAAKGTLVCTYATLLDTTVRQIRELTSAIERAVMAHSDATVFTSFPRIGKVNAAQILAELGVRDRFLTEEQLAGEAGVAPVTRMSGKHRAVVFRWACNHRLRAALTWWADNSRRASPWAHTVYLCARQRGCDHPHAIRILTRAWLRVLWRCWNDAKPYDVTQHHAAVALKQPA

SEQ ID NO: 399881 - protein, 351 aa, unidentified
MNGVDEADLVVGVDTHLDTHTAAICDARGRVVSQLQVPATTAGYVQLLAWARSAAGDRPVAWAVEGTRHYGLGLARHLAAQGEHVSEIDCSRHIGKRRAGKSDPIDAVRAARELLARPAPAQMRADGDREALRLLMIDRDNAVQSCKTARTALAAVLVTAPAELREQIRPLPRERRAKACAALTCPDATDRQTRVLHQTLARLGQRIAALADVAADPEAQITAIVEDMAPGLVAAEYGLGYLSAAQILLSWSHAGRIRSEQAFAMLSGTAPVPVSSGRTDRHRLNRLGDRQLNRAIHTIAVTRMRCHQPTQAYVQRRRAEGKTDREIRRCIKRYLARHLYRALSHGILSST

SEQ ID NO: 399882 - protein, 337 aa, unidentified
MKKIIRIGIDTSKQLLQVHGVDETERPVLRRQLRRLEVDRFFGSLAPCLVGLEACGASHYWARVLRSLGHEVRLLPPSYIKPYLKRAQKNDTRDAEAICEALGRPSMRFVPVKSEAQQAALMLHSVRDLLIRQRTMLANAIRGHAAEFGIVGAKGLGKLSVVLNRVRTSSIPELARDMIELLAAQLDPLEDKLGTIEDRLRAWFRESAESRRLATIPGVGVISATRLAMKVPDPGVFQSGRHFAAWLGVTPRDHSTAGKQRLGKISRQGDETLRSLLIVGATAVIRWAKPGHASPWLLALLARKPRKLVAVALANKIARIAWAIMMHGETYRRPTPA

SEQ ID NO: 399883 - protein, 343 aa, unidentified
MKEISVVAVDLAKNVFQVHGFSRSGERILAKRLNRAGFVRLLGELPVSSEVVMEACGSGHHWARACQRRSLRVRLLPPQHVKPFVVGNKTDRHDADAIYAASQRRELRAVPVKSVAEQDVLMAHRVRERRKRARVAVMNQVRGLLAERGQVCGQGVASLRALLSTTLAHGPEGEITASFLTQLGELQAEWRGLDEQVASAEREIRRHARTTPACQQLETMPGVGPITASAAVAMAGDGSAFRDGRQFAAWVGVTPKEHASGEKRRLGGITKRGDAYLRSLFVHGARAVVRAATGDDARSRWIRALVERRGHNKAVVAVANKNARIVWALLRTGETYRAAVAAP

SEQ ID NO: 399884 - protein, 373 aa, unidentified
MTKNLRYLGLDVHAETVAVAVAEPGGEVRSLGIIPNEPSAVAKLVRKLGGREQLRACYEAGPCGYVLYWQLTKLGVACAVVAPTLVPTKPGDRVKTDRRDAEKLARCHRAGDLTAVWVPDAAHEALRDLVRAREAAKADQLRARHRVSKFLLRHGRRAPGDVKPWTQRHRRWLDTVTFAPVAQQTTLADYIHEVDHAGARLERLETALDLAIAAAPPAMQAIMRALQCLRGVRQLTAATIVSEIGPLSRFAHPRQLMGYSGTVPSEYSSGSSVHRGAITKTGNAHLRRVLVEAAWAYRFPPKCGDALRTRQRGQPPGITDIAWKAQQRLHTRYRRLLGRGKPVPHVITAVARELVGFIWAIGIAAEREVPVAA

SEQ ID NO: 399885 - protein, 310 aa, unidentified
METKVFVGVDVCKDNLDVAIGAGKDIVTFTNDQKGVDSLVKKLSRINAALTVFESTGGYELLATSCLAEAGLPVVIVNPRQVRDFAKSAGILAKTDAIDARVIARFAQAVKPEVRPLKDHQTSELTALVTRRRQIIEMIVAERNRLKLANKRNIKDIKDHIRWLQKRLDKIESDIGKMIESSPIWRCKDDILQSVPGIGPITSASLICDLPELGVLSPKKIAMLAGLAPLNCDSGKFKGRRRIWGGRAAVRSGLYMATLAAIRCNPAIKGFYQRLIAAGKCHKVAATACMRKLLIIANAMLRDQTLWQQN

SEQ ID NO: 399886 - protein, 360 aa, unidentified
MQSLVRWVGRAIGLDLHRDFCVIAICEEGVVRSAGRVATTLEALEALAASLEPTDRVAVEVSGGAWEVARILEPHVQRVVVVSPDDTGIAQARTKTDKLDARTLASLLWKGELEAVWMPDERARVLRRRLARREQLVRTRTRAKNAVHAVLMRRLHGKPPCSDLFGVKGRKWLRQLSLPPEEAETVQAAMRHIAFLDREIEQVERMVAKQMLTWPEAKRLMTVPGVNLIAAATFLAAVGDITRFISSRRLVAYLGLDPRVRRSGEQPARSGSISKRGSVSARWALVEATWSAVNQPGPLRAFYLRIRARRGHGKAIVATARKLVVLFWCMLTRGQDYAHQQPPLTAQKLRRSSPGSVDMG

SEQ ID NO: 399887 - protein, 348 aa, unidentified
MWAIGADVHMKTTTFFAFDDEAKPVTDFNRMFKSVRSNREGFLLVRMYLENIDYQILMENSSKTHDVQWTWEELGMNYIVAPSNELKKITQSDSKTDKRDAKELATYLVARFAGAKQFHVCYMCSKEDMMNRQLCRTAKVYMVEIGKCKRRIRSHALVYGIPLPRSITSTEAREYMGGFDDPILESLVGMMEDLEKRRDQLLNTIKTRFQGNPIYEKILSIPYFGEITAAYLACFICDIERFDGPKQFVASLGLAPRVRNSSETVSHCGITKKGDPHARWLLIQATIGHVRNVKDSPVTLFFNKKNGGSIELRKEQDEDRLMDRSAIVAASAKMARIIYTLVVKDRTW

SEQ ID NO: 399888 - protein, 434 aa, unidentified
MSEFLNDFIVGIDVSSEFSVVAMLEPNGSLIRKPFRIDHNPAGFNKLLGILKKEEERLKQKPIYFVESTGIFHLPLFFFLKSNDLKGFVLNPLCVHSTKNFDLRKVKNDAKDAESIARLAKFQDVKYSLVPEPQILSLRMLLREYYAISDMLTELKNRLCTDLYLLFPGYLDVFSNPFGKASLKILRDYQTPQAILSENPDTLAQMIAKTSRKGLIWGQKKVAKLVEMAQLCLSMPMEFSILSRKIQYHLDGIETFQANLEGLKDELAGMISNVDFPKNIRDSIILLEAMPGIGFLTAATILAEIGDFSRFHSPKALVAFFGIDPGVNQSGKFNGDRNKISKRGTRFGRRVLFTAALASIRTTCKGDPINPVLRDYYQNKCQNKKKKVALVAVMHKLLHYIFAVLRDQKPFEFRSPEDHQSWRNSTHSSLTLAA

SEQ ID NO: 399889 - protein, 349 aa, unidentified
MIWIGVDAHKQVHLALALGREGVLGERTIANTPAAWAALLDWARQWPERIWAVEGAWYLGRGLAQYLAGQGERVHEVNGRWTARRRRGMRTPGKSDRLDARSVATLLREEAGTLPRVYAEEDEQAAVTLWSHTQAELTKDLTRLINRLHDLLLQCDPQYKATLPDLTTKAAIAALKAYVAPGSGVLAREREALVRAAAAQLELLDDQDRELRRKLERASRARFSPLRQIEGVGPLIACAIAAELGAPRPGFGEAQLAALGGLCPLEASSAGGVRHRLNRLGNRRLNMLFHQIVLTQARLYPPARTYLLRRQAEGRTAREARRALKRLIVRRVFLAWRACFETNAERVAA

SEQ ID NO: 399890 - protein, 371 aa, unidentified
MKSIIYVGMDVHTTNYTLSCYTVENDMSFATVQVEPDYKNILKYLEQVRKNYEDPCEFLCGYEAGCLGFTLYEELKRHDVPCVILAPTSMPVYKKKEIKTDKRDAMKIAKCLAYNTYSAVHIPTKEDSDIKEYVRMRDAHKTALKKVKQQILAFCTRHGFRFSEGRNNWTQKHMKWLRELKLEGLLREVLDEYLATFSQETDKVERFDRRIAELAEGESYAKKVHCLSCMIGIRTHTALSLLVETGDFHRFKKAEQYAAFLGLVPGEHSSGDGQNRLGITKAGNSHLRRLLIEAAQCYNRGKVGYKSKELKARQYGNPAEIIAYADKANERLRRKFYHMTLKLNKTHNVAVAAVARELSCFIWGMMTGHVA

SEQ ID NO: 399891 - protein, 360 aa, unidentified
MRTKVNENLFNGQHFYVGIDTHKKSWTVSIFGEQYEHKTMSQNPDPVILASYLKRNFPGGDYHAVYEAGFSGFGACRKLRELGVNCVVVHPADVPTSTKEKLQKTDPVDSRKLARSLRSLEFEGIHIPEPKLEADRALVRQRFRIVKDLSRTKNRVKSLLFQFGIDIPEKFSTAQTRHWSKKFINWLKALAIQEESLKQTIDNYVQIGESQRSNLLVLNRQVRALSQTESYKGHYLLLISIPGIGVTTAMHILTQLGDIRRFERLDDLCNYVGLVPKMHGSGEKMKTGKMIKRGRKELKIMLIEASWEAVRKDPALMAKFNELSLRMNKNKAIIRIARKMLSRIKYVLSHHEEYQMGIVC

SEQ ID NO: 399892 - protein, 427 aa, unidentified
MNYTQNHKISQITTSTLIIGIDVAKDKHVARAQDDRGIEFGKRLIFENRFHGFQTLLDWMERQRKQNHKDHVIFGVKPTGHFWLSLAYFLTAKGYDFVLVNPMHVKKSKELDDNSPTKNDTKDAKVIAQLIKDGRYSVPNLLDGIYAELREGAKLRDQLVKQLMITDGRIQNVIQRYFPEFFDVFKDWEGKAALCTLKSFPFPSQIKEMTPEEVLEKWKTQVKRGVGIKKATKLVEAARKSIGIQVGMKFAKREIDCLLEQYELYNQQIKQLDQELESLVEDLPGARQMMAIPGLGKTTVALFFAEVGDITKYNHPQQLVNLAGLSLKEHSSGKFKGQTTITKRGRKRLRRALYLAIRPLVVHNPTFKALHQYYTKRPEHPLKKQQSLIALCCKLLRVLFAIGNKQCDFDGAKLLQGLPQIETLQVA

SEQ ID NO: 399893 - protein, 425 aa, unidentified
MSQQNVEIAAFVGLDWADQKHVATLQEANSDQQQRFTLDQTPEALQSWIQQLRNRFAGRPVAIAVEQKRGALIYALMHVDFLHLYPVNPQTLSQFRKAFYPSGAKDDPVDADLLLEILMAHRQHLRVWIPDDVRTRSIQLLAEDRRHLVDERTALTNQLTAALKMYFPQALDWFSDLHTARACAFLQRWPSLQQLKRATPSSVRKFYRAQGYRGEDKLEQLIASIPKAQPLTQDGAVLLAGSMKVQALVTQIPLLTESIERYDQQIASLFEQHDDSTLFGSFPGAGPSLAPRLLAAFGSNRGRFEFAAEMQQLAGIAPVTEKSGTGIWIHWRLACSKFLRQTFHEFAGQSITQSDWARACYDQLRKRGKSHHAALRALAFKWIRIIFRCWKTRTPYDEARYCKSLQLRRSPVAGKLAAAEKIVLT

SEQ ID NO: 399894 - protein, 348 aa, unidentified
MIYAGLDLHQKFSVVTVMDAQGKEIIKQQKLPNNGKLSDFFQTFEEPVTVAMEATRGWYWLYDLLEDKRIEVKLSHPLRTKAIASARIKNDKITSKVLAHLLRADLLPLSYVPQWNVRMQRELLRYRASLVRIQTGIKNKVHAILAKNNITHDFSDLFGKQGKDFLSSLSVSEMYRMALNGYLLILDELEQQIKAVNKGIRDSVGDDEKAKLPMTIPGVGYYSALLTRSEIGYTNRFPPARKLCSYAGVIPSTYAPGNTVFHGHITKQGSKWLRWIMAEVVTHCIDRPGHLQRFYSKLERGKGKKIAKVAAERKLLEWIYHMLRNGKSYEEMGEIASAWGKLATRSGR

SEQ ID NO: 399895 - protein, 347 aa, unidentified
MARIARHFVGIDLHRTVVQVCVVDGDGEVVAERRWRLEGPGGEGRVLRGLETWREGGRYVVEALGLNRWLVNGMRARGMEVVVADPVKLGLKALGKKTDRRDARELARRLRLGDIDRCAATHYPEDAEYGVRALLRGRRKLVGIRTQLVNQARAVVNAYRLEAPRGKLYGAKGLAWLQACRVPTQELEVWVRALGKALEGIQAQVEAVETRLGHVAKQGLRGLETQTGVGAVTGVALVYELGDVGRFRNARTVASYVGLVPRVSQSADHAHHGRLTRRGNAELRFLLGQWAVRLLARDPRVQAWAGPHLKRMHRNKVRTALARRLLVGVAASWRRQEPFDLERCLAL

SEQ ID NO: 399896 - protein, 457 aa, unidentified
MQSFYLGNDVSKGYADFVILDLKKQQVMKNFQLDDTFEGQSHLYDILSQFLAAHSGANLFAAVESTGGYENNWYNTLVKFQSTLNIQTARLNPLGVMHNSKADLKRNNTDKISAQSIAEYLITHPEKVTYQQEDQMASLRKQWGFIKMLTKQSTQLLNQLESLLYTANTELLAYCKDGTPGWVLKLLLKYPTAARLSKARVPAVSQIPYVTSERAQELVINAKRSVASASDRITEKLVSATAKQILNLKKTIDEQADLMGKECSIPEVDLLKTFTGISDSSAIGLLLEIQAIERFKTVKKLASFFGIHPVYKTSGDGSGGFRMSKKGRKEPRKILFMVALTAIRSNPLIRNIYLERTEKGMEKMAAIGLCMHKILRIIYGMLKHGKPFNPQIDLGNRQQSFKKKPAGHRDESRRFQDYDSNAPISRRQNKKRLERKPSHSVNGTKFGIDTPVPELVS

SEQ ID NO: 399897 - protein, 427 aa, unidentified
MSEVQPVKQESQFAAFVGIDWADQKHVWCLQAVDSEKRESGELEHTAEAVEAWVGQLCQRFANRPIAVAVEQSRGALVFMLGKYEGLHLFPVPSTMAAKMREALYPSGAKDDPRDADLLLDLLLQHRDKLHRLSPDTEATRRVQNLVEERRKLVDEKTAQSNRLRSHLKIYFPQFLEWFEHLDSELVCALLERWPTLEELQKVPPPKLRTFFRQHHCRDEALIEGRILAIRQSIPAIRDRAVIEAKSTVAKVIVQLIRSLMKGIADLDEKIEEAAAAHPDFFIFESLPGAGTVMAPRLLAAFGSQRERYANAAEVQSYSGIAPVTEKSGKKKWVHFRWACPKFLRQSFHEWASHSMTYSLWARSYYQQQRSKGHDHQAAVRALAFKWIRVAFRCWKDGVAYDESKYLAALARRGSPLAAFVATAKTL

SEQ ID NO: 399898 - protein, 457 aa, unidentified
MVEKSQAQAMDWDSLPPLNVNAAGLDIGATEIYACVPVGRDPQPVRRFDAFTVDLQSLAAWLAACRIDTVAMEATGVYWIPVYEILEASGFEVYLVNARHVKNVAARKSDVSDCQWIQRLHTYGLLRASFRPPEEIAALRSLVRHRDTLIHYRAAHIQHMQKALQLMNVKLTHVISDITGVTGMTIIRAIVAGERNPKVLAQYRDPACKKSQAEITKALEGHYKAEHVFVLRQALELYDFYDQQIQACDREIESRYQASAPRDPEGQPPTTAPNPRQRRPRKGQAHFDLTSSLYQMVGVDLTRIDGIDALTAQTLISEIGLDMGKWRTVKHFTSWLGLAPNPKKSGGKVLATHIRRTQNRAAQALRIAAQTLARNKSALGGFYRRMRAKHGAAQAVVATAHKLARIVYHMLKYRQDYHDLGTDYYEQQYKERVVRTLKRKAADLGFRLEPVLTPQVS

SEQ ID NO: 399899 - protein, 348 aa, unidentified
MTVYGAIDLHANNGVAVVLDEHDRVLLQRRLPNRLEEVVSALAPYRGELKAVAVESTYNWYWLVDGLQEQGFPVVLVNTSAVRTYEGLKYAGDEHDARWLAHLLRLGLLPQAHIYPREQRAVRDLLRKRMQLVQCRTQQVLGVQNLLARNLGSSTTAHAVKRLDEEQLASLPVSPEQRLALAANVAVIQCVQQQLERIEAEVLRATLASSMAAAYRGLQTVDGIGKVLALTIALETGDIGRFARVGQFASYCRCVGSQWVSNGKTKGRGNTKNGNPFLAWAFIEAANFAIRYNATIKRYYERKERRSKHRLVALKAVAHKLARACYFVMRDGVAFDVGRAFGPEAARG

SEQ ID NO: 399900 - protein, 405 aa, unidentified
MDLIPICRCAVGMDIHLNVIEVCVITENPDGEPQVHRRRFGGFRRERLEMAEWIAGFAPDTVVMESTGIYWKSPYAYLERVGIRALVVNAQHVKKVPGRKTDVADAEWLAMLARAGLLRGSFIPPERLRNLRQLARHHQRLTALLGAEKNRLVRVLGDAGIRLSAVVSDPHGVAARAMIDCLLDGGTPQQALLHAGRLKAPHEELAAALEGELSTEHLFVARMLRRHIDALETDLSALERELIVAMAPYQPAMDLLLTIPGIDTLAAAKLLVEIGDDMTAFGSAGCLAKWAGLCPGNDQSAGKRRNAKTPKGNRYVRALLCEIAWSAARTASQFKSRYQGLVIRRGAKRAIVAIAHKLLKIVYVLLARRVPYRDDTVDYEALAVQRKAPRWIRQLKKFGHLPQTA

SEQ ID NO: 399901 - protein, 317 aa, unidentified
MTWIGIDIAKRTFTASKPGKAPARTFTMDLDGWRAFRAWIPEPDVRVCMEATGPYWLQLAEWLGQATTPYAVVNARKVRRFAQASEQRSKTDPIDAELVRRFAEVFSPECTPGDEGVTRALRVLSRRILQLQTQLDIERDRREKTAADPATPDAVLASFASITNEISRLIEDLEHRAKALVLAEPALSRDWELLCSIPGIGPKTARTLLAEYGPRLASASVKQLTSFAGLDVVRFESGSSVHRRPRISKQGNWRIRRALYLAALTASRHNPTLAPYYRRKCKQGLENKQALVAVMRKLIHIAHGILKNQTPFQEATA

SEQ ID NO: 399902 - protein, 369 aa, unidentified
MKKTIKNIGLDVHKNSISIGIADEGRDGEVRYYGKIDNDMNQLNKVIRKLISKGAVLRFVYEAGPCGYAIYRYLTKNAMECAVIAPSKIPQKSGNRIKNDRRDCLSLARLHRAGELTPVYVPTEEDEALRDLVRGREDATRALRTAKQRLGAFLLRHDIVYSGKTKWTKAHFNWLSDIAMSHPAQQIVFQEYIDTVTDCSNRVQRLTEHVRQQSQQSRLHELIKALQSMRGISLIVAATIAAELGDLTRFENPGKLMAFLGLIPSEDSSGERVKKGPITKTGNSHVRKALVEAAHAYRFPARKSRAIRKRQDELSKEVIDISWKAQCRLCTRYQYLTAKGKKSNVAKTAIAREIVGFAWAIAKTLPRAA

SEQ ID NO: 399903 - protein, 528 aa, unidentified
MTSTNLAKTPSFRLDGKRALVTGGGRGIGLAAASALAAAGAHVTLVARSKSEIEDAAAAIRARGDKADALVLDVTDIEAVRNAIAQAEPFAILVNNAGMNRPAYLADVTVEDFDAIFALNVRAAFFMAQAVALRLIEAKLPGSIVNVSSQNGMDRPRSRPHNGSLSTRGLVRRRSTTMPRTSTVHAVTAIGIDMGKNTLHMIGLDTRGAIVLREKVSRGRIALRLANLPPCLIGIEAGMATHYVARELAALGHDVKQVPPTYAKPFRQGQKNDFRDAHAVAEAVQRPTTRFVPAKTDEQLDLQALHRVRSRLVSERTAVINQIRGFLLERGIIVRQGLRFLRQVLPDILAKRTDVLSPRMVRILADLASDWRQLDGRIEPVTDEIETLAKSDDSCRRVMTVPGIGPIISSAMVAAIGSGAAFAKGRDFSAWLGLVPKQMSTGDRTILGRISKRGNGYLRMLFMQAARVILLRPANWPKHGFGVWLARAAVRLHPNVLAAALANKLARIAWTVLAQQRSYEARLTKAAA

SEQ ID NO: 399904 - protein, 352 aa, unidentified
MQHFIGCDVHTRNQVVAWIEEETGEIRKRRLEHAGEEVRKFYAQFPRGTVVGIEATFPAYWFERLLGELGHELWVGDAARIRASEVRYPKTDPRDAEGILDLLRTGRFPRIWVPSLAERDLRQWLVHRMKQVRARTQVKNPLHALAISQGVCRGRKLWSAQGRAELESLVLLPWAARRRKELLEALDRLDEQVRELDRAVEEAGRARPDVALLRTHPGVGMVVGLAFVLSAGPIERFPNRRKLVSYWGLNPRENSSAGRQRLGSISKQGNTMMRWLLIEAAQTAARLDPQLRRTYQRLKHQHNSGVAKVAVARRLVVRLFWMLRTRNKYAQLVHMSGSPSSAVVPPQGGPNL

SEQ ID NO: 399905 - protein, 408 aa, unidentified
MNPLFVGIDVSSRNNIAYLMKPDGSKHSSFSVQNNLGGAKILSERIVSALGSMQLSDVIIGLEATSIYGDSLVYALRKDGSLGRFQRKIHVLNPKQVRKFKEAYPDLPKNDWVDAFVIADHLRFGRIAKEVYMDDYRYQALRTLTRSRFDIIQNLTREKQRFANYLFLKCSGIAQAKDIQNTSATTIALMERFETVDDLANTDLDELTAFITETGRGKFADPDATAKAVQAAARGSYRLPKTVNDTVNQAMAVSIASMRALKEQVKVLDKAIEQQFEIIPNTLTSIPGIGKVYSAGIIAEIGDIHRFDSQASVAKFAGLVWHRNQSGDFEAEHSQMIKSGNRYLRYYLLEAANSVRRCDSEFRRYYDLKFKEVNKYQHKRALALTARKLVRLVFRLLKDNRLYIPPEG

SEQ ID NO: 399906 - protein, 356 aa, unidentified
MSKNSMLFVGVDLGDKFSHVTVLDQEGELVEEARLPTNRAAFERKFSVLSRSRVAMEVGGHSRWASQLVEDLGHEVLVANARKLKVIYTNPRKGDEADAETLARLARLDPKLLSPIHHRSPQAQAHLSMIRSRDVFVRTRTLLINHVRGTVKASGERLPSCSARSFHHKAGDSLPEALQPAVLPILETVARLTEQIKVFDQKIEELCKESYPETQLMRQISGVGPLTALAYVLTLKDPGRFHKSREVGPALGLVPRRDQSGDQDPQPHITRTGDVYLRRLLVVAAQYILGPFGPDCDLRRWGLKVAERGGKNAKKRAVVAVARKLAILMHRLWKTGEAYDPSYQIRGEIEAPSLAA

SEQ ID NO: 399907 - protein, 380 aa, unidentified
MKHTQMILQEAITNNRLLYIAFELSETKWKLMFSNGVKRRQRTIESRDLNRLLLEIQQTQEKFQMGEEVTMMSCYEAGRDGFWLHRFLTGRGINNLVVDSASIEVNRRQRRAKTDRVDAEKLLNMLVRHVHGERKHWSVVRVPEEAAEDARRLSRELERLKKERTAHTNRIKSLLVLHGVTGVLVSSSFQGQLAGVRLWNGKLMPEQLKQELLREYERYCLIQTQIRQLTLQQREQLKTDCPQAVQVRTLGRLRGIGPVGSWKLVYEFFSWRRFASGKQVGAAAGLTPTPYASGTMNRELGISKAGNRRIRHVMIEMAWQWVRWQPDSELSKWFEQRFGSGTARMRKTGIVAVARKLLIALWRYLEQGCVPEGALVMGKA

SEQ ID NO: 399908 - protein, 423 aa, unidentified
MNNKTKEVPFQERFKLFAGFDWASDHHDIVAVDASGKIVLELTIEDTAEGWVALRKKFVDLVGQDLGLVAVAVETNNGPAVERLLEMGCRVYPLNPKAAKRYRERKSPMGGKCDRLDAWSMADALRTDGHAWRPLEADDPLTQELRILCRDEVQLIQQRTALICQLRAALHEYYAAALEAFSDLVAPSSWAFVEAFPTPQALVEAGKEQWNTFLHTHRLARPERYQQRMDIFASAEEFCGTEAVTKAKSRLAVALVKQLRVLHNQLREYRKAIEALFAEHPDSDIFESLPGAGDKLAPRLLSEFGQHRDRFADAEAIQCYSGTAPVTKQSGKRRRVHFRRGCNKHLRTAVHLWADHSRKKCAWADVYYRTKREQGKSHSCALRCLGQRWLKILWKMWQTGTTYDEALHTRNQIRHGSWVLRPG

SEQ ID NO: 399909 - protein, 409 aa, unidentified
MAMLDVALDPATVVVAVDPGKVMNRVWVSDGSGLLEEPVSLSVARDGIVVLERMLAAHAGEQVIAIEATGNLHRAWAAELERLHPGSLRLFAPSETKAARTQLGSGRFKTDDRDCAALTYLARQGAGREQSEESAVERLRSAVRHRHRLVDDRKRAQQRLHDQLNGLCPGLSAPAGHGRALPIETPTGQAVLACAAAFAGRPPTTRSLIARAPGRLTKTNAEYWVQRWRGCLPPPSDARQRAHWLDRDLQRYQALRADIAALEEEIKVLLAGTDGQVLTSLPGVAVIRAAAFAAHSLPIEKFPDAEHLYSATGLAPALYESATLRRRGRISRQGLAEHRDALMGIAWGLSLFSPSFSERNAELRCRGMAPIQARVALARNACRLAYRILVTQQPFDEEAYRRGRLSRGR

SEQ ID NO: 399910 - protein, 343 aa, unidentified
MKIYALGIDLGKTVFHLVGLDSSGQVVVRKRCSRTQLLAFTGNLQVRLIGMEACSGAHFLGKALRAQGHDVRLMPAQYVKPYVKTNKSDYLDAEAIAEAVQRPRMRFVPIKTEEQLDLQALHRVRERWVMRRTAVVNQIRSLLLERGLTLPKGRSHLGQMLPRILEDAELKLSGAFRVLLAQLKLELEQLAARIEPMDMVIQQEARENESCQRLTTIPGVGPVTATALIAAVGNGSAFGKGRDLSAWMGIVPGEYSTGGKQKLLGISKRGNKYLRRLFVQGARSVLQHRDKQAPGLSSWLAQLLARAHQNVVVVALANKLVRIAWAVLCKNENYRAPVLAATP

SEQ ID NO: 399911 - protein, 331 aa, unidentified
MSNIIGIDVCKANLDCAYLRDLDQDKAKRKSCPNNLSCFASLVTWATARSGLPIQALAFIIEPTHVYHEQLVHFLFNAGATVYLVNPGRVRKFAEGIGILSKNDLVDADLLIRYGLMARNLIAYQPAAPEVNDLRSLLNRLDALEHNLRSELNRQEKVGKTMVFHRLEQQSIARSVKRLKAEIITFKRAIRECVKSKPSLQQSFNLLCTIPGVGAKTAWIMIVILGSRAFRSAPEVASFLGLNPIEKRSGNSQYRRPRLSKSGSGHYRQKLYFPAMVATRKNPDIRALYERLLAADKSKMCALGAAMRKLVHICYGVVKNQTPYQAQAISS

SEQ ID NO: 399912 - protein, 387 aa, unidentified
MPAEAGIQSGGLNNLLLLGWTAPDGIECARLRVVITTAKGSRPMTIIRVGLDTSKSVFQVHGADEQERPVLRRQLRRGQIEKVFAKLPPTRVGLEACGASHHWGRVLRDLGHEVMLIPPQYIKPYVKRGKNDVIDAEAICEAMSRPGMRFVPIKSREEQAALMLLKVRDLLTKQSTMLSNAIRGHAAEFGVIGAKGPQKIKELLERIAGEANMPEPARELLNDLASQLAAVEVRLAALEAKLMAHHKADPRSQLLATIPGVGPVTAVNITLKVPDATVFRSGRHFAAWLGITPREHSTAGRQRLGKISRQGDEGLRRLLVLGATAVIQQVERRRKAKKTSGNDSPWLLQLLARKPRKLAAIALANKMARTIRAMLVSGELYRRPQAA

SEQ ID NO: 399913 - protein, 426 aa, unidentified
MFSESQDDEQIIERVAALDIGKAEVVCCVRLPAPGPGKRRVQEVTTHTTMVRSLSELANRLVDLRVERVVMEATSDYWRPPFYLFEAHGLQPWLVNAKDVKHLPGRPKTDVLDAVWLCKVAERQMLRSSFVPPREIRRLRDLTRYRVDLVGVRNAEKNRVEKLLEDACIKLSVVASDIFGVSGRAMMAALIAGERDPKVLAEMARSRMRVKIAQLEEAFAGLPTGTFDDHHRFLLARMLSRVDQGDADIGALDVEIEAELAPFGDAVARLDEIPGIGPTAAAVIIAEIGTDMTRFSTPGHLCSWAKFAPGIKSSAGKNKGNGSTGHGNRYLARVLGEAAVAASRTDTFLGARYRRIARRRGKKKAIVAVGRSLLVAIWHLLSDPETRFVDLGTDHFDRHVDTATKKRNHIRQLEALGYRVTVEPAA

SEQ ID NO: 399914 - protein, 344 aa, unidentified
MGHYVGIDVGLRSSSLCIIDEQGKVCLEREVASEIEAIADAVRGFAEHVDGVALETGNLTPWLTAGLRAEGFRVVVMEARQVKTTLSSLRNKTDRNDARGIAQILRTGWYREVHVKSLESQRLKTLLAARKALLRRRIDLENEVRGLLKVYGFKLPAQIYHARFDDMARQAVMADPALAEALGPLLDARGHLYRAFLEIDKRVRSIAHDDPICQLLMSAPGIGFIAALTFKAAVDDPKRFRRSKTVAAHFGLTPRRYQSGEKDNPGHISKAGDVEVRSALFLAANTIMNGRGKPSSLRSFGARLARRKGRKRAMVAVARKLAVVLHAMWTDGTLFCNVEKEALA

SEQ ID NO: 399915 - protein, 370 aa, unidentified
MKKRITFVGLDTHKNSIEVALADEGANSEVRLYGSIGGDLDSLDKMIRKLRIPGAELRFVYEAGPCGYEIYRHLRAQGLHCDVVAPSMVPRRSGDRIKNDRRDACNLARLYRAGELTAVYVPHEDDEAMRDLVRGRQDAINAQRKARQQLGGFLLRHGVRYPGKCLWSLAHGRWLAGIKMPHPAQQIMMQEYIHTVEECTQRVIRLNEQIQQLLPDWRMHPLVTALQALRGVAPVVATTVVVEIGPMGRFKNPRQLMAYLGLVPSERSSGGSVRRGAITKTGNGHARRALIEAAHSYRHPARISRTILKRQETLTEPVRQIAWKAQLRLCARFRRLIARGKSRNRVVAAVARELSGFMWAIAKQVPVPQG

SEQ ID NO: 399916 - protein, 410 aa, unidentified
MVKENFIYVGIDLHKETHTAVMIDCYNQKLGEITFPNRPADFPKLVTKVKKCNTDAKEVVYGLENAYGYGRPLAVWLIDKGYFVKDVNTAISHRQAKHRGAMYRKSDSDDAEAIALATLNMLDKLPDACPNNAYWSLGQLVHRRDNIMKQRTRLVNQLHEQLCIAYPSYKQFFNDISRPTALYFWEHYPSRKYLKGKSVEDLRTELVPVSHNRCSTKNCEKILDAVASDKVKNNAYQDARDMVTLSIVSDLQHYDSQLAEVDKMLEQMYKMLGCTLTTIPGVNVITAVKILAEIGDIKRFSNANKLAQFAGIAPLHLSSSGKGKDVATKQGNRRLQATIYFLAIQMVQVSSKGTPRNSVVRAYYEKRKAEGKTSQQALICISRRLISIIYGMLKHGTEYRMPVVESAGEK

SEQ ID NO: 399917 - protein, 325 aa, unidentified
MFVGLDLHKRYSEFAIMDIFGKVLRQGRIENTLEEMTTFSESIPAHSSIAIESSSTWYWAHRLLSGRHNVVLSNPVKNKAIASAKVKTDKIDSLMLATLLRGGFVAESYVPSRETMEFRELVRYRANLVRQRTRMKNQVHAHLLMNNISIEAGPFTKGFVEEVRKIDDARVQGYLRLIDGLNREIREASVAIRQKAGSNEEANLLMTIPGISFYSALLIVSEIGEISRFEDSSSLVAYAGLAPSTHSSGEKTYHGPIMKSGSRYLRWIAGQCTRVHMRAEPDGTVAIFYARLARKKGDQKAIVAASAKLLKVVYWVLKERRAYHS

SEQ ID NO: 399918 - protein, 398 aa, unidentified
MSLDHSFAGPTAIRVQFGAIFVSLELSRSTWLVTSLSPGRERMSKHGVKAGDIAGLLGHFAGLKRKAMTRTGEDYPIVVIQEAGLDGFWIHRVLQGEGIESHVVDAASIAAPRRRRRPKSDKIDGEGLLRVLLASKRGEPRVCAMVVAPSPEEEDRRRVCRERQALICERIAHVNRIKGLLFSQGISDYAPLRRDRRPRLEALRTGDGRALPLHLKAQIVRELDRLELLLDQIKAVEAERDAVLVEVRQSAANAVTICESNALHPIAMLLALKGVGTEFTNTIWSEGLRRRFANRRQVAAYAGLAATPWRSGSIVREQGVSKAGNPRLRTAMIQLAWLWLRHQPQSALTRWFNARGQRGHKGWRNSAIVALARKLLVALWKYVTQGVVIEGAVMKGAA

SEQ ID NO: 399919 - protein, 426 aa, unidentified
MQPHYNCVCGVDVHKEFLQVCLLKREEGPVIFRVFNNFSGIQELKQRIEVESCECIACESTGVYWYRLYLAFEGQIRVIVGNAYQIKSIPGRKTDVRDAQWIAELAMSGLINPSRVFQKKDRELRELTRSRESTVKSRTQIKNRIHRILDSAGISLGKGVRDIFGKSGVHLIWGLLNRADPEEIITTLPSARVKKKADALREILSGSLSDLQIILIKRNLDMMAHINEHIRALDEQIIARMTEQDSIRDVEIACSIPGISVTSAVTILAEIGDYHDFENAEKLASWAGLVPSVYQSAGKNCSGKITKHGSEHLRWILVQAAKAAGRTVNTTFRKFFNRIAYRKGGNTATVALARKILCILWHLLINRELYVDPLKKAKSTKPPIFHKFSKNSPSDVQQAIDFIIECGFEVIHPDSSLDQKFREVSR

SEQ ID NO: 399920 - protein, 367 aa, unidentified
MKKISTAATRQIKNFSEQKLTIGFDLGDRSSWYCVLDESGRVLLEQKVSTTPKAMQEVFGGMPRSRIALETGMHSPWVSRLLSELGHEVIVAHARNVRLIGESRKKDDRLDAQTLARLARIDPQLLSPVKHRSAKAQADLTVIRARAGLVRARTALVNTARGLAKSYGERLRGCNVRNMNPEKAEALSPELQRALGPLLAASAALSEQIAEYNERIEQLAQESYPQTALLKQVKGVGTLIALTFLLTLEDAHRFQKSRDVGCYLGLQPGRRNSGQSEPQMHISKEGDPYLRTLLVQGAQHILGPFGIDCDLRRWGLKLAERGGRSGKKRAIIAVARKLAVLLHHLWVSGEVYEPLHNRNQKAMPAAA

SEQ ID NO: 399921 - protein, 339 aa, unidentified
MTAIVTIGIDLAKNVFAVHGVDATGKSALVRPSVPRAKLLELIAALPPCLIGMEACSGAHHWAREFQNFGHTVRIMAPKFVIPYRLSGKRGKNDAADAAAICEAVTRPNMRFVPIKSIDQQGQLMVHRARQGFVEQRTATLNRIRGLLSELGIVLPLKAAVVRREAMAHLEDLPGWANTVIGDLLSEVSHLDERITQYDHHIELMARHSTEAKRLMQLSGVGPTTATALLSTIGNGHDFKCRRQLCAWLGLVPGQYSSGGKQRLGRITKAGDPYLRSLLVLGARAVLAAAKTKSDPISRWAVSLEQRRGYWKAIVAIAAKNARMCWAVLSRGEAFRLPA

SEQ ID NO: 399922 - protein, 422 aa, unidentified
MLQETLETEEIIERVAALDIGKAEVMCCVRVPDEDRPGRRLQEVRAYPAMTRSLLRLADRLRSLGVTRVVMEATADYWKPPFYVLEAAGFETWLVNARDVKHLPGRPKTDRLDAVWLCKVAERQMIRPSFVPPPEIRRLRDVTRYRTDLVGARTAEKQRAEKLLEDACIKLSSVASDIFGTSGRDMMAALIAGERDPRRLAQLARTRLRGKITALEEAFAGHFTGHHAFLLAKMIARTDAIDADIADLDTKIEEMIAPFSQAADRADEVPGIGRIAAAVIIAEIGLDMTRFPTPGHLVSWAKFAPGVKESAGKKKGRAATGHGNRYLARILGEAAIGASRTSTFLGERYRRIARRRGKKRALVAVGRSILVIIWHLLSDPAARYADLGPGFYDTRISHQRSARNHVRHLEALGYKVTLEPAA

SEQ ID NO: 399923 - protein, 362 aa, unidentified
MPTTITKSTDFKEQVFYIGIDVHKKSWTITVRTLDLEVGHFTQEPGAGQLARYLHSRYPGAKFFSAYEAGFCGTSAHQDLCKVGIHNMIIHPADLPQTDKQKKTKTDLHDSRAIARYLEAGLLSGIHIMPADQQERRALYRCREAKVKDVTRCTNRLRSLLHYLGVVIPQAFRDKEYISQNFLSWVCELKLTTDEGTETLLQYVEELRYQRQQLLQITRKLRKAVIIHFKESYRSLLTVPGIGPITAMGLLCETGDLNRFSDPDEFASYLGLIPGEQSSGETIFSNHIQPRCNTHLRPLLIEASWTAIRRCPMLLMYYKKHVGKNSKKAIVKVARKLALIAKAVALKKTIYDAEYINKLKPF

SEQ ID NO: 399924 - protein, 329 aa, unidentified
MDAPRGPHIGDGGVRVGTTWVGIDVSKASLTIGVWPTKEHWTVSNDEMGIAPLVDQLRELTPERIVLEATGGWERPVMGALLAAGLPAVVVNPRQVKDYRRSLNQLAKTDRLDALVLGRFGESTRPALHPLPEPALHELQGLLARRRQLVEMVSSEKNRLATALPETRPEIRDHIAYLEQRLSRYNDQLGQLIEASPAWLAKSQLLQTVKGVGPVVSSTLIGDLPELGTLTNGKIAFLVGLAPITRDSGQFRGTRRIQGGRAHVRAALYMAARVAVRYNPRLRDFYQHLLDRGKLPRVAIVAAMRKLLVTINAMLRTNTAWRDLPSTNP

SEQ ID NO: 399925 - protein, 457 aa, unidentified
MYRELHSLRQALREELKGTLPPLTGVEPDKMLETYLNQLTLYVGLDVADKTVTLLAMNANQEELGHLLDAANTLQGYVQIGDWLESLRVQHHLRIIAVACETTGVFYWGVWDSLAQRPNVARVLYNPRTTEHMGEVLSKRVRTELVDALLLAEQLRLGSTPEVVLTDNAELLSARLCSRAARDAAQMINRKKNQLRSLVRGYNPVIAQVFPGSKFHHPAVYAVLKQYVFPNEFVTAGVEALTTILTEHSRSAFGTEQAQKLVELCQGYLSRPIRQEIVRQRVQDLIEEITLTRKHQQAMLKAGYALIKDRPEAKVLKASTGAGISNTLALVTELCDIQRFPDGEHAASFLGLTTSKHISGTSIYHSKHITKQGSPNGRYAAVNMALHLAVRVPKYQAMYKAIKSRKPPRKGHFVALVAIARDFVTNVLYDMWRYNRPFFIKVEDYHQYRKEHPRPMS

SEQ ID NO: 399926 - protein, 477 aa, unidentified
MASFYMGIDVSKGYSDFVIINHQKQTVMENFQLDDTFQGHSQLYEILQDFLAKHKEAALYAAVESTGGFENNWYQKLVSFQALLPIQTARLNPKGVMHNSKADLTRNKTDKISAKSVAEYLISHPEKVRYQQEDPLASSRKQWSFVQMLTKQCTQILNQLHSTLYTANPELLRFCRNGIPDWVLNLLMKYPTAKQLARANEKTVAKIPYITVERAQKLIAAAKDSVASSDDEVSAQLIISMATQIQHLRKHIDAQNKLMAKQCDLPEVQLLKTFVGIGDILSIGLMIEIQSIARFKTVKQFGAFWGVHPVYKISGDGSGSFKMSKQGRGQPRRLLYLVALTAINHNSVIKSLYEYHLKKGREKMDAIGICMHKILRIIYGMLKNNTAFDPQIDDSNRKRIIKSQKSIPKKDKSRRFQDYDGGAPISCKQNKKRMEREQSQSIKNTECGISDLVPLSSILPDMLNKLQGGFTEFSKNI

SEQ ID NO: 399927 - protein, 387 aa, unidentified
MPQLNDLSRSLVALDQDSTIIAVVELSQSSWLVAGVLPGIERQPQKKLEPSAERLLGLLHRWRDEAVRAGKKITRIALAFEAGRDGFWLARWLNARGVEAHVIHPSSVAVSREHRRAKTDRLDTELLKRGFLGWLRGERGHCTMARVPTIAEEDAKRPNRERECLVGERTRIVNRIKATLARMGIRNFKPTLRKAAERLATVRTPEGMPLPPNTLAELQRDMARLGFVVSQIREIEQARQKRLEQETETGPHAMVRQVARVIGIGIETADMLVHEVLSRPMRDRKAVARYAGLTGSPDESGARRREQGLARAGNARVRRGMIQLAWRFLRFQNQSALAQWYRARTADSRPGTRKTMIVALARKLLIALWRFVTTGETLDGVILRPAG

SEQ ID NO: 399928 - protein, 412 aa, unidentified
MEVVHARCAGMDISKTDAKVCVRIAGAGRRKTAETVTTWGAMTGQVLALRDHLAGEKVTCVVMEATGDYWKPFYYLLEDLPGVQVMLVNARHVKNLPGRKTDVADATWLAQLGAHGLVAGSFVPPAPIRALRDLTRTRTAITRERGREAQRLEKLLEDAGIKLSSVASDILGVSGRAMLEALIAGQRDPDALADMARRRLRARIPELTQALEGRFSEHHGFLARVHLDLIDQHTAAISELTRRIEQVIEPFRRFRDLICSIPGIATVTADVIVAEIGDDMSRFPTAGHLASWAGTVPGSNESAGKVKSSRTRPGNPYLQGALGTAAMSCAQHPGTYLNAKYRRIATRRGPQKANVALQHAMLIAIWNMGTNGTFYQDPGGDYFARLNPGKARTRAIRQLESLGYTVTLASTS

SEQ ID NO: 399929 - protein, 325 aa, unidentified
MPPRRELVTNKAEFNPNFMSEKIYFGVDVCKESLAFCGANVAGQVPNNAPGVRRLLARLPQGAHLIIEASGGYERELVKVAQQSAVPLSVVNPRQVRDFARGVGRLAKTDPIDAEMLARFGAEVNPPPDAVPTTAELALQELVSARQQLVEQRTVLLQQQSQHLNNVVRRLDRARLKLLQRQIGQLELAISSILEEQSALKQKVERLQQVKGVGFITAVTCVALCPELGSLSKRQTAALVGVAPYDDDSGARRGWRHIVGGRPRLRRALYMASISAVRSNPILRRFYQQLRQRNKPPKVALVAVIRKLAILLNRLLQNPSFLPAS

SEQ ID NO: 399930 - protein, 359 aa, unidentified
MSKNSTLFVGLDLGDKFSYLSIVDHEGDLIEETRLRTTKPALRRKFSTLPSSRVAMEVGTHSRWTSQLIEELNHEVLVANARKLKAIYDNPRKGDRADAETLARLARLDPKLLSPIHHRSPEAQADLALIRSRDALVRSRTLLINHARGTAKAAGIRLPSCSAASFHHKALEAVPETLDPALMPILETVGSLTTQIKEHNRRIEQLCDERYPETKLLTQISGVGPLTALAFLLTLEDPRRFCKSREVGPALGLVPKRDQSGDKDPQLRITKTGNAYLRQLLVNAAHYVLGPFGPDCDLRRWGLKLIERGGKYPKKRAAVAVARKLAVLMHRLWKTGEKYDPFYQSKSHDEQSTPLASAA

SEQ ID NO: 399931 - protein, 428 aa, unidentified
MAKATTQSVMQTDDDTLYYERCAGIDVHKKLLVVCLRIGRKTESREYGTTTGEIREIVRWLKESGCQMVAMESTGSYWKPLYNIFEQETLPAMVVNAYHIKNVPGRKTDWNDAFWIAKCLAQGLLKPSFVPTCEQRELRDMTRFRKSQIEERSRNINHLQKFLEGANIKLGSWLSDIEGKSATQLLELIIGKPDFTIDDVKDRMHGKMHSTPEEIFAAIEGYITPTQRAFFAHVMNIIREQTKLIEVTDAMIEFSLNDEQKEAVKALNTIPGIGVVSAEQIIAETGTDMSHFRNQHAFSNWIGVAPGNNESAGKRKSGKTTYGNKTLKSTLTQCAKSAVKNKRTFFSAQYSRLVSHRGKNRATMAVAHSMAIAIYFVISGAAFEDLGADYYHQFNREKKINSHIKQLAKFGLTFPDEVLRTAIELSTA

SEQ ID NO: 399932 - protein, 352 aa, unidentified
MPKGTRIVIGGVDTHGRTHHAAVLDEQGRLLGDQEFPANRGGYRQLLSWLGHHGQVGVVGVEGTGSYGAGLARYLLDQQVRVVEVDRPDRRIRRQRGRSDPIDAEAAARAVLAGTATAAPKRRDGIVESIRALRTARSGAVKARTAAINQLKALLVTAPANLREALDGRSTPALIAACGRLRPDQNALADPAHATKAALAMVAQRIQLLEAEITLADQRLAILVGRAAPRLLQLLAIGNDHAGQLLVTAGQHPERLRGEAAFAHLCGVAPIPASSGKTHRHRLHRGGDRDANRALHLAVVVRMRFCPRTRAYVQRRTREGLSKPEIIRCVKRYLAREVYHALVADFEALHTT

SEQ ID NO: 399933 - protein, 415 aa, unidentified
MALKIVYKICCGIDVHKTFVVACIASTDKHGVTSYERHRFSTYTKGLKNLLQWLLEHNCKDVCMESTGKYWIPVYNILESDCSIVLAHPKYVKAIRGKKTDKKDAKWIADLFKHDLVSGSFMPPADIRQLRDLMRYRFKLTCFKSSEKNRLQNCLTVSNIQLGNVVSDTFGKSAQAILDKILENPEDTSFDLEPLVFKSLKKKLPELRDAIDGYITPEQAGKLKIIKAHYESLESRKAELEELILALAAPYQQEFAILQTAPGISSDFTAIGIISEIGTNMEAFPSAKHLCSWAGLTPTNNESAGKKKSVRVSKAGCYIKPLLVQCANAVVKSSKHPEMRNRYLRLKKRRGHKKAIIAIARMLLTALYHMLKNGENYNAELYRKSDLPPVDREITVEQAILIARNQGYKIKSATA

SEQ ID NO: 399934 - protein, 357 aa, unidentified
MEYGAIDLHKKESQIRIVTATGDVIDRRIATTREGFRALFENRAPLRVLLEAATESEWVAQHLEGMGHEVIVADPNYAPMYGQRTRRIKTDRRDVAALTDACQRGTYRAVHRRSAAQRARQQQLQIRRGLVQARTRAISMVRALTRAAGLRIRSGRPETFLTRLGALELAPPLTDTLTPLRNTLTMLNEELETIDEALTAQVRTDPVAQRLMTFPSVGAITALTYMAALDDVHRFRRAGEVTSYLGLVPHEYSSGERQHRGHVIRSAQPEMQSLLVETAWRVWLSADPRTARLRTWAQRLAQRRGKRIAIVALARRVARILYAMWRDERDFDASRWRTADRAVTPRGPAADPVATAV

SEQ ID NO: 399935 - protein, 312 aa, unidentified
MAVAESCLIGIDVSKAQLDVAVSPSGETTGFANTDGGIEELVAWAKGVQPHLIVLEATGGLEMLATGRLTAADFPVAVVNPRQVRDFAKATGRLAKTDRIDAQVIAQFGQAIKPVPRALKDEETQRLSALLVRRRQLVDMLTAEKNRLSRAHLRIQKDVKQHIAWLEKRITKTEGELAAAIKASPIWRAKEKILTSAGGVGPVLATTLLCRLPELGDLNRRQISALVGVCPFNRDSGTMRGKRSIFGGRADVRAALYMSTLAATRFNPPIKAFYDRLIRAGKLPKVALTACMRKLLTILNAMVKNHQPWQPQ

SEQ ID NO: 399936 - protein, 339 aa, unidentified
MRHIGVDLHTNSFTACYLQEGKPEHIQTFRLKDLDNFTKDLQETDEVAIEATGNSCFFYDAVSPYVKRIVIIAPGQFEVVRRSVNKTDKHDARAIAFFLSKDMLPEARCKNKQCQQLASLLQTRDQLVKSRVSLINKVHGLFNYHGIKIKKEVLTTKVGFERATQKHNWDPLEKVEIEVISYHLEAIRESLKKLEKEIIAFAKQLPGFSNLIGIKGIGPISAAVFIVTIGDINDFRRPEKLTAYFGVVPRVSQSNQQCTIGRITKRGSKIARTSLVQCTWIAVRYSLYLKSFYEHIKKKRGSAKAITATARKFLITIFYTLKNNWVFKDFTKFEISIGQ

SEQ ID NO: 399937 - protein, 416 aa, unidentified
MELQMNKVCGIDVHKRFLIATILSRDGTKEIQRFSATLEDLLTFRDWLIKNGCEQAAIESTGIYWHPVHAVLEGKIDLIVANAYKIKHTPGRKTDISDSEWIAELCLNGMIEPSRIFPKDDRELRRLTRAREGYVKQMTQEKNKIHHSLDSACIKLASVVSDIFGKSGMYLLNGILEGKDIDEIVEGIPSNRLKKKADQIKEAIKSRLEISQIILIRGSLCLMRSIQERIDELDGEISARIQRRKNDLAIAMSIPGMGFISATAILAEIGDYTDFENSEKLAAWCGLVPSLYQSAEKVVLGGITKQGSKHIRRMLIQIAYAISRTKNSKLKRFFLRIQAKKGSKVAAVALARKVLCILHHLLINQEMYQEDEDKKNSRRKTIVSPSSIEMPIQEMIDCIVRAGYVVTKSDSRGRLG

SEQ ID NO: 399938 - protein, 340 aa, unidentified
MSIVMGLDQHRAQISAEWIDTITGEVIRARVVPADRAGVRKFLAQFRGDGLEVALEATTGWRFVVEELERIGAEVHLAEPAEAAALKGKKKRAKTDWADARHLRELLLIGRLPASWIPPAHILDLRARVRTRHLLSHQRTEWQQRMHAVLYHHGFPQRHNLLSLENRGWIAGLRLPAAAREQLDIALQIIDALDLQLVPFDQALHAIARKQPGCRALIQRIYGVGDLTAVTILAELGDVRRFDNSRDVVRYGGLDITVYQSDDHRAPGHLSRQGPPALRWALYEAAQRARFPASPDRPYYEQLAARIGGKRACLALARKLLKRTYHILKELGDQALAPVS

SEQ ID NO: 399939 - protein, 420 aa, unidentified
MDVVVARCAGLDVGKRELVACVRVPADGARAGTVLGSRRQVIKKFATFTGSLRRLAGWLAGHGVTEVVMEATGQYWKPVWYALEDHGGFELKLVNAQHVRFLPGRKTDVADAAWLAELLEHGLLRGSFVPPAPIRELRDLTRYRKKLIQAHTAESQRVSKTLEDAGIKLDSVASDVLGVSGRAMLGALLAGERDPAVLAELAKGRLRAKIPILVEALTGRFGAHHAVLLRLSLDHLQHLEQAVATLDEQIDAVITPFAAARDHLDSIPGVGKRAAENLIAEIGVDMAVFPTAAHLASWACMCPGSNITGGKRRSGKTRPGSPWLRDALVEAAWGASHTKDTDLGAQFWRLARRIGKKKAAVAVGHSILTAAWWMITNDVDYHDLGSDHYTRHHDNTDRRRDRALRDLHALGYRVTLDPAA

SEQ ID NO: 399940 - protein, 345 aa, unidentified
MSMVKTAAVTGGVDTHADTHVAAALDGIGGLLGVAEFPASPAGYARLLGWLQDFGAVCLAGIEGTGSYGAGLARHAAAAGIRVVEAGRPDRQDRHRQGKSGPLDAVSAARAALSGRASGAPRGRDGQVEAIRALMVAKRTARSQRTQTTSQARSLIITGPDDIRTRFTRQGPAGLVAELAALRPRAGSMVRYHTLLALRELGRRAQYPGDQLARLDDLIVPLVTARAPGLLALHGIGPDTAAILLIAAGDHPGRLRSEAAWAHLCASAPIPATSGKTKNRHRHCRGGDRQASHALWRIVITRMSSHPPTRAYVARRSKEGLTKPEIIRCLKRYAARETYRYLRPG

SEQ ID NO: 399941 - protein, 423 aa, unidentified
MKDLLEISCGLDIHKEKIVACILTGPLGKPTHSEIREFTTLIPDMLALRDWIISENCHHIAMESTGIYWIPIYEILEDAFSGDITLLVVNARHMKNVPGKKTDIRDSEWISTLLRAGLLNASFIPEKRIREFRDLNRYRKSIIREMCIRDRSIIRDITSQKNRVEKFLQSSGFRLSSFISDIFGASGRNIILHLMEHGQIDKMSLDSYLKTKTRKRIDEILMSVNGTLSEHQKSFLKILMCHYDSMKEHLIEIETHLQEDMLPFALQIEQLNTIYGISTTASCAIIAEIGTDMKPFKTAEHICSWAGLCPGNNESAGKRKSTSITKGNPYIKSMLCEIAWVIAGKRNTYLSAWYWRIKQKKGARKAIVALARKLLVIIYTMLKQGTNFDENCFEVRRKNCEQKQLSRYIRELEKHGYTVEAQV

SEQ ID NO: 399942 - protein, 340 aa, unidentified
MGHVTLTGIDLSKESFEICCENHAGTVVKRRSVRRGGLIEALYSLPQGSVVAMEACGSAHYWGQECCKLGLEVKLIAPQHVTPFRMAQKNDRNDAQAICRAAREPGLRRVPLKNREQLDLQTLHRVRERLVKQHTALMNQVRGILLERGITIPQGKGAFRSKVQELVIIFGTTNQLGFILSELWEEFLAVEKRVAAFTKRLIQMARVNEQCKLISALPGVGPITATALVAAIADVSAFRNGRAFAAALRLVPRQHTTGGRTRLGSITKQGNGYLRKLLVHGARSVVRYAVLKQREDRKSLWIRNLHQRGGTNRTSVGLANKTARQAWAILAGKQPLSLAA

SEQ ID NO: 399943 - protein, 419 aa, unidentified
MEEDFQWFVGLDWASEAHRVCVLDRAGKPVAERAVPHDGAALSQMCAWLCEVTGATPAAIAVAIETPRGPVVEALLEHGFVVFAINPKQLDRFRDRFSLAGAKDDSRDALVLGHSLRTDRHAFRRVAVDDPLVIELREWSRMYDDLKQEQNRLANRVRDQLWRYYPQTRAFSADFASDWFLDLWQELPTPAAAARASEKAVARILKRHRIRRFDATTVLAMLRQPQLAIAPGTMAAATAHIRTVAARLRLVNVQIKEAERRLDELCGAIEAAAETAPGQICEQRDVAILRSCPGLGRITIATLLAEASEPLNKRDYHALRTLSGVAPVTKRSGKSCIVLQRHACNKRLQNAVYHWGRVAVQHDPISRQRYAALRHRGHGHARALRSVVDRLLYVLCTLLKHQILFELSDVAAQPIHPAA

SEQ ID NO: 399944 - protein, 316 aa, unidentified
MDILGIDISKRTFQAALSRPNGKWKQHTFPNSGAGFSALFQWLAKQEVTIVHACMESTGGYGDALATFLWDHGNAVSVVNPSRIKAFGGSELVRTKTDASDASVIARFCASQKPELWQPPSESQRALQGLVRRRSDLLETRTQEALRLQAPTLSEQIRPSIEHHIAFLDQQLADIDKAIQKIIHDDPDLRNRNTLLLSIPGIGERGASSILGEMPNIEEFRDGKAVAAYAGLSPRHNQSGTFAGRSRLSKIGNAHLRHALFFPAMAAMRYNPILRPFAQRLRARGKRAMVIVAAVMRRLLVLAYGVLKSGRAFSPA

SEQ ID NO: 399945 - protein, 356 aa, unidentified
MSRMAGKARIVIGGVDTHADTHEAAVLDEHGRLLAVEGFPTTPSGYQQLLNWMRGFGAVREVGVESSGAYGAALTRHLVAAGVKVVEVNRPHAHTRNRRGKNDAIDAEAAARKVLAGECTAVPKDTIGIVEAIRQLLLARASAVHARAAALHQLGELVVTSPADVRASLTAKTLAGKASQATRWRPDPARLADPAQAARIALRSIGRRIHALSDEIKLLDAQLSTLVTRAAPKTLALLGVGIVHTAQMLITAGQNIERLRSENAFAHMCGADPIEASSGKTERHRLNPGGDRDANRTLYLIAVVRLRYCDRTRAYAIRRAGDGKSKKEIIRCLKRYIAREIYYTLRADLKNLVSAT

SEQ ID NO: 399946 - protein, 417 aa, unidentified
MNLFSEYAAIIGVDWADRKHDLCLKVFGSDALEYSILEHKPEAIEDWANTLRLRFAGKPVAICIESRKVPLIHALLKYDFLVLFPVNPQTLCRYRRALIPSRAKDDPSDARLLMDLVLRHPDQFASWKPQSAKMRTLAQLVEHRRTLVADRVRTTNRLTACLKLYFPQALDWFEDKATLVFCEFLEKWPTLADAKRARKSTLERFFHEHNSRYAEVIEKRIQAIKSAIPLTRDPGVIEPNQLMVVALVHQLALLLGHIDHFDDRIAECFADFDDADLFSNLPGAGKQLAPRLLVAFGEDRSRFASAQHLGCYAGIAPVTERSGNKSWVHWRYSCPKFLRQTFIEWTNQTVRFSFWARAFYQAQREKGKTHQMAIRALAFKWIRILWRCWQDRKPYDEARYLMALKNQGSPLVKELAS

SEQ ID NO: 399947 - protein, 368 aa, unidentified
MKQQTSATTETGNKIRKIVSFTGKTVFVGIDVHKKDWQVAVYHEGIVLGNHRMRADSQQLIEHLNKRYWGASFKCVYESCAWGFELHRELKAADIDCIVVHAADVPGSNKELLNKDDSNDALRLARHYAAGLIHGIYIPQEEVQKHRNLIRFRKKLVNDLNRSRNRLKSLLKYQGIIIPEQFDNAQWSNNFLEWIDHQAERDVLLRDTIWLMLEQIKQLRQLLLKAERKVRELMRDKKYNQQARLLMSIPGIGCITAMLFLLEIGNLRRFKSFDQLNSFVGLYPGTFSSGERNRDTGLSFRRHNQLRTHLVEASWQLIRRDPAMMESYQQLIKTMKGNEAIIRIARKLLRRMRAVLLNEKPYQMGLIA

SEQ ID NO: 399948 - protein, 316 aa, unidentified
MTESVVFVGIDVSKAQLDVAVRPSGAEWSVPYTEAGIATLVEQLSPMRPAAVVLEATGDLEGALVSALVAVGLPVQVVNPRQVRDFARATGRLAKTDALDARLLAQFAEAVRPTPRLLPDAATQALSAVLTRRRQLLEMLTAEKNRRSSAAKRLQKQIDAHIDWLIADLARVDAELDATIRQSPVWREQDDLLQSIPGVGPGLSRTLLAELPELGTLAPKPLAALVGVAPHNRDSGTVRGKRTIWGGRAVVRTALYMAALVATKWNPVIRAFYQRLLTAGKAKKVALVACMHKLLNILNAMVKQKTPWRANGVQGA

SEQ ID NO: 399949 - protein, 391 aa, unidentified
MIYVGIDVAKDKHDCFITNSDGEVLFKSFTIPNNREGFESLFQKVQSVSDDLTKVKVGLEATGHYSYNLLGFLLDKGLPTYVINPLHTNLYRKSLSLRKTKTDKVDAHTIASMIMSDVNLKSYSDTSYHNEELKSLTRYRFDKVKERAKLKSSVSRLVCILFPELEKLVPQLHIASVYALLSEFPSAHAVASAHLTRLTHLLSESSKGRYGKDMAIIFREAARNSIGSNMPAKSLELKHTIKLIRELTSEIDEIEIEIKSIMDEINSPILTIPGISYRMGAMIIAEIGDFNRFNSADKILAYAGMSPSTYQSGQLDNCYSHMEKRGSRYLRYALYNATKYVCHWDPTFAEYLAKKRAEGKHYNVAISHAVKKLVRVIYAMEKSGQVYNKAS

SEQ ID NO: 399950 - protein, 350 aa, unidentified
MEYVGIDWSYRRAAWCALSEGGTIVGEGAVAADEDGLARLVIERGLEVRAVVEMMSGAIWVRDTLAAAGWRVQVAHARKVRDVAPLACKTDKVDARVLAELCRRDLVPELWVPSLEDRELRERLRRRMHLVRMRASAMNRIFGLLTQWGLRLSLRRLREADAMALLEARGVPAVWRRSIAEALAVIDLLDARIAPLDRELRPLAVADQRVVLLETIPGVGPLLGLTLASEIGDVARFGSPRKLIGYAGLAPKINQSGDRSRTGALSKAGSRTLRWAAVEAAQHAWRPANPWHQLYRDLAARSGKNPAKSAVARKILIAAWHVLSRQQPFKPAAARPRTSVSASSRCFLAA

SEQ ID NO: 399951 - protein, 347 aa, unidentified
MNFYNTTHLHYCGIDLHARSLYVCIIDQEGKTLLHKEIAANPETLYQLIQPYLDDLVIGVECMHCWYWLADFCEDHGIHFILGHALYMKAIHGGKTKNDRIDSYKIAKLMRGGNFPLAYVYPRAMRATRDLLRRRTHIVRHGADLKAHIVNTTSQYNLPPNKVNLKNVCAREQLKSTFENPEAQRNIDLDLNILECYHRELSKLEWHLEQQAKHHNPVCFTLLRSIPGVGRILALTILYEIGEIQRFESVQNFASYSRLVKCKAESAGKTYGTQGNKIGNAHLKWAFSEAAVLFLRGNPDAQKYLQRLQKRMSKAKALSALAHKLGSAVYFMLKQEKVFDEHRFLVG

SEQ ID NO: 399952 - protein, 387 aa, unidentified
MLPERTQVAWMSLVMGIDQHRAQITAEWLDTETGEVSRARVRPADRAGVRRFLARFAGQQLEVALEATTGWRFLVEELRAVGAVVHLAEPAETAALRGNKRRAKSDRADARHHRELLLAERLPESWIPPDHILDVRARVRLRHTLIEQHTEWQQRIQAVLYHHGCRQRRRLMEGDGREWLASQALSETAREQITVAMAIIDALDVQLAPLTKELCAWARRQAGCKALIDAYYGIGELCAVTVIAELGDCRRFQNSRDAVRYSGLDVTVYQSDRHRAPGHLSRQGPPALRWALYEAAQVARRPGSPDRGYYEQAAERLGGNRACVALARKLLKRCYHTLRELGDDALTPPVERPQPGPGSAAARRASSGSPRSLEPTTTNQRADVLAA

SEQ ID NO: 399953 - protein, 372 aa, unidentified
MGWLPSAPNGIGMCQDGGVNSHWMERTATVTKTIMIGVDLAKNVIQLHAARMTGEVEYRKQLSREKFRRFMAEQPPAVVVMEACGSANYWARELSRVGHTVKLIAPHYVRPFVKRQKNDAADAEAIVIAAQRPEMRFVAAKSEDQQGRAMLFRTRTRLVHQRTELINMLRAFLYEFGHAVPQGVQQCQRIEAIVKEANSDLPEIVRSECLEILDQITGMTARIKRSDERIRALAAQTDTARRLQTMPGVGPMTALAVDAFAPPMESFKSGRDFAAWLGLVPRQHSSGGKARHGRISKAGQADIRRLLIIGAMSRLNWMGRKSIIAGSWLANLSARKPRMLVAIALANKMARAIWAMLTRQENFRDPMAATVA

SEQ ID NO: 399954 - protein, 355 aa, unidentified
MVQSKQLDFSGQKIFCGIDVHKKSWKVCIRSEHMELKTFSQNPSAGELIKHLRKNYPLADYKVVYEAGFCGFNPQREFSEEKVDCIIVHPADVPTTDKEKKRKSDTIDCRKLSTTLSDGKLTGIFVPGIEQQDDRSVIRTYQQFVKDQTRCKNRIKGWLNFQGISIPNDDEYKYWSNNFIKWLKEFSLTPSARISLDLLIHSYEQTRNMVLAATKQVRALSKQERYNEKIDLIRSIPGIGPIGALLFTTEIGDITRFKTFDQLCDYIGLVPMVSGSGEHETVLGLTHRGHHKLRETLIEASWVAIRLDPAMTLAFNQITKTMKKNKAIIKIARKLLNRIRFVMKNQTKYVMAVIE

SEQ ID NO: 399955 - protein, 376 aa, unidentified
MPTHKITPNAFAGQTFYVGLDVHKKSWSITVRAAGLEVEHFTQTPDPLQLARHLKNKFKGAAFYSAYEAGFSGTSAHTSLCKEGINNCIVHAGDIPLTNKQQNNKTDLHDSRAIAKYLEAHLLNSTYIMPVEQQERRALFRQRQSKVKDIRRCVNRLRGMINFFGITLPDEFIDKEYISQNFIGWLQQLNLLTQQGTDVLQQYISEIVYQRQQLLLITRKLRTSIKQYYPEQYNCLLSVPGIGPITSMGLLAETGNISRFDNPNEFASYLGLIPAEQSSGEKIYSKRIQNRCNRHLRPLLIEAAWMAIKKSPSLLGYYKKHAGRNNKKAIVKVARKLAFIAKAVALSQTKYQEEYEVKKISTGETKGEIGAIRNSE

SEQ ID NO: 399956 - protein, 416 aa, unidentified
MYYMGIDWADQKYDIVILDEQGKYASPKFEIDKSDEDYNRLLSKMRQLSANPTDFKIGIETPHNLIVDFLLMWGYEVYCIHPISMKSFRKRYRTTNARDDAHDAYVIADVARTDTACWEKVHRGSELTHQIRILTADHLHLTQQHTMANNTFRQTLKDYYPEYIKFFKDVSCPTSLAFLKAYPNFDAAKKLTHQQLTQFFKEQMFLNTKKINHIYQLLQHSHIIVPSPIIKCKTMKMFIYLKQLIELNKSCDQYLQLIKQLAANHPDFDIFLSFPGAGELTAARLIALFGDKRQLYPDASIIQAKAGTCPVTEETGKDKKRKKVHKVIYFREGCNKVYRTFVHHLAFASLTKSQWCKAYYDKHRAMGKDSHHALRCLGNLQLKILFAMWKNRTKYDENIFLAQRTRHLLNEQKKAA

SEQ ID NO: 399957 - protein, 310 aa, unidentified
MGTIVVGIDVSKDRLDVHVHPLGGYFAVSRDAEGLDALIARIVPLGVQAVAVEATGGFETVVAASLGAAGLPVIVVNPTQVRAFAQALGKRAKTDPIDAAVIARFVEATKPEIRLLPDADTRLLADLVARRRQIIQMIVAERQRERQLPTRYLKKSAARLIKALEKELNVLDEAIDESVRGSPVWCEKEDLLKSVPGVGNVVARTLLAEMPELGTLNRREIASLAGLAPWTRQSGKWRGKSFTGGGRTTARTTLFMAALVATRHNPLLKAFYQRLITAGKPKMVAIIAVARKLLTILNAILREKTPWQIA

SEQ ID NO: 399958 - protein, 313 aa, unidentified
MSESLVYVGMDIAKATLDLHVPTQPQPRVRPFINAPRGHRSLVSWLRKLGPVHVVCEATGGYERAVVNALQAAGITVSVVNARQVRDFARAQGRLAKTDRLDASVLADYGRCLQPRASAVPSAAQRQLAELVTRRQQVQQGRAAEHNRLEHTTHPALRRQIQRHVVALDRQLEQLDVWLTELVRAEEPLARKVARLCLVVGVGRITALILLATVPELGTLNRRQAAALVGVAPFNRDSGPRRGHRLIAGGRATARRALYMAGLVAAFTNPQLKQFYHRLVAAGKAPKVALVAVMRKLIILLNHILHDPTFQPT

SEQ ID NO: 399959 - protein, 363 aa, unidentified
MSESMTVTVGLDVHARSIRLAAVRADELLEERTLPYDEAAVERVLRRWPAVRCCYEAGPTGFGLYRYLSGRGIECAVIAPGLVPQRPGDRVKTDPRDARKLARLHAGGLLEPIFVPAPVLEAARDLVRAREDARLDRMRDRHRLSKFCLRHGRLVPGVSWGVSRRKWLSEQRFAFAAEQQAFDSYLHALDLADARIEQLEQAIWEAAEQQPWRELVARLRCLRGVDTLTALALVAEIGDFGRFKCAEEFMAFVGLVPSEHSSGEQRRQGSITKVGNSHVRRLLVESAWHARRRPTVGYQLGRRQRGQDAVDIERAWRCQQRLYQRWQRMAGRGKPAQKIVVACARELAGFVWAIATDQPLRNA

SEQ ID NO: 399960 - protein, 402 aa, unidentified
MKPSKQYLRFCGIDIAKRKHVACIIDQDGRYILPPRSFHNNAEGFRQILNCLKRTGRKKSVLAGMEATGHYWYTLHDFLARQGYRVAVLNPIQTAQQAKQAIRKCKTDKHDAFHIATLLRTDQYKSALVPGELAMTCRQLTRLRYRMVRQGALIKQLVNSRLYPAWPEYETFFADKFGATSRKLLHAAACPQELLMLEPQALTELIHKASRGKLGPALAQRIRQTAGNSVGVRRGRYGRSTCIRILLEYIEAFGPIRKKLEAQIEGLADQLPGYLYTLPGATPMGIVSLYGEVDPIEAFTGPSQLVAFAGLDPKVFQTGQYDAPRRHVSKRGSPYLRRTLWQMAHRAICQEGELRDYWRRKRRQNKHHLVAVTATANKLSRIVWRIMTDRRDYVPRQSDPNS

SEQ ID NO: 399961 - protein, 412 aa, unidentified
MEMLYERCCGVDVHKRTVVACLLTPGGDGQPGKEIRTFGTMTADLVALSDWLAAAGCTHVAMEATGAYWKPIYNLLEDRFVVLVVNAAHIKAVPGRKTDVRDAEWIADLLRHGLLRPSFIPDRPQRELRELTRYRTTLVHERANEVNRLQKVLEGANIKLASVATDILGKSGRDILAALVAGTTDATALSQLARGRLREKIPQLEQALAGQFSAHQRFLIAQQLAHIDFLDASLERVSTEIGDRLRPFEPQMERQQTIPGVGRRTAEVLVAEIGTDLSRFPSARHLASWAGLCPGNDESAGKRRSGRTRKGSPWLRTALVEAAQAAARSKETYLAAQYRRLATRRGAKRAAIAVAHTILVMVYALLTQEVTYHELGGQYFDERDRQAVERRLVRRLEALGYSVSLEPTSPAA

SEQ ID NO: 399962 - protein, 345 aa, unidentified
MDQISRIGMDTSKHVFQLHGVNAAEAVVLRKKLRRKEMVTFFEKFAPTVIAIEACGASHYWARLLQSFGHTVKLIPPQLVKPYVKRNKNDAADAEGLCEAMSRPTMRFVPVKSPEQQAALMLVSVRDRLIRNRTQLANAIRGHAAEFGLTAAKGMAHLIPLLDRIQTDESLPALARELFAAQAKEYEQLQTQIAEVDAQLMARHRADECSRRLAKIPGIGPVGAMLLRMKTPAPELFRSGRQFAAWIGLTPRDHSTAGKVRLGVITRAGDEGLRSVLVVGATAVIQQAQRHGRASPWLAALLKRKSPKLAAVALANKTARIAWKLMLTGEDYSAIPAPAAVAGAA

SEQ ID NO: 399963 - protein, 408 aa, unidentified
MNAVGIDVSKGKSMVAALRPMGEVALLPQEFLHTEVGLEQMAYAIVALGEDTRVIMEATGRYHEPIAAALHEYGIYVCVLNPLFIKQSGGGSIRKVKTDKADAMKIAKYGLDNWVELREYTPMDTVRQQLKLCSRQYNLYMKTVVSLQNNLISLTDKTFPGVNELFSSPERADGHQKWVDFVMTFWHCDCICRVSEKAFTDRYQKWCKRKGYHFSTEKALDLYAGSCGHFTTLPKNDNTKLLITTAAQQLLAGKTTLAALRTEMTRLAKQLPEYDTVRAMYGVGETTAAQLMAEIGDVRRFPRRSSIVGFAGVDPAVDQSGKHSAKSVPTTKRGSPHLRKTLYQIVCTYLKRSPADEPVYQFLDKKRAEGKPYFVYMTAAQNKFLRIYYARVKECLEAFDERQDTVRN

SEQ ID NO: 399964 - protein, 351 aa, unidentified
MLIIGCDYHPSVQQIAFVDLETGETGERQLLHKDGEAERFYRDLKLRGISVRVGIEATGHARWFERLLAELGFELWIGDPAQIKAARVRKQKTDRQDAQLLLKLLVEERFPRIWIPSPENRDVRQLLWHRHRLVQMRTRVMNQLQAVAMNEGVRRKKALWSKSGRAQLESFVLSPWASRRRQDLLEVLDRLNPTIDELSTAVEQEAKKRPEVLRLMTHPGVGALTGLAFVLIIGSAERFACGKQIGSYLGLIPCEDSSANRQRLGHISKQGNTLLRFLLVEAAQAAVRGDAAWRRKYLHLAMRRDPRIAKVAMARKLAVSLFWMWRKQWNYEQVIKFGSHAGQSDYVHGVK

SEQ ID NO: 399965 - protein, 497 aa, unidentified
MHIKASEGRWDWALDLVNTLSKRMKAKNNQSGAKATGKSIRPGKRIPVIHPHAAGMDVGATSHTVCVPEDAVPAGQSPGREFGAFNRDLDELVEWLRRCGVTTVAMESTGKYWIAPYQKLEAAGIGPVLTNAHYLKHVPGRKSDMLDCQWHQQLHSYGLLTDSFRPSEDIRRVRTLMRHRANLVIQCGQAVQHMQSAFDDMNIHLHHVISDLDGETGLRIVDAILAGQRDPEQLVKLRDERVRKSTPAEMVEALRGDWQDEHLFVLRQARELYQWMHTQIDQCDAQLEKALAQVQSNPVVVLQEQRPPNPQGKVPTKAKRKHAGNAPKQDFTEELTRICGVDLTKVVGLSVLSVLMVIAEIGVDVRHWRNAKAFCSWLGLCPGSKISGGKRLSSRTRRVNNRVSILLRNLALSIGRTDTWLGTYHRRMKARLGPAGANTATAHKVATIIYHLLKYKEEYIDVDRLVYEEKFRRCRLGRLRKQAEELGFQLVETQKAA

SEQ ID NO: 399966 - protein, 350 aa, unidentified
MDRYIGLDAHTSSCTVAVVGPSGRQLDSHVVETNARALVSIIEAIPKSRHLCLEEGALAGWLYEMLAPHVQEIVVTAVPQSRGPKSDKRDAFGLAEMLRIGAIPRKVYKQRGQFTQLAYLAKVYQMLVSDDVRVQNRIKSLLRSRGLQVAGTAVYTTTGRSTYTDRLPAEARTMADLLYQQHDHLADLRNQAQKAMISEARKHPEYRCVKSCPGLGEVRAALLLPVVVTPYRFANKRQFWAYCGLAVISRSSSDWVRTRTGEWMKAPVQQTRGLNKNFNHTLKSVYKGAATTVVGQARDEPLYHHYQRLLDGGTKPNLAKLTIARQIAAISLALWRNQEDYDQSKFKQPT

SEQ ID NO: 399967 - protein, 360 aa, unidentified
MVMLAEQYEYVIGGDPDRDTIDLAVVDAATGVVQCHRSDRADGPGYRQLLSWAIEQAPGRRVWALEGTGSFAAGLATALAEAGEDVVEITGGKRTRGAKNDRLDAVRAARTAMAREHQSQPRTRGLREALRQILVTRQAVLVSRTKAINELKSLIVVAPEHLRVGLRGLSLAKQLQRIAALSSPAGATVEHRVTVLTLRSIAARVEFLLAQTAELDPELLTLVKAHPAGPALLAEPGVGPVVAAQLLVSWSHRGRVRSEAAFASLAGAAPLEASSGQRCRHRLNRGGDRDLNRALHTIAITRLRCHPESRAYETKRTAHGKTHRDVRRSLKRALARRLYRRIQAATRPEAVPLKQAPTST

SEQ ID NO: 399968 - protein, 422 aa, unidentified
MSSTSGRVVIGMDPHKRSATVEVMSANETILGGCRFGTDRDGYAALLRYGRQWPDRVWAIEGCAGIGKHLANRLLADGEQVVDVPPKLSARARVFATGQGRKTDATDAHSVALVGTRMTGLRPVVNDEQLAVLRILVDRRRSLGEDHTRMVSQLHQLLLELIPGGAKKDLSARQAKALLAKVRPRDAAGRTRRRVAAELISDLERIYARKKAANKELTELVAATGTGLLDLNGIGPSGAARLLVEVGDITRFPTKAHFASWNGTAPIDASSGDQVRHRLSRAGNRQINRVLHIMARVQIRNPSQGRDYYERKKADGKAPMEAMRCVKRRLSDIVYHQMLNDALAQTGTGPGGHRGTSTDSSVTGSHPHAGSSDKSLPGPATDDHTPTHSPFFTPSTPRPLSSADPQPTSSALCLTPARTGAS

SEQ ID NO: 399969 - protein, 330 aa, unidentified
MQKVHHIIGADLSKETIDLFCQPTKTYLKIKNNPQGFKALLTWLRQERINCFELMIVMEHTGLYSFCFEEFLHKHQIAFCKVNALVIKRSMGIVRGKSDRVDARRIASYGFEKRDRLSAEPATSKELKRLQLLFSTRERFVKQKASLINAVKEYSHIGLSKNDAILRSQQRLIKHFAKEIGKLEAEMDMIFNSDPLLQKNYQLLQSIKGVGKVVSTATIIKTKNFTRFANGRKFACFSGTAPFEHTSGTSIRGRTRVSHLADKEMKTLLDLAAKSAIQYDKELRKYYLKRIESGKSKKSTRNIVRNKIIYRMFAVVKRQTPFIENYLQTA

SEQ ID NO: 399970 - protein, 338 aa, unidentified
MQTYAGIDLHSSNNFIGVINDKDKILYGKRHPNRLDDVLRALDPFRDSIQGIVVESTFNWYWLVDGLQEHGYPVHLANPSAIQQYEGLKHTDDPWDSFWLAHMYRLGILPEGYIYPKEHRAVRDLLRRRLLFVRHSTAHILSLQSMISRNLGFKMSNNEIKKLKPADIESLFDCSNLVFMANNSLAAIEFLKKITKGIEKKVKSQVKIRKEFEMLLTIPGIGNILGLTINLEVGDIGRFPKVGDYSSYCRCVGSTRLSNGKKKGENNKKNGNKYLAWAYVEAAQFARRYCVKAQSFYQSKEAKTKPVVAIKALSNKLSKASYYIMRDQVAFDEEKLFG

SEQ ID NO: 399971 - protein, 410 aa, unidentified
METIFDRVAGLDVHKARVTACVRVPAAGGAREQQVAEFATTVRGLVALRDWLEAHRVTHVAMEATGVYWQPVWHVLEDAFELILVNARHVKQVPGRKTDVSDAAWICQLMEAGLLRGSFVPPKPQRALRTLTRYRKTQIQERQREANRLHKALEDTGIKLDCVATDILGVSGRAMLDALVAGTTDPEILAELARGKLRAKLPALREALEGRFEAHHALVIGAILAHLDFLDEQIERLSDAIEEQLGPFATGVRLASTITGVAARTAEVMVAEIGTDMSRFPSAGHLASWAGRCPGNHQSAGKRRSGRSRKGCKWLGIALEEAALAATRTKGSYLQAQYQRLRPRIGHGRALGAVKHSILIAYWHMFTTGEIYNDLGGDYYQRRHPQRQIRRLVQQLERLGQHVTLETAAA

SEQ ID NO: 399972 - protein, 468 aa, unidentified
MSKHNKNRGKKQNLKSHPSKKQGKYFEMITPDAAGIDIGSQEHWVAVPEDRDEQPVRRFGSFTSDLHEIVDWLKKCKIKTVAMESTGVYWIPLFELLASEGFEVKLVNAAHTKNVTGRKSDVSDCQWIQQLHSYGLLQGSFHPQDEIAILRQYWRHRENLVRYAAAHIQHMQKAFTQMNLQLHHVISDITGVTGMSIIKAILAGERDPQKLAQLKDRRILNPTEIIAKSLEGNYRQEHLFALEQALEAYEFYQKQIQTCDKQIEQYMNQIQSAIDLEKFPLPPAPKGKRKIQGNAPKFDLRSHLYRICGVDYTTIPGIDALTVQKIISEVGLDHTAFPSEKHFGSWMGLCPENRITGGKVKSSKTRKVVSRAANAFRMVAQTLANSASSLGAFYRRMRARKGPAKAITATAYKLARIFYQMWKTKKPYQDLGADYYEQQYKERTLKNLKRKAALLGYNIVLQPIEEAL

SEQ ID NO: 399973 - protein, 311 aa, unidentified
MTNYSIGVDISKATLDVHRPKDGATARFSNDKAGFGALKAWLKGYEIARIVYEPTGPYHRDFELALEADFPLVKVNPLQARRFAQSLGTRAKTDAVDARMLAMMGEVFSLEPQAPISVNQRDLKELHIARLALLKDRTRTLNRQKTLTMSLLKRQVKARLKQLETQIAQVDEEIRTRLQSAPETARATEIICSIPGLSKVSAAALLIEMPELGTLSKKQAASLAGLAPMTRQSGQWRSKSFIQGGRKFLREALYMPALVAVRFNPDMKVKYQDLKKAGKPSKLALTAIMRKLIILVNTLIREDRKWLENKP

SEQ ID NO: 399974 - protein, 340 aa, unidentified
MREYGRIANTATALDRLLRKLGDAGMVLRFCYEAGPCGYGIQRHVSARGHECVVVAPSLIPKRAGDRVKTDRRDAASLVKLHRAGELTAVWVPDPQHEAMRDLVRARLDAVHSLRRARQQLSGFLLRQGCHYGRPAWTKLHRRWLAGLIFEQAIHHIVLEDYIAAVEAAEARRDRLTAQIETMLPDWTLAPVVAALQTMRGMAMVNAATLIAELGDLSRFADPRQLMAYLGLTPSEYSSGSSVRRGGITKAGNGAARRLLIEAAWSYRFPARLSRELLLRQESQPKPIRDIAWKGQVRLCARYRRLARTAKPANVVTTAIARELTGFVWAIARQVTVTPG

SEQ ID NO: 399975 - protein, 353 aa, unidentified
MKRDKYIGMDVHQATTVVAVLDANGKVIWETIIATQAGPIIELLESLSGPLHVTLEETTQAEWLYEVVRGYVAEVVVCDPRRNKLLSEGSKADKVDARRLAELLRVGLLRSVYHGNEGARKLKQLARGYQTLLSDMQRTMARIKAMYRSRGIPTPGRGVYQAKQREQWLSLLTDPGVRQRTAWLYEQLDQLGGLRRQAKLAMLVESRKHRAVTLLRTIPQLGPIRSALIVAILDTPHRFRTRQQLWSYSGLAVVTHMSSEYEIKEGRVVRSRKPIATRGLNRNCNRVLKDVFIGAATGGGSREPYRQYLQGLQDRGMRKEMARLTLARKIASIALTIWKKGEAFDPKKLNWAT

SEQ ID NO: 399976 - protein, 348 aa, unidentified
MRCYTGQHRFYAGVDLHARSMFTHVLDHQGKTVFEKDLPAEPEFFLDAVKPFRDGLVVGAECMFAWYWLADLCEDHAIPFVLGHALYMRMIHGGKAKTDRIDAAKLASMLRGGLFPMAYVYPRAKRQTRDLLRRRSFFVRQRAQLITHIMNTNTQFNLPPLSKKLTYAANRSPQIAERFEHPSTRLSITADLGLIDAYDQQIADLERHLVQNAKVDDPVTFGLLRTVPGIGPILGLILLYEIDTITRFPEAGNFLSYSRLVRCAHVSAGKVKGSGGKKIGNAHLKWAFSEAACLMLRSMPAAKAWMQRQERKRGKKKALSILEAKLGRTAYHLWRKQVPFDAKRFLAS

SEQ ID NO: 399977 - protein, 358 aa, unidentified
MVQSKGLNFEGQNIYIGIDVHLKTWHITIITESGYKRSHSQRSSARELFEHLQKHYPNGLYQAVYESGFSGFSTYYALVDLGIHCMVIHAADVPTTQYEAVMKSDPVDSQKLAKSLRCGELKGIYVPDKDSLDDRSVVRLRKTLQKQLGGYKSRVKHLLYNNGVSIPDSFIQPGSHWSKRFMRWLREDVVLLSSTRHALDLLLSQVELFRRSLFDVTCRVRALSQSERYAEVYRNLTSIPGIGMVIGMSLLTEIENVERFNNTRQFASYLGLIPVWHSSGEKQSSGEKTFRGNKLLGPMLVECAWVTIRYDRVMAAAFGEYCKRMKPQEAIIRIARKMANRILTVLKSGKKYEYDRYR

SEQ ID NO: 399978 - protein, 344 aa, unidentified
MTHFAGLDISLRSINVCVVDDQGNVVAEGKTDAETADLVAFLDALDVVITTVGLEAGMLTQYLTYGLQFAGYNVHCMESRQVKAALSAMRNKTDKNDARGIAQILRSGWYSRVHIKSMESHRVRALLTSRRALLDKCIDLENEIRGIFKIFGIKLPPKLGHGSYDRVVRPLIEADETLSMSLLPVLEARLELYRSYRELDKRTRHLAEQDPICQRFMTAPGVGFVTALAYKSGVDDPMRFKHSRTVGAHFGLTSRRHQSGEVDFDGHISRCGDAAVRTALYTAANALLTRSSKWSSLKAWGMKVAKTRGHKKAVIAVARKLAVILHRMWIDDTQFRWGTEVARS

SEQ ID NO: 399979 - protein, 319 aa, unidentified
MDNLSHGRVIGIDVSRDWLDVHCLPDGHRVRVPNAPAGHAAVADLARDRDAVVCFEATGGQEWQLWAVLEGEGIAARQVPPAQVKAFAQSRGTRAKTDRIDAELIARFFAFRPEAGRRLPAEKLRLLRALTTKRAQLVKMRKRLLAQIRAHQKLGTAVIFEDVDTELKQRIDSLIKELEDRITRAIASDERLSETAGVLRSIPGIGPVASTMLIAEMPEIGTITGEEAAALTGLAPVAHDSGTLRGKRAIAGGRRALRHVMFQAALVAAHHNPSLKSFADRLRKAGKPHKVIITAVARKLVTIANALCKSRQKWVAPTT

SEQ ID NO: 399980 - protein, 320 aa, unidentified
MSGYIGIDVAKSELVMAISGIDGVRSFPNSEHGHAEATKWLKKLDAPPVLIVLEATGGYERGITAALGNAKLPVVVVNPRQVRDFARGMGKLAKTDKLDAAVLAEFAARVRPEVRELPTEEQEDLRELLIRRDQLKQMLLAENTRLLQAAGKRYHRRRKEIKSHVSDLEKRMRMLESDLDDTLRRSSLWREHDDLLQSAPGIGKQTARSMIGFLPELGTVNAAQIASLVGLAPRNRDSGMMRGQRHIGGGRSRLRATLYMATLAAIRTDPVVKGWYEHLLAAGKPKKVAIIACMRKLLVILNAMTKTNTRWQPQTQPLPA

SEQ ID NO: 399981 - protein, 374 aa, unidentified
MRKSTRFCAMDIHKDSITVAIAADGRAPVLYGTIQSTGAAVAKLADKLSGPGAPLRFCYEAGPCGYGVYRQLRALGHECAVVAPSLIPRRPGDRIKTDRRDALSLARLHQKGELTSVWVPDEEQEAIRDLERAREDFKHAERRVRQRLNGFLLRHGRVYTGGRRWTQAHYRWLETQRFAHPAQQIVFQEYVDEVKHAQTRIKTLEKELEQVLCDWTFSGQARDLMALRGVDTLTAITVLAELGDITRFDTPRQLMAFVGLVPSEHSSGQRRQRGAITKAGNAHVRRVLVESAWCYRFPARKTRHLQRRAERTAPAVQAIAWKAQRRLCGRYRRLSARGMPKGKVCTAIARELLGFMWAIAWEHRHPGSMIARAA

SEQ ID NO: 399982 - protein, 323 aa, unidentified
MKEPIILGVDIAKKKFDVALLVNDKQKHKVFTNNQEGFRELLGWLKKKGVEHVHLCLEASSTYGDELATYMHDAGHTVSIVNPARIKGFAQSELMRTKNDTVDAGLIARFCLAMHPEPWAPAPPEMRQLQALVRRVDALINIRTQELHRLGTTQGTVEYSIREHIAYLDRQIEALKQQIADRIKSDPDLTIKRDLLKSIPGVGEATVAAILAELHMFETCDRVQKVVAFIGLAPREFTSGSSIKGKPRLSKVGNARLRKALFMPALVSIQCNPVIQTFYHRLKGNGKNGKVIVCAIMRKLVHLIFGILKSGRPFDPNYTSYCA

SEQ ID NO: 399983 - protein, 341 aa, unidentified
MFAKFKVMKKIFIGVDVSKLKLDFCNYQDGQFCKEEVVTNHSSAIKSHLESILKDTSKEKVLICAEYTGQYIYPLSCVCKDLELDLWIENPVQIKFRSGMQRGKNDKLDARKIAIYAQRFEDQASLFSMPEDAIQNLKQLVSERDMLVCDRAKYKGQLTDQRDFMNQQIYTKKHKRLSQLIQNLNQAIKQIEDQIQSIIDNDETLSKQHYLLCSIDGVGERTSLKMILETNAFRDFKDPRKFCCHAGVAPFSYTSGSSVRSKRKVSKRADKSIKALLHMAALSASKTNGDLGHYYNRKVAEGKNKMTVLNAIRAKLVLRMFAVIKNEKMYIQNYINPLSVS

SEQ ID NO: 399984 - protein, 422 aa, unidentified
MEEEYRIYVGIDWASEAHQACVLDHTRRIVAERSFAHAGDAILAFAQWLGELAKDSPGQVAVAIEIPRGAVVETLVERGFHVYAINPKKLDRFRDRYTVAGAKDDRRDAFVLADSLHSDRHCFRRVRLDDPVVIQLRELSRVDEDLMRESNQLANRLREQLHRYYAQALKLCPSADEPWLWALLELAPSPDVAQRLRPQRVERLLRQHRIRRLRADEVVATLRMPALQVAPGVVAAATEHIALLLPRQRLVHSQRQRCGARIEALLDELQPADDDEDERQEHSDVEILRSLPGVGRLVAASLIAEASAALAERDYHSLRAHAGIAPITKQSGKHRTVLMRYACNGRLRHALYNWARVAMMHDAASKTYYTVLRRRGHTHGCALRAVADRLLRILIAMLKTGTLFDCSRARPPQTDTPAEKVA

SEQ ID NO: 399985 - protein, 455 aa, unidentified
MQTFYLGIDASKGYADFIILNRYKKVIVESFQLDDTFDGHCLLYELLMNFSTDHPDSIICAALESTGGYENNWHNVLLEFQGTLNLQTARLNPLGVHHNSKADLKRNVTDKISARNVAEYMIAHPEKVSYQPQDHLASLRKQWGFVKMLTKQCTQLLNQLESLLYSANPEILTYCKDGVPAWVLKLLVKYPTAANLARAKMGSVSRIPFVSTAKAEALVLNAKKSVASAVDEVTQQLVAATVKQILHLKETIKIQSAIMARACAVPEVELLKTFIGISDASAIGLMLNIQSVKRFKTVKKLAAFFGLHPKLKISGDGVSYVRMSKQGRAEPRQILYMVAMAAITRNPLIREIYQERVGQGMEKMAAIGLCMHKILRIVYGMLKNNRPFDPEIDWRNRQKPISQRKQKQNKIRRYQDYDFKAPISRRQKAKRMEQRQSQSDNGAECGILAPVPFPT

SEQ ID NO: 399986 - protein, 349 aa, unidentified
MRFYTKQHQFYCGIDLHARLLAICVVDQAGVVVCRTQIPADKSILLATLAPFRPDVVVAVECLFAWYWVADLCREEKLPFVLGHALYMKAIHGGKAKNDDIDAEKIARLLKGGNIPVAYVYPKGLRETRDLLRRRMYLVRQRAALITHVQIVNAQYNLPEFSKKLIYAKNRAELKIAERFDNPQLRKSVAIDLALIDALDTQIADAELHLERTAKIEDPQTFHLLKTVGGVGKILGLTMLYEIHDIRRFPDVGEFLSYARLVRCRHESAGKKLGSGGHKIGNAHLKWAFSEAVCLMVRHYPAVKVWQARHEKKHGKKKTLGILAARLGRTVYHMLRKREAFDVKRFLGQ

SEQ ID NO: 399987 - protein, 414 aa, unidentified
MDVVHPRCAGVDISKRDAKVCVRIAGKGRAKATSTVTTWGAVTNQVLGLREHLIAEAVTLVVMEATSDYWKPFYYLLEDGPFEVMLVNARHVKNLPGRKTDVSDAAWLAQLGAHGLVRGSLVPPEPVRQLRDLTRTRSAVTRERAREIQRLEKLLEDAGIKLSSVASDISGVSGRAMLQALIAGERDPARLADLAKRRMRSKIPELTEALTGRFGDHHAFLAQLHLDLIDQHTRAIEEINARIEVVIEPFRGARDLIVTIPGISTGVADVIIAETGADMGRFPSAGHLASWAGTCPGSNESAGRIKSTRTRPGNPYLKGALGIAAMSAARSNRTYLSAKYRRIATRRGPVKAIVAIEHAMLIAIWNMLSTGELYNDPGSDFYARLNPDKAKNRALDQLRRMGYSVTLNPLAATG

SEQ ID NO: 399988 - protein, 315 aa, unidentified
MSDMPCFIGIDVAKAQLDIALRPSGERWAVPNDASGVATLVDRLQALHPTLIVLEATGGLERAATAALATAGLPVVVINPRQARDFARATGQLAKTDALDARVLAHFADVIRPTPRPLPDAQTQELRALLGRRQQLIVMRTAEQNRLAGTSARLAKDIAAHITWLNAGIATLDDDLETMLRASPLWRENDDLLQSAKGIGPVCARTLLLELPELGTLTRQQVAALVGVAPLNCDSGTMRGRRTIWGGRAHVRTVLYMGTLVATRFNPVIRAFYKRLLAAGKVKKVALTACMHKFLTILNAMLKHRTPWKAQEVQS

SEQ ID NO: 399989 - protein, 402 aa, unidentified
METSTQYKWFCGIDLAKEKHVACIIDQNGQYLLRPRSFGNDAAGYEQILNCLKQAGNAKSILIGMEATGHYWYGLHDFLVRQGYTVAVLNPIQTAQQAKLAIRKCKTDKYDAFHIANLLRSGQYKAALVPGELAMTCRQLTRLRYRIVKQAAMIKQLVNSRLHPVWPEYEALFSNKFGTTSMKLLQMASTPKELIESDYDDLSELIRKASRGRFGPAQTQKLLHTAKNSVGMQRGQYGISTGIKFLLEQIEALEPVRKKLDTEIVKLSARLPEYLFTLPGSTELTIVSLYGEVDPIEAFKKPSQLVAFAGLDPKVFQTGQYDAPRRQVSKRGSPYLRRTLWQMAYRAICNEGDLRDFWRRKHRQNKHHLVVVTAAANKLCHIVWRIMTDRRDYIPKGYNPKS

SEQ ID NO: 399990 - protein, 313 aa, unidentified
MIIPLRYVGIDVSKHHLDIFDETTGVSERIVNATQAITQLVARWRCDALVVFEATGVYDLELREALRQAGIRFARINPARARDFARASGQLAKTDPIDARMLAAFARAMQPATEQVVTPARSALARLAKRRDQLVLMRVQEKNRRSEADDCAMAERIGRFIEVLDGQIAEIEADISALIKAEPEISDDAQLMRSLPGVGPVACMQLIAQMPELGRIGPKQVAALAGLAPFNVDSGAYRGKRKIGGGRKRVRDALYMAALNAVRRAAPFKTFYTRLRQAGKPAKLALIAVARKLLTVLNAMMRDRKPYRLEPAT

SEQ ID NO: 399991 - protein, 365 aa, unidentified
MQKISTMQTSGKNIFEGQLTIGLDLGDRSSAYCVLNEAGEIVLEHKLATTPEAMKQVFASMPRCRIAMETGTHSPWVSRLLTALGHEVIVGHAQKVRLITKSRRKDDRLDARTLARLARIDPELLSPVKHRSAQAQLHLTEIRARAVLVSARTALVNAARGLVKSYGERLRKCGTEQFRRETTSGLSAGLREALEPLLREVESLNERIQEYGRRIARMAKETYPQTALLKQVKGVGDLIATAYVLTIEDPHRFRKSRDAGCFAGLQPGRRNSGESEPQMHISKEGDEYLRTLLVQGAHYILGPFGEDSDLRRWGQKLAARGGKNGKKRAVVAVARKLAVLLHRLWVSGEAYEPLRNSQKAMSTAA

SEQ ID NO: 399992 - protein, 410 aa, unidentified
MEVLYPYCAGLDVHKNSVVACARHMSGGKISTKVRTFKTTTEELMALLVWLTDQGVTHIAMEATGVYWKPVWHILSDDDFVMVLANAAHVKNVPGRKTDVNDAQWLADLMAHGLIRASFVPDPLTQQIRDLLRTRKQLVRERASHTLRIQKVLEDANIKLDSVVTDLLGLSGRRILDALVKGQTMPEVLAALADGRIHATAEELTAALYGRVTSHHRFLVKLHLDQIDAIAQAIASIDEEVDSQAEPFRQPAQMLSAIPGLGPLAALVVLAEIGLDMSHFPNAAHLISWAGLCPRNDESAGKRRSTRMRNGAPWLKTVLIQCAWAAARTKGSYFQSLYHRLRSRRGAKKAIGAVAASLLTTVYHMLKNGTLYEDLGANYFDQKAKEGQAMRLINRLHTLGYQVHIKQKTA

SEQ ID NO: 399993 - protein, 414 aa, unidentified
MNTLVSNTSLSGTLIALDIAKKHHDAKIRHPDRRTSFLRIENTLEGFNRLLALTASPHNDITAAFEPTADYHRNIAWWLHKQGVKCHLVSSVRCARAREMLFKTWDKNDRKDASVIMYLLEQGLSSPFYDPLANGIIDIQEISNTYHQVTLARTRCLNSLVNHYLTLYFPEAEQFLHMSRAEWFCQFLLQFPTPSCITSLNRDVFVKQSWDVVGRKQYKQQFLEHLYDVAADPIALPLSEDSLAVTTFRLQLHRYVGLSVQRLQLEKQAENYLQERSDYRHLRTIPGIGAIIALMIIAASGDLTRFTHYRQYLNFCGFNLSASQSGQKHSDYRLSKCGNARLRYAFWLAATVAVRTRENSFRYKYERYIRENGDKPDQKRKAMTAVATKVARVAHAIVKQDIDYKGYYEISHGT

SEQ ID NO: 399994 - protein, 359 aa, unidentified
MEAQRKALCFKGQNIYIGIDVHLKSWSVTLMSEATQLKRFSQSPDPDALYAHLVRNYPEAEYHSVYEAGFCGFWIHYRLVGLGIHNIVVNPADVPTTTSEKLRKTDAVGSAKLARSLRAGELKGIYVPGSESLETRSLIRLRDSITKDQTRLKNRIKSHLRYLGIEIPEEFSGPGRCWNRRFVVWLKGSETGTAYGRQTLDFLVRQYEALRGQRLEMLRAVMALSRTERFEKPLENLMTVPGIGQLTGMSLLSEIDDIRRFKSADQLAAFIGMIPMCHSSGEREGVGDITVRRSARLRSVLVEASWVAVRQDPALSMAYGNYCKRMAPGKAIIKIARKLVNRIYFVMKRNQPYVKCVVA

SEQ ID NO: 399995 - protein, 416 aa, unidentified
MDKKVRKFGYDLNEKTLLVTADVGKFENYCYARTPKGEELEPFKFHNTGLGFRMVYGIIEVFRKRHNLVKTVFGIESTGNYGEPLVHYMKKRGIQMVQVNPLHTKKVKEMRGNSPNKNDKKDPKVIADIISLNNGLTIVIPEGPAAELDRLVHLREILLEDKKRAYNQLESAIVPIFPEFLHVFKDLKIKTVEYLLKSCPTAELIIELGLEDLVGILWQFSRGRFGRNKAEQLYDAALSSAGIKEGIESTLLIINNLYDKINLINKQLKVVEEKIETKLEDIPYSSYIMSIKGIGPIITAAIIGEVGDLRKYSYARQLQKLAGINLYEISSGKQRGQRHITKRGRHLLRKMLFYAAINVTKKGCIYYDTYHMHLKKGMTKVQALTAISRKLIGIIYALVRDSSNYIERVDGDKIAA

SEQ ID NO: 399996 - protein, 348 aa, unidentified
MKEVTTIGLDLAKAVFQVHGVDAAGAVTLRRAVRRRQVLSFFTKLPPCLVGMEACATAHYWAREIAKLGHDVRLIPPAYAKAYVRRNKNDPADAEAICEAVSRPSMRFVAVKTEVQQAAAGIHKVREMLIKQRTMLINTLRGLMGEFGIVVAEGPRHVGELIAILADPADRRIPTPLHEGLLAIVETLRGIERRIEIVDQQIVGWGRDNATCRHLITIPGYGPILSSAMAAMTVNPADFGSGRHFSASLGLVPRQDGTGGKVKLGPISKRGNGYLRRLLVNGAMSVLCSKRAKEDPWLVKLLETKERKVAACALANKMARIGWAVMRRQEDFRGRRHNQPCPDGETAL

SEQ ID NO: 399997 - protein, 520 aa, unidentified
MASTRTCRRSSRRRTPVAVGKPRGVLHPRVQQVGPEHFGIVCFDCHKVSSKFLLADFYGRLLIPPTVVAHTRPALDVAVAQIRQAFEQHQLRDGLAAIERTGRYHRVVQRTFAAAGFETRILHPFVTKQYRQPVDPGNKTDDADLAAIHRATVTGCALLEATRDEAWTTLQLLIRHRRDLVCKGAALNCQIRDHLEAALPGYAACFDKLWDSAIPWHLLRHYPTAAQLREAGVTILCHSLRQADIRFQQRTIQSVVDWAEQAAPGDVAADQHLRIALALYDDRRQKTREIKALERDIAGRLVQTPYVLLLSFPGINVVSAADFAGEMGPIEHYANAKSITGRAGLRPSRYQSNQVDKANGPLVRNCNRSLRAAILGIADNLIVCNHHFQALATQWSAQGKDPRHTRVKVGLRFCRIGFQMVAGRQVFRHPSIQGRHYILDKLSAFHREHDTGMVEVLGDLQAAIGQVPQREHAAEAKPLSEELKRIQNGHRRGPQVLGDILPIVLARLGVGVVQSPESGE

SEQ ID NO: 399998 - protein, 412 aa, unidentified
MEVVFPRCAGLDVHRDTVAAAVRIQPAKGPAKVEVRTFTTTGGSLGLLADWLAQNKVTIVGMESTGVYWKPVFHMLEDQFECWLLNAAHVRNVPGRKTDVADAVWLADLVAHGLVRPSFVPPKPFRDPRDLTRARRTVVEEKTREVQRLEKLMQDAGVKFTSVASQLLGVSGRAILEKMIDGEQNPQYLADLARGRLRGKIPQLAEALAGTFRSGHHGFLAAQLLERIDLCDEQITELDRRIEVMIAPFVETVDRVTTIPGVGRVTAIVLLAEVGIDMSRFPTAGHLASWAGICPGNHTSGGKRLSGRTRHGNKWLRTALTEAAWAAARSKNTYLASHHAQVRGRRGIQKAIGTTRHDILIAYWHIVAGNTEYHDLGGDWHTRRRRNPEKRKNTLVGELEKLGYTVTIEPAA

SEQ ID NO: 399999 - protein, 359 aa, unidentified
MVVIEGRERLIVGGVDTHKDLHVAAVVDEQDRVIETRSFATIRQGYRQMLAWMRSFGDLQRIGIESTGSYGAGLLRFMQQAGVEVLEVTTPDTQDRRRRGKNDDLDAQNAAHAAFAGLRTVTPRSRDGMIESLRVLMACRKTAVSARRVALQLIQNTIVCAPDGLRDQLRSMTRMQLVRTLAAWRPDLTAYRDVEAAYRIAFKSLARRYLELHDEIADLDAMIAAIVDELTPNLVARNSIGHIGAAQLLLTAGDNPERLRSEASFASLCGVSPVPASSGKIVRHRLNRGGDRAANSALHIIAIGRLRTDQRTKDYVARRIAEGHSKLDAIRALKRYLAREVFTLITQRRREINATRIAA

SEQ ID NO: 400000 - protein, 349 aa, unidentified
MLHVGLDLSRRRVDVCLISSEGELVEHFRAPADRDGLYGLSRRVAVYDEPVRGVVESMNGARFVHDELVRYGWEVLVADAQRVKGLAPLACKTDKIDARVLAELSFRDLVPAIWLPTPELRQERERSRWRLHLVKHRSILKNRVHAALIAFGHQVPMADLFGAGGRRLLAELDFPEPWLSHVRASLELIDDLDRRIGEIERWLQRSGADHRYIPLLMSAPGIGWVTGFTIAAEIGDISRFSSPVKLTGYTGLCPRVNQSGEVDRRGPISKHGPRYLRWGLMEAAIHASAHPLYKERYQRTKRRLGRQRGAKVAQIELARKLTEAIRYMLTRNQPFKPFAPAGAIYRLTA

SEQ ID NO: 400001 - protein, 412 aa, unidentified
METMVERPAALDVHKASVMACLRLPAADGGRDERVEQFATTVQGLLTLADWLEAHGVTQVAMEATGVYWKPVWAVLEDRFACMLVNARHVKQVPGRKTDVLDAQWLCRLLEAGLLKPSLVPPKPIRTLRNLTRYRKSNIRDRQREANRLHKLLEDTGIKLDCVATDLLGKSGRAMLDALVTGTTDPHVLADLARGQLRKKLPALREALAGRFEPEHALVVGQILAHIDFLDESIDRLSAAIEEQIAPFAAAIELLCTIPGVQRRAAEVIIAETGGDMTAFATAGHLASWAGVCPGNDESAGKRRSGRTRKGSKWLRGTLIEAARAAARTRDTYLAAQYQRVRARRGANKASLAIAHSLLVAVWHMLQTGEAYLDPGGDYYTRRNPARTTRRLVTQLERLGYSVTLQEQAVAT

SEQ ID NO: 400002 - protein, 413 aa, unidentified
MKQVQQVVIGVDPHKLSATIEVVDAQERLLGSGRFTTDQAGYAAMRRYAKSWPERVWAVEGANGVGRPLAQRLLEAGEQVVDVPAKLAARVRLFDTGHNRKTDAHDAHSIAVVAVRTEGLRVLHADAELEALRMLADRREALTRRRIQTVGRLQALLAELLPGQAKKDITTGQAKTMLAGVRPRDIAGKTRRRIAADELAELVSVEAKIKKADAELKAMVLARGSRLMDLRGVGPVVAARTLADVGDVARFADRNRFASWTGTAPLDASSGEQNRHRLSRAGNRRMNHMIHIAAISQLRLDTDGRAYYRRKRAEGKKPLEAIRCLKRRISDAIYRQLVADAQAAAETAEPQGGAQASAGPGGHRGASHQSSAVNLPPPIDTSDQPLPGPANTTLQPDPRHRNTSPRKTPQLTT

SEQ ID NO: 400003 - protein, 313 aa, unidentified
MAMPAKQFIIGIDVAKVELVSYCEQTGQHQSFRNTQPEIRKWLALQPANTAICVEATNIYHLDLVEMAYEKGFAVYVVDGYQLSNYRKGIGGRVKTDASDACLLARFLDREGSALRPWVPPPPVYRKLQSLLRRRAALVSARTSLVQSWSNEGVLKEAFNSFIKHFESLDLLIQKQLKTVVREAGLTEQVVRCQKVEGIGFLTAVALVTAFIRGEFRSSDAYIAFLGMDLKVADSGQKSGRRRLTKRGCSEVRRLLHNAAMAASKSAAWKELYEYYRSKGKAATQVLVILARKLARVAFALMKTQGEYVSRRA

SEQ ID NO: 400004 - protein, 452 aa, unidentified
MPRIKRSRMAMSPVHANAAAIDIGATLHVAAVGPDRDPEPVRSFGTFTGDLHRLAGWFKQCGVTTVAMESTGVYWIPVFEILEQRGFTVVLVNARDAKHVPGRKTDVTDAQWLQRLHEYGLLRASFRPEHRIAALRDYLRQRERLLDYAASHIQHMQKALMQMNLQLHHVVSDITGATGMRIIRAFVAGERNPVTLAALRDQRCKESAETIRQALVGNEREEHIFALAQAVELYDAYVAKVDACDKRIEAVLTELKATCPPPAAPLPAPRHRTKQPNALNFPAREALHRILGVDLTQIHGLGPYLALKLVGECGTDLSAWPSAKHFTSWLCLAPSNKISGGKVLSSRTRRSSNRASALLRLAAVTVGCTETALGAFYRRLAGRVGKAKAVTATARKIAVLFYNTLRHGMGYSDPGASYYEDRYRQRVLANLKRRAKSLGYSLQLTEPTSAGA

SEQ ID NO: 400005 - protein, 403 aa, unidentified
MIYIGDDWAEEHHDVHIMDGDGTKLAARRLPEGIEGIGRLHALIGAHTQDPGQVLIGIETDRGLWVSALVAAGYQVYAVNPMAAARYRDRHHVGGGKSDAGDAKMLADLVRTDAHNHRLVAGDSALSEGVKVLARSHQSLVWSRTRETNRLRNSLREYYPGALATFEDLDSPDALAVLSRAPDPARGARLSLSQIKNVLRAGGRRRYLEPTAQRVQAGLRAEQLTAPPQVVSAYAAATTAAVGVITALNTQINNLATELEAHFEQHPDAAIYRSLPGLGVVLGARVLGEFGDDPERYANAKSRKNYAGTSPLTIASGKKRAVLARHARNKRLYDAIDQWAFCSLSTSPGARAYYDERRAHDDTHHQALRALGNRWVGILHGCLKTHTPYNETTAWAHRNTTAA

SEQ ID NO: 400006 - protein, 338 aa, unidentified
MRLYCGIDLHSNNSMISLIDQEDRVVSEKRLDNNLEAIEHHLQPFQDDISGVVVESTYNWYWLVDGLIEKGYPVHLANTLAIQQYNGLKYTNDATDARFLAHLLRLNILPTGYIYPKAMRHIRDLLRRRLLLVKQRTAQLLSLQSLIGRHTGERLSCLKMKQLKQDELAHHFGSAPARFSAQQNHRLMQQLDTQIEEVETFVLARCRDSEQYSRLTSTPGIGKILGMTILLETGPIDRFPNVGNYSSYARCVPSEKISNGKSKGKGNTKNGNRYLAMAFVEAAHYASIWEPTIKRYYQRKCKKVPVMVAKKTVANKLTRACYHMLRNGAVFDVARAFG

SEQ ID NO: 400007 - protein, 351 aa, unidentified
MMIIGVDYHPSFQQIAFFVEETGECGEQELNHSDGQAEKFYRDLKQRGICVRVGLEATGYSRWFERLLAELGFELWIGDPAEIKTRRVKKQKTDRKDAQLLLRLMRENNFPQVWVPSPENRDLRQLLWHRHRLVQMRTRIMNQLQALAMNEGYRWKKKLFSEQGRAQLEKLSLATWASRRRQELLELLDRMNPTIEELTAAAEQEVKKRPEALRLMTHPGVGPLTALAYVLIIGTPERFHCGKQIGTYVGMIPSEDSSARKQRLGHISKQGNSLLRFLLVEAAQAAARSNPQWRRRYIHLAMRRHKSIAKVAMGRKLGVRLYWMWRNGCAYSPSFEFGSYVGQLGTGHGVK

SEQ ID NO: 400008 - protein, 379 aa, unidentified
MTHAQMIQIDNSTKNDRLYIAFDLSNAKWKLAFGNGIKKRQKTIPAGDLPGLMEEIAKAKHRFKMGDDVQIYSCYEAGRDGFWIHRFLESEGIHSVVVDSSSIEVNRRFRRAKSDRIDADKLLTMLIRYINGEQKLWSVLHIPTVEQEDVRRLDREIERLKKERTAHTNRIRSLLVLHGIQLGVGRSFLKKLEEVTQWNGEELPQQVKKEILREYERYGVIQDQLKVLESEKKEILASGSRPAKKVLGLQNLKGIGPVSSWVLVYEYFGWRDFKNVKQVGGASGLTPTPYDSGGSEKEQGISKAGNRRVRSVMIEVAWYWVRYQPQSSLSRWFMERFGTGGKRMRKIGIVALARKLLVALWKYLEKGLVPEGAILKNLV

SEQ ID NO: 400009 - protein, 347 aa, unidentified
MNLYKLPHKYYCGVDLHSRTLYLCVVGQEGGVLLHRSLPCDPTRFLLAVAPFREDLVVAVECVYSWYWLADLCAKEGIAFVLGHALYMRIIHGAKAKSDRIDSEKIAVLLRGGLMPNAYAYPADMRATRDLMRRRLLFVRQRGSLLAHIQITHHQYNVDPPGKRITYRSNREGLGEAFEDPSVRQNIASDITVADHLEVVIGELELAVLRQARVHDPNAYALLTSVPGIGKILALTILYEIHDISRFPSVRDFASYCRLVKCERRSAGKSLGSGGNKIGNAYLKWAFSEAAVLFIAKSEQGRTVLKRLERKYGKPKALSILAHKLGRAVYFMLARKQAFDPQRFAAA

SEQ ID NO: 400010 - protein, 321 aa, unidentified
MNKNTEIFGIDISKDVFDVYSHQKGHQSFKNDAQGFKSFLKEITKEALVVMEATGYYHYLFAQFLHKNEVQVSVVNPLSVKRFIQMKLAKVKTDKSDAKAICEYGHMNEVPLYTALTDVQAECLQLFRLLDNYLKKRTQTKNKLHGEEVLGVPSKYVHQSLKRDLKHLDKEVKGIEARLLELVKQDQQHQLTLLKSIPGMGIKTALFLIVVTDGFSKFETASQLCSYVGITPIIRESGSSVRGRSRISKVGNKKLRNLIFLCAFSACKHNKACREIYERIVNKGKSKKLALIAVANKLLKQAFAIAKSGRPYDENFVSKLV

SEQ ID NO: 400011 - protein, 360 aa, unidentified
MDRYIGLDAHASSCTFAVLSASGRRLRTDVVETHGQALVEYLQLLPGQLHLCMEEGALSSWLYELLSPHVEELVVVTVGISRGDKSDAKDAWGLAEALRIGAVKTRVYKDQGAYGKLREVGRVYTKIVEDHARVQNRLKALFRSRGVSALEALFKESKQEEFVKQLPAKMRVSAEILLAQYSAILEVRSRAHKELLQESRKHEVCQRLQSCPGIGPIRAALLVGIVVSPHRFRTQRQFWSYCGLGIVMRSSSDWKQDRKGQWVKSKEPLCRGLNPNHNRTLKWIFKGAATTIITGLPNSALHADYQRLLEGGTKPPLAKLTLARKVSATVLSMWKNQEAYDPSRSRQNPQQAERQSTGRS

SEQ ID NO: 400012 - protein, 370 aa, unidentified
MEEGIKFFVGLDVHKDTIAVAVAETGRAPARLVGSIAHDVNQLLKRLARYGEPAQVHVVYEAGPTGYGLQRALARRGYQAQVIAPSLIPKRAGSRVKTDRRDSLRLAELSRAGELRAVWIPDPADEAIRDLARAREDAVNARTQVRQQLKGFLLRHDVRYARRTSGSKTYYRWLATLNFAETGVQTAFTDYWPAVSAADERVGRLTTALVGSIAGWRFASIVAALQALRGIDQINAIGLVAEIGDIGRFAHPQQLMSYLGLVPTEASTGERVVRGSITKTGNAHARRLLTEAAWNYRFQPRIGMRAQRRAEDLPQAIRDVAWKAQLRLSGRFRRLHTRGVHLNKVCTAVARELAGFVWAVARARSELPQS

SEQ ID NO: 400013 - protein, 356 aa, unidentified
MSSKLNTAIAVAGIDIGKNSFHVIGLDKRGAIVLRQKWSRGQVEARLANTPPCLIGMEACVGAHHLSRKLQALGHDARLMPAKYVRAYSKGQKNDFRDAEAIAEAVQRPTMRFVATKTGDQLDLQALHRVRERLVGQRTGIINQIRAFLLERGVAVRQGLRFLRIELPGILAKRTDVLSPRMLHLIEGLADDWHRLDERIEVLSSEIGALACGDPACDRLMTVPGIGPIISSATVAAIGNGAAFSKGRDFGAWLGLVPKQISTGDRTILGKISRRGNRYLRSLFVQAAWVVLVRVGPKHWDRYGLKSWIEAAKKRLHHNVLAIALANKLARIAWAVLNKERKFECIRTNKMSPRAA

SEQ ID NO: 400014 - protein, 345 aa, unidentified
MTIVEARLVTGGVDTHADTHVAAALDSIGGLLGVREFPVTPAGYARLLGWLGGFGTVGLVGIEGTGSYGAGLARHVSAAGVRVVEVDRPDRQDRRRQGKSDPLDAVSAARAAQSGRARGAPKGRDGVVEAIRALMVAKRSARSGRVQTISQARSLIVTGPDDLRARFTGHTVTALVSELAALRPRPGDVVGYATRVALRELGRRAEFLDAQLGRLDELIVPLVTARAPGLLALHGTGPDTAALLLIAAGDHPARLRSEAAWAHLCAVAPIPASSGKVTRRRLNPGGNREANHALWRIVITRMGSHAPTRAYVERRTAEGLSKKEIIRCLKRYAAREVYPHLHPAA

SEQ ID NO: 400015 - protein, 359 aa, unidentified
MASIASDPADVIVGVDTHKDQHVAVALDGLGRRLGERFAPAMPSGYADLLAWAARLGRVAAFGVEGTGSYGLGLARFLRRHGIVVLEVARPPRKGQRRRQGKSDPVDAEHAARELLAGAGAVTPKTAEGAVEAIRLLKVARDTAVTAHSQAMITLKATLVTASDTLRAELEPRTDFALVTACAELEVAGDLADPDVAARHALRALARRWLALHEEIKVHTRQLKRLTSQTAPALVATFGIGFDCAAELLCAAGDNAGRVRSEAAYAKLCGACPIPASSGKTTRHRLNRGGNRQANAALFRIVVVRMRWHPATIAYVQRRTTEGLSKREIIRCLKRYVAREVYRLLPVPTATPAEPLQAA

SEQ ID NO: 400016 - protein, 470 aa, unidentified
MFITRRSDQQTAFCFKTHTQGSSSHRLSIRPARNKFQAHSNTNFTPRRCDMKEPTITDFAALIGVDWADKKHDVCENPVGTTIFNDSIISNKPESLHEWAMSLKKRYPNQSIAVGCELTKGPLIYALSKYNHLTLFSINPSTVAKYRKAFTHSGAKNDPSDARIQTDILSRHMDKLESIRPEPANVRALAQLLEYRRKVVQDRVDLSNRITATLKNYYPQALEWFKEKDTAIFCDFLTKWPSLAAVKKARKQTLMNFFNTHHSRYVTVNEKRIEDIKSAMPLTNDLGVIEPNMILVEVLVPQLKGLIEAVERFDKEIKQRYKHQKDKVVFDSFPGAGPQLSPRIFVAFGTDRKRYSEANAVQKYGGIAPVIEQSGQKKWTHWRYSCPKFMRQTFVEWAGQSIRYSFWAKAYYEQQKQKGKPHNTIIRALAFKWIRIAFRCWQTSTPYDESKYLNALKKQGSPLLNFAVNN

SEQ ID NO: 400017 - protein, 355 aa, unidentified
MEKPEITIGLDLGDRFSHYCMLNGDGEAIETGRIQSTEEALRRHFEGEPTMRFALECGTHSPWISRLLEQLGHQVIVANTRKIRAITSSESKNDKNDAEKLARFAFCDPRLLSPIRHRSPERQQDLNLIQARSTLVRARTMIVNALRGLVKSAGGRLPACSPQGFEARVEASIPPALAEAARPLLNQIVALNAGIQQMDRGIEQLANRYPEIPVLRTVPGIGPLIAAAYVLTLDRPDAVQHSRQAGAFLGLRPRQSQSGDSDPQHRISKTGNVYLRSLLVQAAHYVLGRFGPDSELRRWGLKLAASGGKRGKKRAIVAVARKLAVILHRIWQTGKPWQAFPQSANNAASKDVCMV

SEQ ID NO: 400018 - protein, 312 aa, unidentified
MYYIGIDVSKKDLSVFDGKKDLKFINKERLKSFKKYLKKKVNFSDLVIIFEPTGVYSLYLKEFCAENNIKAYIVNPKKSHNFTRALGKRSKTDKIDARILYQFHKLIDLKDIKIPKIDQQAKALASYLTSYEFALKQRISLSNHLESLRDKSLIALMKKDLKRAKKLEDKIFNDILEYVSKNQNLKEDYQRLLTISGVGDKTAIALLTLFKTYQGTNRAQITALAGLDPVRRESGTSVKGKVKISKNGKGIYRKIFYLPTICATVHNQKIRVFYQRLLAHHKIKKLAVIASMRKILLIAHAMYRDKTEYVAA

SEQ ID NO: 400019 - protein, 393 aa, unidentified
MYLVGIDIGKLKHSFCLLEKETGEILVEPVFFENNRDGFNALLSSFKHLPQKDILIGMEDTGHYNLALLKFLLDRNYQVALINPVATNLTRKMQGGISKNDKLDTLTICDVLSSNQRVKSYRISKYSSFDLYEQKQLTREHHNLKEEENQLSNRLQKCIDVVFPEFNSLFKSKYGIVYMNILKEFGSADAIAHADIRTLRKCFDTGRGKHISLTAQELKEAARNSIGFPSSSEATQIKHLVARIELIKEQIAEIDKKIEEFSLQNNSPILSIPGISHFSGTSILAELGDIHNYSKPSQIIKFAGVAPLTYESSQFTAQHTAITKKGCKYLRKTLYQIITPVIQYNPVFRKFYLLKIAQGKGHRCAQGHCVRKLMRVIYHLLSTGTQFDPALLR

SEQ ID NO: 400020 - protein, 372 aa, unidentified
MLFVGIDVSKDNSTAQGLDREGRKLFYLEFPMKGEGFSRLLSLVNTHGPDVSRVTVGMESTGCYHLNLFAFLSSKGITPVVINPLLIANFARLSLRKTKTDKKDALTIAQFLLAHGEGLSKIGYSQNGQDLKDLARERESLAVMIAGLKNDTQRFLQLTFPELEHHCKLFTETMLHFLSKFPSARVIRTAKPREISRTLIHGEGKRKRVFISSEEIIKLAQTSVASDSVAKELILLGKIETLLFLEEKKKKITEALVEACQSMRVDDLEIITSIDGINQITGSTFLAELGDIRTFSSHRHVIAFAGLDPSIHQSGQYGRISKISKRGNRHLRRVIFLMTLCVVRSRNVFREYFLRRKREGLPPKKAILAFGS

SEQ ID NO: 400021 - protein, 353 aa, unidentified
MSCYYVGLDVHKASICIAVLNADGKLVMESVVETSAATVLDYLKGLRGQVEVTFEEGTHAAWLYDTLRRTKAQVIVCDPRKNRLLQDGNKSDRVDARKLAQLLRAGLLSPVYHGEHGTRDLKELVRSYEYLVEDSTRTMNRIKALYRSRAIPCGGTDVYKPRQREAWLAKLPESGARVRAERLYAELDHLAGLRREARKSLIAECRRHPSAKVLLKVPTLGIVRIAQLLATVVTPHRFRGKRQFWAYCGLAVVTRSSADYQRDGAQLRRVKRAASTRGLTRSHNRTLKHVFKSAALTASRCEPFKTRYAEMLARGLRPELARVTMARKIAAITLAVWKAGADFEGSKLLGQAA

SEQ ID NO: 400022 - protein, 370 aa, unidentified
MKKKILYIGLDVHKKSIDVANTDARAKGKVRSYGKIDATLEALDKLVSKLKTPRAALHFVYEAGPCGYPIYRHLTSKGHSCSVVAPSLVPKRSGDRIKTDRRDAINLVRLFRAGELTSIYVPTTEDEAIRELLRCRVDIRRIECKTRQQLLAFLLRHGHYYPGKKNWTKGHMNWLAELKPAHRAQQIVLQEYIDAANECTRRIKRITEQIQDLVAQWSRAPFVRAYQALRGVSLIVATTVVAEIGDMNRFKNPKQLMAYLGLVPSEHSSGNRIRRGSITKTGNSHVRRALIEAAWTYNLRARKTKPILKRQQGLDDRICEISWKAQLRLCGKYRRLFARGKSKQAITTAIARELSAFIWAIDKQVQQITA

SEQ ID NO: 400023 - protein, 351 aa, unidentified
MEVMFDRVAGLDVGKDSVTVCVRTPGPRGGRRSDTRTFKTMFGSLRVMRDWLVEAGVRTAAMESTSTYWKPPFYCLEEVMVVWLLNAAHMKAVPGRKSDVRDAEWIAQLLEHGLLAPSFVPPPQIRRLRMLTRYRMQLMGDRTREMVRLELMLEDASIKLSSVASSLRTVSARAMLTAMIGGETDPLQLADLAKGKMRRKIPDLAQALTGTFDAHHAQLAKSMLRRLELVEQALAELDAVIAEACRPWQHQLQLLQTIPGVGETVAQVIVAETGADMSRFPTAAHLAAWAGLAPAMHESAGRQTPAGKRHGNKWLTAMLVEAAGSVRRMRGKNYLAAQHARLTRRRGMGRR

SEQ ID NO: 400024 - protein, 358 aa, unidentified
MNAHRIQNFVVKRKEIFVGLEDSKTTWKIAVRCEKMLIHQVSMEAKYLLLRGYLLNKFPECTIHLLYEAGFKGFNLYDRLTEDHIDCVIIPPHTVTQEKVNKVKTDKRDAKRLALILENHDFRDGCHVPDKERREDRQISRTFIAIQKDIVRTRNRIRKFLHFHGIETPFADKDIWGRKEYRALAQLPLSEPLRISLDVLLAQLEQLWTHHRNLRVSLRQLSRKERYRKAFEIAKSVPGIGWFTAIRLVLELGEDLTRFASAKKIAGFVGLTPGEYSTGESTRKGKITGMGSGFIRATLVENSWAAIRKDPVLLNKFRRIWRGTGSKKKAIVAVARMLIVRLRACIISGTPYAIGVVR

SEQ ID NO: 400025 - protein, 402 aa, unidentified
MTNRDPIPSDAVLVAIDIAKVRNEVLIEASHHKRWRRLSVLNTRAEHDRLIEVLRAYGKPVICAFEATGNYHRPIAWRLIEAGFEVRLVSSMALARTREALHNGWDKNDPRDAQVILHMLRIGATQRYHDPIRAGINDVQELSKTHEAIAKAKTEIQHRILTHYLPLYFPEIERFRGNSRSDWFFAFLEVFPTPASITALSKEAFIKTAWSVAGRKVSKERLLSDIYETARTSIGLPLPGDAPAIRMFRMVIAEARSLIRQRNEIERMADNLLGESADYQALRRIPGIGPIIALTILAEGGDLRRFGHHRQFLKFCGLDLSTQQSGQYRGQTRLSKFGNARLRRTLWIAGQVAIRQKENGFRHKFERYIAKDRDSPDLRRKALTAITAKMARVVHAVITRRH

SEQ ID NO: 400026 - protein, 328 aa, unidentified
MSKDVLYVGIDVGCKELWVSIDGFKPRKFRHSREGIRSLNAWSQRKSNHEQVHFCMEATGVYSISVASQLVERYQAVVSIVNPAQIAAFAKVLMKRSKTDQIDAKVIRNYAEVQSPPVWMPASRSLRQLTSLVTQADAIRDCLGQWRNRRHAQDFIPDLPEEVKKTQRSIERSLTVQLKKIEMAISNLCAQEATLAHQVALLCTIPGVADQSAVKLLAYGQEWLTERSAKALTAHAGLAPHHYQSGTSVRGKSRIDKRGNPKLRKTLFMPALVAVHYNPVLMKFYQRLLKNGKPKKLALVAAMRKLLLISRAMLIAQKTFNPKYSPLT

SEQ ID NO: 400027 - protein, 382 aa, unidentified
MSTTTTTRIAERNAILYLAFELGNGTWRLGFTTGTGQKVRQQTVTARDGRAVLAEIVRAKERFGLAPETPVVSCYEAGRDGFWLHRFLTAEGVENRIVDSSSIEVNRRQRRAKTDRMDTVRLLGLLVRYEAGERTAWSVVRAPNDAEEDARHLHRELLTAQRDRTRVTNRIRGLLANQGLEIDPTKDVPRQLAGLRRWDGSPLPEHLRRRLEREWEKVQFLTQQIAALTRERRQLVRKADDPTMAMVWRLLHLRGIGMNGAWLHTMEFFGWRHFRNGKEIGSLAGLTPTPHHSGDLRRELGIDKAGNRRVRWMAIELAWAWLRFQPESALAKWYETRFARGGPRLRKIGIVALARKLLVALWRYLETGVVPEGAQLKDRILI

SEQ ID NO: 400028 - protein, 346 aa, unidentified
MDQIIRIGMDTSKHIFQLHGVDAAERPVLRKRLGRRQMVAFFAKLPATVIGIEACGAAHYWARVLGEFGHEVRLIAPQHVKPYVKRNKNDRRDAEGLCEATGRPTMRFVSVKTAEQQAALMLAGLREQMVARRTQLSNAIRGYAAEFGITAAKGLDKIEPLLADIAQDESVPALARGLFAVQGREYAQLQSELKAIEARLRAWHRANADSRRLAKIPGVGPIGASALVMKTPDPSAFPSGRHFAAWLGLTPKDHSTAGKTRLGKITRAGDERLRSVLVAGATAVIQQAKHGRGHPSPWLLALLKRKPPKLAAVALANKIARIAWKLMTTGESYDGARMSGASALAA

SEQ ID NO: 400029 - protein, 400 aa, unidentified
MNAVGIDVSKGKSTVAVLRPFGEVVASPFDVIHNDSDLKQLVDLIKALPGESKVVMECTGTYFEPIAQFLHNNGIFVSVVNALLVHDYGGNSLRKVKTDKKDALKLASYTLDRWTELEEYVPADEQRKTLKILNRQYNQSNKIQTMMKNNLISLTDSVFPGINKLFTSPERQSDGHEKWVDFLNAFPHKDCIAGLYLSVFKTKYKSWCKKNKYNYSDSKAEEIHTFAKSIIAVLPLNYSVKLLVTQAVMQLNTILETVSSIRKEMDRIASSLPEYKTVMAMYGVGKVYGPQLMAEIGDTRRFRNRRAITAFAGLDAPPYQSGQLDITSRHISKRGSAALRKVLFQITQVFILNKPENEPVYQFIDKKRSEGKHYYSYRIAAANKFLRIYYAKVNQTLKLL

SEQ ID NO: 400030 - protein, 345 aa, unidentified
MKITTIGIDLAKMVFQVHGVDAHGKTRLRKQLKRKDVVSFFANLEPCLIGMEACGSAHYWARKISELGHTVRLMAPQFVKPYVKTNKSDRNDAEAICEAVGRPNMRFVAVKTAPMQAVLALHRARQGFVKARTAQGNQIRGLLAEFGIVIPKGIGHIAKRLPEILEDGENRLPGMMRELLQRLGENLQDMDRQVRDLERQIMLWHRENEASRKLEAIAGIGPLTASALVATVGDAKSFKNARQVPAWLGMVPRHEGTGGNVKMGRISKRGDVYLRTLLIHGARAVIAHIERKPDHADEWLKKLIARRNKNIAAVALAAKNTRIAWALLAHERSYQHDYVATRKAA

SEQ ID NO: 400031 - protein, 342 aa, unidentified
MDHYAGIDVSLECSSVCVVDANGKIWREARVASEPEALIAWFHSLGFGLERIGLEAGPLSQWLFAGMKAAGLAVELLETRHVRKAFEAMPVKSDRNDARGIAQLMRLGWFRPVHCKSISAQETRATLTARKLVQSKLRDVENSLRGILRGFGLKVGKTTEREFAGRINQLVTDHPHLQRIVDALLAVREVLRTEFAAFQKQTRKMARSDSRTRLLMSTPAVGPIVALTYASAIDDPTRFKSSKQAGAHFGLTPKKHQSGETDYTGRISKIGDSSVRTALYEAAHIMLTKPVKGCSQLKSWAMRIAKRAGMSKAKVALARRLAVIMHRMLADGTPFNAAAAAA

SEQ ID NO: 400032 - protein, 385 aa, unidentified
MTNETLQTNDTNTSATLTPRLLVAIEMSLKNWRLVMSPEGGTRNRVKTVEAGNYLELEKAVAEARERFKLPPQTRVVFCYEAGRDGFYPYRRLTEAGHEVWVIDSASIEVSRRQKQAKSDGIDGDKLAELMQRKARGEKKALRIVRVPSPEVEDERLLPREREIILQDIVRLRNQIESILFTQGYRGIPKTAAALKSWAAGRGELTPQLRERLGREIERLTLLEAQLQKVEKAMALKARQENGAGIAAVACALMQLCGIGLIGAWVLSSEIFGWRKFRNRREVGAVLGLAPTPYSSGQDGREQGISKAGNRRARSMLVELAWLWLRYQPGSALSQWFMARFSGGGKRMRRVGIVALARRLAVALWRYADQGVVPAGAKLKKEATA

SEQ ID NO: 400033 - protein, 362 aa, unidentified
MLQSTTIIAFDQHAATTVAAVLLAGQGTPALHSLSSDSATILRFVERLRREGAVQCCYEAGPCGFELQRALVGHDVPCDVIAPALIPRRAGDRIKTDRRDAGQLAILYRAGALTPIHIPTAEEEAARDVLRCREDIRADLLRARHRLSKFLLRHGRRFPGPKKAWTTRHGEWLRTQVWPLAALEQTYTAYLRAVDEAGARLRTVELDLRALLELPSLRPRVDRLRCFRGIDDLTALTVAAELGDPRRFPTAPKLMAFVGLVPSEHSSGTKRARGAITKTGNAHLRRVLVEAAWHYRHRPFVGQALRRRQCGGPEALIAQAWAAQQRLHRRYRRLAGRGKPTPQVITAVARELTGFVWAALTR

SEQ ID NO: 400034 - protein, 317 aa, unidentified
MTQTSITTAGIDTSKAKLDIALHGRAGCWQVPNAPSGWRLLAGQLTKAGVTRVGIEATGGYERGVVEHLRAAGFAVLVLQPTQVKAFGRVRLRRAKNDALDAVQIAACAATLDQVKVAPDPRLVQLADNLTFLEQIEEDIKRFKTRLEHIDEPRLRRMVLADIARLKARRLTQIRDIAKQLRAHRDLAARLDLVLSIPGIGERTALALLIRMPELGRISREEAAALAGLAPFDNDSGQQKGQRRIAGGRARLRRSLFAAALPAAFRWNKALIALYQRLTAAGKAHNAALVACARKLLIYANTVVQRGSPWTERPLGV

SEQ ID NO: 400035 - protein, 342 aa, unidentified
MAMKAMTLVGLDVHAAQTHAAVVDRGSGEVRVSKLRMPPVEVASFLAGLGSGVVAVYEAGPTGFGLARAARERGVDVRVVAPGSIPKGSGDRVKTDRRDAIRLARLLAAGELRFAFVPSVADEQFRDLVRAIEDARGDLMRARHRLGKFLLRRGERFPGPGSAWTAKHLAWLRGLRFDDACSHATFTDYLASIELLAGRRASLLVALEQQALVCRHAPTIARLRCFRGIETLSAAGVCADIGDFGRFPRPTLLSGFLGIVPSERTSDTKRRQGAITKAGPPHARRLLVEAAHHYRHRPNLGTTLARRQAGQDPRVIAIAWRAQRRLHQRWQHLHHDRGKPPA

SEQ ID NO: 400036 - protein, 346 aa, unidentified
MQTIVKQVVGIDVAQKELVVCLGRMDSDLSSELYAYHVFGNTAQGMNSLINWVKQRTDAGVSLRFVMEATGVYHESLAYFLNAQGYRQTIVLPSKINHYAQTLAVKTVTDKTASQAITRFGLERQLTDWVPPTPAYKKLRQLTRERDQVVQLRTMAKNHIHAEKAEAQPDEQSLRRMQQQIDFFNQQEKEIKVQIKELVKQQEKIKNEIAIITSITGIGELTAVTILGETNGFELVSNKKQLASYAGLDVKEKQSGTSVKGKPRISKKGNRYLRKAMHLPALAAIRSDERFKAIFTRLVAKHGIKMKAAVAVQRKLLELVYTLHKTGSKYNPEYLKKLENSNGAVL

SEQ ID NO: 400037 - protein, 427 aa, unidentified
MNYNQNHKIAQITESTLIVGIDIAKDKHVARAQDYRGIEFGKRLIFENRIHGYQKLLDWVARLQEENQKTHVMFGVEPTGHFWKSLAYYLNAKGYDFVLVNPMHVKKSKELDDNSPTKNDTKDARVIAQMVKDGRYSVPNLLDGVYAELREGIKLRDQLTKQLMIVEGRIQNAIQRYFPEFDDVFNDWNGKTAICTLREFPFPSDIQDMTPEDVLSTWKTVVKSGVGIKRANQLVQAAQKSIGVQIGLRFARQELQTLLDQYELYNQQLVSLDKEIETLITDLPGAKEMMAIKGIGPTTVATFFAEVGDLSNYSHPQQIVSMAGLSLKEHSSGKFKGQTRIDKRGRKRLRRAIYLAVRPLVAHNSTFKTLHHYYTTRPDRPLKKQQSLIALCGKLIRVLFAIGTKQCEFDGSKLLQGLPELQTSQVA

SEQ ID NO: 400038 - protein, 331 aa, unidentified
MKILDTVGIDMSKLTFDTRIHSNQDYKEFENSKSGFSRLLKWVYKNSTFSKENILFVFEHTGLYSHQLSVYLTEKKVPFSLIPGLEIKRSLGIARGKNDKVDATKIALYSYRLRDEIELYQMPTEQVASIKRLLSLRVRIVKQRAGFKSSYKEQKRILSKKDNTTLFNVQEKTIKYLTKQIVDIEKEMMTIIKSDDKLKEQYKLITSINGVGKQTALFMIAYTYGFTKFKTWRKFASYCGIAPFPNSSGTSIRGKTKVSNLANKKIKSLLDLCAKSAIQYNPEMKVYYNRRVDEGKNKMSTINIIRNKLLARIFAVVERQTPYVDIMKYAA

SEQ ID NO: 400039 - protein, 381 aa, unidentified
MKPTKKLTPTSHQQTEATAEVIKLGIDIHKTKYVVIRQIDNLAPQSPQQFSPEEFIVWVQRQRLLAKRVVSCYEAGCFGFVLHRKLAEVGVENFVVRPRNWDEYGSSVKTDARDARELCGHLDRYLAGNERALCVVRVPTEEQEQARALSRQRETLAKERKRLQNVGTSAGLFHGVEVPANWWKPKVFAKLSTEIPEFLKLILAPFQQVLEMIDKHLRETTAREERKANRKIPVGLGALTTSILDQEFVDYSRFTNRGQVSSFTGLCPGESSSGNKRQQGSINKHGNPRIRHMLLEAVWRMIQFQPDYKPVLHWKARMANEPFGAAKKKKMAVAIARQFAVDWWRIQTGRITPEDVGLRVDFPSAYSTRALREGRVSKVYA

SEQ ID NO: 400040 - protein, 353 aa, unidentified
MENKLSETTVILGVDTHLDVHVGAVINEAGKLLGTRSVSTSTPGYRDLLDWAAAFGTVSSAGLEGTGTYGAGLCRFLIDNGITVLEVNRPDRAKRRLKGKSDPTDAESTARSVLSGISTAIPKEQSGACESMRMMSVVRRSAVKARTQAINQLRAILVSAPQDVRDSLWKTKASDCVDACLQSSSLGESELCETLTVTLKLLANRWLELSKELKQLDRSLERLTRQYAPQLRARFGVGPATAAVLLSVAGDNPERLKSEAALAALCGVNPLPASSGKTIRHRLNRGGSRAANNALWTIAMVRMRSDPRTRIYVERRTSEGLTLKEIHRCLKRYIVRELFPLILRDLAAADSAP

SEQ ID NO: 400041 - protein, 474 aa, unidentified
MQKKLSNKQEEVIKLLERQKIRDVRDLESYKLSECHPASAGIDLGSKELYLAINPAIAAELGIAIVHRFETFTNDLLACKDLLVYCGVKTVSMESTSVYWTTIYFILEDAGIDVCLVNPKKFRMVPGRKTDIADCQWLQTLHLYGLLRGSFHPSQDIAMLRSYMRERDSIIKERSTFVQRMQKALVKMNLLLHNVIDDITGKTGIQIITSILAGEKDPKLLASFRDPHCKKSEDEIAEALTGYYKEDQLYLLKINYQSFSFFDKQLCDLDKQITKLLKRFPHKKEKKEKKPDNGKSKSRGKNDIRTSENLEEVMYHILGTDLSALPGIRANAILQIISEVGTDMSKFPDAHHFASYLGFVPHNKITGGHVISSKTDRIISSAAQAFRKLIPSISQTKTALGAFYRRLAPRIGKAQAIIATCRKLAILFYNTLAFGKAYLEQGELIYKQKQEDWERRKLANLAKKYNCTLVTLIP

SEQ ID NO: 400042 - protein, 392 aa, unidentified
MYIVGIDIGKNHHEASIVSPEGKQIGRSLRFATTHKGADSLMSFIFKNIGNSPCVFGMEATGHYWYPIYSFLKAKGYTIYVTNPIQSDSLRKMYIRQTKNDSIDSFLIAEVIRFGQFGTTSMADENILAMRQLCRYRDSVISSRTEIKLRIGTIMEQIFPEYEKQFSSLWMSTSMGILEKYLTPENIENAPIDELFEIIKDKSHNRLTKAKAISIKEAAADTFGIKIAQDAFSFQLKQLIDRMNFLDKQIEALDCQILEYYEKFDCYLHTIPGIGIIGAATILAEIGDINRFKSSSALVAFAGIDPTVRQSGEFNSTHNHMSKRGSPYLRHAIFLAATTCSFHNSPLNAYYKKKRDQGKHHLTATGAVARKLTTVIYAVLRDSKPYEPKKFC

SEQ ID NO: 400043 - protein, 366 aa, unidentified
MRKVMAGMDLHGNNVMVGIVDAQGARLQHRRLACELPEIIEFLAPYKTELESIAVESTFNWYWLVDGLKAAGFPVVLANPAKIDQYSGIKHADDKNDAYFLAELQRLKILPTGYVYDPELRPVRDLLRRRMSLMRQRTTLFLSAKSLHQRTTGRGLELRRLKAMEPEEAAALYTHPANQLIAQIQKEHIDSLDQSIRQIEKAVLKVALQQPYYQRLQTMPGVGIILGLTISMEVGNIDRFAGPGQFASYCRTVDAKRISNGKTKGDNNQKCGNKYLAWAFVEAAHGARRFDATCRRWYDRKAGKKCTTVATKALACKLAKAAWYVMAKGTEYQAGKIFPGLTEPKAEEISGEQASASKGVGPNPED

SEQ ID NO: 400044 - protein, 339 aa, unidentified
MNEITTVGIDLAKNVFQVHGVDTHGVVVVRKAIRRVQLLRFFEALPRCLVGMEACATAHYWARAIAALGHEVRLMPPQYVKAYVKRNKNDAADAEAICEAVRRPSMRFVPVKSAEQQAVLTMHRARELLIRQRTMLVNALRAHLAEFGIVGAQGIHRVCDLIAIVADEGDDRVPAIARGVLRMVADQIAVLQTGIAEIDGRILAWYRTSEVSLRLAAMPGVGPIIASAIAASVPDASVFRSGREFAAWLGLVPKQSGTGGKTWLGRISKRGDGYVRRLLITGALTALTRSRAVKAMPWIIGMKERAKRPMVIAVALANKMARTAWAMMVRATAYRASAV

SEQ ID NO: 400045 - protein, 358 aa, unidentified
MWTRVMIVLGADTHKRSHTLAAINVATGQVLGDRTVQVGPRGFATLLGWARELDGQRVWALEDCRHVSGALERFLLGRGERVVRVSTRLMAASRRSSRQRGKSDQIDAVSVARAALAAGIETLPTAALAGVELDIRLLVDHRERLVRTRVALNSTLQWNLHDLWPELALPGGALFSKKWTSKIARRLARAEQTMRVRIARDELRRVRELTHTINALETEIADLVAQVAPQLVAERGCGPLTAAKLVGEIAGADRFATDAKLARAAGIAPIPASSGRTDRHRLDRCGNRQINAAIHRMAVTRARCDPQTRLHRPQTRRRQDDQRSHPLPQAPPHPPPLAPAPDQQPRPGSHDHTINLLT

SEQ ID NO: 400046 - protein, 377 aa, unidentified
MGREQREEKIGQLSVGVDLHKSQLTICVMRADGELVQEGMYRTTAEGYRAFVQKMHEWEQELGCSVAMAVETTGNARYFRNRMEAEGFSVVVVNTNKFKVISQSTKKNDRGDAATLAYYLGKGMLPESHLADQSSEELRRMIKCRSLLVSSMVKMKNQIHGMLLGYGIATKAAQLQSNKKRQALVKDLADQGFTEAAASLEVILGIIEGVQEQIKVLEKRLHEMVRDDEDVDLLMSIPGVGFLTASTIAAYTKDLDKRFCGDFKRFASYVGIVPSVHNSNETVHMGRITKHGPQELRTALVQATMGMIRLSKITGEWRLMTDYRAMKTGKGSGKSIIATTRKLARIIFAMLHNREPFNPALMVRDKCLFTIEEVIGA

SEQ ID NO: 400047 - protein, 352 aa, unidentified
MLTCNNYVGIDLHKKFSQIAVINQEGKVIEEKRINNNREELSVFFNNLKHSSKGVVEASGSWYWFVDMLKEIDFDITLAHPFKVKAIASAKIKTDKVDARILGNLLRADLIPMSYIPSKKELEQRELLRFRFSLSQQKTRNKNQIHSILTKYNIAYTGRSDLFGKGGREFLRSQKDLPSHCQLFVLEYLELIESIETKIKNIDKQIDAEIKLDKSLKLLLTIPGVGPYTAYLLKAEIGDINRFPDDHHLCSCMGLVPSTYQSGNTMYHGHITKRGNSTVRWALVQAAQVAVRKEGYLKDVYLDISRRRGKQKAKVAIARRILSSAYFVLTRNQPYFKPNNQEHLSGPKRPLG

SEQ ID NO: 400048 - protein, 356 aa, unidentified
MAIVANTYAYVIGVDAHARTHTFVAVASRTAAVLATSTFPATAAGIRRALAWVGRRTGGDLATLVVIEGIGSYGAKAARAATEAGYAVAEPGPVAPALRRGAGKSDELDAELIAKSVLGVEAALLRWPRREEGIRAAVRVLVVARDELNVERTRAINALTALVRTVDLGVDARGPLSKKQIATIAAWRARREALATATARREAIRLARRIGTCDEELQDNRRELTALVEASEAAHLLKEPGIGAINAAVVLTAWSHRGRIHSEAAFAAITGTCPIPASSGNTTRHRLNRGGDRRLNRALSSIALTRMSHDPATRHYVTRRRAEGRTTKEIRRSLKRYIARQLYRRLTSPPAQASRA

SEQ ID NO: 400049 - protein, 417 aa, unidentified
MDDIRWFAGVDWASEKHKVCLLNASGQVVGARDVDHSGTGLSELCDWLLAKTGAPPGQIAVAIETPHGPVVEALLERGFAVHAINPKQLDRFRDRFTVAGAKDDSRDAHVLGDALRTDRRALRRLAVQDPLLIELREWSRMNEELQQERTRLANRVREQLWRYYPQALEISDDLASDWFLDVWQQVPTPAKAARISKKTIARILKARRIRCIDAAEVLRILCKAPLVVAPGTAEAARAHIDTVAARIRLLNQQIKQAHRKLDELCAQLEAASENAPGQVCEQRDVTILRSSPGIGRIVLATLLAEASEPLQRRDYHALRTLSGQAPVTRRSGKQCFVIRRRACNKRLENALYHWARVAMQRDQGSRSRYAELRRRGHSHGRALRGVGDRLLYVLCKLLERQVLYDPDHPRAQMTMAA

SEQ ID NO: 400050 - protein, 329 aa, unidentified
MKVPHIIGADLSKRTIDFATYQGIHLKVSNCRIGFDELVKWLNKQGINSSEMMIVMEHTGLYSYRLTQFLEKHKIPFTKVSALAIKRSIGLVRGKNDKIDAIRIARFGFEKQDQLMPDQPAGKVMERLQMLHSTRDRLVKHRTALITAVEEYQYNCGLKNNDVIIASQLKLIKDFDRQIARIQEGIASTIELEKNLKDNFILLQSVKGVGKIVAMATIVKTRNFTLFNKARKFACYCGTAPFENSSGISVRGKTKVSPLADKQMKTLLDLAAKSAIQYDKELREYYLRRIAAGKSKRSTRNIIRNKILFRMFAVIKRQTPFVQNYLKTA

SEQ ID NO: 400051 - protein, 341 aa, unidentified
MSIVILGIDLGKNSCSVVGLDEHGTIVVRRRMRRDGVIALAAKLAPCTIAMEACCGAHHMGRSLVALGHEVRLMSPEYVRPYVKAQKNDDRDAEAIAEAATRPTMRFVELKSEEQLDVQTLHRVRDRLVGERTSLTNQIRSLLLERGHIVAQGHARLRLLLGELLDCGSGTLSSRMTFLLGDMRARWQELDRRIAAFDAEFSAMARTDKRAHRLTGIPGIGALNATALVAAVGNAATFDKGRDLAAWLGLVPRQATTGGRPKLLGITKRGSRYLRKMLIQGARSAMPSLVRSDTATGVWLRALLARAHPNVAVVALAAKMARTVWALLHHERTYQAVSTTA

SEQ ID NO: 400052 - protein, 375 aa, unidentified
MKEKLRFLGLDVHAETIAVAIAEPDGEVRSLGTIPNRLESIRKLIKKLGPTEKLRACYEAGPTGYVVYWQLAGLGVKCDVVAPTLVPVKAGDRVKTDRRDAEKLARSHRSGDLTAVWVPDEGSEALRDLVRTREAAKQDQLRARHRLSKFLLRSGQRPPTGIRPWTRPYLIWVAQLRFTQMAQEATRLDYLHEVEHMRERVERLERAITEAVKLASPALQQVINDLQALRGIADISAVTIAAELGQVSRFDGARQLMGYCGAVPSEDSSGKRTRRGSITKTGNAHLRRIVVEAAWSYHRPPCIWYGLRKRQEGISEEVKEIAWKAQYRLHKRYMRLAAAGKDKRKITTAVARELLGFIWAIGTRAETTVSQRIAA

SEQ ID NO: 400053 - protein, 345 aa, unidentified
MNKISVIGLDLAKNVFQLHGIDIDGEIVVRKQLKRSQLRQFFAKLEPCLIGMEACAGAHYWSRELIQLGHTVRMMAPVFVKPYLKSNKNDRNDAEAICEAVQRPSMRFVQPKIPEQQAVLHLHHGRRLLVRQRVALSNHMRGVLSEYGIVLPQGVKVIPRRLPEILEDADNELPMLARHLLAELKAEYDQLIERIDRFEQQLKVWHANNAVSQRLASIPGIGLLTATALAATVGEGHDFKNGRQLAAYLGLVPRQASSGGKERLLGISKRGDSYLRSLLIHGARAVIHHIRRRLKANQPGGNPWVEQLLQRCHINETAVALANKMARTAWVLVARNETYCPARPV

SEQ ID NO: 400054 - protein, 371 aa, unidentified
MAKSELLGVVDDLQDSYEAGEGNITIGIDLGDRYSYCCVLSEEGNVLAQGRIRTNAETLERYFKDIPPCRIAIEAGTHSRWIYELLSSWKHDVTVANTGAIKIITSNNRKSDEVDAQMLARLARADPKLLSPIQHRSEVGYEDVVCMNARDLLVRTRVKLINAVRGMVKSSGGRLPTSSTEYFVAKAAPCIPVALRPALAPLIENIARLTEQIREFDKRIEQIGRTRYPETARLRQVNGVGPVTALKFVLTIGDPNRFHQSRDVGPYLGLVPRRHQSGAVDKQLRISKAGNRQLRVLLVQCAHRILSRSGPDSDLKRWGVHIATRGGKSSRKRAVTAVARKLAVLLHRLWVSRETYRPLFNATAIQSKPAA

SEQ ID NO: 400055 - protein, 378 aa, unidentified
MTSENTVHVAIELSFSSWLVAVRLPGAEKSRPHRLKGGDTTALLALIAELRSCASTNLGRAVDVACCFEAGRDGVWLHRLLTAHGIAAYVLEPTSILVNRRARRAKTDRLDAEGMLRVLAAWLAGDRQMCSMVRVPTPEEEDAKRPHREREHLVQERLRIENRIEALLFTQGIRGRPSLRSWGRDMVELRTGDGRALPSLLRTELDRLRRRLVLVLELIRELEAERAAAIAAAADDAMVQKIIVLQRIRGIGPNFAAVLVREVLYRSFANRRQLASYVGITPMPYQSGGVDRDRSISRAGNPRARTTLIQLAWLWLRYQPGSTLATWFRERVGTLQGRTRRIAIVAMARKLLIALWRYVETGVIPDGVEIRAHSEVTA

SEQ ID NO: 400056 - protein, 369 aa, unidentified
MIVIGADPHKAKHTFVAVNAATGQDLAELTVATKQADYRRLAAWAHALGAERVFAIEDCRHVSGSLERFLLARGERVVRVAPKHMAGARRSVRERGKSDPIDALAVARAALREGIESLPTAFLDSEAMEIKLIADHREDLVAERTRIQNRLRWHLHDLWPELAIPRGGLDRFKWLDKLAGKLARAPQQARVRVCRELLRRLRELTRRTKDLERELAALVEAKNPALTELPGCAALTAAKLISETAGAERFASDAKFARLAGIAPIPASSGNKDRHRLDRGGNRQLNCAVHRIAVTQGRHHPPAQAYLARKEAEGKSRKEALRCLKRQLARTVLGSLRPSKAQTGSPSHLIEKEMQIAAYSGSASVVGLT

SEQ ID NO: 400057 - protein, 350 aa, unidentified
MTMVGGFDVHRQQITFDYVDSDGLVHWGHIRPATRKTLRAWLGEHCPDGDGEFALEGCTGWPYASEELSAAEVGVHLGDPAEIAMARGPKKRAKTDRADARLLRTLLLEGRFPESWIPPAHVLEIRTLGRLYCTLMDERRAWQQRIHAQLFHQGCPPIRALLSEAGRAALASVELSAAGRQYVDTALQRIDEFSTEIEPLRTQLVSFARRQHGCQALQRQYGIGWLCAAIMWAEIGDARRFVSSDQLVRFAGLDVTVYSSDAKRSPGHLSRQGSPELRWAAFEAAKCAARRGSPDYAYYHKLAAKHDGHNGKNPTLAVERKILRRCYYRLRELGDAALALPDTPPQEVAA

SEQ ID NO: 400058 - protein, 411 aa, unidentified
MDVFCGIDWAEDHHDIALVDQSGQLLARRRISDDAAGLTALLSLLAEHGDSPDDPVPVAIETPRGLLTACLRVTGRKVYPVNPMAVARYRDRHSVAGRKSDHGDAVVLANILRTDMHAHRPLSADSELAQAIAVLARAQQDAVWDRTAAHNKLRSHLREYFPGFLAAFTDARGGITRPEARAILAAAPTPAAAAKLTAAQLRALLKKAGRSRGIDTEAQRLRDAFRAGQMRQLPLVEQAMGRQAVALLRQLDAACASADDLEAAAIESFNQHPDAGIITSFPGLGALTGARVLAETGDDRSRASDARGLKAYAGAAPITRASGKTKSVTHRRVKNNRLAAAGYIWAFSALSASPGARGHYDRRRDAGDRHAAAQRNLFGRLLGCLHHCLLTGQHYDETIAFPTPEPLPAAA

SEQ ID NO: 400059 - protein, 471 aa, unidentified
MIKSVGIDLGGIGEHKVRCLDERAQMCDGFSFDTTRAGLAKLEERVFSNGSNPVIIFEPTGLAWLLVAVYLKSRHPDSRLVRVQAQKVVALRKYLNRSSKSDKIDSLTLAKMPFIDPEKLEEIYFPPGKIYAIQRLARQRRRLENDIAGRKKRIGSIVDGHFPGIRSTFSDSWSAHARAFLRSRLNPLAVVRSGEKALCAFLTKARRHCKIEASVESHGVYLACREVATLYKASSSVGTIDDDFFSALQDEISRELRLMEIEETESAAIAKRLEKLYMELHPSDNLRTIPGVGDHTAPIFLATVGDPARFHSQSSFANYCGIVPGANQSSGSEAKGLRMTKAGPAIMRWALFQAGYIGRSHDPQLACVYYREMVHNGKNHMQAMGAVMSHLSARVLAVLREDKPYEIRDKDGRTVSHEEARKIILLNYQVPEEIRRERRHRKTSGDSKSGNKRRETLAPRVHEAAVAPQPG

SEQ ID NO: 400060 - protein, 356 aa, unidentified
MEKGTTYVALDDSKRKIVAGILHPGAVQPELREIANEARQIRRLFERLKREGPVAACYEAGVSGYDLYRQLTGLGVACSVIAPALTPRRPGQRIKTDRRDAAKLVRLFRAGELTAIHVPAEAEEAVRDLVRCRDDIRRDVLRWRHRVLKLLARHGRAYLAGKNWSQVHWRWIREQRFDLPPLQRAFEATVFALEQALARQAELDKELEALATTAPYREPVGWLRCFRGIDTLSAIILVAEIVDFQRFRRPRELMAYLGLVPSEYSSGDTQRRGALTKAGNSHARRVLVEAAWHYRHRPTIGRSLASRSEGQRLHRRYRHLVGHGKRTPVAVAAIARELVGFIWAAMTRHESRSSAA

SEQ ID NO: 400061 - protein, 459 aa, unidentified
MVSHRGSTPSLGTFEQINWHAAGIDVGTEEIYVAVPEGCDGDRVRVFPTFTVDLERIADWLKQCQITTVAMESTGVYWIPLFEILESRGFEVYLVNARHLKNVPGRKTDVLDCQWIQQLHTYGLLRASFRPPEEICALRAVVRQRNMLVRYRAAHIQHMQKALHLMNIQLTQVLSDITGVTGMQIIRALVAGERDPHVLASYRHDKCVHTESEIVKALQGHYRREHLFTLQQALELYDLYGQQIAQCDAELEAMYREMDPPNAPPTAEVTEPPPVRTTKPRKNQASFDLATSLYQMAGVDLTRIDGIDALTAQVVLSETGLDMGKWPTVKHFTSWLGLCPQNEITGGKVKHRGTAKTRNRANTALRVAAQAVWRSQSAIGAFFRRIRSQHGGAVAVTATAHKLARMIYHVLKFRTDYRDPGTQAYDTQQRERAERSLRRQAARLGFAVTPLEPSPAAVS

SEQ ID NO: 400062 - protein, 390 aa, unidentified
MFFVGIDVSSAKHDCCILDSSRKPIRSFMILNNRKGFSGLSAVLTELAAPEDIKIGLEATGIYGDNLANFLRRKGYNVCTINPLLCKKHQSATTLRKTKNDRSDAKNIALIVASEDLQPDQLLSYHIVELKSLSRARFLTVKDRSSLKNKVKRLVTVLFPELLDAFTDLFGASGMALMTRYPSAKALAACNLDTLTELLRTASRGRFGREKAEALRKLAKESIGTFSDSAVFQLRLLLKRIELLNTQIEMYDDEIRRLMDQLDSPILSLPGIGYTLGAMILSEIGDIKRFSSPAKLLAFAGLEPSVYQSGKFNPASGKMVKRGSPFLRWALLQAATYAPAFSITFAAYYDKKRLEGKSPSVAHSHVAKKLVRVIFALLSKNASFIDSFAA

SEQ ID NO: 400063 - protein, 373 aa, unidentified
MPPPPASDTELRKLACFLEKLPGETKIVMEYTGNYWQPIANVLHDAGIFVSIVNALLIYKYGNNSIRKGKTDKLDAVKIANYCLDRWTVLERYTPVDQIRQALKTCRRQYDQYIRLKVNLKNNLIALLDGTFPGLNILFKSAPRDMDGHEKWVDFAEKFWHRECICGNSEKAFTNQYKKWCAKAGYRFKEEKASSIYAHAVSQVNTLPMTDSIKCLVTLAVSQLNTIIETISVIQHEMLTLAAQLPEYPVVMRMFGVGPVLGPQLMAEIGDVRRFDRKQSLVAFAGVDAPPCQSGTFESKNRHISKRGSPRLRKTLFQVMSTIIQHAPTDDPVFQFLDRKRREGKYYYVYMTAAANKFLRIYYGTVMAYLKKL

SEQ ID NO: 400064 - protein, 401 aa, unidentified
MVSDFRKGRYNLMKIFVGIDIAKLNHFAAAISSDGEILIEPFKFTNDADGFQLLVSKLESFDKNSIIIGLESTAHYGDNLVRYLVAEFYQVCVLNPIKTCQMRKNNVRKTKTDKVDTFVIAKTLMMQDDLRFITFFDLDMMDLKALGRFRQKTIKQRTRLKIQLTTYVDQVFPEIQYFFKSGLHQHSVYALLKEAPSPKEIASMHMTHLANLLKVNSHGHFTKEQAKELRVLAQKSVGANDSAISIQITQTIQQIELLDSQLEKIEAEMTDIMRFNDSVIMTIPGIGYINGGMILGEIGDIHRFSNPNKLLAFAGLDPSVYQSGNFQAKTTRMSKRGSRVLRYALVNAAWNVVRNNATFEAYYNAKRAEGRSHYSALGHCAGKLVRVIWKMLTDEVDFNLE

SEQ ID NO: 400065 - protein, 366 aa, unidentified
MKKTSTVRVNGNMIFKGHKLTIGVDLGDRWSCYCVLDEAGEILLEQKVATTPEAMKQIFEKIPRGLIAMETGTHSPWVSRLLREPGHEVLVAHAQKVELISKSKRKDDRHDARTLARLARIDPELLGPVRHRSAKAQIHLTVIRARAELVSARTALVNAARGLAKSYGERLHKCGTEQVSRKLAAELSAELREVLEPLLKEIESLNERIKEYDARMERIARESYPQVELLKQVKGVGTQIALTYLLTLDDPHRFPKSREVGCFLGLRPGRRDSGQSQPQMHISKEGDPYLRTMLVQGAHYILGPFGEDSDLRRWGRRLAERGGKNAKKRAVVAVARKLAVLLHRLWVSGEVYEPLRNSHQAMRAVA

SEQ ID NO: 400066 - protein, 348 aa, unidentified
MNITTVGIDLAKLVFQVHGVDTRGKVTLRKQLKRSQVVAFFAQLAPCLIGMEACGGAHFWARRLMEFGHRVKLIAPQFVKPYVKTNKNDAADAEAICEAVGRPNMRFVPIKNTEQQSVLGLHRARQGFVAARTAQVNQIRGLLTEFGLVIPAGIRCIERKLPGFLEDAENGLSGASRALFARLLEHFRVLDRQVEELEREINAWHREDTASQRLQAIPGIGPLTASALVASVGDAKVFHNGRQFAAWLGLVPRQDSSGGKTNLLGISKRGDTYLRTMLIHGARSVLLGLKRHPDRAGGWLARVADRRNPNIAAVALANKNARIVWALLAHGRDYKAGFCPVSAIAVPA

SEQ ID NO: 400067 - protein, 270 aa, unidentified
MRVVGIDISKNKIDGYCLPDNQSFQYSLNELAEAVKKIQTLKPDWIILEASGGYERPWVKALQDVNLSVAVEHPLRQSYYRKVLGHLVKTDSQDAKALACYALAHNDNLVNYCPKTEALQSVCELVDRRNSLVEQQSAEKNRLQQSTPKSFVHGSMQRILKQLEKEIIKIEKAIQTLISEDEALKKEQELLMTVSGVAEKTTWSLLAYLPELGKLNRKAIASLAGVAPFQQQSGQWHGKACIKGGRAPVRKALYMATLTAVKYCPPIKAF

SEQ ID NO: 400068 - protein, 404 aa, unidentified
MWFIGLDWADEHHDICVITDAGKQIGSLRIAHTPQGFQDLKDFLLSLTGPNREEEVVCIVETNHGLLIAWLLEAGYPVYPVNPKTVDRHRSASGAKTDKIDAYLLAKHGRSEIADLRRLEPDSAIVAELKALTRDQDSLIRSQTRLVNQLTACLKAYYPVALHLFSKLHQSSTLTFLQTYPTPQEAMAASVGQIAQVLKEAGHPTAAKVAPKILETLRQPQLTADAITTRTKARLMLVLVKQLQPLVEEIAHYDKVIEELFLTHADSKMFRSLPRAGKRLAPRLLAEIGDDADRYANAESLQALAGTSPVLFESGKYSKPHRRYACSKPLRNALQQFAWQSTQRAGWARDYYRRKRKEGKSHTVAVRALANVWVRILFAMRSSHSCYCAATFEEAQRKHAPRAA

SEQ ID NO: 400069 - protein, 412 aa, unidentified
MKHPKMQYTYVGIDSHKDTHTAVFMDCFFEKLGEITFENLPSKFGAFFDDAERFLMDGTVFLFGLEDTSVYGRTLLTFLRESGQQVKHVSSLLVARERKNQNITQKSDSVDAECAARVLLSKFGELPDANPEEMYWILRSLVVRRASLVRQNVASKNMLHSFLTQHYPNYRSFFVNIDCNTALAFFARYPSPQLLEGTTVDELAAFIEMHSNGLMGLDKASEILGTLQDTVVPFQEIRDGLVQSTIKQVQRNLEEVAQLEGQLTSFLEFFDCPLLSMTGIDTISAAQILSCIGDIRKFSTPAKLARYAGIAPVTYASGKTDLQFANQRGNRELNSLFFNLAVRLTMTAGPKRKIMNSFCYDYYNRKRAEGKTKRQALKCVQRRLVTIVWTMLTNNEDYVNPPTYNAPPKDKV

SEQ ID NO: 400070 - protein, 429 aa, unidentified
MKYNTQNAKIASITEKTLIVGIDVGSETHYARAFSWRNYEYSKKPFAFSNDEDGFASFKAWMDDIAEKHEMEKVIPGMEPTGHYWLNLGAYLQGQGMRPVHVNPHHVKKSKELDDNNPNKNDRKDPKTIAGLVNEGRFSYPYIPTGIYAEIRNLSNLRIQTQEEITRIKNRIARWFSIYFPEIKDVYRNPDAVSGLMVIKQAPLPCDIKGLGVDGVNKIWRDARLKGAGIKRAKTLVTAAEHSIGNTEAPRSARKEIRNLLEDYEGYKKRMDELMEEIEELLSEIPYIDKLMGICGIGIKTVSCFIAEVGDIERFDNPKQVQKLAGYAIVADSSGKHNGESRISHRGRKRLRYALYEAAISVIGKNKEFKEIHHYYRTREKNPLKKMQSVIAVSCKLIRIFYTILTKGIDYDGQKMLRDIVRPGMQSAA

SEQ ID NO: 400071 - protein, 478 aa, unidentified
MAMARTAGVNRKQRKELARRLQSDDPGLEVMHPHAAGIDVGNSAHYVAVRPDRDPDSVCRFDCFTADLHRLADWLQQCGVTTVAMQSTGVYWIALYEILDARGLDVYLVNARHTKNLPGRKTDVQESQWLLKLHTYGLLRNSFHPSAAIRVVRTYWRQRGDHVQGVSTCIQRMQKVLTQMNIQLANVISDLSGWTGQRIVRAILEGERDPATLAALSHPGIHATRDTIAKSLEGTWQPDLLFVLQQEVAMYDAYQQRIAECDHELEQHLKGFGDKVADPAADAEPSPTTSPKELRSGPKRRRKAGSHAPQFDLGRELHRISGVDLTRIDGIDVGVAQTVISEVGLDMTRWKTEAHFASWLGLCPDNRITGGKVIRKGTRHVINRAATSLRLAATTLLRSQSYLGAQYRRLRARLGAPKAITAMAHKLARLVYRMLKWGHEYVDKGLQYYEERHREQQVQLLKQRAAKLGLQLVAPEVA

SEQ ID NO: 400072 - protein, 310 aa, unidentified
MDCYIGIDVSKATLAIATLPDGESWTVTNDDPGIAELIPRFVALAPVLIVLEATGGYEMLPAITLAKAGLPIAVVNPRQVRDCAKAMGQLAKTDALDAGMLAAFAQRVRPEPRPLPDAAAQLLDSLLTRRRQLIEMLTAEKNRLGFARGPVKRDISQHIRWLEKRLADVDGDLQNAVAASPLYQAKADLLRSVPGIGPVTTLTLLATLPELGHLSRHQIAALVGVAPMNRDSGTLRGKRMVWGGRAPVRAVLYMAALVGLKHNPVLRVFYERLRAAGKPFKVAVTACMRKLLTILNAMLHQNRRWDPQHA

SEQ ID NO: 400073 - protein, 346 aa, unidentified
MTNQTSQATISTIGIDIGKNSFHVIGFDERGAIVLRQKLSRGQIAVRFANLPVCLVGMEACVGSHHLSRRLQALGHDVRIMPALYVKPYLKGQKNDFRDAEAIAEAVQRPTMRFVPTKTVEQLDLQALHRLRTRLVRQRTAVINQIRAFLLERGFAVRQGPNPLRRALPEILAKPGDELSPRMIQMIEGLCDDWHYFDHRVDDLTGEIEALVKGDDACQRLMTIPGVGPLTASAMVAAVGDGSAFRRGRDFGAWLGLVPRQMSTGDRTILGGISKRGNKHLRTLFIQGAWAGLIRSKNWHKYSFGNWLEAASKRLHPCVLVVALANKLARIAWSVLNRGRAYEASL

SEQ ID NO: 400074 - protein, 359 aa, unidentified
MLYLGIDQHRKQLTVNVRDEQGDVVLKRQVSTQWDRVRKFFEELRGLAEPEGGFLAIVEICGFNDWLLQMLKEYECREGVLIQPEKRSRKKTDRRDASALSQLLWVNRQRVLGGKRVQGLKRIILPSQDEQDNRQLTALRQRTAALRTRTINKVQHILLKHNLQQECPTKGMKTKRARQWLTELPLGKVDRLEMDQLLAQWELWDVQIAKSDAEIQERQRKHKTAPILATLPGANAYSSLALASRTGAIENFPRPGSLANYWGLTPGCRNSGDVTDRLGSITKEGSAMARFILGQLVVHVLRRDASMKAWYARIKKRRGSKIARVAVMRRLATSIWHMVKHREPYRMGGPPRQRQKKVA

SEQ ID NO: 400075 - protein, 349 aa, unidentified
MDTTAPLASIGIDIGKEVFHLVGFGTDGKIAFRRKIKRLALADTFRKLPPCVVGMEACLSAHFVSRALRQLGHEPRIIPAVYVKPFVKGQKNDYNDAEAIAEAALRPNLRTVREKSQEQLDLQACHRVRSRLVSRRTATINQIRAFLIEQGIAIRAGSRALRNSLFDVLKNREDEISPRMSDLIVGLYEDWLWLDERIETITKEIEEISQREVNCIRMMSVPGVGPLISTAVVAAIGTGEAFDRGRDFGAWLGLVPRQYSTGGRSILGGISKRGSRYLRTLFIQAAKVLLMRPQNWEKFSFGQWLTNAAPRMHRNKLATALANKLARIAWSVLSTGKAFDTHRLEVEAI

SEQ ID NO: 400076 - protein, 422 aa, unidentified
MLEETQDTEELIERVAALDIGKAELVCCIRVPGEGKRGRRLQEVRTYTTMTRSLLVLADRLGELGVTRVVMEATSDYWKAPFYLLEAQGFEVWLVNAKDVKHLPGRPKTDRLDAVWLAKVAERQMLRPSFVPPPAIRRLRDVARYRADLVGCAPPRSSAWSRLLEDAPIKLSVVASDSFGVSGRAMLAALIAGERDPKVLAELARGRMRAKRSVLEEAFTGVFTDHHGFLLARMLGRVDGLDADIAELDHKLEELIVPFTAAADRLDEITGVGRTAACAIIAEVGVDMGRFPTPAHLASWARFAPGVKQSAGKTKGKSSTGHGNPYLARVLGEAAAAAGRTDTFLGERYRRIARRRGAKRAIVAVGRSILIIIWHLLADPDARFHDLGAGFYHTRINPERAKRNHIRQLEALGYKVTLQPAA

SEQ ID NO: 400077 - protein, 457 aa, unidentified
MARKSAQKSKGGSWMLPVMHPDAAGVDIGAEEIFVAVPADRAADPVRSFGTFTRELHELADWLQKCGVRTVAMESTGVFWIPLYQILETRGFEVFLVNAQHVKNVPGRKSDVSDCQWIQYLHSVGLLKASFRPPDEICVIRSLWRHRESLVQMAAEHIMHMQKALSQMNLQLHHVLSQITGLSGQKILDAILAGERDPMRLASLCNGRVKSSRETVAKSLEGDYREEHLFALRQSLVGYRFYQTLIAEVDRELELKMRKLPRATGGPEQMPPRTKACFYQRADNEPAFDLKGELFRIAGVDLTDVPGISAITAHTILMEVGPDVSRFRNASAFAAWLGLCPEKQISGGKVLYTRSRKVKNRAAIALRLGAHCLYRAKNYWGEFYRRMRWRLGAPAAITATAHKLARIVYHLLSTKEPYSESVLAHCDHLANKRAEIRLRKQAANLGYQLTPIPEPNT

SEQ ID NO: 400078 - protein, 316 aa, unidentified
MEAPVAGIDVSKDKLIVYFQGKLYEFTNDKRGYEEIRKILPKGCKVGIESTGVYHVNLAKYLNNEYDVRIINPFILKKFKDFRGKKSDKNDAKKLAELVVSMCSGFTTSDARELTSQWDFVTRSIARVKNRLRRDLVLLGYRDSLSKKNLEEVLRGGDSIVLAEVRFLLEELERLKTRKREIEKELENFVSKDSLIFTIPGIGKTLGCIILARVGDVKRFSDKKRFVAYCGLDPVVESSGKSVVSRGISKKGDAVLRRAFYLAALTAIKVNPVIKRFYEEHKGRLKGKKLITACARKLAVITWAVLYYNKPFDASE

SEQ ID NO: 400079 - protein, 313 aa, unidentified
MLNEVIVGIDVAKNKSDVHVSGSGTSFSCSTTKSGLRSLSRRISRIKPSLVVLEATGGYEFPVASALYKAGLPVSVVNPRRIRDHAKSIGRLAKTDCIDAGVIADYGRANRQHCRAFKVRQEQAVKEVVARRSQLIAERSAEKNRLKQASNPVVLKSIRKNIGNLNQDIKELDREIARLIKDNESWRRRQEVLTSFCGVGTVTSAVLIGMLPEMGEVNRREVAALAGVAPFNNDSGKQKGHKSISCGRGPVRAALYMATLTAIRRNPVIKEFYERLVKKGKPRKVALTACMRKLLTILNAMIATDTTWRPKNT

SEQ ID NO: 400080 - protein, 377 aa, unidentified
MKKELYLGLDVHKDCIITAVAEEGRKGEVRDTGVISNDLHALEKWVGRLRKAHGRDVILRACYEAGPCGFGIARRLKQLGVECEVVAPSLTPKRAGERVKTDRRDARKLARLLRAGELTPVYIPEATDEAIRDLCRARTDAVDDRRRSRHRLKGFLLRHGYRYQGKSSWSAAHERYLRELVLPHPAMKVILEEYLQGIAAAGERIARCEVGMRALLEQWRLAPAVRALMALKGFQTVAAMIVVSELGEVDRFAHPRQVMAYLGLVPTENTSSDKRRQGRITKCGNAHARWLLVECAQHYATPPKVSQHLSRRQQGQPAQVRAISWRAQNRLHSRYTRLLGRRLQRNKAMVAIARELCGFIWELLHTQSCYHVQATSV

SEQ ID NO: 400081 - protein, 413 aa, unidentified
MLLFIGDDWAEDHHDVELQDETGRRLERVRLPEGMAGISRLHAMVGRHAGDAEDVQVVVGIETDRGMWVQALVAAGYQVYPVNPLQAARFRERLGVSGAKSDPGDAHTLADVVRTERHQLRPIAGDSDTAAAVKVAARAHKSLIWERTRHLARLRHALLDFFPAALAAFDDLDAPDVLELLGKASDPDAAARLSRAQVRAALKRARRRDVDAKTERILAVLRAPQLRQPAPVTAAYAASVRAQVAILTALNTQIQAMQAQVDAHFGQHPDVEIYRSQPGLGVILGARVLAEFGDDPDRYAEAKARKNYAGTSPITRQSGKMRLIRARYVHNDRLVDALNHQAFLLRPSTRPRGQSPRRAAPAGQPARRDPPRLPQDPHLLRRGHRLARAVHQHQAGQGSVAGHHPKEDQQLGP

SEQ ID NO: 400082 - protein, 352 aa, unidentified
MQIVGALDVHRRQITHKTLDLVTGDVRRGRLSPANRESVREWLECFRGYEAEFALEGTTGWRYVAEEIERAGQVAHLADPAETAAKRGSKRRAKTDRSDCDLQLKLLLARELPESWIPPAHILELRTRVRTRKTLVDQRSAWQLRLTAQLFHQGVRAGINPRTRAGREALARVELSPAGRQLVAIALRMIDVLDLEIVPLDRELRAFAARQPGCRALSERLYGVGPVTATAVLAELGDCRRFSSSDDAVRHAGLDVTVYQSDSKRAAGHLSHEGAPVLRWALYEAGQQATRQTSPDHAYFLQVRERTDHKSASLSVARKLCRRAYHILRELGEQALAPVDIDAHAEEAIHAA

SEQ ID NO: 400083 - protein, 345 aa, unidentified
MEQISRIGMDTSKYIFQLHGVNTAEQPVLRKKLRRKEMFAFLEKLAPTVIAIEACGASHHCARLLQSFGHSVKLIAPQLVKPYIKRGKNDAADAEALCEAMSRPTMRFVPVKTAEQQAGLMLVGVRDRLIRNRTQLSNAIRGYAGEFGLTAAKGKAHLAPLLERIHADESLPALARELFAAQAEEYAQLQAQIDEVDARLMAWHRADECSRRLTKIPGVGPIGAVLLTMKTPEPELFRSGRQFAAWIGLTPKDHSTAGKVRLGGITRAGDEGLRSVLVVGATTVIQHAQRGGRPSPWLTQLLKRKSPKLAAVALANKTARIAWKLMVTGENYAAKAAPAALAAAA

SEQ ID NO: 400084 - protein, 411 aa, unidentified
MASQLQRAVPLETLLVAIDPAKVSHRVWLATGERGLIGEPVSLPAFREGIDQLAHLIASSGVAGEPVIGVEATGALHRPLTAELERRFPGRVRLLAPSETKAARTQLGSRRFKTDDRDCAALVWLLRQGLGRLPQSPALDGLLGAVRHRRQLVAELKILRQRLHGQLNALCPGLSAPPGHGRMLDLLRPSGQAVLAYAAAFAGRPASVRSLLARAPGRLSRSSASYWAQRWRRCLPPPSDAKLRAERLALDLERLQALLQALAAVDAQTAALLAQTGGQVLTSLPGVAVVRAAAFAAHSLPIERYPSPEHLYSATGLAPASYESGALSRRGGISRQGLAEHRDALMAIAWGLSLSAPAFRERARELRERGFAPMQARVALARHACRLCYALLHNQETYDEARYRQGRRRGR

SEQ ID NO: 400085 - protein, 402 aa, unidentified
MTYDYVIGMDACKYFHHACVLDIDGTQVLSKRINQNEQSLRALFSAFSAYDHKVLVVVDQPNNIGRLTVAVAQDIGIDVRYLPGLAMRQLSRIHAGNAKTDIRDAYIIAHVAKNLPESLRSVDRVEEAFLQLKVLNGIDEDLARSYTRLINQIRSALVGCYPQFEQALRGQIIHRKWVLHLLARYGGPTKIKRLGKAKAAAFARRYKARNPEPVLDAIFAAISEQTVTIAGAHYAEMGVAMSAKDALLKLEHRQQIEKEVIELINDIPHTQFLLSMPGIGPKTAAQILMTAGDMSDFPSAGHLASYAGLSPRTNQSGTSIMSNSLNRAGNKKLKNALWQSSSASIRFHERSRQFYERKRREGKRHNAAVVALARRRLNVLYAMMRNHEHYHDPAPSQEDLAA

SEQ ID NO: 400086 - protein, 400 aa, unidentified
MAELWAGIDAGKRTHHLVLINVAGEVLLSQKVANEERDLLDVIARVFEVTQEREVCWATDLTDGGAALVIALLAAHDQQVLYIPGRIIHHAAATYRGDGKTDAKDARIIADQARMRTDLPTITTPDEVAVGLKLLTSHRLDVIHDRVRAINRLRAVLMEYFPALERSFDYSKNKAALLLLTGYATPTSIRRMGANRLAAWLKARGARNSTGVAHTAVEAAKAHTTELPSQRTGSILVAKLAATITAIDADLAGIDALIAEQLKDHEDGEIVMSMPGFGPYLAARFLAQIGGSLDAFESPDRLASLAGLAPVPRDSGRISGNLHRPRRFNRRLLRTCYLAALSSLKSSPTSRAFYDRKRAEGKTHKQALLALARRRINVIWAMLRDHTPYTEPSQPLPIAA

SEQ ID NO: 400087 - protein, 335 aa, unidentified
MNFKQFIGIDVSKLWLDFAVFEQNNLVFHMRVENSLKGIQSFMKELKRLITFDFKLIVFCMEHTGIYNNHLLDYLYKKNANICVESAIQIKQSSGLQRGKNDKVDAIRIAQFAYKNRDELKLWEPKREVIQLLKHLTILRSRLVGVLKQLKTPIKESTEFVTNKINRASIELCKRAINSTEKDLEEVEKSIQLVIDSDPELHRLFKIVTSIKGIGSVTAAEIIITTNEFKDINSAKKFACYSGVAPFEHRSGSSIRGKTRVSKMGNKSVKTLLHMAALVAASFDDQLKHYYQRKVAEGKNKMSVLNAVRNKLIQRIFACVNQNRLFINNYQHALA

SEQ ID NO: 400088 - protein, 370 aa, unidentified
MSNATTFVGLDVHARPVKACAFVPETGETIRKSFGYEPGEIASWVSSLPQPARCVYESGVTGFHLCRELNAMGAACVIGAVSKMHKPAADRGRKTDRRDAQFLAVQLALGVVTEVHVPDAECEGARDLARALADARDDAVRAKQRLSKFLLRHGLVYDERNAAGQRRNRWTGDFWAWVGRIDLGDAAAMATLDHYCERVREADAAKAALEAKVKSLAQQPRWKPTCDALKCLKGIDAVTAASIACEADGFARFATASGFAAWVGLVPSERSSGESRFRGGITKAGNKHLRKLLVEAAWHYKGASRSPKDLAKGQVVDAATRRHANAGVRRLVDRRRSMDDAGKQSSVANVAVARELACWCWAVGRMAEGA

SEQ ID NO: 400089 - protein, 402 aa, unidentified
MTYDYVIGMDVGKYFHHACVLDIDGTQVLSKRINQNEKSLRALFSTFSAHDHKVLVVVDQPNNIGRLTVAVAQDLGIDVRYLPGLAMRQLSRIHAGNAKTDIRDAYIIAHAAKNLPESLRSVDRVEEAFLQLKVLNGIDEDLARSYTRLINQIRSALVGCYPQFEQALRGQIIHRKWVLHLLARYGGPTKIKRLGKAKAAAFARRYKARNPEPVLDAIFAAISEQTVAIAGAHYAEMGVAMSAKDALLKLEHRKQIEQEVIELINDIPHTQILLSMPGIGPKTAAQILMTAGDMTDFPTAGHLASYAGLSPRTNQSGTSIMSNSLNRAGNKKLKNALWQSSFASIRFHERSRQFYERKRREGKRHNAAVVALARRRLNVLYAMMRNHEHYHDPAPSQEDLAA

SEQ ID NO: 400090 - protein, 322 aa, unidentified
MNGSIALGIDVAKAKLDCALRLLDGKFTSKSVENNLKGFKILTEWLEKHGATTAHVCMEATGVYWEAVAEYLVNRGMTVSVVNPAQIKAFGQSQLVRTKTDTVDARLIAGFCAERNPEPWQAPTPSEQALRAMVLRLESLQVMRTQESNRLEVARDAVKPGIVSHIEWLDKEIKALAQKIGEHMDGDADLKDKQALLDSIPGLGERTIAILLAFYADLERFGNARQAAAFAGLDPHHHESGTSVKMKPRMSKVGHAFLRKSLYMPAMVALYKTAWGIRFRERLAAAGKPPKLIIGAMMRKLVHVAFGVLRSGRNFDPTLHGC

SEQ ID NO: 400091 - protein, 400 aa, unidentified
MRETHTHAWVGIDAGKGHHWAAVVDEAGLIVWSHKIINDETAILHALSEILALADELHWAVDISGTSSTLLLALLAAHGQNAVYVPGRTVNRMSGAYRGEAKTDARDAYVIAETARHRRDLSVLIPPAQLAAELALLTSHRTDLVADRVRLINRLRDTLTGVFPALERAFDFGRHKGALVLLTGFQTPRAIRRRGRVRLSLWLGKRGVRGADGVAEIAWEAASAQNVVLPGEAVAAQLVADIADRVLAVDVQLARLDAQIGETFRRHPQAAVIESMPGIGPILGAEFVVAAGDMSAYSDAGHLASAAGLVPVPRDSGRRTGNMHRPKRYSRRLRRVFYLSAQTSIIKDGPNREFYLKKRSEGMRHVQAVIALARRRVSVIWALLRDNRLFVVDAPAVRTA

SEQ ID NO: 400092 - protein, 339 aa, unidentified
MTVKTIGLDLAKDAFQVHGTSENGRVIFNKAIKRAKLLAFFETLPPCTVGMEACGSAHHWGRTLRKFGHDVRLMPANYVKPYVKRGKTDAVDAEAICEAVRRLTMRFVEIKTEDQQAVLSIHRTRDLAVRQRTQMANMTRSLLREFGHILPIGIEAVTAFAKRHLDGDHPDMPDIANGMLGMQCYQFIGLNERIAGYTKMIEQHAMLSTDARRLMRMPGIGPITASAIVATIGDAKQFRTGRDLAAWLGLTPLNKSSGGKERLGKITKQGDRYIRKLLVVGMTSRAVMAKRSPEKVDLWTAKIIADKPFRLATTAMANKAARAIWAMLTKKQEYRQPAF

SEQ ID NO: 400093 - protein, 484 aa, unidentified
MKPKAHRQTENASGHATSVAWHEMNRKQRRDLTRKMQAEEISLQVVHPDAAGIDIGNEAHYVAVPPSRDDRSVRRFGCTTAELKDLAAWLKECRIHTVAMQSTGVYWIPVYDLLEEAGFEVYLVNARETKNLPGRKSDVQESQWLMKLHTYGLLRNSFRPSQEIRIMRTYWRQRNDLVRSAGRHIQRIQKALTQMNLQLANVLSDVSGVTGQAIVKAILAGERNPLKLAALRDGRVKASEVEIARSLEGNWQDDRLFLLKQEQDGYEFCVRQISECDARLHQYLKQREDRSAGASLPEEKRRERLRKKKENKPQFDLRADLFRMTGTDLTRIDAIDVRTAATVISEAGWDMSKWRTEDHFVSWLRLCPDNKISGDRVIGKGRLPTNNPLTVALKMAASCLRQSNSYLGAQFRRLRTRLGPPVAIKAMAAKLARLIYRMLRYGMKFVDQGAEAYEARHRQREVSFLIHKAAKLGFQVTELNTFQG

SEQ ID NO: 400094 - protein, 315 aa, unidentified
MLIHYIDIAKRNFVIAVSSLSKTKTETNNPKGIAHTIEYLKKHKVALVVTESTGGLEIPAAKAIRRAGIAVIIANPRQTHQFAQSQPLTKTDAKDAKMPAFFAQMTAQKEDSQTMPYQPPTEAEEVLEALVNRRNQPADMRTAEKNRLHQVHETQVGSVKQLIAHFDRLIDELDKQIDDHTHTHFDGKAQVAEQIKGIGSITTATLMAMLPELRRLSHKRIAGLAGIAPHPRESGETKFKSRCFGGRSAVRKALHMATVAATRFEPLIRDFYQRLLSEGKPYKAAVTACMRKLLTISNARMRDYFAENDTAENGI

SEQ ID NO: 400095 - protein, 343 aa, unidentified
MAQQTIIGIDLAKHVFQVCMVTPQGTIKTNTTVARGKLLALIARQPPALIFMEACGGAHDWARRFCALGHEVRLLAPQYVTPFRRGQKNDPNDALALTEAGQRPHIPTVPIKTVEQQDIQALHRVRERLIKNRTALVNQVRGLLLEYGIVIPQGIARFRKRLPRVIEEAENGLSLVLRDLLQSLLSELSALDTRITDVTCQLTRLSHEMEACQRLQAMEGIGPLSATALVAALGNGHDFQTSRQVAAWLGLVPRQHSSGGTTRLGGITKGGNSYVRRLLIHGARSVISHVRDKPDAKSAWIRQLVTRIGVNKACVAVANKMARVAWALLHTGEHYRKPAVLLA

SEQ ID NO: 400096 - protein, 313 aa, unidentified
MSEPIYVGIDVAKETFHVASSPELLKTCLPNTLDGHRQLCRMLKEHTIALIVLEATGGYEKPIAAELLDAGLPVVVVNPRQVRDFANGLGQWAKTDPIDAQVLAKFAQIVKPAPKTHSTPQTAELAELVRRRRQLNDLRCQESNRLLMIHHPKVKKSIKKMIKTLDFQINEIDQLIREHIDADDNFKNKDRILQSTPGVGPQTSAMLIANLPELGKLNRQEIAALAGLAPYDRSSGKYDGHAHIWGGRKDVRSVLYMAAFTACRFNPAIRALAERLRQNGKAYKVVITACMRKLLIILNTMIRNQTLWSLEKL

SEQ ID NO: 400097 - protein, 446 aa, unidentified
MIEAERVKRGKRKGVEAGHKRGLRPEGSRATNVDDMNKHIKSSDAPTLKTTVSYLGFDVHKETIAVAIAHEDGRMEYYKTISHDLHAVEKLVQELGEKGKVTLKVCYEAGPTGFVLARRLLAWGVECIVVSPSSVPKASGDKVKTDKNDALKLARLLRSGDLKGVNIPDERDEAVRDLCRARTDAVEDKRRLRQQLKAFLLRNGYKYHGKSSWTQAHMRYLRELVMCHPAQKLVLEETLQAIDLADNRIKQLEGHLEMVVKEWRFKPVVEALQCLKGIKFLSAAVLTSELGDLSRFANPRQLMAYLGLVSSENSSGASRRQGSITKCGNGHVRMFLMEAAHHYRTAPKISKELSKRQEGQSRRVRAIAWEAQNRLHRRTWKLMNRGLMVPKIVVAVARELAGFVWAIHRESLTPGSVEVRAARVSASPNPQARRIEYVLKREKVLN

SEQ ID NO: 400098 - protein, 394 aa, unidentified
MRFVGIDVASERHVVAGVDETSAVLFKPTSFTEDAEGYEKLFALLGAATDTVVAMEATGHYWKNLFAALVAQGFAVALLNPLRTRRFAGEDLQRTQTDAFDALGIARFAAQKRPPATRLPDRATEELRELVRFRDRLGQDFGDRVRQLHRLVDLGFPEFTRYVRDLGSELATALLSEYPTATAFAGVSVRRLAGLRYDGHHRVGDALATAVREAAGRSVGRHHGEAYRIQVRYTCEDLHLLRRRLRTLERDIERLLDDHEVGQWLTTITGIGPQTSARLVATFGDFTGFPDAAAVAAYVGVIPALRQSGKRTSTRAGLTPLGAAALRAKLWMPVLTAVRKNPWLRAYYDRLIARGKLPKVALVAAMRKLLTAVYSVAKHRRPFTPKLAAAEATG

SEQ ID NO: 400099 - protein, 264 aa, unidentified
MATYGGQFTLTGKPAGKTKLSRNQLLNWLVQQPKMTVAMEACGASHYWAREIRKLNHDVILLPAQHVKAYQRRQKNDYNDAQAIAEACQHGTIRPVPIKTLEQQDVQTFLKMRRLVSMERTQLINHVRGLLAEYGIVFSKGATELHQKLPALLEDAENELTDTMRTLLHRQYIRLITLDNELEWYDSEQKKYVRQDPVCKRLLAIPGFGPLVSQAIKSWMGDGKQFRRGRDASAALGLVPRQFSTGGKQVHQLSVHGHSRPEAL

SEQ ID NO: 400100 - protein, 307 aa, unidentified
METLIKRCCGLDVHQATVVACLRIARPGKKVSREIRSFATTTAGLLELRDWLTAAGCTHVGMESTGVYWRPVHAILEDAFTVIVGNAQRIKNVPGRKTDVKDAEWLAELLALGLIPPSFVPDRGLRALRDLVRFRRSLVEARTDCRNRILGVLEGAGIKLASVATDVFGVSGTAMLQAIVAGHLTPAEIADLAKGRLRKKRAALELALHGSVTDDHRLMLDLLLGSLNDTEGRIAAIETHINVRLEPYRQDHLNLTTIPGVDWAGAASIVAELGTDMAVFGTAGRAAAWSGVAPGNGSPAVPSRTRS

SEQ ID NO: 400101 - protein, 355 aa, unidentified
MHATTVAVDLAKDVFELAFADANHHIVQRKRLSRGVFGRVLENHAPVRVVMEACSSAHYWARRFVRLGHTVRLLPARDVRPYVRRNKTDRTDAAGLLEADRCAQIDAVPIKSPDQQGVQALHRIREQLKAQRTASINLVRGVLREFGVVIPLGAAKVRPAALAALEDAVNELPMAVRHTLAEMLEHVANVTRSMSTIEQRLKSIANDDPVTQRFHQVPGIGVLTATALHASAGSLHRFRSGRHFAAWLGLTPREHSSGTQRRLGRISKRGDGYLRLLLIHGARAALRAAQVRAHRQQPLSQMQTWALATQQRIGHNKAAVALANKTARRLWAMEHHHSAFNPDHVSVRRDLPLSH

SEQ ID NO: 400102 - protein, 376 aa, unidentified
MKKIRFVGLDVHAETIAVAVAEPDGEVRSLGTIPNREESVRKLVKKLGPTEHLRVCYEAGPTGYALYWQLTALGVSCEVVAPTLIPVKAGDRVKTDRRDATKLARLHRNGDLTAVWVPDEAHEALRDLVRAREAAKQDQLRARHRLSKLLLRHGRRFPEGGKTWTLKYMAWVKQVHFAQPAQQFAMLDYLHEVEHVNERVLRLEQAIEEAVKLAPAWMQEVVRALQALRGVAKITAATLVSELGAISRFQNARQLMAYSGAVPSEDSSGERVRRGAITKTGNAHLRRVVMEAAWAYRLFPGIGPALRQRQKGASEAVKEIAWKAQHRLHKRYQRLTAAGKDRRKIVTAIGRELLGFIWAIGIKTEALHRPQQAVSA

SEQ ID NO: 400103 - protein, 352 aa, unidentified
MQHFIGCDLHTRNQVVAWIEEETGEIKKRWLEHEGQEEKEFYAQFPRGTVVGIEATFPAYWFERLMGELGHELWVGDAARIRASEVRYQKTDSRDAELLLDLLRTGRFPRIWVPSLEERDLRQLLVHRMKQVRARTQVKNQLHALAISQGVWRGRKLWSAKGRKELEGLALLPWAARRRKELLESLDRLDEQVRELDRAVEEAGRARAEVALLRTHPGVGMVVALAFVLTVGPIERFSNSRKLVSYWGLNPRENSSGGRQRLGSISKQGNTMMRWLLVEAAQTAARLDPQLRRIYQRLKKQKTSGVAKVAVARRLAVRLFWMLRTRNNYAQLVHMSGSPRSAVVPPPAEPTV

SEQ ID NO: 400104 - protein, 462 aa, unidentified
MPKQDRKKKSPRGKRSHDWEALPALNQNAAGIDVGNAEHYVAVPAGRDAEPVQKFGSFTADLHRMAQWLKACGIQTVAMQATGVYWVALYQILEDYGLEVNVVNAHHTKTLPGRKTDVLECQWLQKLHTFGLLNNSFQPAEEIWVLRTYMRQREKLVAGASTCIQHIQKALTEMNIQLANVISDISGMTGMAILRAIVSGEKNPQALARLKNERIQASREEIAQSLEGNWRQELLFVLEQSLALYDLYQQKIADCTLRIESHLKSMGSKTSADRQPPPKGRHGRGHRKQMPWLDLGAQLYRIAGVDLTQIDGIQVQTAQTVISEVGVDMSRWRTEKQFASWLGLCPDNRISGGKVLKRGTRHVVNRAATALRMAAWSLFRSQSALGANFRRLRRKLGAPKAVTAMAHKLARLVYRMLKFGQGYVDKGMEHYEAKYRQDQIKWLAKSAAALNLQLTPLTEVVD

SEQ ID NO: 400105 - protein, 346 aa, unidentified
MDITTIGVDLAKSVFQLHGIDSSGKVLIKKQIKRAQMAEYFVNLKPCLIGMEACGSAHHWARKLESFGHTVKLMPPQYVKPYVKTNKNDAADAEAICEAVTRPNMHFVPIKSTEQQAILSLHRIRQGYVKARTAQANQIRGLLAEFGLEIPQGIGYIAKRVPDIIEDASNELPGILRIEIQSLLEHLNELDTRADHCEKKIVAWHKQSETSKKLEAIPGIGPLTATALVASIGEAKNFKNGRQVAAWIGLVPRQHSSGGKQNLLGISKRGDIYLRTLLIHGARSVIYRSGQKENPTDRQGWLNQLTQRRNKNVAAVALANKNARIVWALLNHNRDYQDNHKMLVAA

SEQ ID NO: 400106 - protein, 416 aa, unidentified
MNAAGIDVSSRKSTVAVLRPFGEVVRLPFDVAHNTEGLASLAEQLKALDGETRVVLEHTGRYYEPVAKALHEAGLYVSAVNPLLIKEYGANSLRRVKTDKADAVKIARYALDNWADLRDYTPMDTIRYDLKTLNRQFQLASKQRTASANNLIALLEQSFPGIRKCFDSPVRSDGTQKWVDFVHTFWHVECVRKQSLNAFSERYRKWCKRHGYIFKQGNAVEVYSLAKNAVVLVPKSEVTKVLVQEAANQLTSISRSVETYRAEMERLASTLPEYPVVMAMYGVGKSFGPQLMAEIGDVRRFERKQSLVAFAGIDPMPNQSGDKNVRSNKSSKRGSPYLRKTLFNIMGIYLKCSPQDEPVYQFLDHKRSEGKPFYVYMTAASNKFLRRYYAQVRDYLSTLDDLPPVDMDSTGLKTTD

SEQ ID NO: 400107 - protein, 419 aa, unidentified
MSFKILKNNCCGLDVHKTWIFACIGITDSHSRTEYKQARFSSFSKGLQELCDWLAKYRCTDVCMESSGKYWIPVFNILEKNNLWVTLSHPKYTKPLKGNKTDRKDAKWICDLYMCGMVKPSFIPPASIRHLRDLVRYRFKLTCMITGEKNRAQNCLTVSNLKLDDVFSDVFGKSSRSITEQILAHPGKTFDVTPFVHGHCKTPIEEIQAAVDGAISPEQAVKLRQCLDHIDELEKHIETVEQEILRLSDPYESALNLIRTVPGFHKNPMTAIQVLSEIGADMSVFPTAKHLVSWAGCCPRNDQSNKKIKSTRISRAGSYFKPILVQVANALIKSKKHPEFTNRYRRIKARRGHKKAIIAICRMILTAIWHILSDLNPYTPDGFLESRPVNESKTLTTSQALNLLKQRGYIIKDEPVTAS

SEQ ID NO: 400108 - protein, 567 aa, unidentified
MLYLGIDQHRKHLTVCVRDEQGSVLLGRQVSTEWEQVRAFLAEVQRWSGVAGFAVILEVCGFNDWLVKLLAESGCRETVLVQPEKRSKRKTDRRDAATLSEILWINRHRLGGGERMQGIRRVEWPGAEEAADRQVTMLRKRLGQARTRTINRIKHLLRKHNREQECPTKGLKTQRGRQWLREISLEGVDRQELDLLLEQWELWDAQIERVEEEIRRRQARHPTAPIVATLPGGGAYSSLAVASRIGRIERFARPGSLANYWGLTPSCRNSGEATDRLGSITKQGSAMVRFMLGQWVRHVLQKDGAMKAWSQRIKRRRGAKIARVAVMRRLATIIWHMVKYRQPYQIGGLRGGTKSAPLPAKPPSGKPAAEKPGDAASASQPGGHGKTKRGGFGASVQGFRRPRAGVAAPRPRQEECPAAGEAPLRQTSGENARRRGLGVAARRPRQEDRWPAGRDEECPAAGEASLRQTSGGKARRRGLGVAARRPRQEDEAGGVRRLRARLSPASCRRPGGRGPSPWTPSPLLCSGDACPKSWQGVNGCGLGRTREPFGPAVLATAGPVKTSGGTF

SEQ ID NO: 400109 - protein, 367 aa, unidentified
MSHIIYCGVDFHARQQTICCLKTETGELTSHELKHDHKEALRKFYSELGGPVIVGLEASGYTPWFEQLLEELGHQVWLGDATEIRRRARRRQKNDRRDAALILELLCHDEFPRLHRPSPESREILRMLRYRHKLVKVRTIVKNSLQALSIQAGLSLQARLFTRQGTQQLEALTLSPVMGQQRQQWLALLQELNQRITETERWLKQQTLSDPRISLLRTHPGLGLLSSLGIVHTLIPVSRFPNTRKVAAYGGFDPMERSSADKKRYLGISKAGSRLLRFLLIEATQTAVKTDPELKRFYHRLVPRRGKPKAKVAVARKLLIRSFIMLRDEINYAEFQQRAIAARLAREFARPNVPVPLIGQPASPAKD

SEQ ID NO: 400110 - protein, 327 aa, unidentified
MDGAKASIWAGFDVGKASFSAALDQLAENGRAKVTTLPCRDFKRTPEGVEQFFQWAKKAVPDHEFRIVMETTGCYSQHLTDWINLLHPEVGITIENARNIHAFIQSLNLPHKTDKLDAQAIARFGTERQPKSTKRPSKTLLTIREFSRTALIKARVDLQNRRDTLPSPIVRKINAQTLATLTTQIEKIDKEIKACVVQDEELLAEVHIMTTMPGVSFISAYSILAEIGSLKQYSAKELSSLSGLAPRIIQSGSSLHSSSLSRRSSGRLRQILFLDSVTGVPKIPFLQEFHQRLIGKGKKKMTSRVHKFILPPCHSLQSVTQTENCAC

SEQ ID NO: 400111 - protein, 489 aa, unidentified
MAKRTSAYERLTKGNRKQRKELQRRLYSDNPGLEVIHPHAAGIDVGNESHFVAVPPAKDAEPVREFGSWTADLERMAAWLKSCGIETVAMQSTGVYWFAVYDVLEKQGLKVFLVNASHTKNLPGRKTDVQESQWLMKLHTFGLLRNSFRPPEDIRPIRAVWRLRERHIQDAARSIQHIQKALTSMNVQLANAISDISGVSGQAIVRSILDGERDPRKLARLRDRRIQASEEEVARSLEGNWQEDQLFELQQAVDEYDFRQKQLTECDSKLQAYLAVLPTRSVPPVDADPVAPAPPAALPGKKKKRTKKVGGGNAPQSFDLAGELKRVTGVDALSVAGINLMTIQTVVAELGTDLGKSWPSEQHFASWLGLSPKRDVSGGKVIRHTHEKNRNRVAEILRMAASSLVRSDSYLGARYRSLHARLGAPKAIKAMARHLACIIYRLFTKGQAWVDRGAAQFEQNRQTRDLARLQAQASSRGFRLVPDSKPITA

SEQ ID NO: 400112 - protein, 331 aa, unidentified
MKFDEAIGIDVSKKTLDACIHSLQIFTTVPNTKRGYIKLFSWVTKSKGCSLANSLFCFEHTGMYSYALASFMSEKHMSYIIVPGLEIKRSLGIQRGKNDQIDARKIAQYAYRRREEVKLFQLPRASINKIRQLLSLREKLVKQRAGYEASLKDQSDFIKSSENKLLFSIPRKLIKELNLQIESIEKEIDLVLEENPEIKNNYRLITSITGVGRQTALQLIVVTNNFLSFDDPRKLASYAGVAPFPYTSGTSIKGKTKVNSMANMRLKSLLSACAVSAIRYDPEMKIYYKRRSEIGKHKMNIINAVRNKLLSRVFAVVKRESPYVPLCRHAA

SEQ ID NO: 400113 - protein, 353 aa, unidentified
MMIIGCDFHPSFQQIAYVDQETGEYGERRLRHREEAVQFYRSLASRQVRLGVEATGNDRWFRKLLGELGQELLIGDASAIHAAAPREQRTDKRDARHILRLLVENRFPAVWQPPAGNEEQRQLLLHRCRLVRMRTRIKNQLDSMAKSEGLTASRRWSSQRRQQIEALPLTGWYAQRRADLLRLLDELEQRIQPLDRAVEAAARQDAQARLLMTHPGVGPVISLAYVLVVGDWRRFPRGKQVGSYLGLIPSEASSGRRQQQMGHITKQGNTLLRWLLVEAATTAQRYDASWHRQYVRLSMAKHHGVAKVAIAHKLAVRLYWMLRSGQDYGQMMERGSHARQSECPVGRSKRPIE

SEQ ID NO: 400114 - protein, 440 aa, unidentified
MEQQDGIRLEEFRQLKKEIRGSERHLVVRIDVSKDRHHAFFRTVMGKPLLKRLVFENSCEGVTKLLDQVARVQLENGLPEVVFGLEPTGNYHKPLGEYLIRRLAQVVLVSGVAAHENRKTLDGRWDTNDTRDAANVADLVSQGKCLFYEFPVGALQDLRNLLSLKRRLKREEHGYRVRIRNHLVAKYFPELDRYYEQSESTALVIVRWCLAPSGVAGLEYQEFVRMVGSIRGRSSQERRLRAIWEMAVDSVGCEAGPTVEFEAQVMVEGLKQIRQRMEEVKEKIQEICCQFSEYEFLLSIPGFGPDVSSKVLGAIGDPFRFQNGRQVLKMAGLDLSAERSGKSSEGAVPVISKKGKADLRYALYQAALIASTKNQGFIVYYTDKLRGREREPGIKTKMRVKLAAKLLILAWTLMKKKEPFHPSYLRVEFQPFSAGAGRER

SEQ ID NO: 400115 - protein, 355 aa, unidentified
MFSMATQARQVYGGVDTHGRAHHAAAIDGTGQVLGDREFTATPDGYRQLITWLKQMGDVVKIGIEGTGSYGAGLARAATAARIAIVEVDRPDRRARRRKGKSDPLDALAAARAALSGEAAGVPKTRSGPVEAIRALRVARRGAIKARTAAFNQLHGLIVSAPASLRTALGDLRGQQLAGRCAAFRIDEDQIGDPAVAAKAALRAVARRIIALQEEIRAADRRVAPLTAAVAPKTTAVFGVGAEVAGQMLVTAGDNPERLRSEAAFAHLCAAAPIPASSGRTDRHRLNRGGDRAANTALYMVVVTRMRRHQPTRDYVARRTAEGLSKTDIIRCLKRFAAREIYYAIRADFQAAHAT

SEQ ID NO: 400116 - protein, 376 aa, unidentified
MENDSTLFVGLDVHKDSITVAYALGSGDVEVLGKIGTSQSDIDRLCKRLKSKAPHVRVVYEAGPCGYGLQRHLRAKGFGCMVCAPSLMPRKPGDRVKTDRRDAIKLTRLLRAGDLSAVHVPSVEDEAFRDLARAWSRCRSDLKRARQQLKAFLLSHGVRYTGTANWGPAHRRWLSALSLHNKWQDLAFNELRRTIEDRLAQCQRLEDALREAVQRWHFYPAVLAVQAMRGIAFTAAIGLVSELGDLTRFAHPRQLMAWLGVTPSEYSSGSKRRQGSITKTGNSYARKLLVESAWQYRHAAKVSRDIQRRQEGLPKAIIDRAWDAQLRLCRRFRKLLARGKERNVAAIAVARELAGFIWDIGRLGMAQASPAPESTA

SEQ ID NO: 400117 - protein, 427 aa, unidentified
MAHTTIIGIDVSKNFADACAISAQGEVMLETKIFYDTVGLQHFLKQLDQLAGEQRHCAVAVMESTAHYHRILETYLRRSGIDVVVINPLQSGSMKNLEIRKIKNDRTDAKRIAQPYLFKMLRGNAVDSILVGALKDLTRQRSDIISERVKFSNKLTALLDQGFPGFRKVFSSLRTKSALAVLARFPGPEEICGANRIDIAKTIAFAAGRNTESAYAVKKANHLLDIAEQAMQLQVERGSFKTLITLFAEMLIQIQRAADQIERQIFETAQCDRTFWSQVELLTSIPGIGQYAAVVILAEIGDFSRFKKAKQLVAFAGIDPAVKQSGTSAYKHNKISKRGSPYLRKILDTCTHVAAHKGRNQQPANPILAAYYEEKRSVKPANVAQCACIHKMLGYIFSVLRNQKPFELRSPEEHLALMRSKTADIAA

SEQ ID NO: 400118 - protein, 356 aa, unidentified
MIKNIYNPQDYDRFIGIDVDSKSFAFTVMDKGVTKRSKKIPAKSHMLVKYIQKNFQNRHVLCAYEAGGSGFSLHDTLTANNIECWVLSPNSIPCSKNTMVKNNRLDSQRIAQAIKSAEIPPIRIPSQEYRELRHLIRIYDNYSKAQSTAKKRIKALLLFENLYGKISDPAVRWTQHFIQELEQCPCSQATRARLDALLSDLKYARTHLATTLQAIKNFCNNSIVIHEYIDCLISIPGIGIRTASYILGKLGDPSQLRNPREIGAFFGLTPKENSTGDRINKGSISHAGNSIARALLIEAAWVAIRYDKELYHFYHRIRSRNPKQSGSQKAITAVARKLTARIYAVLKNKKKYIRTQ

SEQ ID NO: 400119 - protein, 349 aa, unidentified
MSAAYDGPQVVGMDLHRRRSVLVRMTADGRKLETARIANSPVELRRVIARAGKRPQVVLEATYGWYWAADTLAAAGAQVHLAHPLGVKAFAYRRVKNDEKDAADLADLLRMGRLPEAWIAPVEIRELRELTRYRIKVVRLRTSCKDQVHAVLAKLGVEVTCSDIFGVAGSAWLDGLELPQPYAGKVASLRTLAAGLTAEITLLEAAIADLLAHHDGYRAIQALPGIGPVLAAVLVAEIGDITRFHAPGRLCSWAGLTPRHRESDVKVRRGHITKQGSPLVRWALVEAIQHVPAGHPLRQRKEDILARRGKEAKHIAKIAVARQLLTWVFYAMRDGQVRDLTPAAGRQAA

SEQ ID NO: 400120 - protein, 412 aa, unidentified
MAQETLSWFAGVDWGSERHQACLVDSQGNIIGEREFPHSGAGLAELGDWLLSIAGAASTVAVAIEVPHGPVVDSLVDRGFVVHAINPKQLDRLCDRFSIAGAKDDRRDAYVLADGIRTDRRLFRRLHVADPKLIELRAWSRLAEELKEERCRLSNRVGQQLWRYYPQMQKLADDFAAAWFLELWSIAPTPAKARQLRKPTVEQILKRHRIRRVDADTVLRTLREAAIKVADGVAEAANIHLRSLVARLHVVNRELREAEVQLDKLCMTIGESVAASGDCLRRQDVLILRSMPGIGRINLAALLCEASGPLGSRDYQALRTLCGAAPVTKRSGKSRIVVMRYAAHVPLRNTVYHWARVAAQRDPKCRARYAALRRRGHSHGRALRGVADRLLALACVLLQRQTPFDPHLAQAG

SEQ ID NO: 400121 - protein, 461 aa, unidentified
MRIIGLDLALTAEHKALIADAQGQPLAPIVQLRTTASDLERLFQRAREGAAPDEPVWLIMEPTGMAWFPVAAFAQQHHVIPYLINSQQVADLRHYYKKHAKSDRIDVRVLVKLPVISPEKLHPLTLPSATLFACQRGCKELDHLRKLMTALQNRIHAIDVFAWPGLDAVLSEPFSPLARWFREHWYQPQQVIAAGPSGLESAWQKVPVAAEFAAPTDWAAALVRLAHHTLALYGTDSPYLDYGYLQAEVTREQTLLAVVESQHHTLQLKTVRPIYRQLHPSRNLETLKGVGQDGAAVYLSFIGNPQRFDDHSHFRGWTGMLPDSKQSGEREAKGLHISQAGPDLIKKFAYLGAETARQWDPQIAAIYYDQMVEHGKHHNQAVCACATHLLDRIWTILKEDRPYELRDVDGTPVTVERARAIIAERYTVPKHVRQRNNQRTRRERAERRAERKTERESRASQ

SEQ ID NO: 400122 - protein, 343 aa, unidentified
MEHYAGIDVSLEESSVCIVDATGTIVREVKIASEPAVLVRYFDELELPVGCIGLEAGPLSQWLHAGLVAAGRDAVLLETRHVKAALSAMTVKTDRKDARGIAQLLRMGWYRPVHAKSVTCKDSRALLVGRKLLQGKLLDVELSIRGILRGYGLKVGEVSRGKFEARIRELTAGHITLETVIGAMLAARTALWCEFTKLHREMLKIARADKVCRRLMSTPGVGALVALTYRSAVDEPMRFGKSSTVGAYFGLTPKKYQSGETDRDGGVSKVGDAMVRTALFEAAHIMLTRATRFSSLKHWALNVAKRRGMKRAKVALARKLGVVLHRMWVDATDFRWSRTAAMA

SEQ ID NO: 400123 - protein, 345 aa, unidentified
MNKSIPTSTATVFCGIDVSAASLSVALIVPDHAVCQREFPNSASGYKALLGWLAKFNAPVRVSLEATGIYSLDLALALDAAASVEVAVLNPKLVNRFAQTLRRSKTDAADAVALAEYSQRMPFTAWKRPGVNHLRLRTIGRYIESLVVDLAEVKNRLHTAASTSTTPRAVLVDLRQAQAALLRRLAKMRREAMKLIQADELLRERFALLVSIPGIAEVSARQILSELVLLPPGMTVRQWVAYSGLDPVHQVSGNSVHKPSRISRAGNRHLRRALYMPTLSAVRFDPHLRAFYQALRQRHKTGLQALMAVARKLLHAIYGIFKSGKPYDGRRLFPQIQLAVESIAG

SEQ ID NO: 400124 - protein, 344 aa, unidentified
MDQISRIGMDTSKHVFQLHGVNDAGVPVLRKKLRRNEMVAFFKKLAPTVIGIEACGASHHLARLLHSFGHTVKLIAPQLVKPYVKRGKNDAADAEALCEAMSRPTMRFVPVKTTEQQAALMLVGVRDRLIRNRTQLANTIRGYAAEFGLTAAKGMAHLVPLLERIQADETLPALARELFASQAGEYAQLQTQIDEVDAKLADWHRADECSRRLAKIPSVGPVGAALLKMKTPAPEQFRSGRQFAAWIGLTPRDHSTAGKVRLGGITRAGDEALRSVLVLGATAVIQQALRSGKASPWLAELLKRKPPKLAAVALANKTARIAWKMMLTGEAYNAKSAAALAGAA

SEQ ID NO: 400125 - protein, 355 aa, unidentified
MTSVKYIGLDVHKESISICVRNSVGKVVMESVIETKASTILQFIDGLRGDLRVTFEEGTWAAWLYDLLKPRVSGVEVCNPRKNALLKDGSKSDRIDANKLSEQLYMNNIKSVYHGENGLRTLKELARSYLTISKDLTRAMNRLKALYRSWAIPCAGKEVYAPRHRAEWLGKISESGVRRRAEFYYQQLDVLCLLRQEVRRDLLREVKKHKAWKLLRQIPGIGPIRASLLMAVMQTPHRFRTKRQLWNYCGLGLETHDSGEYRAVKGQLQRAKKQATVRGLNRDHNHDLKDIFKGAAMRASTAAGPLHDFYDNLLAKGRKPTMARLTLARKIAAITLIVWKKEVRFDANYLKPQAA

SEQ ID NO: 400126 - protein, 346 aa, unidentified
MKITTIGVDLAKEVFQIHGVDAHGKAVLRKQLRRGEMAKFFANLEPCLIGMEACGSAHYWARKLGEFGHTAKLMAPQFVKPYVKTNKNDMADAEAICEAVSRPNMRFVPIKNVEQQAILSVHRARQGFVKARTAQANQIRGLLSEFGIVIPQGIKLIAKRMPDILEDGENSLPGTMRNLLERLNDNLKEMDRQVTELELQIKQWHHGNEASRKLEAIPGIGPITASAIVATVGNATEFKNGRQLAAWLGLVPKQHSSGGKQTLLGISKRGDTYLRTLLIHGARAVIRFAENKAEPDQWLCNLMGRRNKNVAAVALANKNARIIWALLAKGKAYEQDYISAAKTAAA

SEQ ID NO: 400127 - protein, 326 aa, unidentified
MTIRTADVELFSGSVPGRWDVLRMLLQRYSGSSIQVVYEAGCFGFWLHDRLIEHGVDCMITPPSLIPQESGNRVKTDRKDSWKLAHLLAKGLLKRIFVPNKQECYHRQVVRRRRQLIGDRIRVQNRIKSELCFYGIDLLDPTGKWTKKYLENLLRFRFEDRFMQESFNCLLDQYRFIVEQIKKQDALIHELSEMDLYRERVEILKSVPGIGTLAAMELLLELQDVTRFRQADQLAAYVGLTPSQYSSADKVRMGRITKVGKHSLRALLVQAAWQLIRKDRAMKEKYERIKIRAGGKRAIVAIARTLLLRVRRIWLDATPYRLALSA

SEQ ID NO: 400128 - protein, 352 aa, unidentified
MRRPKDKLIAGIDLHSNNLVIAVINLEGKRVAHQKLDCDLKEVVQFLKPLKPQLQSMAVESTFNWYWLVDGLRAAGYPIDLANPAKIEPYSGLKHADDKDDAFHLAELQRLKILPQGHVYDPALRPVRDLLRRRTMLVEQRTALLLSLKSLHARTHGVRLELSDAKKMEPKEAAKLYAHPANQLIAAVQAQQIQALDQSIGKLEAAVLACARAIPLYERLLTLPGIGKILGMTITMEVGVIERFPTDGDFASYSRLVDARRLSNGKLKADNNRKCGNKYLSWAFVEGANFARRYDANCRRWYDRKAAKTSKVLATKALACKLAKAAWHMMAKQVDYDEKRMFPELAATTKTN

SEQ ID NO: 400129 - protein, 349 aa, unidentified
MKENSSTCYSSWTIGIDLGDRRHAVCVLDCEGEAVKRRTISNSRHALSRLAGEYPGALMVMEVGTHSPWIARHLGELGVEVLVANARKLKAISRSATKNDLNDAEMLARLGRADPKLLSPITHRNEECQRDLSVIKSRDALVGSRTALINHVRGSLKSHGLRLPACNAAAFARKAPGHLEACDPALVEEVIASIGELTERIKARDKEIGRLCEEKYPETRWLMSVPGVGPITALAFVLRLESPKRFPKPREVAPFLGLTPRQDSSGARNKQLRISKHGDALLRRLLVNCAQYILGPFGPESALRSHGLELSARGGKNAKKRAVVATARKLSVILLTLWSDQAEYKAYPA

SEQ ID NO: 400130 - protein, 369 aa, unidentified
MRKIVKYVGLDVHKNSIAIAIAEDGQKRDVNFYGVIKNDMDQLHKFLRKQISQGVEPRCVYEAGPCGYNIYRSLKDKGIDCVVIAPSLIPKKSGDRIKTDRRDAESLAKLHRAEELTAVYVPSMEDEALRDLVRARDDCVNTLKKAKQQLGAFLLRHNACYSGKSKWSKAYFNWLADISMPHPAQQITLQEYIDMVQDGKKRVERISEQIKQLAEQTQLKELNKSLQSLRGVSQIVSAVLLSELGDLTRFESPGRLMAYLGLVPTQHNSGDQKRPGRITKTGNGHVRRALIEAAQAYRLPARKSRAIAKRNEGLPQEICKIAWQAQVRLCGRYKRMVFSGKNSNLVKTAVARELAGFMWAIAHAIPKNA

SEQ ID NO: 400131 - protein, 467 aa, unidentified
MPRVRPHPHRRSPAVTLPPELHQVNLNAAGIDIGAAHHYVAVPPGRDPDGRDVRTFGAFTADLIALADWLTRCGIETVAMESTGVYWIPLFEQLTERGFEVKLVDPRQLKHVPGRKTDVLDCQWLQQLHTFGLLAAAFRPVDQICVLRSYLRQRGMLVRYAAHHIQHMQKALEQMNCKLTHVVSDIAGLTGLAIIRAILAGERDPHVLAQLRDRRCKADEATIARALEGTWRREHLFELRQAVELFDFYRAQIAACEAEIEAQLGQFADQSGGQPLGDAPRGRPAGRGALSFDARQHLQRLTGVDLTRIDGIDAPTALKLVAEIGLDMTRWPTEKHFASWLGLAPGCKVTGGKQFSGRTKPSANRAATALRLAAHSLHHSRSALGAFYRRLKGRLGAPKAITATAHKLARLIYRMLRFGTEYVDSGQDYYEQRYQSRVVAHLMRRAQQLGYQLIKNELVSVATTSPA

SEQ ID NO: 400132 - protein, 413 aa, unidentified
MSVTDEPGSRRPTAGVDWATADHAVAIVDPDGEQTGRFPVTHDAAGLRTLVRKLLAAGVAEVGIERPDGPVVDALRAAGLVVYVIPPGQLKNLRSRYGSAGNKDDRFDAYVLADVVRTDRRRLRPLLVDQPVTTALRQTVRARRDLVAHRVAIANQLRAHLQICFPGAVGLFADIDSDISLRFLERFPTPERADWLSVKRWTAWLSSVGYSGRTLPETLHTRLRDAPRGATGTHADTAAAVTAAFVAVLRTLSTQIQALAARIAEQLDLHPDAPIFTSLPRSGRVRAARLLAEIGDARGRFPTADSLACLAGVAPSTRQSGRVEVVSFRWGADRQLRDAICDFAGDSRHANPWAADLYQRARARGHDHPHAVRVLARAWVDIIWACWTSNNPYDPDKHGALQRILNQDQPSAA

SEQ ID NO: 400133 - protein, 375 aa, unidentified
MIAYVGIDAHTTNYTLATRLEGSKEPINVNTYSPAISNIVKYCKAIRKVYGKDTDIILGYEAGCLGFKLKRDLETNDLKCLVLAPTSIPGTEQNRKRKKKTDKRDAEAIAKALINSDYSEVYMPDEEDEAVRDYIRMREDHRKQLRVIKQQICALTNRHGFKFTDGNNYWTVKHLKWLKSLPVEGVLKEAFESYLLSYETVSDRIAQMDKKIEEIAEQDKYREAVHKLICFKGIKVLTALAVIVEIGDFTRFVKAKNFAAFLGLVCGELSSSDDQNRLGITKQGNRFIRKLLVECAQSFSRATSGKSAMLKKRQEGNQAEVITYADKANERLRKRYLTLVLRNKKAHNKAVTAVARELACFIWGMMTGNIHTALA

SEQ ID NO: 400134 - protein, 349 aa, unidentified
MKKLSKMPTRMGEIIGIDLGDKVSRYCIVDHNGNVAEEGSFRNQASSIEKHFGGEPRRIALEAGGQSAWISRELKQLGHEVIVANPRELKWITSSDTKNDPGDARKLALLARADVRLLAPVEHRNAEQQAELSVIRARDAILRARTLLINSARSIAKGFGVRLPKSITNTFGERAVEALPEFLRTALTGLLEQIDALGRAITGYDQTIGQLAEKHPELERLESIPGVGRLTAMTFMLTLGRVERFAHSRDVAGFLGLRPKQRQSGARDPQLGISKSGDPYLRKLLVQCAHHILGHYGKDSALRQWGLAKSEGGKKATLRAIVAVARKLSVLLHRLWVSGEFYKPFPKMV

SEQ ID NO: 400135 - protein, 409 aa, unidentified
MAACDIGKAELVCCARVPNEDRPGRRLQEVTTYSTMTRSLLGMADRLRVLGVSRVVMEATSDYWKPVLYLLEANGFETWLVNARDVKHLPGRPKTDKLDAVWLCKVAERQMLRPSFVPPPEIRRLRDVTRYRCDLVEARTAEKQRVGKLLEDAQIKLSVVASDIFGVSGRDMMAALIAGVRDPKALAQLARGRMRGKLATLQEAFTGFFTDHHAMLLTKMLARVDALSADIAELEATIEEMVAPFAQTADRLDEIPGVGPVAAAVIVSEVGLDMSRFPTAGHLASWAKFTPGIKESAGQKKGTGSTGHGNRYLAKVLGEAAVGAGRTDTFLGECYRRLTRRRGKKKAIVVVGRSILVIVWHLLSDPDARYTDLGSDFHDRRIDPERKKRAHIQQLEALGYTVTLAPAAA

SEQ ID NO: 400136 - protein, 407 aa, unidentified
MLIVGIDWSRSKHDAVLMDSDGQVLEQLVVRHSLEGLEALAQAIARREGSPAEVRVAVEQHDGALLAWLLAGGYVVYGVNPKSSERARDRYRPAGGKGDLSDAFILADMLRQDRGSLRPLPQESPTAAELRTLGELRVQRVQERVALMNRLRTLLDDWCPELSSLCDNLGVVPWQLDFLKRFPLQGDLATADVRTVNAFIRGHRMYRATAERIRQLRKVRGLPIPVGREAALRLDAAFLVDQVQTLTEAIRAIELKLQHLVEQHPDAEIFQSLPVKGLVTTSALLAGFSEPREAAPHHTELAARWGVAPVTVASGRTRFVRYRRACDGYMRGALMFFAFTTAQRPDCWAQDYYRRKRAAGATHYGALRCLAQRWLKIICRMWRDRASYDEQRHRSRLAQGAAALAST

SEQ ID NO: 400137 - protein, 327 aa, unidentified
MSKTVLGIDISKSTFDGVLLTGQQERHRVFDNKPQGFAALSEWLCEQDVEQVHACLEATGRYGDPLARYLYQAGHQVSVVNPAAIKKYAEGQIIRNKTDKADASIIADYCQKQPVHLWEPPEPAYQELQALVRHLPSLKNMRQQEQNRLKSGIPSEAVRQTIQQHIAFLDEQIADLEDQIADFIDQDSTLKQNKQLLVSIPGIGEATAAKLLAEVQDVTRFEGAKQFAAYTGLTPSNRQSGSSVRGRASLSKKGRVNFRRALYFPAINARRWNPLIREFCQRLEDRGKCDMVIICAAMRKLAHLVYGVLKHQQPFDPDYLAKSPATA

SEQ ID NO: 400138 - protein, 366 aa, unidentified
MKKISTVQVNGNMIFKGHQLTIGVDLGDRWSCYCVLDEAGEILLEQKVATTPEAMEQIFEKIPRGLIALETGTHSPWVSRRLTELGHKVIVAHAQKVQLITKSTRKDDRHDARTLARLARIDPELLGPVRHRSAQAQIHLTVIRARAELVSARTSLVNAARGLVKSFGERLPKCGTYQVNEKLAEGVHAELRDVLLPLLREVASLSERIKEYDERMEKIAKEVYPEVFLLKQVKGVGTQIALTYILTIEDPYRFPKSRAVGCFLGLRPGRRNSGQSEPQKHISKEGDRYLRTMLVQGAHYILGPFGEDSDLRRWGLKLAERGGKNAKKRAVVAVARKLAVLLHRLWVSGEVYEPLRNSQKAMRAVA

SEQ ID NO: 400139 - protein, 337 aa, unidentified
MKISGLLSYLCLKTTAMDTQVSFNQVVSRGCGIDVHKKIVVATIDGEGIKKETREFGTFTRSLTELKEWLLENGVTHVAMESTGVYWKPVYHVLEPTPLKIWIVNARHIKYVPGHKTDKQDSAWICKLLLAGLLKPSYIPPREQRELRDLTRYRIKLVQQVASDKNRILRVLEDCNIKLSNVLSNIQGVVGTKLIDKLCDGEAITMEDIDQVYHRKLEASREDLYEACQGLVTDHNIYLLQMIRQDIFAKEAIIKGLNERIKNKLMEYDNVLERLREIPGLNTKTLEDLLAEIGLDMSVFPSEKHLASWAGMCPGNNESAGKKKVDAPIMGTNRSNR

SEQ ID NO: 400140 - protein, 423 aa, unidentified
MEEVTDEPLYRDRVCGIDIGKAGLAATIRVPSDRDPARRMQETRGFGTTRRQVPAVVMEATGDYWKGPFYRLEAEGFECVLADAKQVKNLPGRPKRDPADSRWLAACFERGAITPCFVATPEFRIIRLHTRYRRDLTEERTREKQRAEKLLESAAIKVSSVVTDLHGVTGRDIMDHLIAGERNPKVLAQLARAAARRKISQLEEALEGAEFFTPAHAALLAKVLARIDRLSADIDDLSQVIEQLLAPYEEQLQQAESMPGWGRRAAQDAVAETGVDMSRFRTGGHLSSWAGRAPQDHQSGKRKGRAKAKKGNRYLGAITGETAVAAGRTQTREGARHRRLARKRGAAKACVATGNTQLKVYHKLLSNPGMRHQDLGPDYYDRQRDTRRQIAHHVGKLGSLGFEVTLCRIPDPEPDATGPAQPA

SEQ ID NO: 400141 - protein, 340 aa, unidentified
MGDITTIGLDLAKNVFQVHAVDEAGSVVLRKRLRRGQVLAFFAGIPSCLVGLEACATAHHWARELIALGHEPRLMPPTYVKAYVKRNKHDVADAEAICEAVRRPSMRFVPIKTAEQQSALMMHRARDLLIRQRTMLVNALRGHLAEFGLIEAQGLHKVARLITIVMDEKDGRVPDIARQVLKVIVNQIEDTQTRIAGLETQILAWHKSNPVSQRLATIPGIGPIIATAIAATVADPSIFCSGREFAAWLGLVPRQNSTGGKARLGGISKRGDSYLRRLLVNSAHTVLLCSKQAKTDPWLMSLLSRKPRLVAAVALANKTARVAWAIMRRQDTYRHAALAA

SEQ ID NO: 400142 - protein, 365 aa, unidentified
MAEVTRGEAARVGVDLSKRVYQVHAVDRAGRVVMAKPMAPERFFNWCAQLPAGCVVAMEACGGAHHVARRLRSLGLDARLIAGHFVTPYRMAGKSGKNDANDAAAICEAAGRPHMRFVPVKTAEQQGQLSVHRLREGYKAERTALINRIRGVLVEFGMSFPQSPEALRRVLAEVIEDGSNELTGIARLVLQRAHLHWIEVELQMKWCEERIGTHVRSDERASKAAALQGIGPIGASALVASVGDFKQFASAKQFGAWLGLVPSQNSTGGKASLGRITKRGDDYLRTLLIQGAKSAVMTAHKRSDRISQWLVQLKERAGWQKAVVALANKNARILWAVLTRDGEFDANHLPERPAPHCALSQRPAT

SEQ ID NO: 400143 - protein, 322 aa, unidentified
MNKYKETFGVDISKDVFDVHGNIKGHNQYKNDEYGFRKFLKELPKGVLIVMEATGYYHFRLAQFLYKNEVVVSVVNPLSVKRFIQMKLAKVKTDKSDAKAICDYALINEVPIYNALTDIQSECLQLFRLLDVYIKHRTATKNKMHGEEVLGIPSKFVYRSLRRNKKHLNAEIKVIEAKILSLVKEEQQQQLTLLTSVPGIGQKTALFLIIVTDGFSKFESASQLCSYVGITPTIRESGSSVRGKARISKVGNRKLRNLLFLCSFNACKYNKACREVYERLVNKGKSKKLALIAVANKLIKQCFAIAKSGRPYDETYVSVLPR

SEQ ID NO: 400144 - protein, 554 aa, unidentified
MTFLREDLQPACLPCEFAESRQGYERLLRLFQNVQQGLAAVHFHIRIDAAGQYATNLEAFLHALPFPKTITVGEPARNQSYRKALFPKRKADSIESLCAARFALVEKPKPSPAPAAPFHHLREIVHRLEGQCRQSTRLTNQLHNLLARVFPELGLIVADLQAHWLLRLLSRYPTPEQLARARLSTLAAIPYLSEGKAEKMQTAAAETVASFCGEAAAALVQQLVSQLRDSLAAEAKLHELMTTAYQELPEPNHLNSIPGIGAATAAVLTAKMVHCARFATPDHVVAYFGIFPQEDASGIDKDGHTKPGRHTHMSRKGNDLVRKYLWNAAKAAIRFNPAVQALYQRLRARGTRGDVALGHCMRKLLHLAFAVWQTGKPFDPAHYPWQTGKTATTQANEKTAGHNQGSSPDSSVVTAAASTVTPPPTPHKATVEPTPAPAVEQAGGPIDYVALRNQISMEQVLAQLGCLTRLKGTGVQRRGPCPIHAATDTRLRCFSVNLEKKVFHCFHPPCGAHGNVLDLWAAVRRLPLYEAARDLATTFQVSLVFLSGTGKRNP

SEQ ID NO: 400145 - protein, 361 aa, unidentified
MNATTAAIDLAKNVFQVALADANARVLEQHRLTRAQFERFFDNRKVARIVLEACGSAHHWARVFTARGIEVMLLPAHYVRAYVRRSKTDAADALALLEAARCADIVAVKVKSVEQQSLQAVHRTRSLWMGTRTSRINALRGFCRELGLHVPVGARTGLEAMARAVADDQSPIPALLRPIMQQLLEEIRVLEVRIAQLERQLAQLARESSACRLLMSIPGVGLLSATAILAATSGNVAHFKSARHFASWFGLTPKESSSGGTRRLGRISKMGDKYLRMLLTHGARSVMRAATVAKLRGQELLGVRHWALQLQGRSNHNKAACALANKMARICYAVLRDQTPFGQPATRLSKKMQRQSFELAH

SEQ ID NO: 400146 - protein, 328 aa, unidentified
MAARDESGELLERLTFKTSRDGIIAGVTRYGFETVVMMEEGEMAGWAYRTLLPYVEQVIVCDPKRNAWISKGSKSDEIDAEKLSELLRIKSFSPVYHTPNEDIAAFKVLVQHYEETTKRSSRQMVQIKAMFRSQGVFPEGQAVYGPEGRNDYLSRVDNTSTRIMLTREYELLDYLIKKKAEAMSQVTAMSRQFPVIERFKRIPGIGPVLSARFVAYVQDPGRFNKRGLWKFSCLGVVSRSSDGVPLGREHLDRSGNGVMKDLSKKAFDGAMRTKEMNPIKAFYRRSSRRCKDPVHARLNTQRKILAMMRAMWRDCTEYSDDVFLGLRA

SEQ ID NO: 400147 - protein, 322 aa, unidentified
MATTRHTLGIDIAKASYQVSLKRTDGKRRQKSVRNTPAGHAALIEWLHRHADAPVHACLESTGTYAEDVATALIEAGHQVSIVNPAAVKAFAQSQLRRTKTDGVDADVLADFCATMTPALWTPWPVEVRALQGLVRRRDAVQDMLTQERNRQAAGGLTTSVAASLARMIEVLEAELADLDRQIRNHLDQHPTLRAQRDLLSTIPGIGVATAARLLTECRAITAFETARAYAAFAGLVPRERQSGQRRPRAHLSKLGSPRLRYAMYFPALTAMRVQVQTFGARLRAAGKPKMVVVAAVMRKLLHIVYGVLKHQRPFDPQVLGA

SEQ ID NO: 400148 - protein, 337 aa, unidentified
MNEITTIGVDLAKSVFQLHGVSSEGNVVLRRQLRHSQMLEFFQTMPGCLVGMEACASAHNWARALAELGHEVRLMQPSYVKGYVKRGKTDQADAEAICEAVTRPSMRFVPTKSEATQGRLVIHKAREFQERQRTQIVNAIRAHLGEFGIVIPKGIHKIDRLIAACDEAKLPVPARKALNLLAGQLTDTQKQIEDLTSEVPRNAVTDEAARRLQTIPGIGPISADALVAALPDISDFRSGRDLSAWIGLTPKPHSSGGKERPGRISKMGNSYLRRLLYLGAMAQVSARRRGKPGNNWLWGIIQRKKPKQAAIALANRMSRTVYALLRDGTEFQVAQAT

SEQ ID NO: 400149 - protein, 426 aa, unidentified
MSAANQSSQEPIAAFVGIDWADEKHDIALRATEPEAKVERTKIANQPEALSDWVLALRERFKQGKILICLEQSRGALMHFLMGYDCFELYPINPTQLENYRKAFKPSGAKDDPTDGELLCKYLSLHHQELRPWRPNDKQTRKLALLCEKRRQAVDARSALSNQLKSELKQYYPLALAVLDNDLTTVLAADFLLKWPNFASLKKASAHKLRGFFYGHQCRSEQKIEARIQRIQSAQPLTRDSAIIEAGTLTTQMLARQLQALAPFIRQYDQQIAELFSQHPDRALFDNLPGAGDALGPRLLSAFGSEHDRFDNVLEPLSFFGIAPVTERSGKTTFVHFRWACSKFLRQTFHEFAGCSVRFCAWAKAFYDQQRARGKDHHAAVRALAYKWIRILFRCWKTRQPYDPQRYLAALAQHGSPLARAVKNSP

SEQ ID NO: 400150 - protein, 397 aa, unidentified
MYIVGIDIAKRKHEAAVIDGDGAVIIKPFSFTNNCSGYNRLLAMLAKAKLPLDEVSFAMEATGHYWLALFTRLQKEGFRVQVINPVQTNSIRSFYIRQAKTDPRDALLIAEVIRFGHFSESTLHPENIYELRELCRGRHAIVSMQADVKRKVVALLDQVFPEYETAFTNMFGDTSMAILQTCPTPKELSEMCLEELCHLIEVSSHKRFRMAKAQELQELARNSFGFAMAGDVFSTMIRLYAKHLDFLKQQVREMDRKIAEIMETLDTPITTITGIGPTLGAYILSEIGDISRFSSAAKLAAYAGIDPTMRQSGEYNGVRNRMSKRGSPYLRHAIWLAASSAVLHDPALKLYFQKKRDEGKPYMASVGHACRKMVSIIYAVMRDNKAYTPCIPNEISA

SEQ ID NO: 400151 - protein, 339 aa, unidentified
MEEIRTIGLDLAKSVFQVHAVNAAGGVVLRRKLRRSALLEFFAALPPTLVGMEACGGAHHWARELTRLGHTVRLMPPAYVKPYVKRGKTDAVDAEAICEAVTRPIMRFVPAKTEAQQASLVELKVRDMLVRQRTQTVNALRSHLAEYGIVAAQGRKLAELIAVVRDGDDARLPHLAREALGELVAQIEALEGRIERLDRRMVRHAREDETARRLASIPGIGAIGATALAALGPNPHGFASARHFAASLGLTPKPHSSGGKERLGRISRQGNSMLRRLLVLGATSRLRYARRSPEAADWATRLLARRPFKVVAVALASKMARIAWALLARGGTYTTAATA

SEQ ID NO: 400152 - protein, 416 aa, unidentified
MEQIFMIKENYIYVGIDLHKETHTAVMIDCYNQKLGEITFPNRPAAFPKLVTKVKKCNTDGKEVVYGLENAYGYGRALAVWLIDKGYLVKDVNTAISHRQAKHRGAMYRKSDSDDAKAIALATLNMLDKLPDACPNDAYWSLGQLVHRRDNIMKQRTRLVNQLHEQLCIAYPSYKQFFNDISRPTALYFWEHYPSRKYLKGKSVEDLRAELVPVSHNKCSTKTCEKILDAVASDKVKNNAYQDARDMVTLSIVSDLQHYDSQLTEVDKMLEQMYKMLGCTLTTIPGVNVITAVKILAEIGDIKRFSNANKLAQFAGIAPLHLSSSGKGKDVATKQGNRRLQATIYFLAIQMVQLSSKGTPRNPVVRAYYEKRKAEGKTSQQALICISRRLISIIYGMLKNGTEYRMPVVENAGEKL

SEQ ID NO: 400153 - protein, 408 aa, unidentified
MAVLYQEAAGLDVHKDTVVACARLARGQKVVRQVETFGTTTRELLRLSEWLRGHGVTHVAMEATGVYWKPVWHVLEGQFTLLLADAREVKNVPGRKTDVNDATWLADLLAHGLIRGSFVPPRPIQELRDLTRTRTQLMRERAQHIQRIQKVLEDTNVKLANVVSDILGVSGRAFLEAIIGGESDPKRLAGLGDPRLKASKKELAEALEGRVRDHHRFLLRLHLSQIGALDASVELIESRIEEHLAPFADLVCRLKTISGMGEAVIPVVIAEIGTDMSVFPTAAHLVSWTGLSPRQDVSNGKRRSTRTKKGKWAKTALVQAAWAGVRTKEQTYLTAQFNRIRSRRGAKKAIVAVAASMVTAAYYIIRNGTEYRDLGADYFHRRDQKAHALRLVQRLQNMGYVVNLQTAA

SEQ ID NO: 400154 - protein, 341 aa, unidentified
MDYYAGIDVSLEYSSVCIVDANGKIVREGKVASEPEALTAWLGSAGLRLTRIGLEAGPLSQWLYAAMRKAGLAVELLETRHVRDAFKAMPVKSDRNDARGIAQLMRLGWFRAVHCKSMGAQETRAMLTARKLLQKKLGDVEASLRGTLRGFGLKVGKTTPKRFAGRVKELVVGHASLEAIAEALLAVHAVLLREFNGFERRVRTMARHDAKAQLLMSTPGVGAIVGLTYACAIDDPARFKSSKQVGAHFGMTPKKYQSGETDYTGRISKNGDKGVRTALFEAAHVILTKPVKGSALKSWAMRLAKRAGMKKAKVALARKLAVIMHRMLVDGTTFDFAAAAA

SEQ ID NO: 400155 - protein, 371 aa, unidentified
MTEAVKYIGLDVHKGTIAVAVADGERGGEVRYVGTVPNEDDAVRKLVKRLTGAGTKLQVCYEAGPCGYGLHRLLTGLGQSCIVIAPSMMPRRPGDHVKTDRRDAMTLARLLRAGELTAIWVPDEAHEAVRDLIRARRSAKEDATGAKQTVKSFLLRHDRRYGGKGTWTKMYWRWLSEQRFDFPHQQLAFEEMQRRVLEAQARVGRLEAALGEAVEGWRFAPLVRNLQALRGIQLVSAATLVAEVGDLTRFDNPKQLMAYVGLVPSEYSSGARKQRGRITRAGNGQARTMLVEAGWAYRLPAREERRYRERVADLPDEVQAIGWKAQVRLCQRFRRLAATGKPQPKVITAIARELIGYAWDIARRVSPAVAT

SEQ ID NO: 400156 - protein, 460 aa, unidentified
MSRTRKARQAAQTAKQVAEMDALTLLNPNAAGIDISLDDMWVSVRADRDAEPVRRFGMNTPDLIAVADWLKACGVETVAMESTGVYWIPLYEILEECGFEVYLVNARHAKNLPGRKKDETDAQWLRRLHTFGLLNNSFRPDGEMCAVRAYMRHRADLIEHRAAHIQHMQKALHQMNVRLSPTVKDITGVTGLAIIRAILDGERDPLQLVRLRQPGCAQPEAEFVKALTGNYRNEHVFTLKQAVALYDAYTQQILECDQELERQFSALKPVHDDDLPPLDTSDKRNTHSKNAPAYDGRSLLYQLLGVDLVAVNGLNEVTAQIIISEIGADMSRWPDVKHFCSWLGLAPHTDTSGGKVLRSRTLKTHNRAGQALRLAAQAVSRTDTAYGAFFRRMRAMHGPKKAIVATAHKIARAVYFMLRDHKPFQDTTAEQYTLREREREIARLERKATKLGFTLAPASA

SEQ ID NO: 400157 - protein, 340 aa, unidentified
MRIIGCDLHTAKQTIAMLDRDTGEVSEQTLIHDGETVREFYAAIPKPAMVGIEATGSMGWFVRLMEELGVTCRVGHPAAIRTAEPRRQKHDRRDAQLLLRLLLEGRFPAIWMPTAAQRDLRALLLHRHQWVRMRTRVQHALQAIALGQGVRRGGTLWSIQGQAVLAALPLLPHATDRRDALQALYQQLDAHVERLDEQVGAIAQQRASATVLMTHPGVGPVTALATEVFLGDPSRFPNGKALASYVGLIPSEYSSGARQRLGHLTKQGNPFLRFLWGEAVLGAVRRDPELQRFFRRKLAQKGLGKARVAAARKLGIRLWIMLRDQITYNEFCRRRQRRPT

SEQ ID NO: 400158 - protein, 335 aa, unidentified
MHYLYYVGLDVSKETFDASLVAFEDANEMAHRKFANSRKGICSCLHWVEKRHGIRLDDVIFCAEDMGSYISEMAVCASDRTLTFNFSLISPLVIKYSMGIARGKTDRVDARRIAEYAITHYRKIALYLPAEKELCQLRTWLILRAHLAKQRVAKLVLLEKLDYKEKFADVSIQRSMLQEEIAYAEIHMKTIEREMKELIAADSNICRNYKLLTSIKGVGPITAIVMLCSTLNFTKITDHRKFACYCGLAPFEHSSGTSVRGGCHTSSMANRDIKVQLNRSALIAIRCDPQLKAYYERKAAEGKHKFSVLNAVRAKIAARCFAVVRRGTPYVALQI

SEQ ID NO: 400159 - protein, 423 aa, unidentified
MMKLKYSICCGLDVHKNVIVATIVITNKDGISEYRQKSFSTINSDIQRFHSWLIENNCYHVCMESTGKYWIPIFNYLENDIDVCLTHPKYVKAIKGKKTDKKDSKWIADLYKFDLVRCSFIPPKDFRQLREIARYRFKLVCMKSSEKNRIQNCMTVSNVGIASVLSDPFGKTATEIMAYLLEHTSDSIDEKAVRKLIKKGAKAKSNEIIEAIRGYNIETDQAKKLELARGHLEYLDDMITQTEVELYIRMKPYYEFVEFVSTMPGMTELSSTIALAETGVNMDIFDDAKHLCSWCGLSPANNESAGKKKSVRIAKAGDYLKPMMVQCALAAIKSKKQPYFAIKYGRIKKRRGHKKAIIAIARMMMVCIYHMVSEKKPFTPTDYEELMEPQNHVERVVLNEDNVFAYLESLGYDSSKLVKRNDN

SEQ ID NO: 400160 - protein, 360 aa, unidentified
MSERTFIGLDVHARSVVGTALDTGSGEIRSLRLSPRTDAVIAWVASLPGPVAVAYEAGPTGFGLARGLTAAGIRCVVVAASKIERPPGDRVKTDRRDAERLARLLRIGELPAVRVPTEAEEAARDLVRARDDVRADLMRARHRLSKLLLRQGLVWEKRAWTGEHESWLRSLSFDGLGVQLAFDEAFDAVLSTHARRERLDKAIEAMAATPPFAPVVGRLACLRGVSTLTAVGLAVEVGDWHRFTGNTIGSYLGLVPSENSSGNRRVQGPITKTGNSHARRLLVEASWHHRKPYRPSRGLARRQDGQPPAVRDRATRGNRRLYQRWKRFDARNKRATVAAVAVARELAGWCWSLATMDENL

SEQ ID NO: 400161 - protein, 348 aa, unidentified
MQVTMVGIDLAKNVFCVHGCDANGKAVVRKQLSRRQLLSFVANLPRCMVAMEACAGAHYWAREIEKLGHQVRLIAPRFVRPYVKANKNDASDAEAICEAASRPSMRFVAIKSAAQQDVQAVHRVRQQLVKARTGLANQVRGLLAEHGIVLGRGFAHLRRGLPVILEDQDNGLSGVMRELLGEIGERLKFIDDRLRKYDVTIQRLFRQDERCQRVAAVEGVGPVTATALVAAVGNATEFRSGRELAAYLGLVPRHRASGGRTVLLGISKRGDRYLRTLLIHGARAALHRIEQHRGARAIWAARLKLRRGANVAAVALANKNARVLWALLSRGQSYRPAPVPARVPQAGS

SEQ ID NO: 400162 - protein, 391 aa, unidentified
MDQAWAGVDAGKEFHWAHVLDPSGTELLSRRVENDEADILRLIDEALSLAEEVVWAVDQPGGGAALLLALLWEGDQKVLYVPGISVDRARQTYRGESKTDARDARVIADQSRMRSDLGELAPGEQELSELRLLLGRRRDLITDRSRVIARLREMLLSLFPALERALDVNSKGPLILLTHYQTPTQLRRAGHRRVAAYLRNRSVKGSDKVASKALRAAGSQSVVLPAQEVASRIVAQLAAEVLTLKERIESIDEEIGERFFARPEARILASLPGMGPILGAEFLVCVGDILAFESADRLAAYAGLVPAARASGKRVGNRRRTRGGNKALKRIFYQSAFASLRGCAQSRAFYDRKRAEGKGHTQAVVALARRRVNVVWAMLRDGTEFEERSAA

SEQ ID NO: 400163 - protein, 473 aa, unidentified
MGKADMKYNQQRKRTGKSERRGSTSLFERIQPDAAGVDCGQKSHFVAVPPERDPEPVREFRTFTADLQRLAEWLAQCGVKTVAMESTGVYWIPLYEILEQRGFEVVLVNARDVHNVRGRKSDVKDCEWLQQLHSVGLLRASFRPAAAMVPLRSYLRQRATLVEELTARIQRMQKALTEMNLMLHIVVSDITGVTGLKIIHAILAGARDPERLAVHRDGRCHASHQELVAALTGNYREEHLFSLRQNFTAYQFHLQQIAECDTEIEALLNTLAAQQPPPSAALPPPRAKPTKKHAPAFDIRTPLHVLTGGADLSQIHSIGPHAALQLIAEIGTDMSRWPTEHHFASWTTLAPNNKISGGRLLSSRTPPSANRAAAILRRCAMSLGRTSTALGAFYRRLAVRIGKAKAITATARKLALLVYRALSGKLAYLDPGATTYLKLNRARELKSLRRRAKLLGFDLFDQSTGELLVNPVS

SEQ ID NO: 400164 - protein, 348 aa, unidentified
MDKIIRIGIDTSKSVFVLHGVNTAEEPVLRRKLRRRQLVDFFGKFEPSRIGLEACGAAHHWARELIALGHEVVLLPPQYVKPYLQRGKNDAADAGAICEAMSRPRMRFVPVKTAEQQAALMMMGVRDQLVARRTQLSNMTRGYAAEFGCTAAKGLDKIEPLLARLATEPGVPALAKELFVGLGEQYAELKPKLCAVEAKLRAWHRQNEQSRRLAQVPAIGPIGAALLTMKVADPHAFRSGRDFAAWLGATPKDHSTAGHQRLGLITRAGDKTLRRVLVAGATAVIQQARKGRGHHSPWLMALIKRKPPKLAAVALANKTARIAWKLMVSGERYNRNHAAAVQTATIAT

SEQ ID NO: 400165 - protein, 342 aa, unidentified
MKATTIGIDLAKNCFQIHGVNEHGKTVHKKQLKRDQMLSFFTNLPACLIGMEACGSAHFWANKLQGLGHTVKLMAPQFVKPYVKTNKNDAADAEAICEAVTRPTMRFVPIKSSEQLAVLALHRARQGFVKARTAQANQIRGLLAEYGLIIPQGITHIGQRVPEFLEDSENGLPGTFRHLLMRLHEHLKELNKQVNELEEAIVRWHRDSVASQTLAQLPGIGPITASALVASIGNARNFQNGRQLAAWLGLVPRQHSSGGKQTLLGISKRGDSYLRTLLIHGARAVLRVAERKESFAGSWLAGVMARRNHNVAAVAQANKTARIVWALLAYDRKYDAHFGMAA

SEQ ID NO: 400166 - protein, 362 aa, unidentified
MKKTIRERESEWKEKPDRTVGVDLGDRFSHYCVLNGDGEVMEEGRIRTSEEAFRRHWEAEPRQRIVMETGTHSPWISRLLRGFGHQVIVANARKVRAISENESKNDRQDAEMLARLGYCNPRLLKPIQHRSAERQRDLNLIRARDTLVRARTMLINTMRGLVKSAGGRLPPASSESFAARVSAAVPAELGTATQPLLRQIAGLTAEIRDLDQVIEKLTERYPEIRILRTVPGVGPVIAAAYVLTLDGVDAVEHSRSVGAFLGLRPKPSQSGASDPEHNISKTGNIYLRRLLVQAAQYILGRYGPDSALRRWGWKLAQGGKRTKKRAVVAVARKLAVLLHHLWRTGQNYRPFPEAAVAAGSAA

SEQ ID NO: 400167 - protein, 369 aa, unidentified
MGDRIGYVGLDVHKEGIVVAVAEGGARGEVREYGRIANTRSALDGLARKLGREGVKLRFCYEAGPCGYGIQRQLSAGGHDCVVVAPSLIPKRAGERVKTDQRDAVSLARLDRAGELTAVWVPDPGHEAIRDLVRARLDAVHALRRARQQLAGFLLRQGCHYRRPAWTKLHHRRLAGLKFEQAMHHLVLEDYIAAVEAAEARRDRLTAQIAAMLPDWTLAPVVAALQAMRGMALVNAATLIAELGDLSRFANPRQLMAYLGLVPSEHSSGASVKRGGLTKAGNSAARRLLVEAAWTYRFPARVSRELLLRQEELPKAIREIAWKAQTRLCARYRRLARTGKPANVVTAAIARELAGFVWAIARQVTIPAR

SEQ ID NO: 400168 - protein, 517 aa, unidentified
MYQFTTADGPVVVRQREAEFKTHWQELVDAKRWVLKILGPLAEPDALRYCIESTGTYHLPVLKAWQGIPSVVNPLLAGASHRKTDVLDARTLAHHSITGLWKASFIPTEQAQVLRVIWARRREMARRATRAANQINNIVLRFGFTFGADVPMRSMQGESILSDLVEGVPVSIDGAPPEGLPAAVRPVIGALVADLRNTIAEARKATVSTENYIKARDWPIGTGTMQGTELLGILRTVPGVGELTALHWLAEITDPRRFENAKQVAAFAGCDPSLKVSAGKVTSYVRRQGNLRLHQALLYAASGLLRRRDDPLGQWGRSIAGRNKKGGHKKACGAVARRIACALWEVHRRGVPFSYEQYRLAQTIFCPPTPLSRIVPARAVQTLRDVGIRNSDQLVIAYNKGLLAAINGLGERSIALIKEWIAKEGRFERDLRKEISGPAGSGARRAKTYFLAPALAFKKKEANGKESNAETEQTSTQSAPGQDAQAPAARPAGTRRAASAERTRARRTGKGASRRAK

SEQ ID NO: 400169 - protein, 507 aa, unidentified
MSAVPKKRFRLNDTSSSDCDEVLQFGVGMDVHKHQIAVCVSGKLPSGDIVTVKNHVFRASPRGLDELIRFLQKFEPVNAYLMECTGVYHLPVYHALQNAFPNKKNKIIAMNPLMLNRRVGDLGQHADRTDARGMAYFAHYSKLIRPSYVGGIGYYRQRQMLRHYHRIKTQTTRIRNRLTQVFDAENFKFLLDLKTEWGLQLLDHFIQKKWTFGEAYNDLVSTLESQKKGTGMLVKRRKEMEEYAQITFHENSRFILQMLLVSLLYEEANAAAFLVQVEHLALKDPELTEGYRHLLQISGFGSISALTVLLELGDYNRFANWKALAKYCGLVPTIHQSGSIDIRGHINRHTNMYLRKALTQVAGILINKGYQDTDLARYAHKQFQIKKLPYKKAIVKIGNKIARTVYNMLVLKIPYDANHEFALKKGKNLESNLAKRGTLLDTRQTRALRRDVSKFLVTNYEFLNSTSKYHLKAGFTRAIRKAKWMDSKKEADKKERMKGERKNKNYL

SEQ ID NO: 400170 - protein, 313 aa, unidentified
MSTPCHVGLDIALATIDVAIRPAQRPPWRVAYDEAGLAALVATLRTLAPALIVVEATGGLEARVASALGVADLPVAVVNPRQVRDFARATGVLAKTDRLDAQILAHFGEAVQPVPRALPDDAKADVAALLARRRQLIEMRTAEQHRLTRARPTLHASLHAHIAWLEAQLRDTDRDLQQRIEASPLWRAQEQVLRTVPGVGPTTARTLLGHLPELGHLSPRQISKLVGVAPLNHDSGRRVGPRRIWGGRAPVRTALYMATLVATRHNPVIRAYYERLRTAGKPPKVALVAAMHKLLIILNAMLKQQQPWQPTTP

SEQ ID NO: 400171 - protein, 353 aa, unidentified
MTIVENTGTRSLIITAGIDTHADFHVAAAIDHNGGVLGVETFTTTTGGHRDLVRWLIGFGVIDKIGVEGTGSYGAGIARHLTGKGINLVEVDRPNRQARHRAGKSDAVDAIAAARAALTGTATGTPKTRDGNIEAIRVLSVARRSGASEWIQIINQIRHLCFTGPEEIRRRFDDLSPIMLVRTTARLKPRKTTGDIVRYTTLLTLRELGQRALFLHDQKKRLNAQMRPLIRESAPDLLEVFGVGFDVAAKILIAVGDNPHRIRSESAWAHLCGVSPIMASSGKNQRHRLNRGGNRQANSAIYRIMLVRMAHDDATRAYIVRRTTEGKTMGEIARMLKRYIAREVYKTLPTTIG

SEQ ID NO: 400172 - protein, 421 aa, unidentified
MTQSTPDTFAAFVGIDWADAKHDVCLQAAGSTKRECFQLEHTPEAIDAWVTTLRTRFHGHPVAVCLELNKGPLVFALRKYDFLILFPLNPLTLARYREAFTPSRAKDDPTDAALQLELLLTHRDKLQPLHPQSPAMRALEQLVAHRRRVVGDKVRITNRLTSTLKNYFPHVLQWFPDKDTPIFCDFLSRWPTLKAAQLARRSTLETFFRDHHGRSADVVAQRLHAIKAATPLTTDEGVIAPNAMLVQALVNQLRVTLEAIATFDNAIAQRAQSHPDFPLFQALPGAGPVFASRLLVAFGEQRDRYATAAEVQKYAGIAPVTERSGKKAWVHWRLQCPKFLRQTFVEWAAESIRHSFWARVYYQQQRDKGKAHQAAVRALAFKWIRILYRCWQDRTLYDESVYLNALNNRGSSLIHNLAQGS

SEQ ID NO: 400173 - protein, 344 aa, unidentified
MEEHTVVAVDVAKDVFELAVSEEPGRVKLHRRLSRGELEVFFAQARKSTVVMEACGSAHHWGRRLQGLDHDVILLPPHQVRPYITRNKTDRADAKGILEAYRNSDLRPVPVKTISQQVLGSIHRFRAGWLGARTAQVNTLRGLLRELGFVIPEGIEKVLPQVRLLVGDADSGLPDSLRCTVAAACDEIESLGENIRQAERQLEALAEQTPVVERLRSVPGIGLMTSTALVAFVGDIRRFPSGRHFASYLGLTPREYSSGMRHRLGRISKRGDSYLRLLLVHGARSVLCHAKKATSHDRLRTWALALQKRNRHNKAAVALANKLARIAWAVWKNGRDYESVAPAA

SEQ ID NO: 400174 - protein, 407 aa, unidentified
MDVVIERACGMDVHKDNITACIMTPEGKEIQTFSTKTVFLIQLVDWIKQHRCTHVAMESTSVYWKPIVNLLEAEDIEFLVVNAQHMKAVPGRKTDVKDAEWIAKLLRHGLLKASFIPDRNQRELRELVRYRRSIIEERARQHNRIQKVLEGANIKLGSVVSDVMGVSARDMLNAIAEGEENPEKLANFARRTMKKKKEELELALKGYINPHQRLMLKSILKHIDFLTEQIEMLDEEVAQRVSKYQEDIERLDSIPGIATRMAEQILSEIGTDIKKQFPSVAHMCSWAGLVPGHNESAGKRKSAKTKKGNKYLRSALTEAAHSVRGSKNYLGALYRRTASRKGKKRAGIVVAHAMLRISYYLLTRKEMYVDLGEDYFDKQKEQSIVRHSLRRLESLGYTVTLKEPEAS

SEQ ID NO: 400175 - protein, 370 aa, unidentified
MRIIGCDLHARQQTLAMLDTETGEVVNLTLMHEGNNVREFYSKLPRPVLVGIEATGSMHWFLNLMEELGIECRVGHPAQIRAAEPRKQKHDRRDADLILKLLAQNRFPAIWLPSKELLDLRALLLHRHQWVRMRVRMQNALQAIALANGLRRGPALWSYDGQAKIAFLPLLPHAAYRRSALQAMYKNMQSEIENLTRRVAEQAGNRCGARLLMTHPGVGPVTALATEVFLGDPQRFTDSKTLASYVGIIPREYSSGEHQRLGGVTKQGSPLLRFLWGEAGAHAARRDPELKRFYRRKLVQKGLGKARVAVARKLGIRLWIMLRDEIDYQEFCRRGQLQQKTVRPVVGMPETGNGAKSHRPSDEATRLPES

SEQ ID NO: 400176 - protein, 315 aa, unidentified
MTKQRSAINVGTDVGKHQLDLYLLERDRAFTVPNTEEAIAALIRRLSRYRIERIVVEATGRLEQPFVRAALAAGLPVIVVSPLKIRRFAEVIGQLAKTDAIDARLIAQFAATLKPAARPASDVNAQAIKDLVVRRRQLTTLRTTEKNRRQVMPEALQPSIDRIITTLTHELKLLEQLIDDAVEQHAASRHKRDLLTSMPGIGNSVAATLIGDLPELGSLDRREIASLTGVAPFNRDSGTLRGKRRIRGGRAPSRTALFLSAMVATRFNPDIKRFYERLLSTGKHKKVALIACIRKIVIALNAMIRDNAPWHSAIA

SEQ ID NO: 400177 - protein, 394 aa, unidentified
MHKDTHCAVVIDCWMNKLGEINFENRPSRFPAFVEDVRKICGTKEIVFGLEDTRGFGRNLAAYLVGRKFEVKHVNPAYTSAVRLANPIIYKDDSYDAYCVARVLRDMVDTLQDAKHEDIFWTIRQIVKRRDLIVKSNVMNKNQLHSQLAYSYPSYRKFFAIIDSKSALCFWENYPSPEYIWNTTPEEIYHTIKPVHQALKIQRIHEIISMIERDGDTRKDYQPERDFIVRNIVKDIRHNKELIAEIDDELRKLIPLTGYKLHTMPGIDLVTEAQIISEIGDINRFPDSDKLARFMGLAPVQFSSAGKGKDQRCRNGNRTLNAIFHFLAIQMVAVSASGKPRHPVFREYFEQKVKEGKNKPQALVCVARRLVRIIYGMMKTRTEYRPFEKADDKN

SEQ ID NO: 400178 - protein, 343 aa, unidentified
MNGTTYAVDTAKNVMQLHWVDGQTGEIGRRKLSRARFFEFFAQRPNCHVVMEACGGSHHLARRLGRLGHAVELLPARQVRPFVSGNKDDAADARALWLASQHPDIRRVPVKSEQQQAVLSLHRMRAHWSSVRTATLNALRALLYEFGVVLPRGKACGLKTLAERRAEFDTQLPALMQRLVDQHLAALRQMELEVKRIETELAAVQAADDNARRLREVPGIGLLGATALSATLGDARAWRRARDFATSTGLTPRHTGTGGKVRMGGISKRGDPYLRTLLVSGARSLLNSPSAPQWARQMLLRRPVNVVVVALANKLARTAWALVAHDGVFDRRWGRPGAVGTPG

SEQ ID NO: 400179 - protein, 400 aa, unidentified
MMTPDDIDVWVGLDVGKSAHHAHALDHDGNTLYDKPLKQDEKAIRTMLGKLSKHGRVLLVVDQPNTIGSLPLTVARDMGIAVAYLPGTAMRRTAQLLPGDAKTDRRDAHVIAWAALKLPETLRDAGPDDETLAVLKLLAGHDEDLAHESTRHVNRLRSLLLQTHPAFERALKGERITRDATLALLERYGGPMGVKRAGIEDVKDWAKSNGLRAGRIIDDMFKAIGEQTVTVPGTLMAETIIPSIAHDIKTIRDRRREVGRQVEKLLEDHPLLTVLTSMPGIGVRTASNILLGIGGDIANFKSSAHLAAYAGISPVTGQSGTSIKGERPSRRGNKRLKNALWQTAFVASTKHPPSVAYYKRKREQGKHHNAAIICLARRRCDVIYSMLKNGTLYQEPALVA

SEQ ID NO: 400180 - protein, 324 aa, unidentified
MTAVLGIDVAKATYQVTLLVEGHNYKRSFGNQESAFPELLNWLHKHYTGQLLVGMEATGRYWEALAYYLHAQGHVVSVINPSRISYFARSKLVRNKTDAIDATLIAEYCLSQQPEPWTPPPAEVRELQALVRHLEALQGLRTQQSNRLQAAPPSCDVRASLQSLLSHLDDQIRAIECKIRGHMDQHPTLKQQSVLLQSIPGIGQITAARLLGENIQQFDSTRALTAYAGLTPRHNISGTSVHGRPHLCKTGNEHLRRDLYFPAIVAMRYNPVVNSFSKRLSERGKHKMAVVGAAMRKLPAIALGVLKSKTPFDPRYSERNLVLT

SEQ ID NO: 400181 - protein, 343 aa, unidentified
MEAVKVIGFDIAKSVFQVHGLNADGKVIIRRQLKRRHVLPFFQKLPPCLVGIEACASSHYWSRELQALGHTVRLMPAAYVKPYVKRHKNDATDAEAISEAVTRPNMRFVATKTPEQQSCLTLHRARHLFIRQQTAVINAIRGHLAEFGIVAPVGRKGVEDLLRVVADPKDERVPKVARACVVALGAQLRMLKAQILEFDRMINAWHRSNKTSKELDEIPGVGPALATALVGGVADPKAFRSGRDFSAWIGLVPKQHSSGGKEKLGSISKRGDRYLRGLFTSGALAVIRYAKIHGTKHRPWLTRLLARRPTKVAAVALANKIARMAWAMMAKGERYKEPVALAA

SEQ ID NO: 400182 - protein, 391 aa, unidentified
MICVGIDVAKDKHDCCILDSEGTTLADCFTIPNNLDGFKRLLQTIKDCTQKSDKIKVGLEATGHYSYNLLGFLLDSGLATYVINPLHTNLYRKSLSLRRTKTDRIDARTIAMMLMSDVDLKSYSNTAYHNEELKSLTRYRFDKVKERAKLKSSVARLVNILFPELEKLVSSLHIAVVYALLSNYPGASYIANANTEELAETLCTASKGRYTKSKTAEIQVAAGVSIGSKMPAKSMELKHTIALIRELDKEISEVESAIDKITSQMDSPIFTIPGIGRHMGAMILAEVGDFSNFASADKLLAYAGLSPSTYQSGQLQNCYAHMEKRGSRYLRYALFNAAKYVCLWCPTFSAYLEKKRSEGKHYNVAISHAAKKLVRLIFAMQRSGKAFLADY

SEQ ID NO: 400183 - protein, 386 aa, unidentified
MIEAVIERCAGIDVGKKFLVVCVMTGPLDAEPKTEIRKFGTIVAELELLRDWLIGERCSHAVMESTGSYWKPVFNILEDNVEVVLANAYDVQNRRGHKTDPNDSRWLAHLLRHGMIRPSFIPERAVRELRDLTRRRRQLVGEKARERNRIQKILEDANIKLGDVLSDVFGLSGRLMIDALVEGVLQAEEIAHFAQRKAKQKIPELIAALQRNRLTDHHRFLLRHVLRHLDFLEKEVEALNVEIRSRLSAEKFRQPHTLLQSIPGIKEEASAAILAEVGPNMAQFPSGAHLASWAGLCPGNHESAGVRKTGRTNRGNKWLRSVLTQCAWAASNKHNSMLSAFYSRLSPRCGRKRSIVALGHRLLRVIYYILLRSQPYQESHGRSIST

SEQ ID NO: 400184 - protein, 315 aa, unidentified
MKTGPIYVGIDIAKGQLDVAERPSGERAVIPHTEAGIATLVAQLRTRRPACVVLEATGGLQVPFASALAVGEIPVAVVNPRQVRDFAKATGQLAKTDAIDAQVWARFADVVRPTPRPLPDEATQELGALLTRRRPLIEMLVAEQQRMQRAPHPIQRQIQAHLTWLKQQLAGLDEDLTHRIQATPLWREHEDLLRSVPGIGPVVSRTLLAELPELGTLTHKQIAALVGVAPLNRDSGTLRGRRMIWGGRAVVRSVLYMSAVVAARHNPVIKAFYQRLRAAGKAPKVALVACMHKLVTILNAMVKHQTPWHLSTQGT

SEQ ID NO: 400185 - protein, 414 aa, unidentified
MVVDLGIHQERRRELHVPQDVWAGIDAGKAAHHCVVINDAGQKLLTRRITNDETDLLKLVDEATALADGGRIVWAVDLNAGGAALLIAVLVAHEQDLFYIPGRTVHHASAAYRGDGKTDAKDAAVIADQARMRRDLHPFRQRDETAAALRMLCARRADLAADRTRAINRLRAQLLDYFPALERAFDYAHRRAALILLTHFNTAAAIREAGPGPIAAWLREQGAYRADLVAARAIEAAESQHITVPGEPTAAALVERIARQIMALDAELDDIETTITETFRTHRYASAIESLPGFGPLLGADFLAAINGDVTNYDTADRLAAIAGLAPVPHDSGRISGNLKRPRRYDRRLLRANYLAAYNSIKTSPQSRAFYDRKRAAGKQHNQAVLALARRRLNVLWALIRDETTYQPIELNAA

SEQ ID NO: 400186 - protein, 443 aa, unidentified
MRRCIGLDVHREFAEVAIWEDGLVRSAGQITTTPEAMRLFAQSLGPSDEVALEATCNTHAIARLLERHVARVVVSNPAKTRAIAEAKVKTDKVDAQVLAQLLAAGFLPSVWLPDDETHALRRQVARRAHIVRQRTRLKNGVHAILHRNLVPRCPAADLFGRKGRAWLNEQELPRDEAQAVAALLRQLDFAGEELRLVDLELGRVGLQRGEVARLMTIPGVDATVALSIVAAVGDFHRFSTPHKLVSYLGLNPRVRQSGGQPAQHGRITKHGRAHARGMLVESAWAASKTPGPLRAFYERVRARRGMQIAAVATARKLAVLCWHLVVKDEDYAFARPSLTDKKRRALELRAGLPSRRGQKGRAAAYSLKEVRRRENELAAQGEQAYRQLVADWQAKAPSTKHGVGVAAANGARLSRPSEGQAARQDSAPTPALRSGVDHAHTEG

SEQ ID NO: 400187 - protein, 422 aa, unidentified
MLEETHDTEEIIGRVAALDIGKAELVCCVRVPSAQGSGKRAQEVRTYPTMTRSLLVLADRLRELGVTRVVMEATSDYWKSPFYVLEAHGLEVWLVNAKDVKHLPGRPKTDRLDAVWLAKVAERQMLRPSFVPPPPIRRLRDLTRYRADLVAVRTAEKNRVEKLLEDAQIKLSVVASDIFGVSGRDMMAALIAGERDPKALAQLARRRLRAKLSLLEEAFYGHFSDHHAFLLQTMLARIDQASADIATLEAHIEAEIAPFAQAADRLDEITGVGRAAAQVIIAEIGVDMGRFATPGHLVSWARFAPGVKESAGKKKGKGTTGHGNPYLARVLGEAAAAAGKTSTFLGERYRRIARRRGTKKAMVAVGRSILIIIWHLLSDPDARFHDLGPGFYDTRIDADRKKRNHIRQLEALGYTVTLQPAA

SEQ ID NO: 400188 - protein, 340 aa, unidentified
MCLSTTSFTPNPHIVAVDVSYKTLDYCMASAPKVKQMANTVPKITAWIEQLPKNSLVVFEPTGTYSDKLQRTLESFQMAYSLVNPLQSRAFARAIGKHNKSDVEDARTLLQLGKSLNLQANKVPSKKMLDRKQLLSSLNALQKQRQQLNNQIHALDQYLDAVPLATSALRTTLAVVEQQIEQLQTAMRTYTDKEEAKVRKLMMSVSGIGPKSADLLIQLTDCLKNFETAKQLIKFTGTAPTTYESGTSVRHAGRVSKKGNAQLRRTLYMAARSARQHNPDCKAIYNRLREKGKPHKLAMVAVINKLLRQVFTIVKTQKPFDKDYELKKQENKEKDNLLAK

SEQ ID NO: 400189 - protein, 360 aa, unidentified
MTTATATGTETSSSPDVVVGIDTHKLTHMAVALGANGGWLGSLKLDAKRSGYQELIRWAAAFGSNPVFAVEETGCYGAGLCRALQAAGMAVVEVNRPDRSTRRRIGKDDTIDAEAAARACIAGTASVIPKAGDALVEMIRMLKVAKDSATANRTAALNQLHAIVVTAPAALRERLQRLKRKELVESCAGLRSGEITTPLAAAKMTLRTLARRIQQLDEELKETVTQLDRLTMQLCPELRNTYGVGVDISATLVVAVGDNQERMKSEASFAALCGVNPLPASSGKVVRHRLNRSGNRQANCALHRIVICRLQRHQQTREYVERRTAEGRSMKEIIRCLKRFVAREVFGILRGGPAVRTAAT

SEQ ID NO: 400190 - protein, 342 aa, unidentified
MNIITVGIDLAKNVFAVHGVNDNGKPALVKPKVSRADLLPLIAQLPPCLIGMEACSGAHHWARLFRQHGHTVKLMAPKFVAPYRMTGRRGKNDAADAAAICEAVTRPAMLFVPIKEEHQQIILCLHRTRQGFVEERTASYNRLRGLIAEFGIALPQKVTCLRREIGAHLEDLPGYANRCVADLLTHADRLDECIAEYDRAIAQAARDDAASRRLMKLPGIGPTTASALLASIGGGHDFTSGRQVAAWIGLVPGQYSSGGKARLGRITKAGDNYLRSLLVMGARAVLNSIGDKQDRFSRWARSLQERRGYWRAVIAIAAKNARLAWAVLKYGEDFKLEPAKSE

SEQ ID NO: 400191 - protein, 341 aa, unidentified
MDIFAGLDVGGKRTAMCVVDAAGKIVWRGIVDTHPEMLAAALKRFESKLAKVGLESGPFTPHLFRSLSAMGYPMVCMDARRAADAIKSRRIKSDKADAFVLAEMLRTGWFSPVHVKSIDSHKIKTLLGARDQLVKVKRSLGNQVRGLLRPFGIRLPSRVGAKKFAEAAYQATRNDPLMYAGIAALLEALASIDAQVSKLDDGLKELARRNEVAWRLMSVPGVGPVTALAFIAAIENVERFARTRDIGAYLGLTGKRYQSADTDVKMGISKQGDAMARHYLDEAANVLLTTVKKRFALRGWGLKLMRKLGPKRARVAVARKLAVLLGRMWKDGAHFDAVVAA

SEQ ID NO: 400192 - protein, 436 aa, unidentified
MDTDYANRLSWFRQFKENINASANTLIVGIDIGKDTHHAFLGTPAGRTIHRRLIFENSIYGFDRLLFLIKSQISDKQLTEVVIGVEPTSVYHKPLAEYLIGLGYGVVYVTNAAIKRNRAILDGRWDKNDTKDSANVADLVSRGRCHFYDLPDINLRDIRNLLSLRKRLKKQEHRLMTRIRNNLVAQYFPEFDRSWYRCRQENLAIVRFCLSPQKIAGLSFDDFCRMVIRRRRGIRQYDRLRHIHALAPESIGCQAGSSVAFEAQLLVDNLDRAREQIAEVEAQLDDICGSYKEYELLQTIPGFGAYVSAVVLGAIGYAQRFENAKQLLRLAGLDLNAIRSGKRSQSAVPVISKAGKAELRYALYQAAKVATSLTAEFKAYFKRILKGREKEKGIKTKMRVKVSAKMLVIAWTLMKTQQPYKAGLLLIDEPVQRRGR

SEQ ID NO: 400193 - protein, 335 aa, unidentified
MHYLGIDVHKDESHVAVLDDDGEVTEEIRVENANLDDVAQQYAGSQAAIEATSNYYTIYDTLDEHLDVVVADPQQTKAIGIAEVKNDRLDAKLLAQLRRADMIAKSYVPSEELRERRALVRGRKQLVEKRTDFKNEVHALLDKHGISYDWDPFSVEGRDRLAGEAVSLGVVGDALMESFLSVIDELTAQIEQLEDLIEETAASLEETQLLMTIPGVSFYSSLLITAEIGEIDRFDRAEEVVSYAGLDPVVRESGDSRTEGGISKRGSSDLRWILVQCVQTAVHRCDDPYLGRFYARLKRRKNHQIAIVATARKLLVSIFHMLKRKEVYDPPGVSS

SEQ ID NO: 400194 - protein, 349 aa, unidentified
MLADEVDYVVGVDTHRDQHVLAVVAAPTGAVVGQRSVTASGRGYAQALRFANQYAAGRRVWAVEGAGHYGAGLARYLSGRGETVIEASRTPPGERRLRGKDDQLDATRAARASLASDGLALPRAGQRREALRLLLLTRRSAVDVRRQALLQLRSVIVTAPDQLRAQLRGLPRRRLITRCSHLRATTTAPPDELATRHVLRSLARRIETATNEAAELETEILSHVRALTPQLLDEPGVGPIVAAQLIVAWSHHGRLRSEAAFARLAGTAPIPASSGQTTRHRLSRGGDRQLNRALHTVILHRRQHDQATKDYIARRVAEGKPTRDAVRLLKRYLARDLYRVMQNTTPLTA

SEQ ID NO: 400195 - protein, 344 aa, unidentified
MIKTPIAVLGIDLGKNSCSLAGLDATGAVIMRRKLTREGLIAFAAELPRCVVAMEACCGAHFLGRTFEAQGHEVRLMSPEYVQPYVKAQKTDDRDAEAIAEAATRPTMRFVSLKSEAQLDLQVLHRLRERLVLARTALVNQLRAVLLERGVIMPKGRLLLMRRLDEIGLDGLAVGARTKALLGDLLDECVDLDRRIRAYDEEFAAVARDDAQARRLSSIPGVGVINATALLAAVGDASAFARGRDLASWLGLTPRQHSTGGKTKMLGISKRGNRYLRKQLIHGARAAMPHLAAKSTRMGAWLRGLLERAHPNVVVVALAAKLARIVWAVLRHQSNFDPGAVVAA

SEQ ID NO: 400196 - protein, 411 aa, unidentified
MDGLSPLHKVVAGIDVHRMLHVITVLVENEDGTIAKHQQSFGGFKRDMRAMVLWLLELGVELVVMESTGIYWKSAYSHLERAGIVARVVNAHFIKHVPGRKTDMCDSEWLAVLARFGLVRGSFIAPKDLRELRLVSRYRRKLSAMLASETNRLHKTLDDAGIKLGAVVSDIKGVSAQEMVAGLIAGKTINDLLEMARGSLKNKRDDLAASLEGELSPRHLFILAGLHEHVTQLKEKLAKIDAYLIAAMRPYQWAFNLLQTIPGIDAIASAMILIEIGDDMSQFGDADRLASWAALCPGNNESAGKRKSGKTRKGNAIVRYILCECANAARNTKSSLAAKYRSLMARKSHKKAIVAIAHKLIRIIYLMLSRCEPYRDPGVDYEAMSAQKNAPRWIKALKKIGKLPITKPALA

SEQ ID NO: 400197 - protein, 390 aa, unidentified
MNLKYAVGLDVSSKKIDACMSIIDEKQRVVVKSSTQITNTRKGFENLAQWIIKHKKEDIPVVICMEATGIYHENCAYYLFEKGFDTSIILPNKAKKYLEAIGLKSKNDSIDAKGLSRMGAEQFLERWQPMGTFFYELRLLTRQYQNITELKTVIKNQLDALSFAMHKLDSVTDQLKQTIQLFESQLKELDKAILQHIKSNQEVAERVKNICTMKGLGVLSVATVLAETNGFNLFKNYKQVVSYAGYDVVEAQSGTRVGKTKISKKGNSRIRRMLHMPSLVVIQCEVKQFKDLFDRTYKKHGIKMKSYVAVQKKILTMIYYLWNKNEPYDDNYKINIQEEEQKLSSRACGFVEDKIEKNSPKQVEATQGKHPVNNRKKLPLGVTKLKKITT

SEQ ID NO: 400198 - protein, 368 aa, unidentified
MNIAIGMDVHKRTCSAYFVYAGKGEESDRHRKILNSLNNEFDSFPTSSDDLTRLAASVYGHECHVLMENSTAAHDVYWTLRNMGLGVTVAQAGDLHRITKSVKKTDRNDSIELAKYMRRRLHGEDEFAECLIPSPEWMIRREMCRGIATEKEYLTETKKRIRAHLLLHGIHLKKEYSNITCRDALAQLNLKNPYLTMQTRFAEDAIKRVNMGIRTIEHMFSDDPLFSLIYSVTGCGMISAAYLTSLIIDIGRFPDSRKFTASFGIVPKKRDSADHNPNCATTHRGDDLARRMLMHCTLAHVRFEPDSVVAKMYHRLVKNGKAKREALVAASRKLLTVIYSVVKSGTPYTSDGRKLTLARKTEEDISDI

SEQ ID NO: 400199 - protein, 320 aa, unidentified
MCILYENGSKIESVFGVLTPELDKLRDLLVSHHVCEVALESTSIYWIPIWNILSVDFSLKLVNPYFIKQLPGRKSDVKDAEWIATVLQKGLIRGSYVPDRMIQCLRQYERRNHELSKNIVHAEQRMDMILQRCNIRISNYVSCISCKGYQKVVNAIISGESNPKVLVTLIHKRTLNKHGRQVVEDSLNGFVSDTDRDILRQYRDERMQMEQHKSENKAKMQAICEAHYCEELELLQTLPGIKEESAANIIAEIGVDMKMFLTASAIVGWAGLKPRNDQSAGKIKSRKITHGNKYLRKILVEAAWSAARTKDSRFMKTYQR

SEQ ID NO: 400200 - protein, 425 aa, unidentified
MKKIDYLSTLFVGIDIESRINVVSALDFHQDYFIKMQPVPNSLDGAQLLESMIVDVLANNHQFKFLIIAMESTSFYGVHIANYLSASDKLAPFSVHVYCLNPKEVKNYKKSFNDLGKNDGIDSFVIADYARVGRISIKPWRGSQYLALQRLSRHRLHITECIAREKTYMLNNIFLKFSEYALLHKDEHPFSNKYSATAEAILTEFTTNEDLVNSSVEQLVAFVNSKSRGRIVDPDETAKLLQAAARNSYRLDKCLYEPLTISIASSFNCISSFEKELNAIDKAILQTVQGLNPNEYTVLNSIPGIGKVYSAGILAELGSIKAFQNSNALAKYCGIVWNDNQSGEFEAEDKRMSKSGNRYLRYYIIEATGSVIRNCPEYKSFYNKKYVETRNHQHKRALALTSRKFLRMLFGLLDKNQLYSPEKSR

SEQ ID NO: 400201 - protein, 389 aa, unidentified
MKIFVGIDIAKLNHFAAAISSDGEILIEPFKFTNDADGFQLLVSKLESFDKNSLIIGLESTAHYGDNLVRYLVTELYQVCVLNPIKTCQMRKNNVRKTKTDKVDTYVIAKTLMMQDNLRFVSFFDLDMMDLKALGRFRQKTIKQRTRLKIQLTTYVDQVFPEIQYFFKSGLHQHAVYALLKEAPSPKEIASMHMTHLANLLKVNSHGHFTKEQAKELRVLAQKSVGANDSAISIQITQTIQQIELLDSQLEKIEAEMTDIMKFNDSVIMTIPGIGYINGGMILGEIGDIHRFSNPNKLLAFAGLDPSVYQSGNFQAKTTRMSKRGSRVLRYALVNAAWNVVRNNATFKAYYDAKRAEGRSHYNALGHCSGKLVRVIWKMLTDNVEFNLK

SEQ ID NO: 400202 - protein, 412 aa, unidentified
MDRFIERCAGLDVHKASVKACVRIPDGHGGRHSETRTFRTTTAGLVLLRDWLTSHQIQVVGMESTGVFWKPVYYLLEDDVECWLLNAQHLKNVPGRKTDVADAAWIAQLVEHGLVRPSFVPPRPIRELRELTRYRKALIYERTRETQRLHKVLEDAGIKLGCVASDVLGVSGRAMLEALVGGTTDPEVLAELARGQLRKKLPALREALQGRVARHHRLLVAELLAHLDYLEEAIGRLSGEVARVIAPFSPLLELLMTIPGVDRRTAEVILAEIGTDMARFPTAGHLASWAGLCPGNNESAGKHFSGKTRKGSRWLRTTLSQAANAAARSRGTYLAAHYARIKGRRGHKKAIVAVAHSILVIAWHLLTRNQPYTDLGADYFLERQTSEAYKNRLVRQLERMGHKVTLEPAQVA

SEQ ID NO: 400203 - protein, 409 aa, unidentified
MYFVGIDIAKKTHQAAIICSDGKLIGKPFKFSNTVDGFNLFLEKLTAVNTDLSQFEIGMEATGHYWLNLYTWLSDKGFRLHVINPLQSDALRNLYIRKTKTDSVDAKIIADVIRIGQYSETQLADENIIALRDLNRQRFYLVDMAADLKRKIIAMMDRIFPEYQDFFSDMFGKTSVQIMKEYTSPEQILQIPTERLTQLLKKASRGRFTETKAKELKALASNSFAALLSSEMTTLLIRQMLEQLDLLEKQISDIEHIIAAQFAQFNTKLTTIPGIGATLGATIFSEIGDINRFDKPKQLIAYAGMDPSVKQSGNFVGTQSHMSKRGSPYLRRALWLAAVVAVNHDDLFKYLFQQKMNAGKTYAQAMGYICHKLLNTVFAILKTGEEYKPVYPPQIDVSKFADQPINSQL

SEQ ID NO: 400204 - protein, 343 aa, unidentified
MTCFVGLDVSQKMTALCVVDNAGRRLWRGQCPTVPEEISVLLRRHAGDDARIGIETGAMTPWLVHELRNLGLEVVCLDARHARAALEMQINKTDQNDAEGLAQIVRTGWYRSVHVKSFDSHRARALLGARTQLIGMTTRLSNHNRGVLKTFGLLPGAMRGLPFDRKVEALLVGRSDIALIVRPMIVAWRQLRKQITAFDKVIRALVRSNSACRLLMSVPGIGVLSSLAYVSTVEDPGRFSRSRSVGAHLGLTPRQYQSGEVDRSGRISRCGDTLARTLLYEAAVVILARVKKASSLKEWARAIAKRSGNGKARVALARKLSVILHSVWRSGKPFRWSEPANAA

SEQ ID NO: 400205 - protein, 355 aa, unidentified
MTSTKYIGLDVHKESISIAVLNFSGKVVMECVIETKASTILQFIHGLGGDVHLTFEEGTWAGWLYDLLKPHVTELVVCNPRKNALLKEGSKSDRIDAHKLAELLYMSKLSSVYHGEHGLRMLKELSRSYLTITKDLGRVMNRLKALYRGWAIPCAGTQVYAPHYRSEWLAKIHEAGVRRRAELYYQQLDALRLVRQQARKELLAEARKHRATKLLRQIPGIGPLRAAHLVALMQTPHRFRTKRQLWTYSGLGLETHDSAQYRVVEGQLQRSKKSVTLRGLNDNHNHDLKDIFKGAAMRASTAAGPLRDFYEALLAKGRKPTMARLTLARKIAAITLIVWKKEVRFDANYLNQQAA

SEQ ID NO: 400206 - protein, 342 aa, unidentified
MTNFNTKYQSVCGIDIAKNVIQIYQVNQDGECKNFQVKRKEFLQLFENREPSLIGMEACGGSQYWARELQKLGHTVNLMAPSAVKHYVSGFKGDRKEAIGIFNAMLAGVRKVAVKTEAVTDLATLLGIRARRIRARTAKVNMVRGYLMEYGIVMARGLRQFKNSIADSLLQLERAQASNMVKEEFKFLVDEVDKETEAILRLDREINSLAKQCKNFDHFLTAPGVGLITAATMCVKLADPQVFKNGRQFAAYIGLVPQHYGSGGKNVNTTIPIKCNKELRGLLVQCAQSIRRTKNKSSWVTQIEDRKPNSVATIAVANRLARRLWAIASKGEDWKRMDINFG

SEQ ID NO: 400207 - protein, 339 aa, unidentified
MSIVMGLDQHRGQITGEWIDADTGELQRTRVVPADRAAVRKFLSRFRGEELEVALEATTGWRFVVEELRRVGAVVHLAEPAETAGLRGPKKRAKGDRADARHLRELLMIKRLPESWIPPDHILDLRARVRLRHTLSEQRSEWQQRIQATLYHHGCPQRRQLMVGDGREWLAAQPLPTAAREQVTVALAMIDSLEAQIAPLDKELRAYARRQAGCKALMAHYGIGELTAVTILAELGDCTRFSSSRQAVRYAGLDITVYQSDQRRAPGHISRQGPPALRWALYEAAQVARRGERSPDREYYLAAKERIGGNRACLSVARKLLKRSYHTLRELGEEALQPA

SEQ ID NO: 400208 - protein, 377 aa, unidentified
MQAAQARGYEAGTVLYMAMELSNRKWKLGFSNGSRTRRKSVEARNCALFLEEVLQAKRKLGLPVAAQVVCCYEAGRDGHWIHRWLSSTGFEVLEIDSSSIEQARGRKHVKTDRVDVEKLLDLLLRYCSGFRRAFRVVRVPPEAAEAAQRLHREDEYLMGQRSRISNRIKGLLVTQGISEVSLKGDFAAWLEDVRCWHGEGLSAELKAELIHLHAQYRLFEAQLAELARAYAAELESETAVGGKRRRLQALKSVGPKISRVVSAEVFAWRTFANRKEVGGMSGLTPTPSDSGDERREQGISKSGNRRVRRVMIELAWLWLKWQPDTALSHWYRRRFAHGSSRMRRIGIVALARKLLIAVWRYVEFGELPQGAVLKAQV

SEQ ID NO: 400209 - protein, 325 aa, unidentified
MQGKVMPNEAEPAVYAGADVCKAWLDVYLHPVGRAFRVPNSEAGLKAMKRELQAHSMTLVVIEATGKLHRLAHRSLHAGGYRVAVVNPYRSRKFADALGQLAKTDTIDARVLALLGESLNPKARPPVPALVAEVQEIVLARQAATAEAIALGNRRTGIESRFLAVEANRRLKALEGHIKRLEGEIKRLIRSDPDLARRFEVLTSIPGIGPIVAATLIACLAEIGDTSSKEIAALAGLAPFNWDSGDLRGQRHIKGGRAHVRTPLYFAAIAAVRIDPGFKRFAERLKAAGKPAKLILTAVMRKILVLANTLISQNRTWLPNPPQYA

SEQ ID NO: 400210 - protein, 338 aa, unidentified
MTYIGFDHHKKWTQAAALDDQGKIIREMRVLNDSSSLKGFLKGLPKPWKGVVEAGPTWGWIYDTLSDLGVKMVVANPSAVRAIAEAKIKTDKIDARMLASLLRVGLIPEVYVPTEEVRAQKMLWRERIWLVRMHVRLKNRIHRLLNHYHVELPEFSDLFGAAGRRFLEGLELPDPGNRILKAQLKLLQSYRSQIDEVQRWAVKATQGHPHRAYLESLPGFGKVFAPIVALEIDDPKRFANPGKLASYCGLVPSLYSSGGKSWQGGIGKQGNHWLKWAFIEAAWAAIRSSAYFRLVYQRLRQRKTAQVAIIACARRLCEIAYHLLKERRCYEERPFRYA

SEQ ID NO: 400211 - protein, 321 aa, unidentified
MNKYKEIYGIDISKDVFDVYGSKSGHNQFKNDAKGFVSFMKHLPKDVLVVMEATGYYHYRLAQFLYKSGVQVSVVNPLSVKRFIQMKLAKVKTDKSDAKAISEYGEMNDVPLYTALTDVQSECLQLFRLLDSYIKHRTATKNKLKGEEVLGIPSMFVYRSLKRNLKHLNKEVLELESRLLELVKQDQQHQLTLLKSIPGMGVKTALFLIVVTDGFKKFETASQLCSYVGITPTIRESGSSVRGRSRISKVGNKKLRNLLFLCAFSACKHNKACREIYERLVAKGKSKKLALIAVANKLLKQAFAIAKSGRPYDENFVSRLA

SEQ ID NO: 400212 - protein, 375 aa, unidentified
MGYHSEAFIGIDTAKLRNAVAIAESGRKGEVRYLGEVDTSEAATRKLVAGLAAKYRKLTFCYEAGPTGYGLQRLIESLGHTCLVVAPSLVPKKSGDRVKTNRRDAEGLARLLRAGELTAVWIPDARHEAMRELTRARDAARQDLTRKRQQVSSMLLRLGKIYSGIKTWNARHRSWLANLKLDHREQRFALEEMLQAERQASERIGRLEQAIREAVPNWSLSAIVPALMAMRGIDLVAAVTILAEIGDLSRFESPRQLMAYLGLVPSERSTGDSVKRGGITKAGNGRARRLLVEAAWAYRHPPRVGYQKQTLVAAAPRAAREIAWKAQVRLCKRFRTLTRNGKKSTVVATAIARELAAFIWAISREVSGARPACAA

SEQ ID NO: 400213 - protein, 349 aa, unidentified
MGMVCGLDLHRGQVTFDALEVESGEVWRGRLRQPDRARLRRWLTDELGPRAKDGLVAVAVEGCTGWRYVVEEITAAGFEAHVAEPADTQAARGRKKHAKTDRSDAKLLRELLQSGDLPESWIPPEAVLEWRERVRLYKTLLDQRRMWIQRIHAELFQHGVSVPEAQIDSGQTRDWLSGDTVQMTAAARQRIAVGYHLIDATEAVRLPLRADLDRFGRRQPACKALAAAHYGIGPLTAVVVWAELGDCRRFSRSMQVVRHTGLDVTVDASDRHRGRGHLSRQGPETLRWALFEAGMAAARATSPDRAYYQAVKQAHDGKLAAISMARKLARRCYHTLREMDPEVVYAMTP

SEQ ID NO: 400214 - protein, 376 aa, unidentified
MEHDSTVYVGLDVHKESITAAYAVGIGEVELLGKIGTSKTDIDRLCQRMQSKAKHVRIVYEAGPCGYGLYRQLVQKGFDCMVCAPSLIPKKPGERVKTDRRDAVKLVRSLRAGDLSPVYVPGVEDEAFRDLARAWAAAKTDLKHARQRLKSFLLSHGVRYTGSANWGPAHRRWISTFAFPNHWQQLAFDECRRTIEDRLAQCDRLEAALREAVVNWRFYPAVLGLQAMRGIQFTTAVGMLAELGDLSRFEHPRQLMAWLGVTPSEHSSGDRRRQGSITKNGNSYARKLLVEAAWSYRYPARVSPDIQRRHEGIPKPIIDRAWDAQLRLCRRYRKLAARGKNVNTGVVAVARELSAFIWDISRLAMSLAIPKDARPG

SEQ ID NO: 400215 - protein, 405 aa, unidentified
MRFTGIDIGAERHMVAIVDESGAVLLRATSVTEDAPGYRRLLELLGDAGDCLVAMEATGHYWRNLYAALATAGFTVALLNPLRTSRFAEEELQRTKTDAIDALGIARFAAQKRPTATRLPEAALEELRELVRLKEQIVQQFGDRVRQLHRAVDLGFPEFTRHVRTLQSELATAILSRYPTAAALRTASVSKLARLCYDGSHHVSEALARALIEGAKQSVGAHHGEPYQLEVRYACEDIDLLRRRLRALEGDIERRLGQHEVGKLLTTINGVGPQTAACIIAEVGDPLRFHSARALASYVGVIPRLHQSGKRKFSASAKVPLGNARLRRALWMPALTAIHHNPWLRAYYQRLRAAGKRPKVALVAVIRKLLAAVYSVAKHRRPFVLPPIFTPAAGGAVVPAPQYSY

SEQ ID NO: 400216 - protein, 343 aa, unidentified
MDHYAGIDVSLECSSVCVADANGKILREDKVASEPEALIGWFRSLGLSLARIGLEAGPLSQWLYAAMREAGLAVELLETRHARNAFKTMPVKTDRKDARGLAQLIRLGWFRPVHCKSMGAQETRALLTARKLVQSKLRDIEASLRGTLRGFGLKVGKTTPKRFAGRVKELVVGHASLEGIAEALLAVHAVLLREFNGFERRVRTMARHDAKAQLLMSTPGVGAIVGLTYAYAIDDPARFKSSKQVGAHFGMTPKKYQSGETDYTGRISKNGDKGVRTALFEAAHVILTKPVKGSALKSWAMRLAKRAGMKKAKVALARKLAVIMHRMLVDGTPFNFAAAAAAT

SEQ ID NO: 400217 - protein, 345 aa, unidentified
MNALNKTKKYVYFIGIDISKETLDIAVMAHGTILLHDTISNDIQSIKDHLTHLKTLLKFTTRNVVVGMENTGIYTNHLIKKLQALKIDTVVDSPLHIKNSMGTVRGKTDKKDAERIALYLYKSRDVLRLRIPRRPILEQLAGLSTLRKRLQSLHIAMRVPLKEHADFVKKGLIEERNRLCYRTIDAISLDIKDVEDSIEATWKSDEETNRLMTLMQSVPCVGPVVALEILICTNEFKNVRTIKEFASYAGIAPFPYKSGTTVSKKTRVSKIANKKMKALLHTSAVLAGRFVPDIKAYYHRKTDIEGKHKMSVLNAIRFKMASRVYACVKNNRLYEKNHEYRPSGD

SEQ ID NO: 400218 - protein, 353 aa, unidentified
MKRTTKYVALDVHQATTVASVREERGRVIARSVLPTEGPVLEEFFRGMRGTVHVAFEEGTQAQWLHDLVTPLVHRVVVCDRRGEPRQGNKGDQLDADRLSELLRCGGLRAVYHGGSRHADLKELTRAYRNLVEDSTRVMLRLKALFRARGIRTPGTAVYQARHRAQWQAQLPDRGVRFRAETLYAELDVLRTLRPKAKAAMLAEARRNPAWPVLRAIPFLGPVRVALLLATMQTPWRFRTKRHLWAYAGLAVRTWSSADHTVVAGHLVRRRRAPMTRGLNRNHNRVLKDVFKGAATAATGRPGPLHDFYAALVARGMRAELARVTLTRKLAALTLRLWKTGAPYDPMQLTRQA

SEQ ID NO: 400219 - protein, 372 aa, unidentified
MVVVVGIDVHKGTHCAVALDQVGRPIGAPRTVRATDAGHRQLLRWAQSLTEQLPPVEVVEVVEVVESVEVVFAVEDCRHVSGRLERALLDAGQVVLRVPPKMMAQARSSARTRGKSDPIDAQAIAMVALRTPDLPRAEHTGVSRDLKLLVDQRERLVRHRTGLQNLLRWHLHELDPDLDPPSRALDRIVQLDRVQDRLTAMPEHGPSSHAMLRRLALETLADVRALTIRVNALEREITALVCTVAPRLLALPGCGALTAAKIVGETANPARFRSEARFAMHAGVAPIPASSGKTNRHRLARGGNRQLNAALHRIAVTQARLNGPGRDYYQRRRQLGNTKMHALRALKRRLARIVYGLLNPTTTAAAAPPQAA

SEQ ID NO: 400220 - protein, 369 aa, unidentified
MSECITYIGLGVHKETIAVALAEGSSRDQVCEHGQISNTPAALTRLSKKLSRSGSLLQFCYEAGPCGYGIQRHLTAAGHDCVVVAPSLIPRKPGDRIKTDRRDAINLAKLHRAGALTAVWIPDPAHEAIRDLVRARLAAVRSLRQARQQLSGFLLRHGRHYSRSAWTLMHRRWLAGLRFEQPAHHIVLEDCIATIEAATARRDRLTAQIELMLADWALAPVVHALQSLRGLALVAAATVIAELGDITRFTNPRQLMAYLGLVPSEHSSGGTRRQGGVTKAGNATARRMLVEAAWSYRFPARISRDQLLRQETLPKPIRDTAWKAQVRLCGRYRKLSRAGKPATTVTTAIARELAGFVWAIACQMPRPTN

SEQ ID NO: 400221 - protein, 387 aa, unidentified
MSRLDDLSSCLVPFRQDTTLVVVIELSLASWLVAGSVPGVERQPLKKMQPDETALLRLLHRWRDEATRAGSTIERIVVAYESGRDGFWLARWLAKQGIEVHVIHSSSVAVSREHKRAKTDRLDTAMLIRVFLGWLRGERGHCKMVVVPTLAEEDAKRPSRQLEKLTSECTRIVNRLKAALARLGIRGFNPKLRKAAARLEALRTPEGEPIPQNLLEEMQRDLAHLAFLREQRKTVEQLRLERLQQAPKTGTNAMVLMLASIIGIGIDTADLLVQELLSRNMRDRRAVGRSAGLTGSPDESGSKRREKGLSKCGNARVRRTMIQLAWRWQQFQPDSVLAKWYKSRVEGAKGVVKLKMIVALARKLLIALWRMVNTGEVPDGVVLRQPA

SEQ ID NO: 400222 - protein, 329 aa, unidentified
MSAFVCGLDVHRDSTYATILDCNDKIVSQGRMGNDKVLPYLSNYKIDKIGVEASNQITPLYRLLSKKGYTVSVSHPKKTRYIAEAKIKSDRIDSKAIAELARLDALPLAYMPDQETAMLREKIRRRAFLVRERVRLRAKIRSILTYEGIKPPSEHGLFTEKGVEWLHRLNLEPVESYLQIIKPLDDEIKQLSKHLKELAKDDGDVKLLMTVPGVGYYTALLVKSETGHINRFSDGEKLCSYSGLVPSTYASGGVVTHGNITKEGSRWLRWVMVEAAMIHVHKYDTSITRAYHRIAQRRGRQVATVAAARRLLMCCYSVLKNKRPYYDQA

SEQ ID NO: 400223 - protein, 429 aa, unidentified
MTRISVGVDVSKNRSTVCIMDQDGKVIMRPFLVWHSTEELDFLADTLKRLNGEVRVIMESTSIYQYPIALHLKEKGIFISIVNAYKVKKFANTDFRGGKTDKKDSRTIASYGISYWDKLVEWQIPKDTYFNLDLLNRTYMNAKKHRQIILQELQHYIDCAMPGMDKELHSLNLNTKKDFMLDFVEKFWHRDKIVNMTEAEFTEVFTAWAKEKGYRLGKGKAAKIYAIAKSCIPYYPANPTVKTILQCIVDKLSGVNRTLVTIVTQMIEEAKKLPEYQIVREMPGVGDPLAARFFGSAGDIRRFKNSKALVAYAGIDSPPDESGDFSSTHRHITKKGSKVFRDTGYEIMMALRAQKRTWEKVRKNPDVYDYMLRKEAEGKPPKVAKIAALNKFLRIIYARIKELYDNMALAERAKTKTRSKTRAKTKVTA

SEQ ID NO: 400224 - protein, 446 aa, unidentified
MSNGSGLSRGDRNRNARLARLRELVPLSNAIVGIDLADDTQAAVVTDHDSKVIARRRVNARAWELGEVLDWAVTRAAGAGFASVTVACEPTGHRWRVLDQLAAGQGLPVVCVQPLLVYRAREGEDLTRDKSDPKDAVLIARLASELRCYEPERASAVWARLRHLGARRNQLTTAATAAVNQIRDLLDCAWPAALAASPSPFRSVSWCASLAVVLDRCAGDLARVRRLGLERFTAAVRRELPRWGGIRPCLRIIRAVFAALADPAGVTAHRPGALERAHLALGDWRDIRSRLAETEARMCAVLEELGLAGLVTTIAGLTVIGAAAILAETGDPARFATGRALVKHAGLCPRENASGAAQGKTSISGRGRPGLRLAAWRAVWAAMPNNPVMAARFGYLTTRQDNRLARQQARTACAAALLRWIHVVITRNVAWDPAIAAGTAPAHQAG

SEQ ID NO: 400225 - protein, 348 aa, unidentified
MNLKRIGLDTSKAVFTLHGVDQDEKAVLRRNMRRAEMEAFFAKLPPTHVALEACGGSHHWGRRLAAMGHTVQLIPPQYVKPFVRRGKNDRNDAEAISEAASRPDMPGVPVRSAEQQAEAIVLSARELLVRQRTQLVNAVRGHAAEFGIIAAKNINQLPALLEVVAAEAAVPDAAKEMLAFLGGQVAQLDERIGELECRMKRQHKANPVSQMLAEVPGIGPIGALSLALTIDPGRFTSGRHFAAWLGLVPKEHSTGGRQRLGGISRAGNERLRQLLVLGATAVIQYAKPGSKSASAWLLALLERKPRKLAAVALANKMARIAWAMMATGEAYRGSKKAAAPAAGAAAAA

SEQ ID NO: 400226 - protein, 356 aa, unidentified
MGNSTKLDFTGQPIYIGLDVHKKSWSVSIHSALCEHKTFTQPPDGDILVNYLRRNFPGASYHAVYEAGYSGFWVHDQLTEKGVACTVANPADVPTKDKERRTKRDRIDCRKLARSLRAGEIEGIYVPCRKKLEDRSLVRTRQSMVRKQTRCKNQIKSILFFYGIPLPEDWAERRWSGPFVKWLGNLSMERASGEVALRIHLEELKHLRQIIARLDREIRLLAQTGEYVVQVRLLRTIPGISTLTAMILLTEFQEITRFRSLDELASYVGLIPDTHSSGETEHTGDLTKRRHAQLRASLVEAAWVAVRKDPTLMMAFQESCQRMRKTRAIVKIARKLLNRVRYVLKNQTPYRIGVVQ

SEQ ID NO: 400227 - protein, 461 aa, unidentified
MSSIAHREFIHLGMDVSKDSIAVAVLAPDRDAAEVDRILHDADSVRRLVKRIGRPKGIWACYEAGPTGYDLRRLLASMGVRCDVVAPSLIPKGSGDRVKTDRSDARRLAGLHRAGQLTPIAIPTPAQEGVRDLCRTRGDMVQDLTRARNRLSGFLLRHSVVWRGGSPWTERHRRWLATLSFDDPAIATTYSHYLATVKLRDTALESIEADLLPWCEKDPFGDQVQRLAAYRGVTRIGALCLAAEVFDWRRFPKARPFMSFTGLVPGENSTGLTQRRGSITRAGNAHLRGQLCEAAWAYQHSPNVGAGIRERQVGVPPETMGRAGPSVQAVPTIGRPQERALGRGCRHRPRARRVPLGRDGGRGLNTMIFPSLSARSAPRLSEPSTTRRSTAAADPILAGVVPTIALRDDVTGAPIQRQPPANGSTAISTRVHHRGGSPIHCAPARRRWLARPPPPSARGDE

SEQ ID NO: 400228 - protein, 338 aa, unidentified
MDIIKQVVGIDVSMDNLTARFGTIDSKQNQDIKAAKEFANNHIGHKELIKWADKNKLNFEVPIWFVMEATGVYYENLAFHLAENKQNIAVILPNKIKNFSRTLDSKSKTDSIDSATITQFGLEKQLKQWQTSPEVIRQLKTLCREYHTLKELSVQVSNQVHAKQNSYKPEQNTLRRLSAKLKLFSKQQIQIIGEIHKLIDQQPEIKERIDKIDKIEGVGFITIVSIIAETNGFAIIDNQKQLTSYAGLDVVHNESGLKKHKTSISKKGNKHLRRSLYMPALTACRYNQKLKELYIRLTIKKNNKKIALIAVARKLLLLIYTIWKKNVDYIPDYQATKL

SEQ ID NO: 400229 - protein, 402 aa, unidentified
MTGRPQLWVGIDVGKSSHHACATDTDGKTVFSEKIANDQAAIEALITRARQAGDNICWAIDLTSSAAALLISILTIAEQHVVYVPGRVVHRMTGAFRGEAKSDAKDARVIAETARMRDDLTVLGADDSLITELARLTSHRADLTTDWTRGLNRLRDLLLSIFPGLEAAFDYTNRSPLILLTGYQTPAAIRDAGVEDLTSYLREHRAWPSKVASIAAAAVSAARAQTVQLPGEAVTAELIAAQAGRMLDLQRQIQQVDKIMHARFRTHSQAEIIESLPGMGPTLGAEFLVAVGGSVDAFVTPGRLASYAGLVPVSRDSGRIQGNLRRPKRYNRRLRRVFYMAALCSLKAGGASRAFYDRKRDERQVHKQAVLALARRLVDVLWALLRDGRMFTADPPLAASAA

SEQ ID NO: 400230 - protein, 450 aa, unidentified
MKRKRSKPKIDRTMPMVHPNAAAIDVGATMHMAAVRADRTPEPVRSFGTFTTDLRRLVDWLKECGVETVVMESTSVYWIPIFELLDARGFNVFLVNARDAKHVPGRKTDVSDAQWLQRLHSYGLLRASFRPKGQIAELRAYMRQRERLLEYAASHIQHMQKALTEMNLQLHHVVADITGATGLRIIRAILAGERDANVLAGLRDYRCHASAETIEKALTGSYRAEHLFALEQALALYDAYHEKVSACDVRIEAVMKELSIGRGHRADSLPSSRRRTNQANGLAFDVRSALFALLGKDITQIDGLGPYLSLKLIAECGDDLSAWPSAKHFASWLCLAPSNKISGGKVLSSRTRRSGSRAAALLRLAAVTVGRTDTALGAFYRRLSARIGKAKAVTATARKIAVLFYNAVRHGMEYVDPGASFYETRYRTRVIDNLHRRAKAFGFVLQPAVS

SEQ ID NO: 400231 - protein, 412 aa, unidentified
MKDVRSKFSILVGLDWANKKHDVCVQVDDNRSFDVISHTPESIDTWLNKLRKLEKGNIAIAVELTKGPIVYALQKYDFVTVFPIHGLTLARYRQAMFPSGAKDDPSDAELALDMMINYPNKVKPLKPSSDKTRTLATLVEQRRLLVDDKRRNTNRLINALKQYYPQPLEWFAHRDSELFCDFLIKWPSLASVKRARTSSIVSFFAARGGNAVSNTEKRVKAINEAVSLTDDQSVILPHKLFVTAVCKQILTIIMNVRIYDREIDELFNSMPDAEIFTSLPGTGPCLAPRLLAALGEDRNRFTSAQQIQNYAGLSPVTERSGQKSWVHWRWQCSRFIRQSFIEWSAKSIHQSYWAGLYYAQQKAKGKSHQMAVRALAFKWVRILYKCWETKTPYDESKYLNALKERNSPLLIA

SEQ ID NO: 400232 - protein, 379 aa, unidentified
MQPTQRDDRSGALDVSLELAGKAWKLAATDGKRAHPAVLVVDAAPGAQRLQGLLHRIQELRHRWRLARDCAVHVVYEAGQDGFWIARALEAHGIQVIVVDAASVPVARHRRRAKTDRLDALKLLEVLRAWLRGERGELRVVHVPSEAAEARRLLARERGLLLKEVGQHRDRARKLLLLHGCTEEIDDGFVERLMAGKVRRADGAALPEELWNWLLREAERLDLARQQLARLEKSLMHQLPEPVQRCVAQLAQLRGVGWVGAMRLVLELFWREFANRRQVGACVGLVPQPYDSGDSHVDQGISKQGNRRVRALLVEMAWFWVRYQPRSAIAQWFARRTAPANNKRGKRIAIVAAARRLAIALWRYLREGVIPAGAELKHT

SEQ ID NO: 400233 - protein, 334 aa, unidentified
MEKITTAGIDLAKRVFALHGVDGAGRVGLRKTVRREQLMQTVAALPPCLIGMEACSGAHEWARRFQELGHTVRLMAPVFVAPYRKSGKNDGNDAEAICEAVSRPNMRFVPVKSAEQQAILALHRVRQGWIEERTATINRIRALLTEFGVVLPNRAQHVRRGAMAAAEALPALARRALEDLRSHLGTLDERIGTYDRELEAQARASEAAQRLMQIRGIGPITAVAIVATVGNARDFESGRQFAAWLGLTPRQHSSGGKQRLGHISRRGDAYLRCLLVQGARSVLYTAMRHRDRLSRWVCTLRARRGDHKTLVAIAAKNARIAWALLSKNQTLQTV

SEQ ID NO: 400234 - protein, 405 aa, unidentified
MFEIEDVGVFLGLDVGKSAHHGHGLTPTGKKVFDKPLPNSEPKLRAVFDKLTAKFGAVLVIVDQPASIGALPLAVARDAGCRVAYLPGLAMRRIADLYPGEAKTDAKDAAVIADAARTMPHTLRSLELTDEITAELTVLTGFDQDLAAEATRTSNRIRGLLTQFHPSLERVLGPRLDHQAVTWLLERYGSPAALRKAGRSRLVELIRPKAPRMAARLIDEVFDALDEQTVVVPGTGTLDIVVPSLAASLTAVHTQRRAMEAQINALLEAHPLSQVLTSMPGVGVRTAAVLLTTVGDGTSFPTAAHLASYAGLAPTTKSSGTSIHGEHAPRGGNRQLKRAMFLSAFACMNADPASRTYYDRQRARGKTHTQALLRLARQRISVLFAMLRDGTFYESRTPKDIELAA

SEQ ID NO: 400235 - protein, 408 aa, unidentified
MKLFIGINVSSTDLETVMISSEDNGIVFQGKFANDITGASEIKDQILKLAQPARFDQIVIGMESTSIYSFHPAFFFKNDAELAKFNVQVVVINPRQTKRYHDIFEDNKNDHIDAFYIADYLRVGRYTIGIVRQENYSALQRLTRTRYELTQSLVRAKQHFLHNLYYKANNLAIGKQKTSVFGATMMDLLIEDMTIDEIVNTPTEALADYFSHKGRGRFADPQGLAKDIQKAVRSSYRLGKVMNDSVDTVLAVYAKEIKTFQKMIKEFDDAIAQIVDVIPEEQILQSIPGIGPVYAAGIIAEIGQIDRFEDETKLAKYAGLTWKQNQSGKFESTTTPLLRTGDSYLRYYLIEAANRVRREDSVFKEYYSRKYQEVQRTPTKRALVLTARKLIRVIFYLLKNHQIYKPKE

SEQ ID NO: 400236 - protein, 394 aa, unidentified
MAFKIFRKNCCGLDVHKTWIYACMGITDTNGRTEYKQARFSSFTKGLQELADWLAKYDCNDVCMESTGKFWIPVFNILEKTCWVTLAYPKYTKPQKGNKTDHKDAKWICDLYMCDMVNPSFIPPPDIRQLRDLMRYRSKLTNIMTSEKNRALNCLTVSYLKLDDVFSDVFGKSSRSVIRYILEHPGETFQVAPFIDRRCKHPVEEIQAVIDGAISHQQAVKLRECLQHLDELEVHKTNVEKEILCLVQQYPYQLELLQTVLGFSGNIMTAIALISEIGADMSVFPSAKHLVSWAGCCPRNDQSSKKVKSTRISRAGVYLKPLLVQVAIQPFTANADKLSAAGALEIRCQICDGRFLSMWAALFIFLGCPLSPCPKNLHVHNGRIVILASVAWIF

SEQ ID NO: 400237 - protein, 379 aa, unidentified
MRTVCGLDVHKDSIFVCILNENGILFQDKIGVLTPDLERLVDVLHEHNATEVCMESTSIYWMPVWRILEPYFSLKLVNPYFIKQLPGKKSDVKDAEWIATCLLKDLIRGSYVPEDRIQQLRQYDRRIFDLNKDIVYKLTKLDAALQRCNIRISNYVSTTDGKSYQKVVEKISEGTTDPKVLTGLIHGRTLNRVGKDIIAASLTGAITQTDIDVIRQIRDEVTLAQKHRKECLDKMEELCNKWFPEQMKNLQTVPGVSLRSATSVIAELGTDMSSFEDAAHLVSWSGLKPRNDESAGKIKSRKITHGNKFLRKTLIECTWAASKTRGCFYNKFSYHQTVVRRKNKMKVQVAIARKMLTAIWFILHDNVPYRDYTPDIAAE

SEQ ID NO: 400238 - protein, 320 aa, unidentified
MSATSVVVGIDVAKAHVDVAVLGAKFDAQRFDNNAEGHSALATALQPLGVALVAMEATGGYEAALACALQAAGLAVAVVNPRQARDFAKSMGRLAKTDTIDARMLAEFAAVLVRREDLASFIRPLADAQQQALAAMVTRRRQLLTMLLSERQRLQLAIPVVRPSIEAMIEAIRKQLDEVEAQMVTHVHEHYAALDKLLRSASGIGPVASATLIAELPELGRLNRRQIAALVGVAPIANDSGTSRGRRRIQGGRFEIRRVLYMAALTASRRNPAIKPFYERLIAVGKQPKVALVACMRKLLTTLNAMVRTNTPWDNSLHLA

SEQ ID NO: 400239 - protein, 412 aa, unidentified
MKDLLEISCGLDVHKEKIVACILTGPLGKPTHSEIREFTTLIPDMIALRDWIVSQNCHHVAMESTGIYWMPIYEILEDAFSGDITLLVVNARHMKNVPGKKTDMRDSEWISTLLRAGLLNGSFIPEKRIREFRDLNRYRKSVIHDITSQKNRIEKFLQSSGFRLSSFISDIFGASGRNIILHLMEHGQIDKAALDSCLKTKTRNRIDEILMSVNGTLSEHQKTFLKILMTHYDSLKEHLTEVETSLEEDMAPFTLQVEQLNSIYGISTTASCAIIAEIGIDMEPFKTAEHICSWAGLCPGNNESAGKRKSASVTKGNPYIKSMLCEIAWVIAGKRNTYLSAWYWRIKQKKGAKKAIVALARKLLVIIYTMLKQGTLFDESCFETRRKNCEQKQLSRYIRELEKHGYHVEAQS

SEQ ID NO: 400240 - protein, 344 aa, unidentified
MEHFGGLDVSVKETSICIVDDTGKIVKEVKVASEPAALLKVLGNPSYRFKRIGLEAGPLSQWLFSALAEAELPVICVETRHMQAVLKAQINKTDRNDARGIAQMIRVGLYRPVHVKTLRSQKLRMLLTHRKLLQSKAIAIENDLRGTLRNFGLKVGMVGKVRFEARIQQLVENFPDLSVLVEPLLIVRRVLREQIVILHRRLLAIVRDDEVCRRLMTTPGVGPVVALTYRATVDVPARFRKSKSVGAVFGLTCSRYQSGEIDWSGKISRCGDEMMRTMLYEAAQSMMHSKKWSWLKAWAMQIARRRGMKKAIVALARRLAVIMHRIWVDGTEFRWTREQAAAAA

SEQ ID NO: 400241 - protein, 410 aa, unidentified
MEAITECCCGLDVHQVTVVACLLTGRADERPRKQVRTFRTVTQDLLALREWLQQEGCTHVAMESTGVYWKPVYAILEDTVELVVGNARHIKSVPGRKTDVKDSEWIADLMRHGLIAKSFVPPKPIRVLRDLVRYRRKLVESCSTERNRLLKLLETCNIKLASFASNVFGVSGMAMLRALVTNASTPTEMAQLARGRLRDKLPALALALDGQLDDAQRFLLQMQLDRLDQVGEHLAALDRRIDQHLAPLRAAHERLKTVPGIDRIVAVRVIAEIGVDMAVFQSAAGLASWAGVCPGNHESAGKRHKGTARPGNVHLTTALVEAAQAAIRKKNSYLREKFHRLRVRRGYKRALMAIAHKLLVAVYHMLRTGTDFSELGADYLDRTDARRTTRKLVQRLERLGYDVQLTRNAA

SEQ ID NO: 400242 - protein, 312 aa, unidentified
MDATVIGIDVAKDRLDVCVRPSGESFVVARNGAGIEDLAERLKTLAPRIVAIEATGGFETVVAAGLAAAGVPLLIVNPAQVRAFAQALGRKAKTDPIDAAVIAHFIEATKAQPRPLPDETTRLLADLVTRRRQIIDMMIAEGQRDRRLANKRLKSSIARLRKALEKELAEIDHELDDHVRGSPAWAAKEELLASVPGVGPIIARTLIAELPELGSLDRRKIAALVGLAPWTRQSGQWRGKSFIGGGRKSVRTALFMAAMVAARHNPVLKTFRDKLVAAGKPKLVALIAVARKLLTILNALLRDNQRWQPKTT

SEQ ID NO: 400243 - protein, 428 aa, unidentified
MNKKNCTRLKEFRQLQKEVRGSKEHLIVGIDVAKESHKAFFGTATGKTLFRRLVFGNDRQGFERLLLQAEAMRVQHGLEKVVLGLEPTANYHKPLGEYLITGGHDVVLVSTKSVKRNRELLDGRWDKHDTKDSANVADLISQGKCLYYEYPELKLRQLRGLLSLKRRLKRQEHGLRVRIRNHLIAQYFPEFDRYFGRSESESLAIVRWCLDPSVISALAYDEFVRLVAPGTRALRQQERLRAIWQKASASIGCEGGEAVKFEAKIMVEGLRQIREALRATEAKITGICRGFPEYEYLLTIPGYGPDVSSKVLGAIGDPLRFTRGNQVLKMAGLDLVADRSGKRSDGVVPVISKNGKADLRYALYQAAMIASSRDREFIMWFTNRVRGRQREKGIKTRMRVKLSAKLLIIAWTVMKNKEPFNPDCLRIE

SEQ ID NO: 400244 - protein, 312 aa, unidentified
MAHLSHGGIDVASDGLDVMLLPQGQCFWVGNNAAGWAELVSRLRGLCIAAIGIEASGGYERGVTRALLAEGISVRQINPFKLRQFAKASGVLAKNDRLDARLIALFVATMPTRPAQRNQAAERMAEVVTARRQLSDEKVAAENASRLFEDVSLRRLYRRRITRIALDMALLDKRLAEMVSADPILAKRYRLLTSMPGVGPVLAFTLIALLPELGQMSRKQVAAIVGVAPYDFDSGKMKGMRCIWGGRAPVRRVLYMAALTACRYNPALKTFHERLAAAGKKAKVAIVAVMRKIITTLNAMIRDNVAWNVRSA

SEQ ID NO: 400245 - protein, 450 aa, unidentified
MKNNDERLLKKKRYSQGLPVLNIHAAGIDIGGSKHDVAISDGFEGHIVCEFGTYTQDLKGIVTWLLSHDITTAAIESTGVYWLNLYIMLEEAGIEPYLVNAKHVKNVTGRKKDDTDAIWLQKLHCCGLLQKSFQPNSYYRKLRTYVRQRKKLIRLSSDCVRRMQKAFELMNIKLHNVISDIIGKTGILIIEAIINGERNPEELLKFKDGRIKASDTDIKLSLEGIWKEEYLFMLGQAYEGYLFYQNQIKSCDCKIEGLLLSQAATILDGDISGLGGKKKKVYGSNQYYFDVQGLLKVIVGVNLCRVDSISEISALEFISETGIDMSKWKSHKQFAAWLNLAPNTKITGGKVVSSRMQKKKNHAGLALRMAASNLSKCKSPLGDYARKMKSRVGKKGAVIASAHKLSKIVYTMIRDQKEYDRATTLSDQVKWREKRIKNLEKQLEKLKKVA

SEQ ID NO: 400246 - protein, 337 aa, unidentified
MEQEVVTVGLDLAKNVFQVHAIAADGAVLIRRKLRRSEVVRFFAELSPCLIGMEACASAHHWARELIAIGHDVRLMPPAYVKPYVKRGKTDAADAEAICEAVTRPTMRFVAVKSVEQQAVLMLHKSRDLLVRQRTMLINALRGHLAGYGIVTGLGAGGVAASLKALHEEQDQFPAHARSALHGIAAQLRALASEIDRLEAQILDWHRNDETSRRLATIPGIGPITASAIAAAVPDASLFRSGRQFAAWLGLTPRANSSGGKERLGGITKQGDGYLRRLLVVGATAVMRMTRKNPARQPWMAGLLERKPTKIATVALANKTARIAWAVMTRKEVYAAA

SEQ ID NO: 400247 - protein, 338 aa, unidentified
MGEITTVGLDLAKNTFHVIGCDVHGKEVKRQLLRRAQVMAFFANLPPCLIGMEACASAHFWARGFRNLGHEVRLIAPQHVKAYVRGNKNDYNDARAIAEAVCRPDMRFVTVKTVQEQDVQALHRLREAQVRERTALCNQIRGLLAEYGIVLPKGVSIVRKRLPELLEADGNGLSAFFRPLLANCYEQLQQLDAHIDFYTRELKRHAQRHEAVRRLQTVPGFGPILSSVFHAFLGDGQAFRKGRDVSAALGLVPRQHSSGGKAVLLGIGKRGDRYLRSLLVHGARSVVRLAAGKDDRLSRWINRLRSTRGYNKAAVALANKMARIGWAVLRQQCVYRTA

SEQ ID NO: 400248 - protein, 356 aa, unidentified
MQERSTKEFAGVCGMDVHDKWCQLCLLDLGSGEVVEESRVRTTREILERRFADVSPMRVAIEAGPQSAWISELLEGLGHEVLVANPRQVRLIGDNRQKDDRLDAERLARLARLDPKLLAPIRHRRGHARADLSLLKARHALVRSRTLMINHVRGVLKSAGVRPPSCDASTFPTHAESRVPTDLRPAFGLLLETIRDLTRSIRGYDREISRLIAERYPEAAQLQTIGGVGALTALAFVLVVFDPARFEKSRDVAAYLGLTPARHESGDHQPQLGISKQGDVFLRRLLVQAAHYIMGHFGTDCDLRRFGLRIQARGGPYAKQRAIVAVARKLAIVMHRLWVTQRAYDPLYNSPMARTA

SEQ ID NO: 400249 - protein, 520 aa, unidentified
MSKTRSQPRRRKTNFVQKPSGLLSARVQAVGPERFGIVMVDVSKQRIQTQICDFYGNEIVPFTVYEQSRSGCADCLRSIGNAQAAAGLLDLVIAIERTGEYHRPFQRAAQRAHWDVRIVHPLATHHFRKLADPGNKTDRTDLGGIYRATVNGFGLIERVLPTEYGQLQLLIRHRRDLVHKQTALCCQIKETLHAIMPGYERCFTRLWDSTLALPIARAAGSAAAVLSRGVPGLAALVEHGHWPRHQTTLHQIVQWAHAAPPGHCEIDILRGVLDDLDNDRLEKNRQIRQLERRIATHLAGTPFVRLLIIPGIHVVSAADLAGEMGPIAHYANANAITGRAGHFPARYQSDEVDRANGALIRAANRRLRAALMQIADNLVTCNHYFRAKAATYSAAGKDPRWIRVKVAKTFTRIAYVILAGAGPFRHPGLQADSYVIRKLNQFHAAHETPAVEVLASLRAAIEQLPRAEYSHEARPWQQELERRQASRRHGPQPLSEIILEVLARLGVATVESTHEGPGLG

SEQ ID NO: 400250 - protein, 429 aa, unidentified
MSYRIAGIDVHKKMLAVVVSDVEIESEYQFERRMFGSSPEQLRSLAAWLLEQEAEEVVMESTAQYWKPVWGALERYWKPLREKREGARRRSGTLHLAQAQSNRGPRGRKKDFPDAERLVKRLVARELTLSFVPDAEQRLWRTVTRRKYQLTRNRVRLQNQLESFLEEAHIKLSSLVSDLLGLSARRMLKALADGETNPAALAALADQRLRATPAQLCDALGACAELSPVYRRLLKMALEELRLIDEQIGQLDQEMANLLSQHQDAVKRLAEVPGLGVDSAQQIIAEVGPTSATFPSEKCLSSWVGACPGDDESAGVNYSHRSPKGNRHMRRLLHQAANAAARTKGSIFEIVYRRSVPRLGHNQAIGTIAHRQCRLIWLILHQGVRYEERGPAVTKRSKQLRTSKMLRQLRSLGYRIEPPNPQPSQAQVQ

SEQ ID NO: 400251 - protein, 421 aa, unidentified
MQEQASEFAAYIGIDWADRKHDVCLQVPGTSPPEASVLEHRPRVIDAWARQLRERFGGRPIAVCLELAQGPIVSALLEYDFFVIFPVNPSMLAKYRRAFVPSGAKDDPTDAALALELLRRHPEKLAPLRRESDDMRALRRLVEARRDLVQDRVRLTNRLTFTLKDYFPQIVDWFRDKETDVFAAFLERWPSLQAAQRAKRDTLVAFFHAHSVRRASTIDRRIEAIRTERPLTSDPATIEPALAIVATLLPQLRALSAGVARLDADIAKRCDALPDFQLFVELPGAGPVFASRLLAAFGEERERFADAAAVQKCVGVAPVTERSGNKHWVHWRWACPTFLRQTFVEWAASSVSHSFWARAFYDRHKAKGSSHNATIRALAFKWIRILFRCWVDRSPYNESRYLAALQKRQSPLLKFAAVQPS

SEQ ID NO: 400252 - protein, 416 aa, unidentified
MSKPKKRMIVNTESLIIGMDIGKYHHMVVALRPDGIFRKPVKITNDLKGYRELLRLIAEWKNECKTEEVMVGMESTGHYWEIPARWLIGQGITVVQVNAAHTKRAKELEDNTPGKTDQKDARIIAGLIRYGKYSSWILPEGVYAELRELTKIRQRLIGELTEKRNYLRRLMDTVFPEIFILFKKSDSKTLLHLLTKYPLPDDVMRAGAQKMKTTLQQKHQNLVTKRFDTLWCLARDTVGVRVGQISYRVAIRTTVERILSLKDSLSKIEGDLAALLSRIPEAPYILSLEGLGIVSAAIIIGETGGLSRYRHAEELLKLAGLNLYEISSGTHKGKVHISKRGRPLLRQGLFLLATVMVKKGMPFHEEYSRLRNRGMETIKALTAISRKVCRLVFALARDKRFFSQEAPDCMHKQKAA

SEQ ID NO: 400253 - protein, 337 aa, unidentified
MKVTLIGIDLAKNIFQVCGVNQAGKSVFNRSIKRAQLLTFLRTYPYATIAMEACSGSNYWGRELLSLGHDVKLIPPQHVKPFVKGNKNDRNDAFAICEAAQRPNMIFVQPRTLPQVDIIITHRIRERRIRIRTALTNQIRGLLSEYGIALPKGRNPLNLLLPELLEDASNQLTTIARQYMRELMEELRAINVAIGSLEKDIKLQARTHPDAKRLMGIRGVAEIIATAAVSFAGDGSGYHGARHFSANLGLVPKEFSSGGKQKLGGITKRGNSYLRRQLIQGAWSIIRYASKSNDRISVWALKVIERRGKQKAAVAIANKLARIIWAMLFHRSEYRPC

SEQ ID NO: 400254 - protein, 341 aa, unidentified
MYYIGLDVHKKTISYCVKDVSGQVHREGKIGTTRNELDCWVGTLPQPRIMAMEATIFTGWIYDYLLPHAEQVKVAHPLMLRAIAAAKKKNDRIDAGKIADCLRCDFLPECHMASTEIRDRRRTLRYRHLLVRQMVQMKNRISGLLMETGVTYNKQRLHKRGYFGELLSSNEEVQENIRPLLRLSRETIVRCQRTEYALVSSLQRDPLLAERLRRLRTVPGVGPITALTWALEVGDVSRFRSVKQAISYCGLCGEEKSSADKVLRTPISKQRNKHIQRVLVEAAKLAPRQNHELALIHEREKNKGNRNRATLAVARKMVAYLLAVDRGEREFVPAEGRGKAA

SEQ ID NO: 400255 - protein, 431 aa, unidentified
MLHANTFISVGIDVGADFSFMALALPNQTVIGKPFKIVHNDFKSLERAVLAIKEAEELHSTKVRIVMESTGIYHYPLFCYLRDKGFDVAVINPIITKNSTNMNIRKVANDKSSSKNLALIGLKPDLKTSVMPSDAVLDLRNLVREYYNLMDCRSAYVNKLLGILRSSFPQYIGIFSKITVKTSLALLEKYPSPNEFLSARKSSIVNLIRKTARFGKTYAEKQYQAIVEAAESAGAFGHFVPSNSTQIRLCVTFIKKYDEEVANVLALMHKLVDERADETFVKHIRLIETLPGAGFLSAATVICEIGDFSVFSSSKQLFAYFGLDPAVKQSGNFTGTKVKMSKRGSAIARRAIFTIALSGVGLKSNGVANNPVLRDYYLEKCQSKQKMVALGAVMHKVCKIIFAVLRDNKAFALITPEQHVQNYANALLSAA

SEQ ID NO: 400256 - protein, 361 aa, unidentified
MVGTMTWVGLDVHARSTHAAAIDAMTGELSRVRFGAGVEAPVAWLLSLPGPVRACYEAGPTGFGLYRALSKAGIATEVIAPGKTPRGPSDRVKTDRKDAELLARQLLAGSLTAVVVPPAEVEAAREVTRAHDVCRQELMRARHRVSKMLLRHGRVYPKQKTWTAEHRRWLSVQQFQEPASDAVFADLLAAVDGISTRKAAIALSISALATDERWWPTVARLRAFRGIDTLTALAIHLELGGDWKRFNRASALSAWLGLTPSLNQSGESLRQGAITKTGSMLARRLLVESAWHYSRQPRLGATLANRQAGQPDHILAISNRAQQRLYKVNRRMRARGKPHNVTVVACARELACFLWAAATAD

SEQ ID NO: 400257 - protein, 315 aa, unidentified
MNQSTDSVKFLGVDVAKDTLQLFSRTLKVPAQIENTPKAIAAWLKALGRHHSQLHIACESTGGYENALLRACWKVGVRVSRLNPARVRDFARCRGLLAKTDAIDAEAIAEFASTFPPQPTPEPSAQQVLLNELVARREDLKTQRAAESNRSRDIQDKSLCRMLEKHLKFLDAQIKQIDQLIEDTISQDQEMSRKRDILVRTKGVGKTSAAILLSCLPELGTISGAAISALAGVAPFNRDSGTLRGKRSIRAGRATARKALYMCALVGSRTNSILKEIYQRLTSKGKPPKVALTALMRKLVVHLNSSLKTLQSTSA

SEQ ID NO: 400258 - protein, 321 aa, unidentified
MITGQSKTTYDLFVGVDVAATTAAVTTQRPGTKPSRSFTIKQTPEGYRKLVEKLQAKGCAPTRILIVMEATGACWITLATRLVDEGFNVSVVNPAQAHHFAKALLKRAKTDAIDAQTLAQLAMILQPEPWTPPPPIYYELQQRLAQRDNLLDLRQQVRHQLHALDQHPQVVAEVRTRLNTLLCTFESQINDVEVEIATALNQDSQWAKAAERLQSIKGIGWVTAAWTLVLTLNFTTCESVESLTAYAGFALMPRQSGSSIWHRPSIGHSGNGRLRTAFYMATLTAARFNPVIKGFYERLRETGKPEKVARCAAARKLCCCS

SEQ ID NO: 400259 - protein, 385 aa, unidentified
MDEAGKRVGVRRFAHSHQGFNELQQFVLSIATSPEQLACIVETNHGLLITFLLEAGIPVYPVNPKMANQLRKVAGAKTDQIDAHLLAKLGRLDLAELRRLEPDRSIVAELKTLTRDQDTLVQTQTRLVNQLTACLKEYYPAALNLFTKLQQRSTLLFLQAYPTQEAAAAVSQEEILATLRMGKHTNPRRTAKKIWEEVHRPQLQASEVIVRAKSRLMLSLVKQLLVVIEAIASYDEVIAPLFLTHPDHEIWSSLPRAGKRLAPRLLAEWGDDRARYVDANSIQALAGTAPVPFQSGNYAKAHKRFACLKPLRNALHQFAWQSTLQEAWALAYYQRKRAEGKTHSMAVRALANVWVRILYRMWMSKTCYQTNTFEAAQLAHAKRAA

SEQ ID NO: 400260 - protein, 405 aa, unidentified
MWYVGLDWADTHHDVEVLDEAGKRVGVRRFAHSHQGLNELKQFLLNIAPEVEHLACIVETNHGLLITFLLEAGIPVYPVNPKTANQLRKAAGAKTDQIDAHLLAKLGRLELAELRRLEPDSPIVQELKTLTRDQDALIQTQTRLVNQLTACLKEYYPAALHLFAKVQQRSTLVFLQAYPTPQAAQAASVAELTATLRAGKHTNPTKAAPKIFEELHRPQLVASEVIVRAKSRLLLSLVKQLLVVIQEMASYDKAIRSLFLRHDDQELWRSLPGAGKRLAPRLLAEWGDERSRYADATSVQTLAGTAPVPFQSGKYAKAHKRFACVKPLRNALYQFAWQSTRQEPWALAYYQRKRARCGKSHSMAVRALANVWVRIMYRMWVTKTSYQTATFEAAKRAHAPRPHAA

SEQ ID NO: 400261 - protein, 400 aa, unidentified
MEPCIRVGIDVGCKAHRVGVAGPDGVILDEFDISHTREGFEDFFRRVGRYEQERKLPVAVAMEGWNGYARPLDREIRSQGWRLYNVNNLKLARFREVFPGPAKTDALDARKILELFHLQDHLRLAKGVLQEVGEVPPENEKLKRLSRRRRVLVEEKIRVMDRLQADLQAVSPGLLSITKNVGNLWFLHFLTSRDDLSELARLRRSSVLKIKGIGEKWAGVIADWQKRATFSSEVSYVGPMILADAKRILALLQEIRALDQAMAELTDVSSLGRRVRTIPGFGKTSAAELAGEIGTLDRFASESSLALYLGMATLDNQSGQHHGTRRPRQVNGRAKAAMMTAVARHIGCVPQSKAYYDKKRAEGKRHNQAVRALGRHLVRVIWSMLRQERDYELRDLPPAP

SEQ ID NO: 400262 - protein, 343 aa, unidentified
MKKMYYIGLDIHKKIIVYCLKSQDGSIVQQGVVAAERKTLRQWAAELPTPWIGAMEATMFTGWVYDVLKVHALELKVAHPQMLKAITAAKKKNDRADAERIADLLRVNLLPECYMAPEELRELRRILRYRNHIVRTAVRMKNKVSGLLMEVGVCYAKKQLHGKKYFQKLLERMEDVPPSVVELLKLSRTNLEMFQAVQKHLVETLHDNELIKERVRRLMTIPGVGEATALTWVLEIGDPDRFRSVRQAVSYCGLCSAQRESAGKEQRGPLSKKRNKQLQTVLIEAAKFAPHWNPQLASVHAKELEKGNRNRATLAVARKLVAYLLAVDKKKADFVPKVTSQAA

SEQ ID NO: 400263 - protein, 347 aa, unidentified
MKFYTNQHKYYCGIDLHTRKMYVCILDEKGEIREHRNLNTDRDAFLKAIAPFREDIVVAVECIFTWYWIADLCHNEGIPFVLGHALYMKAIHGGKAKNDKIDSQKIAVLLRGGMMPMAYVYPEKMRATRDLMRRRNHLMRKRSELFAHIQNTNSQYNLPDSFGCMSRPKNRDGIIEQFEQPSVQQNIAVDMEMINTYDSVLSQLEKSIIKLANHHDPVSYALLQTIHGVGKIIALIILYEIENIRRFESVQDFASYSRLVKCAKESNGKKSGSGGSKIGNAHLKWAFSEAAVFFINGNDPAKKYLDRLTKKHGKSKALSILAHKLGRAVYFMLKNKEAFDQKKFLAV

SEQ ID NO: 400264 - protein, 396 aa, unidentified
MYIVGIDIAKRNHEAVVMDGQGSVVKRSFSFANSTAGLEKFLSVLSGISQEPGDFTIGMESTSHYWFALFSALKRRGYSIQVLNPIQSNALRGLYIRQVKNDQRDSFIIADVIRFGRYTQGQTPSDDLYALRELCRARVFLVSMAADTKKKVIALLDQVFPEYENIFSNIFGVTSTALLLECATPEEILAIDTEKLAAVLGNASNNRFRTKKALEIRELAQNSFGVLLAADTFSLLIKQHMEHVHFIEGQIATLDAKIAELFSRFDTCITTIPGIGLVLGATIFSEIGDISRFSSSAKLAAFAGIDPTVNQSGEFTGTHNHMSKRGSPYLRRALWQAAVISVHFDPVLKAFHQKKMAEGKPRMNSIGHVTRKLTNIIFAVLRDNQPYVPRALPLAE

SEQ ID NO: 400265 - protein, 392 aa, unidentified
MVVSVGIDVAKDKHDCFIHSSEGEVLADVFTISNNMDGFHTLLEKIQACTAPQDKIRVGLEATGHYSYNLLGFLLDNGLATYVLNPLRTNLYRKSLSLRKTKTDRVDARTIAAMLLSDAGLKPYTDTAYHNEELKSLTRYRFDKVKERAKLKTSVSRLVCILFPELEKLVPTLHMASVYALLEEFPGAKQVAGAHLTSLKSLLEKASKGRYKRDVALSIRDAARMSIGSRMPAKSLKLQHTIRIIRELDAEIHEIEAEIETMMDEIRSPIMTIPGIGCRMGAMILAEAGDLSRFDSPDKLLAYAGMSPSTYQSGQLNNCYPHMEKRGSRYLRYALFNATKYVCLWDPAFAAYLAKKRAEGKHYNVAISHAAKKLVRLIFAMEKSGQPYRSAA

SEQ ID NO: 400266 - protein, 346 aa, unidentified
MGMDIAVLGVDLGKNICSVVGLDGSGAVVMRRKVRRETLIALAEKLPTCIVGMEACCGAHHLGRVFAAHGHDVRLMSPEYVRPYIKAQKNDDRDAEGIAEAATRPTMRFVELKSQDQLDMQSLHRSRDRLVGERTALINQLRAILLERGMVAPQGKRKLEQFLAVLMDEQGGEGLSPRMTLLVADARAQWAELDRRITAFDAEFVRWVKDNQEARRLMTIPGIGAIVASALVAAVGRAESFDRGRDLAAWLGLVPRQFTTGGKPKLLGISKRGNKYLRRQLIHGARAALPYVAERDTPLGRWAKGLMSRAHRNVAIVAFANKLARIAWAVLQRGERFAATGMSMTA

SEQ ID NO: 400267 - protein, 418 aa, unidentified
MLVAGIDVGAEVHHVAVVDQSEAVVTKPTAFEESAPGYEKLFALLARAGARGGEDLPLATASEAPPSTLVVMEASGHYWQNLFAALVAKGFAVALVNPLRTHRFAGEELARTKTDRVDCLQIARFGVQKRPAPSQLPEAAVEELRELMRLRERLMQELVARVNQLHRLVDLGFPEFTRCLTDLNTELATAILQRYPTAQALRGVSRKRLAKLSYDGRHQVVSGLAQQLIDAAAISVGSQHSPSHQLGVRYACEDLETLRKRLKRLDGEVVGTLQHHKVGQLLTSIGGIGNTTAAMIIAELGDPARFRSASALAAYVGLCPAHKHSGRHQPKSSSLSPIGNRRLRRALWMPTLSAATQSNPWLMVFYRRLIERGKPHKLALCAAMRKLLAAIYSVAKHRRPFSTDLNPQSALRIRYENP

SEQ ID NO: 400268 - protein, 360 aa, unidentified
MQTQKTGLDFKGQNIFVGIDVHLKSWAVTILTDHLVHKTFTQPASADTLSNYLERNFPGADYYSVYEAGFSGFWTHYKLKNMGINNIVINPADVPTSQKEHLQKDDPTDSRKLARSLRSGDLKAIYVPGQSTLEDRSLVRLRAALVKDMVRFKQRIKSFLYFYGISFPPEFEKSGTHWSKRFMKWLNEGVSLEHESGTQALKILVQEAEQQRKLLLEVYRKIRLLSKSEKYAVNIALLRSIPGIGLITSITFLTEIENIERFKNTDHFAGFVGLVPNYHSSGEKANNGEMTFRGNNILRRSLIESSWFAARHDPALMMSFNNHVKRMEPNKAIIRIARKVLNRMYYVLKNKMEYVSGVVN

SEQ ID NO: 400269 - protein, 288 aa, unidentified
MNTAILGIDLGKNLCSVVGVDDTGAVVLRRRMRHQTIVQYASGLTRCVMAMEACCGAHHLGRILQVQGHEIRLMSAEYVRPYVKAQKNDHQDAEAIAEGASRPTMRFVELKSQAQLDLQSLHRVRARLVNARKTLINQLRAILLERGHVIAKGPQRLDQALAGDDLDFTARMRALVSEMRNEWRELDQRIEALNAEFKDHVRAHEAARRLIAIPGIGVLNAAVLMAAIGDGNAFGRGRDLAAWLGLVPRQVSTGGKAKLLGITKRGNKYLRMLFIHGARAALPSLPRT

SEQ ID NO: 400270 - protein, 342 aa, unidentified
MQITTIGLDIAKNVFQVHGIDAKEKVVVRKQLRRGQVIAFFKALPPCLIGMEACATAHYWARELRKLGHEVRLMPAKDVKAYVKRNKNDAADAEAICEAVRRPTMRFVRIKSAEQQGQLMQHRTRDVLIRQRTQIINAFRAHLAELGIVAAQGDAGVNALRAIVADERDERLPIDARASVIVLAAQLEALQTLIGSIEKRIKMQHRSNETSQRVETIPGIGVLGATAIVATAADPTVFRSGRDFAAWIGLVPRQDSTGGKQKLGSISKQGDRYLRRILVVGAIAVLRHAQENPGKYPWLTQLLARRPFKVVAVALANKMARMAWALMVHGGTYRAPELAEAA

SEQ ID NO: 400271 - protein, 319 aa, unidentified
MSRISTPPARFIGCDVGKTSIAIFDSLNGQTRVIANRKPDLKRLAQTLDAACLVICEATGGFEAKLLAAMLTHGVPAHRADARKVKAFIRSFGTLGKSDAIDAQALARYGAERHAALARWVQPDPVRAELQALVLARTDLVRLRQAQLNRLAAPGAEVVATALRGIVREAAKQLRAIEARIAACLRGHPALARDTAVLRQMRGIGEVTAAALLALMPELGTLSGPQAASLAGVAPHPHESGQRVGYRKTRGGRPDVKRTLFMAALVASRGKGELAEAYRRLTARGKKPIVAITALMRKLIVIANAKLRDARNADAIQVS

SEQ ID NO: 400272 - protein, 389 aa, unidentified
MKIYVGIDIAKLNHFAAAISSDGEIIIEPFKFTNDADGFQLLVSKLESFDKNSLIIGLESTAHYGDNLVRFLVTELYQVCVLNPIKTCQMRKNNVRKTKTDKVDTYVIAKTLMMQDNLRFVSFFDLDMMDLKALGRFRQKTIKQRTRLKIQLTTYVDQVFPEIQYFFKSGLHQHAVYALLKEAPSPKEIASMHMTHLANLLKVNSHGHFTKELAKELRVLAQKSVGANDSAISIQITQTIQQIELLDSQLEKIEAEMTDIMKFNDSVIMTIPGIGYINGGMILGEIGDIHRFSNPNKLLAFAGLDPSVYQSGNFQAKTTRMSKRGSRVLRYALVNAAWNVVRNNATFKAYYDAKRAEGRSHYNALGHCAGKLVRVIWKMLTDEVEFNLE

SEQ ID NO: 400273 - protein, 348 aa, unidentified
MVVIGVDSHKRTHTVVAVDGTGRKLAEKTVPARSAGYLELVRWAARFVDHSWALEDCRHLSRRLSTDLLVAGESVVRVPPKLMAGARRSSREPGKSDPIDALAVARAALREDLPAATLDGPDRDVRLLVDHREDLVAERTRAQNRLRWHLHELDPGNEPAARSLDRTVVLTALDRGLAEAPGTVGRLARELVGRIQALTVTINDLEREIAGLVAELTPTLLEMTGCGRLTAAKLLGEAAGIGRFRSRAAFARHNGTAPLPVWSGNTERHRLSRTGNRQLNVALHRIAITQLQREGPGRTYFEHRRALGNTKTEAIRALRRRISDEVFRRMRHDEAARAASPSGLAAAA

SEQ ID NO: 400274 - protein, 376 aa, unidentified
MSKIRFLGLDVHADTIAASVAEPDGEVRPLGIIPNRLESVRKLVAKLGPVKQLKACYEAGPTGYVLYWQLTALGVACQVVAPSLVPVKAGDRVKTDRRDAAKLARSYRAGDLTPVWVPDAAHEALRDLVRTREDAKQDQLRARHRLNKFLLRHGRRPPEAVKKSWTVKYMTWIKEQVHFDQPAQEATLLDYVHEVDHQAERIQRLEKSIDVAIEKAPAEMRAVIQALQALRGVAKITAVSVVAEVGTFSRFENARQLMGYSGLVSSEFSSGSRIQRGRITKTGNAHLRRVVVEAAWAYQRRPWVGGALLKRQQGLDQEIKDLAWKAQWRLHHRYSKLAARGKNKNQIVTAVGRELLGFMWAIGVRVEARAARAHAA

SEQ ID NO: 400275 - protein, 336 aa, unidentified
MKEFTSCIGIDISKDTFHVCCKQSVGEQFVIKGTHSFENSYTGFTALLDWTLTKTKNAETLYVMEATGIYHEELTHFLYSNAQTVAVVLANKINHFAKSWNIKTKTDKADASMIAHYGLERFPEAWQPMMPQMKSLRDLCRERLSLKQNIGSLKCQLHALKNAHGTLEFVFQMKQKQVEFMEINIQAIEQEIKRITMEDKDFYERVKKIETIKGLQSITIVTILAETNGFAQFNNIRQVVSYAGLDVAERQSGLFKGKTRISKKGNSRIRQCLFMPALSATNHNDKIKALYQRIVERNPTIKRKGVVAGMRKLLILTFVLWKKNEAYNPDYQWNIE

SEQ ID NO: 400276 - protein, 251 aa, unidentified
MAMLSFCGIDVSKDRLDVVVLPEGWFFSVSNDTAGCAELVVRLRPLAVSAIGLEPSGGYERGIIRALLAAGLSVRRINPNKLRQFARARGVLAKNDRLDARLIAEYVAIMPTRVVQRDAAVERLAEIVTMRRQLCDEHVVAGNQAAHLEDAMLRRLSKRRQMRLEADIRLLDKRLAEMVAANVALTQRYELLTSMPGVGPVLAFTLIALLPELGKMSRKQIAALVGLAPYDFDSGKPQGTSQHLWWSDAGP

SEQ ID NO: 400277 - protein, 342 aa, unidentified
MNESQAYHFIGLDIHKRTVAFCEKTLTGKTVARGTIRARHSDLVEFAESRGKPWVGGMEATLFSGWVYDVLVGHCVELHVGHPLRLKALSKNKNDRIDAELLANLLRADLFPTCHMPSPEVRELRRVMRFRNFLVVQATRMKNKAAGLLMETGAQYDGKKLHGKKYFSELLAGLDEIPPSVRELLRMTRTSLDVFTSAQGYLLRALKRHAALSGRVELLKSIGGVGDIVALTWALEIDDPNRFSSIKKAQSYCGLCSAQHESAGKQWRAPLSKERNPHLQRVLIEAAKLAPSKLGSLERVRDAAIERGYNKNRATLAVARKLVGYLMAVDKSGSIFVAPQPG

SEQ ID NO: 400278 - protein, 310 aa, unidentified
MSKTNYVGVDLSKSELVADLSAGTAPRVFPQTVKGRSALLAALPPGAHVICEASGGYERALVATLQAAGIPVSVVMPVRVRAFACAQGLRAKTDPIDARLLSAFGAALQPAPVLAQTRAHAELQELVRTRRVLIEQLNDEASHLEHTALPLLVELAQARRKLLESQMETIEARLRELIALDAAWRWRAERVQQVCGIGEVSAWTLLAELPELGSLERGQAGALLGVAPHPDDSGPRHGRRRISGGRSGARKVLYMAAVSAAHRNTILRAFYQRLIGPKNKPKLVALTAVMRKLIELLNRLLADPNFKLAT

SEQ ID NO: 400279 - protein, 350 aa, unidentified
MNYIGVDCHISSLDFAVVNEKGTVSQRAKVNTGVKEFMEFVKSIPKPRKIFIEEGELAGWLLETSLKFREKLIITDPKTNKWIGKAGQKNDTIDAEKLAQLARGKYIKEVYHPVNDRRKFKDLIFAYHDTVKNQSRIKNKIKAKFRSNGIKCSGTTVYLDKHRDKWREKLSSESMTRLIVEELWVQMDQLRNSKEKLKKIIRIQSKRYSEIKKFMKVPGIGLIHGSTISAIIETPHRFANKKKLWMYAGIGLMERSSGGTIYSRRLTREFNRPLKNAIKQSTEVAISAKDNQFRRQYLKLTMEKGIASHRAKLTVARSILAALYGMWKKGEDYDSEIDKKRENKKFVHTI

SEQ ID NO: 400280 - protein, 385 aa, unidentified
MNQISCSATSSHTLHCALELSKKSWLLAIQFPDREQPSVYSIKGGDTEKLMAKLTAARDCWAKVSGSLPVITVCYEVGYDAFCLARFLKARGIECLVIDPGSLQVNRRGRRVKTDRVDVKMLLRTLIAWCRGERHVWSLVRIPSVDEEDLRRSHRERSRLVRERTAHINRIKGLLFAQGIRDVKVKSQYKTLAVDKLLTADGHRLPPRLASEIARELQRLAMVQEQIAEIERERDTAPTPCEATERKRQLLLQLKSIGPAISALLSREVYYRQFANRRQVGSFLGLTPSPYSSGEEERCQGISRAGSGQVRAIMIETAWLWIRHQPKSALTRWFVERTAGQSTRMRKIMIVAVARKLSIALWRYVEQGLVPQGAILNPPTTGRAR

SEQ ID NO: 400281 - protein, 427 aa, unidentified
MAASTQLMPDTVCVAIDIAKRYHDVLVRWPDGREKVLKMPNTRAGHDDLIHFLQQQHAPVLAVLEPTADFHRPLAYRLAQAGISVHLASSLAAARVREALYTSWDKHDRKDARVLMYLLTQGMTHPFHDPLREGYFDLQEISNTYQQIARARTRCQHSLVNHYLALYFPEMERYLSRSRAHWFCHFLLAFPTPASITALARESFVEAAWESVGRKVAKQQFLEGIYEAAQTSMGLPVVPDSPAVRTFQLQVKQYLSLTEQRQALEAMATTCMRDNKDFARLQTLPGVGPIIALMILAESGDLRRFSHHRQYLKFCGFNLAASQSGNTCSRYRLAKRGNARLRYAYWLAATVAVRMRDNSFHTKFDRYVGKDPTDGDLKRKGLTAVAVKMARVAHALIKHDVDYRGYHEYCIPGGGTSLPSRRAARTP

SEQ ID NO: 400282 - protein, 455 aa, unidentified
MPTRTKRKTKAPPLPPQLQKVNLHAAAIDVGSTEHYVAVPPASAPETVRCFGGHTADLHALAHWLKDCGITSVAMESTSNYWVPLFQILECAGLEVVLCNSRHVKNLPGRKTDVLDCQWLQELHTYGLLSGSFRPADKVCVVRSYLRHRDNLTKAAASHVQHMQKALTEMNIGLHHVLSDLTGVSGLAIIRAILEGERDTLKLATLKHPYVRKSPQEIAQALEGDYREEHLFALRQALELYEAYQMHIAECDGKIQAALRAMAVPLPAASPSEAPPPKARKTAKAQAEFALKAELQQLCGVDLTALPGFQALSAQILISEIGLDMSRWKTEKHFCSWLRLAPGNRISGGKRMKSKPHKGHNRAAQILRVCAQAAIQSKSALGAFGRRLRARLDAPKAIKALAHKLARLVYRMLKSGQSYADAGELYYEHKYRDHLLKRLHKQAALFGFHLTPAPE

SEQ ID NO: 400283 - protein, 430 aa, unidentified
MKSNTQNAKIEAITEKTLVLGIDVGSEMHYARAFDYRGIEYSKKPFKFSNTEAGFVTFKEWIQDLKERHEKDKVIPGMEPTGHYWFNLGKFLQDNEMKPVLVNPHHVKKSKELDDNNPTKNDRKDPKVIAGLVREGRYMIPYLPDGVYADLRTASNIRFQLQAELTRIQNRISRWFNIYFPEYKTVYGKPDAKSGMLILKAAPLPEDILTLGIDGVNQIWRDAKLRAVGKARAKTLIEAAEHSVGSKEGAVSARMEIRMLLEDYESRNTRLQEVMVLIEELVRKIPMTEKLLEIKGVGIRTVSGFLAEVGDISRFNNPKELQKLAGLALVENSSGKHKGETTISRRGRKRLRYLLFEVAMSLVSKNQEFRELHNYYITRRLNPLKKMQSLMAIAAKLIRVFYAMLTKGVDYDPKKMVSDIKRPAVYLQAA

SEQ ID NO: 400284 - protein, 384 aa, unidentified
MKVVCGLDVHKDSVFCCILCANGEKIQHKFGVLTEELVTLRDLMVSEGVEECAMESTSIYWIPIWRVLEGSVKLHLVNPYFIKQLPGKKSDVNDAEWIATCLSKELIASSFVPDDKIQRLRQYDRRIFDLNASISRNLVKLDQCIQRCNIRISNYISTTDSKGYRSIVKLISQGVTDAEVLVKELHGRTINRHGRETLVKALTGVVSETDIDIIKQLVEEIELQQRHKDEAQQKMTALCMEWFPQEVENLQTIPGVKERSATSIIAEIGTDMTHFQTPKKLVSWVGLRPRNEESAGKIKARGITHGNRFVRKTMIECSWGAARMKDSFFAEFSYRQCIERRKNKMKVQVAIARKILVAVWYVLSQGTQYIKPTDHYTAAHMTAV

SEQ ID NO: 400285 - protein, 312 aa, unidentified
MAHIICGVDVSAETLDARIGRDGMWQKFSRTTEGVAQLALFCKSHQVSLVVMEATGGYERLPFAQLWAADVPAAVVNPRSVRQFAQAMGALEKTDKIDTGMIAWYAETKRIEPTQLASDRQQHLAALVLRMRQLTDLRVAQKNQQRLVEDADALASFTAILAAINQQIRNLEAKVIALIDADPLWLALDTAFREIKGVADRTVARLLANLPEIGTFSGKAVAKITGLAPIANDSGKKTGKRPVRGGREAVRSILYIVADLVRRHDADLKAFYDTLRAAGKPRGVIRVALARKLLVRLNAKARDVRKQIVATS

SEQ ID NO: 400286 - protein, 368 aa, unidentified
MIVIGVDAHKRTHTLVALDAVTGVSKGETTVQASDDGALSALRFAAGVDQDRVWAVEDCRHVTSRLERALLGAGERVVRVPPTLTGESRKATRTAGKSDPIDARAVALAAIREGVESLPVAFLDQQAHEIRVLCDYRDQLMHERNQLINRLRWLLVRIAPGIESQIGPAALKGPRIRARLARQLGQLPASVELRVVKAQLRRLNQIEKEQKELFAELTTLIQAHAPQLLEQRSIGPVTAATIIGRTAGAQRFRSEACFARHTGTAPIPASSGNTVRHRLHRGGDRQLNRAIHIIALGRMVWDTETRAYIERRITEGKTKREALRCLKRHIARQIWHLLYNLQPITPALPKPPPQRVRVSAPGLMPCTR

SEQ ID NO: 400287 - protein, 464 aa, unidentified
MRVVARLPAEPVALATTSNRKVPQEGRYIRAMDSRAKRRTSDKHPKTMNEAAQWQQHRAFGAVDWASEKHYVIVVDQAGKVIEEFQIEHSALGWKKFREKLQPYGPIPFAIETSQGAVVEQLLESAMIVYPLNPKSAQAYRQRKAPSGVKDDQLDAWSFADALRVDGHGWKALRPEEPLIKELRLLCRDEVTLIEQRTAFVQQLRHALAEYYPAALEAFENWTSVSAWIFLQRFPTPTALAQAGKRQWQKFLHTRRLWGSDQGPRRMEIFSHASEFAGTQPTVNAKSLLALSLVQMLFSVEKQLAVYRQRIEELFARHPDHDLFGSLPGAGPKIAPRLLSEIGDDRQRFDGDAQALQCLGGTAPVTKRSGKYRHVHQRWACDKHLRHAVYLFAEQSLSRCVWAELYYRHHRQKDRSHANAIRRLGHRWLKIIHKMWIERAPYNAELHHRNQLQHGSWIFKLKPS

SEQ ID NO: 400288 - protein, 317 aa, unidentified
MKNATRFVGLDVHADTIAVAVAEAGRDCEVRNLGIIRNEAGAVRKLVEKLGKKGLRACYEAGPTGYALYWQLSELGVTCEVIAPTLVPRKAGERIKTDRRDAIKLARCYRAGDLTPIWVPDKAHEALRDLVRARESAKQDQHRARQRLSKFLLRSGQKPPQQKSTWTQKYLEWIRGLRFEHGAQQATLVDYLSEVDHLSQRIERLEWSIDEAIAQAPDGLRAVVEGLQALRGVARLTATTIAIEIGSFSRFQTAKQLMAYCGVVPSEHSSGSSRRQGAITKTGNAHVRRVLFESAWSYRHLPNLGAALKKRQQQSTP

SEQ ID NO: 400289 - protein, 352 aa, unidentified
MSMIAFDSHKRYTFARVENEHGEHPQEFRIEHRRGNIAGFLSRQEPGSRVAIETIGNWYWIVDEIEQAGMVPQLVHARKAKMMFGCINKTDKLDAKGLNVLQRAGTLPTVWIPPAGVRDKRELPRTRMVFARERTQLKNRIHSVLDKYGLQDAFEDISDIFGTTGRQVIICVLEQLPPHTRYTTELLLEQLDQTGQKIKAIEAQMNKLFKETTLHALLKTMPGIGFILAVVILQEVGDIGRFGSAERFASYSGVTPRVHASGGKVRYGRLRPDTNHYLKWAFSEAGNSVAVNRNRFPARPVSQLYNRIRGRKGHAKAVGAVARHLAEATYWILTKNEVYRDRGLLEVSPTGA

SEQ ID NO: 400290 - protein, 343 aa, unidentified
MEHYVGLDVSLKETAVCIVDQSGAIVREAALPSDPETIAEFISANSTNVGRVGLESGATSTWMWTELDRLGLPAICIDARHAKAALSMQINKSDRNDAAGIARIMQTGWYREVRVKGLDSHAIKAVLVSRALLVKMKRDLENQIRGLLKNLGLVIGRAKMNTYAERAVELIEDKPELAAVVEPLLKVREAVERQIADLDRKVMRLARSDAQVRRFMTTPGIGPITALCYLATIDDPTRFNKSRNVGAYLGLTTRRYASGEIDWTGRISKCGDAMLRSYLYEAANVLLTRVAKWSALKAWGMRLAKRSGMAKAKVAVARKLAVILHRMWIDGSEFNWSSKRAIA

SEQ ID NO: 400291 - protein, 361 aa, unidentified
MAQAKTWAAFDVHVSGVVAATLDRDSGELRVQRLPGRSDEVAAFAAGLAGPVRATYEAGPTGFVLARKLEAVGVDCLVCAPGLIPRGASDRVKTDRRDAERLVRLLAAGELHRVTVPSVEAEALRDLVRAREDLRGDLMRARHRLAKLLLRHEVRFEGPQANWTQAHLGWLAGVTLAQPASQRALEDYRGAVAALMIRREQLEAEIARALPASPWAQTARRLMCLRGIDTLTAAGLCAEIGDFHRFEHPAQVMSYLGVVPSEHSSGERRRRGPITKSGSQHARRLLVEAAWHYRRAPRVAGSLARRQRDGEPEILALSWKAQRRLHHVWNRMEQRHKRRTIIAVAAARELAGFCWAVATLD

SEQ ID NO: 400292 - protein, 355 aa, unidentified
MRFVGIDIASEKHVVAVVDEVAGVLVKPTGFGEDAGGYGKLFELLGAATEVLVAMEATGHYWKNLFAELAARGFPVALLNPVRTRRFAGEDLERTKTDAIDALGIARFAQQKRPSVTRLTDAATDELRELVRHRERLVQDFGDRTRQLHRLVDLGFPELKRFIHTLDSQLATAVLHEYPTAEAFLGLPWKKLAKFRYDGVHIVGEELAKSIVETAKVSVGRHHGYAYRLQVQHACEDLDLLRRRIKQLDRDIGTKLGEHEVGSLLTTIDGIGPTTAARLLAELGDPADFRDASAIAAYVGVVPALKQSGKRTSSRAGLTPIGNARLRAALWMPTLTAVRKNLWLKGHYQRLRARG

SEQ ID NO: 400293 - protein, 376 aa, unidentified
MNEFSSMYVGLDVHKETIAVGVARSGRCAPEYFGEIKNSVAAVRKLLRRLSPNGEVLQICYEAGPCGYGLYRQIRSLGHDCEVVAPSLIPRKAGERMKTDRRDGLKLAHEHRAGGLTAVWVPGEEQEAVRDLTRAREDMKAIETKARQRLGAFLLRHGRVFEGKSRWTQAHFRWLETVKFDQPLQQLVLQEYIDAVTDARRRVEALELQMRQALPGWSLGVVAEALMALRGLSLIAAMTTLAELGDITRFDSPRELMGYLGLVPSEHSSGGSRRQGGITRTGNGHVRRVLVEAAWNYRFPARKTRDIQKRAEKTSAAVQAIAWQAQKRLCGRYQTLMRAGKEKNQVTTAVARELAGFIWAIAREVMGKPHASKALA

SEQ ID NO: 400294 - protein, 430 aa, unidentified
MEVIYPKACGVDVHKSFIVAVICDSTSVKPQYLRNRFSTFNNSLIEFRNWLLANDCQNVCMESTGKYYVPVYNALEGHISNVVVANPKWVRCIKGEKDDNKDAKWIADLFKLGIVRGSFIPNKDIRILRELTRYLYKLTNMRTSEKNRFTNALTVGNCKLDLVFSDIFGKTSSAIINTILSQNEYDDEDILKNIDKHCKSSNEDILNSISGISWESSQKQRMNVIQEHIDYLDKSIKTVREIIDSIIAPYESAINLLCSVPGVDRKSAITIISEIGTDMSQFSSHYRLASWAGLAPGCNESAGKKKSVKISRAGVYLKPALVEVAHCAVKDKDNPYYANKFNVLSKRRGKKRAYIAIARKILVAIYHMLSTGELFNPSDLSRVETSDKDKIKFTKNNFMQSTKQLISLGLTIDDLQTLIQSKISESTPVI

SEQ ID NO: 400295 - protein, 365 aa, unidentified
MQKISTMRTNGKNIFQGQLTIGLDLGDRSSAYCVLNEAGEIVLEHKLATTPEAMKQVFGSMPRSRIAMETGTHSPWVSRLLTALGHEVIVGHAQKVRLITKSRRKDDRLDARTLARLARIDPELLSPVKHRSAQAQLHLTEIRARAVLVNARTALVNAVRGLVKSYGERLRKCDTQQVRREASSGLSAELRKALEPLLQEIESLNERIKEYDRRIEKMAKETYPETALLKQVKGVGDLIATAYVLTFEDPQRFRKSRDAGCFVGLQPGRRNSGESEPQMHISKEGDEYLRTLLVQGAHYILGPFGEDSDLRRWGQKLAARGGKNGKKRAVVAVARKLAVLLHRLWVSGEVYEPLRNSHKVMSAVA

SEQ ID NO: 400296 - protein, 370 aa, unidentified
MRKNTLWVGLDTDKKHIDVAVAEALPDGEVRLWGRTANTPASVDRLVKKLGQGGRELTVCYEAGPCGYGLYRHLASKRGVKCLVVAPSMTPRRPGDRVKTNRRDALKLAKLLRAQELTEVWVPDAAHEALRDVVRARTTAVSSLMRCRQHISSFLLRQGIHYTGKPWTKKHRLWLGRLEFEHAAHRLLLVELLAALEQQQARRDRLTDHIRELVPGWSLAWLVEAVQALRGYDLINAANVVSEIGDLRRFTSPRQLMGFVGLNVCEASSGDTVRRGHITKTGNKRARKALIEAAWTYSRPTAATGKPIAARLPVEVQQIADKARHRLSRRYRHLLTHGKLKQVAIAAVARESLGFLWAIAHAAAPTSARR

SEQ ID NO: 400297 - protein, 350 aa, unidentified
MPKAPLPPIATLGIDIGKNSFHLIGLDARGAIVLRQKLSRGQVEQRLANMPTCLIGMEACVGAHHLSRQLLALGHDVKLIPAQFVKPFRKSQKNDFRDAEAIAEAVLRPTMRFVPTKTVEQLDLQALHRVRARLVSQRTAVLNQIRTFLLERGIAVRQGLRSLRQALPDILAQRTDVLTPRMTRLIEGLMQDWHHLDERIDAVTDEIEALVAADEACQRLMSVPGVGPIIASAMVAAIGNGAAFSRGRDFGAWLGLVPKQTSTGDRTILGRLSKRGNSYLRSLLVQAARVLLLWPAKWRQHSFGNWLTAASTRLHHNVLAAALANKLARIAWSVLSQNRTYEPRTAAAAG

SEQ ID NO: 400298 - protein, 347 aa, unidentified
MADPQPPRVTVGVDTHKDLHVAAARDQLGRRLATTQVQTTSAGYAQLLGWARSLGQVQAWGVEGTGSYGAGLARFLAAHGQRVLEVNRPDRATRRRVDADAAARTVQAGEASGTPKAQDGTVEMLRALRVARHSAVKARTQTINAIKALLVTAPTELREQLATLPTTALIRQAATLEPGTLATPTAATMLAVGGLARRYQHLDAEIGLLTGKLDQLTAKTAPKLRALLGVGPDSAAALLICAGDNPSRLRSEAALAALCGSSPVEASSGKTRRYRLNRGGDRQANAALHRIVIVRLRWHQPTRDYLARRTTQGKTKKEIIRCLKRYVAREVFAALRQTDQHDLTAAA

SEQ ID NO: 400299 - protein, 343 aa, unidentified
MKITTIGLDLAKCVFQVHGVDATGQVVVRKSLRRSQMLPFFAKLPRCLVGIEACGTSHYWARELIKLGHEVRLMPPAYVKPYVKRGKTHAADAEAVCEAVRRPTMRFVPVKSPEQQAVLSMHRARDLLVKQRTQLVNMIRSLLAEFGLNIPKGLERALLMARRIVDGKAPDVPMEAAKIVSTLSQQALDIHVRLRQIDRDLLVWQRGNDVARRLMTIPGIGPVGATALAASVTDPHQFRSGRQFAAWLGLTPLQKSSGGKERLGRITKMGDKYLRKLLIVGMTSRVRRAKQNPAVDPRLADLLARKPTRVATVAMANKTARIIWAIMARGETYLAGHRPALAA

SEQ ID NO: 400300 - protein, 314 aa, unidentified
MNTENQSEISIGVDVGKANLDIAIYPLARHFRIPNTREAIQKFLPLLKELQVKRIVLEATGRHEHPFVFACDQANLPICVVDPVKVRRFAQALGIHAKTDKIDAALIARFAATIKPESKVIPDKQSRLIKDLLVRCAQLIEMSTMEKNRLQIMPKELHSSIKSMLKMLEKQLESLSEKVEHLIRQNQEWRIKTEILTSVPGVGKILAYTLLCELPELGKLNSREIAALVGLAPFNKESGRMKGKRSIRGGRPRIRTIMFMAMMSSVQCNPVFKQKYEHLKAAGKLSKVALIACMRKLIVILNTMIKNQQQWQLN

SEQ ID NO: 400301 - protein, 344 aa, unidentified
MQVDIGIDSHKRSFSAVVVDELGRVVGSRDLANTPTGFAHVEAWATEHGDVRRVGIEGAGSYGAGLARHLCARGFEVVEVPAFAAHRERRHAPAKGKSDVADAASIARVVARGEGLTPVRHDPVLSELRLLSDHRDQLVRARTQIANRIHKLLVAGYPGYETRIPTLTSKRHLGAVGTLLRGDRSVRAELVRDHVAELGRLDHRIAGVTKQLTTRVVATETSLLGLHGVGVVTAARILGEVGHRAGVGTRSSFAMFTGTAPLEASSGATTRHRLNRGGNRKLNCALHTIALTCARSDPATKAYLARQKAGGKTGREAIRSLKRHLSNAVHRALVCDFDDRKLAA

SEQ ID NO: 400302 - protein, 392 aa, unidentified
MRFVGIDIASEKHVVAVVDEAGGVLVKPTGFGEDAGGYEKLFDLLGGTGEVLVAMEATGHYWKNLFAELAARGFPVALLNPVRTRRFAGEDLERTKTDAIDALGIARFAQQKRPAVTRLTDSATDEIRELVRHRERLVQDFGDRTRQLHRLVDLGFPELKRYIHTLDSQLATAVLHEWPTAEAFLGLPWKKLAKFRYDGVHIVGDELAKSIVETAKVSVGRHHGYAYRIQVQDTCEDLDLLRRRIKRLDHDIETKLKDHEVGSLLTTIDGIGTQTAARLVAELGDPADFRDAAAIAAYVGVVPGLKQSGKRAPSRASLTPVGNARLRAALWMPTLTAVQRNPWLKAYYERLRARGKLPKVALVACMRKLLTAVYSVAKHRRPFVPEVAGGTA

SEQ ID NO: 400303 - protein, 323 aa, unidentified
MNKDKNYFGIDISKAVFDVCDNNGVYYQFKNNPSGFKKLLKLLDANSICVMEATGYYHLRLAYFLLEEGQGVSVVNPLKIKRYIQMQLSKIKTDKSDAKMIQSYAKDQHPSLWFGQSKTQQDSLQLSRLLSVYIKQSTQLKNKIHGEEVLGNPSKLVVRSLKRQLKSLQKEIKILEDQLLKNVKSEYQDSLTLLKSIPGIGDKTALMLLVFTDGFNRFTSYKELCSYAGITPVIRQSGSSVNGRPRISKMGNPKLRNLLFMCSFNACKYNAACKALFDRIVAKGKSKKLALIAVCNKLLKQAFSIVKNKLPYDANHRSVLVKN

SEQ ID NO: 400304 - protein, 346 aa, unidentified
MLYAGLDLSRKRLDFHLLDAEGATVDVGASPPDADGLRALSQRLELHGAPIRAAIESMNGARFVHDRLELAGWQVEIADAQKVKGLAPLACKTDRIDAWVLAELARRDLVPAIWLPDPRVRAERERARWRLHLVRHRSSLKQRVHAVLLTHGKPCPVSDLFGMRGRQLLARLGLPEPWQGTIEASLRLIDELDREISDCERELRRLGADHQYVPLLCTVPGISWVLAYTIAAEIGDISRFPTPPATAASARASTSPANATCAARSASRVPATCAGRSSRPQHTPARIRSTATATSRRRRGSASSAAPRSPRSTSPAGSPKRSGTCSAAANASLPKAPPTPWPPDGP

SEQ ID NO: 400305 - protein, 454 aa, unidentified
MDPGFLEYVRLSPRAIIGPGARFLEFLLMEPHADDATQKEEQMELLHRRCCGLDVHKETVVACLRLVIDGKVITEVRTFQTTTADLLRLSEWLATNECTHVAMEATGVYWKPVWHILDDGEFKLVLANAAHVKNVPGRKTDVNDAMWLAELLAHGLIRASFVPDAQTQEMRNLLRTRKQLVREQSSHVLRVQKTLEDANIKLDSLLSDLMGKSGRAMIEALIAGETNPVKLASLADRRVKASPEEFREALRGRVTKHHRFLLHLHLNQIDALDAAMATVDAQVETNIGPFRTAVDLITSIPGIKKLGAHVIVSEIGIDMSRFPSAAHLISWACICPGNDESAGKRRSNRMRKGAPWLKATLLQCAWAAAKKKDSYLQAQFYRIKARRGPKKAIMAVAASILTAIYHMLKDGTMYQDLGCSHFNRRSTDQQKKRLVKRLADLGYAVEIKPLAAMA

SEQ ID NO: 400306 - protein, 363 aa, unidentified
MTYERSTLVNSEKYIGLDVHQATISVAVLDSKGKLIMESILETKAATILEFVAGLRGTLSVTFEEGTWATWLYDLLKPHVDELVVCNPRKNALLKDGNKSDRIDARKLADRLRLNDLKPVYHGETGVRMLRELARSYLNLVKDQTRVMNRLKAMYRSWAIPCAGRDVYYARHRAEWLGKIREAGVRRRAEHLYQQLDMLQHLRQQARRELLAESRQHPITAKLRQIPSLGLIRSALAVALIRTPHRFRTRRQLWAYSGLALETRTSGEYRCVEGQIRRSKKQISIRGLNKDHNHDLKGLFKGAATRASVQPGPFQDFYQRSLAKGIKPTMARLTLARKIAAITLTLWKKGENFDAEKLKAQAA

SEQ ID NO: 400307 - protein, 411 aa, unidentified
MQYFIRKEGMPMLSIGIDVSKGKSTVCGMKPGGEIMYAPFEVQHTREGMSELVSLLRSSGEEVRAVLESTGSYHCPVVAALLENGIFVSVVNSLRMKRFCSQSIRKVKTDRIDAMQIALYGLAYWQELQPTRLPEDTYRELQLLARQYYQMTSLLIKAKVDFNAICDQVLPGMQELMNDHAGRHKLSDFVLRYHHTTHILEMGETRFRKDYCKWAEKKGYRNCERMAALIFATAQNGIPVLPNAPSTQIVITEAIRVLHTVEASRDAILTQMQALAKTLPEYSLVREMPCIGDTLAPRLIAEIGDVRRFHSKRALIAYAGIDAPPYQSGKFCANNRHISKRGNRYLRKTGYEVMQSYVMHKPANDPIFTFIEKKRGEGKSGKLAMVAGLNKFLRVYYGKVTELYRSSSAIE

SEQ ID NO: 400308 - protein, 344 aa, unidentified
MSQVTTIGLDIAKNSFHAHGADESGEAVFSRKLSRGKLLDFFAAQPACLVAMEACGGAHHWARALTQLGHDVRLIPPAYVKPFVKRHKNDAVDAEAICEAARRPDMRFVAVKTEEQQAAGMVFRTRDLLVRQRTQLVNALRGHLAEYGWVAPRGKAQMAILADLLDEDEMASSLPEAARAMFRIMTDMLAELDHRIADLDKEIARRAREDEVARRLMTIPGIGPIAATAIVALAPHAATFSKGRDFAAWLGLVPLQHSTGGKQKLGRISKMGERTIRRLLIIGGSAVVRQATIHGAPAGSWLEGMLARKPRMLVSVALANKMARIAWALMTKQEDYKAPVVAAA

SEQ ID NO: 400309 - protein, 318 aa, unidentified
MYHSFIGVDISKDEFHATIQSTNKVIKFANTRDGFLEFQRHYYQILPESLVVLEATGGYEITFANYLYKNNIAVHRANTRIVKSFIRSLTKLGKSDSIDAQGLAQYAKERHDSLALYIPILDIKKEMIELTNRKNDLKRIATQEKNRLQAPDNQYCKDSNTTMIAFLQGEIDRISVRQKEIINEDKLLKAKVNLLTAEVYGVGENTAISLLSVFPEIGSLNRRQVASLAGVAPHPYESGKKIGYRMTRGGRDNIKPVLYMAALSVSRDKGTLGAFYKRLIANGKKPLVAIVAVMRKMIVIINAKVKELLKNYTELGIV

SEQ ID NO: 400310 - protein, 311 aa, unidentified
MTDHTIGVDISKSHLDVFRLEDGAAQRFDNSAAGFRALTKWLGKAPVARIVFEPTGPYHKAFEAALAKTFPLVKVNPLQARRFAEAHGTRAKTDAVDARMLARMGMAFDLAPQVPCSKEILVLRDLHVARAGLIKDRTRLRNRGQTQDIAVLKRQTKARLAQVERQIVELDAEIAALIAAGQTTARNCDILCSMPGIGTVTAAAMLTLMPEIGTLERKQVASLAGLAPITRQSGQWQGKAFIAGGRKPLRDALYMPALVAMRFNPDLKAKYEGLRAAGKPAKVAIVAVMRKLIETANALVKADRTWTQKTA

SEQ ID NO: 400311 - protein, 405 aa, unidentified
MSVHHGALVTSSTIVVAVDVGKTSAMLLVTDGGRKHVFGPVEFAMTRSALSAMVDRVSAVVAASAQVKVGVEAAGHYHRPVLDYRWPAGWEVLEFNPAHVAEQRRVAGRRRVKTDVIDLEAITDLMLAGRGQVITDREVRIGELAAWATHRSRRVASRTATKNQLLGQLDRAFPGLTRALPDVLGTKIGRLVAVEFADPARLSALGVKRLIRFAAAREVALRRPVAERLLTAAADALPTRDAVVARRVLAADLELLADLDTQIVDAESELAALLPLTPYATLTSVPGWGVVRVANYAAALGDPGRWPGPRQIYRAAGLSPMQYESAGKRRDGAISREGSVALRRALIDLGIGLWLTEPAAKTYAAGLKARGKHGGIIACALAHRATRVAYALVRDRSRYESARWT

SEQ ID NO: 400312 - protein, 401 aa, unidentified
MIGVGIDVAKSKSMVVILSDDGEFIKNPFEIANTESGLSSLCQIIKEIPDKVYCVVESTSVYHFPVVSYLQENGIFVSVINPLIIKKYASMDIRKVKTDKADSLKLASYVLDNYRHLVNYSAEDEVYSELRILSRQYLHYVKVLANEKVNLTDMLDRTLPGIKPLLKSHIRTTGKNKLCDFVERFWHCDIITSMSESKFVSEYIKWAKKKGYHPNETKAKSLYANALECIPTLPSKSASTKMLVLEAAKAVSNVETTLATIISQMSELAKSLPEFSTVRAMSGVGDVLAPRIIAEIGDVRRFHSASALIAYAGIDTPPYESGDFRASNRKITKRGSASLRKTGYEIMQALKIVQPQNDNAVYQYLIKKESEGKALKVAKIAALNKFLRIYYSRVKEIYLNS

SEQ ID NO: 400313 - protein, 441 aa, unidentified
MRVVYKRCAGLDVHKKTVVACRRWTKEGSVVETEVKTFGTTTPELLEMVDWLNEWEVTQVAMESTGEYWKPAFNLLEGNFEVLLVNAQHVKHVPGRKTDVKDAEWLAELLSYGLLKASFIPAKLQRDLRDLTRYRVKLVQERVRVVNRVQKVLENANIKLGSVASDPLGVSGRQMLAALVAGETDATLMADLAKGRMRNKIPELEKALTGIVRDHHRFMLAQQLTHIDFLDEQIADIEAEIGRRVETMSQRPPSDNQSSLDEPKENEAGVQLTWNEAITLLDTIPGINKRTAEAILAETGIDMDQFPSAGHLARWAGVAPGNNQSGGKRYSGKTPPGNRALRTTLVQAAWAAQRTKGTYLSTVYRRLAGRRGKKRAIVAVAHSMLVSIYYMLLRHQPYQELGGDYFDQRRKEAKVDYLMRQLYKLGLSVRVEPVPIQLVAG

SEQ ID NO: 400314 - protein, 411 aa, unidentified
MDLVYPRCAGIDVHKRTAVTTIGWVDEQGQRRRKTRTFGTMTAEIEQLAAWLVEHGVTHVAMESTGVYWRPVFNLLEPHVEVVLANAAHVKAVPGRKTDVRDSEWLLDLMQHGLIRGGFIPEAPIRALRELTRYRTGVIEERTRALNRIQKVLEDTNIKLASVVSDILGVSGRAMLEALIGGETDPEVLAGLARGTLRKKHDALVQALQGRILDHHRFLLRTLLAHVDQLTASIAELNAEIARRLEPYAAAFDLLCTIPGIKRRVAEVVLAEIGTDLGRFADARHLCSWAAICPGNHESAGKRRSGRMRHGNRWLRGILVQAAWAAIKVRGSSFGARFRRIARRRGDKRAAIAVAHSLLTVVYHVLTRDEPYRELGGEYFDRRKPEHQARYYARRLAELGFDVTLDPVTAA

SEQ ID NO: 400315 - protein, 360 aa, unidentified
MLYLAIDQHRKQLTVNLRDEQGDVLVKRQVSTEWPRVRSFLEEVRRTSVPVEGFVAILEVCGFNDWLLKLLTEYGCREAILIQPEKRSKKKTDRRDAYALGELLWVNRQRLLAGKKVQGIRRIQLPTDREAEDRQLTAVRQRMGRQRTRTINKIKHLLRKHNLEQQQPAKGLDTQRTRKWLVALPLGPIDRLEMDLLLAQWKLWDEQLAQLELEIEKRQAQSKTAAVLATIPGCAAYGSLALASRIGPIERFPRPASLANYWGLTPGCRNSGEATDRLGSITKQGSAMARFVLGHMVLHVLRRDGRMRAWHGRIKRRRGSKIARVAVMRRLATIIWHMVKHNEPYVVGGPPQRKLAAQAA

SEQ ID NO: 400316 - protein, 388 aa, unidentified
MEQVIIGVDPHKLSATIEVVDHREKLLGSGRFTTDRAGYAAMRKYVDAWPQRVWAVEGSNGAGRPLAQRLLEDGEQVVDVPAKLAARVRLFDTGHNRKTDAHDAHAVAAVAVRTKTLRVLQLDGELEALRMLTDRREALTRRRVQTVDRLQALLAELLPGQAKRDITTGQAKTMLASVRPRDIAGKTRRRIAAEELAELVAVEAKIKKATAELKAIVLARGSRLMDLHGVGPVVAARTLADVGDVTRFADRNRFASWTGTAPLDASSGEQNRHRLSRAGNRRMNHMIHIAAISQIRLDTDGRAYYRRKRAEGKKPLEAIRCLKRRISDAIYRQLIEDAQRAAVEDDGTGPGGHCGATLQSSAVDLHPHIDTSDQPLPGPARKTLRRTG

SEQ ID NO: 400317 - protein, 341 aa, unidentified
MSKRSFPSCAVLHCGIDVSAATLAVAVQPEGSDDFQQREFANSAAGHKQLIAWLLKRGASVRVSLEATGIYSLDVAMALDRADGIAVAVLNPRTVHQFAESLRRSKSDAADAVALAEYSRRMPFVAWVRPSGATLELRAISRHIATLTEEQARWKNRLHAAAGSGSTPRCVREDLRRSITGLEKRLLRLRREAKAAIAKDAGLAARFKHLTGITGIGEVSAVQLLGELAGLAPEMTVRQWVAQSGLDPVHQTSGTSVHKRPRISRRGNRHLRRALYMPALSAARFDPHMKAFYTLLLTRQKTRMQALIAVARKLLHAIFGIFKTGSEYDGAKLFPLLIPTS

SEQ ID NO: 400318 - protein, 370 aa, unidentified
MQDYSEVFVALDVSKSKNAVAIADGSRRGEVRYLGEIENTPEATRLLITKLSKTYKKLTFCYEAGPTGYGLFRWITDLGHECIVVAPSLIPSKPGDRVKTNRRDAESLAKLLRAGELTAVWVPDEKHEAMRDLVRAREAAAQDLTRKRQQVTSFLLRHSRSYPRKKTWGATHARWLTEQVFEHAEQRIAFEETVMAVRQAKDRTERLEAAIAEFVPRWSMAPLVAALQAMRGLDLVSACILLAELGDLRRFESPRQLMGYLGLVPSERSTGETVRRGSITKAGNVRARRVLIESAWCYRHPPRLSAKKRFLFERAPRAVREIAWKAQSRLSSRTRTLTAKGKRSTIVVAAVARELAGFIWAIGRHVAPAS

SEQ ID NO: 400319 - protein, 318 aa, unidentified
MSEVVTFEQIVQRGCGLDVHKQTVVGTIDGAGLQRETREFRTTTSSLKELREWLERSEVTHVVMESTGVYWKPVYHVLEPSGMTVWIVNARHVKYVPGHKTDKRDSKWLCKLLLAGLLKPSFIPPREQRELRDLTRYRRKMIEQIASEKNRVIRILEDCNIKLSSVLSDTHGVVGTKLIDKLCQNGKISMEDIEEVYHGKLQASREEIYEACEGFVTAHHVFMLQAIRKDISSCEAIISELNARIRKMLAPYGNVLELLKEVPGLSTKSIEDLIAEIGLDMSVFPDEKHLASWCGVAPGNNESAGKKKVDAHLMATNR

SEQ ID NO: 400320 - protein, 421 aa, unidentified
MTRRIAGIDIHKNVLMAVVATVLEKEIDGGREQQIEYEGRRFGSGTQERGHLVAWLRERQAEEVVMESTAQYWKPVWMDLELHFPKLHLAQAHSHKAPKGRKNDFADARRLTRRMAAGELILSFVPDGEQRTWRTMTRGKQQLVRDRVRLQNQTEALLEEMRIKLSGVVSDLFGVSGRRILEALAGGETNPEKLADLGDDRLKCGREALVDALTGHSEPMHLQILKLSIERLKLLDRQIEALEQMAAGALNKHGAAVTRLAGVPGFGVDSAQPVMAEVGSDAKSFSGAGELASWVGTIPGSDVSAEQNHSSRSPKGNKFLRRIFTQAAQAAVKTKGCHFQNVFRRLVPKLGYKGAIWAIAHRLCRLAWKILHDGVSYIEQAAETTPQAKKRRAQRLTQALRRLGYQVAITPIAPKAEVAQG

SEQ ID NO: 400321 - protein, 344 aa, unidentified
MTPIELNATAHDASLSLFAGIDVGAEELVLVIRKNGNPFDPQKYANTRADHARLAKKLSKLPGIIVCLEATGIYHFDLSIALHDAGVLLMVVNPKSSHNFAKVLMKNSKTDAVDAHTLAEYAARMDFVAWTRPTTEKLALRSFARRINALTRQKAAAKNHLHALNATLETPKAVLRDARLAIVQLERRIDHLTAEALLLIAAYPDLKRILTLLVGIKGIAETSAIALMGELLLLPPGLSHREWVKFAGLDPKAFDSGKSVHKKTRLSKAGNRQLRSALYMPALSAKQHDPHVRAYFQHLVDNGKKPLQAVCAVMRKLLHAIHGMLKHDQPFDNSRFYVIPSAVE

SEQ ID NO: 400322 - protein, 355 aa, unidentified
MQQDSRGDVYVGMDYHKDNVQVCVLDAAGKVLLNRSLPNDRRTITSAVAATGMPRRAAMEACGGAAHLAQELVDHEQGSVELAHPGYVNRMKQSPDKTDFSDARLLADLTRVGYLPRVWLAPPYLRELRSLVRYRQQQVNYRRSVKLRLLALLREHRLRPGGPIRAWTRLWLRWLHEEGLARLPESCRWILKRHLRALMQSTEEVDAAEERLRKHTHGDPVVERLLGEPCVGEVTAWVLRAEIGRFDRFSRPKALSRFCGLSPWNASSGQRQADAGLIKAGSNLLRATLIELAHRLGRCEPHWIEMNHRLREAGKSGSVAAAAVANRWVRGLWHRMQEIPMMAEDGGELVSPVGA

SEQ ID NO: 400323 - protein, 408 aa, unidentified
MKLFVGIDVGSKKLDVCFLDSEDTRLKEETLSNDLNGANKIKENILAYNGQSHYEKIVVGMESTSVYSFHPSTLLDNDKDLQRIGVEVVVQNPKAIHRFKGLFEEDKTDRIDAFRIADFLRFGRYNKTVIKEEKYVALQRLTRSRYQVIQQLTECKQHFLENLYYKCNTLSNEVDTSIFGTAMMELFADSLSLDDISNMELEELALFLQGKGKGRFRDPEKLAKTIKKAIRDSYRLGKVVQHSVDMVLATYARLVQTLKKQIKELDKGIKALFEILPEAQCLESVPGIGPVYAAGIIAEIGQIERFETQAQLAKYAGLYWKRSQSGDFESERTPRIKTGNQYLRYYLVEAANSVKRNEPVYHEYYLKKYKEVPKYKHKRALVMTARKLVRLVDVLLRNHQLYTSERSV

SEQ ID NO: 400324 - protein, 421 aa, unidentified
MHVVYERCAAVDVGKDEIAVAVRMPGDGPDGRVTVKRAFRTFYGVMGEAARWLVSLGVTHVAMEATGIYSMPVYYALVEHGDFIRVLICNAAHVKNVPGRKTDYADAEWLAHLLECGLLAGSFIPPAEIKAARDVIRYRTKVAQQRVSEIARLGGTLQDAGIKIDSVASSIATKSGRAMIEALIDGERRGPVLAQLAKGTMRAKIADLSMALEGRFSDHHALMCRLHLDHIDHLEAAIARLDARIEQMTEPFQRWRDLLITVPGIGRHASAAVISEIGIAVAEFFPGDAHLASWSGLCPGNHESAGKRRSGKPRKGNTHLQALLVECAWSAVRHHGYLKSLYHRHVMKNGGYRSATAKKKAIVVVAHAMIVIIWHIMVTGQPYHELGADYFASLRDPERETRRLIARLQALGHTVTINPAA

SEQ ID NO: 400325 - protein, 422 aa, unidentified
MLEETHDTEEIIARVAALDIGKAELVCCVRVPSAQGSGKRAQEVRTYPTMTRSLLVLADRLGELGVTRVVMEATSDYWKSPFYVLEAHGLEVWLVNAKDVKHLPGRPKTDKLDAVWLAKVAERQMLRPSFVPPPPIRMLRDLTRYRADLVATRTAEKNRVEKLLEDAQIKLSVVASDIFGVSGRDMLAALIAGERDPKVLAQLARRRLRAKLSLLEEAFHGHFSDHHAFLLQTMLSRIDQASADIATLEAHIEAEIAPFAQAVDQLDEITGVGRAAAQVIIAEIGTDMGRFPTPGHLVSWARFAPGVKESAGKKKGKATTGHGNPYLARVLGEAAVAAGRTNTFLGERYRRIARRRGTKKAMVAVGRSILIIIWHLLSDPDARFHDLGPGFYDTRIDADRRKRNHVRQLEALGYTVTLQPAA

SEQ ID NO: 400326 - protein, 459 aa, unidentified
MNQTSPSSPAADPQFAAFIGLDWADQKHAWALQEAGSQRVEQGTVDNTPEAMDAWVTELTSRFHSQPIAVAVEPVRGSVIAKLSKYANVMLYPIHPKASSDYRSAFRPSGAKSDPSDAALLLEMVTRHRDRLRKLDPDTEPTRMLRILVERRRDLVDQQTAYTNQLTAVLKQIFPQALDWLDKLNTPLAFDFLERWPTLESLRKVRPQTLRDFFHKHNSRNSERIEQRIQQIPQAVSATEDRALIEPGILWIRSVSKQLVQVSQAIAEFEAKIEEVAQAHPDFNLVHSFPGAGPVMAPRLLATLGTQRDRFGSADELQCFTGIAPVTVTSGKQKWVHWRWACSKFDRQTIHEWAGHSRKKCEWAREHYQQQRDRGNGHHAAIRSLGYKWLRILYRCWKDSVPYDEARYLKARRPPPQSQPTQSKQPRTQPSKISTGAVDIDWKYCGGFSKPTRISHLTE

SEQ ID NO: 400327 - protein, 313 aa, unidentified
MEREPVWAGIDVGKRELAVALSTGAEFILANDEAGVAELIERLCAAAPALVVLEASGGYEHAAWIALWEAGLAVAVVNPRDTYHFAQASRRLAKTDALDARGLAEFAARMRPAPTAPPADEELKALVGRRRQLVAMLAAEKNRRQQAPQWLRKSHDRAIRALERERGAIDHAIERKLEQSAHLSRQRELLCAVPGVGPVACATLLAKLPELGRLNRREIAALAGVAPLDQQSGVWRGRSTIFGGRAEVRAVLYMATLAAVRCNPMLRSFYRRLREAGKPAKIALTAAMRKLLLTLNAILKHRTHWSPVCLESA

SEQ ID NO: 400328 - protein, 406 aa, unidentified
MTAYRVHVGIDWATVAHRVVVVDAEQRVVGERTVRHEGGALEAFAVWLGELAGGEPSEVAVALETPRGAVVDVLLARGFHVWALNPKQLDRFRDRYTVAGAKDDRRDALALAAALVTDLAAFRRLAPEDPLIVELRELSRLEDDVQAEAHRLSNRLREQLHRYFPQLLQLVLAADEPWLWTLLERAPTPSAAQHLPRATIQTILTRHRIRRVDADAVRALLRAPALPVAPGTVQAAQRHLAVLLPRLRLVHQQQAECATLIEGLLERLGESQGHRDVPILRSLPGVGRIVAATMLAEASQLLADRDYHALRTHTGVAPVTKQSAKHRQVQMRYACNRRLREAVYHWGRSVVCHDPHSRAHYEQLRARGHSYARALRGVVDRLLRVLVAMLKTQTVYDAHRRLPIAA

SEQ ID NO: 400329 - protein, 406 aa, unidentified
MIRYVGLDVHKQWTQVARHLPDGQVQRERIPTSPQFLRDFAETLGPQDVVALESTTNALSVARLLKRRAARVLVSNPLRTRLIAESKIKTDKVDADVLAQLARSGFLPEVWQPPEDVELVRRRSAYHQALGQEITRVKNRIHSVLARHLVEPPVADLFSDKGRAFLLKADLPQDEKAQLDLDLYLLETLEAIRGAAKEELARLAHSSPQAELLMTIPGIGYTTAIGILSAIGEIERFREPAKLVSYFGLNPIVHQSADRCYSGHISKQGRCQARWLLVEAAHCAVRCPGPLRGFFLRIQRRKGTNVAVVAAARKLAVIIWHMLTSGEPYRHAPERTTREKISLMHYHATGLRRRGGLPKGAPRPASCGSGVRGRTVKARQDKERLLQAQGNYENLVKERTERRRAH

SEQ ID NO: 400330 - protein, 458 aa, unidentified
MNRKQRRELARKIHADDVTLDVVHPAAAGIDIGNESHYVAVSPKRDSEPVRRFGCTTAELKAMAAWLKECGIETVAMQSTGVYWIPVYDILEEAGFEVYLVNARDTKNLPGKKTDVQESQWLMKLHTYGLLRNSFRPTNEIRMMRNYWRQRNDLVRSAGRHIQRIQKVLTQMNVQLGNVISDVSGLTGQAIIKAILDGERDPWQLAAYRDPRVKSSEEEIAQSLEGNWQEDLLFVLKQEQDGYEFCQKQMAECDVRLEEYLKGREDRSGGASLPEEKRKERRRKKRGNAPRFDLREALFRMSGTDLTQIDGIDTITAITILSEAGYDMSKWATEHHFVSWLRLCPDNRISGDKVIGKGRLPTNNRLTVAFRMAANSLRKSNTYLGAQFRRLRSRLGAPIAIKAMAAKLARLVYRMLRYGMEFVDKGAEIYEAQHRQHQIHSLKRKAAQMGFQVVEVAA

SEQ ID NO: 400331 - protein, 387 aa, unidentified
MNEVFDPRKPATAFDHTTTLVTVLELSGKSWELGASVPGVSRRPLRRISVGDVAAILKAIEQWKAEADKAGCQVSRVVVGYEAGRDGFWIARSLREYGIEVYVMHAASIAVERRGRRAKTDRIDTDMLLGTLLGWLRGEPRRCTMAPIPTAADEDMREPGREREALTAARLKIENQIGSLLTRYGIIGFKPRLKKAAQHLEQLRTPDGKALLAKTMDRLRRLMTQHRLLTEQLKDIETARQQVVAVVDPDRIERMIQLLVHIVGLGVETATTLVHEVFSRKFRDRRAIAAFVGLTGTPFNSGGSTREQGISKNGNPRVRRIVTQLMWRWIKFQPESDLTKWFLERTSGAKGRIKKIMAVALARKLLVALWRYVETGVIPDGARLAAA

SEQ ID NO: 400332 - protein, 372 aa, unidentified
MGHHSEAFIGIDTSKSRNAIAIADGGRGGEVRYLGEFPATETAIRKLVVKLAAKYSKLTFCYEAGPTGYGLYRLIKSLGHECIVVAPSLIPKKPGDRVKTNRRDAVSLGKLLRAGELTAVWVPDERHEAMRDLSRVRQATKKDLQGKRQQISSLMLRLGRVYPGKKTWGPTHMKWLMAQKLEHREQRMALEELLEGMRQEEERVERLEQAIRDAAPDWSLAEVVTALQAMRGIDLIAAVVVVAEIGDLSRFQNPRELMGYLGLVPSESSTGDNVRRGSITKAGKGRARRILVEAAWAYRHPARVGLAKQPKVAAAPRRVREIAWKAQTRLCARFRSLVRKGKNPAAAAAAIARELAAFIWAINREVMASRRA

SEQ ID NO: 400333 - protein, 349 aa, unidentified
MTVTIVEEARPVTGGVDTHADTHVAAALDPVGGLLGVEEFPASSAGYARLLSWLGGFGTVCLAGIEGTGSYGAGLARHITAAGVRVVEVDRSDRQDRRRQGKSDPLDAVSAARAAQSGRAHGAPKGRDGAVEAIRTLMVARRSAAGERTRTINQARALILTGPDDLRTRFARHTPAALITGLASLRPRTGDVAGHATRVALRELGRRARFPAGQLARLDELIVPLVTARAPGLLALYGVGPRTAALLLIAAGDHPGRLHSEAAWAHLCGAAPIPASSGKVTRHRLNPGGDRQDGHALWRIVFTRLGSHPATRAYAERRTAEGKSKAEIIRCLKRYVAREVYPHLRPAGG

SEQ ID NO: 400334 - protein, 348 aa, unidentified
MYHVGVDLHKETSWFYIIDSNGKKVDSKNILNKPEILRKYFGQIPKPFVLAVEATYNWYYFVDLAQEYAKEVFLANSYELKAFAKRHKKTDKIDARLIANILQKGFLPVVAIADQHTRQVRELLRYRIRLVIDRSRNISRLKALLDKLGINSNGDFTTYKRLKTIIMGELPSIYIQLVKNYIEIITELTQKLKTIEKDITTVSCNNHHMVNLMSVPGIGDFSAALIKSEIIDISRFVSFNRLCAYAGLSPRVSASANKIHHGPLNKNRRKNLQWILLENVYHFIKAIPEKQEKYEILKQRKGHNTAKVAMAREMLKIIYHVLKEQRPFYFSNKKYQIQSVAAPALSGV

SEQ ID NO: 400335 - protein, 343 aa, unidentified
MKLKKVTTWKDFAGCSAIGVDVCKKHLDVVGLSGAAGYSRRISNTVGSIQGFIEGLVRDNFQGTVLCEATSHYHILLAVMSCEAGLDIRVINPLLSSKHAKSAIRKTKTDRVDARVLATMILTEPNLPPPLKLTRSQCAVRHTLGLIHSQEKHLQGMNRALASYQERIGQLGFAFGEAYKETAEAVKQLQRAHEKLVAELESCMREIQPERQEIIDRVSEIPGITRRNAALFTFVLDPQVSSAKSWMAYVGLDVAIRESGTWCGRGKITKRGPAWMRKRLVQAAWGAAMTNPQGRCYYDFLKAQGRKHKEALVIMARKLLSIMYSLVVNGKKFNHSKAFQIMA

SEQ ID NO: 400336 - protein, 429 aa, unidentified
MTCISAGVDVSKNRSTVCIMDQDGKFIMRPFLVWHSTEELDFLADTLKRLNGEVRVIMESTSIYQYPIALHLKEKGIFISIVNAYEMKQFANIDFRGGKTGKKDSRTIASYGISYWDKLVEWQIPKDTYFNLDLLNRTYMNAKKHRQIILQELQHYIDCAMPGMDKELHSLNLNTKKDFMLDFVEKFWHRDEIVNMTEAEFTEVFTAWAKEKGYRPGKGKAAKIYAIAKSCIPYYPANPTVKTILQCIVDKLSGVNRTLVTIVTQMIEEAKKLPEYQIVREMPGVGDPLAARFFGSAGDIRRFKNSKALVAYAGIDSPPDESGDFSSTHRHITKKGSKVFRDTGYEIMMALRAQKRTWEKVRKNPEVYDYMLREEAEGKPRKVAKIAALNKFLRIVYARIKELYDNMALAERAKTKTRSKTRAKTKVTA

SEQ ID NO: 400337 - protein, 424 aa, unidentified
MKNSAARKLRQVPEGYLIIGIDPHKKRNAAVAITQDYSLQAKFKFDNTREGFETMLRRARTEMVESGCRGVMFAIETGSHYWRNVAYFLDEQGIPFRFINQFTLKRRREGKDLNRRKNDYRDSEVAAQLLCTGEFTESKLPQGVYAELRSAHNAYRRLVVERTRITNLMKGLLDSLFPEFTLVFKDPCGLTALSVLSTCAVPRVIAGMAEDEFVAKIEERHQGHRLMRMKLRKLHYLARTSIGIDAGAPSVSTEISFLVEKLELICRQTRIMERTLAKLVDETEEGKYLLSIRGLSYIAVAGLLAELGCFKAYRSAKQMIKMAGSNPTESESAGKRSTRTPMSKRGRPVLRYCAWTSVIPMLRLNDEFRAWAKQMRERPVHANPLNGREIVGAALNKLLRLAFALVKNQTYYQAPKGESIPVAV

SEQ ID NO: 400338 - protein, 343 aa, unidentified
MQTITTIGFDIAKSVFQVHGVDASGQVVVRRQLKRRQVIVFFQKLPPCLVGIEACASSHYWSRELQALGHNVRLMPPAYVRPYVKRQKNDMADAEAICEAVTRANMRFVPTKTPEQQSGLMLHRTRHLFMRQQTSVINAIRGHLAEFGIVAPVGRRGVEELLRVVADPRDKRLPEVVRACLAALGSQLLSLKKQILDFDRMILAWHRSNQTSKRLNCIPGVGPLLSTALVASVADPKTFRSGRNFSAWIGLVPKQNSSGGRDKLGSISKQGDRYLRGLFVAGALAVIRYAKIHGTKHRPWLTALLARRHTKVAAIALANKLARMAWAMMATGERYNYPASLKV

SEQ ID NO: 400339 - protein, 369 aa, unidentified
MDAALTLTASRCAILVVSKHKLKERASMEEVSIIGVDLAKNVFQLHGAAADGVVVFRKKLSRLQFARFMTDHPACDVAMEACPSAHHWARELSAYGHSVRLIAPHYVKPFIKRQKNDAADAEAIVEAAMRPTMRFVEPKTEAQQARAVAFRAREQIVKQRTEAINALRAHLYEFGHVAPEGVGYIPRLAKVVEDPGSGLPDLARDICRMVLEQIELLTSRLTAVSAKLAAASRAAAMPRQLQTMPGVGPITALAVETFAPPMDQFRRGRDFAAWLGLVPRQHSSGGKQRLGKTSKMGQRDIRRLLVTGAMAVVRWALRRGAPQNPWLERMLERKPPMVAAFALANKMARGIWAMLTRGEDYRDPVMATA

SEQ ID NO: 400340 - protein, 339 aa, unidentified
MRQITTLGIDTAKQVFQLHGVDAQGNVVLHKRVTRKQVLPLLAQLPPCLVGLEACGGSHSWAREITKLGHTVKLMAPQAVKPYVQGNKTDGRDAEGICEAARRPRVRAVAINSTADQDLQTLHRIREQCVKMRTALANQLRGLLGEYGLVVPQGIGRIRQAIPLIVEDADNGLSALCREWLWDVYQRVCTLDAEITRYNARIAQLADQSEVCRRLTRVEGVGPLTVTAFVAAVHDPRAFKNGRHCAAWLGLVPTQHGTGGKTVLGGMSKRGNQYLRRLLLQGAMAVIRRVDGKKDARSVWLQQLRARRGTQVAAVALATKNARILWALLATGDSYRQAA

SEQ ID NO: 400341 - protein, 343 aa, unidentified
MQTITTIGLDIAKSVFQVHGVDAAGEVVIRRQLKRRSVLAFFQKLPPCLVGIEACASSHHWSRELQALGHTVRLMPPAYVKPYVKRQKNDAADAEAICEAVTRANMRFVPTKTLEQQSCLMLHRTRHLFIRQQTAVINSIRAHLAEFGIVAPVGRKGVTELLHVVADPSDKRVPEVGRTCLAALGDQLLGLKRQILEFDRMIMAWHRSNQTSKRLHYIPGVGPMLATALVASVADPRTFRSGRNFSAWIGLVPKQHSSGGKDRLGSISKQGDRYLRSLFVAGALAVIRYAKIHGTRHRPWLTALLGRRPTKVAAIALANKIARMAWAMMAKGEHYKQPAALAA

SEQ ID NO: 400342 - protein, 341 aa, unidentified
MKKFIRVGVDLAKNYFQIHALESENGPALMRKLKRSKMREFFSKIEPCLVGMEACGSAHYWARELKAMGHEVLLMPPAYTKPYVKRGKNDAVDADAICEAMSRPGMRFVPIKSAEQQAILMLHKTRELLIKQRTMTINALRGHLSEFGVIAAKGIGRVDELLDLAESDATFPAAAKAAMKVLASVLDEFDKAINDLEGELTSAHAQNEMVQLLDKVPGIGKLIASVVVASVPDPSVFKSGRDFAAWLGLTPRQNSSGGKQTLGGITKQGNRYIRKMLVLGATSLLNVVGKRKGALRDWVAGLLAKKPARLVTVALANKLARILWAIMKTGENFRTEMFAKA

SEQ ID NO: 400343 - protein, 421 aa, unidentified
MSITDGCPSDPLPHLEPDDRVAGIDWAKDDHAVAVVDAAGRTVERFTVAHTGAGLRELLRRLGRLQVGEVAIERPDGQVVEALLEAGTTVVVISPNQLKNLRSRYGQAGNKDDRFDAFVLADTLRTDRARLRSLTPDSPATLTLRATVRARKDLVNHRVALCNQLRAHLQTFYPAPVGLFHELDGLMSLKFLARFDCQDRADWLTPKRLAAFLAGIRYCGSTTPEAMHARITAAAPGAKGDTGSAAVHVTRALVAALQALIVQINVLTDQLTEQLHAHADGHIFRSLPRAQALRAGRLLAEIGDARGRFPTPEALASLAGVAPSTRQSGKSRLVGFRWAVDRQLRDALVEWAGDSRLSSPWAADVYGRARARGHDHPHAVRVLARAWVYVIWRCWQDGVAYDPTRHGGATRLDSSSSCPAA

SEQ ID NO: 400344 - protein, 478 aa, unidentified
MGKGSAGSGMTRGDRRRNARRERLRGLLPRDGAVIGIDLAEDKQALAVVDHDVRLLARKTVRVKAFRLGEALDWAVGQARAKGFAQVTVACEPTGPRWLQVQRLCAERGLPLVCIQPLVSHIAREQQDYTRHKTDEADCVMIARLAIELHCYVPEELDETWAQLRHLGRRRVQLITAATASAQRIRDFLSVAWPTVTEACARPLESVTWLAALQVVTGRCGGQPGRLAVMGEEAFTALVRSAVPGWGARRACARICAAVFAGLTDTEGVVVSCRRGLLRRVADELGDLQRTRAQLRAAEADMACVLGELGLSRLGDIPGLTAVGAAAILAETGDPRRYDSSSSLVKHAGLAPSDNASGALSGQAHISRRGRPGLRLAVWRAVWPMLRFNPVMAAKYQALTRAADAAVQAAGAHNGTRPQPATAAAAAARARHATARVACAASLLRWIYSMVVHDTSWDPAAAAGGTCQHPARNQPEAA

SEQ ID NO: 400345 - protein, 484 aa, unidentified
MDDRRLVGIDLGITSAHTVRVLAGDGTTVCRRKAVPTVQSLGEVERAALAGAAPGTRLEVVIEPTGPAWLPIAVFFCSRGHTVFRVSSAKAHDLRRFLSRHAKSNGIDADTLARLPLVDPAGLHPLQLADAPRAALDRRVRACDRLTQQAAGHKRRLKDLVRQLLPASPLVGELGMADLAVLERYADPHTLVAVGRARLARVIAKASGGHLGAARAEQWLAAARAALELYADHPAVAFQDLAAEVATEVRLLRATQAELAAHATQRAACYRWVDPAGLARSLPGLAEIGGPALAATMGPASRFPAASNFRSFTGLAPKASETGQTDRKGQPISKAGNRLLRTTLVRAADNARRVDPQLARIYYLQMVERGKDHLGAVCVVAAHLAERAWVTFNREMPYVICDTDGVPVTPTQAKQIIAERWTVPEEVRRRRRSKKGEGPSASPARTCTWRSRRNEATLPLAVQSWTATRARQASPATYLTTHPP

SEQ ID NO: 400346 - protein, 368 aa, unidentified
MKQQTSAATETKIKGRNIIDFTGKTIYVGIDVHEKDYQVAKVFDGICLGNHRMAANHQMLIDHLNSRYPGATFKCVYESCAWGFTLQRALNSAGIECIVVHAADVSSSDKEKKRKTDKVDALKLARNLASGDLTGIHIPDEDLQKERNLIRFRKKLVGDLNRSKNRLKSLLKYQGIKIPEHLGKKNNWSYNFMNWVEQEANKDVLLKDTLLLMLEEIKFLRQLLLKTERALRKLMKERHNEKATLLMTAPGIGRTIAMQFVLEVGDIKRFHSFDALNDLIGFCPDTDSSGDMQRDRGITSRRHKQLRSALIEAAWTAIRIDPALTDAYQKLTKRMQGKYAIIRIARKLLRRMRTMLLTGQPYQTGVAA

SEQ ID NO: 400347 - protein, 407 aa, unidentified
MNEEIDTRSSRRYVALDIHKHYCVIAAVDREGRVVLAPVRVEPADLEGWLKKNLRASDYVVIESTTNAWHVSDLLEPLVERVRVANPIKVKQIARARVKTDIRDTLILARLLAANLVPDVWVPPLHVRQLRQLLSQRRQFVETHTQIVNRMHSVAHRHHLQHERGKRFTEKNTRWQKDKRLSQVEQFQLELEMENRVYIEKQIGRIGKEVAKMSHQKPWAQRMTYLMQLPGFGVITGMTVLAAIGEIQRFESARHLASYSGLTPGLEQSGTKYREKGIAKEVAQRAVKSDPHWKHRFQELQKRLHRNQAIVAVARRLLELVWYVLTRRQPYRPFSHERIADKYLTWAWQMDEQARDGLTRQQFARYYLMRLGVGHDLTRIALDPKHPRKLASEAELLALRPELNHIE

SEQ ID NO: 400348 - protein, 319 aa, unidentified
MADSFPFVGIDVSLATLDLAWCDDPAAGRSFTNDAAGIGQVVQLLRELTPPPQLIVVESTGKIEQPLLLALLDAGLPVARVDPKRVRLFAYGIGQLAKTDPIDARVLAKFAELAAPRLTEKKSQNRLELAELLTCRRQLIDTRTAHQNQLSRTASSFARKSLESVLRHLQSRLEKLDREIARIIDDDDEMRGLEKLLRSFKGVGPILAATLIGQLPEIGRLGHAQLAALVGLAPYNRDSGTQRGRRSIRGGRAPVRQMLYMCTVAAIRHNPTLKATYARLRDAGKVAKVALIACARKFLRILNAMVRDHLTWSPRAVGA

SEQ ID NO: 400349 - protein, 457 aa, unidentified
MTRQKSARDTARRSLEPVQPMVAGIDIGGTEHWVCGPERQDGERHVRVFGATTRELKKMARWLRRLHVTSVAMESTYIYWIPVYEVLEEAGFEVVLVNARTLKNVPGRKTDMHDCQWLQLLHSCGLLRGSFRPKDEVCRLRALQRQRSNLISERARVVHWMQKALDQMNVRVHRAVSDVTGVTGMSIIRAIVAGERDPMTLAALRDKRCNLSKTEIAEHLTGTWRQEHLFNLTSALTLYEHLQSAIATYDAELLRVMQGLTPEARRTEEIAEHPSPSKARAMKRRGETELRQALWRFAGADLTAIDGISAETARVVLTEVGPNISAFPSEKHFVSWLHLCPRTPISGGKPLKGKKNGLGASRVGAALRLAAVALQRSPTALGATYRRIARRKSAAVAVFAVARKLAQQIYRLLRHGIAYVDIGAEAYEKKFQDRRLAALTKNAQDLGMMLVPITQTG

SEQ ID NO: 400350 - protein, 409 aa, unidentified
MTTDIDLSASPVAGVDTHTDTHTVAAVTPTGRHLATETFPTTRPGYTHLAEFLSKHGVCAVGVEGTNSFGAGLTRHLIDRGYTVVEVLRPARSIRRRDGKSDPVDALAAARQVLTGEGLSTPKDSTGPVESLRALQITRKQLVSTTAKLITTMKSLLVTAPDDIRTRYATMTNHALVNALVYCRPSSDVTDPRNGVLTSLKILATTYRALRVQCDELETRIAALVSVINPHVSNIVGCGALVSADLLISIGDNPERIHSEAALAHLCGVAPLPASSGRTNRHRLNRGGDRRANSALYRIAMVRMKCDQRTREYVARRTEEGLSKREIIRCLKRAIVREIYRVICTRRSTSQPRDLRRDELKELRIAKHLTQVVVAKHLGCAPARISDIETGKRPLTELASAYEKFLKSS

SEQ ID NO: 400351 - protein, 342 aa, unidentified
MNGDYDGRQYVGIDLHRRRSVIVRTTEQGEQLGWVRIDNDPVALGLELAKAGPDPEVVLEATYGWYWAVDALQTAGAHVHLAHPLGVKGFAYRRVKNDVRDAADLADLLRMHRLPEAYIATPHERELRELVRHRAKLVALRSGLKAQVHATLAKQGQLPAASDVFGRAGMAWLRSAPLELVYRQRIDSLLELIDAYDGEIETFRTMIANRFTGHRGYRAIQQISGIGPTFAAVFVAEIGDVTRFSRPEKLCCWAGLTPRHRESDTTVHRGPITKQGSKLVRWAAIEACQHTRAGTKLSADRSRIIAARGRNVGIVAAARRLLTLVFYGLRDGEIRALAARAG

SEQ ID NO: 400352 - protein, 344 aa, unidentified
MKVTTIAVDLAKSVFEIAVSDRPGRVRERRRLPRSRFLPFFTNRKPALVLLEACGSAHHWGRRLTELGHQVVLLPPHAIRPYVTGNKTDKTDAKGLLEAHRNEQIQPVPLKTKEQQSLTALHRLRSAWIAARTARINTARGLLREFGIAIPLGAKRVVPMVIEILGQDESEIPEAIHPVIGLACEEIRRFEESIAAVEIQLRRLGRQMPVVEKLMTIPGVGWITATALVGFVGDVWRFPTARRFASYLGLTPRERSSGLRRRLGTISKRGDGYLRMLLTHGARSVLWQAKSKKKPDRLRSWAIELEQRRGHNKATIALANKITRIIWAVWRSDVEFEARMPLAA

SEQ ID NO: 400353 - protein, 313 aa, unidentified
MKEDKTFIGIDVSKEKLDVGVRPQVDFMTFANTEDGISLLTDFVQSKQPELIVLEATGGLEMAALRSLVVAKLPAVCVNPRQVRDFAKAMGVLAKTDKIDAHVIARFADSVRPEIRPLKTEETEILDAFNTRRSQIIIMLTAEKNRLTTASKWTKKDIERSIKGLEKALAKINREVENLIKKSPHWRHMDKILQSVPGVGPVMSLTILADLPEIGTMNRRQIAALVGVAPLNRDSGKYKGRRAIWGGRARIRSVLYMCVISGICHNPKIKAFYNRLVSSGKKHKVAITACMRKLMIILNTMIKNDTCWNESGC

SEQ ID NO: 400354 - protein, 344 aa, unidentified
MNHFAGLDVSVKETSICIVDDTGKIVREVKAASEPQALLKVLGNPTYRFKRIGLEAGPLSQWLFSGLAEAGLPVVCVETRHMQAVLKAQINKTDRNDARGIAQMMRAGLYRPVHVKTLRSQKLRMLLTHRKLLQSKAIAIENDLRGTLRNFGLKVGMVGKVRFEARIKELVESLPDLAELVEPLLIVRRTLREQIVILHRRLLAIVRDDEVCQRLMTTPGVGPVVALTYRATVDVPARFRKSKAVGAVFGLTCARYQSGEIDWSGRISRCGDEMMRVMLYEAAQSMMRSKKWSWLKAWAMQIARRRGMKKAIVALARRLAVIMHRIWVDGTEFRWTREQAVAAA

SEQ ID NO: 400355 - protein, 386 aa, unidentified
MQTVAALIPAAVDYERTLVLAIEVSNESWVLAAQVPGLPHTKAKRTINPDAESLMTAIAGYRTRAAATGHSVERVITVYEAGWSGFWLARWIMRQGMEAYVIQPSSVPVDRRMRRAKSDGIDAELLLRTLLAWLRGEPRVCSMVPIPDEADEDARRCVRERTELISERVGLTNRIGAVLATLGVSDYNPLLRNRHRRLTELRTGLGEPLPRNAQAKIERLLARLELVLAQIAELERERDAVVEAEASDKASKMIQQLTKLRGIGVQSATVLVREAFVRRFANGKTLGSYAGLASSPYSSGGIDREQGIGKAGNRRVRTVMVELAWLWTRYQPGAAQVRWFRERVGSTGRRARKIMVVALARKLLIALWRFVIDGVVPEGAILKPAA

SEQ ID NO: 400356 - protein, 383 aa, unidentified
MKKNSIAKLQANKSQIRKMAAKQKLTVGLDLGDRTSRYCILDGAGNKVGEDQLPTTKLGLDSLFGKMAPSRIALEVGMHSPWVSRQLAALGHEAIVANPRKVRLITQSVKKNDRMDAEHLARLARVDPQLLAPIRHRGVEAQADLAVIRARAELVEARTKLINAARGLAKPMGERLKSCDADYVKESLADGLGEATQNVIRPLLKSVEDISQQIGVYDKKIREVEKRYAETELLKQVHGVGTLIALTYMLTLEDAERFEHSREVGPYLGLTRKQRDSGDRQPELGISKAGDELLRRLLVQAAHCILRDGAPDSDLKVWGMTKVQTGAKTGNGKKGSKRRKKKAAVAVARKLAVLLHKLWVTGEVYDPQYNRKAVEAGKGKAAA

SEQ ID NO: 400357 - protein, 353 aa, unidentified
MTVYVATDFHAREQTISWCDTADGEVHRTKLRHQHDDVRKFYEQFSGEVIVAFEASGYSAWFEQMLAELGHTVWLGNAAEIRRKAPRKQKNDRRDADLMLELMLKSDFPRVHTFSAESRTVLRQLRYRHKLVKVRTIAKHSVHAIGVNAGLPLRGRLLTQTGLEQLQALPLSPVLSQQRDEWLALIRLMNKQIGAVEESLAQRAQDDEAVELLRTHPGIGLLTALALRYTLDPIARFTSPRCVVGYAGLDCVEEQSSERRRMGSISKQGSRLLRFLLNEAGQTAARQDPQLKQFYRRLLRRRDKPKAKVAVARKLLVRSFIMLRDQIDYAEFVRRGVAARVARETHSPKVTDL

SEQ ID NO: 400358 - protein, 400 aa, unidentified
MSGLRGNVDCFVGIDVSKDKFDACGITGEGTKLFQISAAMDRKGFEKLKRHFADISVSSVLIGMEFTASYHVNLFSYLIAEGYKVILINSLLISNYVKMELRKTKTDKKDAFVIARFLLANGDALIQRATPSLISDLRDLSRQREGLVDEMTSLKIEIKQLLNITFPELEHMAGIFTKSILKLLQQYPSAFALRDADIGQLAQTLITDSYGHKREEFAQTLIKAARFSVGTNSPAKGMIIKQKISLLLHLKVALQEITDMLMEMARKLMEEDINIITSIKGIGEKTAANFLVEMGGDINQFERSGKIIAMAGLDPAVYQSGQHEGRGKITKRGNRHLRRIIWLMTTSVIQYTDIFKAYYLKRRKEGLPYKRAVLATAHKLVRVIYAMLTQRTTFCPQLNS

SEQ ID NO: 400359 - protein, 414 aa, unidentified
MALMRWVGRAIGLDVHRDFCVVAICEDGKVRSAGRVPSTPDGLGALAESLLGTDRVALEVTGSCWEVARILEPHVQRVIVVSPDDTGISSARAKTDKLDSRTLASLCWKGELDAVWMPDERCRILRRRLARREQLMRTRTRAKNEIQAVLQRRLQERPPFADLFGVKGRQWLAGLELAVEERESVDAGLRQIAFMDTEIAAVDRLVAQQALAWPEIRRLMTVSGVNLICAASFLAAIGEPSRFLTSRKMVAYLGLDPKVRQSGEAPARSGRISKRGSASARWALVEAAWSVVKQPGPLRAFYERLRARRGHGKAIVATARKLTVLFWCMLTRGEDYAHQRPALTKKKQRQLELTAGAPARTKAAAGIWGTNRAILHAERALAEQAEVSYKRMVTDQQAGRPSRKAGASATPERA

SEQ ID NO: 400360 - protein, 347 aa, unidentified
MNYFIGLDAHSKTSTFAVLNESGQCVLRKTVPTSEAAFDHVLNQINGVRNLTFEECHLSQWLYLTLKEKVENLVVCNPVYLAKKPGAKTDFRDALHLATELKCGHLQEVHHEESHWMELRTLVSGYQDIVEEIIRFKNRLKSVFRSEAISTDENNFYKSCRDKSNLLKNESSKFVANNLFTQIDYLESEKLKYIERFTKNQKTYRPIRNLMSVPGISIIRANIAVAIICTPHRFKNKHQFWGYCMLVRHIQESGGRIYGNKRTHGRRELRDIFIGAAESAIRTETKIRDHYDILKMKGHSHHEAKLSVARKIASIVLSLLKNNEKYQDSWEDLQKQRSELRKKMNFK

SEQ ID NO: 400361 - protein, 354 aa, unidentified
MTSSALADIAVIGIDIGKNTFHAIGLNQRGAIVLWQKWSRRQLADRLANLPPCLVGMEACAGGHHLARHCVALGHDARLMPAKYVKPYSKGQKNDFRDAEAIAEAVQRPTMRFVAIKSIEQLDLQALHRVRQRLVSQRTCIINQIRAFFLERGIAVRQGAHCLRSELPILLASRQDALSPRMLRMIEDLAADWRGLDARIDAVTEEITALARQDAGAERLMSVPGIGPIISSAIVAAIGAGEVFAKGRDFAAWLGLVPKQISTGDRTILGPISKRGNRYLRVLFVQAAWVVLVKPQIWERHGLKSWIEAGKKRLHRNVLAIALANKLARIAWAVLARGRGFAAQRTSDAAAQPA

SEQ ID NO: 400362 - protein, 350 aa, unidentified
MASNKISYFGKKVYIGTDVHKATYSVTCICEGVVAKKAASVPASPAEFAQSLLHWFKGAEIYSAYEAGFSGFNLHRELEKAGIKSIVVNAASISVAANDRVKTDLRDSKKIAEQLSTNQLKAIYVPSKDEEARRTLTRTREQVVEARATASRQIKSKLHYHGLMAKDDKRLISNRYLKGIEKLELPAEVLYSFKIFFDQWRLFTRQLMDLRKALQKQADNDEKLESVYRSVPGIGLITSRTLANELGDLSRFKNEKALYSYTGLTPNEYSSGEKVRRGHISRQGSARVRGLLVEAAWRVIDKDEALKQAFERIAKTSGKKRAIVAIARKLIGRIRACFRTGKTYAVGTYV

SEQ ID NO: 400363 - protein, 282 aa, unidentified
MGEVSTIGLDIAKSVFQIHGVDAGGAVVIRKRISRTKLLEFFATLPPCLVGIEACPTAHYWSRRLQTLGHTVRLMPPSYVKAYVKRSKNDANDAAAICEAVTRPSMRFVATKSEQQQSGLMLHRSRQLLVCQRTMLSNAIRGHMAELGIISAKGRNGTAELLKIIANEQDDRIPEAARFSLDILARQYAVVRAEIVAIEKRIHAWHRSSEESRRLEEIPGVRPIVATALVAEVGDWKVFSSGRSLAAWIGLVPRQHSTGGKERLGRISKQGNPDQGCCRCAC

SEQ ID NO: 400364 - protein, 346 aa, unidentified
MKINRVGVDLAKNVFQLHGADHKGKAVWKRQLPRSKWIKILCETVKPGTEIGMEACAGAHHWARLLTHRGYAVKNIPPQFVKPFVKNNKNDANDAQAICEAMGRPNMHPVKVKTVAQQDIQAIHRVREEIKGHRIAKSNQIRGLVTEYGLVAPQQLSSLRRAIPEWLEDGNNGLTLLFRQLLQGLWGDLYALDQRMAELDQQISVIAQENPIAKRLQQLRGVGPLIATALVATVGDAKQYRKGRDMAAAIGLTPKQHSSGGKDRLLGISKRGDAYLRCLLVHGARSAVRTAKDKDDRLSRWVVSLQSRKHANVVAVAMANKIARMAWVMMTSDIDYDPDLAAASVN

SEQ ID NO: 400365 - protein, 441 aa, unidentified
MSMSKLPELDACAAFVDVGSEQMHVSVAGGPPQVFGTMTAQLHELRDWLLAQGVHSVAMEATGVYWLPLYGVLEAAELEVLMVNGRQLKNVPGRKSDMKDCQWGATLHAHGLLKAGFVPPAHIRRLQDYMRLRGEHISSAASHVQHMQQALERMNIKLHDVISSLTGVSGLAVVRAILKGQRDPGVLLKLCDTRIQNAKAERVKEALRGTWAEEHLFALRQALQSWEHYQQQIAECDRAVQALLQQSGGDIPPDMPAPSGKRKSPGANAPQIPHLREMLTRLCAGRDPTRLPAHSEYSVLQLIGEVGTDLTKWSTEKHFTSWLGLAPGSHQSGKRNRSVKRKRNRAGRLFCVMARSLSRSKYIALGGFYRRMAARRGGLIANIALARKLAALFWRVMVKGIDYVERGLQDYEARVLQTKQRALHRLAQQLGHRVVPQSAPA

SEQ ID NO: 400366 - protein, 449 aa, unidentified
MSKVSPVINGLPVIHDRAAGIDIGSRFHVVAVPSTLSDEPVQTFQAFTADIQRMADWLKTIGVETVVMESTGVYWVPVFEVLESAGIDVMVANARETRSVPGRKSDINDAQWLQRLHACGLLRASFHPGRDIAALRAYLRHRERLLDYAAAHIQHMQKALTFMNLQLHHVVQDITGVTGMKIIRAIVAGERDPQVLAGFRDVRCKSSIEIIHAALVGNYQPEHVFALTQSLALYDFYQARVDECDVQIEQALAELKADKPEPKQPIPKARHRTKQPNAVNFDVRTALYQLIGVDLTQIHGIGPFLALRLVAECGTDLSKWRTAKQFTSWLTLSPGCKISGGKVLSAHSRKSSNRLTAHLRLAAVTVGRTNTALGAFYRRLAARIGKAKAVTATARKIAVLFYNAMRFGMHYSDPGADQYEQKYRERVIKQLHRRAAEFGFILQEAECVS

SEQ ID NO: 400367 - protein, 355 aa, unidentified
MTSTKYIGMDVHKESISIAVTNSVGKVVMESVIETKASMILQFIDGLRGDVQVTFEEGTSAAWLYDLLKPHVTKLVVCDPRKNKSMREGNQNDKIDARRLAELLRLDHLTPVYHGEHGLRTLKELVRSYLTITRDLARVKSRVKAIYRSWAIPCTGKQVYARCHRVEWLGKIGELGVRRRAEFYYQQLDALRVLRQEVRRDLLTESKKHKAWKRLCEIPSIGPIRAAVLLGILQTPHRFRTKRPLWNYGGLAIETHSSADHRSVDGQLQRSRKNVLVRGLNRNCNHDLKNLFKGAAVVASSKPGPLQEFYAALVAKGMRPEMARLTLARKIATIVLIVWKKGVSFDAQYLKPQTA

SEQ ID NO: 400368 - protein, 373 aa, unidentified
MDLQEVRFVGLDLAKRLFSVQLQSEDGRNLGTRSLTRDELQPFFASLPPSVVAMEACAGAAYWCELFASQGHTPLPLHARAVARLRMGPKNDKKDAGLILLAAHLPDARAVLVKSRDQLAALSLHRMRELVLRQEVACGGQLMGFLFEMGCVRWKTIADLRRATDEELDEEVRSMPSDMQFSIRSSFARLRAAHAENVATWKALQRWHASHPRSLVLGGIPGVGFGAASALAASIPDPPPWTSGRSFSAYLGLVPCQRSSGDITRLGHIGRGGDQYLRRALFLASRSAAMRCFRMKEGPASLVSLLNRKHFFVAVTAHAARIARTSCQMLIDGTEFEETAAWHSAPFDGKRHTASGGATKRCTKVDPEPHMEP

SEQ ID NO: 400369 - protein, 344 aa, unidentified
MLHVGLDLSRRRIDVCVLDAGGGLVAEFRAQPDADGLRVLARRFSDTEVRGVVESMTGARFVHDTLEGQGWVVEVADAARVKALAPLTAKTDRIDARVLAELSRRDLIPAIWLPTPGVRGMRELARFRLHLVRHRTALKNRIHSSLITWGIPVVSSDLFGAGGREFLGGLNLPGAWTETVTTTLEVIDHLDTQIADYGQRLTRAAADVPAVGLLQTAPGIGPILGFTIASEIGDITRFPTPSHLVGYSGLCPRVIQSGESDRRGPLTKHGPTWLRWALIEATVHAAQHPAYSQQYQNIVRRLGPQRGPKVGRVDVARRLTTAIWWMLTRGQPFAPRGSRSPLAA

SEQ ID NO: 400370 - protein, 331 aa, unidentified
MSNIIGIDVSKASLDCAYLRDPDQEKAKRKSYHNEVRCFASLVAWAEARSGLPVQALAFVIEPTHVYHEQLVQFLHHAGATVYLVNPGRVRKFAEGIGILSKNDLVDADLLTRYGLIARNLIVYQPVAQEVNDLRSLLNRLEVLERNLRSELNRQEKIGKTMVFHRLEQQSIAQTIKRLRTEIMTFKRAIRQCIKSTPSLQQNLDLLCTIPGVGAKTAWVMLVILGSRTFRSAPEVASFLGLNPIEKRSGKSQYRRPRLSKSGSGNYRQQLYFPAMVATRKNPDIQALYERLLAADKSKMCALGAAMRKLVHICYGVVKNQTPYQAQSAQP

SEQ ID NO: 400371 - protein, 369 aa, unidentified
MQKHITHVALDDSKRVIVAGILRPGTQEPELRQIPNEPRHLRRLFARLTQEGPVVTCYEAGPSGYALYRQLTALGVPCQVIAPALTPRKPGDRIKTDRRDAAKLVRLFRAGELTPIRVPDEAQEAVRDLLRCREDVQEDLLRWRHRLVKFLARHGRVYRDGRHWTQRHWTWLRSQRFDLPVLARTCQEYLFTVEQLLARAADLEREIMALAATAPYRERVGWLRCFRGIDTLGAMTLLVEIGDFHRFAHPRELMAYLGLVPSEASSGDRQRRGSITKAGNTHARRILVEASWHYRHPPRLGKALVLRSQGQPKAVLAQAWRAQQRLHRRYRHLVGHGKRPPVAVVAIARELIGFLWAALTQAEPVLQAA

SEQ ID NO: 400372 - protein, 408 aa, unidentified
MFVGFDWASDHHDAVGVIASGKVVLKMRFEDSAEGWASFRQGLVELAGTDLSKVAVSVETCNGPAVERLLQANVVVYPLNPKAAERYRDRKSPMGDKNDPLDAWSFADALRTDGQGWKPLLPDDPITQELRILCRDEVQLIHQRTALVCQLRAALREYYPAALEAFEDWTVPSPWAFVEAFPTPAILVKAGKRRWEKFLHVHKLYRPETYAKRMEIFARADRFAGTPPVTSAKSRLAMAGVAQLRTLQKQLEQYRQAIEQLFERHPDNDIFGSLPGAGGKLAPRILSELGDRRERFQDAQELQCYAGSAPVTKQSGKKKWVIFRTGCNKHLRQAVHLWANLSREKSTWADVYYRHKRDRGMSHACALRCLAQRWLKIIWKMWQDHTTYDEAFHTRNQIEHGSWVIQPA

SEQ ID NO: 400373 - protein, 477 aa, unidentified
MNVKTSKAKKQVNLDNQAINLLSKEELGKKIEVVEKELKSYTWRELETNGKFAKNDKLSFITDDMLIVGCDVGSETHYIRAIDVRGREVSRGAFEFSNTEEGFENARTWMLILAAENGKKQIVLGLEPTGHYWFALAAWMISNGISVVQVNPYAVKQSKEIEDNSQCKDDRKDPKLIANLVKDGNYGMPYLPEKIYADMRRLSMFRDQLTEDRIRNINRLHRELKIYFPEYMDAFGKIDGAFTLEVLKVSAIPTDIVALGTDGLRNIWHNAKLRGRGYSRAHEIVSCAEKSVGLTDGIDAGCEAMKWYAGQILKLDVQLAAIESTLHKKCREIPYAENILAINGVGENILSGILAEMGDISRFDDVKEIQKLSGMGLVACSSGKHKGQTKISHRGRKRLRYWLFQAAKSAVSHADEFKQLHEYYTTRADNPLKKMQSLIVIACKILRIVYTILKTGTTYDRQKMLKDIKRPVSSQAA

SEQ ID NO: 400374 - protein, 362 aa, unidentified
MPKMIWLGMDVHAASITVARYEDQAATAMVQTIANDPAQVRRLVRRLPAGSDVRACYEAGSCGYGLHRQLTALGVHCDVIAPALIPRRPGERIKTDRRDAEKLGRFYRSGELTTITVPTPSQEGVRDLVRAREDVRRDRTAARQRLAKFLLRHGHRYPGSHWTKRHWEWVCGHTFDGPARTVFVHYCDHVLALNERLAHLEREIRTLAESAAYQPVVTRLSCLRGLATLSALVLIAELYDLRRFRTPRELMAYLGLVPSEHSSGARERRGRITKTGNALARRLLIEAAWAYRHPARQTRRVHQALTTQPPEVHAISDRALHRLTARYRRLLSRGKTPHHAVTAIARELCGFVWAIALVPDLA

SEQ ID NO: 400375 - protein, 317 aa, unidentified
MTNVILGIDISKLTFDVTLLIDNKVKNRKFDNNKKGFDTLIQWLKTKGVDTGYACMEATGSYGLKLARYLYENNFKVSVVNPVRIKGFAHSKLCRVKTDKADSDLIAHFCQTMKPDLWKPTSLHIQELQQLVNRLDALISIKNQETNRLEGLSDLVATNIKDHIIFLNKQIKEVEQLIANHIKTHQDLSEKSTLLASIPGVGEKTISQVLTFLSNIDNFNSSKQVIAFLGLNPKQRQSGTSVRGTSRISKTGNAELRKAFYMPAIVSLKYNPVIKGFVKRLSITGKPKMVIVIAAMRKLIHIIYGVLKNKTLFNEKN

SEQ ID NO: 400376 - protein, 359 aa, unidentified
MEAQVRKIDFKDQNIYVGFDVHKNSWKVTIMAENTFYKTFTQPPNPEVLYKYLKSNFPGGNYHSAYEAGFCGFWIHEKLTSFGIKSIVVNPADIPTTDKDRVQKEDSRDSRKIARSLSSGTLIPIYTPTIQTQRNRSLIRTRAMIVKDMARYKNRIKSFLFFYGISIDEAFAQTKKHWSKRFMNWLESLEIAGESRNESLQILISEFKNLRASILKVTQQIRELSQTVTYQEQVTLLKSIPGIGLLTAMTILTELETIDRFSNLDKMCGYIGLVPSTKSSGEKEKNGDLTSRGHGVLRAAIIESSWVAIRNDPSLMKSYLTYLQRMDSNKAIIKIAKKLLSRIRFVLANKMPYQCLIEK

SEQ ID NO: 400377 - protein, 344 aa, unidentified
MAQYAALDVSQETTAICLVDESGKVRRQAKVATCPETISRWFAENATGLVRIGMETGPLAVWLWNELDARGLPVVCMDARHANAALKMRPNKTDRNDAAALAQIVRTGWFKHVRIKSRTSYEIRSLLAAREVLVRVRVKLENEIRGLLRTFGVLFGKAAGGFARRAHEIVAGELDASPPMRLVVENLVQARLTILDRIKVLDRQVLAVARTNATARLFMSAPGVGAITALSVASAFDDAERFKRSSSAGAYLGLTPRRYESGEISWNGRISKHGNKLTRTHLYEAATTLLTRTVRFSRLKAWGLRLAKRCGFKKARVAVARKLAVILHAMWKTNTGFRWSENAA

SEQ ID NO: 400378 - protein, 360 aa, unidentified
MRTVSCAQSEAVARIATRMQLTLTYPIKISVSQRKDFSMIFVGIDISKLTFDVAVLIDGKYLSRQFENKQSGFLKLSQWIKSFKNPAYFCSEATGIYGLALAKHLYQTNQKVIVANPLQTHAFAKMEMARNKTDKADAMSIARYCQYLFNRGEIDKGLFIPRSAAFERVQFLVTRLDQLSKMKSQENNRSGVSLDKAAARSIGSMLTFIDKQIVVIKKEITMIIKQDEQLTAQLKLLVSINGIGDKTAWALLAYIGDISLFENSKQISSYAGLNPSIDQSGTSLNRSSLSKTDSTRLHESLYMPAMVAVRYNPLMLAFYNKLLTKGKPKKVALIAVMRKLLVLAFGVLKSGKPFDVNYQH

SEQ ID NO: 400379 - protein, 423 aa, unidentified
MFKIIKFNCCGLDVHKTWIFACIGITDSNFRTEYFEARFSSFPKDLRRLAAWLQEHKCEEVCMESAGKYWIPVFNVLEETCKVTLAHPKYTKPQKGNKTDRKDARWICDLFMCGMIRSSFIPPPAIRHLRDIIRYRFKLTNMLTSEKNRAQNCLTVSNLKLDDVFTDVFGKSARSITEYILSHPGETFDVAPFVDRRCKTPIDQIQAAVDGAISPEQAVKLRECLNHIDELNAHRDRIESEILQLVEPFSVQLGLIRTVPGMDKDPMTAILILSEIGSDMSVFPTAKNLVSWAGCCPRNDKSAKHVKSSRIAQAGCYLKPLLVQVANALLHSNKHPEFTERYRRIKSHRGHKKAMIAICKMLLTAIWNILSTGEVYNPSGYLIQTPRPTNETKILTQKQALELLRLRGYVIKEDPEEPEPVPA

SEQ ID NO: 400380 - protein, 420 aa, unidentified
MDVLLERCAGVDIGKDEVVACVRTPDPKGKGRRKETRTFLSFTGELEAMADWFCAEGVTEVVMEATGSYWKPVWYVLEERSFELKLVNAQHVKILPGRKSDVLDAEWLAELLEHGLLRGSFVPPAAIRELRDLTRYRKRLIQAHTSECQRIQKTLEDAGIKLDSVASDVLGVSGRAMLAALVAGERDPDVLAELAKGRLRKKIPELRQALRGRFRDHHALLIRLCLDHTAHLEAATAELDEHVDALFAANTSEAGIPFERARDRLDTITGVGKRAAETIIAEIGVDMSRFPTAGHLASWAGRCPGNNITGGKRHSGKTTKGDVWLADILTQCAWAAARTRDTYLSAQFWRLARRIGKKKAAVAVGHSILVICWHLLTNDCDYDDLGGDYFTRRANPDRQRDRAIEQLHDLGYQVTLKKTA

SEQ ID NO: 400381 - protein, 343 aa, unidentified
MEHFAGLDVSVKETSVCIVDDTGRIVREVKVASEPEALLQVLANPAYQFKRIGLEAGPLSQWLFSALAEAGLPVICVETRHMRAVLKAQINKTDRNDARGMALMMRAGLYRPVHVKTLRSQKLRMLLTHRKLLQSKAIAIDNDLRGTLRNFGLKVGIVGTVKFEARIKELVENQPDLAVLVEPLLIVRRTLREQIAILHRRLLALVRDDEVCRRLMSIPGVGPVVALTYRATVDVPSRFRTSKAVGASFGLTPAKYQSGEINRTGAISKCGDEMMRVMLYEAAHIMLTRTTKWSWLKAWAMKIARHRGIKKATVALARRLAVIMHRIWVDGTEFRWTRETAAA

SEQ ID NO: 400382 - protein, 333 aa, unidentified
MKNLSTIQHFVGCDVSKDTLDFAIFEHGKDYRMFEHIQVDNSQEGFQQLRKWLRTFKINLKDTVIAMEHTGFYSSALSEWCFKKGIPFVMLHPMDVKMACTRGRNKTDSTDAKFIADYVYTMREKLDLSAPEPAGIKLLRELRNERRMAVRARTAYLNQLKTVKEKETQRRIKKVIESFTEQIKDIESAIKKEIENDPEMSKNYHLLISIPGIGLVNAMTTIVATGNFTRFRNARQYAKFACVSPLSRESGTSIRGGNHVTRIGHIDIKSTLTEGACSAMTHDPQIKAYYERKRSQGKSYGCIMNAIKFKLICRMFAVVKRNTPYVNTEAFRS

SEQ ID NO: 400383 - protein, 346 aa, unidentified
MSYSTTVGVDLAKNVIQVSVVSSRGKELLNRSLTRRKFAEFLCKRQPALVAFEACATSHYWARVAVRHGHVARIIPAKAVAPFRQGHKTDSNDALAVAEAARRPNIKDAPMKTVEQQGLQAIQRSRDLLVQERTAISNHLRGLLMEFGVVIPQGFAALQRSVPEILEDGDNEVPDMYRPTLQRLYVHFLELHDDIRAMDVEIRQLVKRHPHCKRLTALEGVAPISAVLLYASLGTGDAFSGSREFAAYLGLTPRQLSSGGKTNIVGLSKKIGNCRLRSVLIQGARAYVHKLKEPKTSKDRWLMDLIERAGHGKAAVALANKNVRTAWAMLTQGTEYQRRPQLKVAA

SEQ ID NO: 400384 - protein, 391 aa, unidentified
MSMYFVGIDISKYKHDCCIISAADQQIVSKFTVKNDKDGFEHLLTTLNSLSNPEDIKIGFESTAHYALNLELFLENAHHNFMEVNPVLIKEYKKSTTLRRTKTDSVDCESIARWLMTVEYKPHSKGFYHSYSLKSLTRLRDRLIRQRSFYLVKITNVLDHTFPEFKPFFNERLSKTAIYLLENYGSAEKMAHMNSASYDKLRCASRGKFSIQQFLHLKELAANTVGVNNSIFDIELNSLLTLYNSLCKEIKTLEAEITKLIEEVHPHYMSIPGIGPISAAVIYAEYGDISNFSNPGQMLAFAGIEPGINDSGTESHGGRMVKHGSSQLRYVLLNACLPLIRFDITFATYYAKKRAEGKKHRVAITHVAKKLIRVIYALERQDVDFNVQKLR

SEQ ID NO: 400385 - protein, 343 aa, unidentified
MTKLNVIGVDLAKNVIQVSLLSPSNRELCNRAFTRSKFAEYLARQRSSLVAFEACATAHYWARVAHRHGHQTKIIPAKAVAPFRQGHKTDENDALAVAEAARRPNVKLAPLKTVDQQGMQAIQRSRELLVHERVSLANHLRGLLMEFGMVIPQGFASLYRLLPEILEDGENELPDLYRPTLNLLYGRLCDLREDLERLNREIEVLVQANPVCQRLTALEGVGPIGSVLLYATLGTGEAFANGRQFSAYLGLTPKQFSSGGKVNLVGISKRVANRRLRAVLITGARAYVYHMKEPKTAKDRWLWAIVERSGKCKAAVALANKNVRTAWAMLTQNTEYQRNPLAA

SEQ ID NO: 400386 - protein, 354 aa, unidentified
MSQTLNTAIAVIGIDIGKNSFHVVGHDARGAIVLRQKWSRGQVEARLANMPPCLIGMEACVGAHHLSRKLASLGHDARLMPAKYVRPYSKGQKNDFNDAETIAEAVQRPTMKFVATKTVEQLDLQALHRVRERLVSQRTGIINQIRAFMLERGITVRQGIGFLRTELPTILATRTDALSPRMLRVIEELTGDWRQLDQRIDSLSGEIEALARQDQACSRLMTVPGIGPIISSAMVAAIGTGDVFSKGRDFGAWLGLVPKQISTGDRTILGKISRRGNRYLRVLFVQAAWVVLVRIKNWERYGLRSWIEAAKKRLHHNVLAIALANKLARIAWAVLAKGRAFELTRTNDAGVRPA

SEQ ID NO: 400387 - protein, 454 aa, unidentified
MPPVPAALPMPNAADGGADFDWYVGIDCGGATHQVCVLDAAGRRVAERAVAHSGAALAAFGAWLRELAGPSLARVAVGLETPHGGPVALCLEAGAAVFAVNPKQLERFRERRSAAGAKDDRRDAYVAAAALRTDRAAFHRVRLDDARLVAVRELSRMGEELRAEAARLSNQLRAQLERYFPQVLALVPAADEPWLWALLDAAPTPAAAARVTEKRLTRLLREHRIRRVSAAEVRAALQAPALPAVPGLVDAVSGHVALLLPRLELVTRQVRTCAARLEAALDALAAPAAPAGPDDAGPPAGAAPNASPAPPASPGRGPDLGTVVRLLRSLPGVGVGVAGVLLAEVPAALVAADYQALRTHGGAAPVTKQSGKQRLVVMRYACNHALRTALFHWARVSIQHDAGARRYYAALRARGHSHARTLRSVADRWLRILTAMLAAGTPYDPARFATAVTP

SEQ ID NO: 400388 - protein, 369 aa, unidentified
MSVLKARIPDCPHCATLPITIKPHRGEGTLYSRVNISCGLDVHKSSISGSILKSDGTFETHQFSTTIDGLLAMKEWIVANHCERVLMEATGVFWIPVYSVLEPYVEVHVVNPLFIKYVPGRKTDVLDSVWIAEIALNGMFKASYIPSKNIRELRELTRTYRKLIEERTNHKNRIHKILVRNGIRLSDVLSDIFGKSGMIVINGLIEGKPIDQTLKMIHNSRILKKKDEIKRAICGELSENDLFVIQQSLECIGQHDCQIAQYENKILKNMFPDNGNIEILVSIPGIGFTIGSSVLAEIGNIGQFDNPKQLVSWAGLSPAVYESAGKTAHGHITKRGSKYLRTMLIEAAQSIARGKSNRLKHFFSRIQSR

SEQ ID NO: 400389 - protein, 354 aa, unidentified
MNSEKYIGLDVHQATISVAVMDSTGKLVMESILETKAATILEFFAGLRGTLSVTFEEGTWAAWLYDLLKPRVAKLVVCNPRKNALLKDGNKNDRIDARKLADLLRGNHLKPVYHGETGVRMLRELARSYLTIVKDLTRVMNRLKAVYRSWAIPCAGRDVYYTRHRAEWLGKIREAGVRRRAEQLYQQLDMLQHLRQQARRELLAESRKHSSTAKLRQIPFLGPVRSALSVALIQTPYRFRTKRQLWAYSGLALETRTSGEYRYVEGQVRRSKKLLIRGLNKDHNHDLKGLFKGAATMASVRPGPFQDFYQALLSKGMKPTMARLTLARKIAAITLTLWKKEENFDAKKLKSQAA

SEQ ID NO: 400390 - protein, 460 aa, unidentified
MNPKRSKSRNGGKMPMVHPNAAAIDVGATMHMAAVRADRAPEPVRSFGTFTIDLHRLVDWFTECGVETVVMESTSVYWIPIFELLDARGFTVFLVNARDAKHVPGRKTDVSDAQWLQRLHSFGLLRASFRPKGQIAELRAYVRQRERLLEYAASHIQHMQKALTEMNLQLHHVVADITGATGLRIIRAILAGERDPEALACLRHYSCHSSAETIAKALTGSYRAEHLFALEQALALYDAYQEKAFACDARIEAVLKKLSIHRGHGHGSAPRASRRRNRTDQANALAFDVREALFALLGKDITTIDGLGPYLSLKLIAECGDDLSSWPSAKHFTSWLGLAPSNKVSGGKMLSSRTRRSGGRAAALLRLAAVTVGRTDTALGAFYRRLSARIGKAKAVTATARKIAVLFYNAVRYGMDYVDPGASSYETRYRTRVVNNLRRRAKAFGFVLQPSEPKVGAAVS

SEQ ID NO: 400391 - protein, 408 aa, unidentified
MLFVGDDWAEDHHDVEVQDETGRVLGRARLVEGVDGIARLHELMAKYLDEDAESGEVVVCIETDRGPWVQALVAAGYRVFGVNPKLAARHREVLSLSGAKSDKADAHMLADMVRTRRDQLRPVAADSDLAAAVKVVARAHQTMIWERTRHLLRLRSALREYFPAALEAYAELELTGVDALELLAKAPTPAQAARLTRGQIAAALKRARRHHMAAKTEAILTALRAEHLAQPDVVTGAYAATVRAEVEVLRAITEQVQGLQREVEAHFGRHPDAELYRSQPGLGAVLGARVLAEFGDADNRYSSAKARKNYAGTSPITRQSGKAKSVHARYIHNDRLVDALHMQAASAARHDPDARAYYRQLRDRGLNHNTALHQLANRLVGIVHGCLKSRTAYDPDTAWAHRRTSNAA

SEQ ID NO: 400392 - protein, 334 aa, unidentified
MKKIFIGVDVSKLKLDFCNYQDGQFCKEEIVANHSSAIKNHLESILKDAQKEELLICAEYTGQYIYPLTCVCNEMSIDLWIENPVQIKFRSGMQRGKNDKLDARKIAIYTHRFEDQARLFSMPEKSIQALKQLVSERDMLVCDRAKYKGQLTDQRDFMEQQVYKKKHKRLSQLIQHLNKAIQQIEDQIQSIIANDETLTKQHQLLCSIDGVGERTSLKMILETNAFRDFKDPRKFCCHAGVAPFSYTSGSSVRSKRKVSKRADKSIKALLHMAALSASKTNGDLGHYYNRKVAEGKNKMTVLNAIRAKLVLRMFAVIRNEKMYIQNYINPFSVS

SEQ ID NO: 400393 - protein, 366 aa, unidentified
MKKPSTTALRRIRKQQDGQLTIGLDLGDRSSFYCVLNSAGEVILEERIATYPEAMKKAFEKVPSSRIALETGTHSPWVSRLLTELGHEAIVAHSRNVRLIGESRRKDDRLDAQALARLARIDPRLLSPIQHRSAQAQADLTVIRARYALVRARTALVCAARGLTKSFGERIRGRNPKGFGSATTETLGPQLQVALAPLLSALETITARIREYNVQIETLAEESYPETALLKQVKGVGTLIALTYVLTLEDPRRFRKSRDAACYVGLQPGRRNSGQSEPQLHITREGDSYLRMVLVQGAQHILGPFGEDSDLRRWGLKLAERGGKRGKRRAIIAVARKLAVLLHHLWISCEEYEPLHNTRKRRLAAA

SEQ ID NO: 400394 - protein, 382 aa, unidentified
MSPPAQKSSGRCICFDGVDGPCVRRRCAIGWLSSGNHVQGPSAMKITTIGLDLAKSVFQLHCIDSTGAVTRKTLRRSELLAFFEALPPCLVGMEACATAHHWARQIAALGHEVRLMPAAYVKAYLRRQKNDAADAEAICEAVSRPTMRFVPIKSADSQGVLVLHRTRELLIRQRTMLINAIRGHCAEFGVVAPQGPRRVLELVGQVRDGAVASLPEIGRAAVLMLGDQLTGLRLQIHALERKLLAWHRQDRASQRLATIPGVGIITATAMSASVTDPAVFRSGREFAAFLGLVPRQNSSGGKDKLGRISKKGDGYLRKLLVVGATSVIRRSKTADLAAAPWIRSLLERRPARVVTVAMANKTARIVWAVLLRGDIYRPAMAT

SEQ ID NO: 400395 - protein, 312 aa, unidentified
MDAIYVGIDVSKDRLDVAVYPGGESFAVGRNGAGIDELIERLKALSIKLVAIEATGGFETVVAAGLAGAGLPVVVVNPAQVRAFAQALGKRAKTDPIDAAVIAHFAEATKPQLRQLPDATTQLLADLVARRRQIVEMIAAESQRARHVTLPRLKKSIARLRKALEKELSELDDDISDHVRGSPAWAEKEDLLASVPGIGPIIARTLIAELPELGSLDRRQIAALAGLAPWTRQSGKWRGKSFIGGGRASVRRALFMGAMVAARHNPTLKLFRDRLVAAGKNKLVAIVAVARKLLTILNAILRDKTPWQPKFA

SEQ ID NO: 400396 - protein, 346 aa, unidentified
MHYIGMDCHISTLDFAVVNEAGRLVRAKRIPTSANGFMEFVKTVPRPRTIYMEESTLAAWALETCVSYGEKLVITDAKENHWIGSSGQKDDSIDALKLAQLARGGYIKEIHHPVGQRRRFRELMIAYHDAVKSTTRIKNKIKAKFRQNGTQCTGTTVYSEAHWEEWKWKLPQEMTLLLILDNLWRQLEQSERTEKELLSAARVQAKHYPEIKHFEAIPGIGFIHAATISAILETPYRFANKRKVWMYAGLGIMTRSSGGKTYSEKLSTDYNRLLKCSIKQAAESAIRAEDNLFRRKYLDMTLLHGIAPHRAKLTIARDMLAIMLAMWRKGEKYNPEIRGKAACKQG

SEQ ID NO: 400397 - protein, 412 aa, unidentified
MKVMHEICCGIDVHAKMLVACLLMANGEKEIRTFSTMTDDLLRLRDWLVNAQCTHVAIESTSVYWKPVFNVLEDALTVILINPEHAQALRGRKTDVKDAEWLADLLRHGLLRASFIPPPEIRELRELTRYRDSLVREQSRVANRIQKVIESGNIKLGQVASDALGASGRAMLWALARGETDPGKLAALAQRQLKEKVPQLQRALQGRLTVNQRFVLRELLKRWEELEQADRRVTKEVDQYVQERPKLARAREIVDSIVGIGPRVAEVVIAEIGVNMRAVFPDDAHLASWVGICPGNKATGGKRLSGRTRKGNSYLRSALVQAAWGATMKKNCYLSSQYFRLVKRLGRKKALVAVAHSLVVIIYHVLDSDQTYTDLGGDYFDRKHVEQQRDYYIRRLQMLGLKVNIEQLPTAA

SEQ ID NO: 400398 - protein, 374 aa, unidentified
MLSARPAGACRPPSDQQKELAITTIAQLQRPRVTVGVDTHLDVHVAHAKDQLGRRMATVSIPTTPAGYQDLLAWARGLGEVQAWGVEGTGCYGAALTRFLGDQGQVVLEVNRPDRQARRRHGKSDPVDAEAAARSVQAGEVTTVPKAGNATVEMIRSLRVARQTAIKARTQAINALKALLVTAPAQLREQLRGRSAAMLVRQAAALEPGPLVTPTAAAKLALRCLACRYQALHAEVATLDTELDRLVAKAAPGLVARFGVGPDSAGALLVAAGDNPGRLRSDACFSMLCGSSPIEASSGKTRWHRLNRGGDRQANAALYRIVVVRLRWHQPTKDYMARRLTEGKTTKEIIRCLKRYVAREMFTLLNQTVPTPAT

SEQ ID NO: 400399 - protein, 403 aa, unidentified
MKHVIAFDISMGKSYMVIYNTQKQCVFESEIKHSKPEFKKLQEKIHELTDKTGELPEIVFEATGIYSRQLERFMQDNQYTYCLLNPLEAKLQCDSLRIHKTDRSDAHRLALTHFTATRRVFTGTDNLFYQLKSLSRLYSELDSELSIIRGRMHKVIQLTFPELERMFTSKSDLFLNFVQLFPHPDCILGLSKTIIKNRIRANTNKKISNITAEKKAIQILEIAKTSYPAVSQNDVLCDQLKLYARRYQELLHQKECCINKMVYIAKQRAEYDIILSLPGIGPNTAVRLMAEIGDITRFNNNKQLNAFAGIDIRRFQSGKTFFKDKINKRGNKHLRKLLFLIIQNMIKQRRYGQNHIVEYYDKLKTQPYNKCHKVASIACVNKFLKLLFHLITHDIHYDYRLTA

SEQ ID NO: 400400 - protein, 346 aa, unidentified
MKKILKQALGIDVAQKELVVSLGRMHEDLSIEIYAHKVFPNTKNGFSTLVSWTKKRVDSNVKVRYVMEATGVYHESLAYYLAQKDYEVSVVLPNKISNYFRTLETKTITDKTASETIVMFGLERKLDLWKRPKPIFKKLRQLTRERDQIVQERTMAKNQLHADLAEAEPHPSSINRIKKRIALLNKQEKEIQQEIAKMAKEDQEVSRSIEGIRSIPGVGLLTAVTVLAETNGFELIRNKRQLTSYAGLDVREKQSGTSIRGKARISKKGNRYLRKAMHLPALAAIRHSARFKGIFVRLVSKHGIKMKAAVAVQRKLLEMIYTVYKSQTLYNEGYLKINTTKESTII

SEQ ID NO: 400401 - protein, 345 aa, unidentified
MSTLPEVFAGVDTHRDRHAVAVVDPIGKVVATDMFDATPTGYQRLQAWIESFGQLTAVGVEGTGSYGMGLSRHLSRQGIDVREVIRPNRQHRRRYGKTDVGDAIAAARAVISGEASGSPRGGTGNIESIRVTKLARDSAIKGRTAVANQIHAVVVTAPEPLRSQLRGLTIDATVTIACRFRAPTQPDTTIHATKLALRSLAQRWKSLSNEISALDNTISYLVTQTSQPGLLEEPGVGYNTAADLLICVGSNPERIQTEAGFAALCGVSPVDASSGQQQRHRLNRGGDRQANAALHRIIIVRLRYHQPSRDYMTRRLTEGKTKKEIIRCLKRHLARQLYQHLKTPT

SEQ ID NO: 400402 - protein, 356 aa, unidentified
MQTQVTKKIDFSGKDLFIGLDVHKKSWSVTIVIDGMEHRTFTQPPDARALFNYLQRMFPGGSYNSAYEAGFCGYGIHRELNSLGIKNIVINAADIPTSQKDKLQKRDPIDSRKIARGLEKGSLRGIHIFDREVEELRSLNRTRFYLMRDLRRSKNRIKSFLQYYGESIPPEFDNNQWTLKFVSWIKQVKMQTMSGQDAFSNLISSYEYHRQQLLTLSRQIRQRIREYDNELYSLLKTISGIGPLTSSALITELGDINRFPHIDHLSSFVGLIPRVRESGETIHTGGITFRCNSFLRTLLIEASWQAVRMDPAMMQYYQKHVINNKGHKVIIKVARKLLNRIRYVMKNRQPYVTGVA

SEQ ID NO: 400403 - protein, 342 aa, unidentified
MFHIGIDAHLNSSAVCILDENGRLFKRFVHRGDLRCLVRRLDDELDQPFQVCFEASCGGGTLCDLLTPIARRVIVAHPGHLRLIFRSKKKNDRVDAAKLAKLLFLDEVPPVHVPGRHVRAWREMVGMRSQAVAKRTRAKNGLRALLRSHLIRPPRGLWTGKGRQWLADLELPTASARLRRDLLLEEVKHFDRQIHRLEEELDRIARQHPGVTLLKTIPGIGPRTAEAFCAFVDDPQRFGTKQIGPYFGLTPSQDQSGSTNRLGHITREGPAVVRRLLTEAAWRASRLSPRVKAFFERVQRGDPDRKKIAVVATAHYLARVMLAMLQSGEVWQKEVALATKAA

SEQ ID NO: 400404 - protein, 347 aa, unidentified
MNFDTHHHKHYCGIDLHAKAMYVCILDQHGTKLVHKNLPTTPEAFLRVIAPYREDVVVGVGCIFTWYWLADLCQQEGIPFVLGHALYMKAIHGGKAKNDKIDAYKIAVLLRGGMFPQAYVYPSEMRATRDLLRRRCHLARKRAELLAHIHNTNSQYNLPEIGQRLATKANREDVAEHFPDPSVRKAIEVDVALIDHYDKLLGEVELYLTRSAKTHDVQTFARLQSVPGIGQILALVILYEIQDITRFPRVQDFVSYCRLVKCAKESNGKRFGTSGKKIGNVHLRWAFAEAAVLFIRQSQLGKAYFAKLEHTHGKAKALTVLAHKLGRAVDYMLTREQAFDLTRFVTA

SEQ ID NO: 400405 - protein, 360 aa, unidentified
MAGKNLSQLSQFVDSENSSLPVFIGIDVHKNSYHVALRRTDGLCATLVSKADPGSVIATIRHLKLNVALAAYEAGPTGFGLARDLSASAIPALVAAPSRIPRQPAPGAKTDRLDCVKLAEYAAKGLLKPIAIPSPEQEAERCLSRHRSDLVESLRQTKQRIKSLLLQLHIEEPNGLRNWTRASVAALDLLALPGEAKTRLESLVRTLGFFQAEIALVETQLGEIGRKRGHEEAIERLRRVPGVGLVVATAFRLEVFSPERFASAGQLTSYLGLAPQVRQSGEGKSRGRLRPVGQQRLRNLLIEAAWTWKAKDPAAEQCYRRILGRCGVFQKAIVAVARRLAVVLWRLCLEDRPYYLGVAA

SEQ ID NO: 400406 - protein, 337 aa, unidentified
MKVTLIGIDLAKSILQVCGVNQAGKRIFNRQVRRARLMELLIQHPEATFAMEACSGSNYWGRELQQRGFRVMLIPPQHVKPFVKGNKNDRNDAFAITEAARRPDLKCVEPRTLAQTDLIQVHRVLDRMIRQRTALINQIRGFLNEYGIVVGQGKEKLLAAMPDLLEDAENGLTPSSRALYQELYEQWRQANEAINRIEKGLKRQANNDEAAQRLMKMRGVAEKISTATIAHAGNGHGYKNGRHFSANLGLVPKEHSSGGKQKLGGITKRGNRYLRRLLIQGAWSVVRNADKNDDRMSRWARQLVERRGKHKAVVAVANKMARIMWSMLYHQTEYQAN

SEQ ID NO: 400407 - protein, 344 aa, unidentified
MSEVITIGLDIAKHVFHVHGADERGRAVLSKRISRAKLLDFFAAQPSCKVALEACGGAHHWARQLTRLGHEVRLIPPAYVKPFAKRQKNDAIDAEAICEAAQRPSMRFVAVKSEEQQAAGLLFRTRDLLVRQRTQLINAIRGHLAEYGWIAPKGPSHVAMLADLIEEEEMASSLPAAALAMFRLMLDLLANLNSKIAALDKEIARRAREDEVSRRLMTVPGIGPISATAIAALAPSAETFAKGRDFAAWLGLTPLQRSTGGKQKLGATSKMGERTLRRLLIIGSSAVVQQASKRGAPKGSWLEQMLARKPRMLVTVALANKMARIIWALLVKQENYRAPVAAQA

SEQ ID NO: 400408 - protein, 315 aa, unidentified
MSTGTGTFVGIDVAKDKLDIAVRPSAEPWVAPQTEEGLTTLVARLVALAPELVVREAPGGFELPVAAALATAGVPVAVVNPRQVREFARGSGQLAKTDALDAAVLARCAAVVQPTPRPRPAAQAQELSALLTRRRQLQAMLIAERQRLGTALLAVRPPIMRPIRFLEAELEDLERQMRDAVQASPLWREQEDLLRSTPGIGPTTALALRAEVPELGQLDRKKIAALVGVAPFPCDSGTPRGKRIVWGGRARVRSVLYMATVVAVHHNPVLRAFYLRLCAAGKPKKVALIAAMHKLLTILHAMLRHHTHWSPIVTP

SEQ ID NO: 400409 - protein, 434 aa, unidentified
MNYTQNHKISQITPSTIIIGIDVAKDKHVARAQDDRGIEFGKRLIFENRLHGFQTMLDWMERQRKQNRKDHVIFGVEPTGHFWLSLAYFLTAKGYDFVLVNPMHVKKSKELDDNSPTKNDTKDAKVIAQLIKDGRYSVPNLLDGIYAELREGAKLRDQLVKQLMITNGRIQNVIQRYFPEFFDVFKDWEGKAALCTLKMFPFPSQIKEMKPEEVLEKWKPQVKRGVGIKKATKLVEAARKSIGIQAGMKFAKREIDCLLEQYELYNQQIKQLDQELESLVEDLPGARQMMAIPGLGKTTVALFFAEVGDITKYSHPQQLVNLAGLSLKEHSSGKFKGQTTITKRGRKRLRRALYLAIRPLVVHNPTFKALHQYYTKRPEHPLKKQQSLIALCCKLLRVLFVIGKKQCDFDGSKLVQGLPQIETLQTAYLPKVTS

SEQ ID NO: 400410 - protein, 433 aa, unidentified
MSNFFYSPVIGIDVSADFSYTAILAPNGDIYKKSFKIKHDLNGFNHLVNEIKKVEEEFNMKTAIFMESTGVYHLSLFHYLNKYFDNTFVINPLVTKSNKNGDIRKVKNDKKDALSIATIGKFQNIKLSQQLSLDIFLLKNLVREYYKLTDTSSTFKKKLSADLRVIFPGYNTIFSDSTSKSSIELLSQYPTPQSILEAPKENIIKIFLDSSKKGIIWSENTYSKLFKVANEAKIIGLPLDGLAVKIASSITLIKTIQSEIDTLLQKINNFIQSETFPESIRANIELIDSIPGIGQLTAITIIAEIGDIDGFLKPKHLVAFFGIDSSVNQSGNFKGDDNKISKRGTRIGRRALYSVALASIRNNRNGVPINKVLLDYYQINLKGKKPKIALVAIMHKIINYIFAVLRNQTPFEQRDPKIHKQMFLENNSLNKVA

SEQ ID NO: 400411 - protein, 344 aa, unidentified
MGQYVGLDVSLEVTTVHVLDEQGKRVWHGTCISHPAAIEATIRKHAPEVVRIGLETGPLTTWLWQALTDAGLPMVCLDARQAKAALNMRINKTDDNDAEGLAQLVRSGWYREVRVKSREAMLVRSLIGARTQLLDIVTELSNQIRGLMKTFGLVVPKGAGKVFEANVRRLLEDEAAVAAIVVPLLDSWRAVRTQAADLDRQLLAVVRENADCRRLMTIPGVGAIVAASFVTAVEAPENFTTSRAVGAWIGLTPRRYQSGEIDYDGHISRRGDARLRALLYEAATTMLTRVQGESDLRRWGLALKKRLGFKRAAVAVARKLAVVMHAMWKKGTDFNPRAAMSAGT

SEQ ID NO: 400412 - protein, 334 aa, unidentified
MENIALIGIDLGKNSFHIHCQDRHGKAVYRKKFTRPKLFEFLATCPTTTIVMEACGGAHFMVRKLLELGHTPKLISPQFVRPFVKSNKNDFVDAEAICEAASRPSMRFVQPRTESQQAMHTLHRVRESLVRDKVKTTNQMHAFLLEFGISAPKGPTLIRRFAEILEENPLPPYLVRLLQKLRDHYDYLIEQIKELESQLKISLDEDTTAQRLLTIPCVGPLTASLLSTQLGDGKQYGSSRDFAASTGLVPRQHSTGGRDILLGISKRGNKKLRALLVQCARVYLRTLEYRSGQLADWVRELLLRKNNFIVTCALANKLARIAWALTTRHKAFEA

SEQ ID NO: 400413 - protein, 372 aa, unidentified
MSFYNTQHELYCGVDLHSRRMYVCIIDSDGKTVFHKNLHSNPQDLSNALAPFRQRDIVLAVESTFNWYWLADACDELNIPFVLGHAFGMKAIHGGKTKNDKQDSLKIAQLLRGGNLPVAWAYPKSMRAQRDLCRRRCYFTRQRAELQAHVRNTGMQHNVACPSGQLRYASNQEGLTELFPSAALQLSITTDLEMINALTAQITRLEKTLVRMAQFDDPGMFYRLKAVPGIGDILALVILYEIGDIKRFRRAGDFLSYARLVPGQHSSAGKNYGSPGRKQGNPQLKWAFSEAVSLLLRDSVPTKSAFAKLEKRHGRGKALSILAARLGRALYLVLKRGAIFNEHEFLRLSDEPPQPSPVKPRRRRKSTTKSSL

SEQ ID NO: 400414 - protein, 367 aa, unidentified
MKKHTTVKQSLSSSDLSACTTVAVDLAKQVFQVAGEDALGQVLYEERIKSREAFHAFLRQLPPSVVVLVETGPGAQAWARQLQAQGNLARILPAQLVAQHRSGAKNDRNDALAILRAGRDSKIAAVPIKSATALAMQALHRARQGYVRRRTAMSNQMRGLLMEHGVVLAQGNAAINQTLPRVLEDATQPLPDMLRELIDELLGEWRQLGERINVLTGRLEKAANEDKTARRLMTVRGIGPIIATALLAKQTDPERFANARQFAAYFGMVPEQKSSGPKVRLGRISKRGDSYVRSLMVQGAHAVLRHLRADSEQPDDRRLQRWQARLGRKEAAIRLANRNLRIIWVLLQNEQTYRSQPANGRPAAPSH

SEQ ID NO: 400415 - protein, 410 aa, unidentified
METILGCCAGLDVHKDTVEACVRRVEKEGGLYQQTRHWGTMTRELVAMAEWLRAEGVTQVAMESTGVYWKPIFNILESAFQVLLVNARDLKHVPGHKTDVKDCQWIAQLLQHGLLKGSFIPPRAQRELRDLTRQRAQVLGEHSRISNRMQKVLEDANIKLGSVASDVVGASGRLMLQAIIGGETNPETLADFAKLRLREKIPPLRQALEGKITEHHRWLLGLLWDQLRSSEAFLARLDERIEQWTRPQKAALEKLDAIPGIDRRVAEVLLAEIGIDMTPFPSDAHLASWAGLCPGNHESAGQRRSGKTTKGSRWLRQALVQAAWAASHKKDSYFQAHAQNLMRRRGRKRGLVAVAHSLLLVIYHLLKEGTEYQDLGRDFLDRIRSEYLTRFHIRRLQQLGLTVTVSQVAT

SEQ ID NO: 400416 - protein, 359 aa, unidentified
MQNQIKIKSWHGQKLYIGLDVHKKSWKVTIMGPSYEHKTFSQDPDPVILANYLFKNFPGAEYYSVYEAGFSGYWASKQLKDLGINNIIVNPADVPTKHKEKDRKSDVVDSRKLARSLQAGELNKIYEPDNECLAVRQVMRNRNQLSRAIAREKNRVKSFLSFIGQPIPAYLTTGETRVWSQRYIKWLEGLEFKNPGDKISLNSKIKIVQTLHQELLALNRHIRKLSQQPEYQKNVELLKSIPGIGLITAMIILTELSPVNRFKTVDQLNQYVGLVPSIRGSGDKEYAGKITVRGHKGIKLILIESAWILIRKDPSMTLKFEELMKKMGKNKAIVRIARKLLNRIRHVLITQEPYKINIS

SEQ ID NO: 400417 - protein, 307 aa, unidentified
MTNIAHFNALRIVVGVDTHKDEHVAVAVDGIGTRLDEYRVPTTPTGYVRLERWATNIGDVAAFGVEGTGSYGAGLARLLSDLGHKVIEVSRPDRSTRRKLGKSDPIDAEAAARAVLAGVATGLPKSGAHGVEMIRVLKVAKDSAIRAKTQAGNQMLALVVTAPSNLRQALAGLSITRLAKRCAGLRPGNVTTATAATKLALRSIAHRHNQLTSEIKTINVELARLTAETAPSLVATFCIGTDIAATLLITAGDNPQRLKSESAFAALCGVSPIPASSGKTNRHRLNRGGDRRANAALHRVVIVRLRH

SEQ ID NO: 400418 - protein, 357 aa, unidentified
MNFIGIDLHKKTISVCVVNQERKVLKRRTLCCAEPERIVAFFREWGEFRAVVEATASYEWLWQLLEPLAQGLVLAHPGKLRVIAESKNKSDKLDAQVLAEFLALDMIPPAYRPTPRQRQHRTLVRQRVFVKKNLTRVRNKIRRVLSNYNADRPDLFTKAGLTYLQEAKKKVSAADQFVLDQLLEEWHYHRRQFQAVGRQLQAFARQAPLKEKEIRAVLRSMPSVGPTTVEVVLSEIGDIERFRSNKRVVAYAGLAPGQRESAGRKKELGITKQGSGLLRWVLVQTAWRTLRCSLRWRSVYENLKKRRGSKKAIVAVARRLLTVMAALWRTGQRYRHAAQDGAPTVPKARRARRAAQA

SEQ ID NO: 400419 - protein, 345 aa, unidentified
MDHYAGIDVSLESSSVCVVEASGKIVREAKVASEPEALIGWCASLGLGLARIGLEAGPLSQWLYAAMKQAGLAVELLETRHVSDAFKAMPVKSDRNDARKIAQLMRLGWFRPVHCKSIAIQEIRAMLTARKLVQSKLLDLENSLRGILRGFGLKVGKTTRTNFAGRIEELVERHPNLQTIGQALLRVRTVLLAEFNGFEKRVRAMSRLHEKARLLMSTPAVGPIISLTFACAIDDPSRFTSSKQVGPYLGLTPKKYQSGETDYTGRISKHGDASARDALYEAAHLMLTKPIKGCSELKSWAMRIARRAGTNKAKVALARKLAVIMLRMLKDNAPFNPAAAKAATV

SEQ ID NO: 400420 - protein, 349 aa, unidentified
MTMVGGFDVHRQQITFDYVDDDGLVHWGQIRPATRKTLRCWLGEHCPDGDGEFALEGCTGWRYVVEELAAAGMVAHLGDPAETAARRGPKKRAKTDRADARLLRTLLVEGRFPESWIPPAHVVEMRTLGRLYCVLMDERRTWQQRIHAQLFHQGCPPIRALLSQRSRDALAAAELSAVGRQYVDTALRRIDELSAEIEPLRAQLASFARRQPGCRALQERHYGIGWLCAAIIWAEIGDARRFGSSDQLVRFAGLDVTVYSSDSKRAPGHLSRQGSPQLRWAAFEAAKCAARPGSPDYTYYHQVADRPHSGKNPTLAVERKLLRRCYHTLRELGDAALAPPVAEPQEVPA

SEQ ID NO: 400421 - protein, 341 aa, unidentified
MKLIRVGVDLAKNVFQLHGVDRSEKPVWRRKLVRADWVKALLGQIEPGCEIGMEACSGAHHWARLLQSHGFTVKLIAPQFVKPYVKSNKNDANDAEAICEAMSRPHMRFVTVKTVEQQDIQAIHRIRSGLVEQRKAIGNQIRGLTSEYGLTAPKELLHLRAAIPRWLEDLDNGLTELFRRLLRGLWQDLLAIDVRVTELDREINLVAQNDPVAVRLQQLRGIGPVTATALLATIGDATQFTNGRQMAASLGLTPKQNSSGGKERLLGISKRGDAYLRSLLVHGARAVIRTAQSKSDRLSTWVMRIATTRHPNIAAVALANKTARIAWAMMSRGTDYDPSLA

SEQ ID NO: 400422 - protein, 341 aa, unidentified
MKYVGLDVHKNQTAVCVLDENGKKVMARTVRGGAAEVVGVLRKIKEPFAVCFEASTGYGHWHDALAPLARRIVVVHPGHVRLIFHSKRKNDRIDAHKLATLLFLGEIPSVHVPGADVRGWRSLIEFRRRSVADRTRTKNRLRALLRGLGIRARYRLWTKAGRAWLAELDLPTDEQALQRDLLLDEVIHADRKIKRIERQLAVRADGHPGVTLLRTIPGVGPRTAEALVAYIDDPRRFGRNKAIGAYFGLVPSLDASANVARYGHITREGPATARHYLVEAAWQGVRHSPRIKAFYERIKKDNPERRKIALVATAHYLARVMLAMLTSGETWWPEGGAALAA

SEQ ID NO: 400423 - protein, 410 aa, unidentified
MELLHQRCCGLDVHKDTVVACLRLVSNGKVTTEVRTFETITADLVKLSEWLATNDCTHVAMEATGVYWKPVWHILDDGEFMLVLANAAHVKNVPGRKTDVNDAMWLAELLAHGLIRASFVPDQPTQEMRNLMRTRKQLVREQSRHLQRVQKTLEDANIKLDSVLSSLMTKSGRAMIAALIAGETNPAKLARLADPRVKASPQDLREALRGRVTDHHRFLLRLHLKQIDTLTAALAEVDAQVATNLEPFRTAVDLIKSIPGFDDIGSHVVVSEIGIDMSRFLSAPHLVSWAGICPRNDESAGKRRSNRLRKGAPWLKTTVVQCSWAAIKKKGSYLQALYHRIKARRGPKKAIIAVAASILTAIYHMLKDGTMYHDLGADHFNRRSTDRQKTRLVKRLADLGYAVELKPLVA

SEQ ID NO: 400424 - protein, 344 aa, unidentified
MTRKLMAGIDLHSNNLFCGIVDLEGRRVFEKKLPCDLNSVVGALKPFKKQLETIAVESTYNWYWLVDGLQDRGYPVVLANPAAMKQYDGLKHGDDKSDAFFLAEMLRLDILPTGHICEREIRPVRDLLRRRMGLVHKRTSVTLSLKSLYTRMTGRSLSPGLVRKLEPEEAEKIFEHPADQLITRLDLQLLEQLDQGIAQIEKTILAEVGPMPHYQVLQTMPGVGKILGLTITLETAGPARFASAGDYASYCRCVDSRRLSNGKKKGENNGKCGNKYLAWAFVEAANFAQRHDGDCRKFYDRKKAQVNSTLATKALACKLAKAAWHMMSQNTNYDPGRIFPGNKT

SEQ ID NO: 400425 - protein, 322 aa, unidentified
MARMQGETTTELPQHFAGIDVSKAYLDIRLSRERRAYRFTNDPAGFAALEAHLGAASHLIVLEPTGRYHHAIWKALAAAGHQVASVNPLHVRRFAESSGELSKTDALDAAVLARMAVERRPEAKAPPGEGQLRLKELTTSLADRIDRRAMLKAGRKEVRSRLIAELGEAEIDLLNAAIDTLKAAIAGLIEADPERARSAEILVSIPGIGVSSAHRIIADMPEIGTLNDKQIGALLGAAPRACESGKRKNRRRTKGGRRHLRAALHMPAIAAARANPDLKAFRQRLKARGKPGAVITTAVLRKLIVLANALVAQNRVWVPKTA

SEQ ID NO: 400426 - protein, 344 aa, unidentified
MGEVSTIGLDIAKSVFQVHGVDVGGAVVIRKRISRSKMLEYFGDLPPCLIGIEACPSAHHWGRELQALGHTVRLIPPSYVKAYLKRSKNDANDAAAICEAVTRPSMRFVPIKTKEQQTALMLHRTRHLLVRQRTMLSNALRGHLAELGIVSAKGRNGTAELLKIIADGGDSRVPPAVRGILNVLARQYSVIGIEIASVDKGIMALHRGCEASRRLAEIPGIGPIGATALVAEIGDWMAFSSGRSLAAWIGLVPKQYTTGGKDKLGSITKQGNRYLRWLLVVGAMAVIRYARKHGTERRPWLARLMERRPTKVAAVALANKIARMAWAIMVRGERYKEPKLLLAA

SEQ ID NO: 400427 - protein, 348 aa, unidentified
MKNSNSLSIRKHAVGIDVSKDTLEVCSGKKTSSESMNFSTSRCFKNTREGFESLLSWARNQSGQNRSVWFVMEATGVYYEQLAYFLHKAGENVCVLVASRAAHYAKSLPIKSKTDAIDARILARYGLERRPETWEPTSPQLRKIKALIREREQLQKQHTQLTNRLHAARNAWGHPQTSLKRLTDHAKQIGRYLEQITIELDNLWQSSRQLAEPVSRIAGINGIGRQTVLDIIAETNGFALITNRNQLASYSGLDVVLDESGNRQGATKISKHGNAHIRKALYMPAMSAIQHNPALKLFYERLVEKHPNQKMIAVTAVMRKLLLLVYSLWKSGKEYDPEFHYRQIMVKP

SEQ ID NO: 400428 - protein, 370 aa, unidentified
MKETITSFVGLDVHKESIAIAVAEAGRQAPRFIGTVIPSLRSLQSALRKINSASRTLVVYEAGPCGYGLARRLNAQGYACEVVSPAHIARSPIEQRVKTDRRDALLLARESRAGNLIAVVVPDERDEAIRDLSRTREDVLAARLRAHQQMKALLLRHGRTCPGRIAFSAAHERTLSSIRLSHPAQEIAFVEYRNAIKDAHERLERVTEALRLQSNQWRMNPLVRALMCLRGFDFIAAITFVAEIGDPRRFARPTALMAYLGLVPSEFSSGQSRHQGSITKAGNKHARRILIESAWAYCHSPRVSRDLEVRQQGQPKAVRDISWRAQLRLTKRFRHLRMARHLPQNKVCVAIARELCGFIWDIARQVRPLP

SEQ ID NO: 400429 - protein, 393 aa, unidentified
MTATRPEYTTQQRALYMAMELSEASWVLAFATAPAEAPRRKTVTARNLAALDLEIAKAKVRFRLAADAPVHSCYEAGRDGFWIARALTVRGVQNLVVDPASIEVPRRQRRAKTDRLDAEKLLRQLFRYHGGEKDVFHICRVPDDADEDRRHLHREMEAAKATRTEYGNRIKGLLATRGLTLVSIGRSFLGDLDGLRDWAGQPVPAELRARLERDFEHWQLADRHARQLESERRQRLRTAPEGKGVWEPVRRLLRLRGVGTNGAWLLVMEVFGWRKIRNRRELAALAGLVPVPYDSGLTTRDQGISRAGSRRLRALLVELAWCWLRYQPGSALTEWFRARFGAGGRRGRKVGIIALARKLLIALWRYVDQGEVPAGATEVDWRTKLNGNVEVCV

SEQ ID NO: 400430 - protein, 410 aa, unidentified
MFTSNSSVTRFIGLDVHKRSVMVAAVDAHQQVVLRPHRLSWDEFELWRQQHLHPTDAVVLEATTNAWHLYDQLVPSVASVVVANPLLLRWISAATIKTDGHDALKLARLLAAGLIPAVWVPPEPVRQLRALVSHRHRLIRQRTQARNRLHSVLQRHNLTPPAGEPFAAAHRAWWEQLSLEPLEKLLVTQNLQLLDALEPLLAQVEQQLYLQSVQEPWVRQVPYLVQQTGIGVLTAMVLLAAIGDITRFPHARQLVGYAGLGARVYDSAETHHGGGITKQGRRDLRAALIEAAWVAVLHNAYWKARFEKLCRRLGKEKAIVAIARQMLVVVWHLWHDHELDRHMDTVTLARKLMTWAEAGGRAMRQGLTAPQFVRLQLDYLGVGQELTELRYGSHVYRLPPPGSVKIADAC

SEQ ID NO: 400431 - protein, 341 aa, unidentified
MKQYVGLDVSMEETSVCVLDDAGTVVFVGSAPSRPEALTKLLRAQAQHAERIALETGSLSSWLWCELKAVGLPVVCLDARHAKAALSMRINKTDRNDARGLAELIRMGWYREAKVKSMESRQIRAVLAARAKLVDLRRDLENQMRGLLKSLGLVIGKAGVRALPSRIATLLRQAPHLRPLIDPLMAAHSTLAKQVAKYDAQIRELAKADQTIQRLMTVPGVGPVTALAFASTIDDPHRFARATDVGAYLGLTPRRYQSGELDRNGRISKRGDRLARYYLFEAANVLLTVVRRPSSLKSWATKLVKRVGSKKAKVAVARKLAVILHCIWTDGTEFDWGRTAA

SEQ ID NO: 400432 - protein, 391 aa, unidentified
MYFVGIDCSKYKHDCFIATEAGEVIRDTFTFDNSGTGFSQFFSILEALSCPKSQIKVGFESTSHYMVPLMKHLSVKGYEFILLNPVIVSRFRRSTTLRRIKTDKIDAKTIAQVLASSDYESYHMQVYHFPELKSLTRLRDRLVKQRSYYLVMLTNVLDEVFPEFKEFFNDSLKSKTAFYLLDTYKIPTRMANMNASSFDNLKKVSYGKFSYAKFIKLKELAKNTIGSSSEADELEISSLLSIYKTINDEVCRVESEIEEIMTIIDSPTVSIPGVGMMSAASIIAEFGDLSRFANADKMLAYAGLDCGRSQSGIADYKGKMVKHGSSYLRQALMNVVETMMIHAPVFYDFYHKKRDEGKSHRVALSHLARKLVRLIYKLETSHSRFDLNNSK

SEQ ID NO: 400433 - protein, 337 aa, unidentified
MQTTKYFIGFDISADDFSASCITSPDNLVFSTQKFSNNIDGTNEFLALLSKNNIKQSDVIICMEATGVYSENISYFLASKGFTISIEAPHKIKNKTKDSPRKNDFIDALSITEYAYRYSDKLPIWKPNNEIIEQIQVLLTTREHLSVQMIANVNALKTLKHKYYQTPLANQIYEQTISKLKEHIKQIDQEIKTLIDKDDSFKNNISLAKSVPGVGLLLAANLLVLTKGFKEQLDYKHIASYSGICPYEQISGTSLHKPPRSRMCGPAKIRKLLYLAALSVRTHNQNFKKYFLRKVAEGKNKRLVLNNIENKLLKIICAVINSGTAYTENFKSINQNY

SEQ ID NO: 400434 - protein, 345 aa, unidentified
MPIVGGLDIHRKQITFDYLDTATGEVKRGQIAPADRAHLRAWLARFAGRDDVAFALEGCTGWRYIAEELAAAGITAHVAEPADTAFARGRKRHAKTDKTDSRHLRELLAEGRLPECWIPPSRILECRALLETYHALRAEHTAWVQRIHAVFFHQGAPALGEAALRTDRALQALRAAAAAYLSPAGQLQVDTALGMLAALEARLDVLRHRLLDAARSLTGARVLAERLYGVGPVTALAMTCWLGGAGRFSSSRKAVRFAGLDITVYSSDRKGPPGRLSRQGPAVLRWAVYEAGKTHARASAPDHRYYAQVKDRKGGKRAALSEARKILRQACHILAELGDDALTAA

SEQ ID NO: 400435 - protein, 382 aa, unidentified
MRTVPHTAEGLSEWGRELDEWRAQGTELWAAIERPEGRVVDFLLDHGVVVYPVNPKALDRARDRFRQSAAKSDPFDARVLADFLRTDPARLRALRPSSEAAQELKLLTDDYQRQIRHQTRLVNQLTMTLKAYYPRALEVAELPTALARDFLQAYPTPAALTALTERQWQRWARAHRMHEARTQELWAVLQRPQLPVPAHVVRAKARLMQSLVAQLTLGVEVVGTYREAIEDFFAQIPAAQWIRTLPIGDHGITAPTLWARLGDAPGRWESFRHLQAQAGTVPVTIRSGKQQVVRFRFACDKSLRYVIDHVAFLSLRWSEWARAYYAGQRARGHSYHQALRALSAKWLKIIFVMWERQVPYDEQYHLATMTRQQLRLRQKLIA

SEQ ID NO: 400436 - protein, 387 aa, unidentified
MIFIGIDIAKQKHFAAAMTADGEVLIPSFGFTNNSEGFTFLLSKLKTFDKENLLIGLESTAHYGENLIGYLFDLGYHVAVINPIQTATLRKTNIRKTKTDKVDAMLIIKSMMVNSYRLFTKTDIDLLHLKSLCRFREKIKKSKARLKIQLVSYVDVLFPELQYFFKSGIHINTCYELLKRHSIPNDIAALHLTYLGNLLQKASHGRFGKEEAIALKSLAKSSVGTGNTSVSIQITQSISQIELLEKQITELDKTIKSIMLEMDSVILTIPGIGYLNGAMILSEIGDISRFSNPSKLLAYAGLDPAVNQSGNFNAKSTRMSKRGSKLLRYALINAAWNVSLNNRTFKNYFLSKQSQGNNHYTALGHVAHKLIRIIFKILKDNVAFNLD

SEQ ID NO: 400437 - protein, 320 aa, unidentified
MAQDGLVVVGIDVAKNKVDACIRARSLRQTCPSTTQGQRKLVTWLRRHDVKKAVMEASGGYERDWVKALRCGGIEVRIVDPKRVRSFAHSAGRLAKNDAIDAEMIAWFAETFSEAPSQMVYDAAHEELLALVKARTALVELKIRSQTQNEHAAPGLAQKAHARVLKGLAAEIAKLEAAISARIETTPDLAERAEIIESVPGLAETSSANIIAGLPELGQVSNEIAAALLGVAPYDDDSGERRGERHIRGGRRWVRNAIYMPCLGAATQNNPALKAFYNRLIAKGKEPKVALVACMRKLIVILNTMIKRRQKWDPSRYALR

SEQ ID NO: 400438 - protein, 449 aa, unidentified
MKRFVGLDVHRESVRACIRDAEDRIVAELDLGCTREELREFAQGHLTSEDAVALEATFHSWAIAELLAPFVKRVVVSNPMATKAIAQSKVKTDKIDARVLSQLLRIDYLPEVWMPDTPTRELRNLCARRATLVSDLVRIKNRIHGVLAKALVPKPKGEIFDAKGQRGLAALELPEMQKRQLQSDLRLLNAAAAELEEHDEILVRNAWEDPRVKLLITLPGVDVTVALSVLAALGDITRFSDADRLAAYFGLVPSTSQSGGHCYHGPITKRGNGKARWLLIQAAQHVAPHPGPLGVFFRRLAKRKGRNVAVVATARKLAVIAWHMLKRNEPYRYALPKPTQNKLARFRVRATGVKRKTGPKKGVPQPAHRGTGARYRVVPALAQIYAGEGLPEATPKERLTAGEQRMLAECKVEEFVESVRIFNREPKNRALRKKPQISAPSPQCVEAAV

SEQ ID NO: 400439 - protein, 349 aa, unidentified
MIWIGVDAHKQVHEALALSSEGVVGQQRIPNTPQAWAALLAWAQQWPERIWAVEGAWYLGRGLAQYLARSGERVHEVNGRWTARRRRGMRVPGKSDRLDARSVATLLREEASTLPRVYAEEDELAAVQLWSRTQAELTKDLTRLVNRLHELLLQCDPEYKRTLPALTTKAAITALQQYAAPGSGVLAREREALIRATATQLALLDEQDRALRRKLGRASRARFSPLRQVEGIGSIIACAIAAEVGRPRPGFGEEQLAALGGLSPLEASSAGTTRHRLNRLGNRRLNMVFHQIVLTQARIYPPARTYLLRRQAEGRTSREARRALKRLIVRRVFRAWRECFQTHTERVAA

SEQ ID NO: 400440 - protein, 312 aa, unidentified
MDAIYVGIDVSKDRLDVAVRPSAESFAVPRTGAGIDELAKRLTAISPLLVALEATGGFETIVAAGLAGASLPVVVVNPAQVRDFAKAVGKRAKTDPIDAMVIAHFAEATKPPVRQLPDETTRLLADLVARRRQIVEMIAAESQRARRVSTPRLKKSIARLHKALEKELAALDDDIGEHVRGTPAWAEKEDLLASVPGIGPTIARSLIAELPELGTLDRRQIAALVGLAPWTRQSGQWRGKSFIGGGRASVRSVMFMGAMVAARYNPPLKAFRDRLVAAGKPKLVAIIAVARKLLTILNAILRDKTPWQPKNA

SEQ ID NO: 400441 - protein, 338 aa, unidentified
MTYIGLDVHKRVCYGTVMDEKGQIVKRGKFSNDPQGLKEFMEGIDEALVAMEAGYCWQPLYDRLEEAGHDVRLAHPLKVKAIAEAKVKTDKIDSETLAHLLRADLLPESYVPPRDIRELRDRVRRRAFLVGMRTMLKNRVHAELAKRGIRLGVPLFTRNGREMLRDLGLEAVDQVLPVMDALDRQIALISGSLKRMCGEDPRASLLTTIPGVGYYIALLIVSEIGDVRRFPDSEKLCSYAGLVPTVKRSGGSTRHGGITKEGSKWLRWALTQAVHVHIRSETNLIRFYRRLAETKPGQVAVMATARKMLKVVYWMLRNDESFHPGPGVVDLVAGRQEI

SEQ ID NO: 400442 - protein, 417 aa, unidentified
MTARTLTQRLAAFEPGTLFAGTDLALDDNVTQVIDQQAHCLDRFKFPNDRAGYDFLRNRLAQLQQRHGAPTVLVGMEPTNYFWKLLASYLSEHALAYRLINPYTVRKHREGNQIDRAKDDYRDAFTIADILRSGHYTQTRLLTGQYAELRQYSMLQRRLARDHGRQQQLLGTTVGQVFPELRQVFKDLTRNTARAMLQHHAPAAVVAALSVDAFIAAVRADNPHTRLMPSKLRQAHALAQHSVGVRSGLQAFQATVTSQLQTLTLLEAQLETTQAQLGAVFMALPAAPYLLSVPAIALASAATFLAEIGEPAHYYNYRQWTKLAGIQPTPDTSGRKHYSRTPMSHQGRPALRTMLYSTVLRLIQIDAGFAHAYDTFQHRQPNPLTKMQAIGALMNKLSRVLWAVVQQPAFYQPQLAF

SEQ ID NO: 400443 - protein, 326 aa, unidentified
MKIVGTDVSKGKLDSSLLTDPSLKKTKDKVSENNLVGFRALLEWACRHGKCEAGELHFILEATGVYHESLAEFLFAAGCQVSVVNPLLVKRFSESQGFRNKNDRHDGKVLALYGKERQPRLWTPPPPEARHLKALLARFAALENDLRRELNRLEKAQIGKAPEQVMTSLTNSLSFLEEQKARLQKEIDDHLDQHPKLKEERQLLLTIPGIGEKLSMLFLALFNNRNFVNAPQVAAFLGLIPVEHVSGISVFKRPRLSKAGDGRFRAALYWPAIVATKHNPDIRALYLRLLKAGKTKMAAIGAAMRKLVHIAFGVYKNSTPYQPQNA

SEQ ID NO: 400444 - protein, 415 aa, unidentified
MKVVFPTCCGVDVHKTFVVATIITTPADSLQPHYQKKRFSTFNSDLNHFADWLLEHNCLDVCMESTGKYWVPVFNILEKRGIRIVIANPKWVKAVKGNKDNTKDSKWIGDLFRIGLVKSSFIPELNIRILREFLRYRYKLVSMKSSEKNRFQNAFTVCNVALDSVVSDMFGKSATAITDYLTSDESFDLDHCVSLLQRSLKKKAEKVLESIEGYSISDEQKARIKIIREHYDFVEKLIAKVDTCVNEMVEKYEGEIDLLCTIPGIDRNSAITIISEIGADMSQFGSSKRLCCWAGLTPGNNESAGKKKSVRISRAGVYLKPALVQVAHAAVKDKANPYYALKYERIAKRRGKKRAIIAIARMILTAIYKMLCTGEVWNPVDLFKIDMPEHLKEQQLAKAIKQATRFLEKQGLTVA

SEQ ID NO: 400445 - protein, 391 aa, unidentified
MIYIGIDVAKDKHDCFITNSEGEVLFNAFTIPNNADGFHDLFQKISSLTNDFSNVKVGLEATGHYNYNLLGFLIDKGLPTFVINPLHTNLFRKSLSLRQTKTDKVDAHTIALMMMSGVNLQSYSDTSYHNEELKSLTRYRFDKVQERAKLKTSISRLVNILFPELEKLVPSLHMVSIYALLAEFPSSAQIASCHLTRLTNLLANASKGHYNKEKAIEIRNAAKHSIGSNMPAKSLELKHTIRLIQELTSEIDEIECFIKSIMDEIRSPILSIPSINYRMGAMIIAEIGDFNRFSSPDKILAYAGLSPSTYQSGQLDGCYSHMEKRGSRYLRYALFNATKFVCIWDNQFSAYLAKKRSEGKHYNVAISHAAKKLVRVIYQLEKSGQLYHRAA

SEQ ID NO: 400446 - protein, 412 aa, unidentified
MDRTFVGGSYQAVHNFIGGIVMTYFIGIDIAKYKHDCFIMDQDGTVIRDSFSFSNDKTGFALLLSVLDSLDPSHEKRIGFESTGHYGLNLMCFLESHDLSFMEINPILIKRFSSATTLRRTKTDKADAALITSYLTTVEYITYPTQSYHIHSLKSLTRSRDTLVRQRSQQLVMITNVMDKIFPEFKPFFNKSLKSSTAMYILRNYTVPSKIASMNSESYRKMSSKLRKTISYARFSKLRELAKNTVGQEDECLTFELHTYLELYQSLDSKIKEVEAYIEAEFKKVQSHIQTIKGIGWISAASIYSEYGGVENFQTPNQMLAYAGLDPSRNESGEHAYKGHMVKHGSSHLRYVLLNCAEMVIIHDPIFYEYYRKKREEGKHHRVALTHVARKLIRIIFFLEKNDTDYDPKKMR

SEQ ID NO: 400447 - protein, 409 aa, unidentified
MEQVFERVCGLDVHKATIAACVRVPDAKGKRVQSVQTFGTTTADLLALRDWLEAHGVTHVAMESTGVYWKPVYYVLEERVTCLLVNAAHVKKVPGRKTDVQDCAWLAQLLEHGLLRGSFVPPAPIRELRDLTRYRKSLIQERAREANRVHKMLEDAGIKLATVARDVLGTSGRAMLEALVQGTRDPAVLAELARGRMRAKLPALRQALAGHFRPHHAFLTTQILAHLDYLEEAVATLSGRVEAILAPFADAVQRLDTIPGVNQRTAEVLIAEIGVDMTQFPSDRHLASWAGLCPGNDESAGKRRTGKTRKGNIWLRAALVEAALGATRTKNSAVAARYRRVMRHRGHKKAIVAVAHSLLVTAYHVLARQTTYHELGADYHDRRHSERVARRALQTLEQQGYRVTLERVA

SEQ ID NO: 400448 - protein, 368 aa, unidentified
MEEVRGFIGLDVHKATISVAVADGGRSGEVRHVGTIENTPVAIAKLARKLARRHGAVEFVYEAGSCGYNVQRQLTGMGLTCRVCAPSLTPRKPGERIKNDRRDAIALARLHRAGELTYVWVPDELHEALRDLVRARHAACEDVRRDRIRIQAFLLRYDLRFEGKPWSTRHRKWLWNRQFAHPAQQIAFQAHLNALDHDEARKRELEEQIRELLSESPWTKQMRALQALKGVGPVVAATVIAEVGDFSRFAHPRQLVAYFGVAPGEHSSGSTIRPRGITKAGSSLARAVLCEAAWNYRTTPKIGQWMNERCPAVPQDIKALAWKAQLRLHKTYRRLTSRGKRSVVATTAVARELLGFIWSIGQRAPLGA

SEQ ID NO: 400449 - protein, 387 aa, unidentified
MSDAITLIKAADKLFIGMDLHKNTSTFVVKDREGKLIDSMKVLTDKNDVTRYINAIKRNNEDKELSLVVEPVSQWYYYANLIENLGVDVHLAHPMEVKAIAHAHIKTDKIDAGVLADLLRTNFLPEAYFSPAEVRGWKEQCRFRASLINLRTQTKNKIHAILFKHSLKHNFSDLFGKGGRRWLASLELKEPFKSNLDKYLSLVDYLTNETGYAEERITNTVINCPQAKLLISIPGISYCSALTIMAEIGDINRFISVKHLQSYAGLIPSTYNSGDKQIHGKITKRGSKWLRWIMIESAYHQMNCKRIPGFGSYYNTLKKRKGSKTAAVATARKLLAVVWRLLKDNRPYEVADPRLSAIALATAGCWKSGPIASNISSVSNSAEAGND

SEQ ID NO: 400450 - protein, 339 aa, unidentified
MRRILTFNPNGCLGLGARIDARMGMSESKVEVFVGIDVCKSTLDVRIEPPGEVFQVDNDDAGIRALCTHLSELAPTLIVMEATGGLETRAAGELAARGLCVAVVNARQVREFAKATGQLAKTDRIDAGVVCSFARAIRPVARPMKEALTAELDDLVTRRRQLVEMRVQETLRLQGASKVQAKSLKAHIVWLNKRIKSIETDLGTRLRSSDAWRVKDDVLLSIPGVGEITSRSMLSRCPEIGQLNRREIAKLVGIAPLNNDSGKYRGQRHIWGGRADVRSVLYMAAVSAKRCNPVIKALAERLKRAGKAPKVVIVACMRKLLTIMNAMIRSNTPWNPKIA

SEQ ID NO: 400451 - protein, 367 aa, unidentified
MKDSITVVGVDSHKNSMEIVTADNFGAMEVRRFGTIGGTMDALDRAVRKLASRGTTLHFIYEAGPCGYEIYRHLTRKGFSCQVVAPSKTPRKSGDRIKNDRRDAETLARLGRAGELTAIHVPSEEDEAMRDLTRGREDAVRALRTARQQLSAFLLRYGKRYPGKKPWTPAHLRWLADLSLPHPSQQIVLQEYIATVREGTERTVRMTDQILQLLPGWRWNPVVEALQALRGVAPLVAVTTIAEIGDLSRFENPRRLMAYLGLVPSEDSSGETTHRGSITKTGNGHVRRVLMEAAHAYAFPARVSRHLLKRQEGLPEPVRAIAWKAQVRLCGKFRRLTARGKLPNKVVTAIARELSGFMWAIAREVKV

SEQ ID NO: 400452 - protein, 317 aa, unidentified
MTQAITTTAGIDTSKLKLDIALHGRAERWQVPNALPGWRQLAANLARAGATRVGIEATGGYERGVVEHLRAVGFTVLVLQPIQVKAYARMHLRRAKNDALDAALIAACAAAVERPRIAPDPRLVELAGHMTFLEQIEEDIARFKIRLEHIDEPRLRRLVTNDIVRLKARRAAQMLLIERQLRAHHDLARRLDLVLSIPGLAVRTVLAIIIRMPELGQVSREQVAALAGLAPFDDDSGKSKRQRHIAGGRARLRRSLYAAALPAAFRWNKALIGLYARLTASGKSHKVALVACARKLLIYASTVVQRGTPWIERTVAT

SEQ ID NO: 400453 - protein, 344 aa, unidentified
MAQVTTARVTTVGIDIAKNGVCIHGVDAHGHVVVKKRLARQKVLPFLAQLPPCLIGMEASGGAHYWAREFTQLGHTVKLMSPQFVKPYVQSQKNDPNDAAGICEAVERPRMRGVPVKSITQQDVQALHRIRERQIKARTALINQIRGLLMEYGIVIPQRASQVRHKLPIVLEDAENGLTATAREWLHALAEELQALDQRIAATDQQIERVFEADEACQRLAQLPGIGPLTATALVAAVGDATEFKNGRQFAAWLGLVPRQHSTGGKTTLLGMTKRGNCYLRTLLIHGARAVLRVVDRKTDARSRWLQGVKARRGMNCASVAQANKTARVAWALLAKGDRYRHAA

SEQ ID NO: 400454 - protein, 343 aa, unidentified
MQSISTIGLDIAKSVFQVHGVDAAGQAVLRRQLRRRHVLAFFQKLSPCLVGIEACASSHHWSRELQALGHTVRLMPPAYVKPYVKRQKNDTTDAEAICEAVTRPNMRFVPTKTVEQQSCLMLHRARHLFIRQQTAVINSIRAHLAELGIVAPVGRRGVEQLLEVVADTADRRLPEVARACLAALGSQLRALKAQILEFDRRIMVWHRSNATSKRLDAIPGVGPALATALVASIAEPGAFRSGRDFSAWVGLVPKQNSSGGKDKLGNISKQGDRYLRSLFTAGALAVIRYAKIHGTRHRPWLTGLLARRPTKVAAIALANKLARMAWAMMVRNERYKQPAALAA

SEQ ID NO: 400455 - protein, 465 aa, unidentified
MGAGKMNRKQRKELGRRLQSANPGLEVVHPRAAGIDVGNGAHYVAVRPEQDAEPVRRFECFTADLHRMADWLEACEVKTVAMQSTGVYWIPLYEILEQRGFEVYLVNARHTKNLPGRKSDVQESQWLLKLHTHGLLNNSFQPTAEIRVVRTYWRQRGEHVRGASTCIQRIQKVLTQMNVQLANVISDLSGLTGQAIVRAILAGERDPRKLAELSHPRIRAGREQIAKSLEGNWRSELLFVLKQEMEMYDTYQHKIAECDRELEATLKQFAAPERASTEQPKIPNAKKTKRIQRNAPGFNLTSELHRITGVDLSRIDGVNAIVAQTIISEVGLDMTRWKTEAHFASWLGLCPDNRISGDKVLARGTRHVINRAATALRMAATTLIKSQSYLGAQYRRLRTKLGAPKAITAMAHRLARLVFRMLKYGQEYVDKGTQYYEQKHRQQQLHLLKKKAATLGFQVVETGVA

SEQ ID NO: 400456 - protein, 379 aa, unidentified
MQTITLYLGLDVHKDSITIAIAEPGPKGEIRLFGTITNDLHSIEKTLTRIRKAHPGAHLEVAYEAGPCGFGIARRLKQLKVPCLVAAPSLIPKQPGSPFKTDKRDARTIARLLRAGELTGVYVPEPTDEAIRDLCRARTDAVDDQRRCRFRLKAFLLRHGYRYQGKANWSQPHMRYLRELVLPHPAMKTILEEYLQGIAAAHDRVERIENSMLTLLETWRLKPAVQALMAFRGFQLVAAMVTVSELGDIHRFEHPRQLMTYLGLVPTEASSGSRQRLGAISRCGNGHQRWLLTECAEHYALPPKISKELSVRQEGQPQAVRDLSWKAQNRLHLRFTRLLARRLQRNKAKIAVARELCGFVWALLRSLECYRTSTGGAAS

SEQ ID NO: 400457 - protein, 403 aa, unidentified
MERGWLDQSVTCDVGYPECLWRSGQSQQREDWSVTQCTKTQFVGLDVHKDSIVIAVAQLGREPARVIGTVPHEWNALRKVLDKLGPRCEVACCYEAGPTGYGLARALIAAGWACDVIAPSLIPKKRGERIKTDRRDAVKLAQNHRSGELVAVFIPDEKGEAIRDLERAREDAKKAERVVRHQLSKFLLRNNRRYPGRTTWNAAHQGWIAKLAFAEPAQQYVLSDGLAAVETATLRVSQLTARLRELTVGWSQEPLVKALQTMRGVEFVTAVTLVAEVGDFRRFATAQDFMGYVGLIPSEQTSGPHRRQGPITKTGNAHVRHVLVESAWHYRRQPRMSKALRERSVGVAPQVCAIAWKAQKRLHGRLNRLIGRGKNKGEAVTAVARELAGFVWAISREEKLIVS

SEQ ID NO: 400458 - protein, 374 aa, unidentified
MKKQTKTTPSVVSTPTPAPASPGGFTIGLDLGDRSHYVCVLEAAGQILHEGPLLNDRVALTRLLTNYPAATVALEAGTHSPWISRYLTGLGATVIVANPRKLHAISRHERKCDRRDAVMLARLVRADVALLHPLTHGTAQAQHDLLGLKLRDSLVRTRVNLINTVRFTLKSLGHAVGNPSSEAFHKNILTAVPADCLPVVQPVLAVLALLTEKIKTLERDLVTRGKKAYPVTQRLQQIAGVGPLTALCFVLKIGEPARFGRSRDVGPYLGLCPGRDQSGGTDKQLRISKCGDGLLRRLLVSAAHYILGPFGPACALRAYGQHLVGTSTREKKRAVVAVARKLAVLLLSLWKHGTDYEPRVPAAAPLILVAAGTE

SEQ ID NO: 400459 - protein, 427 aa, unidentified
MNCTQNQKINQVTEHTLVVGIDIAKRTHYACFVDDRGRVLRKSFPIFQSKEGFQQLYEAIQEGRKAFGKSQVIVAVEPTGHYWLNLAYFLEENGIPLVMVNPAHVCRSKELDDNLPTKHDAKDALVIARLAKDGRFLVPRLLHEIEADLRVGSTLKEKLRKEQAAVKNAIIRWTDRYFPEFWTVFRDLGKTALAVLEWTPLPADMAGRTAEELLEAYRQSEGLKCPQKAKIQALIDAAKGSIGVTEGTTMARFEIAALVRQYRQFEAEIAALDAELKALVQTTMEYQWLKTVDGLGDATIIDLLAEIGSFAHYRDPRQLVKLAGLTLKENSSGQRKGQKHISKRGRKRLRSVLFRAVIPLIRHNEAFRELHEYYTTRPVNPLTGKQSIVALCRKLLNVLFAICTKKQAFDAERMRQDVLSHVPHRAA

SEQ ID NO: 400460 - protein, 311 aa, unidentified
MPANATPHYVGLDIAKDQLDYCISDTDEGKFPNTAEARARFIQQLLRLRTARVVCEASGGYERIIVAELLAAGIEVCVAQPGRVRAFAYAEGLLAKTDRIDARLLRRYGEKIALRLAVPTDPAATVLRELLEHRRQLTTQLTEVEGRLGLAGATLRKLLLRQKTFLQKQLRTVETMIADHIDHDPDLRAKSERLQQITGVGPVLSATVLAYVPELGKIENAQMSALIGVAPFPKDSGTLHAPRHVRGGRAQVRHVLYMAAVAAARSNPILAAFYQRLLADGKPSKVCLVAVMRKLVCLMNRLIEDPDFVLA

SEQ ID NO: 400461 - protein, 353 aa, unidentified
MGKVIGIDLGDKKSHYCVLGEGGVVVEEGTVLSTPATFKAHFEVLTSSLIAMEVGVHSRWASRVLRELGHEVVVANPARLKLIHKSSKKSDRVDACALARLVRVDPELLGPVEHRSDEDQSMLAVLRVRDLLVRTRTRLINCARGLVKPTGTRLPSCSPVSFANHARSEVPPELRLALDPLLDQIQSLTNLIKRYDRKIARIAETSYPATKHLEQIRGVGPLTALGFVLTIGRSSRMVRSRNAGAYFGLRPRCYQSGESNPQLGISKEGDGFMRRMLVQSAQYILGPFGPDTDLRRWGERLIARGGRGARSRAVVAVARKLAVLLHHLWVTGEVYDPLYNSRIGQHALESASA

SEQ ID NO: 400462 - protein, 429 aa, unidentified
MSVTQNEKIRQLTESTMVVGVDIASESHWARAFDWRGIELTKAFHFENDAEGFVLLTSWIWDVAAKNSKDQVVIGAEPTGHYWFTLAEYLKDSDIKLVLVNPHHVKKSKELDDNHPSKSDLKDPKVIAKLVLEGRYCEPYIPEGVYADLRIAMNVRERIIREMVIAKNQIQRWLKIYFPEYRSVFVNFSQTGSMAILHEAPFPADLAALGPDGINTIWRRMKLRAVGKKRAQNLYAAAKKSIGCRDGMGAARTELKLLLEDYDAKAQQLAEIMSMIEALCEQIPAVAELMKIPGIGLVTVAGFFAEVGAVRRFDSPRQIQKLAGLAITQNSSGKFKGQTGISRRGRSRLRTVLFRAAIMLVGWHGSPEFRQLHQYYTTREKNPLKKKQSIIAMSCKLIRVFYAVSTKGCAYDPVRLLADIHRNQPQQAA

SEQ ID NO: 400463 - protein, 458 aa, unidentified
MRKQNRRSPKVAVTPTLRRHNPAAAGLDIGAEEIWACVPAERDPQPVRAFGTFTPDLLALADWLVQCEVTSVAMESTGVYWIPIYEVLEARGLEVYLVNARHLKHVPGRKSDVQDCQWIQQLHSYGLLTASFRPAEDMRVLRAYLRQRAMLVEHRAGHIQHMQKALQQMNLQLTQVLSDITGTTGLQIIRAIVAGERDPQVLARLRHGRCQRSEAEIAKALSGHYRPEHVFALKQALALYDFYTAQVQECDTYLEQHYAAIKPTYDERTPPPPLGPDPKPNSHAKNAPAFDVRACLYRILGIDLTATDGLEASSAQVLLSEVGTDMSKWPTEKHFASWLGLAPHNDISGGKVLRSKPLKGNRRAAQALRLAAQTLGRTQTALGSYYRRLRARKGPTPAITATAHKLARMLYHVLKHRTPYQPQSQETYDQHLRQRAIRHLKRSATRLGFTLVPQPVAA

SEQ ID NO: 400464 - protein, 390 aa, unidentified
MIFVGIDVAKDKHDCCILGPEGNLLLPTFSFPNNRSGFSLLLDTMDSLSVNAPEIKVGLEATGHYHLNLLRLLLDHGIDCFVLNPLHTNRYRKGKTLRETKTDKIDARNIAKMLISEKELKPYSEASYHNEELKSLTRYRFDKVQERAKLRMSVSRLVNILFPELEDLVSHLHSASVYALLSEFPGASLIAGAHLTRLTNLLSQVSRGAFGRDKALAIRAAARSSVGTPILSKSMELKQTIQLINFLDAQIDELDTEIDAIMASIPSTVTTIPGIKNRMGAMILAEIGDFSCFDNPDKILAFAGLSPSTHQSGTLYSSHAHLEKRGSKYLRYALFNATRYVCMYDSVFAAYLAKKRAEGKHYYVAITHACKKLVRLIYQLQLTGEVYKRA

SEQ ID NO: 400465 - protein, 385 aa, unidentified
MRGKSFIPKDYDVFTGLDVSKKSMSVTFTNHQGLIRSLNMPHKAEPLLHYVRKHFPDQKVAFVYEAGPTGYGLYDGLAAQAYPCLIAAPSMIPRAPGQRVKTNRLDSKALSENLRGGQLKSIHVPSPTYRQLRHLTQLRDVLVSELAGMKQRIKSLLLFEGIEFPPAPAGSQWSFLVKDKLRKLACSGTVRFKLDQLLDSLEFNEKQVLKTITEIRRFCRQDPELSQCIEYLMTLPGIGWITASQLLARIGDWRELNNIRQLGGFLGLVPTEHSTGERVDRGSITRTGNERLRSKLIQASWSAIRQDGELREFFRSVCRKHPREVASRVAIVAVARKLSVRISVVLMKQRPYEVREKIHSAPLTQEETSPQGTTRRLAEPGEKNS

SEQ ID NO: 400466 - protein, 413 aa, unidentified
MDVLHPRCCGLDVHKSSISACILLREAGRVQKHQRRFGAMTQDLRELAEWLRQFGVTQVAMESSGVYWKPVWNILERQFTIVLANAQHIKNVPGRKTDQKDAEWIAQLLQYGLLRPSYIPCEIIRDLRDLTRMRASLSQEASRISSRIQKVLEDANIKLASVATNVLGKSGRAMLEDIITGEDDPEHLAALALGHLRVKIPQLRLALEGKIRSHHRFLLRRLLDQMQFVEHEIALLEERLEDIGQQRPELSQAVARWDTIPGIDRVAAWALLAEVGDNMAQFPTAEHLASWAALCPGNHESAGKRLRGATRQGSPWLRRMACQCAWAAARTKNTYLSSQFRRLAARRGKKRAIIAVAHTLIVIGYLLQKNQSNYDDLGGNYFDRIHSDGLKRYLVKRLQQLGHKVTLEPIEAA

SEQ ID NO: 400467 - protein, 340 aa, unidentified
MKTSKKNYLGIDVSKPWFDVSLLSELNHVKQPMLTLRFDNTAQGLKLFKKWLTAQHVSFDNNTLLVIENTGVYHRLLWRFCSTHNLQLHIGNAAHIKWSLGITRGKSDIIDSKRLCLYCCKQAEELKATPALNPVFMKLKDLMTSRSRLVAQLHNTKNYLKEIQCTEDKQLLLVLESLHKAAIEGLKKSILKIEEYITKMIKEDAAIYHNYELIKSVPGIGHLTAVYIICCTNNFASKISGKQLASYAGVVPFEHSSGISIKGRNRVHKMANKDLKKMLHLCALTAIKYYPEFSNYFNRKKAEGKNGMSALNAIRNKLVLRVVAVVNKQTPYVDYSVKVA

SEQ ID NO: 400468 - protein, 362 aa, unidentified
MRIIGCDLHARQQTLAMLDTTTGEIVNMILKHEGNNVREFYSKLPRPVLVGIEATGSMQWFLNLMEELGIECRVGHPAQIRACEPRKQKHDRRDAELLLKLLAENRFPAIWLPSKELQDLRALLRHRHQWVRMRTRVQNALQSIALANGLRRGTALWSHDGQSRIAALPLAPHTAYRRSELQAMYEKFEAEIEKLNQRVEEQACGRAGALLLMTHPGVGPITALATEVFLGDPARFADSKALASYVGMIPREYSSGPRQRLGGLSKQGNPLLRFLWGEAGAHAARKDPELQRFYRRKLVQKGLGKASVAVARKLGIRLWIMLRDQIDYNEFCRRGQKQQKSSDACAGMPETRNGAKSHRPVD

SEQ ID NO: 400469 - protein, 338 aa, unidentified
MNYVGIDLHKQFIVLCVMDQARNVLQRKRLSCSNEASIRAFFEELGPFQAVIEATASYDWLVKLLDPLADRVVLAHPRKLRIIAESTRKNDKLDAQVLAEFLALDMIPEAHRPGPRQREHRILVRQRQYVRGRLTGTRNKIRRILSNYNADRSDLFTAKGWNYLAKISVSSSDRFVLDQLRAEWEHHDRQLGAVDKQLREFAKSAPAHEAEARAVLETIPGVGTVTVDVVISELGDVRRFRSAKQVCAYAGLAPGQRESAGHSKQLGITKEGSKLLRWVLTEAAWQLVYRTRRWGAVFEALARRMGKKKAIIAVARRLLCVMVSMLRSGRPYQSAMAA

SEQ ID NO: 400470 - protein, 317 aa, unidentified
MTEPCGVGLDVAKATLDLACSTNPAARWQTTNDEAGWAALVAHVCTLQPAVVVLEATGGYETGAASALSTAGLPVAIVNPRQVRDFAKALGLLEKTDAIDAAVLAAFAARIRPTPRPLPDDLQADLHALVTRRRQLVEMLTAERNRVPLARGAVRKNLLAHIAWLEKQLGKTDRELRTRIEASPLWRVRDQLLQSVPGIGPTTSACLLAALPELGTLTHRQISKLVGVAPLPDDSGARRGYRRIQGGRSAVRNALYMATVTAITHNPTIRACYRRWRAAGKLPKVALVAAMHKLLIHLNAMLRHQTLWHPSPVAPMA

SEQ ID NO: 400471 - protein, 396 aa, unidentified
MAKQTTSNSKTHKSSSSSKAAKTTKGAAAAGALTPEPAQQASCAPLPEIIHLGIDVHLRQHVVCRKIDAATVQPAQHMKPAELVAWVVKQKSLARRVVCCYEAGPFGYTLQRQLAAQGITCHVVRPQDWDRHGQRVKTDSRDARELAEALARYEAGNKHALAIVRVPEVEQEQRRLITRQREAFVREVRRLGAMGRSHGMTQGHEVNGRWWRKRAWSALIKGMPQHLRDLLESLAQVLLKLEELIAQRTAQIEAQATAATARPKGLGALTECVIENEVHDWERFTNRRQVSSYTGLCPSEHSSGGSRRQGSINKHGNPRLRHPLVECVWRFIRMQPGWKRLLKVMGRLKGEDGRRPANKKKIAVTLARELAVDLWRLKTGRTTLEALGLVPAQSAA

SEQ ID NO: 400472 - protein, 411 aa, unidentified
MGLLHEALPASTLVVAIDPGKVSNRVWLSTGEAGAVVPPLSLPVLRPGLDQLHRLVVNHAGTADPVFAIEATGGLHQVWVRELDQRFPGSVRLFAPSETTAARAQLGSRRFKTDDRDCAALTYLARQGQGRRVTDRIDDALAVAVRHRRGLVAEHKVAQQRLHDQLQALCPGLSAPDGHGRALPVDSVIGQAVLDCAAAFAGRPPAIRSLRARARGRVLTSEAEFWVQRWRTCLPPPADASARAARLTRSLARWRALNADLAAVDNDIAALLAGSEGQILTTLPGVATSRAAAFAAFSLPIARFPTAEHLYSATGLAPASYKSATINRRSPISRQGLPEHRDALMNLAWGLSQHCGPFIDRHRELRARGLRPIPARIALARHACRLAYTLLRTQQPFDEQRYRRARHQSER

SEQ ID NO: 400473 - protein, 366 aa, unidentified
MKKTITVQAFKSEIFKERKLTIGLDLGDCWSFYCVLDEAGQIILEQKLPTTPEAMKQTFGKISRSLIALETGTHSPWVSRLLTELGHEVIVAHAQKVESITKSNRKDDRHDARTLARLARFDPELLGPVRHRSVQAQLHLTVIRARAELVSARTALVNAARGLVKSYGQRLPKCGTYQVNEKLAEGLSAELREVLLPLFKEIESLNEHIKEYDERMEKIAKEVYPEVSLLKQVKGVGTQIALTYVLTIEDPYRFPKSRQVGCFLGLRPGRRNSGKSEPQKGISKEGDRYLRTMMVQGAHYILGPFGEDSDLRRWGRKLAERGGKNAKKRAVVAVARKLAVLLHRLWVGGEVYEPLRNSQKAMREVA

SEQ ID NO: 400474 - protein, 354 aa, unidentified
MNNESPEGIVHMQVITIGVDLAKNVFQVHGVDSAGKVVISRQLRRKQVIDFFSKTPPCLVGMEACGTAHHWAREVSKLGHTVRLMPPNYVKGYVKRSKNDAADAAAICEAVTRPSMRFVPIKSADQQAVLMLHRTRDLLIRQRTQLINALRAHLAEFGLVAETGREGLAQLARIITDESNRETLPSAMRQALQAIVDQLAALELQIGALDQAIHAHHRANDMSCRLETVPGIGVIGATAIASTVTDPSDFKSGRDFAAWIGLVPRQHSTGGKERLGGISKQGDRYLRRLLVIGATAVVRHARQYPQKHPWVMRLLAKKPAKLVAVAVANKMARIAWAIMAKGGRYRAPELAAAA

SEQ ID NO: 400475 - protein, 355 aa, unidentified
MDSKKYIGMDVHKESISIAVMNDAGKIVMECVIETKANMILQFIDGLRGDLQVTFEEGTSAAWLHDLLKPHVTKLVVCDPRKNASMREGNQNDKIDARRLAELLRRNHLNPVYHGEHGLRSLKELVRSYLTITKDLVRVMTRVKAIYRSWAIPCTGKQVYAPRHRAEWLGKIGEPGVRRRAEFYYQQLDALRTVRQQVRRELLAEGKKHRAWKRLCQIPSIGPIRSAVLLGILQTPHRFRTKRQLWTYSGFGIETQSSADHRRVNGQLQRVKKQSSIRGLNRNCNHDLKNLFKGAAIVASSKPGPFQEFYTALLSKGSRPEMARLTIERKIATIVLIVWKRGVSFDAQHLKPQTA

SEQ ID NO: 400476 - protein, 348 aa, unidentified
MSKSNQYVGLDVSLKETSICVIDDAGKIMWRGRVDSTPEAIATAVKQHAPRAVRIGLESGQLSSWLFHELKGAGLPVICVDARHAKAALSLKVNKTDANDAFGLAQIMRVGWYREVTVKGLDCQAVRALLVARAQIVSQITTLKNCVRGILKTFGRVLPKGLRSQFPARVRAAIDGHPVLGTIIEPTLRVLEATRVQLRVYDKAVIQRARSDDTARQLMSAPGVGTVVALAYITGVEDPARFKRSSSVAAYFGMTPRRYQSGEIDHAGRISKCGDGMVRSLLFEAAKVLLSRSARPSALKTWGEALGKRIGAKKATMAVARKLAVILHRMWTTGTTFQWNVEAASSAA

SEQ ID NO: 400477 - protein, 307 aa, unidentified
MFIGIDVSKNQLDVCTRPSGEAFVVARDDKGLADLVEQLRGARPELIVLEATGGFEQVVAGALAGAGLPVVVINPRQIRDFARALGRLAKTDRIDAEVIALFAGRVRPELRPIPDEAARELDELVTRRRQVIEMIVAEGNRARRLDTRRIKKRIDRHLEVLQKELTEIERELDDTIRNSPIWRETEDLLKSVPGIGNATARTLLAELPEIGSLDRRQIAALAGLAPFNRDSGTFRGKRMIGGGRASVRAVLYMATLTASRWNPVIKTFYKHLLASGKAKKSALVACMRKLLTILNAIVRDRTPWQPA

SEQ ID NO: 400478 - protein, 410 aa, unidentified
MDILYSCCCGLDIHKRTVTACLIDRDSKGRSRKEVRTFGTMTDELLALADWLGAAACTHVAMESTGVYWKPIYNLLEANFTLLLVNAQHIKAVPGRKTDTRDCEWIADLLQHGLLRGSFVPTREQRELRELVRYRTALVRERADEVNRLQKTLEGANIKLASVATDIMGKSGRAMLAALIDGTTDPATMAALAKGRLREKREELTRALDGRIAPHQRFLLVEQLSHIDTLEEAIERVSAEIARRMEPCAAQLAALDTIPGVSQRVAEILIAEIGTEMTQFPSAHHLASWAGMCPGNNESAGKRKSGKTRKGNPWLRSILVEAARAAAHTKGTYLSAQYHRLARRRGSKRAAVAVGHTILVIAYHLLKEGTTYTDLGGDYFDRRDRQAVERRLVHRLEGLGYKVSLEPVAA

SEQ ID NO: 400479 - protein, 348 aa, unidentified
MKILALDLGKSKSVAYRLDTATGEVGFKTVLTRPATLVRLAARWRPDRVVFEVGPLAGWVHDVMVGCGVRQIEVANPMGEAWRWRNLKRKTDRDDAVKLAELSAAGQLPTVHMPNPAVRQWRQLIAYRMTLVNCQTAAKNRVRAILAMAAESLPPGKNGWTAEMRARLASLARPLAECGPEDLWRGMLASELETLNHLQEQILEVEKRLSAVAASDDRVARLQTIPGMGPRTAEALVALLDDPHRFRSAKQVSAYLGLVPRQFQSGTMDRRGRITKRGSRLVRRLLVQAAWAALRWNLTLRRVFERITRGHQGRRKVAIVAVARRLAVIAWAMLRDGTTWQASRAMAA

SEQ ID NO: 400480 - protein, 387 aa, unidentified
MPVAAHRSEAPTAIRTDLGAIFVSLELSQSKWLITSLSPGGGEKMSKHAVAAGDVAGMLARFTELKTKARTRTGRCFPIIVIQEAGLDGFWIHRVLEAEGIESHVVDPASIATSRRRRRAKTDKIDGEALVRALLAYQRGEPRVCAMVRVPTPEEEDRRRLSRERQALTHERVQHVNRIKGLLFCQGVSDYEPLRRDRRKQLEERKTGDGRPLPAHLKAQIGRELDRLELLLEQIKAVEAARDAMLSATQVVSPAPAMLLTLKGIGPEFTAVLWSEGLSRHFDNRRQVAAYAGLAPTPWQSGSVDHDQGVSKSGNPRLRTTMIQMAWLWVRHQPHAALTLWFRDRVKQNGGRLKKTTIVALARKLLVALWKYVNAGVVIEGAVIKTV

SEQ ID NO: 400481 - protein, 417 aa, unidentified
MKHPKMQYTYVGIDSHKNTHTAVFIDCFFEKLGEITFDNLPSKFPAFLKKAEQYKVDGTDFVFGLEDVGMYGRTLAIFLDNNNQKVKHTNALLVARERKNQNIVQKTDSVDGECAARVLLSKFGELQDFVSDEKYFILRSMVARRNFITKNNTSLKNHLHSILTQHYPNYNTFFPDIHSKNSMAFFYEYPSPITLKNVSIEELTEFFRKVSSNRGSNGRSISERAKVIIDTLQDTTVPFQEIRDDSVRSTIRQIESNMDELKRIDKTLAEFMKKFDCTLTSMTGIDLVSAAQILSCIGDVKKFSTPAKLARYSGIAPVSYSSGQRDLQFANQRGNRELNSLFYLLSLRLITTNRGKILNPFFFEYYHRKVSEGKTKTQALKCVQRRLVNIIWTMLTNNDEYVNPPMFDKPPKKEESK

SEQ ID NO: 400482 - protein, 368 aa, unidentified
MSHLTIGAVSSDANNRQSAVVTPLALVIKLGIDVHAKDYVVVRQVDEAVSQPAQRFNLEGLLGFVRRQVAVAQSVHSCYEAGPFGYVLHRQLSALGVHNLVVRPRDWSTYGERVKTDQRDASALCSCLDRHLAGNQGALAVVRVPSEAEEQARAIARQRQSLVRERVRLTLQGKSAALLRGHQLRGEWWRVSTLSKLAPDLPPELLTLLQPWQQVILLLDTQVQALTEQLEQAAPPELPCGLGSMTWEILSREVGDWHRFRNRRQVASYTGLCPGEHSSGASRQQGSITRHGNPRLRHLLIEAVWRLLRYNPEYRGIAKWRDQFTAVRVTQARKKKIVVAIARQLAVDLWRLGTGRTTPAALGLQTPS

SEQ ID NO: 400483 - protein, 340 aa, unidentified
MKKFLFIGIDFSKSKFDVTVLKSIDQQDYAQAIFLNEQKGFNDFLKWLSKQSDVPQKDWLFCGEHTGLYSRGLTEFLVKKNLFIWLENPLQIKCSWGIKRTKNDRIDSLEIARYALRFQDKAVACKPANKDIESIRMLLGYRGRLVKNKVSLEVAAKETRRVINRDSVSRFVYENSQRDIERIKKEIEQIEFKMLEIIMASDLKENYQLVVSIKGVGPITAITLIVHTDNFTAFDTARQLACYSGVVPFEKSSGSSIKGANHVSHLANKDLKVLLTQCARSAVQYDKELSAYYTRKIAQGKKYLVVINNVRNKLIHRIFAVVTNKIPYRENYLNPWADCA

SEQ ID NO: 400484 - protein, 358 aa, unidentified
MNRKTGMNAGQILGTIDGLQVVGLDIAKLVFQMHTVDMATGEIVGVQIKRAKVLEHFANRAPCLIGMEACGGAHHWARELQALGHTVRLLHAKAVRPFVSGNKTDAADARAIWLAVQQPGTKCVGVKSLAQQATLTLHRQRELLMKMRTMQTNALRGLLYEFGATFAKGTKTMLGEVEVALEALSNKLPQMVADSLREQVLRIKALGEDIAAIEKRLALQLRQDADMRRIADIPGVGVLTATAAIATMGDPRAFRSAREFCAWLGLVPRQWGTGGKVRLQGISKRGDAYVRTLLIHGARSVLMHAKEPGPWLEQIKARRPANVVVVAQAAKMARTIWAVTARQQEYHRGYRSVRPQAV

SEQ ID NO: 400485 - protein, 391 aa, unidentified
MSVYVGIDVAKRQHRIAVLDGSGAPLQKPFSVTNDIEGMNRLLETLLPWSDAIEIGLEATGHYWLALFEHLTRADYTVHVLNPLQVHAYQRSGIRKRKNDSIDAVWIADFIRIGGARHTSDPTVMPIYMQLRQLSRFRFSLVEQIGDAKRRILSLLDRVFPEYENLFSSVFLISSRQLLAEAVTAQEFADFDLDELTRILKTASRGRLGRAKAEHLQQVAKKSIGVTFLADASRIQMGCLVAQLDFLTQQVDEIDAALAKLIDTLPNQYLTTIPGIGPVTAASILGEIGDIQRFDTLKQLVAYAGIDPAVYQSGQFEARQTRMSKRGSPYLRHALWMAATVARMYDPELRAYYQKRRSEGKAHGTVTGALCRKLLARIIVILRDQRPYEPR

SEQ ID NO: 400486 - protein, 415 aa, unidentified
METETSYWVGSIDVHKSMLAVVAADVAGQGPLRLERRKFGTTANQVRELAAWLAERNVREVVMESTALYWRPVWQELEGQCRLFLAQAHSNRAPRGRKRDFADAERLLRRHLAGELILSFVPDAEQRLWRTMTRSKHQLTRDRVRIHNQVESLLEDARIKLSGVVSDLLGVSSRRMLKALAAGETDPAKLSALADRALRATPEQLQEALSAASTLGPLHRQVLGLFLSRLEVIESHMEILDKSIATALASVQDAVVRLAQVPGFGLDSAQQVIAEVGATAEAFPSPEQLSSWVGVCPGREESAEVSKTDRSPKGNRVMRRVLTQVANAAVKTEDSLFQALYRKLLWKGHNKAIWAVAHRLCRLTWKILHQGVSYIEYGARLNPKALQRRTAKLLRELRQLGYQVQLGPLQPKATG

SEQ ID NO: 400487 - protein, 354 aa, unidentified
MNSNTIGLDIAKSVFQVHGVCVKTGSVFKKRLPRSRVVEYFAGLEPSLIGIEACGSAHYWGRELLKLGHAVKLIPAAFVKPYVKRGKSDALDAEGICEALTRPSMRFVPIRRAENQAVLVLHKVRAQLVKQRTILVNMLRSHMAEFGMVAPKGIWRIADLKEIVADERDERLPVLARQALKRVLHQFDGLEGDIEKLEGEIVKQCKSDEASRRLTAIPGIGPIGASALAASMGDAKRFKSGRHFATWLGLTPNRNASALKEKKTRISKMGNPYLRTLLVLGATSVVGQVKRSKAPPPGLPARLLEKGKPVRLITVALANKLARIAWALLAKGQTYREAPAHQGDAHPLCAPSLA

SEQ ID NO: 400488 - protein, 427 aa, unidentified
MSTLFVGIDVSSKSNSVYAMDFEENKYLSTSFGNNQPGADELVNRIAACMQKHKNLDTLLIVLESTSVYSVHISNFLASSEVLMPYKPYVFCVNPKATANYRKSYIGMEKTDPTDAYLIADFARVGRTKKLEPWRGGQFIALKRLTRHRMHLSECITREKTYMVSNLYLKFSELQLLEGDDKPFGNLYGATSSAILTEFLSPQEIIDMPEEDLLAFLAQRSRNRICDLSKTSELLRKAARDSYRLDKCMYEPLNISLASSFNCIQAYQKEIRLIEQAIEKCIKGMNPNALIILQSIPGIGPVWASGILSEIGDISAFHSSDALAKYAGLYWPKGDSGDFISEDNQMSKAGNPYLRHYFGEAANSIRKHIPEYADFYARKYAEVSKHQHKRALALTSRKFVRLVFGLLAKNQLYTGEKLDTEHNTESN

SEQ ID NO: 400489 - protein, 332 aa, unidentified
MAYDFVIGVDVGRYFHHACVLDPQGRQVLSKRIDQHEGALRKLFGQFLADNASVLVIVDQPNNIGRLTVAVAQDMGADVRYLPGLAMRQLSRIHVGNSKTDVRDAYVIAHAGLNLPDALRSVDRVEEVFIQLKVLNGIDEDLARAYTRLINQMRSALVGTYPAFEHVLRGQMIHRKWILHLRAKYGGPTKIRRIGRTRLAAFARSHKARNPEPVIDAMLAAIHAQTVSIAGAEYAELGVAMSAKDALAKLEHRKQIEAQVLKLIKDIPQTEILLSMPGIGPRSAAQILMTVGDMSDFPDAAHLASYAGLSPRTNQSGTSIMSNSPNRAGNKN

SEQ ID NO: 400490 - protein, 403 aa, unidentified
MTSYSYFAGIDWASQSHSVCVLDAAGGVELRLDVPHNKEGIERLIRQLRSFAGIVIAIERPSGLLVDALVEAGLRVVPIHPNVLKASRPRYRSAGKSDPGDAYMLADILRTDGHRFRALEPQSDEIRALRALVRTRDELVDSRVALANQLRSLLESFWPGAAEIFSEIDSPIALAFVARYPTPESTARLGEKRLAGFLAQHSYCGRRPVGVLLERLHAAPTGRAGELEAEAKGELVRSLASILERLVTELAKLTARIEHTVANLADGQIIMSFPRSGRICAAQILAELGSVRERFPNEAQLAAEAGVSPVTYESGKHRSVVFRFTCNHRLRRALTCLADQTRHAHPWAADVYHRARSRGCDHTHAIRILARAWVRVLWRVWYTKTAYQPHLHRSAAAFNATTG

SEQ ID NO: 400491 - protein, 454 aa, unidentified
MQKQDSYDYYVGIDCAQNKHDFAMKNNQDKFLIKKGHFSNTLQGYEKFLNTVLSKCLDKDKILFGMEVTGIYGTNLYERLKSDGYNVVMIFPDSVKNYRDYKRLNKTDKIDSACIAELLLNGDAQIVHAEKNGYIDLKAYIRRRNALKVTCTQETNRFLAKVCLYFPDLLKVFPSGRATLKAIFSIYPTPYSIIEADFNELVSVLQKASKNKFGVDKANELIHAARNSIVVRKSISDGELYNIHSLIDSIDSLESEIRNLEKIIDSKAEEFPAYHVLLTLTGCGKITAATIVAEIGDISRFHKASQIVSLAGLYGDNSKSGSSVNKRGKISKKGSRYLRHAIYMVAEFARRNNPIFKAYFTKKKNGDRTKHILAVNAVANKLCKVIYSLMKNQSTYIIQYRDLAKLSESTQNEFFQNAETDFSAKTRRKKYLYEDEYGELHEFVFKSIKTALIE

SEQ ID NO: 400492 - protein, 409 aa, unidentified
MERVIERGAALDVHKKSVTACVRGPRADGGRRQEVQTFGTTAAALLALRDWLSAHGVTHVAMESTGVYWKPVYYVLEEMFTCLLVNAAHVSKVPGRKTDVRDCEWLAQLLEHGLLRGSFVPPVPIRELRDFTRYRQVLVQDRTREANRLHKVLTDAGIQLASVASNVLGKSGRAMLAALVEGTTDPAVLADLAQGKLRRKLPALREALAGRFRTHHALLVSQLLAHLDYLDEALDILTTQIEEALAPFAREAARLDAIPGVGPRTAEILIAELVVDRRQFPTARHVASWAGLCPGTHESAGKHRAVRTRKGNRWLRAALIEAALAAINVRDSALAARYRRLVRHCGHKKAIVAVAHKMLTTAYVLLADGRTYQEPGAGYYDAQRKDRSVRRALQTLERCGYRVSLEPAA

SEQ ID NO: 400493 - protein, 348 aa, unidentified
MGYFAGLDVSLEETAICIVDDEGRILREARVASEPYALVAFFNALGMTMERVGLEACSLTAWLHQGLSEAGIPAVCIDARQAKAAIGAMPNKTDRNDARGLAQIMRTGWYRAVHVKSPSCRSWRALLTARRMLLNKRRDIENGVRALLREAGLKVGAPSRKDFPARVRELASGDDVLTGLVESLLSVIKVTTDEVARLTKRVLDEVRVEPTCRHLMTVPGVGPLTALAFRATVDRPDRFRKSRDVGAHLGLTPRRYQSGETDVQGRISRCGDELARTALYEAAHSLLIRSRKWSALRAWGMQVAKRRGIARARVAVARKLAVILHRMWVDKSEFRWGKQAATAAKAAR

SEQ ID NO: 400494 - protein, 351 aa, unidentified
MPRKTAVAVVRTIGIDTGKNTLHMVGLDERGAIILREKISRHRIAARLVNVQPCLIGIEAGMATHYVARELVALGHEVKQVPPAYAKPFRQGHKNDFRDAHAVAEAVQRPSTRCVPIKTDGQLDLQALHRVRSRLIGARTAVINQLRGFLLEHGIAVRQGHRFLRQQLPQILATRADVLSPRMVRIAGDLIEDWGYLDERIERVTDEIEGLAKTDVSCGQLMTVPGIGPIIASATVAAIGNGAAFAKGRDFAAWLGLVPKQMSTGDRTILGRITKRGNRYLRMLFIQGARAIQLHRASWTRHSFGPWLTAAAKRLHHNVLTVALANKLARIALTVLIEGRNYETRITPAAA

SEQ ID NO: 400495 - protein, 412 aa, unidentified
MEVLHACCCGLDVHKESVTACVLWAEGKGKKRKAKRQFGTMTRDLLALADWLQGCGVTHVAMESTGVYWKPVWNILEGQFEVLLVNAQHIKAVPGRKTDQNDAEWIADLLQHGLVRSSFVPPTPIRELRDLTRYRVSLVHECNRIVNRIQKVLEDGNIKLASVATDALGASGRAMLKAMIEGEEDSGKLAEMSCGLLRRKIPELQQALEGRLRSHHRFLLRELMEHLEFVESKMARLEQEIGEHLRPFEEEVERLCTIPGVDRVTASGLIAEIGVQMEQFGDAEHLSSWAGLCPGSHESAGKRKSGRTRKGSAWLRRCLCQGAWAVSTKRGNYLSAQYRRLAARRGKKRAIIAVAHTLLQIAFYLLRDGKCYRELGADYFDQLHPNRVKRYLVKRLERLGFQVSLAPAAQPA

SEQ ID NO: 400496 - protein, 320 aa, unidentified
MTEHTKEQCITVIGIDLAKRSFHLCGMDAQGRRVFSKQVSRAKLASELANRHPCLVATEACGSAHYWGRLFESHGHQVKLIAPQFVKPFVKSNKNDAADAEAAQRPTMRFVLIKRVEQQDLQAIQRMRSQAVEQRTAQVNQIRGLLAEYGITIPQGRAHVRPCLAAILEDAENGLSALFRASLQGLAGELLHLDERVAAYDAQIAAIGSDPRLLGSGRGLAAFLGLVPRQHSTGGRDRLLGISKHGDTYLRQLLIHGARAVMRWVERKADALSRWATALRARRHTNIAVVALANKLARIAYAVLISGQPFDPARGAVSKA

SEQ ID NO: 400497 - protein, 304 aa, unidentified
MYVGIDVSKDRLDVHVRPSGEAFAVMHDSEGMTSLVERLRRLAPDLVVLEATGGLQTRVAAALAAAQVPTAVVNPRQVRDFARAVGRLAKTDALDAEAIAHFAEAVKPTPRPLSDEDGRALQALVARRRQLVDMRIAEKNRRQQVQAPHLRKRLEDHLDWLAQAIAEIDNDIDDHIKRSPVWRATEDLLTTVPGIGTTARALIADLPELGTLTRRRIAALVGVAPYNRDSGKMRGRRSVKGGRTTVRTSLFMATIAAIRCNPPIRSTYQRLVAAGKPKMTAIVACMRRLLVILNAIMRDKVVWA

SEQ ID NO: 400498 - protein, 341 aa, unidentified
MWIIGCDYHPRFQQIAMVNTEGGELEQRRLEHPQEAEQFYRGLRGQKVRVGMEASGHARWFERLLGELEFEMWVGHPGAVRAAAPRKQKTDARDAEHLLQLLLSGQFEQMRVWVPTAEQRDLRQLVLHRHRLVQMRTRVKNQLRSVALNEGVGRKPGLWSRKGQEQFLGLELPPWTERRRQDNLELLAELEQRSVLLDQAVGEQARQRAEVARLMSHPGVGPVTALGFVLTIGDPRRFACGKQVASYLGLIPAEYSSGGRQRLGHISKQGNGLLRSLLVEAAHVAVRVEPDLGRYYRRLAMKKHRSLAAVAVARKLALRLWWMWRREQNYAQWRASGSHAG

SEQ ID NO: 400499 - protein, 344 aa, unidentified
MTTIDYIGLDIHKKTISFCAKAQDGTILDEGTIPALRKTLLAWAQARPRPWIGAMEATLFTGWIYDFLKPWAQELKVAHPPMLKALTAAKKKNDKVDARTIADLLRCNLLPECHMAPCAIRDLRRVLRYRNLVVRQATRIKNRIAGLLMETGTPYNKRRLHGKAYFGELLGSLQEVPPSVVELLKLSRGQVEFFAAMQRRLLKGLKEDAELNQRVMRLQTIPGVGEILALTWALEVGEVKRFSSIGHAASYSGLTSAQRGSAGKEQREPISKQRNKHLQVVLIEAAKLAPRHNRQLAAVHKRELQRGDRNRATLAVARKLVAYLMAVDKSGQPFTMRASTQEAA

SEQ ID NO: 400500 - protein, 374 aa, unidentified
MSKLRFLGLDVHADTIAAAVAEPGGEVRHLGIIPNRLEAIRKIVKKLGSPQHIRACYEAGPTGYVLYWQLTALGVKCDVIAPSLVPTKAGDRVKTDRRDAEKLARCHRSGDLSTVWVPDAEHEALRDLVRAREDAKQDQLRARQRLGKFLLRHGKRPDGSMKAWTGKYMDWLKGHVHFEIAALEATFLDYVQQVRHQAERIADLEKAIDAAIAAAPAQTRAVVEALQALRGVAKITAVTIVAEVGSFSRFRNAPALMGYSGTVSSEFTTGKHVRRGKITKTGNAHLRRVVGEAAWAYQRRPWVGGLLKKRQQGLEQEVKDIAWKAQTRLHARYTKLTARGKNKNQTVTAVGRELLGFIWAIAVRTEAKYQKRAA

SEQ ID NO: 400501 - protein, 411 aa, unidentified
METIFERVAGLDVHKAQVTACVRVPDAAGRREPHLAEFATTVAGLVALRDWLAAHRVTHVAMEATGVYWQPVWHILEDDVELTLCNARHVKNVPGRKTDISDAQWLCQLMEAGLLRGSFVPPKPQRQLRMLTRYRKTQIAERAREANRLHKALEDTGIKLACVASDILGASGRAMLDALVAGTTDPTLLAELAKGRLRAKIPALREALQGRFEPHHALVIGAILSHLDFLDEQIAMLSEAIGAQLGPTGAGAVALASTITGVAARSAEVMVAEIGTDMSVFPSARHLASWAGRCPGNDQSAGKRRSGRTRQGSKWLGIALEEAALAAIRASTSYLAAQYRRLKPRLGHGRALGAVKHSMLVAYWHMFTTGETYRDLGGDYFQRRDPQRATRRLVAKLEELGHQVNLAPATA

SEQ ID NO: 400502 - protein, 347 aa, unidentified
MEIETIGIDLGKTVFHLVGMNGAGEVVVRSKFSRLQLLRFTANLRVRLIGMESCGGSHFLGRSLREQGHEVRLMPAQYVKPYVKTNKNDYIDAEAIAEAVGRANMRFVPIKSDEQLDMQSLHRVRDRWVARRTSVINQMRGLLLERGITFRKGRRHAEASLPAVLEDADNHLSGLLRMLLAQLQGELRQLQSQIDEADALIRKAAREQEACQRLIAIPGIGPLTATAVVAAIGSGAEFRKGRSFAAWLGLVPKQESTGGKQKLLGISKRGNHYLRRLLVSGARAVLQCRDKQPPGLSAWIGQLASRAHTNIVAVALANKMARVAWAVLSKSEVYRPPLPVIAAQAAV

SEQ ID NO: 400503 - protein, 380 aa, unidentified
MRTVSGLDVHKDSIFMCILDEQGKKTEEKFGVTTREIKRMAVVMHSRFVSDVCMESTGIYWIPLWRLLESDFKLHLVNPQFLKQLPGRKSDVKDAQWIATALLKELVRDSFVPDGNIQRLRQYGRRINEINKDTVRCEQRIDMLLQRCNVRLSNYVSRTRSRSYRKVVDSLIRGETSVDELIRLIHGRTVNRHGKSAVHDALEGCIVESDRDLLGQYTQMLDMYQSQKQQCHEAMVQMCMNLYREAFLFLLGIPGVKELSAAIIISEIGDNMELFATAAALVSWAGLRPRNDESAGKIKSRQITHGNKYLRKALIECAWSAARTRGSVFYCRFWHLKGMKKHHNAIIVAVAREMLAVIWKLLSRHENFDETYHLKKKTAS

SEQ ID NO: 400504 - protein, 411 aa, unidentified
METIIRRCAGLDVHKASVVACVRVVDDNGELQSRTESFGTTTSDLLRLNDWLTSFAITVVGMESTGVYWKPVYALLETEFECWLLNAQHLRNVPGRKTDVADAAWIAQLVAHGLVRSSFVPPKEIRELRELTRYRKTVIQERSREAQRLHKTLEGAGIKLSSVASDILGVSGRAMLQALIDGTHDPDILAELACGRLRKKLPALRKALLGWFSPTHRILVGELLAHLEYLDESIERLSADIAQMIAPFAQAIDLLDTIPGVNRRSAEVLIAEIGVDMRQFTSSAHLASWAGMCPGNNESAGKHFSGKARKGSKWLRTALVESAQAASRTKRTYLAAQYARIKGRHGHNKAIFAVAHSILVIAYHLLERSEPYNELGGDYFVERQNKDAYQRRLIQQLERMGYDVALHVRAA

SEQ ID NO: 400505 - protein, 400 aa, unidentified
MLSIGIDVSKGKSTVCGMKPGGEIVYTPFEIQHTREGMSDLVSLLRSSGEEVRAVLESTGSYHCPVVAALLENGIFVSVVNSLRMKRFCSQSIRKVKTDRIDAMQIALYGLAYWQELQPTRLPEDTYRELQLLARQYYQMTSILIKAKVDFNAICDQVLPGMQELMNDHAGRHKLSDFVLRYRHTTHILEMGETRFRKDYCKWAEKKGYRNRERMAALIFATAQNGIPVLPNAPSTQIVITEAIRVLHTVEASRDAILTQMQALAKTLPEYSLVREMPCIGDTLAPRLIAEIGDVRRFHSKRALIAYAGIDAPPYQSGKFCANNRHISKRGNRYLRKTGYEVMQSYVMHKPANDPIFTFIEKKRGEGKSGKLAMVAGLNKFLRVYYGKVTELYRSLPAIE

SEQ ID NO: 400506 - protein, 355 aa, unidentified
MNDAKYIGLDVHQATISAAVLDSAGKLVMEAILETKAETILQFLRGLRGSLHVTLEEGTWAAWLHDLLQPHVTRVLVCDPRKNALLKAGNKSDRIDAHKLAELLYMNKLNPVYHGEQGIRTLKELARSYLTITRDLTRVMSRLKAIYRSWAIPCAGQQVYAPRFRAEWLAKISEAGVRRRAELYYQQFDSLAALRQGARRELLTEGRKHLNTRLLQQISSIGPIRAVLLLALMQTPNRFRTKRQLWAYCGLALRTYTSGEYRIVGGQLKRSKKVLAIRGLNRNHNHDLKNIFKGAATRAASTAGPFQDFYEACVARGMKPHLARLTLARKIAAITLLVWKKGVRFDAEHLKQQAA

SEQ ID NO: 400507 - protein, 312 aa, unidentified
MAHSEGFVGLDVGKFEIFVFISKTGAAFSVPNTPTGHVRLQNRLGTPAGQIIALEPTGGYEWAVWEMLDTAGYDVRQVSSAHVRAFSRATGALAKTDPIDARLIAEFIAFRPRSGRQLPAENLRLLNALSAKRRQLVELRKRLKCQIKQHQSSKLTDMDDELLRLLSRQISILDEEIQMKIKGDPQMNQHSKILRSIPGIGPVLCAALIGEMPELGTIGDKQIAALAGVAPINRDSGRMDGRRSIKGGRYIIRSLLYQAALVASTHNKTLKVFAARLKESGKPHKVVLIAVARKLLTIANALVAKNQLWRAS

SEQ ID NO: 400508 - protein, 387 aa, unidentified
MARKRILSTLDTSIAYEAVGLDLAKTDVALAAFDSDHKEPYFIDRIPYDKLYELLANMAPTLVAMEPCSGAHQIAEQIQALGHEVMMISGRHVQAWVKDHCNGQKTDLNDAFAILNLAYDRWLTPIRGKTREECRLLALQASYRQLKGQRTKTMVHVKATLHAWGFPIRTGSFNQKALRELIDANREAFGGEMAETLHLMIDRVRGLDHDIATVLKLLTEATKRDPRASLLRSIPGFGVLTTSRWCAVMGDIARFDSPKQTMAFIGLVPNNRITGHHTETSSGREARGQGRMSKRGDKMLRSLCILGAASLCMLVRKDRLQDCPFVASIKERLASPRPWFKVLVYVAAKLVRIATSLLKYGEKFSFEKAGISKAVLKQWELEQAKAA

SEQ ID NO: 400509 - protein, 323 aa, unidentified
MDSVMMTYLGLDVSKAKVDCALLLEGKVKSKVVRNNSEGFEVLKQWLAKHGASRVHACCEATGTYSEAIALFLHDQGHGVSVVNPAQIAAYAQAQLSRAKTDALDARLIARYCEREEPVAWAPPPAEERLLMALLRDLQQLQSMQQAESNRLATAHPGVRARIQRHLEFLAGEIEELRQKIDQHIDHHDELRGRRDLLDSVPGLGEHTIPWLIAYLGDGKRFPGSKCAVAFFGLCPKPRQSGSSVRGKARIAKSGHADLRHALYMPAVVAYSRCKVFASFVHRLKTAGKPPKVIIVALMRKLVAIAQAILKSGKPFDPSLHYT

SEQ ID NO: 400510 - protein, 344 aa, unidentified
MDTIGLDLHKRESQLCTLTEAGEIVERRIVTSRERFTAVLGGRTPARILVEASTESEWVARHLESLGHEVVVADPNFAPMYATRRRGVKTDRRDARTLAEACRLGAYRPVHRASAPQRHVRAQLAVRDALIRTRTRYVSVVKALARRDGLRLPPGKPVHTEAKLTALLLPALLAEEVAPLRAVLEPLNQEITAADERLAAVAAADPVVARLQTAPGIGPVTAVAFVATLDDVTRFASAHHVAAYLGLTPREYSSGEQQHRGRISKTGSPRMRALLVEAAWRVLRSPAPAAAPLRAWAERIAQRRGKRVAAVALARRLAGILYALWRDHADYRTPAPRPSATTKA

SEQ ID NO: 400511 - protein, 312 aa, unidentified
MDATVVGIDVAKDRLDVCVRPGNESFVIARSGAGIEDLVERLQKLSPRIVAIEATGGFETVVAAGLAAAALPVVVVNPAQVRAFAQALGKRAKTDPIDAAVIAHFAEATKVEPRPLPDAMTRLLADLVARRRQIVEMMAAEGQRGRRLTHKRLQNSIARLRKALEKELAELDSEIGDHVRGSPVWAEKEELLASVPGVGPVVARTLIGELPELGSLDRRKVAALVGLAPWTRQSGQWRGKSFIGGGRKSVRTALFMAAMVASRHNPVLKQFRDKLVAAGKPKLVAIIAVARKLLIILNAILRDKTPWQPKTA

SEQ ID NO: 400512 - protein, 344 aa, unidentified
MVTTIGIDPHKATHTAVAIDDDETVLAEITIRADKDQTRKLIDWAQSVDGEGRVWAVEAATGLGHLLSQQLVSRGEPVVDVPPVLASRIRVLSSGKSQKNDPNDARSVAIAALRRESLAEVHREDDAAILRMLAKRHRELTALRTQAVCRLHAMLAVLRPGGMGHRLSAKQASRMLGGTRGLDAVGEQRRQMAKTHIVDIRRLDRDLEANKTQIRRAVAAADTSVTDIYGVGPVVAAFLVGYTPPIDRFATADRYAAYNGTAPIEVSSGGKVRHRLSRRGNRTLNHAIHTAAVTQISHHTPGRVYYDKKLDEGKTTKEALRALKRRISNAVYRRLITDAQRHSS

SEQ ID NO: 400513 - protein, 464 aa, unidentified
MANSAYIGIDASKGYADLIALHSNKEVAEEPFRLYDAADGHRQLGEMIEGWFNKGFEKIYCGVESTGGYENNWVNYLQEAGKTNSVHVARLNPKGVKSLGEAGLTRTITDSVSAQNIALYLINFNHKVHYLQPSQTSKAYTDGRKHSSFIRMLKKQKNQLGNQLEKIIYQELSPLMCYCRHGFPAWLLLLLEKYPGVELIKKAGEKKLCKIKGISHEKAIALIKKVSSLTNLTSSHISSIIKSTVEEILRLDAAINTQKIALFNRFKNEKDAQLLTSITGVGEQSAVEFLIELEDVNRFDLAKKLNAYFGTHPMYKQSGDGTWGNHMSKKGRSEIRGVLFMCCLTAIRYDEMFKGIYARARAKGKNHFSAMGVVMNKMLRVIYGVLKNKTKYNREVDYKNQENAKIKQNEKEEKQAEAKKEIQTKLERYNQAELDDMPVSKRYTKKKRQSPKLHKEECTGSSAS

SEQ ID NO: 400514 - protein, 346 aa, unidentified
MKILALDLGKYKTVGCAYESESGAHQFQRTFTAPADLRRLVQEVKPDRVVIEVCSIAGWVCDLMGQLGIAVQVANTSDDAWRWRKVKQKDDRRDALKAARLSAVNQLREVYIPQTEVRQWRALITYRQHLVGRRTKIKNHIRDLLVREGQILPRGSKCWTKLGQEQLNSMARPLKEVGAAELWRGELWEELQQLQMIQERVASVEEKLNAMGAADTRVRLLRTIPGVGPRLAEAIVALLDQPQRFRKASQVSSYIGMVPKAFDSGESERRGHITRQGSGLVRSLLVEVAWAGLRHNTWMRQTYLRLSGGKKARKKIAIVAVGRKLLVRCWAMLRDNCAWDWQPQIT

SEQ ID NO: 400515 - protein, 429 aa, unidentified
MSYRIAGIDVHKKMLAVAVADVEVDGDFQFERQKVGTTPIDLRRLANWLVEHEVDEVVMESTAQYWRPVWEALEQHWRPQRRARDSAPRLAGTLHLAQAQSNRGPGGRKRDFPDAERLVKRLVAQELTLSFVPDAEQRLWRTVMRRKYQVTRNRVQLQNRLEALLEEAHIKVSSLVSDLLGISARRMLQALADGETDPAALATLATARLRATPEQLRDAFHACPTLHPVYRRLLKLTLEELRVIEDHLGQLDQQMADLLTAHHDAVQRLAEVPGLGVDSAQQIIAEVGATAATFPSSKHLASWMGACPGNEESAGVNYSHRCPKGNRQMRRVLNQAANAAVKAKGTIFAIVYRRLVPRLGHAQAIGAITHRLCRLIWKILHQSVRYEERGPAVSEEAKKVRARKMIRELRSLGYRVEPLQAPSTNPASS

SEQ ID NO: 400516 - protein, 344 aa, unidentified
MNTIKVVGIDLAKSAFQLCVWMNDGTVAWNRKVSRSKLLDTVRQFPPDTLIAMEACATSHYWGRTFQSMGYAIRLIPTQHVKALTRHQKNDANDALAICETAFRPGIHFVAVKTVEQQDIKALRCARQLMVEQRTAAANQIRALAAEQGFEFPVGIHTLQQRLPDLIEDAQKPVSSVLRHLLSTLLENIHTLNEYIRSTEYEIAALCQQQPRYRALMTIPGVGPLIAAAFLSEVDAEQFANGRQLSAWCGLVPRQHNSGGKRILTSMTKNGNCDLRTLIIHGARAVMRYTQKRDDRLGRWLNHVTERRGKMKATVALANKLTRIVWRLLSEPVDFDMNKAFALK

SEQ ID NO: 400517 - protein, 427 aa, unidentified
MPHRIAGIDVHKRMLAVVVSDVEVADEYQFERRQFGSNPAQLRALAEWLLEQQVQEVVMESTAQYWQPVWGALEQYWKPPCQKSEGARPRSGSLPLAQAQSNRARRGRKRDFLDAERLVRRFVAHELVLSFVPDPEQRLWRTLMRRKYQMTRNRVPLQNQLEALLEEAHLKLSSLVSDLLGASARRMLRALADGETDAAALAALADYRLQATPAQLQDALGACAGLDPTYRRLLSMALEELQLLEKQIGQLEQEMADRLRPHQDAVQRLAEVPGLGADSAQQILAEVGATAATFPSEGDLASWVGACPGDEESAGRSYSHRSPKGNRQMRRLLNQAANAAVKLKGSIFALLYRRYVTRLGHNVTIGIIAHRLCRLIWKILHQGIRYEERGPAASEQSKRQRARRMIRELRSLGYRVELPNPQPAVPA

SEQ ID NO: 400518 - protein, 376 aa, unidentified
MEHDSTVYVGLDVHKESITIAYAVGMGDVELLGRIGTTKGDIDRLCKRLRSKGRRVHVVYEAGPCGYGLHRQLVAEGFECMVCAPSLIPKKPGERVKTDRRDAIKLVRALRAGDLSAVHVPGIEDEAFRDLARAWVSAKEDLKQARQRLKSFLLAHGVRYPGKADWGPSYRRWVSQHSFSNDWQQLAFEEHRRTLGDRMAQCERLEAALRDSVINWRFYPAVLGLQAMRGVQFTTAVGMLAEVGDLSRFEHPRQLMAWLGVTPSEHSSGEKRRQGSITKAGNSYARKLLIEAAWSYRHQARVSENIGRRHPGLPKPIIDRAWDAQVRLCRRYRKLAVRGKNANIAVVAVARELAGFIWDITRLSMSLAIPRTGLTT

SEQ ID NO: 400519 - protein, 340 aa, unidentified
MEQAIMIGLDIAKNVFEVHGRNAASEVVLRRTVKRGDMEKVFGKLSPAQIGMEACGSAHHWARVLANLGHDVRLMPPAYVKPYVKRNKSDAADAAACCEAMGRPDMRFVPTKTVDQQAALSLHRSRELLVRQRTQLANALRALLSEFGIVAGQGKAGLAQLIDKLRTGTLELPEDALFSATMLADQHAAADATAAGLERRIKAQAKADKTARMLQTAPTVGPIIAHAVRAVLPDPARFKCGRDFAAFLGLAPSNSGTGGKMRTGPITKKGDPTLRRLLVLGATSWVRHVSKCLDKASPWLRGMLARKPRKVVAVALAARTARVLWAMLTHNQPYRASANA

SEQ ID NO: 400520 - protein, 419 aa, unidentified
MRNSNTKKLKRISEQTLLVTVDMGKVKHTGYYRFPDGTEGKTFEFSNSRKGFEEMWQQVYRAKRFRNLTDVVVGFESTGPYAEPLLHFLRKRNVQLVQVNPLHTKRLKELQGNSPNKTDQKDPKVIADIIELGHALTVIIPEGTVAELRRLTQARERSIQRMSMLMSQLQDLIFLIFPEFMTVMKDITIKSTQHLLKNHPRPQDIVDVGIELLTQILKKVSRGRLGKERAEALYRAAEESVGLREGQESIVFEIKEIVSFIESIERFIKELETHMSKHLKDVSYSQCILSIKGIGEITAAGLIGEMGDFKKYKTIAEVIKHAGLDLFEISSGKHKGKRRISKRGRPLLRKLLFFASINVVRKGGILHKQYQHHLEKGMPKIKALVAISRKLLSIIFALVRNHSMYVAQYSKTQRLKEAA

SEQ ID NO: 400521 - protein, 342 aa, unidentified
MGTMTVLYGGLDLHGDNVFCTLMDAARNVRFEQRFPNDLFTIAEGLKPFRKWIKAVAVESTYNWYWLVDGLRRLKYDVRLANPARMQENIGLKAANDKTDARFIARQLVNGILPEGYIYPEETRGVRDMLRRRMRLVHERTSEWLSLMSLAARHTGQDMTIAELEGCDLNDVLKGQPHALVMAQASVRHIVFLAEEIKALEKEVLRGLPDKETYKRLMTVPGIGPVLARTILLETGPVSRFKEAGNYASYCRAVSTTHTSNGKKKGEGNGKCGNRYLAWAYVEAANLAARHSPEMHAWFQRKQARSGKRVIAVKALANKLAKACYFMMRDGTDFDVKKLAGI

SEQ ID NO: 400522 - protein, 410 aa, unidentified
MEVVVVVGAGLDVHKKKIVACCLDGRSSPPKAVKCTFGTFRDELERLRAWLLKRECTHVAMESTGVYWMPVHRVLEGSVQIILGNARHMANVPGRKTDMSDAEWIAKLLRHGLIRPNFIPPRPIRDLRQITRYRRKMIDMRSASELRVEKLLQTANIKLSSVASEVFGVSGRLMLRSLAKGMTDPVKLAALAKGTLRNKRAELTRAFRGTFTADDARLLAVELHVIDDLEKRLANLEQLIEKQVGPFAQEIALLDTIPGVDRALAIDLIAEIGTDMTAWPSDRHFAAWTGTCPGNRESAGVRRRARTRDGNPYVKVILLRAAVCASRTVTSYLAARYRRLTARRGSRRAFVAVAHEIAIAIYHMLSKQQPYIAPKAADPAVARKHKSNQLIRELRKLGFEVTCTPTANLI

SEQ ID NO: 400523 - protein, 394 aa, unidentified
MKLVGIDVGKNSHHFCVMDKETGEFNVTPTSFSNNKEGFDFLINSLKPYSKKSILIGMEDTGHYHVALLKFLLSNGYTVALINPKTTDLTRKMEGGITKNDKLDTITICDVLDTPERKKQYRITKVDRFDLYEQRQLTRHHHNLKEELNIYCNRLQKSIDLVFPEFNTLFGSKYGVVYMNLLKTFGSAEAIASTDIRTIRKCFEIKGRGGRISLTPEKLKECAKNSIGISSEVETIQIKHLVSQITLIKEQIAEIDKKIEEFSIKNNSPILSIPGISHFSGTSILAELGDIGNYSKPSQIIKFAGVAPYHYESSQFNAQHTVITKKGSKYLRKTLYQIILPVIKYNPVFKKYYLLKISQGKGHRCAQGRCIRKLLRIIYHLLETGQSFDPALLR

SEQ ID NO: 400524 - protein, 311 aa, unidentified
MTSQFAGIDVGKDSLTGNLYGQDVVKDYPNTSRGIQRLSTWLQKHEIDLVVMEATGGYEKMASRQLERAGLAVAVVNPTYVRRFAQGMGTLAKTDPIDARMIAWYASVKQPKPRPPRSEAAEALSACVDRRDQLVAMRTMEKNRLGSAAAYVQSSITAHIESIDEQIKQMEVEIDHLIDQEEEWQSRIACMTSCKGVGKVTAVTLLAEMPELGHEKREQIAALAGVAPMNRDSGRKSGRRKTRGGRSKLRRVLFMAAMSAAKFNPVIHAFYQRLIEKGKPKSVVMVACMHKLLTILNAMLRKNEMWRPDFA

SEQ ID NO: 400525 - protein, 462 aa, unidentified
MARRQAKPRDPAARKLAGSLPIVNPNAAAIDVHSDNHVVCVPADRATPNVRTFGANSCDLLQIAAWLKECGITTVAIESTGIYWIPLFELLEAQGFEVDLIEPGQASRCGARPKTDVLDAQWLQRLHSHGLLQGSFRPPDEVIALRAYLRQRQMLISYASTHIQHMQKALEQMNVKLTEVVSDINGVTGLRIITAILAGEHDPARLAALRDGRCKNDEATIARALEGTWREEHLFELSQAYELYRAYQMKVTECDRRIEQAVARLPDRSAGDALQRQLRTRGRKPNDLRFDGANPVFRALGVDLTAIEGIDVSTALVILGEIGVDVSKFPTEKHFASWLGLCPNHQASNHKLKSRRVRKGKNRVAIALRMAARSLHRSHSALGAFFRRMHSRLGTKGAITATAHKLARYVYAMLKHGQAYVRQGLAEYEAAMDERMTRALRKKARALGYDLVASQQSSPAVP

SEQ ID NO: 400526 - protein, 444 aa, unidentified
MIHPDAAGIDIGNESHYAAVPPSRDSQPVREFGCTTAELKAMAAWLKQCRIRTVAMQSTGVYWVAVYDILEQAGLEVYLVNARDTKNLPGRKTDVQESQWLMKLHTYGLLRNSFRPSQEIRTMRTYWRQRNDLVQSAGRHIQRMQKALTQMNIQLANVLSDVSGVTGQAIIKAILAGEHDPHKLAEFRDPRVKASEEQIAQSLEGNWQPDLLFLLKQEQDGYEFCHKQMAECDRQLAQYLQQREDRSQGAPLPEEKRKGRLKKKSGNKPQFDLRTGLFRLSGTDLTRIDGIDVMTATTVISEAGYDMSKWQTENHFVSWLRLCPDNRISGNKVIGKGRLPTNNPISIALKMAATTLRESKTYLGAIPSTANQARGSHRHQGHGRQAGPLGLPHAALRDEIRGPRSSLLRASTPTVTDQAPQGQSRKARIPSESNAGCGLTSRSF

SEQ ID NO: 400527 - protein, 350 aa, unidentified
MIIIGVDFHPGSQQIASVDTETGEFQEKRLAHREEAERFYRALAGAGQKVRVGMEASGYARWFERLLAELQIELWIGDTAEIERKRARKQKTDREDAQHILQLMLKDDFPKIWVASWGNRDLRQLLWHRHRLVQARTRIMNQLQAVALNEGLQCKKRLWRASGRQQLESFRLGPWASRRRRDLLELLDRLNPTIEELSQAIEQEAERCPEAQRLMTHPGVGPLTALAFILIIGNAERFQCGKQVASYLGLVPLEKSSGKRRRLGHITKQGSSIVRFLLVEAAQAAVRGDPQWRSKYMRLLMRRGRKTAKVAMARRLAIRLYWMWRERQDYRQSRSFGSHAGPPGNRDGVQ

SEQ ID NO: 400528 - protein, 356 aa, unidentified
MTSTKYIGLDVHKESISIAVMNSIGKVVMECVIETKASTILQFIDGLRGDVRVTLEEGTWAAWLYDLLKPRVTEIVVCNPRKAALLKDGSKGDRIDAHKLAELLYMNKIKSVYHGEHGLRTMKELARSYLTIIKDLTRVMNRLKALYRSWGIPCVGNKVYAPRYRAEWLGKIREAGVRRRAEHYYQQLDVMHLLRQEVRKDLLAESRKHKAWKLLRQIPGIGPIRAAVLIAMIQTPHRFRTKRQLWTYSGLGLETHDSAQYHAVDGALQRSERPATVRGLNKDHNHDLKDIFKGAAMRASTAAGPLHDFYENLLAKGRKPTMARLTLARKIAAITLIVWKKEVRFDANYLKPQPAA

SEQ ID NO: 400529 - protein, 364 aa, unidentified
MKRKVYVGMDVHKETIRIAYLTSNSKEILKEQQIKHNEVQIKKFIKKLKTEWNEIHCCYEAGVTGYPLYRYLKSLGVNCILVAPGKIPRQNTGKIKTDKRDAIKLARLMRSRELESIHVPSEEDEAVRDYLRSRDSLRLDLGRNRQRLMKFLLRKDIKYSTTKYWTVSHYKWLNNLHFNNEILQETFNDYYSRVRVQEENLKSMDKKIQEIAESEPYREKVGILRCFRGVDYLTAMFLLCEVNDFKRFKTAGSFMSFLGLVPGEYSSGSKRKQTGITKTGSPRLRRILTEAAWQHRFPGTGSKIVTARRSGQPALVVALAEKASLRLHKKFRNLQLRGKTPQVMITAVSRELSGFLWAAMNLVA

SEQ ID NO: 400530 - protein, 410 aa, unidentified
MELLHPHCAGLDVHKESVVACLRHMVDGKVTAVVKTFQTTTQELMALSDWLSAEGCTHIAMEATGVYWKPVWHVLSDGGFELVLCNATHVKNVPGRKTDVNDATWLADLLAHGLVRASFVPPEPTQQMRDLLRTRKQFVRERSGHVQRIQKTLEDANIKLDSVITDIVGLSGRRMIEALIAGQTDPEALAALAHSRLHASKQELEAALRGRVKAHHRFMLRLHMDHLQALDAAIACIDQEVSAQLEPFRVAVEMLTTIPGISSLAAEVMVSEIGIDMSRFKTEGHLISWAGLCPKNDQSAGKRRSNRMRKGAPWLKTTLIQCAWAASRSKGTYLQAQYLRIRSRRGPKKAIGAVAGSILTAAYHMLKNGTLYQDLGANHFDCRQKGKQVLRLVNRLQNLGFIVQITSMAA

SEQ ID NO: 400531 - protein, 413 aa, unidentified
MRLFVGDDWAEDHHDVELMDAGGRRLAKARLPEGVAGIARLHAMIGEQLGEDADEDDAGQVATGIETDRGPWVAALIAAGYTVFAINPLQASRYRERHGVSGAKSDAADAHVLADMVRTDSHQLRPVAGDTALAAAVKVVTRTHKTLIWERTRCTQRLRHALRDYFPAALEAFEDLDAADTLELLARAPDPASAAKLTTAQISAALKRARRRGVAAKAERIQAVLRAAHLGQPDVVAAAYAASVRALTAVLITLNEQVKTLHGQVEAYFGQHPDAEIIASQPGLGGVLGARVLAESGDDPTRYASAKARKNYAGTSPITRASGKKKTVLARHVHNDRLIDALMSQAFTALRVSPGARAYYDLQRARGSGHNPALRQLANRLTGILHGCLKTRTLYDEATAWPQHPTATEKTAA

SEQ ID NO: 400532 - protein, 391 aa, unidentified
MIYVGIDVAKDKHDCFITDSDGEILFPVFTIQNNRDGFDDLFAKILSISSDFSNIKVGLEATGHYSYNLLGYLLDKGLHTFVINPLHTNLYRKSLSLRKTKTDKVDARTIAMMLMSDVNLKSYSDISYHNEELKSLTRYRFDKVQERARLKQSVSRLVTILFPELEKLVPTLHIASVYALLSELPSTGKIASCHLTHLTKLLENASKGRYSKEKAIEIREAARVSIGSNMPAKSLELKHTLHLISELDSEISEIESEIKQIMDQISSPILTIPGISYRMGAMILAEIGDFSRFDSPDKILAYAGASPSTYQSGQLESSYSHMEKRGSRYLRFALINAAKYVCHWDETFGAYLQKKISEGKHYNVAITHATKKLVRLIYAMEKSGKPYIKTA

SEQ ID NO: 400533 - protein, 486 aa, unidentified
MSSQKKKQPEDSGKQKAVNGKNKRRRRKKGMTLDDRPVLEPNAAGIDIGAREIFVAVPADRDENPVRVFPTFTEDLEEMAGWLVSCGVTTVAMESTGVYWIPLYDVLEQHGVRPCLVNARNMKNVPGRRTDWHECQWLQFLHSVGLLRAAFRPDGAVSAVRSLMRHRTDLVQIAAQHIQHMQKSLTQMNLQIHHVISEITGVTGLAIVDAILAGERGPAVLAKLRDHRIHASEEIVQKSLVGNWKPVHLFTLKQSRQIYQQYQESITACDEEIEKLLVAFEPRVDPAEHPLPPDRKAKQRKRKKRGVIPGVNAKTGFDMRTEAYKLFGVDVTQIPGLMMTPLKLFSEVGRDMSRWPTADHFASWLGLCPDNDISGGRVLWKGMRGTRNHAGQLFRMAAFGLHHELSPMGDHLRRMKSKIGPAAAQTATAHKIAIIFYTMVKKQVEYDASIWAQKDAEREKRFEAKLKRQAQARGYKLVKIEETIAA

SEQ ID NO: 400534 - protein, 372 aa, unidentified
MTQTTAMHHDAPETPLHMAMEVSAAEWKLGFARGLEKARVRTIRAGNFEQLRAEIRKTQKLFGLELDAPVYSCYEAGRDGFWIHRELERRRIHNVIVDPASIEVVRHRRRRKTDRLDAANLVRRLVRWVRGERDAWRTVKVPSVAAEELRRLHRERKRLVKEQTGHQTRIRSVLATHGPVPKKLEPAVLQRRSNGTRLPAPTRDELRREWQRLELVRSQLKEVEREIARQENEDESPAMNKVRKMRRLKGIGSVFARTFGAEFFGWRTFQNGRQVGALAGLTGTPYDSGQTNREQGISKAGNRWVRSLAVEMAWMWLRYQPDSALSLWFHARFGEGARVRRIGIVALARKLLVALWKWVEFDELPEGAVLRN

SEQ ID NO: 400535 - protein, 335 aa, unidentified
MMYVGLDVHKRACYGTITDQDGNVLKRGRFSSSPEGVTTFIEDIDEASIAMEAGYCWQPLYDALKEKGYDVRLAHPQRVKAIAEAKVKTDKVDSETLAHLLRANLLPESYVPPMDIRELREMVRRRSFLVGMRTKLKNRIHAELAKRGIDLETPLFTRQGRELLRSLSLEAVDQLLPVMDALDVQIICISGSLRRMSGEDERARLLTTIPGVGYYVAMLIISEIGDVNRFPSAEKLCGYSGLVPRVRNSGDSVRHGGITRDGSRWLRWALTQAVHVHVRWEEESELSRFYRRLAARKTKQEAVIATARKMLKVVFWMLRDGEPYHSGGLEPALGR

SEQ ID NO: 400536 - protein, 355 aa, unidentified
MKRCHFIGLDVHCQSTELAVVTQSGQLTKRQRCPTTIPALREALEAIGRPRHVAFEEGPLADWLWRNLTGHVEEVTVCDPRRNHLIAKDSDKDDPIDAEKLAQLLRGGYLKAVHHPESLERAVFKQLVLLYHDRVRQRVREANRVMAYLRRHGVFVKEKAFADPQERPGLVQRLPAQRLIASNLELLWQSYDLAAEQVRTTRRRLVEAAKKEEVIERFQELPGFGWVRAATFFVYVDTPWRFRSKAALWKYLGIGLERRHSGSGRVQVHLVKYANRQLKSVLIGAAQKVIGLKETPYAAQYQRWLEAGLSASTARRSVARSLAATLWGMWKNGSVYRPEWVGVAAARLSAAEVAS

SEQ ID NO: 400537 - protein, 341 aa, unidentified
MLGIRTLNSHHEGVMSDYTYVGIDVAKKSLCCSLPDRKPFTVGNDPAGIKSLLRRASACDGLDKLCFVMESTGGYSDYTADALEDLAQAKTSIVPPARIVGFRRAEQINTKNDPSDAAVIRRFANQHKPGLRLTPTKAQRHLRALQIQMHNLHKLIALQKCVREKFTSAYEVDLAVLESVDRVIGSIETEIGQLQAEFDRTVSENERMATDAAHMLSIHGIGTGVCNVMLTYCYRQLWELSRPELLKHCGMEPKDHQSGQLKGHTRMSKAGDGRIRGILYMAAMVSVRKGGLMHDYYHGQVATGKKKMIALVNVMRRLLFLIQGVVKSNSPFDINVFEKRG

SEQ ID NO: 400538 - protein, 422 aa, unidentified
MSYCPVAGIDVSKRFSDMCILSPDNKIFAQEKIYHDETSINRANALLQKAERLFFSKPVIVMESTSHYHLILFQFFSEHGYDVIVVNPLQSNSMKDFSIRKRKTDRVDAFKLAMMYRTKTLRPSQIPQTATRALRQLCRHRAELLNDVSSYKNRLTALLDQTFPGYDKVFSDVGGVTSCAVLVRFPTPTILLVEEESELVEVIAAASKSGYSFAKKKAGLLISAAQKAQTLGIHSCADETLIVCTIQMLRTLSESVLQIETAIDNLLAQIKEMRNNVSLLQSIPGVGSHSAALLLGEIGDISLFKKPKQLAAYFGLDPTERQSGSFRGTKNKLSKRGSPYARAALHMGVVNSICKRGKDSAANPVLLSYYEKKCKNKPAKVAQAASMHKLVFIVFAVLRDQKPFELKTPEQHAVEQGFVKAA

SEQ ID NO: 400539 - protein, 417 aa, unidentified
MDVHRDFCEIAIVEPDGQVRSAGRINTVVEELELFAGSLAADDVVALEATSGAGLIAEIIEPHVAAVLVANTRKLPQISKAKAKTDRLDARTLARLAGSGFLETVWAPDEQTRALRRLCARREALVRARTRAKNEAHAVPARNLCGRPPVTDCFGKKGRTWLAELQLPIDERLTLDGCLRQIDFLDTEIGALEAALATQALGSPEILRLMTVPGVNLHTAAAFMASVGDIRRFGSARQLVGYLGLDPRVRQSGGAEARHGRISKAGSSLARGMLGEAAWSVAQTPGPLRAFFERIRARKGPQVAATATARKLTCLFWCLLTRQEDYAYARPSMTRSKIRRLELAAGAPPRKGVRGIAGNKNDQTREAEREIARRAETAYRRTIADWKAAGPTKTGAGATPGRASSRPSKGKAARQTP

SEQ ID NO: 400540 - protein, 347 aa, unidentified
MRFYTKQHKFYCGIDLHAKKMYLCILDEAGEVRLHRNIKTDREVFLKVIEPYQEDVVVAVECMFTWYWIADLCTAEGIPFVLGHALYMKAIHGGKAKNDKIDSHKIAVLLKGGMIPMAYTYPATMRATRDLLRRRNHLMRKRAELYAHIQNTRSQYNLPDTLGCIAKPQNRNGIVERFEDPSVQKMINADLAVIEAYDPIIAKMERDIISMANHHDPVAYALLKSIPGIGRILGLVILYEIETIKRFPSVQDFVSYSRLVKCSKESNGKKSGTSGKKIGNAHLKWAFSEAAVLFLKGNDPGKRYLDRLTNKHGKGKALSILAHKLGRAVYFMLKQKKPFDQDTFLGL

SEQ ID NO: 400541 - protein, 284 aa, unidentified
MTIIRIGLDTAKHVFQVHGVDENEQTVVRRQLRRGEMEKFFGKLAPTRIGLEACGASHYWARLLRGLGHEVVLLPPQYIKPYVKRGKNDANDAEAICEAMSRPGMRFVPIKSAESQAELMLLGVRNLLIKQRTTVINAIRGHAAEFGVIAAKGPVKVAELLQQAHTEEASVPELALDMLRLLAAQLDALHVKLKLIETRLMASHRENPLSQCLASQPGIGPIGAVSFALRVTDPKSFRSGRHFAAWLGLTPKDHSSGGRHRQGRISRQGNEALRKISKKKKIYK

SEQ ID NO: 400542 - protein, 351 aa, unidentified
MMLIGVDYHPSFQTIAFFVEETGEYGEQELNHSDGQAEKFYRDLQQQGICVRVGMEATGYSRWFERLLAELGFELWIGDPAEIKAKRVKKQKFDREDARLLLRLLRENNFPQIWVPSPENRDLRQLLWHRHRLVQMRTRIMNQLHALAMNEGYRWKKKLFSEQGREQFEKLPLAPWASRRRQELLELLDRMNPTIGELTTAIEQEARKRPEVMRLMTHPGVGPLTALAYVLIIGTPTRFQRGKQIGTYVGMIPCEESSARKQRLGHISKQGSSLLRFLLVEAAQAAVRIHADWRRRYIHLAMRRHKSIAKVAMGRRLAVRLYWMWRNGCEYSPSLEFGSHAGQLGTGNGVK

SEQ ID NO: 400543 - protein, 314 aa, unidentified
MRYIGIDMSKDSFHAAFSNGKVKKFANTKQGIEMFLDFIKQTHKSKKTLIGVEATGVYHLLFAKTLTKQDWKVNIINPLESHKILTQGLRTVKTDRIDAIKIREMVKFKKGYLFSETDTATALKALINERNTLVQTRKAMKQRQEANKLKAIATGKKLFDSFSDVIKAIDNSIIKIEKEMKSYEQDTQRLLQTIPGIGPVVSASLVAYIGDIKRFDNPKKLVAYIGLDSRVYQSGTSIQGKGYISKKGNKYLRNVLFNSAFVARQYNPNLNGYYNKKIKEGKHYLSAMCAVERKLIHLIYAVWKRETPYVKYKN

SEQ ID NO: 400544 - protein, 343 aa, unidentified
MDHFAGLDVSVKDTSICIVDETGKIVREVKVASEPEVLLTVLKKGGYQLKRIGLEAGPLSQWLFSALGETGLPVICVETRHMRAVLRAQINKTDRNDARGIAQMMRVGLYRPVHVKTLRSQKLRMLLTHRKLLQSKAIAIENDLRGTLRNFGLKVGIVGSSRFETRIKELVEGLPDLALLVEPMLTVRRVLREQIAILHRRLLAVVRDDEVCRRLMTVPGVGPVVALTYRATIDIPARFPKSKSVGAVFGLTCAKYQSGEIVRSGRISRCGDEMMRTMLYEAAHRMLCLAKWSWLKAWAMQIARRCGMKKAIVALARRLAVIMHRIWVDGTEFRWTREATAAA

SEQ ID NO: 400545 - protein, 422 aa, unidentified
MLTETQDQEEIIARVAALDIGKAEVVCCVRVPQDNAPGKRLQEVQPYSTMTRSLLLMADRLRSLGVTRVVMEATSEYWKPVFYLLEAHGFDTWLVNAKDVKHLPGRPKTDKLDAIWLCKVAERQMIRPSFVPPPDIRRLRDLTRYRIDLVNVRTAEKNRVEKLLEDACIKLSVVASDIFGVSGRDMMAALIAGERDPKTLAQLARSRMRTKITALQEAFTGHFTDHHAFLLARMLGRVDAINADIAAIEDRIGEHLVPFASAVDRLDEVPGVGPTAAAVIIAEIGVDMSHFPTAAHLVSWARFAPGVQESAGKHKGRGSTGHGNPYLARVLGEVAVVAGRTDTFLGERYRRIAKRRGKKRAIVAVGRSILVIVWHLLADPDAHFHDLGSDFYDTRIGPDRKKRNHVRQLEALGYTVTLEPAA

SEQ ID NO: 400546 - protein, 345 aa, unidentified
MKITTVGIDLAKNVFQVHGIDERGKVVLRKQLRRAQVAVFFGNLPSCLIGMEACASAHHWARRLQRFGHTVRLMAPQFVKPYVKTNKNDVADAEAICEAVGRPNMRFVPIKSIEQQAILSVHRVRQGFVKARTAQANQIRGLLGEFGLVIPQGIINVAKGVPEILEDADNELPVPFRHLIDRLTRHLKELDRQVKEFEQEIVAWHRGSELSRKLEKIPGIGPLAASALVASIADAHSFKNGRQVSAWLGLVPRQSSSGGKPTLLGMSKRGDAYLRTLLIHGARSAILAAKNKVDNTEGWLTNLLERRHPNIAAVALANKNVRTVWALLAHGREFKADYVPTRMAA

SEQ ID NO: 400547 - protein, 377 aa, unidentified
MKRVKFVGLDVHAETIAVAVAEQDGEVRSLGVIPNREESIRKLVKKLGAVEELQFCYEAGPTGYVVYWQLGALGAMCEVVAPTLVPMKSGDRVKTDRRDALKLARNYRAGELTPVWVPDAAHEALRDLVRAREAAKKDQLRAKHRLSKFLLRHGRRPPMGVKAWTLKYLAWIEREVHFLQPAQEATLLDYFQEVEHMAARMARLDLAIEEAVKLTPPKMRAVIEALQALRGIAQISAVTIVAELGEVSRFTRARQLMGYGGIVASEHSSGEKTWRGGITKTGNAHLRRVVVEAAWAYRHRPGVGGVLRKRQEVVSADVREIAWKAQHRLHTRYRKLTARGKNKGKVVTAVGRELLGFIWAIGVKVEAMHKEPLRQAA

SEQ ID NO: 400548 - protein, 350 aa, unidentified
MIVVGVDAHSQTHTAAAVNDKTGEQLDVREVRARQAGHEQLLAWAREFGGERVWAIEDCRHLSSGLERLLLEAGERVLRVPPKLMAESRKSVRSFGKSDAIDALAVARAALREGDLPEARPAGPERELRLLSDHREDLLQEGTRYQRRLRWHLHEIDPDLAPPARGAAKTSNLDRLARQLARREQTAQVRICRELIRRIRELAKRVGQLDRELATLVRDQGSGLLEIPGCGTITAARILAEVGDPDRFATAARLASYAGVAPLDASSGRQQRHRLNRTGNRRLNRALYTIALTQIRIHPPAREYFARRLTEGKTRREALRALKRQLIRSIYRILTGTRAPADLVIHPPRI

SEQ ID NO: 400549 - protein, 386 aa, unidentified
MQRNDLSRSLVAFDQNSTLVAVVELSLKTWLIAGLVPGLTRQPLKKQGADADALLALLHRWQGEAIKAGRKIERIVVAFEAGRDGFWLARWLRARGIESYVIHPTSIPVSREHRRAKSDRLDTELLMRAVLGWLRGEVKHCSMVAIPTLAEEDARRPNREHEHLIGERTRILNRLKATMIRHGIRNFNVKLRKALERLAGLRTPEGVALPANTLEELRRDMARLRLIRDQIKEIEQQRLRRLRKAPQEGTHPMLLMLAKVMGIGVETADMLVHEVLTRQLRDERAVGRYAGLTGAPDESGSKRREKGLARAGNARVRRGMIQLAWRWLMFQKDSALAKWFQARTANARRNVRKTMIVALARKLLIALWRYATTGEVPAGAKLRPAI

SEQ ID NO: 400550 - protein, 315 aa, unidentified
MENTNWVGVDTHKDTLACYTGNKFKEFKTTPQGFEKALKWAGEANWAIEGAYCFGKPFANYLIKNNCKVYEINPYITKSWRCALSANGNKNDYGDAKVISIFSKNLKLQEISLKTIELKERITARELVIKERTKLINSIKMLCYTRGITLKLNNLTTKKAENYLKSFDDVIISNYGEIIEKLNKTIKVLDEDIYKLLPEKVLELTNICGISKLTAAVLYTETKSKLTTKAAFANYCAVAPIENSSGKSARHSTNHRGNRKLNSALFRISMCQSINDERGKSYYQKKLSEGKTPRQARKCLARQLINSIFKILKIA

SEQ ID NO: 400551 - protein, 326 aa, unidentified
MYASLDLHKVYSQAVVMDTDGVVEREERIENSAENMEKFSDGLPPSTQVVIESSSTWYWVYQILSKKHKVVLANPLKTKAIASAKLKTDKVDALKLANLLRGGYIAESYIPPRRTMELRELVRYRANLVRMRTNVKNRIHGYLLLMNNVPIDAKPFSKEFIQCLRKIDDLKVQGYLRLLESIDAEVHEASRVISREAADDDGAKLLMTIPGVSFYSALLIVSEVGDVNRFPDSDSLVAYAGLVPSTHSSGGTTFHGRITKTGSPYLRWILGQCTRINIRNEPDGRLALFYNRLARKKGSQKAIVAATAKMLRIVFWMLRDRQPYHG

SEQ ID NO: 400552 - protein, 343 aa, unidentified
MEITTIGLDLAKNVFHVVCCNQAGKVLKKKKLTRNKVLPYFAQLPPCLVGLEACGSAHYWGRELEKLGHTAKLLPPQKVKPYVHGQKNDYNDAAGIAEAVTRETIRPVSIKTIEQQDLQSLQRMRSACVKERTALSNQLRGLLGEYGIVINQGLSQVRARVPEILEDAENDLSPQMRRWILRGYRQLLKLDNEVVFYTRELEVISRQHEACQRLQALPGFGPIVAVAFVSHVGDGLAFKRGREASASIGLVPRQHSSGDKAKLFGITKKGNAVLRSLLIHGARSVVRHAEGKNDSLSLWINRIRAERGKNKAAVALANKLSRMGWAMIVNKTEYQPESVSFSN

SEQ ID NO: 400553 - protein, 344 aa, unidentified
MEISTIGLDLAKNVFQVHGVDVKGKAVVRKALRRSQMLPFFEKLPPCLVGIEACGTSHYWARELIKLGHEVRLMPPAYVKPYVKRGKTDAADAEAICEAVTRPTMRFVPVKSQEQQAALSMHRTRDLFVKQRTQLVNMMRGLLAEFGIDIPQGINRALEKARAVVDGEVPDVPFDAVRIIERLSQQALDIHVQVREIERDLIAWQRQSDVATRLMTIPGIGPIEATALAASVNDPSQFRSGRQFAAWLGLTPLQKSSGGKERLGRISKMGDRYLRKLLVVGMTAVVRNAKRKPEAVDPNVLALLARKPARVVTVALANKTARIVWAIMARGEVYRERHVPALAA

SEQ ID NO: 400554 - protein, 343 aa, unidentified
MEKISTIGLDIAKNVFQVHGLDEAGNIVVQRQLRRRQVLPFFERQSPCLVGMEACATSHYWARELVRLGHEVKLMPPRYVKPYVKRNKNDAADAEAICEAVTRPTMRFVAIKTPEQQSVLMLHRTRQLFVRQRVTLTNAIRAHLAEFGIVAGTGRNGLEALLELIGKEGDERIPAAAHECLMALVMQLQLVKRQILEADRRILACHKASPVSRRLEAIPGVGPLIATALVASIPDPQAFRSGRDLSAWIGLVPKQNSSGGKEKLGSISKAGNRYLRQLLVVGAMSLILRARQLGYTRHPWLARLMERRSAKVAAVALANKIARTAWAMMARGETYRTPVQQAA

SEQ ID NO: 400555 - protein, 409 aa, unidentified
MYFIGIDIAKKTHQTAIICSDGKLIGKPFKFPNTVDGFNLFLEKLTAVNTDLSQFEIGMEATGHYWLNLYTWLSDKGFRLHVINPLQSDALRNLYIRKTKTDSVDAKIIADVIRIGQYSETQLADENIIALRDLNRQRFYLVDMAADLKRKIIAMMDRIFPEYQDFFSDMFGKTSVQIMKEYTSPEQILQISTERLTQLLKKASRGRFTETKAKELKALAANSFAALLSSEMTTLLIRQMLEQLDLLEKQIADIEHIIAAQFTQFNTKLTTIPGIGTTLGATILSEIGDINRFDKPKQLIAYAGMDPSVKQSGNFVGTQSHMSKRGSPYLRRALWLAAVVAVNHDDLFKYLFQQKMNAGKTYAQAMGYICHKLLNTVFAILKTGEEYKPVYPSQIDVSKFADQSINSQL

SEQ ID NO: 400556 - protein, 403 aa, unidentified
MNSVGIDISKGRSTVAVMRPFGEVVISPFEVRHTDSELSELARQLKSLNGETRVVMEATGNYHAPVAKLLHDAGLYVSVVNAKLVHDYGNNELRRVKTDRKDAVKLANYGLDRWLTLPRYIPEEDTRLLLKNCYRQYRQYSKVQTVLKNNLISLLDTVFPNANRLFSSPIRGDGSEKWVDFVAEFWHCRCVSEKSERAFTSKYLRWCRKHGYNFREAKAHTIYAEASGHIGVMPKSETTKLLVEQAVAQLRATSTALAALKLEMQTLASQLPEYPVVMDLFGVGPTLGPQLIAEIGDVRRFYSKKALVAYAGLDAPPNDSGDVTGRHKSMSKVGASSLRRTLFLVMSVYLQNAPLDEPVYQFMDKKRAEGKPYRVYMMASANKFLRIYYATVKAYLESLEHTA

SEQ ID NO: 400557 - protein, 395 aa, unidentified
MRYIGIDIAAETHVLAIVSDEGTTLRKPSSFEESEAGYKRLWEWISSPEDALVAMEATGHYWQNLFAALTARGFAVTLLNPVRTHHFAQESIRRAKTDALDALNIARFAQQKRLAPTKLSDEATLELRELVRFRDRLVQEQGDQQRHLHRIVDLTFPEFTRHVRDLSTPLATTLLAAYPTARLLSGASVSAVAAMVYDGRHTVGTALATSLIEVAKVSVGAHHSPAYQLQARCACEDLTTLRARIKALESDIGNTLDRHEVGKLLTTIPGIGRTTSARLIAELGELDRFHSADAVAAFVGVVPRVNHSGKRTPSRGALASMGHASLRAKLWMPVLVAVRLNPWLKAFYGRLVAAGKPTKAALIASMHKLLLAVYSVAKNRRPFVPHLPTPSGATP

SEQ ID NO: 400558 - protein, 355 aa, unidentified
MLIIGCDYHPGFQQIAFVDSDTGEFQEQRLPHREEAEKFYRNLAGQGMKVRVGMEASGHARWFERLLAELQFELWIGDAAEIQSKRVRKQKTDRQDAQLILRLMLKDDFPRIWVPSWENRDLRQLLWHRHRMVQMRTRIMNQLQALALNEGLRCRKRLWREHGRQQLESFRLAPWASRRRRDLLELLDRLNPTIAELSQAIEQEAEKYPEAQRLMTHPGVGPLTALAFVLIIGKAERFQCGKQIASYLGLVPLEKSSGNRRRLGHITKQGSSMVRFLLVEAAQVTVRSLPEWRKKYAHLMMRRGRKIAKVAMARRLAVTLYWMWRKGWNYEPSKSSVRTRASSEQAMVCSKTPSN

SEQ ID NO: 400559 - protein, 433 aa, unidentified
MSLLNHERRIVHMKVVYPVCCGIDVHKRFLVATIVSVTKMQTLSYKRERFSTFNKNLQRLKHWLIENGCYDVCMESTGKYWVPVLNVLEPEMHVVIANPKWVRAVQGHKDDAKDSKWIAELFCFGLVKGSFIPSKDIRILREFTRYRAKLTNMRSSEKNRFQNGFTVCNIALDAVVSDMFGTSAQRITKYLLTDKEPTAQHCSSLLHRSLKKKAVAVVESIEGFQLTEEQKFRMLQIRQHMEYLNAAIQVLDEKLDQMAAPYAAAIRLFCTIPGMGRESALTILSEIGTDMTQFGSSKRLCSWAGLTPGNNQSAGKKKSVRITRAGVYIKPMLVQVAHAGVKCTSQPYYNIKYENIARRRGKKRAIIAIARMILTAIYHMFKTGEVFCPTDLRQIDMPEELKEKRRSRKIQNAIHLLKQQGILSETFVAPTCA

SEQ ID NO: 400560 - protein, 427 aa, unidentified
MKSEKDTRGFRQAQPARIKRYIGFDIHKEYALVGGQNAQQEWVMAPRRIGMEKLREWAAGNLRKGDAAVIETTTNVWDVYDIVEPLVSYVVVAHAGGVRQIAEARVKTDKKDIERLIRLLIADIVPEVWVPPVEVRELRGMISYRNRLVKTSTMIRNRLQSLIHRHNLILPKGMLRDKAWWEAQQVSALEKIQIRQELAMLDELEKHKGEVDAELGRQSLGEIWGKQAMRLLQLSGFGVVISMTVLSAIGDVTRFESAKKLVGYSGLGAGVHDSGKEHIEKRITKSGRKELRWALVEAAWRAIRISPYWKEQYEKYLRRMRKPNQAIVVIARKLLVVVWHVLTKQETDEHVSEEDLAYKMLVLAWDLDEEVRMGLTYKQFAKYALMKLGVETDITRFVRKEVPRRIAPRAEVLARMHGGTGIELLTN

SEQ ID NO: 400561 - protein, 415 aa, unidentified
MTNRPYIIGVDVASQKADVHVHGPEDEELGHFVMKATNSHMRQTLSRLQSLVDKRNTVVVLEATAIYHRIYYYAFVNCGFEVVVVNPYQSHAFQSGLSIPKTRTDKVSAHTLAVLYRTVRNLPPTKGDTYLELRKLVRAYYRLMDEQSDYRRRILTVLAELFPLLAQRFKNLFSLTGLAILRHFPTPQAILEANPKDLFYFIRKVSRQRPEWAIQKLDQLLSIARESPSVPVAVGANIQLLHLYLDCLEHSKRQADRLRAQLEAMAQRCRPAKLLLTIPGIGTILATTIVAEIENIENFKKPAHLAAFAGIDPTVKESGNFKGTRNHMSKRGSKLLRRALYLATVAAIRRDKRTGLSKNPYLREYYDKKVRQGKPKKVALGACMQKTLCYVFTTLKHDRPFRLIDPQQAAWRKVA

SEQ ID NO: 400562 - protein, 315 aa, unidentified
MIVLGADTHKRSHTVAAVAAATGELLAEQTVQVGRRGFGALLRWARSLDGDRVWALEDCRHVSGSLERFLIERGERVLRIPTHLSAKARKSARVRGKSDPIDALNVARAALQEGLESFPTALLDGPELDLRLLVDHRERLIRHRVELNSTLLWHLHDLWPELMLPGGALFSKKWSTRVGRRLARAEQTMRVRIARDELRRLRELTLAVRQLEREITALVTQIAPQLLDQPGFGPLIAAKLVGEIAGAQRFATAAKLARAAGVAPIPASSGTTQRQRLDQGGNRGEGEQASRVSWPSPLQIAQGAGWCGGHTLAAE

SEQ ID NO: 400563 - protein, 334 aa, unidentified
MENIALIGIDLGKNSFHIHCQDRRGKAVYRKKFTRPKLIEFLATCPATTIAMEACGGSHFMARKLEELGHSPKLISPQFVRPFVKSNKNDFVDAEAICEAASRPSMRFVQPRTESQQAMRALHRVRESLVQDKVKTTNQMHAFLLEFGISVPRGAAVISRLSTILEDNSLPLYLSQLLLNLQQQYHYLVEQIKDLESQLKRKLDEDEVGQRLLSIPCVGTLTASTISTEIGDGKQYASSRDFAAATGLVPRQYSTGGRTTLLGISKRGNKKIRTLLVQCARVFIQKLDHQSGKLADWVRDLLCRKSNFVVTCALANKLARIAWALTARQQTYEA

SEQ ID NO: 400564 - protein, 401 aa, unidentified
MVSDFMKGRYNLMKIFVGIDIAKLNHFAAAISSDGEILIEPFKFTNDADGFQLLVSKLESFDKNSIIIGLESTAHYGDNLVRYLVAEFYQVCVLNPIKTCQMRKNNVRKTKTDKVDTFVIAKTLMMQDDLRFITFFDLDMMDLKALGRFRQKTIKQRTRLKIQLTTYVDQVFPEIQYFFKSGLHQHAVYALLKEAPSPKEIASMHMTHLANLLKVNSHGHFTKEQAKELRVLAQKSVGANDSAISIQITQTIQQIELLDSQLEKIEAEMTDIMRFNDSVIMTIPGIGYINGGMILGEIGDIHRFSNPNKLLAFAGLDPSVYQSGNFQAKTTRMSKRGSRVLRYALVNAAWNVVRNNATFEAYYNAKRAEGRSHYNALGHCAGKLVRVIWKMLTDEVDFNLE

SEQ ID NO: 400565 - protein, 313 aa, unidentified
MTKTTKTNPIDYIAIDVSKATLQIQDDQLAFAVDNDSEGHSKLLKHIKTRKNPLVVFEATGGYERGLCEFLREETIPLTMVNPARVRDFARSEGVRAKTDPIDTKMILAFAKSKALCAMETPSETCTKLAALLDRRGHLVEQLAREKNRLQNSEKLILRSIQRMIKILEKEISALDKAIDELVSSEPGLQSRSKLIQSIQGVGKITAWTLLAYLTEIEHLNRNRLVALAGIAPFNRDSGKFSGKRSIIGGRAKVRRCLYMATQSAANCNPIISAYVKRLRERGKPYKCAIVAAMRKLLLHIQSLIKNPKLSTC

SEQ ID NO: 400566 - protein, 388 aa, unidentified
MIAVGIDIAKRTHEACFMGQDGRQIGKARRFHNTRLGVRALLDDLQQLREPATIGLEATGHYWLALHDALERAGHTVQVLNPLQTHAYRKTTIRKVKSDRKDAWLIADVVRIGRGRAAYVPDETILQLRELTRFRWGLVDQIGDAKRRALSVLDRVFPEYESLFSDVFIKSSRAVLQRATTAAEFVDADLAELASVLKQTSRNRLGMERAEAVQAAARDSLGLAKLGGVASFELRALLDHIVFLEQQVAACEQQIEPLLATLEQHVTEIPGIGHVLAASLMAEIGDVSRFARFESLVAYTGIDPTVFSSGEFTATETHMSKRGSPYLRRALWLAAISASQSNPDLADYLHRRLEQGKPWGTAMGAVARKLLSRIYVVLKQNRPYEVRG

SEQ ID NO: 400567 - protein, 492 aa, unidentified
MASSSPASRRNAKNALKLKKQTRERAATATSPVEMEKLEPVHRRAAGIDIGSAENYVAVPPETVAPGESSVRVFGVFSEQQDALVEWLRSCQISTVAMEATGVYWLTLYDKLEVVGIEVYLVDPHGVKAVPGRKSDWLDCQWLQKLHTYGLLQRAFRPDAPIRRLRTLTRQRTGLVCAAASQQQQMEKALVCLNLQLGLVISDLVGETGISIIRAILLGERDPKVLVERYRSVRCTKASIGEMKQALQGTYNDEDLFVLQQCVDTWDFVQEQVRECDGKIELALAAIPTARAVERKAPPLPVPAAAEQPKKKANGTQGKNAPVKDFTPILRRICGVDLTQVMGLNLLSVLMLLGEIGADMSRWRSAQAFCSWLGLCPGAKISGGKVLSRRTRKVTNRAATILRLAAVAVGRTDTWIGLFYRRMKARKGGPKAVTATARKLACIVYHMLKFQEEFVALDMEKYVAHAQAHRLRYLKREAEKLGYELVEAEQVA

SEQ ID NO: 400568 - protein, 358 aa, unidentified
MEHFAGLDVAMEETAVCVVDLAGTIVHESTVATDPEAIATALAPWGQSLGRVGHEAGSLSPWLQPALDGLGVPAVCLETRNVRAAMAAQRNKTDQTDAQALAQIVPTGWYREVHIKSETSYRLRLLLTLRRNLKRKFLDIENAIRHSLKSFGIRLAGTTRGHFADVIRGLIAGDPLLQAMIEPMLEVRAAMWLQYTRLHRLVVKVVRADEVCRRFMAIPGVGPVTALQVKTALDDPGRFSRSKTVGAYFGLTSRRWQTGTSVDIQGRISKMGDDDVRRALVEAANSLLLRYQGWSALKVWGLKLSRTRGRKRALVAVARKLAIIMFAMWRDGTEYRFGTKKSAPDEVKLSGEVALVVA

SEQ ID NO: 400569 - protein, 342 aa, unidentified
MKFYCGIDLSARDCHVCVIDEQLKIVVQQKLRNELPKIVQLLEPYKANLKIVVESTFNWYWLIDGLQAEGFEVVLAHTLGLYLITGAKVKTDRRDAYALAKLLLVGAVPAAYIYPVETRPVRDLLRRRAHLVQVRAGEYGSLRRLLLRQGILSSQQQEIKTATEAELEQWFAHPLVRLHASQELQRIELYSQQIAELEKTILLLAQTEQSYELLRQLPGVGQTIALTILYEAGELTRFANVKVFSSYCRVVPGIAQSGNVSRRGRASKQGNHYLKAAFSQAAVHAVRCYPKVRRYYERQLKRHQGRGRQMICYNIIAHKLAQAAFHVLKEQTEYREELLFGR

SEQ ID NO: 400570 - protein, 458 aa, unidentified
MSRKRSRKRKADELEVPKLEALEQINLNAAGLDIGDDDIYVAVPEGRDEVSVRVFHTFTRDLYALADWLEACGVETVAMESTGVYWIPTYEILEERGFEVYLVNARDVKNVPERKTDILDCQWIQQLHTYGLLRPSFRPPEEICALRALVRHRDSLIRSCGAEIQRMQKALQQMNVKLTNVISDITGVTGMNIIRDIVGGERDPHDLAKHRDFRCKKSEEEIAKSLEGNYKPEHIFALKQALEAYDFYRGQIKACDVEIEKQYKTFEPKVDVTEHPLEPGKQTNPRGNEPDFDLRLHLYQMGGVDLTRIPGINVLTVQKVLSETGVDMSAWPTVKHFASWLSLCPHNDKTGGKVIRSKTKKTQNRAAAALRMSVQSLFHSKSALGGYYRSMRAKLGKPEAVTATAHKLARIIYAMLKNQTEYRDPAEGYYEGQAGQRAINNLKRKAKKMGFELVPNQA

SEQ ID NO: 400571 - protein, 362 aa, unidentified
MERVYERCCGIDVHKKMIVACLSLVVNGQRRKETRTFRTTTQELLLLLDWLSSAGGTHVAMESTATYWKPIYNLLEGHFELLVVNAQHIKAVPGRKTDVHDAEWIADLLQHGLLKASFIPPSSQRDLRELTRYRTNLVEERVRAANRLQQTLEGTNLKLGDVATDILGKSGRAILEALLAGQTDPAVLADLARGRMKAKRAELEQALVGTLTAHHRFLLREQLDHIDTLNEAISRVSNEIEERMHALDHVEQNACPSQQTSHEQEPLTWNGAIALLDTIPGINQRAAEGILAEIGTEMTRFTNAHHLASWAGMCPGSNESAGKRLSSRIRKGSPWLRTLLVEAAHAAAHESRTRICQHNTAG

SEQ ID NO: 400572 - protein, 343 aa, unidentified
MKITRVGVDLAKKVFQVHGVDRAGRRVWQRQLKRSSWLSVLTETVEPGCEIGMEACGGAHHWARELKSRGFKVKLISPQFVKPYLKSLKNDVNDAEAICEAMARHHMRFVAVKTVEQQDIQAMHRVREGLMNHRKAKANQIRGLVAEYGLVAPRQMGPLRKAIPCWLEDAENGLRSAFRVLLHGLWEDLQNLDVRLNVLDKEIFALSESHADAKRLKQLRGIGPLIATAMVAQFGDGRHFKRGRQASASVGITPRHAGTGGKNHLFGITKKGNPYLRSILIHGARSVVSKAKHKDDRLSRWVTELARRKHPNVAAVALANKTVRIAWAMLRNGTDYDPELAMA

SEQ ID NO: 400573 - protein, 371 aa, unidentified
MQETSRVFVGLDTSKLKISVALAEEGRQGEVRFLGDIDNTPDAMKRLVRKLSGKYLQLLFCYEAGPTGYGLHRQITALGHDCSVIAPSLIPKRSGEHVKTNRRDALSLARLHRAGELTTIWVPDLGHEAIRDLVRAREAAMEDLREKRQQLQSFLLRHGRLYPGLRSWTLVHARWLSSLIFEHPAQYLVLREYRQAIEDAEARLKRLTQQVADVVPTWSMAPVVEAYQAMRGVAFLTAVTFVAEIGDVRRFETPRQLMAYLGLVPSERSTGEQVRRGSITKAGNPRARRVLIEGAWTYRYPARLSRPLQVRQESLPEVVRAIAWKAQVRLCARYRRLMAAGKRQTLITTAIAREMAAFLWAIGHEVQPCPA

SEQ ID NO: 400574 - protein, 349 aa, unidentified
MSQHCPSTVARMGIDIGKSVFLVVGLDTKGKPVCRSRLTRERLLEFLARASPTIVGMEACPGSNWLARKAAALGHDVRIVPAQFVKPFVKSNKTDIVDAEAIAEAISRPTMRFAQPKTEAQLDLQALHRVRQRLVSCKTAIINQARAFLLEYGLTIGAGPAFFVHDMPDILAADDNGLTTAMRDLLQEQWQEYRSVEIRLEQLRRRIEAISGADDVATRLTSVPGIAHLTATAITAFAGTGRQFKSGRHFASWLGLVPGEYSTGGKQHLLGISKRGNPYLRKLLVHGARTCVLHLDRTKDRLGQWISVMESNGVHRNKIVVALANKLARIAWTILTRQGTFYLRQPRIQ

SEQ ID NO: 400575 - protein, 363 aa, unidentified
MKIMVGIDLHSNNALCGLMDESGRRLAHQKLPCELDAILQFLRPYQKRIATLAVESTYNWYWLVDGLQDEGYHVVLANPAAMQPYSGMKHTDDVSDAFFLTELLRLNLLPTGHLCDRQTRPVRDLLRRRMLLVHHRTTLILSFKSLNERTLGQRLPLARVKAMSVADAQARFSAPADQLLSGQQITLMGHLTDAITQIERHLLGVAGKWASYQRLQALPGIARILGLTIALETGDARRFADAGHFASYCRCVQSVRQSNGKKKGENNRKCGNRYLAWAFVEAAHFACRHDQQCRRFYDRKKQQTNPVIATKALACKLAKAAWHVMAEDVPYDATRVFGPGKQTDFGETRREPAKGSGRVSQQN

SEQ ID NO: 400576 - protein, 337 aa, unidentified
MKFSGIDLHSNNSVVLISDEADRIVYQKRLPNDLAQILAALEPHRDELVGVVIESTYNWYWLVDGLMDAGYRVHLANPSGIRKYEGLKYSGDVADAAYLAHLLRLGLLAEGYIYPREERGARDLARKRLQLVRYRTAQILSIESILMRQTGARMKSESIKGLTAAQVEEFGFAPDVALAMEANRAVSQTLGQQIEALERRLRERVSLRGEFKLLKTAPGIGETLATTIMLETGTIARFARVGNFSSYCRCVDSLRESNGKKKGEGNTKNGNKYLAWAFVEAANFAVRYCPQAKSFYEHKKRKTNRIVAIKALAHKLARACYHMLREQKPFDVNRCFA

SEQ ID NO: 400577 - protein, 356 aa, unidentified
MSYDAKYIGMDVHKEAIVIAVLNERGKLVMESVIETKASSILQFLHGLRGELHVTWEEGTWAAWLYDLLQPQVQHMVVCNPRRNALLKEGSKSDKVDARKLADLLRTGMLRPVYHGENGVRTLRELGRSYQTIGKDLTRVMNRLKALYRGWGIPCAGTQVYAVRTREEWLDKLPQAGVQRRAELLYQQLDGLQALRREVRPELLAESRKHKAAKLLRQIPCIGPIRAARLIALMQTPHRFRSKRQLWTYSGLGIETHDSAQYRFVRGQLQLSKKPQQLRGLNRNHNHEMKEIFKSAATRASCGRGPFYDFYAALLAKGMKPEMARLTLARKIAAITLTLWKKEERFDAEQLKTQAA

SEQ ID NO: 400578 - protein, 365 aa, unidentified
MKKSSRTTPQQTEWKRKPSITVGLDLGDRWSHYCLLNEDGDLVEEGRIATSEAGIRKQFEGEPRQRVAMECGTHSPWISRLLQHLGHQVIVANARKLRAISQNESKNDKADAEMLARLALSDPRLLSPLQHRSVERQRDLNLIRSRDVLVRARTMLVNAVRGLVKSAGGRLPACATDYFIEHARPALPAELKKAAAPLLAQIASLTKHILHLDVEIDKLAARYPEIALLRTAPGVGPLVAAAYVLTLDRADAVSSSRAAGAFLGLRPRQSQSGDSDPEHRITKTGNIYLRRLLVQSAHYILGRFGPDSALRRWGLRLAGTGGKRAKKRALVAVARKLAVILNRMWRSGERYQPFPEQRQAVTAAA

SEQ ID NO: 400579 - protein, 322 aa, unidentified
MHPFHLGIDVAKAKLDCALRLTNGTFRHKVVENTPAGFRALDSWLAKEGAQAVHVCMEATGLYWEGIAEHLAGQSTLTVSVVNPLQIKAFGESQLIRTKTDKVDAKLIAQFCAERAPDAWQAPSPAEQALRALVRRLEALQTMHTQESNRLELARHTVAEGIAKHLQWLDEEITRLKKAIRDHIDNDPTLREKYRLLESVPGLGERTAATLLAFLAEPARFDNARQAVAFAGLDPRQHESGSSVRGKPRLSKIGHTLLRKALYMPAMVTLYRTEWGKRVQERLTASGKPPKLIIGAMMRKLIHVAFGVLKSGMPFQPALHGA

SEQ ID NO: 400580 - protein, 449 aa, unidentified
MANYAGVDWASEKHDVLVADAAGERLLAATFAHDEAGLRALCRALVGLGVGLVAIERPDGLMVERLLDAGLRVMAIHPNQVHAARPRFRPSGGKSDRFDAFVLCELARTDSHRFRVLVGDSDQTKALRALTRAREDLVQTRVGLCSQLRAELERFWPGATVVFAELDSQISLAFLERYPSPVDAQRLGEKRLAAFLAGQRYSGGRKPAELLAKLRAAPKGRAAADELEARRTIVLALIAALRPLIDKIAELTAQIADRVRSHPDGQIFLSLFKDPSSVITAATLLAEIGDCRERYPTPDALAADAGMSPVAVESGKRKVATFRWGCDKRLRTATSTLADSTRHWHPWAQDHYARARARGHDHPRSIRTVGRAWCRVMWRCWQDRVPYDPARHHGLQQHITVTINSSSEPRPDIAATHQMAGAAVTETAAQRAEREALDGKPTSAKARGG

SEQ ID NO: 400581 - protein, 330 aa, unidentified
MALKIVYKICCGIDVHKTFVVAFVASTSDKGITSYESHRFSTYTSGLKTLLQWLIDRNCKDVCMESTSKYWIPVYNILEKGCSIVLAHPKYVKAIRGKKTDKKDAKWIADLFKHDLVAGSFMPPADIRQLRDLMRYRFKLTCFMSSEKNRLQNCLTVSNIQLGNVVSDTFGKSAQAILDKLLENPADTSFDLEPLVYKSLKKKLPELRDAIDGYITPEQAGKLKVIKAHYENLESRKAELEELILALAAPYQQELAILQTAPGIRSTFTAIGIISEIGTNMEAFPSAKHLCSWAGLTPTNNESAGKKKSVRVSKAGCYIKPLLVLSLIHI

SEQ ID NO: 400582 - protein, 370 aa, unidentified
MLNTTTFVGLDVHARSIKAVALDAMTGEVRSATFGYDAAEVAGWVSSVDPSAKCVYESGVTGFDLQKRLASMGIDCVVGAVSKMIKPPADRKRKNDRNDAEFLARMLSVGNVVEVWVPDDGCEAARDLSRALDDAREDLKRCKQRLSKFLLRHGYVFSETTPTGRRKGNWTAAHWAWIKSISFPEKADDDVLAYYVDAVRQAMEDKARLERLVEAEASKPRWKRRVDSVRCLKGIDVTSAADLVFEAGEFSRFKSARSFAAWLGLTPSEHSSGESVRQGGITKAGNKHLRRVLVESAWHYLGCSPHSKDLAKGQVPDPGARRHAAKGVRRLVERRRAMLERGVHKNKANVATARELACWCWAVGRMVENG

SEQ ID NO: 400583 - protein, 353 aa, unidentified
MNNRKYIGMDVHQASISIAVSDAAGKVLMECIIETKAATVLEFIQGLRGSLWVTFEEGTSAAWLYDLLKPHVTKVVVCDPRKNALLKAGNKNDRVDARKLGELLRAELLTPVYHGESGVRTLRELSRGYLAVNKDLTRVMNRLKAIYRSWAIPCAGQQVYSPRHRAAWLEKLREAGVRRRAEQTYQQLDFLMEIRKETRKELLAESRKHPARKLLEQIPRLGPIRVALLIALIQTPHRFRTKRQLWNYCGLGLRTRSSGEYRYTGGQLQHARKPPALRGLNVNHNHDLKHLFKSAATQAGNDPLGAFYQNLLAGGMEPPMARLTLARKIAAIALKIWKKGERFDPAKLKQQAA

SEQ ID NO: 400584 - protein, 348 aa, unidentified
MAVTMLETRPVTGGVDTHLDIHVAAALDANGGLLGVESFATTPEGFTTLYRWLASFGPVARVGVEGTGAYGAGLARHLRRAGIEVIEVDRPNRLLRRVAGKSDTVDAVEAARAVLSGRARGVAKTADGNVEAMRALLIAKRSGREARITCLNQLRHLGFCAPDELRERFRGVPRTQLADVAAALRPRLDSDPVTYATKLAMRALARRVLSAVEDTDHIDTVLAHLVTATAPGLLELYGVGIDTAAILLVAAGDNADRLHSEAAWAHLCGVAPLPATSGKVTQRHRLNRGGNRQANHALWRIVFTRMSSESRTRAYVTRRLDEGLSKPEIMRVLKRYVARETYRHLRPT

SEQ ID NO: 400585 - protein, 356 aa, unidentified
MVMVLGVDVHKDTHTVVAVDEVGRADGERTVRATDTGHRQLLDWARRQVPQDRMWAVEDCRHVSTRLERALLAAGETVVRVPPKLMAGARSSARTRGKSDPIDALAIARAALREPDLPLARHDDTSRTLKLLVDHRDDLVIERTKMANRLRWHLHELNPELDIPARGLNRLNLLDRLITWLAEQSRPDRLGQVLARLAAELLTDIRAATVRINALEREINTLARQAAPRLMTLPGAGGLTTAKIVGETANITRFRSEACFAMHAGVAPIPASSGRTQRHRLARGGNRQLNAALHRIAITQVRITASPGQLYYQRRRAQGDTAMEALRALKRRLARVVFNLLQADTTIAINDLSTAA

SEQ ID NO: 400586 - protein, 352 aa, unidentified
MRFYTNQHQYYCGIDLHTKNMYICILDQAGNILVHKNIPTSPHALLRILEPFQPDVAVTVECIFTWYWIADLCQEEDIPFILGHALYMKAIHGSKTKNDKIDSHKIAVLLRGGMIPMAYVYPAEMRSTRDLLRRRMHFMYKRSELLSHIQNTRSQYNLPEFNGCISRKRNRDGISDHFKDLSVRKSIELNLTLLKQYDSLLNDVELYLVRHTKEHRPNELYLLRTIPGVGKILSLVMLYEIQDISRFERVQNFSSYARLIKPQKESAGKVKGSGNRKMGNAYLKWAFSEATLLLIREKQEIKDYHLTLKNKHGKARALAIISHKLGRAVYYMLKNKKAFDIKHFLKIKDRAA

SEQ ID NO: 400587 - protein, 408 aa, unidentified
MKTLHSRCAGLDVHKVEVVACLRLVSKRKVEREVRRFPTTTQGLLQLSEWLERGGCTHVAMEATGVYWKPVWHILEGRFALVLANAAHVKNVPGRKSDVNDATWLADLLAHGLIRASFVPPPAIQELRDLTRTRKQLTREIVQHVQRILAVLEEANVKLSSVIADVLGPSGRRILKAMILGETDADKLAALGSERLGCPRAALVEALTGRVREHHRFLLAQHLRTMEHLEESVAAFDARIQAALAPFHDTIERLTEIPGIGVTAVQIIIAEIGADMSRFPTAGHLLSWAGLVPRLDESAGKRRSTRIKKGAPWLKPVLVQCAWAAARKKSSYFQAQFLRLKARHGVKKAAVAVAASILTTVYHMLGDGTCYHDLGPQHFARRDPDKAAARLANRIRNLGYHVEIRPAA

SEQ ID NO: 400588 - protein, 326 aa, unidentified
MIFFGIDISKLTFDVNVVSESKPRHKKFKNTPVGFEEFLKFIKSYISQSYFCMEATGVYGMCLAQFLVKNKLKTIVANPYKIKNYSRMKMNRNKTDKADSLCIANYCKSLYLDKTIEDNIYKPKSKYYQRLQSLVTRLEQVKLLQNQEANHLESTLDIITNKFIKTTINQLNKQIKSIEKAIKNCVSKDENLSNEVKLLISINGISYMTAWAILAYLGDVSLFENSGQVTSYAGLNPRIEDSGTSVNKTKLSKMGNKRLRKALYMPAASAMQHNPLLKDLYNRLLAKGKPKKVALCAVMRKLLVLSYGVIKSGVEFDPGYKKQKAN

SEQ ID NO: 400589 - protein, 343 aa, unidentified
MQTITTIGLDIAKSVFQVHGVDAAGQVVIRRQLKRRYVLAFFQKLPPCLIGIEACASSHYWSRELQALGHTVRLMPPAYVKPYVKRQKNDATDAEAICEAVARANMRFVPTKTPAQQSCLMLHRTRHLFIRQQTAVINSIRAHLAEFGIVAPVGRKGVTELLHIVADPSDKRVPEVARACLAALGNQLLSLKEQIVEFDRMIMVWHRSNETSKRLHYIPGVGPMLATALVASVADPRTFRSGRNFSAWIGLVPKQHSSGGKDRLGSISKQGDRYLRSLFVAGALAVIRYAKIHGTKHRPWLTALLTRRPTKVAAIALANKLARMAWAMMARGERYRQPVALAA

SEQ ID NO: 400590 - protein, 374 aa, unidentified
MGQNSEAFIGIDTSKLRNAVAVAEGGRAGEVRYQGEIDTTDAATRKLVAKLAAKYSKLTFCYEAGPTGYGLYRLIESLGHACVVVAPSLVPKKAGDRIKTNRRDAEGLARLLRAGELTSVWVPDERHEAMRDLSRAREAAVDDLKSKRQQISSLLLRLGLHYPGKKTWGKAHRNWLRSQKIAQREQRIVFEELLGAEGQAQARIDRLDVAIRAAVPEWSLAAIVTALQAMRGIDVVAAVTVLAEIGDLSRFASPRELMGYLGLVPSERSTGDSVKRGGITKAGNRRARRILIDAAWSYRHPPRIGREKQAKVDAAPKAVAEIAWKAQTRLSARFRTLAKKGKRPTIVVTAIAREMCGFIWAIHRAMTAAATATR

SEQ ID NO: 400591 - protein, 321 aa, unidentified
MNKNIEFFGIDISKDVFDVFSLEMGHNQFSNNEKGFKQFIKKLSKGSLVVMEATGYYHYCLAQYLYEKGYAVSVVNPLSGKCFIQMKLSKVKTDKSDAKSICEYARNNEVPLYTAKDKSQAECLQLLRLMDTYAKHRTAIKNKLDGEKVLGMPSKAVYRSLSRTVKHLNKELLLLEGRLIALVKEEQQEQLRLLKTIPGIGEKAAILLVVFTDGFSKFETSKQLCCYAGITPTIRQSGSSVRGRSRISKIGNKKLRNQLFLSSFTACQYNKACRELFERIVAQGKSKKLALLAVCNKLLKQAFAIVKSGLQYNENFVSKRA

SEQ ID NO: 400592 - protein, 388 aa, unidentified
MGKFSKYVGLDTHKETIAVSIADAGGGKARYFGEVANRPAAIKKLLDELSREGEVVSFCYEAGPCGYGLYRQITESGHDCTVVAPSLIPRRPGDRVKTDRRDSEALARLHRAGELTAVWVPDEEQEAMRDLTRAREDMKQLERRSKQRLNAFLLRHGRHYTSGKSRWTQAHWRWLEKVTFSQPVQQIVMQEYIDSVQQLRCRVTDLEEEMARAVQAWTLAPVVEGLMALRGCRLITAMTVVAELGDISRFDTPRQLMAFLGLVPSESSSGPKRRRGGITKTGNGHVRRLLIESAWCYRFPARKTALLQRRAEKTSAAVQAIAWKAQKRLCTRFRALNDRGLMRVKISTAIARELSGFMWAIACEVMAQQPSLAGVAAVNASTAVNHRH

SEQ ID NO: 400593 - protein, 370 aa, unidentified
MHPQFLVWCLTFGAQFKNDGHYFCRAGGNRPDGLNEPVTDIAKHVIQIHFINEHTGEVVDKQLRRQDFLTFFGNREPCLIGMEACGGSQHWARELTKLGHKVRLLQARFVKAFVMGNKNDVMDARAIWMAVQQPGKEIAVKTEEQQSVLVLHRPRMHLVKFRTAQINALHGTLLEFGETIHKGRAAMAREFPEALERMKERLPPYLITVLENQYNRLNELDSLIEDIEKQLTSVARQNETCKRLLDIPGVGPLIATAAVATMGEASAFKSGREFAAYVGLVPKQTGSGGKVRLLGISKRGDTYLRTLFIHGARAVALVAKEPGPWITELKKRRPASVAIVAMANKLARTVWAITAHDRKYDRNHVSIRPY

SEQ ID NO: 400594 - protein, 360 aa, unidentified
MKAAKKVKAVTKTAVLEAVGAVGIDLGDRWSHWCVLSTAGEVMDRGRVKTSAEALSDLSAGWTKIPVAIENGTHSGWVSRTLKKAGCSVSVANPSRWRGTAHSSKNDANDAEALARVVRLDPKLLYPITHRTQQQQEDLSVIRVRAQLVKARTLLVNTARGAVKSVGARLPATDADAFHNTSWKFVPEALREALRPLYQSLATITEQVRALDRQIEKLSKERYQATALLRSVPGVGPLTALTYVLTVADTARFASSREVGAFLGLRPRQRQSGSRNPELGIAKNGDHYLRSLLVECAHYVLSRAPDSALKRWGLGLAQSGPPAKRRALVAIARKLAVLLHCLWSNGELYCPFPADSSVAA

SEQ ID NO: 400595 - protein, 416 aa, unidentified
MSTMEWSGRLLFVGDDWAEEHHDVEVQNESGKVLGRAKLPEGVAGIAGLHAMIGEHLGEDDEAIVVVGIETDRGPWVQALIAAGYRIYAINPLQVARYRERHRVSGAKSDTGDAHVLADMVRTDRHQLRPVAGDSVEVEAVKVLTRAHKTLIWERTRHLLRLRHALREFFPAALVAFDDLDAKDALELLGAAPDPASAAALPIDHITATLTRARRHHAAAKAEAIATALRAKHLGQPPVVTSAYAATVRAQVAILTVLNAQITTMEEQVEAHFGQHPDAEIYLSQPGLGVVLGARVLAEFGDDKDRYADARARKNYAGTSPITRQSGKRTLVLARYIHNDRLVDALGLQAFAALRASPGARAYYDQLRARGTGHRAALRQLGNRLVGILHGCLKTSTNYDENQAWTPTHKDQQLAA

SEQ ID NO: 400596 - protein, 332 aa, unidentified
MEKKQIIVGIDVSKNTLDVFIRVVDRSFVVSNGPKGFPTLLETIRKEAQCNLHQLFICFENTGKYSKMLSVFLHSMKIAFLMETPLAIKKSLGITRGKNDRIDARRIADYAFEKQHVLKPTVLPGAEIESIKMLLTLREKLVRQRTAHKNGITDLHDCYRDGETKFVKELQEELIRRLDTAIQDVENEIERIIKEDNSLLTNYGLVRSVKGIAKINAFYFIAYTANFTLFATARAYACYCGIAPFETSSGTVKGRAKVNHYANKQLKSLLNMAASSVVQTKGEYRDYYNKRVNELGKSKMSTLNIVRNKLVYRVFAVVNRQTPYVDLYKFAA

SEQ ID NO: 400597 - protein, 333 aa, unidentified
MYRLWSGVDIAAKTFTTTWTTDRTTYAPPLTLPYTPEGIMTFQQQLSTLGIAPADTLIVLEATGSYWIRLAVALHAAGFVISVVNPKQVHHWAQSLPRRGKTDALDARMLTQYAWERQPRRCSPPPAIYHELRQRLTAREALAGLPQQARNQAYALRQWPVVVAAALQAIEQVIAELDTQIADLDTAIAQVLRDGAWAASAELMQSIIGIGPLTTAWVLVLTVNFRLCPTAAAAANYAGLIRLPCESGTSVRGRAHLGHDGNARLRTRLYRATVNAARFNPIIKRFYERLRAAGKPPKVARCAAAHKLLLLIDAVVQKQRPFDPAYGQAAVGG

SEQ ID NO: 400598 - protein, 458 aa, unidentified
MTKRIRKQSKEEKRGNVKSVLSLINPNAAGIDVGASDHYVAVPADRDERAVRRFGAFTEDLHALAKWLLQCGVETVAMESTGVYWIPLYQILESYDLKVKLVNARHVKHVPGRKSDVQDCQWLQQLESFGLLSGSFRPEAEICILRTYMRQRQMLIRDASRHVQHMQKALTEMNIKLHQVISDITGVTGLAIIRAILAGERDRSKLTAMKDRRIKSDEARIAKSLEVDYRSEHLFALRQALDLYDYYQQKIAECDSQILEQMQTLSTRADNPRPPAQKGRRKQASRHNPFSFDTGVELYRILGVDLTRIDGINENTVQLILSELGLDLCQKWPTEVQFTSWLGLCPNNEVSGGKVLRRGTRKVVNRVANALRMCAESLLNSKSALGAYARRMRSKHDSKIAVTATAHKLARLIYRMLKYGQEYIDTGQEQYEAKYKQNILKSLSRKANQLGYQLVANP

SEQ ID NO: 400599 - protein, 405 aa, unidentified
MIFVGIDWAEHHHDVCLLDREGRVLATTRIPDGVGGLAALHAVLADHADDPASVVAGIETDRGLLVSALVAAGYQVVGVNPLAASRYRERHPTSGAKSDPGDARVLADLVRTDRHHHRPVAGDSPTVEAVKVLARAHQALVWTRQRQVNQLRNALREYYPGALGAFGTDLASPDAVAVLAAAPTPTQGRALGVADLTKLLRVAGRQRNLAVRASQVRQALAAPQLAAPPVVAAAYSQVTAALVGIIAELTQQVTALEDDLTRAFEAHPDAEILRRLPGLGVVGGARVLAEFGDDPTRYGHPKARKAYAGTAPVTRASGTRQVVLARVARNKRLADACYRWAFSALTRSPGARAYYDQQRARGATHHQALRALANRLVGILHGCLRHRTSYDEPKAWSHRTRPAAA

SEQ ID NO: 400600 - protein, 410 aa, unidentified
MEVLHAHCAGLDVHKDSVVACVRHMAEGKITAPVKTFKTTTQELMALSEWLSSQGVTHIVMEATGIYWKPVWHILSDGEFELVLANAAHVKNVPGRKTDVNDAMWLADLMAHGLIRASFVPDEPTQQMRDLLRTRKQMMRERSSHIQRIQKTLEDANIKLDSVVTDILGLSGRRIIEALIAGQTMPQALATLAHRRIHASADELEAALRGRVTKHHRFLLKLHLDQIDAFDAAIAAIDQEVNVNVEPFRAAIELLTTIPGISRLAAQVLVSEIGIDMSRFETAGHLISWAGLCPRNDESAGKRRSNRMKKGAPWLKTTLIQCAWAASRKKNSYLQAQYLRIRSRRGAKKAIGAVAASMLTAAYHMLQNGTFYEDLGSNHFDQRAKGKQVLRLVNRLQNLGYAVEITPRAA

SEQ ID NO: 400601 - protein, 342 aa, unidentified
MYYIGLDVHKKTISYCVKDASGQVQQEGKVGATRWELDDWMNTLPQPWTVAMEATIFTGWIYDHLLPHAQQVKVAHPLMLRAIAAAKKKNDRIDAGKIADCLRCDFLPECHMASTAIRDRRRTLRYRHLLVRQMVQMKNRISGLLMETGVSHNKRRLHKVGYFRELLASNEEVNESIRPLLRVSRDSIVRLQKTEYALVSSLQRDPLLAERVKRLRTVPGVGPITALTWALEMGEVSRFPSIRQAISYCGLCGDEKSSADKVTRTPLSKQRNKHIQRVLVEAAKLAPRQDHNLALVYEREKQKGNANRATLAVARKMVAYLLAVDRGRRDFIPFADSQSAAA

SEQ ID NO: 400602 - protein, 469 aa, unidentified
MAAEKKLWNRKERKELARQLQSANPGLEIVHPNAAGIDVGNQAHYVAVRPDRDPEPVRRFECFTADLYRLANWLKNCGVKTVAMQSTGVYWIPLYDILEERGFEVYLVNARHTKNLPGRKSDVQESQWLLKLHTYGLLNNSFQPSCEIRTLRTYWRQRAEHVAGAATCIQRMQKALTQMNLQLANVISDLSGLTGQRIVRAIIAGERDAQRLAGFRDPRVKASQEEIAKSLEGNWRPELIFLLQQEMAMYDTYQQRIAECDQQLHKHLTSFADHAHQVRSQSAQGKAEGKKAKKPAAKNAPRFDLSSELERITGVDLTRIDGIDVMGSQTILSEIGLDMGRWKTEAHFASWLGLCPDNRTSGDKVLRRGTRHVVNRAALALRMAANSLLRSQSYLGAQYRRLRTKLGAPKAITAMAHRLARLVYRMLKYGQQFVDKGMEYYEQRYRNQQIQLLQKKAAKLGLQLVQAQT

SEQ ID NO: 400603 - protein, 404 aa, unidentified
MTVVIGIDPHKGSHTAAALNEAEAVLGELRVRSGAAQLEQLLAWAAQWPERTWAIEGAGGLGYLLAQQLVAAGERVVDVQPKLAARVRLLATSSTNKNDPNDARSVAITALRSPEAKQVRAEDHAAVMKVWAKRRHDLVSARTQVVCRLHAVLCELVPGGISGQLYASKAATMLDEFEPYNAIAAARHELGLELLADLRRVDEQMRETKKRIALAVAASKTTLTEIFGVGPIVAATVIGYVGDVTRFASSDRFAAYNGTAPIEVSSGPRKIYRLSRRGNRRLNHAIHMAAVTQIRNLHSEGRTYYDRKVAEGKTGKEALRALKRRISDALFRQLQIDAQRAQGSIMGPGGQTGNDSKACVTDSHPEGRLFGKATPEPGTTLRPAATAIRSRRLKTPTRISRRAS

SEQ ID NO: 400604 - protein, 405 aa, unidentified
MDIQPIFRCSVGIDVHLALICVCIIVADPGMEPTVYRREFGGFKRDRHAMAEWIAGFKPDIVVMESTGIYWKSPYAALEKAGIRATVVNAQHVKKVPGRKTDTGDAEWLAMLARAGLLRGSFIPPEELRTLRQVGRHHQKLTAMRAMEKNRLIKVLSDAGIRITAVVSDAHGVAASAIIDCLLDGGTPEQALAHAGRLHAKPEVLLASLQGELSADHVLVAKTIRNHIGFMNIQLADLESHLLDALQPHEAALQLLMTLPGVDRLSAAKLVVEIGLDMAAFGTSGRLCKWAGVCPGNDESAGKRKRGDTAPGNRYVRTVLCEIAWGAVRTTSQFKGRFQNLVSRRGTKKAIIAIGHQLLRIVFVLLSRKVPYKDSTVDYDALVVKRNAPRWIRQLKKFGYLPQAA

SEQ ID NO: 400605 - protein, 344 aa, unidentified
MMFTRCGFDIAKRVFQVHGVDEHGVVKVRKTLAREKVLEYFAQLLPCLIGMEACGGAHYWARELTKLGHTVKLMAAQFVTPYRKRGKNDANDAEAICEAVGRPNMHFVAVKTEEQQSVLMVHRARSLVMANRTAQVNQIRGLLGEFGLVVPQGVAHLRRQLPRILEGAENGLPTLAREVLAGLLEQFRELDQRIAQYDCKIRELAQQSEPARRLLKVESIGPMTATAIVASMGDPHVFNSGRNYAASLGLTPRQHSSGGKSRLGQITKQGDRYLRMLLVHGARAYLRIVDKKSDAKSAWARRLKERRHANVAAVALAAKHARIAWALLAKGTEYRPVGLQEDPA

SEQ ID NO: 400606 - protein, 371 aa, unidentified
MDVVFTHGAGLDVHKQSVMACRITPDPTGQQAEGVVAVQEFGTLTVDLLALSDWLAAASITHGAMESTGEYWTPVFNLLEGTGQVFLVHASHVKRVPGRKTDTADARWLAKLMRHGWLPASVMPPAGQRDVRDVTRSRTTLGQERSREVNRVQGVLERAHIKLASVATDMMGVSGRAILAAWVEGRADPATMAELAKRRLRSKIPLLEQALTGLVREHHRRLLAIQWAHIDFLDEHIEALSGEMTRYLTELSAEAVLPAPTAFSPAADRAAEPAVPGAPLTFIRAITLLETIPGVDRRGAERWVAETGIDMARFGTAARLAAWVGVAPGNNERAGKQRSGRTRHGHQPLRTVLTQLAHAAAHTQGPYLSAL

SEQ ID NO: 400607 - protein, 417 aa, unidentified
MKCFVGLDISSTKLDVCIMLSDTSTPVTASLSNDLSGATEIKNHILDLNHTYHFERIVIGMEATSLYSFHPAMFFHEDRQLKELHVEIMVEQPNKIKKYRDAFEENKNDTIDAFYIADYFRIERFSPSFLKEEKYMALQHLTRTRLQIIEQLTRTKQHFIENIYYKCNTLAYQFKKEELSTNLWSSTMMTLMTDEMTLDELANMPLQELDDWLQKLGKGHFKDSEKLAQTIQAAIRGSYRLSKLQQDSVNVILGLLAREIRNLEKMIKEIDKAIEDMVETIPEYQCLTSIPGVGKVYAAGITAEIGQIERFKDHPQVAKFAGLNWREKQSGNSNSQHTSLVNRGNRYLRYYLVEAANSVRRYDDEYKDFYKKKYHEVPKHQHKRAILLTARKFVRLVDVLLRNHQLYTPPRRIMEDN

SEQ ID NO: 400608 - protein, 345 aa, unidentified
MKKVIAGMDLHSNNVMIGVMDMDGQRLASRKLPCELKEVVKFLTPFKKRLAQVAVESTYNWYWLVDGLQALKYPVVLANPAGMQQYSGIKHADDTNDAFFLAELLRLAILPTGHIYEAELRPVRDLLRRRLLLVHQRTALMLSFKSLYTRTTGQEMTLSALKNLEIKEAQELYEHPANQMIAGMQIKHIEQLTESIEKLEKAVLGSARELPYYAKLATLPGVGRILGMTITMEVGDIKRFAEPGHFASYCRTVEAKRMSNHKKKGENNSKCGNKYLAWAFVEAANFARRYDEQCRKWFERKAAKTSNVIAIKALACKLAKAAWYLMAEGTDYDPKRMFGQPAKTK

SEQ ID NO: 400609 - protein, 316 aa, unidentified
MTTTAVVVGVDVAKDRLDVAVRPSGEVWSEANDETGITTLVARLRPLGPALIVCEATGGFERAAIAALAAAGLPVVVANPRQVRDFARATGQLAKTDQLDAAILALFAERVRPTPRPLPDAAAQLLDAVLTRRRQLLEMLVAEKNRLGFAPKPLHRGIQAHIRWLERQLDDVTKELAGLIEASPVWRAKDDLLQSVPGVGPIVSFTLLGDLPELGTLSHKQIAALVGVAPLARDSGTLRGKRLVWGGRASVRTALFMAAMCGRRWNPTLKVFYERLKAAGKPTKVALIACARKLLTILNAMMRDQSRWTPNVQYSC

SEQ ID NO: 400610 - protein, 326 aa, unidentified
MTVAGSKQRCGEDSGIGAEEVVLGVDTHLEVHVAVALDGLGRRLGELAVATTEKGYEGLLTWAQGFGHVGRAGVEGTSSYGAGLVRHLKAAQIPVFEVERPKRRHLRRRGKSDSRDAQGAARAVLAGETAGVPKSADGRVEMVRVLRTARRSAVKARSQSANQLRGLLVTAPEAMGHRLRELSTKELVAAAARFRPGDDPEDVKAATRFALRSVARRYQYLSEEIAELDAQLCRLVAETAPELTSLPGVGTDHAATLLVVAGDNPQRLGSEASFASLCGVSPVEASSGKVVRHRLNRGGNRDANRALHLTSAWCVCGSRSAPELTS

SEQ ID NO: 400611 - protein, 409 aa, unidentified
MEVVYARCCGLDVHKKSVVACVLLSEGGTVRKQVRTFGTLTAELLELGDWLAEQGVTHVALESTGVYWQPIWNLLEERFSLLLVNARHVKQVPGRKTDVKDSEWLAELLRHGLLKASFVPDRPQRELRELTRYRTSLVQERAAAVNRLQKTLEGANLKLASVATDVTGVSGQAILEALAAGETDAAAMAELARGRLKTKRDQLERALVGRVGPHQRFMLTEHRRRIREYDAAIERASAEIAGRQRPFAEARACLETIPGVGPRVAEILLAEVGADLGRFPTAAHLASWAGMCPGNHESAGKRFGGATRKGNRWLRSALIEAAHAAGRTADTSLGAQYRRLAARRGAKKATVAVGHSILVIAYYLLTRGRPYHELGTDHLAERERAALERKLARDAHLLGYRLVPEEPAA

SEQ ID NO: 400612 - protein, 358 aa, unidentified
MQRNKKTFKGQNIYIGIDVHKKNWQVAVITESGYTERISTAADAKALFKFLKSHYPDGNYRAVYESGFSGFATYYALSELGVSCVVAHAADIPSSQYELTMKSDRIDAEKLARALRAGLVRGIYVRPKDNLDDRGVLRIRKTIQIQVGGYKTRIKHLLHSNGVELPERFSRSGTHWSRAFIAWLREDVRLLSDTRRSLELLLLQVETLRANLLEATRRVRALSMTDRYREDCALLMGIPGIGLTVAMTILTEVCDIGRFGNERQFASYLGLVPTSHSSGERVSHGEMTFRGNKHIGPLLVEASWVLIVRDRELGRMYTEYRWRMAGQKAIIKIARKLSNIIFAVLKTRKAYEPYRRDA

SEQ ID NO: 400613 - protein, 339 aa, unidentified
MKVTTFGLDLAKRVFQLHWVDMETGEICRRQLKRDEVAQFFAQRAPAVVAMEACGSAHYWGRKLEGYGHEVRLIAAQFVRPFVKSNKTDAADAQAIWEAAQRPGMKFVGLKSEAQQSVLMLHRMRQQLVKMRTMQVNELRGLLYELGAELPRGRQRGIERMGGELERLESVLPMVVMESLREQTKRIETFDEDIGEIEKKLALWKKEDEAVRRLLAIPGVGLLSATAALATMGEAKAFRSGREFAAFLGLVPRQSGTGGRVKLLGISKRGDVYLRTLLIHGARSVITRAKQREAWLEKLLARRPLNVAVVALANKIARTIWALLAHERTYEHGYVARAA

SEQ ID NO: 400614 - protein, 424 aa, unidentified
MKVTYQTCCGVDVHKSFLVATIVKTTGGIEPSYQKKRFSTFNNSILEFKQWLLDNHCHDVCMESTGKYWVPVFNLLEDEINVVIANPKWVKAVKGNKDDTKDSKWIGDLFRLGLVKGSYIPCKKVRILREYTRYRYKLVSCRSSEKNRYQNALTVCNVALDSVVSDIFGKSSTSIIDYLLEQSGTSINHEEIASKLLRSLKSKEDAVIESVEGYQMTDAQKYRMRLVRAHMDYITAEINDVDKMIENMISSNPDFENAVQFLCTIPGVKRDSAITIISEIGTDMSQFSSSKRLCCWAGLTPGSNESAGKKKSVRITRAGVYLKPALVQCAHAAVKSDKSPYYKKKYESLVKRRGKKRAIIAIARMILTAIYQMLSTGEQWNPSDLYKIDMPVALVEKQKAKAIKQAKKLLQREGLLPPDEPLAS

SEQ ID NO: 400615 - protein, 417 aa, unidentified
MENFAALIAIDCADKKHAVSLYDETAGGREQTTIKHTPEALNDWALALRTRFQGQPIAVCLEQSRGPLIYALLKYDFLVLYPINPATLAKYRQAFSPALGKDDPSDADYLLDLLQHHRERLTPWRPDDEKTRTLRYLVEQRRRLVNDGTRTTNRLTALLKSYFPQVLNWFSELRTLIVCDFLDRWPTLEAVQRTRPTTVNKFLRSHHSVRRETNERRLAEIKTAVPLTTDLAVLNSSKLIVKGLTAQLRTTIKALAELDRHIEALCQTHQDYELFSSLPGVGSIYAARLTAAMGSDRSRWTRVEDLLCFSGVAPVIERSGKQNWIRWRYFCPKFFRQSFVEYAEQSIQHSFWARAYYSMQRAKGKGHYAAVRALAFKWIRIIWKCWQTRTPYNEVIYLESLRKSGSPLLKFAAEHQA

SEQ ID NO: 400616 - protein, 342 aa, unidentified
MQITTIGLDIAKNVFQVHGIDAAERVVVRKQLRRGQMLAFFKALPSCLVGMEACATSHYWARELAKLGHQVRLMPAKDVKAYVKRNKNDAADAEAICEAVRRPTMRFVQVKSAEQQSQLMLHRTRDLLMRQRTQVINALRAHLGELGITAAQGQAGLRELLALIAGSADERLPAEAHASLIVLAAELQAMRTLIASIEKRIIAHHRLDEASKRLRSIPGIGLVGATAIAATITDPKAFRSGRDLAAWIGLVPRQDSTGGKQKLGPISKQGDRYLRRILVVGAHAVLKLARQKPEKYPWLTRLLARRPFRVVAVALANKMARIAWALLAKGGTYRMPVLAAAA

SEQ ID NO: 400617 - protein, 346 aa, unidentified
MILIGCDFHPSWQQICWLDTATGETGERKLEHASGEAERFYRGLPGPARMGMESTGNCQWFVELLTRLGHEVWIGDAAKIRACDTRQQKHDRRDAALILKLLVDGRFPRIWTPSSQERDLRQLLIHRDKLVRMRVQVKNELQHLAMNQGITKKRRLWSVAGEKVLCELPLKPWASRRREDLLRLRSLFDEQIALLDEAVKKVAAENEKAQLLMTHPGVGPITALAFVLTIGDVQRFPRSKQVASYLGLIPREYSSGGHQRFGSISKQGNRFMRMLLVEAAQSVVRYDPEFRNEYLHRCHKKPKGVAKVAAARKLTVRLYWMLKTNTGYPEIARVESSSRVPLASAS

SEQ ID NO: 400618 - protein, 452 aa, unidentified
MAKPKRSRPERDISLTHRDAGAIDIGARTHVAAVPPGRDHAEPVRTFGTCTGDLQRLADWFERCGVRTVAMESTGVYWIPAYEVLEQRGFEVVLVNARDAKHVPGRKTDVSDAQWLRRLHEYGLLRASFRPKGELAALRAYLRLRERLLEYAASHIQHMQKALMQMNVQLHHVVTDITGATGMRILRAIVEGERDPAVLASHRDRRCHASVEEVSAALTGNWREEHIFALGQALELYDAYQAKVVECDARIEAVLGRLRDAAARPASRLPPARHRDGTANAPGFDARAALHAILGVDLTQIHGLGPSLALKLVGECGTDLSAWPTAKHFTSWLCLAPSNKVSGGKVLSTRTRRSGSRAAALLRLAAVTVGRTQTALGAFYRRLSARVGKAKAVTATARKIAALFYNTLRHGMAYADPGASYYEERYRARVLANLKRRAKSLGYVLQEAPSPA

SEQ ID NO: 400619 - protein, 346 aa, unidentified
MSKQIVAVGQTGISHVKKLFCGIDVGADTLAVAVMDWDHPCIQREFANTVTGHKALLGWLGKMKAQVRVSLEATGIYSMDLALALDATEYVEIAVLNPKRVHDFARTLRRSKTDSADAQVLAEFSLRMPFAAWQKPSQGALAVRAVSRHLEALVVQQRREANRLHAAERSIATPRCVIADLKRSLAGVGRRIVKLRREAMTLIAADANLKERFNLLTGVPGIAAVSALQILGELVLLAPDMKVRQWVARSGLDPVHKDSGTSVHKPSRISRAGSRHLRRALYMPALAAVRWDPHMKAFYEALLARHKRKLQALIAVARKLLHAIYGIFRTRTPYDGRKLFPHLETA

SEQ ID NO: 400620 - protein, 408 aa, unidentified
MQRYYLGVDWADKSHQLYAADESGKKIKELEVQQTAEGLAEFGRWLDERRSAGTELWAAIEKPQGRIVDFLLDHGVVVYPVNPKALDRARDRFRMSQSKSDGFDAYVLAEFLRTDHTHLRALEPDSAQGQELKMLTRDHQRLLRQKTRLLNQMTITLKEYYPRALEVFDDLETQIARDFLHAYPTPQGLSRMTRPQWKRFAKGEHHLSEARWQELWEKINKPQITIPDHVVRAKAKLLLALVAQLEVGVKAVHDYSQEVERFFAALPAAKIARTLPGAKSGTTMPTLWAELGDAKNRWNSFRHLQAEAGTVPVTKASGKSRMVQFRFACKKRLRTAMSWFAFNSLMRCEWANKYYRDQRGKGHSKHQALRALGAKWLKIIFVMWRDHKPYDENYHLANIARHAMRQAA

SEQ ID NO: 400621 - protein, 312 aa, unidentified
MNSQTNWDMIGIDVSKDKLDIHILSKNKHVCIKNQYTKILAWLKQQPDHVAYVFESTGGYEKILIKCLNKVEASYHRAHPNRVFHYGKSKGYFAKTDKIDAKTLACYGRDNPLTFMKISEKDLQLQELSARKAQLKKMLQQERHRLGHDFFNSIIKQSIKRHIKQIEKEINQIDIALEQAIADNQEMTEKRELLESVKGVGKEVSQILLTQLPELGKLSKTQISSLVGVAPCNRDSGKRKGRRSVRGGRFDVRRALYMAALVAVQHNKRYKEKYHELLSKGKEKKVALMAIMRKLIMALNAMIKNNRVWQEA

SEQ ID NO: 400622 - protein, 385 aa, unidentified
MPTATTRSMHATVPVRTLHLALDLGNTTWKLAFATGHGHTPRLRTIPARDLAALDREITAARARFGLPAGAPVVSCYEAGRDGFWVHRALTAMGVANIVVDSASIKENRRKRRAKSDRLDATALVTLLLRHQAGERDVWSVVHVPSVEQEDRRQLHREVVTLTRERTRQVNRIKGLLALHGVVLPCPRGLPATPPPLRDWAGMPLPAELTARLQREWTRLRTTQRDLLTLRAERRRLLAEIDPASDPTVDMARRLLALRGIGEVGAWLCTTEFFGWRQFRNRRQVGGLAGLTATPRESGDTHQELGISKAGNVRIRGLAIELAWSWVRRQPTSGLTQWYRRRFSGSPRQRRIGIAAVARKLLIALWRYLETGVLPEGAVLKPLKA

SEQ ID NO: 400623 - protein, 360 aa, unidentified
MKIQRTSVGLDVHARSVLGCGLDGDTGEVFQQRLTPDHGEILAWLGDLPGPVAVTYEAGPTGFGLARALTAAGISCEVAAPSKLIRPAGDRVKTDARDAAHLARLLHLGQITAVTVPTASQEAARDLVRARDDCRGDLMTARHRVSKLLLRQGIVYSEGKAWTGRHELWLRRQRFDNLALQLSYEAAFDATLACQDRRDRLDDAITKLAADSEFTPVVHRLGCIRGVATLTAFGLAVEIGDWHRLTGRSIGAYVGLVPSEHSSGDSRSQGGVTKTGNGHVRRLLVEAAWHHRNQYRPGAELRRRWDLASPAARARGQAANRRLHTRWSGFDARKKRPVIANVAIARELAGWCWSLAVMPD

SEQ ID NO: 400624 - protein, 357 aa, unidentified
MSKVTRVGVDLAKNVIQVHAVDAQGKLVTNRALMRDKFLAWCAQLPARCLIAMEASSGAHHWARKLVSLGLQARIIAAHLVEPYRSQGKSGKNDANDAAAICEAASRPSMRFVAIKTVDQQSMLSVHRLREGFKEERTAGTNRIRGLLAEFGVVIPQSTTVLRESLSEVIEDANNELSGLVRLVIERAQTQWKELDEHIDWCDQRIAAHLKNDAQARAAGQLIGVGPVSASAVVATVGDFKQFKNGAQFGAWLGLTPRQNSSGGKNNLDAITKRGDMYVRSLLIQGAKSAVLTAHRREDPISQWVLRLREKSGWQKAAVALANKNARILWAVMTKGAPFDARHVSLKPGASTALAAA

SEQ ID NO: 400625 - protein, 363 aa, unidentified
MHSIRDTELSSHEGTRCQFNGSKAVIKLGIDVHQDFYVVVMQEGGTNPKPPQRLRKEAFLHWAAKLKSQGVEVHAVYEACGFGFGLQRQLSAFGIHCYVVCPQKLDERNRRVKTDSLDAKALCLKLDRFVQGNRDALALVRVPSEKEEQLRAIHRQREQLVKARKQLEAQGRSLMVNHGVEPVKSWWKSRTFAALQVASWLKELLRNSQPILVALQEKIRALTVELQNAADPDQARGLGAMSSVIIDREIGNWHRFNNRRQVGSYTGLCPGEYSSGNTRLQSCVTKHGNPRLRAALVELAWRLVRFQPNYKPVLKWRETLRQGALSTGAARKKAIVAVARQLAVDLWRIRTGRVSAESLGLSN

SEQ ID NO: 400626 - protein, 328 aa, unidentified
MSKQILYVGIDVGCKELWVSVPGMKPRRFEHSKRGIRSLYNWAAKKAGDDQLHFCMEATGVYSISVAFQMVSEYQARISIVNPARITAYGRVQMRRSKTDQVDAEVIRNYAESQRPAVWKPAPKPLRQLSALVTQADAIKDCLGQWRNRCHAQQFVPDLPDEVKKTQRSIERSLTTQLKKIETAIANLCAQESTLAQQVALLCTIPGVADQSAVKLLAYGQEWLTERSAKALTAHAGLAPHHHQSGSSVKGKSRIDKRGNPKLRKTLYMPALVAVHYNPVLIRFYKRLLNNDKPKKLALVAAMRKLLLITRAMLIAQKPFNLQNKALT

SEQ ID NO: 400627 - protein, 340 aa, unidentified
MKKPKYYIGLDVHKEKTTYVVKNQLGDVLLTGEAASRYETLHEQLRSFLPSSLIGLEASTSYYTLYQNFLHNGYQIKVANTIQLRQLIAKNDTLDAKRLAEMLRLGTYPCSYIPDEPIQRIRNMVQIRHALMEEKVRSNARIQAFLDRNKVNMPSTRAFSKRWRQALMQYMGSSEINTELRYAYDHFIFLEKKMEQVDQELQGYARKHWPKEYHLLQSITGIGPVIACYIIAQIFPIQRFASHKKLRRYAGVIPLSKSSGNYTSKGRIPKTSSRTLLRWALIQAANTIGKTKTPLGSYYRMKKKQKKNTGIAKVAVASSLIDIIYKVLTTKKPYKINMNN

SEQ ID NO: 400628 - protein, 411 aa, unidentified
MEVVYERCAGLDIGKDEVVACVRVPDGAGGRRQELCTFRTFSSGLEALADWLTEQGVTQVVLEATGQYWKPCWYVLEERGLELLLVNARHVKILPGRKTDVGDAAWLCELLEHGLLRGSFVPPPAIRELRDLTRYRKRLIQAHTAECQRIHKTLEDASIRLGSVAADVLGVSGRAMLRALLAGERDPMVLAELARGRLRSKLPELREALRGRFSAHHALLVRLALDHVEQLERSITELDMAVDRVIAPFAQARDRLDTITGVGRRAAECIIAEVGVDMSVFPTAAHLASWAGRCPGNNITGGKRRSGRTVKGNVWLGDVLIECAWAAARCRDTYLAAQFWRLARRIGKKKAAMAVGHSILVIAWHLLANDCNYADLGGDFFARRDSDRARQRAVAQLQALGYRVTLQPLAA

SEQ ID NO: 400629 - protein, 424 aa, unidentified
MLGVGIDWAETFHVVALGRPGEGVVQVLRVEHSKPALEALLEQLQALEPDSGEVRVVLETRHGLLVERLLEAGFVVVPVNPDLIARRRGPAKKKDDVEDARIACLLALDRFQPLRPLIPHGELAAELRLLGRDDERACQDERRLLNRLRADLLAVFPAAVQIAGPDMGAPTFLRMLQRWPTATALAATSRQELVAFARAAHSGYPERFADRVGQALSREHFTARQTLAQAKVDTIQLMVTQLLLIGAQRRTWERRMGQLLLGAPRHRGGALPSQAERDRSQAVPGGELYLSFPGLGDRLAARIAGEIGDHPEQFQTPNSLQCYAGQAPVTRRSGKRELRITRRLACNRHLADAVHQWALASLRRSAWAKDSDDRQRDRGKDHHAALRALGNRWLEILWHCLQRQVPYDEAVHVANRTRALRPAA

SEQ ID NO: 400630 - protein, 464 aa, unidentified
MKDNKRRKQMKQRRISSHLEQVNLFAAGIDIGSLSHYVAVPEELDSEPVREFACFTGDLNRMADWLVEIGIQTVAMESTGVYWIPAFEILEERGLVVLLVNARHVKNVPGRKSDVQDCQWLQQLHTYGLLEGAFRPPEETVALRAYTRQREMLVQRASDHIRHMQKALRQMNLLLDNVVSDINGMTGMKIIRAILAGERDPAVLAQFRDKRCKYEEKTIAASLEGHYREEHLFALKQSVELYDVYQQQIANCDETIQAQLDRMESRGDKDDLPPTKKRKTKSSPDFDLRGELYRMTGVDLTRIDGLNETSVLKVLSETGVDITPWPTEKHFSSWLGLSPGNKITGGKILTSKTKPSANRAAAAFRLAAYGLFNSKSALGAYYRRQRARLGSPKAITATAHKLARTFYSMLKNGTEYVDQGQDYYETQYRDRVTKNLKKRAASLGFALVPNKEDENMPDTVLSTT

SEQ ID NO: 400631 - protein, 426 aa, unidentified
MVSGGLVDQQVSRCAGLDVHKDEIVACARIADPAASGGRRVELHTFGTTTSELLALRDWLTGLGVTRVGMESTGVFWKAPFHILEDVIGECWPLNARHLHNVPGRKTDVADAAWIAELVEYGLVRPSFVPPPPIRELRALTRYRKSQIEERTREVQRLDKVLQDAGIKLSSVASDILGVSGRAMLDALAAGTTDPAVLSELAKGQLRKKIPALREALTAFFATHHRIVVSEILAKLDYLDEAIDRLSVEIDQVIAPFADKVALLDTIPGVDLRTAQCLIAEIGVDMAVFGTAERLASWAGRCPGQYESTGKSKGGKTRKGSKWLRLYLHEAARAASRTKGTYLSAQYSRIKARRGPAKARVAVEHSILVALFHMLDRDEPYRDLGADYFTRRRDPARHAERLTAQLNALGYDAVITKRPSQAPEAA

SEQ ID NO: 400632 - protein, 358 aa, unidentified
MKIVGCDLHARQQSIAMLDTETGEFTEKIVRHEGNAVREFYAALEGPIEVGIEATGSMQWFLQLLEELGIQYRVGHPAKIRAAETRKQKHDRRDARLILDLLVMEDRFPEIWMPWMEQRDLRTLLRDRHQWVKMRARLQHTLQSMALNHGLRRGPGLWSVAGQVALRALPLAPYTSQRRNALVSLYRQLQMRIQELDKVGEAEAQSRAQACRLLTHPGVGPVTALATEVFLGDPNRFRTGKQVASYIGMIPGEHSSGERQRLGKLSKQGNALVRYLWTEAAMHAVGKDPELKRFYRRKLIQKGMGKARVGAARKLGIRLWIMLRDQINYEEFRRRGRLRQEGEAHAGMPAFNSGPALQ

SEQ ID NO: 400633 - protein, 351 aa, unidentified
MWIIGVDYHPSVQQIAFVNTDTGECGERRLSHSDREAEKFYRELKAAGCSVRVGMEATGHARWFERLLAELGFELWIGDPAKIKAKRVRKQKTDRLDAALLLELLLEDRFPRVWVPSPENRDLRQLLWHRHRLVQMRTRIMNQLQAAAMNEGVRRKKALWSKSGRAQLESLPLAPWAARRRHDLLELLDRLSPTIEELSAAVEQQVKHRPEVLRLMTHPGVGPITALAFVLIIDSAERFACGKQIASYVGLIPCEDSSSDQRRLGHITKQGNTLLRYLLVEAAQAVVRCDPDWRRRYIHLAMRRDKRIAKVAMARKLAVRLYWMMRKEWNYEQLKKFGSYAGESDLVHGVQ

SEQ ID NO: 400634 - protein, 447 aa, unidentified
MKKKAGFPVLYPNAAGIDIASREHYVAVNPDAAEQSIRSFGSFTDDLHEIAAWLLQCKVDTVAMEATGIYWVSLYLILEEAGFDVVLVNAKHVKNVSGKKSDVKDAEWIRQLHSCGLLSKGFQPDHFTRTLRAYMRHRKNLTEMAATHIRMMQKALEQMNIKLQNVIADITGKSGQAIIKAIIDGEHDPQNLVKLLDGRIKATKESICKSLHGIWKTENLFELKQSFDLYHTYQEMIKECDLHIKGHIEEKASYCESDQTQPPYPVKKKYKTNKNNLNFDATDMLQKIVGTDLTEIFGITDTNATEIISEIGLDMSKWPTAKHFTAWLNLAPNNKVSGGKLLSSRVPRKRNKAGQIFKMAAFAVQRSKNWLAIFYNRIKMRSGTSRAVTATARKIAVIFYKLMKEKVRFCPLDRDQYLESFKVRQLKKLKQQATRLGLVLVPDNLVT

SEQ ID NO: 400635 - protein, 368 aa, unidentified
MGEPITYVGIDAHKRELHIAMLVGDQERTVHWTAPADSRGIDRLRHKLEREAPGHVECCYEAGPTGYVLQRRLTGGRVRCAVIAPSLIPRKPGDRVKTNRRDAQKLVQLLRGGLLTEVHPPTTAQEAVRDLCRARDDARRDVLRCRHRLGRLLLRRGLIFNGRNWGKRHRDWLQQLQWEYAAERHVIRDYQLAITQLEARLTELDRHLEEIAGLPPYASAVAALRCFRGVDTLTAISLLAEIHDVRRFQHPRALMAFVGLVPSEDSTGDRRRPGAITKTGNSLVRRLLIQAAWHYHHEPRLGVPLRRRRVGQPLAFLAIAEKAEQRLCRRYRRMCARLKPKPIVITAIARELVGFLWAALQLPETHMV

SEQ ID NO: 400636 - protein, 377 aa, unidentified
MAYRIAGIDVHKKKLAVVVADLELGSETQFERRWYGSQPEPLRALAEWFIEQQVEEVVMESTAQYWKPVWGALERYWQPVCQKREAVGPKSGTLHLAQALSNRGRRGRKKDFVDCERLIKRLVSGELTLSFVPTAVQRLWRTVTRTRYQLTCHRTRLQNQLEALLEEAHLKLSSLVSDLLGVSARRMLEAVADGATDPAAIAELANQRLRATAAQLRDALGTCRELNPVYRRLIKLALQDLQLVEQQIDQLDQEIARLLHKHQAAVERLAEVPGLGIDSAHQIIAEVGAKAETFESAKKLASWVGACPGEEESAGVTVAHAHRRATVTCAVSSISVPTLPSNGKAASSKSSTAVWCYAWATKRPLEQSHIACVSSFG

SEQ ID NO: 400637 - protein, 386 aa, unidentified
MQDHEPKGQTAIRTDLGAIFVSLELSRSSWLITSLSPGGGEKMSKHSVPGGDISGLLTLFLRLRERARKRTGKDFPIIVIQEAGLDGFWVHRALEQEGVESHIVDAASVMTSRRRRRAKTDRIDGEALLRALMAYKRGEPRVCAMVRVPTAEEEDRRRISRERKTLTAERVAHVNRIKGLLFSQGIAFKPLYGNRRARLEQLRTGDGRALPEHMKRQISRELDRLELLLEQIKAVEAERNTMLTALEGEKIPTPAKMLIRLRGIGSESAMVLWSEGLFRHFDNRRQVAAYAGLAPTPWQSGTIDREQGIAKSGNHRLRTTMIQLAWLWLRHQPGSALSRWFHERVERSGGRFRKTMITALARKLLVALWKYATAGVVIEQAAMKPL

SEQ ID NO: 400638 - protein, 318 aa, unidentified
MTSFLGIDLSKETFHAFLLSDRADAKKVFPNTPKGFEQLTTWLKNRQAVEVHICMEATGSYWEALALYLHGLEQHVSVINPARIKAFAQSELLRTKTDAVDAALIARFCKSQSPELWIPPPPEIRVLQALMRHSDHLKKTRAQQSVYAQSSDAAVVTASIQEVIATLDEQIAEVERKIRQHFDDHPDLKRRRDLLTSIPGIGETTAGSILSEIPHLDRFESAKAVAAFAGLSPRERQSGTSIHGRTRLCKTGNARIRKALYMPAMVALRCNPILRIFAERLSAAGKHKRLIIGAVMRKLLVLAYGILRSGVAFDANYA

SEQ ID NO: 400639 - protein, 341 aa, unidentified
MEIITIGLDIAKSVFQVHGVDGAGHVVLRKKLRRRDVVGFFAGLEPCVVGLEACGGAHHWARELAGLGHDVRLVPPSYVKAYVKRGKNDAVDAAAICEAVTRPHMRFVPVKSAQQQAVLVVHRVRDLAVRQRTMLINALRGLMAEFGVVAPRGRQRLGELVAVLEDPCESRIPAAARAPLLELVGAIAALEPRIARSEKAIAAMAGTDPVARRLMTVPGIGPITASALAASVGDPRRFRNGRHFAAWIGLVARQNSTAGRTRLGRISKMGDRYLRRLLVLGATASLRRLQQGQTPLAAWVRSLLARRPARLVTVALANKMARIAWAVMARGTAYRPAAAAA

SEQ ID NO: 400640 - protein, 338 aa, unidentified
MKLYAGIDLHSNNSMVVIIDEQDRVMFEKRLPNELEHILRALASFKQWLVGVVVESTYNWYWLVDGLMQSGYSVHLAHPAALVQYQGLKYSADEHDARWLAHLLRLGILHEGYIYPRQARAVRDLMRRRMQLVQTRSAQVICMQTQFTRSTAKSPPSNALKRMLPDEIEALLEERNVASGVRANLEVVRTLNREIARLEREVSEQVKLAAQYEPLLSIAGIGRILALAIMLETGAIERFAGVGNFSSYARCVASKRLSNDKKKGEGNSKCGNKYLAWAFVEAAHFAVRYNPRIKRFYERKAAKTNKVVATKAVAHKLARAAYHVMRERVPFDEARAFA

SEQ ID NO: 400641 - protein, 452 aa, unidentified
MPPKPERKGTWSTTTHILQPNAAGVDIGATEIYIAVPPDRDSQPVRSFRTFTGELKAAAEWLKQCRIDSVAMESTGVYWIPFFQILEAAGFKVFLVNARQVKHVPGGKSDVADCQWLQYLHSVGLLRASFRPQQAVCAVRSILRHRESLIQIATIHVQHMQKALDQMNLQLHHVISDITGVSGIAIIEAILNGERDPVVLAQRCDKRIKASRPTIAAALVGDYRREHLFTLRQSLHGYRQCQELIAACDREIEQHLAAFDSMVELQATPLPKPKDRHKPRRNQMKFDLRAHMYRVYGVDLTAVPGIDALTAHVLFAEIGPDLSQFTSAAAFVSWLGLCPDNRISGGKLLSAKTRVVKSRVAKALRMAAQSLHRSQSYLGSYYRRMRTRLGTPKAITAAAHKLARVIYHLLTTRQSYEESGFARCEALHQQRLEHRIRRQARDLGFDLVRSPS

SEQ ID NO: 400642 - protein, 394 aa, unidentified
MAKIGVVEVRRQEGIPPPKRPPEGTPVWMAIDISRSKAVYCLRWEGSEQRRLSTPLGVEHVRALLEQYRGCQVQVAYEACGFGYELAWWLQEHGVVVTVIAPSRVERVPGLQVKTDRVDAGKLARKLEKGDLKAIYIPSRTVYEQRQIGRTYAQCVKERKRAQVRLRSLMQEQGRRGPLPAAGWKAYSAWLDVQSLPEPVGLCVQAHQHLRGVADQHATRMHAELYTLARSDAYRALVTAVSAQSGVGWQSAIRLVLELGDIERFRTTDALPHYLGLTPSQYSSGELDHRGHTLKCGPGFLRAMLLQCAWSAVRHGCDSALKDRFAHLAPRLGRKRAIVAVARRLAIDTGTEVRLPARPSWLLMAAPPPHPCVRRSGCSRQRTPSTNLEGEQWL

SEQ ID NO: 400643 - protein, 337 aa, unidentified
METQLFMGCDISQDSFHFCLRGSRGILLQGQITNSTKPIRSWLKELQKAHQLDLSQILFCLEHTGVYSAILLRELTARSLIICLENAMNIKLSLGLTRGKNDKVDAQRISEYAQRNADRLPQWKPKRRVIERLQLLIRMRERLIKARTELSRFNQDSKRFLLAEDTKMILAGTKRALEGIAKDIQKAEDLIESIIRSDENLSRLNKLITSINGVGLITSSTVIVRTNEFIDITKPKKFACTAGVAPFEHSSGKSVRGKSRVSHSAHKDVKTLLHMCAVGCISRKGELRDYYDRKITQGKNKMSVLNAIRNKLVHRVFAVVRDNVMYQKDYQYHLRMV

SEQ ID NO: 400644 - protein, 408 aa, unidentified
MKRYYMGVDWGDRLHQVYVGDEDGKKVREMKLQESPEGLAEIGRWLDEKRAEGFELWAAIEKPQGRIVDFLLDHGVEVYPVNPKAVDRVRDRYRMSGSKSDAFDAYVLAEFLRTDQAHLRALRPSSEKAQELKMLSRDQRRVVRHKTRFLNQLTTTLKEYYARPLEVFEDLETEIALDFLQRYPTPAHLSALTRKQFNRFATKQHHLSKQRCEELWEKLNKPQLAVPEHVVRAKAQLVEVLIEQLRASIKAVKIYNHRVESFFASSPAAQFAKTLPGGKSGTLVAAVWAELGDAQGRWESSRHLQAEAGAVPVTKASGKSRVVHFRFACNKHLRYTMYWFSFVSLNHSEWAKLYYRGQRDNGHSHHQALRALGAKWLKIIFVMWRDHKPYDENYHLANIARQKMRQAA

SEQ ID NO: 400645 - protein, 351 aa, unidentified
MSQQINIRVAVVGIDIGKNSFHIVGQDRRGKIVLRQKWSRGQVEARFANMSPCLIGMEACVGAHHLSRQLRALGHDARLMPAKYVRPYSKGQKNDFRDAEAIAEAVQRPTMKFVATKTADQLDLQALHRVRERLVSQRTGTINQIRAFLLERGIAVRQGHRCLRTELPRILATSSDTLLPRILRIIEALAVDLRRLDERIEGLSSEIEQLAKQDAGCERLTSIPGIGPIISSAIVAAIGTGDAFAKGRDFAAWLGLVPKQISTGDRTILGKISKRGNRYLRVLFVQAAWVVLVKVKPTRWAGHGIQPWIEAAKKRLHHNVLAIALANKLARIAWSVLARGRSFEASKLQVA

SEQ ID NO: 400646 - protein, 459 aa, unidentified
MKRSAGRGKRVNVKRAEGTLSVTRANVAGIDLGSVEHYVACPPRGGQANVKTFGTTTPELAALADWLQAEGVESVAMESTGVYWIPLYELLEQRGMEVVLVDARQMKHVPGRKTDMIDCQWLQLLHSCGLLRGAFRPADAFCRLRAVVRQKATLIDEQADWLNRMQKSLDQMNVRVHRAVSDISGTTGMAMIRAIVAGERDPHNLAKLRNGRCARTRREMIEELTGNWRQDHLFNLKEALAMYDFILQRIVAYEAEIQRILQELGSKVEFGPVPEPGNPNKKKSLRAHGQEPLRQALYGVCASDLTSIDGISTSTAEVVLSELGSDLSAFPTERHFVSFVKLSPKLAISGGKPIRKRPKGTASTRVGAALRMAALTLRNSKTALGAAYRRIARRKGASVAVFATARKLAILIYRMLRYGTAYVDEGLQAYEERFQVSRLQMCQQIANQLGYKLIQQETA

SEQ ID NO: 400647 - protein, 411 aa, unidentified
MEQIHDRVAGLDVHRDQVAVCVRTPGPRGGVQTEKARFDTTTGGLAALAQWLAGHAVALAAMEATGVYWKPVYYALEGRFELWLCNAHHVKNVPGRKTDMSDAEWLADVAAHGMVRPSFVPPPPIRELRELTRYRKTQIDVRAAEIARLEKVLQDAGIKLTSVASKVLTQSGRAIIEALIAGQRDPRALAGLAKGKLRPKIPQLTAALRGQLGAHHAIVAARILAHLDFLDETIGALDAQIAARVAERCQPAARLLADVPGLERRSIEVIIAETGADMSRFPGPAHLASWAGLCPGNHESAGKRRRVATTPGNQWLRRTLIESARAAARTKGSYFGAQYRQIARRRGPDKAAVAVAHSLLDVIWHLLTTGEVFSDLGADYFTSRQDKEHQARRLISQLEKLGFTVQLTDAG

SEQ ID NO: 400648 - protein, 353 aa, unidentified
MELDKYIGIDAHSSTLVVNARDAFGKVILQSTVATNAEAIVQCIGGLRGRLHVTFEEGTHAQWLYDVLRRHVDDVLVCDARESRLLQDGSHADRIDAGKMSHLLRLGALKPVYHERQGTRALKELVGSYDGLVQDSIRAMNRIKAIYRSRAIPTPGQSVYRANQRESFMEHLKEAGALKRVRLLYEELDTLNLLRHQAERFMVTEARRHPAYGLLRSIPQLGPVRVARLISIVDTPHRFPNKAAFWNYCGFAVVLHSSGEHRFIGDQLVRSPKAVTTRGLNKDHNPAMKEIFKGAAMKARVRGPFAAYYQALVGRGLKSELATITLARKISAITLAIWKKGERFDPKKMTQTT

SEQ ID NO: 400649 - protein, 350 aa, unidentified
MNDTMIGVDLAKSVFQLHGASMTGQLKYRKKLTRSQFRKFMADQPPSVVVMEACGSAHYWTREMVRLGHDVKLIAPQYVLPFVKRQKNDAADAEAIGIAAQRPEMRFVEPKSQEQQARAVLFRARERLVHQRTELVNALRAVLYEFGHAVPKGIGNIKRFDVILEDPNCDLPALVRDECGDLVKQISEQTIRIDAKTKTAKEMATTADTARRLQTMPGVGPLTALAVEAFAPAMQSFKRGRDFAAWLGLVPRQHSSGGKERLGRVSKAGQTDIRRLLIIGAMSRLNWMGRKTIAEGSWLARMLDRKPRMLVAIALANKMARGIWAMLTKNEDYRDPVPAVAARSTCAAAT

SEQ ID NO: 400650 - protein, 452 aa, unidentified
MEEKAIPMEIVNPHAAGIDIGSRSHWVAIGQGEQDVCEFGVFNEDLFAICDWLAQAQVRTVAMESTGTYWQNLYAVLVSKGFHVILCNGKFTKNIKGKKTDIKDCQWIQKLHSLGLLTSSFLPDGNTEQLRTYCRHRSNLIQAAASTSKKMQKYLRLLNLRLDVVVNDVCGLSGLAIIRAICQGEKDPEKLASLRHGNCKKSKEEIARALHSNGREDYLFALSQELENYDHLQLKIAQCDKRIEAMLDEIISRDDNKREHHIEPKPHKRVTKNTPKDIDLNLKAYQMFEGTDLLAIEGMSYATVLSIMSEVGVEGIRKFPSAKHFSSWLRIAPNNKVSGGKVLSSKVPKGSSRLKIALRNAANAIGNLKDSTPLRDFFHRINFRKGRVSAISATARKLAVIIWNMVVKKTQYVNPEGYLFLDQKRKLGLVKRIKKQIDKFGLTKEDLEFTTS

SEQ ID NO: 400651 - protein, 345 aa, unidentified
MDKLDFSGVEVGAQELVVSLQRQGRRKPLKTFPNQLSGHQAIIRHLRCPGRRVRVCLESTGVYGLDLGLALHRAGLEVMVANPRAVRHFATALMQRSKNDHLDALVLLEFAIRMPFQAWVPPRPAALQLHCLARRLQALTEMQAAEKSRWHAAGATNATPPALRRDLERSLRSLRRAIARLSAEAVKLVEGDPDLNLRYQLLRSAKGIGPTSAIQLLAELGVVSQGLDVRQLVAYAGLDPRQYSSGTSVHKKVRISKAGNAHLRRALYMPALVAVRHQPHLRAFYQHLCDQGKLKMVALVAVMRKLLHAIYGMFKHQQPFDGSKVYRLPQRAPILQPTFSTAEAA

SEQ ID NO: 400652 - protein, 351 aa, unidentified
MKDITTIGIDIAKNYIQIHGANNQGKAVLKKRITREKFLTYMANVATCLIGMEACGGAHYWAEKLIELGFTVKLMSPRKVKKYVENNKNDANDAAACAEAVNRGSMRFVPIKTKTQLEIQAIHRVRSHYVKQRTGLTNMMRGLLLEMGIAIPQGKASLIKKMRTLLTGEEKQLSEKTKHLFQNLYHDLKRLEEEIERYTASLEQLAEEDESCQRISTLPGIGPITATAIIAKIGNGSEFKKGRELSAYLGLVPKQHSSGNKQLLLGISKHGDRYVRQLLIHGGRSSLQAAMRKNKQTGLLDKQDEHSQWMRQLAERVGMNKASVAVANKNARMIIALLKNETSFQSTLAHS

SEQ ID NO: 400653 - protein, 338 aa, unidentified
MMMVAVLGIDLAKRVFHLHGVDTHGRAVVSKRVGRAKLAAAVVQLAPRLVAMEACCGAHYWGRRFRDLGLEVRLIHPKFVRPYVKSAKNDARDAEAICEATLRPHMRFVPIKSPEQLDIQALHRVREQLVGWRTALINQTRGLLAEHGIVLPQGAWRLRPEVATALDDPASELTALAAELFRGLLDQLRELEHRIGTLDRRIVQLCRASEACRRLATLPGVGPIIATALVASVGDGRQFRCGRDLAAWIGLVPRQHSSGGRPKLLGIGAGGNRYLRKQLIQGARSVLPHLGARDDRRSRWLRGVLDRRGPNRAVVALANKTARIAWVLLARGEDYRAA

SEQ ID NO: 400654 - protein, 330 aa, unidentified
MAYAGLDIHKSYCQSIVCTPEGDVIKEGRMTTDKEDIEEFFSGLEGLEIALEASTNYEYFYDLLESLGHHVVVAHPLKTRMIADAKVKTDKLDARILADLLRGDLLPTSYVPPKEQRELRHLVRHRIALGRLRGRLKTQIKTELRRKNIKYREGANCFTEKGKTELRRLHNPVIDSYLTIYAVVEDELKKMDRAIAEAGTRYEDVRLLTSIKGIGVYSALVIYSEIGDGSRFPTEDHVFSYAGLTPRVHQTGNEQYYGRITKEGSKYLRWILVEAARIHVQWCPESRITKHYEKIKRKRGEKIAIIAAARKLLQAIYYMLKHKEPFRIEG

SEQ ID NO: 400655 - protein, 343 aa, unidentified
MQSISTIGLDIAKSVFQVHGIDAAGQVVIRRQLKRRFVQSFFEKLPPCLVGIEACASSHHWSRELQALGHTVRLMPPAYVKPYVKRQKNDTTDAEAICEAVTRPNMRFVPTKTPAQQSCLMLHRARHLFIRQQTAVINSIRAYFAEFGIVAPVGRRGVEHLLEVAADAADHRLPEVARVCLAALGSQLRALKAQILAFDRRIMAWHRSNATSKRLDAIPGVGPALATALVASIADPKAFRSGRDFSAWVGLVPKQHSSGGKDKLGSISKQGDRYLRSLFTAGALAVIRYAKIHGTRHRPWLTALLARRPTKVAAIALANKLARMAWAMMARNERYREPAALTA

SEQ ID NO: 400656 - protein, 356 aa, unidentified
MSKGNTKSAKSKGVLVTAADRVVVGLDVHKREIHAAVRMNGQEVGTHVLPARPAAVEKFLAPYRACLGHVVYEAGPTGYGLARHLRSAGVAVDVIAPSKTPQAPGDAAKSDRLDCRDLARLDEAHLLRPVAVPTEEEEADRQVIRLRDQAADGRRRVRQRIKSFLLMHGLPEHRGLEHWSQEAVAALGTMEIKNGRLRFCLDLLLEELANADEMIAKIKHEMKQMAQEPRHAATVKALTDHVGVGQTTALAFETEMYRPERFSNERQVSAMLGLAPRVRQSGNRRHEGPLLKAGRGRLRALLVEAAWVWIQHDAEARKVYQRLVHNTGSAQKAIVGMARRLGLELWRSLVKARAAA

SEQ ID NO: 400657 - protein, 344 aa, unidentified
MTITTVGLDLAKNVFQAHGVDERSKAGLRKQLKRGQMAEFFANLPPCLIGIEACGSAHHWARKLQSFGHTVRLMAPQFVKPYVKTNKNDTADAEAICEAVARPNMRFVPIKNIEQQAVLALHRVRQSFVKARTAQANQIRGLLGEFGIIIPQGIANIAKRVPDLIEDASNELPGSFRLLVDRLMDHLKDLDRQVDELEAQIKAWHRASDASCKLEKIPGIGPITASALVATIGDAKNFDCGRQVAAWLGLVPRQHSSGGKPTLLGMSKRGDSYLRTLLIHGARSVIFRAQQKADIDSWLHKLLKRRNANVAAVALANKNARIVWALLANDREFRPDYTSAGAAA

SEQ ID NO: 400658 - protein, 373 aa, unidentified
MSSNGCHQIIYLALELSSSSWVIAYRLPENDKAKLHRLEAGDGEGLLAFIAGLRRQLDPDDASTLVVSCFEAGRDGFWLHRLLTAHGVINYVVEPTSILVTRGARRAKTDRLDAVGLLRVLAAKFAGDPGACRTVVVPSVEEEDAKRPHREREFLVQERVLIENRIAALLATQGVRERPSLRSWDADMRALTTGDGRPLPTHLVAELNRLRRRLSLTLDMIRELDAVREQALEEQHDSASRTVKALCTIRGIGVNFASVLTREVFYRTFDNRRQIASYLGLAPTPFQSGGMDRDRRINRAGNSRARKTLVQLAWLWLRYQPESSHAAWFRDRVGSLQGRIRRITIVALARKLLIAIWRFVTLGLAPEGAIIAA

SEQ ID NO: 400659 - protein, 344 aa, unidentified
MDVAIGVDSHKSSLAAAALDELGREVDVREFPNDERGHDALLQWIRAQGHARVIGIEGAGNYGAGVARHLIDAGESVYEVPAFLTHRERKRNPSKGKSDPADAVAIARVAARGEGLSSPQRTDVLVDLKLLSDHRDQLVRARTRLINRTHTGLVISHPGYEKKIPKLNSKKNQAAALTLLRGDRTVRADLIRDCISEIRRLSKKIVDVEKQLAGKVRESGTTLTALQGIGFVVAAKILGEVGDPSRIRSKGAFAMLTGTAPIEASSGLTKRHRLNRGGNRQLNYALHMMARARLRHDDDSKAYVARRQLEGKSDKEATRCLKRHLSNVVFRQLVVDLKALPEAA

SEQ ID NO: 400660 - protein, 387 aa, unidentified
MLLDHHSAGLAAIHTQFGAIFVSLELSRSTWLVTSLSPGKGEKMSRHSVEAGNTAELLKLFAELKRKALARTGESYPIITIQEAGLDGFWLHRTLRQEGIESHVVDPASIAMPRRRRRAKTDRLDGETLLRTLLAYKRGEVRVCAMVVAPSPEEEDRRRLCRERRSLIAERIEHVNRIKGLLFAQGISDYVPMRRDRRARLEALRTGDGRVLPAHLKAQIGRELDRLELLLGQIEVVEAEQDALLAAGKLADEQAAPDPVKMLLALKGVGPNFAAVLWLEAFYRQFANRRQVAAYAGLAATPWRSGGIAREQGVSKAGNPRLRTTMIQLAWLWVRHQPQSALTQWFKALSQRGRKRAIVALARKLLVALWKYVTAGVVIEGAVMKTA

SEQ ID NO: 400661 - protein, 336 aa, unidentified
MTIIRIGLDTSKHVFQIHGVDENEKPVLRRQLRRSEVEKFFAQLPPTRIGIEACGASHHWARLLRGLGHAVLLMPPQYIKGYVKRGKNDAIDAEAICEAMSRPTMRFVPVKTAEQQAALTMLGVRDLLIKQRTMLINALRGHAAEFGVTAAKGPNKIVELLQRLATGEGVPALAREMLGMLASQLEAVNGKLKAIEARLMAWHRQDQTSQCLATIPGVGPIAGVSFALKIPDARAFRSARHFAAWIGITPRENSTAGRHRPGKISHEGDESLRRLLVLGATAVIQRAKRGRVSPWLLGLLARKPKKLAAVALANKMARVIWAMMISGEVYRRPQEA

SEQ ID NO: 400662 - protein, 373 aa, unidentified
MPKYSTAFGMDVHLRSTTVCALDADTGEAVTRRFPGNPWGEIAGWMDGFPGPSLAAYESGYLGFAPQRELAGLGVECVVAAVSKIPRSAADSASKNDRNDAARMAKAILAHDISPVWIPSPEVEGIRDLAGAYDGATARLATAKQRLLAFLAKRGFVYGGTTPAGNPRKYWTYDFLRWLDKVRPEDDGGVRTLAALRNEVEAAAEARADLLSEYRAAVDASPIAAEVAALQSIKGCAFALAAAFSAEVGDFTRFRSGRQVTAYFGLAPSQRSSGDSVRLGGVSGAGNALVRKLAVEGSWCYAAARHQPKLMPRDTGVPLEIRMHGRKGSERLLRRREEMLARGMPAAKANAATAAELVRWLWALGMMCREGAE

SEQ ID NO: 400663 - protein, 360 aa, unidentified
MSVNGMARPCSCPARRRVLRGVEKHKEPVPCHTNPHDQRGAIVLQQKVSRAQLERRLVNVPNCLIGMEACSGAHHIGRQLAALGHDVRLIPAQYVKPFLKGHKNDYRDAEAIAEAVQRPTMRFVAIKTPEQMDLLALHRVRSRLVSQRTGVINQIRGFLIERGITVRQGVVPLRKALPDILSSQTGPLSPRMIGLLTDLAQDWRRLDERIASVSAEIEALAEQDNSCQRLMTVPGVGPIISSAVVAAIGNGVGFKQGRDFAAWLGLVPKQESTGDRTILGKISKRGNKYLRTLFVQAAHVVLVRRPSAAMRGLWPWIEQASKRLHRNVLAIALANKLARIAWAVLARGHDYQPRIAPHAV

SEQ ID NO: 400664 - protein, 351 aa, unidentified
MLIIGVDFHSRFQQIAMVDTESGELIERRLDHKSDDAQKFYAGLQRPVRVGMEATGYAQWFERMLAELGHELWVGDAAEIRAAMVRKQKTDARDAMHILDLLLTKRFPRIWIPSAAERDLRQLLRHRHKLVGLRTSVRNQLPALAMGQGVYRKRKLWAAGGRTELEALALDPWASRRRQELLDLLDRLDPSLAELDRAVAKEAEQRPAACSLMEQPGVGPVTALMFVLTIGPVERFQRSKQVVSYLGLNPQESSSGGRQRLGAISKQGNSMARFLLVEAAQTASRYDEELRRDYQRLKFRRGTAVAKVAIARKLAVRLFWMLRKQASPVPPARMQGSPKHPVVGAAYRVID

SEQ ID NO: 400665 - protein, 361 aa, unidentified
MTGTVTFVGLDVHARSTQAAAVDVMTGELIRVRFGEGLLAPISWLGSLPGPVWACYEAGPTGFGLYRAATEAGIRVDVIAPGKTPRGPADRVKSDRKDAELLARCLMAGSLTPVKVPSLRVEAARDLTRAHDRCRDDLMSARHRLSKMLLRYGRIYPKPSTWSQRHRHWLAGQQFSNPVSELVYADLLAVVDGLTNRKAELAERISLLALEDEFWPTVARLRCFRAVDTLTALSLHLELSADWVRFQRATRLGSWLGLTPSRYQSGESDQHGSITKTGSGLARRLLIEAAWHYARPPRIGDRLASRQQGQPDHILQIANRAQHRIHRVYMQMRSRGKPHKVTVVACARELSCFLWAAAIAP

SEQ ID NO: 400666 - protein, 405 aa, unidentified
MEIIYPRCCGLDIHKKTVVACVITPEEKEIRTFSTMTEDILAMVDWIKSKGCTHVAMESTGSYWKPIYNILEIEGLNPMVVNANHIKNVPGRKTDVKDAEWIAGLLQHGLLQGSYIPSREQRELRELIRYRRSLIEERAREINRIQKVLEGANIKLSSVVTDIMGKSSRAIIEAIINGEEDTVVLSELAQKQLKNKKEELKKALKGLIGPHQRLMLKTQLAHIDFLDEQIGLLDEEIKRRMLPFEEDMERLDTIPGVGRRTAEHIIAEIGTNMDQFPSAAHLCSWAGVAPGNNESAGKRKSGRTRKGNEKLRSVLVEAARAAAHTKDTYLSAQYHRIAARRGANRAAVAVAHSILTIVYYLLKRKERYNELGVNYYEECKKEAIVKQSIKKLEALGLKVTVENAV

SEQ ID NO: 400667 - protein, 397 aa, unidentified
MYIVGIDIAKRKHEAAVIDGEGTVIIKPFSFTNNCSGYNRLLAMLTKAKLPLDEVSFAMEATGHYWLALFTRLQKEGFRVQVINPVQTNSIRSFYIRQAKTDPRDALLIAEVIRFGHFSESTLHPENIYELRELCRGRHAIVSMQADVKRKVVALLDQVFPEYETAFTNMFGDTSMAILQTCPTPKELSEMPLEELCHLIEVSSHKRFRMAKAQELQALARNSFGFAMAGDVFSTMIRLYAKHLDFLKQQVREMDRKIAEIMETLDTPITTITGIGPTLGAYILSEIGDISRFSSAAKLAAYAGIDPTMRQSGEYNGVRNRMSKRGSPYLRHAIWLAASSAVLHDPALKLYFQKKRDEGKPYMASVGHACRKMVSIIYAVMRDNKEYVPCIPNEISA

SEQ ID NO: 400668 - protein, 339 aa, unidentified
MKYTPVGVDIAKHLMQVHFIDEHTGEVIDKQIKRAALLEYFSNREPCLIGMEACGGSQHWARELEKLGHKVRLLQGKFVKAFVMGNKNDVMDARAIWMAVQQPAKAVAVKTGEQQAVLSLHKMRRQLVKFRTAQINALHGLLLEFGETVRKGRASLDKAMPEVLERLKEKLPPFLIYQIEDQYRRLSDLDMQIDGIEKQLAAWAKQNEACQRIMDIPGVGPLVATAAVAIMGDAGTFRSGREFAAYIGLVPKQTGTGGKVRLLGISKRGDAYMRTLFIHGARAATLLAKDPNPWVTELLKRRPTSVAVVGMANKIARTVWALVAHNRKYDRKHVSVRPF

SEQ ID NO: 400669 - protein, 372 aa, unidentified
MENIIYIGMDVHKESFSLCALHGTTGEIVREARCASNVSLVKKFVEKLKMKYGEDIKIKAGYEAGCLGYSLHNLLEQNGIDCDILAPTTMYSSSKNKMVKNDRFDAKMIALNLANGTYKEVYVPEEEDVAVKEYIRMLSDFKTSLKKIKQQIKAFLLRHGYVYEGKSSWTIAYMKWLKNLDLQGLFKETLDEYLLQYNVLVDKIERFSLRLEELSHSERYEEPVGKLRCLKGIDTTSAMTVHVEIADFARFPTAKAFMAYVGLTPSESSSGEKISRRSITKQGNSTVRSTLVECANALVKGTIGLKSKRVKARQKGQRSEVIAYADQAVERLQRKYHRMIYQGKPRNVAVTAIARELGCFIWGLEVGKIHRK

SEQ ID NO: 400670 - protein, 340 aa, unidentified
MQTEKKCFIGVDVSKLWFDVSMMLIAKGRKPQIVRERFDNDVAGFKKLTGWLKLHKVPFNDNTLVVIENTGIYHRMIWEYCSQRGLPISIVNAAQLKWSLGITRGKDDVADSERLCDYCYRHADKLKASAILDPAILQMKDLMTSRTRLLAQINSTRTYLQELKHSNSKEVQAMMEQIHKAALVGMKKSLELIEDQINKVVRQSAAIKNNYDLLLSVPGIGHITAVYIICCTANFASSITGKQLACYAGVVPFEHRSGSSIKGKARVHKMANKELKRLLYMGARSVVQHKQEFKQYYKRKEQEGKHHLEILNAVKNKIVLRAVAVIKNQRKYLDNYQKAA

SEQ ID NO: 400671 - protein, 369 aa, unidentified
MPLVRGERAARFTFGTPSPRGSIWRAFATVLWKPEQLIDFNSHLQGWETENMPELIHVGIDVSKDALEVACGPESPTQCFTNDDAGHEALVNVLHVHRVDLIVVEATGGYEAPCACALQAAGLAVAVVNARQARDFAKAMGYLAKTDRIDAQVLAALAAVLANRADRQKLIKALPSDEQQRLHALVLRRRQLVQMLVAERNRLPMSHQAARVSIEALIKAIRKQIVDIEADLSSHIAHHHADLAGLLRSAQGIGPHTSMALIADLPELGKLSNREISALVGLAPFNRDSGKMRGKRMIFGGRTQVRCALYMATIVAMRHNRVIQRFYQRLLAAGKPKKVAIVACMRKLLTILNAMVRTGKQWDETFHFA

SEQ ID NO: 400672 - protein, 353 aa, unidentified
MITIGIDAHKRSHTAVAVDELGRQLGSKTTPATTTKDHLAIIRWADQFGAERTWAVEDCRHLSRRLERDMLAAGETIVRVPPKLMAHARDGARSYGKSDPIDALAVARAALREPDLPAAHLDEESREIRLLVDHREDLVAERTRHINRVRWHFHEIDPGWEPKERGLSAFKNLDLAEQRLVGNDTVVARVARDLVRRIRELTVEINALTSELDERTRTRAPHLREIHGVAALAAAKLIAEVAGIGRFKSQHAFARHNGTAPLPVWSGNRERHRLSRSGNRQLNAAIHRIALTQARHHPDAIVFIKRRTATGDTGKEALRALKRRLSDVVYRAMLADLDITTCVAAQHVSPAAA

SEQ ID NO: 400673 - protein, 341 aa, unidentified
MTISLLAIDLAKHVFQLHGVDHSGAVVLRKRLKRNQLLGFVQALPPCTIAMEACSSAHFWGREFTRLGQSVKLLPPQYVKPYVKTNTHDAADAEAIAEAATRPSMRTVTVKSQEQQDLQTLHRGRERVIKTKTMLLNSLRGLCAEYGIITPKGSSWLTRDLAGTRQQLEAVNSQCLTLLFERSLAEFHRIEEDEKFYTAQLERIATTHPVALRLMQIPGVGLLTATAALAVVAAPQEFKNGRHFAAFLGLVPRQHSSGGKAKLLGISKRGNSYLRRILVSGAQSILRWSPRRTDAIGRWVTALRQKKPWNLVAVALANKTARVIWPLLRYDVDYCPHGAVA

SEQ ID NO: 400674 - protein, 398 aa, unidentified
MSRIWAGIDSGKGHHHGLALDADGKTLLSRRVANDEPELLKLIGDVLGLADGRQVTWAIDMTGGEPALLLALLLNHGQEVLYLPGRLVNRASDGYRGEGKTDARDAYVIADQARMRRDLRPIRPDDEAAIELKLLTGRRADLVEDRTRVVNRLRGTLLSMFPALERALELTNTGPLRLLTGYQTPAAIRRVGTTRLTKWLANRKVRGARALAEAAVEAAGRQHTAVPGEKTTARLVHTLAEEVMALNAQISDMDKLIEGRFREHELADIVLSVPGIGTVLGAEFLAAIGGSLDEFDSPDALAAFAGVAPAPRDSGKVSGNLHRPIAYHRRLQRVFYTSALVSVRCDPNSRKFYDRKRAEGKKHVQAVLALARRRVNVLWALIRDRRCYQVTPPVTTAA

SEQ ID NO: 400675 - protein, 341 aa, unidentified
MNSIGLDISKSTLSVYIPINKEELTIDNTPKGIRELYAKLKKVYKKSIDNLVFVYEPTGNYSAAIKRFCSERGIKVFMINPKQSKNYAKAIGERNKNDRVDARMLSRAIVLAKEEEIRVPQIDHVVEEIKELMNLYRFTVKQRVQMSNHLESLHEAQTSPYVLKELNKRIKVQKDKEQEIMEHIEALIDSHEALRQKYTAILSIPGIGKVGATVLLHLFLKYPKANQKQIVSLTGLDPIEKESGTSIRSRARISKAGSRLYRGSLFMSAMSATRFNDELKHFYDRLKVNGKHTTSAQIAVMRKLVVIAHALFKTGEHYDAQKYLLRCGVMQKETRRIKITA

SEQ ID NO: 400676 - protein, 388 aa, unidentified
MRTAGVDIGSEQHVLALLDEAGKVLVRPTKFSEDAAGYERLFGLLGEPGETTVAMEATGHYWQNLFAALVGHGYPVALINPLRTARYAEEELRRTKTDAIDALGIARFALEKRPAPAALREEVAGELRELVALRLRAVQDLSDRVRALHRLVDLAFPELTRQIRTLDSELATAVLSRYPTAQAIAAAPPGALAALRYDRRHQVGPARAQRLQDSARATVGAHQGPAYARGVRYACEDIERLRLRIKELDDEIGRTLGGSDLAPLLRSIKGLGETTTAHLLAVLGDPAAFASGKAIAAFVGTVPGLRESGKRRPGHAPLHPLGHAALRHALWMPTLTAIRCNPWIRAFYQRLTAAGKPKKLAIIACMRKLLDAVHYVARTRTAFVPKVA

SEQ ID NO: 400677 - protein, 363 aa, unidentified
MVETRSALSGLKHQKEKRSMDHFAGLDVSVKETSICIVDDAGKIVREVKVASEPEALLAVLKNPAYHFKRIGLEAGPLSQWLFSALAEAGLPVICVETRHMQAVLKAQINKTDRNDARGIAQMMRAGLYRPVHVKTIRSQKLRMLLTHRKLLQSKAIAIENDLRGTLRNFGLKVGMVGKVKFEARIKELVENLPDLAALVEPMLIVRRTLREQIVILHRRLLAIVRDDEVCRRLMTTPGVGPVVALTYRATVDVPARFRKSKAVGAVFGLTCAKYQSGEVDRNGRISRCGDEMMRVMLYEAAQSMLRSKKWSWLKAWAMQIARRRGMKKAIVALARRLAVIMHRIWVDGTEFRWTRERATAAA

SEQ ID NO: 400678 - protein, 416 aa, unidentified
MESQRNKVCGIDVHKRFLVATILSRDGKKETKRFSVTLEDLLKFRDWVIDNGCEQVAIESTGIYWHPIHAVLEGKVDLIVANAYKIKHTPGRKTDVSDSEWIAELCLNGMIEPSRIFPKDDRELRRLTRAREGYVKQMTQEKNKIHHSLDSACIKLASVISDIFGKSGMYLLNCILDGRDIDEIIEGIPSSRLKKKADQIKEAIKSHLEVSQIILIRGSLSLIRSIQERIDELDREISARIERRKNDLTIAMSIPGTGFISAAAILAEIGNYTDFKNPEQLAAWCGLVPSLYQSAEKVVLGGITKQGSKHIRRMLIQVAYAISRTKDSKLKRFFLRIQAKKGSKVAAVALARKVLCILHHLLMNQEIYLEDKARKNMRQKPLVSPSPIEMPIQEMIDCIVRAGYVVMKSDCRGGPG

SEQ ID NO: 400679 - protein, 341 aa, unidentified
MGEVSTIGLDLAKEVFQVHGADAAGAVVFRKRLRRTSVLQFFAAQAPCRVAMEACASSHYWGRELSRLGHEVLLIPPSYVKPFVKRQKNDAADAEAICEASQRPTMRFVQIRSEAAQAAAVVFRARDLLVRQRTQIINALRGHLAEFGLVVAKGPAHVGRLIAQAEDYTRSLPHFVRPTFDALIEVLHSLYEKIALLDGEISRRAEEDEDARRLQTIPGIGPVTAAAISALAPPAQSFTRGRDFAAWLGLTPLQRSTGGKQRLGKTSKMGERTLRRLLIIGASAVVRWAARNGAPAGSWLERMLARKPRMLIAVALANKMARIIWALLVKGGIYRASIAAA

SEQ ID NO: 400680 - protein, 372 aa, unidentified
MLRPAKKAPAQKAHRENPMNAPHYIGFDVHKKSISFCVKTASGEIVEEGSVPAQRRVLRQWASARPQPWQGALEATLFSGWIYDTLQPYGERLEMAHPAKMKAISAAKKKSDTIDARTIADLVRCNLLPACYVAAPRIRELRRRLRYRSLVVSEAVRMKNKMAGLLMETGALYVKEKLHRKKYFANLLEELEEVPESVIDLLRLSRGALEMFESTQKRLVRELLADPELAQRVERLMSIPAVGEITALTWALEVGDPQRFRSGSDAMSYCGLTAALQSSAGKQQRGPISKQRNRWLQTTLIEAAKLAPRWNPQLAALHARELERGHRNRATLAVARKLVAYLLAVDKSRQPFQVRGPSSEARTQQDWAQKAG

SEQ ID NO: 400681 - protein, 341 aa, unidentified
MKGYYYIGLDVHKKVIAYCVKKADGEVVDEGTMRATREDLKEWVNSIKGRWIGAMEATLFTGWIYDFLKPYAFSLKVGHSYMLRAICASKKKNDRIDASKLADMIRCDWFPECHMAPREVRDLRRVLRYRGLLVREAVRMKNKTAGLLMEVGAGYDKKKIHGRKYFDKLLDGLEDVPESVIELLSLTRSNMEIFDINQKRLVNALRYNIILKERVERLMSIPGVGEITALTWALEIDDPRRFSTIKKAASYCGLSSAHDESAGKIIRHPLSKQRNKYLQTVLVEAAKLAPRWNPNLALLYDRERERGANRNQATLAVARKLVAYMLYVDKKEKEFELKEAA

SEQ ID NO: 400682 - protein, 338 aa, unidentified
MNLSRIGLDLAKQVFQVHGVDRHEHVVCRRQLKRAQVRDFFRQLPPCLVAMEACGSAHYWARELRELGHTVRLIAPQFVKPYVKGDKHDAHDAEAICEAASRPSMRYVPVKSAEQQAVQSVHRVRSRLVRARPAVCNEVRGLLGEFGLIATRRGRAATMALLETVTATEPASLPAPMGELLRELKDELQTLEARIARLERQIQAHVRGDARIQRLLAVDGIGPISASAVAASAGDARQFRTGRQFAAWLGLVPRQHSTGGQQRLGNISKRGDTYLRTLLIHGARAVVRCCANKTDARSRWLQGLLQRRPANVVAVALANKNARILWALLSRETCYRPG

SEQ ID NO: 400683 - protein, 349 aa, unidentified
MQYVGVDHHKRFSYLAVMDEKGVVLKEGRVNNTKESLKRFLGNSDEPKKAVLEAGRNWTVMHDWLEEELDEVKLANPKKVKAIAEAKIKTDKIDATILAHLLRADLIPEAYVPKAETRMIKNILRQRMFFVKLSSMTKNRIHNVLDRHPDLRGQIDPSDLFGKQGLEWLSKVKLPKEDRNLLDEQIDLLTYLTDKIKSSNQVVEKLGSKDKRVRLLMTIPGIGKFFALLIVSEIDKIERFRTKDKLASYAGLIPSVHSSADKTFYGKIVAHGNRYLRWALIEAVWPAIRKDLHLRGVYQKIKQYKNANIAKVAVARRLSTIVYRVLSENRTYIVNYPGRPHITIAVANN

SEQ ID NO: 400684 - protein, 377 aa, unidentified
MRIVKHVGLDVHAESISVAVASAEGVLSQGRIPHDLVMLKKMLAKFGEPGSLRVVYEAGPTGLGLCRSLNEWGVQCAVIAPTLIPKQSGDRVKTDRRDAQKLARLSFGGLLTDIYIPSDEQEALRDLVRAREAAKKNQTSVRNQLSKFLLRRNLKPDSKIKKWSAKYMPWVRSLKIKETAAQIALEEYIVEVEHQSERIKRIEARLIEVSADLGVVLTAMIQALQGFKGIKFLTAVTFASEIGNMMRFTTAPELMSYAGVVPREYSSGGKVQKGSITKSGNAHLRRVLGETAWSYSRGFSTPGATVKKRREGLSPEIVQILERADQRLRHRFIALEAKGKHRNKVITAVGREMLGFIWAVARIAQQQVAKSKAAKEQ

SEQ ID NO: 400685 - protein, 346 aa, unidentified
MIVKQVVGIDVAQKELVVCLGRMYDDWTPELYASKTFANSVKGFISFIQWVRKITDVSIPIRFVMEATGVYHESLAYYLEDQALEVSIITPNKISNYARTLDVKTVTDKTASEAIALFGLERNLDKWKRPNPLFKKLRQLTRERDQLVQLRTIAKNQLHAELAEAEPNNSSIIRVKKQIAFFNKQEKEINSEIMELSKQDEKVSGSIKIICSLPGVGLLTAATVLAETNGFELIRNKRQLTSYAGLDVKEKQSGTSVKGKPRISKQGNKYLRKAMHLPALTAIRLDERHKAIFARLVSRHGIKMKALIAVERKLLEMIYTLYKTNKQYDKEYFKKTEANINEKATA

SEQ ID NO: 400686 - protein, 355 aa, unidentified
MAIRKQSIGIDISKSTFTACLCQQSDDGKLTFSKVLDFSNDSKGFNQLLRWTKGLIVSDSELVFLMEATGVYYENLAHHLHKIKKRVHVVLPNTSKHYFSSLNVKTKTDAVDARILSQFGVERVHKLWSPPPSALLQLRNLTRYYVQLQEQKTALGNIKHSKDCSHDIQNFITKSNKKLINEIDKEIQRCLKEIKKAIEEDKALKERVRKILTIKGVGLITVATILAETMGFDQFHSSKQLVSYSGYDIVQRESGTSIKGKTRISKKGNRYIRNALYFPGMVACRYNETLKETYIRINKNSKASKMIGQVAIQRKLLVLIYTLWKNNTEFIENYKSSSLDPKIETTQDSSVAELL

SEQ ID NO: 400687 - protein, 391 aa, unidentified
MIYIGIDVAKDKHDCFITNSDSEVLFKAFTIFNNLDGFNDLYQKIESVMDDVTKVKVGLEATGHYSYNLLGYLIDKGLPTYVINPLHTNLYRKSLSLRQTKTDKVDARTIASMLMSDVNLKSYSDTSYHNEELKSLTRYRFDKVKERAKLKTSVSRLVCILFPELEKLVPTLHMASVYALLSEFPSAKHVATAHLTRLTNLLSKSSKGRYGKDTAITFRDSARASIGSNMPAKSLELKHTIKLIQELDSEIDEIENEIKIITDEINSPILSIPGINYRMGAMIIAEIGDFNRFDSPDKILAYAGFSPSTYQSGQLDGAYAHMEKRGSRYLRYALYNATKYVCHWDPTFAAYLAKKRAEGKHYNVAISHAVKKLVRVIYHLEKTKQQYIKAA

SEQ ID NO: 400688 - protein, 350 aa, unidentified
MLIGVDYHPSFQQIAFLVEETGECSERRLNHSDGEADKFYRDLQLRGVHVRVGMEATGYSRWFERLLAELGFEVWIGDPAEIKTKRVKKQKTDRQDAQLLLKLMMEDRFPRIWVPSPENRDVRQLLWHRHRLVQMRTRIMNQLQALAMNEGRRWKSKLWSEQGRAELEKLALAPWASRRRHELLELLDRMNPTIVELTAAAEQEARKRPEALRLMTHPGVGPLTALAYVLIIGTPSRFHRGKQIGNYVGMIPSEDSSGGKQRLGHISKQGNSLLRFLLVEAAQAAVRNNPDWRRRYMHLAMRRHKSIAKVAMGRRLGVRLYWMWRNGCAYSPSMEFGSYAGQLGTGHGVK

SEQ ID NO: 400689 - protein, 338 aa, unidentified
MKITTIGLDIAKSVFHFVGVNKAGKLVKKKMIKRKDLIHFFAQVEPSLVVMEACGGANYWAREFQKVGHEVKLIAPQYVIPYRPANKNDYNDALAIAEAAQRPNMRFVQPKPVEQQDVQMLHRMRERLNKQTTALVNQVRGMLAEYGIVIAKSKAAFRKAFPDILSDENNELTVKGRYIFNQLHEEFTDIEKRLKSCDTQIVEERNTNPVCLRIETSPGIGPVTSTAFYAAVGEGKDFSNGRHFSAWCGLVPRQHSSGGKDNLLGISKRGNAYLRTLFIHGARAVLQHCGGKQDRLSHWAYALAERKGFNKACVAVANKLARITWAIAAREDEYRTFA

SEQ ID NO: 400690 - protein, 400 aa, unidentified
MFYCGIDIAKHNHEASIIDAEGKALLDSISFANTKAGCEKLLALLERLNITKADVIIGMEATGHYWLSTYEYLTERKFEVRVINPIQSEAFRKMYIRQTKNDSKDSFIIAQVMRFGQYSATTLSEENIVAMRQLSRYRLALVDSCGDCKRRVIALLDQVFPEYDKLFSDTFGSTSKELLLKYPTSEDMLSISTRKLTTLLTKASHGRFGESKAKEIRTVAADSFGVGFAKNAFSFQIRQLIEQLMFLENQIEELEEQISYLLHQTNEVITTIPGIGDILGAIILSEIGDIQRFDAPGKLVAFAGLDVKVSQSGEFTGTKQKISKRGSPYLRRAIWLAASRAAFCDPILSDYYQSLKARGKHHLTAVGAVARKLCNIIFTILRENRPYEPIPPTKMKEATE

SEQ ID NO: 400691 - protein, 371 aa, unidentified
MKKDSTIKFIGLDVHSKTISVAIADEGRKGEVRHYGTIENTFEAMDKVIKSLTETGVELRFIYEAGPCGFALYRYLTGNGFTCIVTAPGLIPKRSGVRIKNDRRDAMTLARLYRAGELTGIYVPEPEDEAVRDLARARDDARVAERKAKQRLNSFLLRYNLIYPGKTKWNRTYFNWLGSVGMKYPAQKVALQEYIEAANECTGRVARLSEQIRLAVEEWRMAPMVKALQALRGVSLICATVTVAELGDLSRFQNPKELMAYLGLVPSEHSSGETIRRGGITKTGNGHARRVLVEGAWTYKHHARVTPPLIKRQRDLSKSICQISWKAQLRLCARYRKMVARKKPNNVVVIAIARELAAFMWAIAQEVRAAA

SEQ ID NO: 400692 - protein, 376 aa, unidentified
MGKRLHDGPLPNSEPKLRAMFDKLAKHGTLLVVVDQPATIGALPIAVARACGHEVAYLPGLAMRRIADLYPGRAKTDARDAFVIADAARSLPHTLRRVDVGDDALAELDVLVGFDDDLAGEATRIGNRIRGLLTGVHPALERVIGPRIGHPAVLEILSRCGGPTGIAKAGRRKLTVIATAHAPRVGDKLVTAILAALDEQTVVVPGTTAADTVLPRLADSLKSVLLQRRQVATEVEGILDAHPLAGVLTSMPGIGVRTAARILLEVGDASAFTSSAHLAAYAGIAPVTRSSGSSIKGERPARTGNRKLKRAFFLAAFAALSDPTSRAYYQRKRDEGKKHNAALICLARRRCDVVFAMLRNKTRYRHPEVTPAPAAA

SEQ ID NO: 400693 - protein, 412 aa, unidentified
MEGETVIAGVDTHKDVHVLCLLDGLGRKIWSGSFGADPEGYDRLAEAIGDPGSCMVVGVEGTASYGAGLTRRLVELGYNVVEVLRPKRDKARPGEGKSDPLDAERAARKAASGRGCSVPKSQDGWVEAVRQLYVARRLAVATSTSCVACAKSMLTTAPSALRERFRGRERPKDLMPLLARGRKAGDALEESVLASLRSVAAVWKEARSQVESLDERIRALLEANAPALLGVEGCGTTTAAALVVAAGDNPGRLKGEAAFSMMCGASPIPASSGKTDRHRLNRGGNRQANWALYEIAIKRMAYDERTRRYVARRTSEGKSRREAVRCLKRYIAREVYRVLMDPNPDGAAPEGPELAKMRKAMRVTQKQAAAGLGMSAASLGHLEHGRRRSTKLERRYYELLCELERTLPQTAS

SEQ ID NO: 400694 - protein, 430 aa, unidentified
MEVIYPKACGVDVHKSFIVAVICDSTSVKPQYLRKRFSTFNNSLIEFRNWLLANDCQNVCMESTGKYYVPVYNALEGHISNVIVANPKWVRCIKGEKDDNKDAKWIADLFKLGIVRGSFIPNKDIRILRELTRYLYKLTNMRTSEKNRFTNALTVGNCKLDMVFSDIFGKTSSAIINTILSQNEYNDEDILKNIDWRCKSSNEDILNSISGISWQDAQKQRMNVIQEHIDYLDKSIKTVREIIDSIISPYESAINLLCSVPGVDCKSAITIISEIGTDMSQFSSHYRLASWAGLAPGCNESAGKKKSVKISRAGVYLKPTLVEVAHCAVKDKDNPYYANKFNVLSKRRGKKRAYIAIARKILVAIYHMLSTGEFFNPTDLSKVETSDKDKIKFTKNNFMQSTKQLISLGLSIDDLQDLMQSKISESTPII

SEQ ID NO: 400695 - protein, 340 aa, unidentified
MALYAGMDLHSRNTLVGVINGSFQRVFEKRVPNDLSLIVDTLEPFASRLKGIVIESTYNWYWLVDGLMDAGYSNVRLANPSAVKQYEGLKHTDDRHDAFWLAHFFALGILPEGYIYPKEDRPVRDLLRKRSFLVKHRTAHILSLQSMLEREKGYKLRGNEIKRLKTEDIARIFSQEHLVMSAQANRASIEFLRHHIKRIEKAVRNRVKLHRSFEYLMTVPGIGDILALTIMLEVGDIARFARVGNFASYARCVSSQKLSDGKKKGQGNRKNGNRYLAWAFVEASHHAKRYNERLRSYYQRKCAKRNQAVATKAVCNKLARACYYIIRDQVPFREEALFCS

SEQ ID NO: 400696 - protein, 331 aa, unidentified
MTSAEDNQDYGMEASMVNVIVGIDVGKWRLDVSVSQGPVRSFANTPAGIVALVDWVASLGASEAVCEPTGGYEREVVRRLRESGMPVHVAHPNKVRHFARAAGREAKTDVLDAQVLSHYGEVFPMADSQPGDGDNQELKDLLKRRKDLVDERVRESNRLEKGLRGGARRSTERHIGWLNKEIERIEKEYRKALSENARLSEAAALYRSVPGVGELTAASLVAYLPELGKLEGKELTALVGLAPWSRDSGAQRGYRSIRGGRGAVRRVLYLAALSAVRCNEELGQFYRRLQNRGKTGKVALVAVMRKLLVLLNAVPLRATAFNNSPPAAQAA

SEQ ID NO: 400697 - protein, 457 aa, unidentified
MPRKPKNPRIGGASSVHTIDPNAAGIDIGATEIYIAVPVDRDPHPVRCFSTFTEDLMAAADWLQRCRVATVAMESTGVYWIPLFQILEARGLKVCLVNARHVKNVPGRKSDVCDCQWLQHLHSAGLLRPSFRPSSQVCAVRSLVRYRDSLVQLSAVHLQHMQKALDQMNLQLHHVISDLGGKTGMAIIEAILAGERDPHQLAKLRDPRTHASEETIAKSLVGDYRREHLFTLRQSLTGFRQNSQLIADCDGEIESLLKEFSSGAGPGAGAVSEPQTELKRKPRRNEMNFDLRAQLHRIFAVDLTEIPGIHTLTAHVLFTEVGRDLSAFRNVAAFTSWMGLCPDNRVSGGKILRAQTRRVNNRVARALRMAAQSLSRSYGWLGQYYRRMRAKLGGPKAVTATAHKLARIIYHLLTTGQAYDETVFAQQETQNKQRNENRLRHQARKLGFELTQIPMEL

SEQ ID NO: 400698 - protein, 423 aa, unidentified
MTTYVGVDIGSRFHKVAIIGQGVMKRGDSEWKKSPTFKVLNRRADFDSLVGRIAVACGAQEEEAVVGLESSGYFYSRPVAEFLAKCFTVLFVDGTAVKDARQRFFNITHKDDDIDARCIARLLFLRDSLGEPLGVSPVALDLADRSQAIRVLSRQRRAMCKMITATTNRLHRIYSGIFPEAVEEHWPAILRVADSFPIPSELAAAQPEQLSGIRSRRKRESLIALAKETVGADATHYRRLVLFLVRQLKQQQQLLKQIEEELRGELSTHPQARILLTIPGIGSWTAAEIIGLVGDVRRYPTKKKFRKMLGVYPVSEQSGISLKRSRMGRQGARSGRGGLYIAVVGLLAPNRRPNFIADYVDRRRSEGMGGKAAVIAAMGKLAETIWSCAYHNQPFDAGRATTLRPRAICEGSARVVMEKPDGL

SEQ ID NO: 400699 - protein, 339 aa, unidentified
MKYTPVGVDIAKHLIQVHFIDEHTGEVIDKQLRRQDFLTFFSNREPCLIGMEACGGSQHWARELKKQGHKVRLLQARFVKAFVMGNKNDVMDARAIWMAVQHPGKEIAVKTEEQQSVLVLHRTRRQLVKFRTAQINALHGTFLEFGETLHKGRASLNKELPEALERLKMRLPPYLISILDDQYNRLNELDSRIDGIEKLLNSVARQSETCKRLMEIPGVGPLIATAAVATMGSASAFKSGREFAAYVGLVPKQTGSGGKVRLLGISKRGDTYLRTLFIHGARAASLVAKEPGPWITELKKRRPTGVVIVAMANKLARTVWAIAAHDSKYDKNFVSIRPY

SEQ ID NO: 400700 - protein, 388 aa, unidentified
MNTTKTSFTSTDSFVHIGVDLAKNVFQVAYKDPTSSKFVNRQLKRKDFKEFLENANSFKKHIFVEACGSSYYWCRLAIALGHKATIIPATATATFVQNNKSDVNDAKAIWQLSFVPDVKTVRIRSEANQILGTLLKLREKLISERTKLCNWMRGQLYEFGFVTSLGDSGKITKLLEEYSEQTKEKEWSDIFSTVSKVFKDSLKAIEKNIKTTEDYIISYARKDNLCCRLMTIPYIGPVNSVAISYVMEDSSCFKNGRQFASYAGLSPKHTGTGGEIRILGVGEQGHNILKRTIYQSALSMYCRYKERQEQIHDSTIYKDLAEYKEKLTEKAENSSWIAQLSRRMPCKKAVCAIANKMVRTAWAVAASNGGYNYKLSTLVKNTEENLSK

SEQ ID NO: 400701 - protein, 331 aa, unidentified
MLDMETGEIVRRRLEHENGEARAFYAALPKPSLIGIEATSYTQWFERMAAEQGHQLWVGDAAKIRASETRKQKYDGRDAEHLLDLLLTKKFPRIWVPTHQERDLRQLLKHRDKLVHMQTALKLQLHFLAMSQGICRKRKLWTEQGRGLLQSLSWDPWASRRRQELLDSLAPRIEPLDQAVERQAQQRPDAVELMKQKGVGPVTALAFVLLVGPVERFPNSRKLVSYLGLNPAEHSSGGRQRLGHISKQGNAMLRWLLVEAGQSASRFDPQLRRKYQRLKFRRGANVAKVAIARHLAVRLYWALRQMRDASPPVRKPGSPVSSVVEATPSTL

SEQ ID NO: 400702 - protein, 345 aa, unidentified
MEPMYYIGLDVHKRKISYCVKDGAGKVYSEGSLAATRLDLDVWMKTLPQPWSAAMEATMFTGWIYDHLKPHAAALKVAHPLMLRAITAAKKKNDRIDAGKICDCLRCDFLPECYMAPTAIRERRRTLRYRNLLVRQMVQMKIKISSLLMEAGVSYNKQRLHKAGYFRELLATNPDINEGLKPLLQLCRETVVRLQKTESAMVRSLERDSLLMDRVERLMTIPAVGPITALTWTLEVGDVQRFSSIKKAISYCGLCGAEKSSGSMVQRTPLSKQRNKHLQTTLIEAAKMAPRNSPELAMLYDKEKQKGNANGATLAVARKLVAYLVAVDRRQKEFLTVQRENRTAA

SEQ ID NO: 400703 - protein, 446 aa, unidentified
MNDRSDLSRGDRNRNEKLARMRGLLPLTNAIVGIDLADHQQAAVVTDHDSRVFARRKLSCRPWELGDLLEWARAKAQDAGFTSVTVACEPTGHRWRVLDQLATQRGLSLVCVQPLLVWRAREAEDLTWDKSDPKDAVIIARLAAGLRCYVPERTTATWARLRHLGARRVHLTTDATAGVQQLRDLLECVWPAALSSSGSPFRSRSWCASMTVVLDRADGDLSRVRRLGRARFVAVVRRELPRWGATRPCLRIVNAVFDALADPVGVVAHRPGGLERAQLVLADWAHTRRRLAEVEARMVAVLDELGLTELVTSIDGLTAVGAATLLAETGDLTRFRSPRAVVKHAGLCPRDNTSGTYQGKTSLSGRGRPELRLAAWRAVWAALPNNSVLAARFHHLTTREDNRLARQQARAACAAALLRWLHVVVTGGVRWDPVIATGRSTARAAA

SEQ ID NO: 400704 - protein, 389 aa, unidentified
MKIFVGIDIAKLNHFAAAISSDGEILIEPFKFTNDADGFQLLVSKLESFDKNSIIIGLESTAHYGDNLVRYLVAEFYQVCVLNPIKTCQMRKNNVRKTKTDKVDTFVIVKTLMMQDDLRFITFFDLDMMDLKALGRFRQKTIKQRTRLKIQLTTYVDQVFPEIQYFFKSGLHQNAVYALLKEAPSPKEIASMHMTHLANLLKVNSHGHFTKEQAKELRVLAQKSVGANDSAISIQITQTIQQIELLDSQLEKIEAEMTDIMKFNDSVIMTIPGIGYINGGMILGEIGDIHRFSNPNKLLAFAGLDPSVYQSGNFQAKTTRMSKRGSRVLRYALVNAAWNVVRNNATFKAYYDAKRAEGRSHYNALGHCAGKLVRVIWKMLTDEVEFNLE

SEQ ID NO: 400705 - protein, 449 aa, unidentified
MAKTKKRKHRMLERSLPVMRPNAGGIDIGATEIFVAVPADRDMETVRSFPSFTQDLHALADWLQQCRVDTVAMESTGVYWIPLFQILEARGIEVHLVNAQHVHHVPGRKSDVLDCQWLQYLHSVGLLRASFRPDQAVCEIRSLMRHRESLVQMACVHVQHMQKSLDQMNLQIHHVISDITGVTGLAIVDAIVAGNTNPEELAKLRDYRIKASVETVTKSLVGDYRGEHIFTLKQSLNAYRYYQQLLTDCDREVQQRIESFETKDGGSGSTGDVGDCNSSTGTFDLRAHFERIFGVDLTAIPGFDVLRVQTIFSELGADLSDFPTPASFASWLNLCPKDGTSAGRKIRGPKIKTKNRVTQVFRMAGQSLHNNKSFLGDLYRGQRARFGAIKAVKNAGHKLSRIFYHVVTTRQPYDETVFAKLEARHQQRRFRKLQSLAKQMGYSLVATPA

SEQ ID NO: 400706 - protein, 458 aa, unidentified
MSQAKRSRGRQELSPVHPNAAAIDIGATMHVAAVGPDCDEQPVRTFQTFTADLHRLADWFAQCGVKTVVMESTGVYWIPIYEILEQRGFKVMLVNARDAKHVPGRKTDVSDAEWLQRLHEYGLLRPSFQPQAEMAGLRAYLRQRERLLDYAAAHIQHMQKALTQMNLQLHHVVSDITGVTGMRIIRAIVAGERDPAILASYRDVRCHASVETVRQALVGNDREEHIFALTQALELYDVYQAKVAACDGQIEAVLERLKQSAVPPTEKLPAARHKAHSSNAPAFEVRGALHAILGVDLTQIHGLGPYLALKLVGECGTNLSAWPTAKHFTSWLGLAPHNKISGGKVLSSKTRRTSNRAATLLRLAAITVGRTDTALGAFFRRLSGRVGKAKAVTATARKIAVLFYNTLRHGMTYADPGASYYEDRYRQRVLGNLQRRAKAMGFVLQQQAEPAGAQAGVS

SEQ ID NO: 400707 - protein, 430 aa, unidentified
MTTKQITPSGAVLVALDIAKSRNEVLIEFPDRQRRRKLSIHNTRDDHDRLIGLLAETGKTVVCGFEATGNYHRPIAWRLIQAGFDVRLVSSMAAARTREALHNSWDKNDPKDAQVILHMLRIGATQHYHDPLVAGINDVQELSKTHEAISRSKTEILHRIQTHYLPLYFPEVERFRQNSRSDWFFAFLEMFPTPASITVMDQTAFVKSAWEVVGRKVAKATLLADIYQTARASIALPIPLDAPAITMFRMVLAETRSLIRQRDMIEKMADAMLAQSADYQQLRKIPGIGPINALSIIAEAGDIRRFGHHRQFLKFCGLDLSTHQSGTFRGRTKLSKYGNARLRRTLWLAAQVAIRQRENSFRDKFERYIARDRDDPDLRRKALTAITAKMARVVHAVVKSGSDYRPFFEGPVPGGRTPLRAAVRAQSATL

SEQ ID NO: 400708 - protein, 328 aa, unidentified
MFYLGIDVAKAKLDCCLLLDPDKAKRKSKSVANTKAGLANLLEWLRTKKVSPNNLHVVMEGTGVYHEQAALVLVETGVTVSIVNPAQVKNFGRGLAVRTKTDGVDSFVLARYGALLKPAAWQPPTLEARVLRALLARREAVALDSQRELNRLEKANVTEIPIFIRQSIDDSIEFLRTQLAKLQQEIDDHIDHHPDLRRDMELLTSIPAVGPQTGSNLLAIVHSYRFDSAEQLAAYLGLVPVERQSGSSIQGRARLSKAGPARIRAVLYMAAVVATKYNPHVKAVYDRLLAKGKAKMAAIGAAMRKLVHLCFGVLKTRTHYQADYAKIS

SEQ ID NO: 400709 - protein, 433 aa, unidentified
MKYVGFDWASQGHDVTVMDEAGRVLDRWAFPHSEAGWVMTLDRLRRQGPQDDAPVIIERTGGLVVDRLLAAGHPVVPVHPTAFFAARPRWGASGAKSDPGDSYKLADYLRTDGHRLRRLRSIDPGLHELQALVRLRDDQVRARTAASNQLTALLDTYWPGPRRLFVSLFSPIALAFLTDYPTPASAAHLGEGRMAAFLRRHAYRGGKSAAELLTRLRTAPVAPAGLPAATLAAMIGAQVELLTTLQQLISDSERFIAARVAAHPRAQLLAELPGVGTINLAQLLAEVGPILDRVDSAEQAATECGAAPVTRASGKTSGVYFRWAANTRARKAITSFAHNARMQNDWAARLYSRARARGKRNPHATRIVARAWLRVIWACWTSGQPYDPDRHRTRSSSYQPVPPSLPTRRSAGAVKMQPPTRGTILTAPSTGTP

SEQ ID NO: 400710 - protein, 366 aa, unidentified
MQRERTSVGLDVHARSVVACGIDASTGEMFRARLGPQPEAVLGWLRELPGPVAVVYEAGPTGYGLARFLTDHNIRCVVAAPSKLQRPSGDRVKTDAKDAQHLARLLRLDEITPVVVPTVAQEAARDLVRAREDVRGDLMRARHRTSKLLLRQGTVWSGGTAWTVAHHDWLRRQTFSQSALTIAYDSALETVLLSAERRDRLDKAIVKMAADPAWSAIVTRLGCLRGVSTLTAFGLTVEVGDWSRFTGSSIGAFLGLVPTEHSSGGSRSQGSITKTGNTHARRLLVEAAWQHRRLYRTPSATLRSRWNQAPAAARARGHAGNQRLHQRWQVFTDRKKRPVVANVAVARELAGWCWSLATLDDTGAAC

SEQ ID NO: 400711 - protein, 368 aa, unidentified
MKQQTSATTETGNKIRKIVSFTGKTVFVGIDVHKEDWQVAVYHEGIVLGNHRMRADSQQLIEHLNKRYWGASFKCVYESCAWGFELHRELKAADIDCIVVHAADVPGSNKELLNKDDSNDALRLARHYAAGLIHGIYIPQEEVQKHRNLIRFRKKLVNDLNRSRNRLKSLLKYQGIIIPEQFDNAQWSNNFLEWINHQAERDVLLRDTIWLMLEQIKQLRQLLLKAERKVRELMRDKKYNQQARLLMSIPGIGCITAMLFLLEIGNLRRFKSFDQLNSFVGLYPGTFSSGERNRDTGLSFRRHNQLRTHLVEASWQLIRRDPAMMESYQQLIKTMKGNEAIIRIARKLLRRMRAVLLNEKPYQMGLIA

SEQ ID NO: 400712 - protein, 370 aa, unidentified
MEEAITYVGLDVHKTSIEVGLADGGRAGEVRHYGRIEATPAAAAKLFAKLSQGGRRLSACYEAGPCGYGLYRQLRSLGHDCMVVAPSLIPKKPGERVKTDRRDCLALARLHRAGELTGVWVPEPAHEAMRDLVRTRMAAQRGLKRTRQELQGFLLRHGRIYQGRSPWTRAHRLWLAGLRFEHPAQQIALQDMLSAIEAQDLRRQGLERQIVQLLPDWSMAPVVEAYQALRGVSVLTAVVLAAELGDLSRFSHPRQLMGYLGLTSSENTSATRRRQGAITKAGNTHARRLLVESAWSYQLPARLAPAKLARIEHLPKPVRDLAWKAQVRLCARFRRLKASTRSPNIAVVAIARELAAFVWAIARIVPPRTA

SEQ ID NO: 400713 - protein, 349 aa, unidentified
MELDTIGIDLGKTVFHLVGLNRAGEVVVRRKCSRLQLLRFTSNLRVRLIGMESCGGSHFLGRALREQGHQVRLMPAQYVKPYVKTNKNDYIDAEAIAEAVGRANMRFVPIKSDAQLDMQSLHRVRDRWVARRTSVINQIRGLLLERGITFRKGRRHAEASLPGILEDADNGLSGLLRMLLMQLQDELRQLQNQIGEADALIATAAKKQEACQRLMAIPGVGPLTATAVVASIGNGAEFRKGRSFAAWLGLVPKQESTGGKQKLLSISKRGNHYLRRLFVSGARAVLQCRDKQPLGLSAWLGQLASRVHSNVAAVALANKLARFAWAVLAKSEAYRPPLSVVSTEALACN

SEQ ID NO: 400714 - protein, 412 aa, unidentified
METLVERGCGLDVHQGTVVACLLTVRKDGKVQKQVRTFGTTTRELLSMREWLLSQGCTHVAMESTGVYWKPVYAILEGGFQIVVANAQHVKKVPGRKTDVKDAEWIADLLCHGLLRSSFVPPKAIRELRDLTRYRRKLVESQSAERNRLLKVLETANIKLASVATDVFGISGRLMLRALIEGKATPEEMAELAKRKLRSKIPQLELALEGRLEDHHRFLLKLQLDRLERVEGDLAVLQQHIQEKLQPYAAQLALLQEIPGVEQTLAAVIIAELGVDMSVFQSVSQLASWAGVCPGNNESAGKRKSSRIPKGNVYLKTALVEAAHAAARTKGTYLRDKFYRLKARRGYKRAAVAIGHKILVSIYHMVSQNVSYNDLGDLYLDKLNKNHLTRNLVHRLERLGYSVTLAPQQKAA

SEQ ID NO: 400715 - protein, 359 aa, unidentified
MLGVLTSNATKEAPVSEQYAGKQIVGMDLHRRRSVLVRMTETGEHLETVRISNDPEYLRQVMERAGEAPEVVLEATYGWYWAADTLAELGAHVHLAHPLGVKMFAYRRVKNDQRDAADLADLLRMGRLPEAWIAPPACRELRGWVRHRAKLVGLRSSLKCQIHAVLAAAGVQVPMSDLFGAGGRQLLTNARLAPESRARVDSLLRLIEALDFEIELFATLVARRLREHPGYRAILQIPGVGPVLAAIFVAEIGDVGRFARPQQLASWAGLTPKHHESDTTVHRGRITKQGSRLVRWAAVEAVQRMPAHTRLGQIRDQVGERRGRNIGVVAAARELTELVFFGLRDGDVRRLSTPPQPAA

SEQ ID NO: 400716 - protein, 356 aa, unidentified
MGGEYQKGKVLARGKDVYIGIDVHKEKWHVTVRVEGEEVFNGSMLSEYQSLRKFLQRFKVCKIKIAYEAGPCGFGLYDKLSADEIETIVVPPSLIPVESGNKVKTDKRDSRKLAKLLESNMLKKVYVLTEEDRANRELVRTRRQLTEHRSDVMRQIKSKLLFHGIKSPFPSKQRWTKQYVKWLRELHLEHEVVKVSFNTLIDLYEYLGSQLMRISKKIVALSQSDKYSHKVKLLRSVPGIGILIAMELLVELADIERFKTADEIASYMGLTPSEYSTGQYVRQGSITRCGNTRARVCLVESSWHLIVKDLFWRGKYMKLKYRRGAKRAIIAIARNLIIRIRRILLNNEPYRIGLAA

SEQ ID NO: 400717 - protein, 314 aa, unidentified
MKDSQVCVGIDVAKAFLDVHLLPAEKAVRYPNSRTGIVTMVRMLKRQRPTLVVLEATGRLEIAAAGALGAAGMPVAIVNPRHVREYAKATGQLAKTDALDARVIATYGRDLHPEPRPIPDKDRLALQGLLARRRQLVEMLTAEKNRLDRAHPATRRDLREHIAWLHERLKKVDRELHELIKASEAWRQRDALLQGVPGIGPIASRTLLIDLPELGTISHKAISKLVGVAPLNRDSGTLRGSRSIWGGRPHVRCALYMASLAAIRCNPAIRDHYRKLRDAGKKPKVAQTACMRKLLVILNAIAQTGAQWEAPHAT

SEQ ID NO: 400718 - protein, 417 aa, unidentified
MKKNNKFGKKSELRTRPAKSGNTGQRETKEVLAELVGRLKEKLNPKVASVSPSEEHPRGGLKPNLDRLTVGVDLGDQWSKYCILDLEGETLAEGQVRTTQEDFAEFFKCLSSVRVVIEVGTHSAWAQEVIGDCGHEVVVANPRLMEGSKRRKRKNDRIDANKLARLGRVDPQSLHPMKHRSREVRQDLVILRARDALVAVRTELINATRGMVKSMGRRLPSCSSRSFASQAEQGLPVEIREALLPLVRLAKALSHSIKAYDRKIEELASEKYGHTKLLRQIKGVGPITSLAYVLTLENPKRFTRSRDVGPYLGLVPKQEDSGESQPQLGISKAGDRMVRKLLVGSAQYILGRFGPDTDLRRYGLKLCQRGGKNAKKRAVVAVARKLAVLLHRLWVTGEVYEPLRNSLSLAGVAAIAA

SEQ ID NO: 400719 - protein, 346 aa, unidentified
MLIVGCDFHPSWQQIAWLDTETGETGEQKLLHAGGEAQQFYGQLSGPVLIGMEATGNSQWFIEMVEDLGHAMWIGDAAQIRASYVRKQKTDKRDAGHILKLLVEGRFPRLWAPDRDERDLRQLVLHRHKLVLIRSRVKNELQHLSLNKGMQRKARLWSEAGMRLLRELPLQPWASCRREDLLGLLTMLDQQVGKLDEAVQRAAEANPSARLLMTQPGVGPNTALAFVLTIGDVSRFPRGKQVASYLGLIPREETSGGRQKLGAISKQGNRLLRSLLVEAAQSAVIHDAQFRKQYLHRCHQKPKGVAKVAAARKLAVRLYWMLRTQTAYPEIVRIESSSRVALVGKS

SEQ ID NO: 400720 - protein, 421 aa, unidentified
MTQSSPDTFAAFVGIDWADAKHDVCLQAAGATKRECFQLEHTPEAIDAWVTTLRTRFNGQPVAVCLELNKGPLVFALRKYDFLILFPLNPLTLARYREAFTPSRAKDDPTDAALQLELLLTHRDKLQPLNPQSPAMRALEQLVEHRRRVVGDKVRITNRLTSTLKNYFPHVLQWFPDKDTPIFCDFLSRWPTLKAAQLARRSTLETFFRDHHVRSSDVIDKRIHAIKAASPLTSDEGVIAPHALLVQALVSQLRVTLQAIETFDNAIAQRAQSHPDFPLFQALPGAGPVFASRLLVAFGEQRNRYASAAELQRYAGIAPVTERSGKKSWVHWRLQCPKFLRQTFVEWAAESTRHSFWAQVYYQQQRDKGKAHQAAVRALAFKWIRILFRCWQERTPYNESAYLQALNSRGSSLLHNLAKEA

SEQ ID NO: 400721 - protein, 428 aa, unidentified
MNYNQNQRLNQLNENILIIGVDVSKKFHIARAQDFRGVEFKRGIKFDNSRQGFAEFEEWKNSLQIENEKTKVLVGMEPTGPYWLPFARWLQTEGYWTVTVNPAHVKKSKELDDNNQAKTDYRDARVIAQLLKDARFSEPNLLEGVYEELRNAKNIRKMIVNDLKRIKNQMANWLDRYFPEYKYGYANWEAESFLYILDKYKLPANIANLNAIKVYSDVKQKFPRGVGQKKIENLIRASKESIGITEGRRMAEKELDYLMKRYKELVSDIGDIESNIEALCEELPEVQKITQIKGIGITTASGVVAELGNIREYRTPKQMIKMAGLSLTENSSGQKKGKMSISKRGRKDLRKILYQAVVGMIRTNEAFCELYQYYRYRAKNQLTGKQAIIVLVNKLLRIIHTIVVKDVDYDEVKMLGAIKHPDEFSFVA

SEQ ID NO: 400722 - protein, 353 aa, unidentified
MSEDKYIAFDVHQAMTVVSVVNAAGREVNTAILPTQAQALLGFVEGLRGRLHLTLEEGTYSAWLYDLLEGRVGELVVCDPRHNALLKEGSKTDRNDARKLADLLRTGMLRPVYHGSRSVRNLQEMAHSYQALVKDMTRVMNRIKAFYRSRGIDCAGRGVYSPKQRGSWLERLPAGASRMRGELLHDQLEQLRPLRRKARRALLAESRKHLVAARLRGIPGLGPLRVALLIAALQTPHRFRTRRQLWTYAGLGLIQQGSSEYRWVEGQAVRRAGALRPRGLNRNYRPGLKAIFKSAALAAIRQPGPFKDYYEPRAQRGVDPAILRVTVARKLAALTLSLWKKGGRYRAEGMKQA

SEQ ID NO: 400723 - protein, 371 aa, unidentified
MKSIIYIGMDVHKKTYSLCALLKETGEIIGETKIPADVSLIIKFIENAKKSVDSDDVQIKTGYEAGCLGYSLYWQLAAKGIECDILAPSTMHRSAKNKVVKNDRRDAKNIAANLANGTYKSVYVPTDEDVEIKEYIRMMHDFKIELKKVKQHINAFLLRFGHHYPGKSKWVPAHIKWFKELELSDMHREILDEYLSQLEILSEKIERFKHRLEELSQKETYNEKIGQLRCIKGIDTTAAMTMHAETSDFDRFPTANAFASYCGLTPGEDSSGESYHRLSITKQGNSMIRTTLIEAAQVLVRGTIGKKGKKVKSKQKNQDVKVIDYADKAVIRLQKKYHRMIFRGVKRNIAITAVARELACFVWGIETGHIS

SEQ ID NO: 400724 - protein, 335 aa, unidentified
MRYIGIDLHKNNFHVCYLEGEDKRFAQYRIEDLDKFRAGLKKEDHIAVESKGNARYFVNQIKEKVGRVIVVNPRQFKVISNSVKTDKRDSEHLALFLSRDMLPEVRMKGERQSQIKSLANTRDKLVKLRTALKNKIHNILNAHGIVSAREAFSSNKSLEAITDYPVNELARLELEVIAAQIRSLNEGIKKLDKQIEDAGKDLDGFENITSIKGIGKKSGTILLSIIGDINDFSDAGKLASFFGIVPRVNNSNETVHQGRITKQGSKLGRTTLVQCTLIAIRYSEYLRSFYERLKVRKGSGKAIIATSRKLLDIIYKTLKESLIFEDFPNFVLKSS

SEQ ID NO: 400725 - protein, 391 aa, unidentified
MIYVGIDVAKDKHDCFITNSDGEVLFKPFTITNNLDGFNELYQKIESVTEDATKVKVGLEATGHYSYNLLGYLIDKGLAAYVINPLHTNLYRKSLSLRQTKTDKVDARTIASMLMSDVNLKSYSDISYHNEELKSLTRYRFDKVKERAKLKSSVSRLVCILFPELEKLVPTLHMASVYSMLSEFPGAKHVASAHLTRLTNLLSEASKGRYSKDTAITFREAARASIGSNMPAKSLELKHTIKLIQELDSEIDEIENEIKVIVDEINSPILSIPGINYRMGAMIIAEIGDFSRFDSPDKILAYAGFSPSTYQSGQLDGAYAHMEKRGSRYLRYALYNAAKYVCHWDPTFAGYLAKKRAEGKHYNVAISHAVKKLVRVIYHLEKTKQQYIKVA

SEQ ID NO: 400726 - protein, 425 aa, unidentified
MREHDTQAEAGTVNIPGKGAMFEIEDVGVFLGLDVGKTAHHGHGLTPAGKKIFDKPLPNSEPKLRAVFDKLTEKFGTVLVIVDQPASIGALPLTVARDAGCRVAYLPGLAMRRIADLYPGEAKTDAKDAAVIADAARTMPHTLRCLELTDEITAELTVLTGFDQDLAAEATRTSNRIRGLLTQFHPSLERVLGPRLDHQAVTWLLERHGSPAALRKAGRRRLVELIRPKAPRMAQRLIDDVFDALDEQTVVVPGTGTLDTVVPSLAASLASVHTQRRAMEAQINTLLEAHPLSPVLTSMPGVGVRTAAVLLVTVGDGTSFPTAAHLASYAGLAPTTKSSGTSIHGEHAPRGGNRQLKRAMFLSAFACMNADPASRTYYDRQRARGKTHTQALLRLARQRISVLFAMLRDGTLYEPRTPKNVELAA

SEQ ID NO: 400727 - protein, 356 aa, unidentified
MAIAIGIDVHKKTSTFFAYGEDGEPLEEFNKRFKRVASNRDGYTEVLVWLGNSDCDFLMENSTKTHDVYWILQGLGYKNLYVAHSVDLKRITKSSKKTDHFDAEKLATYMRVKQQNIDQFRTCYICTPEDMRIRRLCRIAKQELFDMGRIRRRIRSHLLLTGREWIGGLNTKWECEALMNEDDPGLRHLGRQLNECRLRRDAAEEAVVEAIKGNEKMFPIYEKLKEIPNFGDITAAYLAAVIVDIDRFENPKKLAAYLGIVPRMRDSGETENHCGLTRSGDPAARWLLIQATFRLVNSSAPDSQLKAFFAEKNGGSIEERKEADTSGLLKRPALVATANKLIHIMFALLTHPDRHW

SEQ ID NO: 400728 - protein, 375 aa, unidentified
MIAYVGIDAHTTNYTLSTYLERSAAPVNTNTYSPAVANIVNYCKGIRKKIGNDTEIIVGYEAGCLGFKLKRDLEKNGLTTKILAPASITGTEINRRRRKKTDKRDAEAIARSLKNHEYSEVYTPDEEDESVRDFIRMQQDHKKQLRVIKQQICAFTTRHGYTYTDGKNYWTKKHLKWLKELPLEGINKETMDSYLLSYETVSDRIEQMNKRIEEIAETDKYREAVHKLICFKSVKVLTALAVIVEIGDFTRFVKAKNFAAFLGLVAGELSSSGDQNQTGITKQGNTFLRKLLVECAQSFSRASSRKSEALKKRQEGSAPEVIAYADRANERLRKRYMRLVLHNRKSHNKATVAIARELACFIWGMMTGNIHTVLA

SEQ ID NO: 400729 - protein, 343 aa, unidentified
MGEVSTIGLDIAKSVFQVHGVDAGGAVVIRRRITRAKLLEFFAALPPCLVGIEACPTAHYWSRRLQALGHNVRLLPPSYVKAYLKRSKNDANDAAAICEAVTRPSMRFVATKSEQQQSGLMLHRSRQLLVCQRTMLSNAIRGHMAELGIISAKGRNGTAELLKIIANEQDDRIPEAARFSLDVLARQYAAVRAEIVAIERRIHAWHRSSEESRRLEEIPGVGPIVATALVAEVGDWKVFSSGRSLAAWIGLVPRQHSTGGKERLGRISKQGNRHLRWLLVAGAMAVIRYARQHGTKRPWLARLMDRRPIKVAAVALANKIARMAWAMMVRGERFKEPRLLPAA

SEQ ID NO: 400730 - protein, 334 aa, unidentified
MDKVTTAGIDLAKRVFALHGVDGAGRVGLRKTVRREQLMQTVAALPPCLIGMEACSGAHEWARRFQQLGHTVRLMAPVFVAPYRKSGKNDGNDAEAICEAVTRPNMRFVPIKSAEQQAVLALHRVRQGWIEERTATINRLRAVLTEFGVVLPNRAQYVRREAHATAEALPELARQAVEDLRAHLGVLDERIASYDRELQAQARQSEAAQRLMQIRGIGPLTAVAMVATVGCARDFRSGRQFAAWLGLTPRQHSSGGKHRLGHISRRGDAYLRCLLVQGARSVLLTAMRHSDRLSRWALSVQARRGYHKALVAIAAKNARIAWALLCKNQTLRAA

SEQ ID NO: 400731 - protein, 354 aa, unidentified
MNTPSTPTQNPPTQNATRFVGVDVHKETLYFDADNLFRGEIQNQGKDILQTLQKLQTKAGANTPLHVCCEATGTYTRPLAGACWQLELPISMANPARVRKYAEGMGVLGKTDKADARVIRLYAEEAARQAETANAVPLRPHTPPDPVRDKLRQTHDLRDLCVEHRTRLSNALAAITLPEFQRDIQIQLRALDARIEKLEALLAETVREAGPAFAGLVKAVDGIKGVGFLTATKLVALCPELGTLTRRGSASLAGLAPYPKDSGNVSGPRQIRGGRKPLRNALYMAAGVAARHNDVLKEFYQRLREAGKHHNVAVTAVMRKLFYYANVVAAEHQRSLAAPVPETPPTSPSGATAD

SEQ ID NO: 400732 - protein, 420 aa, unidentified
MRGIGLDVHRDFCEIAVAERGRVRSAGRIRTRVRALEALARSLMPADVVALEATTGTDRIVSVLERHGVRVVVANTRKLRSISEAKAKTDRLDARTLARLLMAGLLDEVWTPDERTRTLRRLTHRREKLVRARTRVKNEAHAVLGRNLIDRPPVTDAFGKAGRAWLAQLKLPVDEQLTLEGCLRQIDFLDQEVGALDREIAKAALEWPEVQRLMSVPGVNVNTAATFMASVGDIRRFSSPRKLVSYLGLDPRVRQSGNAPARHGRISKAGAAEARHMLGEAAWKVTLTAGPLRAFFHRVRARRGPQIAATATSRKLVVLFWHLLTREQDYAFARPAMTRNKIRQLELAAGAAPQKGRRGVAGNKSKAVFEAERALSRQAEAAYRRLISDWRATGPAKDGAGVTRGRASQKALEGQSRAAG

SEQ ID NO: 400733 - protein, 402 aa, unidentified
MSDLVRSVEQEPQFAAFIGIDWADQKHVWCLQAAGSQRRESGELEHTPEAVEAWVAQLCQRFAQRPIAVAVEQSRGALVFMLSKYELLHLFPAPSQMAANLRQALYPSGAKDDPRDADLLLDLLLQHRNKLRRLSPDSEATRRVQNLVEERRKLVDEKTAQLNRLTSQLKVYFPQMLEWFGRLDTEVACALLQRWPALEELQKASPSTLRAFFRKHRCRDRERIERRMEAIRQAIPAIHDRAVIEAKSTAVKVLVQLVRILVEGIEDLDGQIEEAAAAHPDFFIFNSLPGAGSVMAPRLLAAFGSQRNRFDSAREVQSFSGIAPVTESSGKKKWVHVRWACPKFLRQSFHEWAGHSIVQSEWARVYYQRQRNKGNGHHAAVRALAFNGDVLRQVCGIGASFW

SEQ ID NO: 400734 - protein, 415 aa, unidentified
MKVVFPTCCGVDVHKTFVVATIITTPADSLQPHYQKKRFSTFNSDSNRFADWLLEHDCLDVCMESTGKYWVPVFNILEKRGIRVVIANPKWVKAVKGNKDDTKDSKWIGDLFRIGLVKSSFIPELNIRILREFLRYRYKLVSMKSSEKNRFQNAFTVCNVALDSVVSDMFGKSATAITDYLTSDESFDPDHCVSLLQRSLKKKAEKVLESIEGYSISDEQKARIKIIREHYDFVEKLIAKVDTCVNEMVEKYEGEINLLCTIPGIDRNSAITIISEIGTDMSQFGSSKRLCCWAGLTPGNNESAGKKKSVRISRAGVYLKPALVQVAHAAVKDKANPYYALKYERIAKRRGKKRAIIAIARMILTAIYTMLCTGEVWTPVDLFKIDIPEHLKEQQLAKAIKQATRFLEKQGLTVA

SEQ ID NO: 400735 - protein, 376 aa, unidentified
MQDSTFIGQDVHKATISVAVADGVRGGEVRHLGTIPHRADHVRKLAEKLGTGGRKLHFCYEAGPCGYGLHRQLVEMGHDCIVVAPSLIPVKTGDRVKTDRRDAVMLAKLHRAGELTAVWVPGAAHEAMRDLVRARATAMRVLGKARQHLQGFLLRHARIYPGKKGWTVAYRRWLTTVRFEHRAQQIVLQDYVDAVADAEARVARLTGQITELLPDWDLAPVVEAVQAMRGVAFIVAVTVVAEVGDFHRFGNPRQLMAYLGLTPSEHSSGATVRRGGITKADSGLARRALIEGAWSYRMQPRVSRKLHDRIEAVPSKVREIAWKGQLRMCQRYRRLVMAGKPKVVVTTAIAREMVGFIWAIARAVEPVPGPAVSQSA

SEQ ID NO: 400736 - protein, 413 aa, unidentified
MEVLYPRCCGLDVHKSSITACALLREQGRIRTERRRFTTMTQDLGDLVAWLLELQVTHVAIESTGVYWKPVWNILEGHFTIILANAQHVKNVPGRKTDAKDSEWIAELLQHGLLRNSYVPPEAIRDLRDLTRGRATLSQEASRIANRIQKVLEDANIKLSGVASNVLGKSGRAMLDAIVVGQLDPEQLADLALGHLRAKIPQLRLALSGKVREHHRFLLNRLLLQLRFIENEIDVLDQHLEQLGRQDPVLAAAVARWTTIPGVDRVAAWSLAAEIGVAMEQFPTAAHLASWAGLCPGNCESAGKHLSGKRRKGSPWLGRMACQCAWAAARTKNTYLSVQFRRLAAKRGKKPAIIAVAHSILVIAYYLQKKESEYHDLGSNYFDRLNADGLRRYLVRRLEALGNKVTLEAASAA

SEQ ID NO: 400737 - protein, 345 aa, unidentified
MYRTRVGVDLAKKVIQVCIYRNKKVQSNIEMTPEEFLSWLINNKPVTIIFEACSTSNYWKQKAIEAGHDARLVSAKLVSIVRQNQKTDKNDAMAIVQTTFMPDVVYIGGKTVEQQQLQCIKRLRELAVKHRDGAQKQLIALLFELNIKIANRRGGIISAIEGVLEDACNGLSAECRRAIYLAKEQLKALFETVKHYNDCIDNSATAHQECKKLMQLEGVGAMNAINLYIALGCSDIGYFSKGKDAAACIGLTPIQHSSGGVVKLGSIGKFTKNSKLRSQLICGATAAVQHAVKRKAITKKDLWIQGLVERRGKKCAAVALANKTVRTAFAMLTQGTEYKAELLAA

SEQ ID NO: 400738 - protein, 350 aa, unidentified
MRRPKEKVIAGIDLHGNNLVIGVIDQDGKRLTHRKLDCKLEQVEEFLRPLKPRLQSMAVESTFNWYWLVDGLRAQGYAIDLANPAQIEQYSGIKHADDKHDAFHLAELQRLNILPKAHIYDAELRPVRDLLRRRTNLVHQRTALFLSFKSLYTRTTGQPMPLSQLKGMEPKEGKDLYEHPANQLIAQVQLEHIEALDRSIRRIEKAVLGCARQIALYPRLLTLPGVGKILGMTITMEVGDIARFRTDGDFASYCRTVDSRRLSNGKQKGQNNPKCGNKYLSWAFVEAANFAKRSDENCRRWYDRKKAKTSTVLATKALACKLAKAAWHVMAKETDYDARRMFPELALKKP

SEQ ID NO: 400739 - protein, 449 aa, unidentified
MSKVSPLINGLPVIHERAAGIDIGSRFHVVAVPSTLSDEPVRTFLAFTADIQRMADWLKTIGVETVVMESTGVYWVPVFEVLESAGIGVMVANARETRSVPGRKSDINDAQWLQRLHACGLLRASFRPGRDIAALRAYLRHRERLLDYAAAHIQHMQKALTFMNLQLHHVVQDITGVTGMKIIRAIVAGERDPQVLAEFRDVRCKSSIEIIHGALVGNYQSEHVFVLTQSLALYDFYQARVDECDVQIEQALAVLTADKPEPEQPIPKARHRTKQPNAVNFDVRTALYQLIGVDLTQIHGIGPFLALRLVAECGTDLSKWRTAKQFTSWLTLSPGCKISGGKVLSAHSRKSSNRLTAHLRLAAVTVGRTNTALGAFYRRLAARIGKAKAVTATARKIAVLFYNAMRFGMHYSDPGAEQYEQKYRERVIKQLHRRAAEFGFILQEAECVS

SEQ ID NO: 400740 - protein, 341 aa, unidentified
MLYVGLDVHSKQSSLCILNAGGGTVKQIQLKGPRCTVVDHLRQLAEPFSICYEASCGYGHLYEQLRPLAHQVTVAHPGKLRLIYGSKRKNDRVDAQKLAKLLLLDMVPPVHVPTIDVRAWRSLIVFRQRLLQQVVRAKNQIRGVLRENDLAGAKWLWSKKQLAWLEALELHPVAKLRLELAVQEFKAVDARIKRIEKELQKYADRHPAVKLLMTIPGVGIRTAETFVAWVDDIGRFRNNRQIGSYFGLVPCQDASADKNRLGHITRDGPPVMRKLVCEATWTAIKKCDAFKAFFEQVMGGKSERKKIALVATMHRMIRVMGAMLRSGEAYRAAPLRKTPDA

SEQ ID NO: 400741 - protein, 350 aa, unidentified
MKRILKQSVGIDVAQKELVVQIGRLYEDLSTELYAYKCFPNTAKGFILLVQWVLKLTEPTVSIRYVMEATGVYHESLACYLADHGYSVSIILPNKISNYFRTLSIRTITDKSASEAITLFGLERNLEDWKRPKPVFKYLRQLTRERNQLVQERTMIKNQLHAEKTESDPNSSTLKRIKQRIDLLNKQEIIIKKENEALVKKEMDLKQELILLRTIPGVGALTAATVLAETNGFELVRNKRQLASYAGFDVQEKQSGTSVKGKTRISKKGNKNLRKAMHFPALTVIRHDERFKAIFARLVSRHGIKMKAAVAVQRKLLEMCYTIFKSRTPYNKNYLQKLQVCSGKHEIQTA

SEQ ID NO: 400742 - protein, 361 aa, unidentified
MRAVQPRVIVAVDPHKRMNAVNVVDERAEVLAREVFPNTSEGYRQLLCFARQWRQRRWAVEGCGGVGRHLAQRLVAQHETVVDVSSRRSSLVRAFATTSGRKTDDIDAYSVALAALHTPGLQEVTVDGHHATLRLLAHRRKELVAMRTQAVCRLHRELLVMLPGGAPKRLSAKRAKTLLGGIRPRDEVGRVRKALALDQLADLVRIDARIKDINRQLRDAVKATSTGLPELYGVGVVTTALVLGEVKDIARFKDRHHFASYNGSAPVLRGSGGEAKACVNLSGNRQLNHALHIAAMAQIRQPESEGGIYYRRKLAEGKSVKEAIRCLKRRISDAIYRQLLLDAEAAKADPGGQMGTTTKPA

SEQ ID NO: 400743 - protein, 350 aa, unidentified
MIIIGCDYHPGVQQIAWVDTDTGEFKETRLQHREQAEQFYRELAMRGVQVRLGMEASGQARWFERLLAELQMELWIGDAAEIRAKRVRKKKTDREDARHILRLLMEDRFPRIWVPSWENRDVRQLLWHRHRMVQMRTRIMNQLQAVALNEGLRCKKRLWREKGRQQLESFPLAAWGSRRRRDLLELLDRLNPTIAELTQAIEAEVEKYPAAQRLMTHPGVGALTALAFVLIIGEEKRFQCGKQIAAYLGLVPEEKSSGESRRLGHISKQGSGLMRFLLVEAAQVTVRSNQEWRSKYFHLSMRRGRKIANVAMARRLAVRLYWMWRKQWDYEQWKKFGPHAGQPGMSDGVR

SEQ ID NO: 400744 - protein, 333 aa, unidentified
MATTTPSHLGIDISKETFDAVLVQEGHSTSFQASNNRIGHEKLSKWLKKHARGVVHVCLEATGRYGDELAAFLHQENFTVSVVNPRRIAAYAASQLRRNKTDRLDAAVIADFCRTQNPVPWQPPPPTVRDLQMMTRHLEALLDMRTEERNRLQSGVTAPVVVAAIEQHITFLDTQIADLERQIAGHLDQHPDLKQQRDLLVSIPGIGDTTAAKLIAEIKDIDRFEDATQLAAYAGLCPSRRNSGTSVRHKPKLSKIGNAVLRKALYFPAMSAKSHNPIVRDFCQRLTDHNKPKLVVIAAAMRKLLHIVFGVLKHRKPFDPHCLKPVVQAPAAT

SEQ ID NO: 400745 - protein, 405 aa, unidentified
MEVIIERVCGMDVHKDNITACIMTPEGKEIQTFSTKTIFLIKLMDWIKLHGCTHVAMESTGVYWKPIVNLVEAEDLEVFVVNAQHMKAVPGRKTDVKDAEWIAQLLRHGLLTASFIPDREQRELRELVRYRRSIIEERSRQLNRIQKVLEGANIKLGSVVSDIMGVSAKEMLYAIADGEEDPTKLASMARRSLKRKKDELELALRGYVNPHQRMMLKTILTHIDFLTEQIEKLDSEVTQRVSSYQEDIERLDSIPGIATRMAEQILAEIGTNLENQFGSAPRLCSWAALVPGHNESAGKRKSTKSKKGNKYLKAALTEAAHSVGASKNYLGAMYRRTAARKGRKRAGIVVAHAMLRIAYYLLTRKEMYRDLGEDYYDKQKEVSMVRYSVRRLEKLGYSVSIEEVS

SEQ ID NO: 400746 - protein, 333 aa, unidentified
MNKITLIGIDTAKAVFHLVGVDGHGHYTWRKQLSRRRLLSSLAQVECCEVALEACGASHHWARSIQALGHKVRLIAPQHVKPYRRGQKNDYRDAEAIISAALSPGMHFVGVKRVEQQAEQALHRVRSRLMSHRNAAANALRGLLGEYGVVFGSGFKPLREGARCFAETEEAAALGLVELVNDVLEEISVLQQRMDHYEHLIEQRVQADETSRRLREELSGVGKLSASALRVKVADVHDYPSGRHFAAYLGLAPGHSGTGGKVHIGHIKRGHDRYLRQLLIHGARSALCHLGDKQDPQSRWLRGLLERRGFNIASVALAHKNARQAWAIMAREQ

SEQ ID NO: 400747 - protein, 413 aa, unidentified
MPQKTDYVYVGMDIHKETHTAVLMTYMEERLGKIKITNNIAGYRRLQDYVEKYRRNLIPIYGLEDVSHYGRDLAIYLLDQDYTVKEVNSALSFMERNSYATVKKSDEWDAQCISAVLSRRSETLPDANPQDYYWTMKQLVGRRDALVKNTASLIQQFHEQIQKQYPGYKQFFHDIECRTSLAFFERYPSAGHLQGVTVEELGAFLREKSHNTCSDKRAELILNLVEQEQTKEREYQSGRDLILQSISRQIYFNQQEMKQLERMQGELLEELGYHLETIPGISTVTASALVAHIGDIKRFKNADKLANYAGVAPICHSSAGKGKDLQNKSLGNRNLYNVLYLLAMQQIQINRDGKARNPLLRAYFECKVSHGKTKIQAMICIMRRLVSIIYSMMKNRTPYRMPEIEESKDQVIS

SEQ ID NO: 400748 - protein, 387 aa, unidentified
MTVPAQVFKIIPRHYDIFGGLDVAKKNMAVTFTDHEALMRSLRLPYSSAHLLHYVRKHFPDRRVAFVYEAGPTGFGLHDELVTAGYRCLVVAPSMVPTAPGDKVKTNRLDSRKLSVQLRGGELRSIHVPAPRYRELRHLVQLRDTQVGQLRATKCRIKSLLLCEGLAFPPAPESSQWSARVLSELLELPCSEAVRFELDQLIGTLHFHFNSAAAAQKQIRYFCQNDPELRQSIRLLASLPGIGVIVATHLVARLGDWREISNVRQIAAFLGIVSSEHSTGEKENRGRITRAGDSRLRNKLIQSAWTAIRKDAELRAFYLRIYHRHPKKIAARKAIVAVARKLTTRIYAVLKEQRPYVLRPENLPAPLTAEETVGPRGRLVGPQNEQP

SEQ ID NO: 400749 - protein, 335 aa, unidentified
MAEVINQFWVGIDVAKAKFDAAVFPDGMQPERWRQLETKSFASDKKGVAAFVRWIQTLGGCCAGMCAESTGIYSADLAEALHEKAPDLPLLAIVNPARVKATAKTFGTKDKSDSVDARVIAAFAAWHRPKPTPLRSPEWQNLRSLFLARESLLADAVAYEQRAQVSRDKDCIASHRRTAKRLYAEAEFFDKKIEAAIANEPTFAKHDKLLRSIPGIGPVISCAILALFGDLTKWTRGEATSAAGLFPRKCESGTSVRGKPCMSKGGGGLLRKKLYMGAIRLLTKDRGFNRSVLRLREQNRPKMVCLGAAMRKLLLVARAVLVSGKPYDANHAAPA

SEQ ID NO: 400750 - protein, 349 aa, unidentified
MTMLADRIDAVIGVDTHTDTHTAAACDPRGGVLAEITVDSDEAGFGQLLDFVLKHAPGPRLAWAVEGTGSYGAGLAEALREVDQEVIEAPRPKRERGRDKNDAADAIKMARAVLGLARHAQPRRGQVRETMRLITLSRSADVKARTRLTNQVKAVLVTAPSALRDRFRGQGTAAQLTLARRLRGPRDGDLRTQTCVQMLTKLAAQISALDKSITAAERQLDDLTGTFAQPLRDLYGVGPVSAAQLLITWSHPGRFRSEAAFAAIAGTSPLEASSGRTVRHRLNRGGDRQLNAALHRVLLTRRRHNHDETRAYIDRRTAEGRTSREIERCLKRALARRLHRLLETMPALP

SEQ ID NO: 400751 - protein, 363 aa, unidentified
MGQIIAKAIEIPVVTVGMDVGDRYSYLCVLNESGAVLEEGRVPTTPDALRARFGKTDRVRIVIEAGTHSPWISRLLADCGHEVIVANARRVRLIYESDSKNDRGDAVALARLGRLDPALLSPIQHRGEAAQRDLALIRARDALVRTRTLLVNHVRGAVKSVGGRLPSCSTHSFVRQVREAIPEAVQEALAPVLATIESISREIHVFDKRVEELAKAEYPETALLRAVPGVGALTALCYVLTIEDPDRFANSRKVGAYLGLRPRLDKSGMSAPALRITKAGDVMLRHLLAGSAQYILGPFGPDTDLRRWGLKLAATGGKNAKKRAVVAVARKLAVLLHRLWSTGEVYEPLHRAMRIQAAEMTAV

SEQ ID NO: 400752 - protein, 414 aa, unidentified
MSDVNTTQHTAAALVAIDIAKRNHDVAILWPNGKTATMKIANSKDGFQRLMEVVQRYGDPVHVAFEPTADYHRNLAYWLQNAGATCFLVSSLMSARARELLFKTWDKNDRKDAQVILYLMRQNMMKPFYDPLVEGTMDIQELSNTYHQISLARTRCQHSLINHYLTLYFPEMERFYHASRSEWFCRFLCKFPTPQSITRYKIATFVKRAWVIVGRKVAKQRFLEEVHETACRSIGLPVELQGQAVKTFRIQLQRIIDLNQLRHQLEKTSENILNAREDYQQLRSVPGVGPICAMMIIAESGDLNRFGHYRQYLNFCGFNLCSSQSGQRQSKHKISKRGNSRLRYAYWLAATIAIRQRENSFREKYERHIKSSPNNPDLKRKAVVAIACKLARVCHSLVKQNTPYRGYYEFNHGT

SEQ ID NO: 400753 - protein, 379 aa, unidentified
MDHAITGTPAETILHGALELSKNSWLLALQLPDRAQPSLYSIRGGDTEGLMAKLMAARDRWAKVSGKAPSIVLCYEAGYDAFWLARFLKARGIECVVVDAASMQVNRRARRAKTDRIDVGMLLRALIAWGQGDRHVWSVVRVPSVDDEDLRRSHRERDRLVRERTAHINRIKGLLFGQGIRGINVKSKYKTLQIDKLVTGDGRPLPLRLASEITREIARLALIQEQIATLERERDQAPTPCKATEKKRVQLMSLTGIGPAIAAVMTREVYYRQFDNRRQVAGFLGLATSPHDSGDVERSQGISRAGRGQVRGTIIQAAWLWLKHQPKSAITRWFVQRTAGQSGRIRRIMIVAVARKLAIALWRFLEQGLVPQGAMLANR

SEQ ID NO: 400754 - protein, 342 aa, unidentified
MDITTIGLDLAKNVFQIHCIDEKGEVIIRRRLRRAQVVAFFNGLKPCLIGMEACATAHFWARELVTLGHEVKIIPPSYVKAYVRRGKNDAVDAEAICEAVGRPNMRFVPIKSEEQQAALMLHKARELLMRQQIMLVNALRAHMAELGMIAPQGRGKVKDLIVVIEDGEDESIPALAKAALKPLVAQLHACEETTNSLDKEIMAWHRNNEASRRLATIPGIGFLTASAIAASVPDPSFFRSGREFSAWLGLVPQQNSSGGREQLGRISKQGNRYIRRLLVTGATSMLRYARARTAPGADWVNRLLERRPARLVTVAMANKTARIAWALLAKRESYRAPGVVAS

SEQ ID NO: 400755 - protein, 420 aa, unidentified
MKVVYQTCCGIDVHKSFLVATIIKTTSGVEPSYHKKRFSTFNNSILQFKEWLIANKCRDVCMESTGKYWVPVFNLLENDINVTIANPKWVKAVKGNKDDAKDSKWIGELFRLGLVPGSYIPCKPIRILREFTRYRYKLTSCRSSEKNRYQNALTVCNVALDSVVSDIFGKSATSVIDYLIEQSDNSINHEEIASRLLRSLKKKSDSVIESIEGYQMTDSQKYRMRLIRAHMDYITSIINDIDTMLDSLITPYENAVMLLCTIPGVDRNSAITIISEIGTDMTQFSDSKRLCCWAGLTPGNNESAGKKKSVRITRAGVYLKPALVQVAHAAVKSDKSPYYKQKYERIRKRRGKKRAIIAIARMILTAIYQMLSAGEVWNPTDLYKIDMPEPLKEKQKEKAIKQAKKLLICEGIISESQLVS

SEQ ID NO: 400756 - protein, 339 aa, unidentified
MQQVTTVGLDIAKNLFQVHGADAQGRPVLKRRLAREKVLEFFANLPACLVGLEACAAAHHWARELAKLGHEVRLTPPQYVRPYVKTNKHDAADAEACCEAVTRPGMRFVPVKGEEQQSLLMLHRVREQLLKQRTATVNALRAHLAEFGIVAARRRTGLRALLAVVADQEDRRLPPLARELLQVLADHLRVLEERTAALDRRLVETARADAACARLAGVPGIGPVIATALVAAVADAKTFGSGRRLAAWLGLVPRQHSSGGKERLLGISKRGDAYLRRQLMHGARALVAVSKGREGGSWSWINGLPARRPFNVVVAAVANKLARVAWALLSRGEDYRAAA

SEQ ID NO: 400757 - protein, 345 aa, unidentified
MKNLNVLAIDLAKNNFQVCKLDTNNEVIYNKQVTRSKLIEILSKEKKALVAMESCGGTHYFARVAKEAEHEVKAMSAVKVKPFRQGQKTDANDALAIGIAARQPNVKSSRLLSVNEQCLQSMNAMRDLLVQQKVSVSNQLRACLLELGIPIAKSDNALVSKVPDILEDGELALPATFRCCIQVMFNQFRLIIRQIVRVEKQLKKAIKQDETCLRLQEIKGVGPIGSVLLKIYFSSIGHFKNGREASACAGVTPVQHSSGGKDKLGSISKVSTNKKLRSTLFQGALTVVCNLEKRECKTEKDVWLKGIIARRGKKVAAIALVNKTIRTAYALLKNNQCYQPKLLTA

SEQ ID NO: 400758 - protein, 361 aa, unidentified
MKCVQSNKLDFSGQNIYVGIDVHLKSWSVAILSEHSVLKRFSQSPEPEALHKYLVSNYPGANYFSVYEAGFCGFWIHEKLTDLGITNIVVNPADVPTMSKEKLRKTDAVDCNKLARELRSGSLEGIYVPKADVLEMRSLIRMRNLIVKDSTRAKNRIKSLLRFHGVEIPEEFTRCSIGCWSKRFLTWLHSLELSTEYGKKTLELHLEQFVRLRKMLLQETRAIREISRKAPFEKPIRLLTSVPGIGVTTAATLMVELDDIARFRNAEHLASFIGLVPMCHSSGESNGTGDITVRRHFMLRCLLVEAAWIAIRKDPAMTLAYTEYRKRMNPQKSIIKIARRLVNRIYYVLKYEKEYVPCVVK

SEQ ID NO: 400759 - protein, 335 aa, unidentified
MTSSKYIGMDVHKESISIAVMNSAGKIVMESVIETKASMILQFLDGLRGDLQVTFEEGTSAAWLYDLLKPHVTKLVVCDPRKNKSMREGNQNDKIDARRLAELLRLDHLTPVYHGEHGLRTLKELVRSYLTITKDLTRVKSRVKAIYRSWAIPCTGKQVYARCHREEWLEKITEPGVRRRAEFYYQQLDALRGLRQEVRRDLLAESKKHKAWKRLCEIPAIGSIRAAVLLGILQTPHRFRTKRPLWNYGGLAIEMHSSADHRSVDGQLQRSKKNVLVRGLNRNCNHDLKNLFKGAAVVASIKPGPFQEFYTALVAKGMRPEMARLTLARKIATIV

SEQ ID NO: 400760 - protein, 339 aa, unidentified
MKLYGGLDLHSNNSVINIIDEQGKVVFRKRIANDLDSVKAHLQQYADDLTGLVVESTYNWYWLVDGLMEAGYKLHLANTTAIQQYSGLKYGDDDSDAKWLAEMLRLKILPEGYIYPKEQRMVRDLLRKRGQLVQQSTKNLMSIQGLYDRHINTRISSNKIKQLTTEDIYRHIDDPNVCLTIESNLRVLNCIQEQIKIIEKSLSKQTKLRDEFINLITIDGIGLILGLTIMLETGDISRFAKVGQYASYARCVNGARYSNGKKKSKTNTKNGNKYLAWAFVEAANYAIRFNGTIKKYYQRKLAKSHVMIAKGAVAHKLARACYYILRDGVEFDVNKAFGS

SEQ ID NO: 400761 - protein, 441 aa, unidentified
MRRCIGLDVHREFAQVAIWERGQVGQAGQIATTPEALRLFADSLCEHDEVAIEATCNTYAIARLLEERVARVVVSNPQKTRAIAEAKVKTDKVDAAVLAELLAADYLPGVWLPDEETHALRRQVARRAHIVRQRTRLKNRVQSILHRNLVPRSPDADLFGRKGRAWLAEQPLPADERQAVEALLRQLDFHGEELKLIDADLAQTALARAEVKRLMTIPGVDATVALAIVGAVGDFGRFLSPGRLVSYLGLDPKVRQSGGQPASHGRISKQGRAHARGMLVEAAWVAAKTPGPLRAFYERVRARRGMQIAVVATARKLAVLCWHLIVKDEDYAYQRPSLTAQKLRALELRAGMPSRRGQRGSTHAYNLKEVRARERALSEQAERAYRQLVADWQAKAPTSGAGVAAANGARLSRPAVGPAARQDSTPTPALRSGVGHAHTEA

SEQ ID NO: 400762 - protein, 387 aa, unidentified
MPQPNDLSRSLVALDQDSTVIAVVEMSQSSWLVAGVLPGIERQPRKKLEPSAERLLGLLHRWRDEAVRAGKKITRIALAFEAGRDGFWLARWLSARGVEAHVIHPSSVAVSREHRRAKTDRLDTELLKRGFLGWLRGERGHCSMARVPSIAEEDAKRPNRERECLVGERTRIVNRMKGSLARLGIRNFKPTLRKAAERLATLQTPEGSPLPPNVSAELQRDMARLRFVISQIREIEEARQKRLEQEPETGSHAMVRRLARVVGVGIETADMLVHEVLSRPIRDRKAVARYAGLTGSPDESGAKRREQGLARAGNARVRRGMIQLAWRFLLFQKESALARWYRARTADSRVGTRKTMIVALARKLLIALWRFVTTGETLEGVILRPAG

SEQ ID NO: 400763 - protein, 305 aa, unidentified
MREEGINNMDFRGQDIWIGLDVHLRSWSVTVATEHVVCRTFSISHDSGLATPRAGENFAHTMYRYLVHHYPGGIYHSVYEAGFCGFSAHHELTREGIDNIVVNPADIPTSQKETVQKTDKKDSRKLALALRAGQLRGIYIPRSSTVDDRSLLRVRGGLVSDMRRYKNQVKSMLNFYGIKYHTEFGGGTNYFSKRFLEWVRGIELNQPTGMYAKDMLVNKVERHRQLLLDTTLRVRELACTDRYAIDFANLKTIPGVSLITSMALLTEIEDIARFGSTKKFIGFLGLHPTCHSSGETQARVYHIPV

SEQ ID NO: 400764 - protein, 354 aa, unidentified
MNTTQVFEKRKIAVAIVIDLAKDHCDVVAYNADNKICFTKSNWAYPQLMEWLANAQPAVVLMESCKGSMVRARDIADLGHDSRLVKGADVKALRNVTQKNDIRDADYIARLFYVPGTKYVFVKNQRQQSLQFLQNEYKSLQELRIRVGNQIHAGLEEFGCPGSKSKKFIQSRMMAHLEKNAELIPDEVMASFLRRRDMWLNLFEQEEQAKTRMEEIAMTDDDAKRIMTVPGVGAQTAVGMLVHIGGDIGRFKNSGQFAASIGLVPKQNSTGGNITLNGITKCGPKRLRANLVQCGQVILMYADKLKGNFGDWVRKLRDSGKKRGVIACAIAAKIAKIIYRLMKDKVDYTPVPSR

SEQ ID NO: 400765 - protein, 465 aa, unidentified
MTVGRKFWRNRKERKEWARRLQSEDPGLEVVHPQSAGIDVGNSAHYVAVRPNRDPEPVRRFECFTADLHRMADWLQSCGVKTVAMQSTGVYWIPLYEILEERGFEVHLVNARHTKNLPGRKSDVQESQWLLKLHTYGLLNNSFQPVSEIRVLRTYWRQRAEHVRGAATCIQRMQKALTQMNVQLANVISDISGLTGQAIVRAIVAGERDTQKLAALSHPRIQASQEEIAKSLEGNWRPELVFVLQQEVDMYDTYQKRIVECDQQLQKQLASLTSLTPPGTGQTQKAKSKPPAAKNAPRFDLSSELQRVTGVDLTRIDGIDVMIAQTLVSEVGLDMSRWKTESHFASWLGLCPDNRITGDKVVGRGTRRVVNRVATALRQAANTLIRSRSYLGAQYRRFRTKLGAPKAITAMAHRLARLVYRMLKYGQAYVDKGTEYYEERFRQQQIHSLRKRAAKLGLQLAEIHA

SEQ ID NO: 400766 - protein, 314 aa, unidentified
MSSLVFVGIDVSQARLDIAVRPGAPFSIAHTESALATLVEQLRALSPTLIVLEATGGMEIPLTSALATAGLPVVVVNPRQVRDFAKASGRLAKTDALDAQVLAQFAEVMRPQPRPFPDAEARALAALLTRRRQLVEMLTAEKNRLLSASSPIRKRVRTHIVWLERELEHTNTDLAEAIRQSPVWREKDELLQSVPGVGPVVTSTLLASLPELGMLTNKQIAALVGVAPLNRDSGTLRGRRTVWGGRAQVRAVLYMGALVAARFNPVIRAFYQRLCRGGKAKKVALTACMRKLLVILNTMIKHRTPWREVEAHHA

SEQ ID NO: 400767 - protein, 401 aa, unidentified
MLKYFIGIDVSSFKFNVCIINKNKEIRGTYRFKYSHLSFKTLLQIFSELGNKNQIIIGIESTGNYHINIFSFLMNKGFNVLLINPLIVKKFNQAITLRKSKTDKIDALTIAKFLIFNKDKLPQNPPPKTLKHLAREREKIAKEIAKIKNRIRQIVFNIFFEFGEKYNIFSKTSLLFLLNVPSARIARILGERKIKEIINKISKGKGNHTPIKPKSIMHIANNTISVEDKQKEIILKSLIRRLFYLKKEIEILSRELITEAINIWEKEIKIITSIKGVGIISAINFMAEIQDIKRFSSHKKLTAYAGIDPVIKESGKYKGKFKISKRGNPHIRRTLWNMCWGAVIYENTIGSFFRNKKEKGMKHKKAMIATCNKLLRIIFTLLNRQTTFNSNHPHSRYVYLT

SEQ ID NO: 400768 - protein, 465 aa, unidentified
MGKGSGSGMTRGDRRRNARRERLRALLPRDGAVVGIDLAEEKQALAVIEHDVRVLARKTVRVKAFGLGEALDWAVGQARAKGFDRVTVACEPTGPRWMQVQRLCAERGLPLVCIQPLISHIAREQQDYTTHKTDESDCVMIARLALELHCYIPEELDETWAHLRHLGRRRRQLITAQTASGQRIMDFLSVAWPAVTETCADPVESRTWLAALEVVTARCGADPGTLAAMGREGFTALTRGAVAGWGITRAHGPICARVFAALTDTEGAVTWSRRGLLRRVADELGDLKRTRAQLRQAGADMVAVLDELGLSRLAGIPGLTAVGAAAILAETGGPRRYDGSSSLVKHAGMSPSDNASGAFSGQAHISRRGRPGLRLTVWRAVWPMLQYNPVMAAKYQAMTRAADAAATDAGPRQGTAAQAAARARRAKARVACAASLLRWIYCMVVHDTSWDPAVASGAASQAEAA

SEQ ID NO: 400769 - protein, 397 aa, unidentified
MKYCLALDVSKGKSMVIFMSEYGEVLLGPKEYFHNDESLNQLHNEINKVSSHYTVIMESTSVYHKKPESFFKSKNQEVIITNPLLAALSKRTLRRTKTDKLDCEYLANTYFENNFTKQRDDNVIAQLQSQSRLIDSITKNISKTKNIFLMKLTLCFPSLELLFSKKSLYTNGMLEFISKNPHPDYLIRKQAKTIRKELSGGKTKGSGSYLNASLKIYKERNKLLPIVEKNSIECHVLSCYAKQLKQLQELYDEEKEIFIEYAKSFWMYDIYHSFAGIGELLSSYFVSELGDVTRFENEKKLIAFCGLDPTIIQSGKSINYKGPISKRGNKYVRKHLYQAILMILRYDGLVKQDSDITTYYKKKRSEGKHHYECVIACSTKLLRKIYYRSKDYKANKL

SEQ ID NO: 400770 - protein, 369 aa, unidentified
MEQVTTVGVDLAKKVFQVHGVDAAGVVVIRRSLRRRQVLAFFAKLPPCLVGIEACATAHYWGREITKLGHQVRLIPPAYAKAYVRRNKNDPADAAAICEAVSRPSMRFVTIKTETQQAAAGVHRVREMLIKQRTMLINTLRGLMAEFGIVVAERPRHVSELVAMLTDPADRRIPTPLHEGLSALVETLGGLERRIEIVDKQIVGWGRDNATCRHLITIPGYGPVLSSAMAAMAVTPAAFASARHFSASLGLVPRQDGTGGKVKLGPISKRGNGYLRRLLVNGAMAVLCSKRAKEDPWLVKLLESKPRKVAACALANKMARIGWAVMIRQQDFRRWRHDQLCPDRTQPGAMLAALKTAARTPAAVAFGQS

SEQ ID NO: 400771 - protein, 365 aa, unidentified
MTTRQHSTSSSVDPPVRGEVVLGVDTHGEVHVAAVVSSPGKVLGTESLPATAAGYRRLLVWARKRGTVRRAGVEGTGTFGAGLSRYLLAQQVEVYEVNRPDRSARRLLGKSDSLDAQAAARAVLSGRTRARAKSGDGPVHSARIFKLAKDSAVKARTQAINQLKAVLVIADPVLREQLSSLGNAELFRTCARLAPHDGGGDEDPVAQATHMTLRMLAERIEQLTAQIDELNQRLTRLVERHAPQLLTPVGIGPDSAVTLLITMGDNPDRLNTEASFAALCGVSPIEYSSGRRSMRRLNYGGDRQANAALHRIVFTRLRHDPRTQAYYERRTQEGKTRREIVRCLKRYAAREVFNLVRPISRTPAL

SEQ ID NO: 400772 - protein, 348 aa, unidentified
MAVTIVKTRTITGGVDTHADVHVAAALDPVGGLLGVAEFPVTPAGYARLLGWLGGFGTVCLVGIEGTGSYGAGLARHVAAAGIRVVEVDRSDRQDRRRQGKSDPLDAVSAARAAQSGRARGAPKGRDGSVEAIRALMVAKRSARAERTQTINQARSLIVTGPDDLRIRFARHTVAALVAETASLRPRPGSTAGYATRIALRELGRRAQFLDGQLERLDELIVPLVTARAPGLLALYGVGPDTAALLLIAAGDHPARLRSEAAWAHLCAAAPIPASSGKRTRHRLNPGGDRQANHALWRIVITRMSSHPPTRAYVERRTAEGLSKTEIIRCLKRYVAREIYPRLRAAAD

SEQ ID NO: 400773 - protein, 405 aa, unidentified
MRLFLGDDWAEDHHDIEVMDQAGKVLARRRLPEGSAGMARLHALTGGLLGEDDDAEVLVGIETDHGPWVAALVAAGYRVFPVNPQQSARFRARHAVSGAKSDAGDAHVLADMVRTDSHQLREAAGDSPEAAGIKVLARTHKTMIWNRTRETQRLRHQLLEYYPAALEAFGDLDAPDTLELLARAPDPARARKLTRAQVSAAMKRAGRRDIHGKATAVLTALRSEQLSQPPVLAAAYAATVRSLTAVITTLNEQVRLLEEQVRDHFGRHPDAEIITSQPGMGPILGARVLAEFGDDPHRYADGKARRNYAATSPVTRASGKRKVVAARFVHNDRLVDALNAQAFSALTASPGARAFYDQQRAAGHGHNDALRRLANRLVGILHGCLKTRTPYDEDTAWGHRQQQAA

SEQ ID NO: 400774 - protein, 462 aa, unidentified
MKSKTPKSKKEKKISVDAGWETIHPHAAGIDIGSREHFVCVPPQSAANNVRSFGTFTADLEALADWLAQCAVTHVAMEATGVYWIPVFQILEERGFNVMLVNPRQTKNVAGRKSDVQDCQWIQRLHTYGLLQGSFRPADPYCVLRSYLRHRDELITARATQVQHMHKALQQMNVQLAQVLSDVAGVSGMAIIEGILDGERDPERLASRVDRRVRATPAQIQKALQGDYRREHLFVLEQAFSLYHVLEEKITACDEQIVRETVSLPDQVNVPPLPPRKEGRPARKDQMQGQDMRQMLNRKLGCDLTAIEGIGVQTALVVLTEVGANVDRFKTEKHFCSWLGLCPDNRISGGQVMSSRTRKVINRLSDALRMAAVTLERSQTALGAFYRRMKARLGAAEATTAMAHKLARLIYRLIKHGDTYVRQGMEAYEAKFKEHKFHALKKAASHLGFDLVARQEVAAPVS

SEQ ID NO: 400775 - protein, 353 aa, unidentified
MTNGTRWVGIDLHRRRSQIAIIDEHGELTLSRRIVNDPETFKELLGDPDGTHVALEATYGWEWLADLLEEAGYEVHLAHPLRVRAIAAARVKTDAVDAPTLAHLLRTGLLPEAYIAPPELRDLRDLLRHRATLVHLRTSIKNRVHALLARQGVLPDHSDLFGTAGREFLAAVELPEGSRRRLDSLLSLIGDFDREITTTTREIDQRAKTDERVKLLCQIRGIGRYTAMLIIAEVGEVKRFPTARHLCAWAGLTPTVRSSDGKARLGHISHQGSTILRWALTEAAQHTPTGGGPLRAQYERIAKRRGRKVAKVAVARQILTLCYYGLRDGEIRCLKHQPAIDQHHDNHELAEAA

SEQ ID NO: 400776 - protein, 359 aa, unidentified
MKTDLDNSTSFFENILLFIGIDVHKSKWVVTIRTYDLELKTFSMHPSAEELEKFLLKNYPGADYRIVYECCFSGFWIYDYFAEKGYKIIVTPTNRIYKDGSTIKTDKIDSRKLAFQLSRELLREVLVPKKRVREYKYIFRIYDKQKMRQGQILRQIKAFLEQKNHPLKWSRWNKGLLEKLKEIKFEDKLFDLKIGNLLKEYEYIVEQIKDSEKIIGKIKEDEELGRRISIIEKINGIGIISAVRMSVYLFDRKDRFESSEKLNHYLGLTPSERSSGDKIIRGRSGMCGNRQLRSIIIQLAWMTVRKDGSLLDKFDRVYKKSGSKQKAIVAAARKLMTKIYAVIQKEEEYKINIRTGKAA

SEQ ID NO: 400777 - protein, 381 aa, unidentified
MPSMKLRRDDVIVGVDTHKDNHVAVAIDGLGGRLGDIVVPTTIAGFEELLAFCLAYVGSAGRLIGFGVEGTGSYGIGLARYLRNHGHDVHEIARPARAAERRLAGKNDTIDAEHAARQLLAGHGLSTPKTADGAVETIRLVKIAYDGAVQARTTAMITLKATLATGSEALRAELEKLTDHKLILACAELEGPTPLPPVRRGAPAVVVPGEPDVAMRHVLSSMAKRWLALHEEAKAHAASLKALTAAAAPQLVEAVGVGYDTAAQMLITAGDNANRIRSEAAFAKMCGACPIPAGSGKTNRRHRLYRGGNRQANAALYRVVIVRMRWHQPTIDYVARRTAEGMSKREIIRCLKRYLARELFRLLPAPEAIANPVDEGLEIAA

SEQ ID NO: 400778 - protein, 313 aa, unidentified
MIITLRCIGIDVSKRHLDIFDEGIGVSERVANAPHAITKLVARWRCDVLVVFEATGVYDLELREALRAAGIRFARINPARARDFARASGQLAKTDPIDARMLAAFARAMRPAPEQVSTPARNALARLAKRRDQLVHMRAQEKNRRSEAGDRAMVERIGRLIEVLDREIAEIEADISALIKAEPEISHDAQLIRSLPGVGPVACMQLIAQMPEIGHVGPKQAAALAGLAPFNVDSGAYRGKRKIGGGRKRVRNALYMAALNAVRRADRFKAFYARLRQAGKPAKLALIAVARKLLTILNAMMRDRKAYIPAQQT

SEQ ID NO: 400779 - protein, 342 aa, unidentified
MEHYAGIDVSLECSSVCVVDASGRIVREAKVASEPEALIAWFRSLGFGLERIGLEAGPLSQWLFAKMKAAGLTVELLETRHVRDAFKAMPVKSDRNDARGIAQLMRLGWFRPVHCKSLSAQETRATLTARKLVQSKLLDVENSLRGILRGFGLKVGKPPKRKFAGRINELVAGHPHLQQIADALLAVREALRKEFAAFEKQIRSMVRADQQARLLTSVPAVGPIVALTYASAIDDPGRFKSSKQVGAHFGLTPKKHQSGETDYTGRISKLGDSAVRTALYEAAHIMLIKPVKGCTQLKSWAMRIARRAGTSKAKVALARRLAVIMHRMLVDQAPFNAAAAAA

SEQ ID NO: 400780 - protein, 424 aa, unidentified
MDEVVEFCAGLDVHRDTVVATVRFPQGRHRGSETKTFGTDTAELVALGDWLISHRVTRVGLESTGVYWKPVFYLLEDRIAQLWLLNAQHLKNVPGRKTDVVDSAWIAQLVEHGLVRPSFVPSPPIRELRDFTRHRRVLSEERTRMVQRLEKVLQDAGIKLTSVASTVLSKSSRAMLEAMLAGESDPVVLAELAKGRMRSKIPALTDALRGSFRVCHHGVLVRQILAHVDFLDAQLAEIDEQITTRVATFEPIIERVQTIPGVARKCAIGMIAEIGVDMSVFATPAHLASWAGICPGNNASGGKARSGRTRHGPVALKTVLTEAAQAAARTKNTYLGARYHAIRGRRGTFKAVGAIRHDILIAYWHIVTADVGYQDLGVDWVARRHSREHQIARLAKQIEKLGAAVEITMPAPDPATSRSEVPDL

SEQ ID NO: 400781 - protein, 374 aa, unidentified
MADYSEVFVGIDTSKLHNAVAIAEGERNGEVRYLGAIENTAAAVSKLVKKLAAQHQRLTFCYEAGPTGYGLYRQIKALGHDCVVVAPSLIPKKPGDRVKTNRRDALNLAKLLRAGELTAVWVPDERHEAMRDLVRAREAAVDDLKSKRQQVLSLLLRLGRHFTGKRTWTRAHMNWLVSQKLAHREQRIAFEEMLLAVRQAQERVTRLEHAIAAAVSDWSLAEVVTALMAVRGLDLISATIFLAEIGDLSRFASPRQLMAYLGLVPGEESTGDRVWRGGITKAGNHRARRILVECSWSYRHPPRVGKKKLAKVEAASPAVQEIAWKAQARLTARYRALARRGKRPTLVVTAIARELSGFIWAVSQAVGAPKTPAV

SEQ ID NO: 400782 - protein, 344 aa, unidentified
MQDINRVAIDLAKNVFQVCALSPHNKVLFNKKLSRKKFTEFMVQLPVSTVYMEACYSSHYWGRTLTEMGHTVHLIPAQHVTPFVRGNKNDNNDALAIAEAANRPGIRFVPIKTVQQQEIMAMHRIRTRLVKSRTQVSNQARGLLSDFGITFSLGTKAFLDAMTALQDNEQLSLPFRNLMLDMSTEFHEISARITTIEDILKSYIKQTNHCTIVSSVPGIGVINASAIVASIDKGQAFNNPREFAVWLGLTPRQYASGEKSRNGGITKRGDRYLRTQLIHAARAAKKWSRKRDDQLSLWIKQLEARVGVHKSTVAVAHKLARIIWVLLQKQQTFVAQYPQKIVSM

SEQ ID NO: 400783 - protein, 352 aa, unidentified
MSATAAQNAIAVVGIDIGKNSFHIVALDDRGAIVLRQKWSRSQVEARFANMPPCLIGMEACVGAHHLSRKLKAFGHDARLMPAKYVRPYSKGQKNDFRDAEAIAEAVQRPTMKFVATKTAEQLDLQALHRVRERLVSQRTGIINQIRAFLLERGIAVRQGLRYLRAELPRLLAAPPDVLSPRMVGVIEGLAEDWRRLDERIEHLSGEITALAHQDAGCKRLVSVPGIGPIISSAMVAAIGTGDAFSKGRDFAAWLGLVPKQISTGDRTILGKISKRGNRYLRVLFVQAAWVVLIKPQSWERHGLKPWIEAAKKRLHRNVLAIALANKLARIAWSVLARGRSFEARPVMASAA

SEQ ID NO: 400784 - protein, 359 aa, unidentified
MSVYVGIDVHRKRSQVAVLDQAGAVCANRNVVNGVETVLRVIGDLPAGTPVAFEAAFGWGWLLDLLEEHGFAPHLVHPLRCKAIASARLKNDKVDAAILAQLLRADLLPEAWIAPPSVRGLRALLRHRAQLVRLRTLLRNRIHAVLADQGWDRPAGYWRGPGRAWLAELPLPAAAREVVEDCLGLIDVVQVPIARLDDEVADYAKAEPRVTVLTGLPGVGVLTALFILAELGDITRFGSARKLAAWAGLTPTVRGSDRTVRHGHISKQGSAWLRWILCEAAQTAKRSPEFAATYQAIARRRGKKIATTAIARKLLTRAYHLLADFEEHATTDLCGPAARLDERNEAGVANPPGELVSTA

SEQ ID NO: 400785 - protein, 455 aa, unidentified
MSVAILAAGERDEHGEETDESPSTPTPTKGSRTAKQEEGEATMQVVYQRCAGLDVHKKTVVACVLTSTAKGTATQEVRTFGTMTRDLEALGAWLRAAQVEQVALESTGVYWWPVYNLLEEAGLPVTLVNPQHTKQVPGRKTDVGDAAWLADLLRHGLVRASFIPPAEIRALRELTRYRATQVRARAKEVNHLLKTLESANLKLASVATDPVGVSGRAMLAAIAAGEDDPEALAQMAKAGLRRKLDELEQAFVGRVKPHHRVLIRASLDLLRFLERSIEQLDAEVARALDPFAAQVAALDQIPGIDRVAAAIIIAEIGTDMERFPSAGHLASWAGVCPGNKQSGGKRLSSATTKGNVWLRRILGEVAWAAIHDRHSVFRARYYRLKPRLGAQQALVAIMHQLLKVIYHLLKTGEAYHELGAEYYEPADPQRAARRLTKRLERLGYTVTIAPKPEAA

SEQ ID NO: 400786 - protein, 342 aa, unidentified
MEYYAGIDVSLECSSVCVVDASGKIIREGKVASEPDALINWLKSRGYELIRVGLEAGPLSQWLFAAMREAGLAVELLETRHVRKAFEAMPVKSDRNDARGIAQLMRLGWFRPVHCKSMGAQEVRAVLTARKLIQTKLQDVENSLRGILRGFGLKVGKTTDRSFTGRIQELVKGQPSLEAIGEALLSVRAGLLREFNAFEKRVRAMARLNARTRLLMSTPAVGPIVALTYASAIDDPARFKSSKQTGPHFGLTPKRYQSGETDYSGRISKVGDASVREALYQAAHVMLTKPVKGCPQLKSWAMRIARRAGMSKAKVALARKLAVILHRMLANGTPFNAAAAAA

SEQ ID NO: 400787 - protein, 335 aa, unidentified
MTLPVGGIDPHQDTFTVGIVDAHDVRQVGVEGSAKWGAHVAVALAAAGFDAREVPASRSAAQRRSRRLEKTDAVDAVASARALLAEPTLGPVQALEAYDPAVAEIEAVLEHRRTLVAARTLMLHHVGDQISKLPTEVRDQLTTTGKIESRLRRLEGVDPDTATTPAGRHRLAWLLAFIEQDRAARSEIRRLERLIDELLDQHGTTLRDEPGIGPIAAATLLCEVGDPARFDRESKFARWCGTGAVALSSGEGNGDPVKHRLDFRGNRRINSVLHIASVTQQRSQPEAIAYLAKKAGEGKTRREARRAHKRQLANRVIRRMWRDETARKQPLALAA

SEQ ID NO: 400788 - protein, 315 aa, unidentified
MSDVPCFVGIDVAKAQLDIALRPSGERWAVPNEASGVMTLVDRVQALHPTLIVLEATGGLERAVTSALATAGLPVVVVHPRQGRDFARATGQLAKTDALDARALAHFADVIRPTPRPLPDAQTQELRALLGRRQPLIGMRTAEQNRLAGTNARLTKDIAAHITWLNAAIATLDDDLETILRASPLWRENDDLLQSAKGIGPVCAHTLLLELPELGTLTRQQIAALVGVAPLNCDSGTLRGRRMIWGGRAHVRTVLYMGTLVATRFNPQIKVFYERLLAAGKVKKVALTACMHKLLTILNAMLKHRTPWQPQEVQS

SEQ ID NO: 400789 - protein, 310 aa, unidentified
MAKLTEPFILGVDVSKEQLQVFDWVNQQRFSLDNDPKAIRRFLRSLHGPVRLAVEPTSNYHLLLVDEAHALGLEVFLVNGRQLRHYREAVNKRNKTDPDDAWLLARYLAHEAEQLRPYRPLDGKARELWALLKRRALIVISQTQLRQSLADVKVARQGLWREFAHLLRGIDQQLLVLIRELGWWAAYERCLSIPGVGPLNAAALVAAFHRGAFANADAFIAFIGLDVRLRQSGVFKGKRKLTKRGEAEIRRLLFCATQGACRHAPFAAYLQRQLDKGLSKTAARVVLGRKLARIAFALITQQQSFNPSTA

SEQ ID NO: 400790 - protein, 348 aa, unidentified
MAYFVGLDVSVKETSVCVVDDSGKVISEQKVLTEPDNIITLLTSIGETYARIGIEAGPLSQWLVNALIAADLPVICVETRHMKALLTAQQINKTDRNDARGIAQMMRVGLFKPVHVTTLVAQEQRMLLTSRKLLQRKLLDVESDLRGTLRNFGLKVGAVSGGRYDARVRELVEGFPGLAAIVEPLLTVRRVMCQQFAVLHKMLLDTVRDDPVCRRLMTAPGVGAVVALTYRATIDQPQRFVHSRAVGAHVGLTPKRYQSGEIDYDGGVSKCGDALLRTMLYEAAQTMLTRAKKWSWLKAWGMRVAQRRGIRRAIVAVARRLAVVLHRMWVDGTEFRWSKDSATVLNAA

SEQ ID NO: 400791 - protein, 346 aa, unidentified
MMIIGCDYHPSWQQICWVDTATGETGEQKLEHASGEAARFYRQLRAPALIGMESTGNCQWFVEMATETGHDVWIGDAAKIRASDSRQQKHDRRDAALILKLLLEGRFPRIWIPSGEEKDLRQLLIHRYKLVRIHAQVKNELQHLAMNQGVTKKRKLWSKTGEKVLRELPLKPWASQKRKDLFRIREMLNAQIDVLDQAVVEVAEKNEKARLLMTQPGVGPITSMAFVLTMGDVNRFQRGKQVASYLGLIPREYSSGGHQRFGSISKQGNRFMRMLLVEAAQCAVRCDPGMRSEYLHRCHRKAKGVAKVAAARKLAIRLYWMLRTNTGYPGVVRVESSSRVPLVSAS

SEQ ID NO: 400792 - protein, 479 aa, unidentified
MTPSKDAFPEPCPPVPTIPEPSVLRPSFSLPLYNPHAAGIDIGEAEHWVAVPPDRAPQPVRRFGTFTADLDALADWLLDCGITTVAMESTGVYWIPVFELLEARGLQVFLIDPRQAQRAPGRPKTDRLDCQWLQRLHAYGLLAAAFRPDDQVCVLRSYLRHRQMLLTYGAHHIQHMHKALQQMNLKLSQVVSDLTGATGMAILKAIIAGERDPLTLAKLRNPHCQHREDEIAKALQGTWRAEHLFALQQAVELYQFYHQQLTVCDQHLQTHLGTFADQSAGQPLPPKPRRHKKANEPHFDARTPLYRLAGVDLTTIEGIEEGTALVILAEIGTDMSRWPSVKHFCSWLGLAPQHKISGGKVLSRHVRPGAHRVAVALRLAARTVHHARTALGAFYRRMRSRLGAPKAITATAHKLARLVYSLLKHGSAYVKQGLDDYESQYRERKVKAMARQAKALGYTLVALGTPEVQRLAAVAAPTS

SEQ ID NO: 400793 - protein, 387 aa, unidentified
MSQPFDASRSLTSLEQDSTIIAVIEMSQAKWLVAAVVPGVERQPLKRLDADEAALLKLLHRWRNEAGQAGREIKRIVVAYEAGRDGFWLARWLRVRGVEAYVIHPASIAVSREHRRAKTDRLDTELLLRAFLGWLRGEKRHCSMVAIPTVEEEDARRPNRERGNLVTEQTRIVNQIKAILTRFGIRTFRPTLRKAEEHLEGLRTAEGLPLLENTRAELRRHLARLHVVREQIRAIEQSRLGKLAMTSEKGRHAMVRLIARVVGVGVETADMLVNEVFSRHLRDRKAVARYAGLTGSPDESGKRRRERGLARAGNARVRCGMIQLAWRFLRFQKDSALTQWFQARTADGRGSTRKTMIVALARKLLIALWRLVTMGELSDGIVLRPAS

SEQ ID NO: 400794 - protein, 442 aa, unidentified
MAVEFVGGPGQAGFMGRVRDLDPARVLLVPVDVGKWEAMAMVTDLRGEIVTAPFRFAMTASGVTVLAQRTATAVADRSAVLCRVGVESAGHYHRPLVTRLVEDAVEVVELNPAAVKHARAQQLRARQKTDERDLAAIADLLSRGAGRSPQARDAALIEQAAWVGHRRRKTETYRRLRQQIHAQLDLVFPGLSACFGDMFETRSGRMILAELCSPDRVGRLGPTRLARYAANRGIRMTRAKCDLVVAAARDALRLPVAHRAAAEAILAADVALLTSLEIEIAKCDARLAELLPATPANVLVSVPGIGVIRASAYSAALGDHTRFRNADAAYAFAGLTPASYESAGRSRPGLGITKAGSVTLRAAILELGLGMGKHQPDLIAYRAQLLARRKPPKVAAVAVAHRAHRIAFALLRDGAIFDPGHPAPAIAGRPVTTSPEVPPETT

SEQ ID NO: 400795 - protein, 345 aa, unidentified
MPESFYVGLDLGSSHCYQTVINTDGALRLARSIPTSEHHLRSAFANLNGDVHVHLEASELSNWVASIIQPLVAEVIVSHPRSLAWIGKDSQKDDKVDAKKLAELLRLGSVHQVFYQSDNSRQNFKYLVTHYEQLSREQARFKSKIKARLRTLGIIRKDSHLFSTLGQSAVLDEIESVSIKQMLAQSFAVLNQMLASFDEARATMIEFSKQFREVELLQTAPGVGIITACRFVAYIQTPHRFSNKRKLWRFCRLGVTRRESNGKRLAHPKLDSAGVGSLKDVSRKVFEAARRTKSANSFKQFYEMSLANTKNAVHARLSTQRKILATLRAMWIGNQPFRNDLTEID

SEQ ID NO: 400796 - protein, 426 aa, unidentified
MEQTEEPVELVARVCALDIGKATVTACVRVPHEDNPGRRRQEVREYATLARGLLELADWLRSQSVQLVAMEATSSYWKPAFYLLEAEGFTCWLLNAKHVKNVPGRPKTDRLDAVWLAKVVERGMCRPSLVHPKPIRRLRDLTRYRRSLTRERTREKQRLEQLLEDAQIKLSSVISDIFGVSGRQMLQALIAGQRDPKALAQLARASMRSKIAVLEEALTGHFDDHHGFLCQLMLERIDAATAKIDQVTAQIDRVIGPFAGHAQRLDEITGVGVVAAQELIAEIGVEMGRFPTAAHLVSWAKFAPQPRQSAGKSKAATTGKGNPWLAATLGEIVAAVARTDTFLGERYRRLARRRGKKRAIVAVGNSILTIIWHLLADPQAHYQDLGPDFYWSKVNQRRRQRDLVRQLEYLTGKKVVLQPPPEQPAA

SEQ ID NO: 400797 - protein, 355 aa, unidentified
MNQEKYIGMDVHDATISAAVKNAQGKLLMECVLETKAATILEFIQGLRGTLALTFEEGTLAAWLHDLLKPHVSRLVVCDPRKNALMRDGNQNDRADARNLAELLRTNQVHAVYHGKQGIRALRELGRSYSTLTKDSTRVMNRIKSVYRSWAIPCAGTSVYSRRHRSEWLVKLVEPGVRIRAEHLYQQLDSLEPVRQAARRELLRESRKHAAVKLLRQIPAIGPIRSALLVAILQTPHRFRTKRQLWAYSGFAVQTYDSGEYRVVRGKLQRNRERITVRGLNRNHNHDLKNLLKGTAISAIERPGPLQDFYAALVEKGMRPSMARLTLARKIAAITLTMWKKGVSFDPKQLQRQAA

SEQ ID NO: 400798 - protein, 346 aa, unidentified
MNFYKEQHKFYCGIDLHARKMYLCILDEKGEIKLHKNMDTDREAFLKMIEPYREDIVVAVECMFAWYWIADLCQKEGISFVLGHALYMKAIHGGKAKNDKIDSHKIAVLLRGGMIPQSYVYPQKMRATRDLMRRRNHLMRKRAELFAHIQNTNSQYNLDETFGCIAVPSKRGTIIEKFSDPAVQKSMQADLEVISVYDTTITDLERAILKVAQFHDPVSYALLQSVYGIGRIGALTILYEIENVKRFPRVQDFVSYARLVKCSHESNGKKYGTGGNKIGNAHLKWAFSEAAVLFLRGNEPAKKYHERLVRKHGKAKALSILAHKLGRAVYFILKNKEAFDQETFLR

SEQ ID NO: 400799 - protein, 410 aa, unidentified
MDTLIERCGGLDVHKDTVVACVRVPARGGGREQSIQTFGTTTAQLLALRDWLVAQGVTRVGMESTGVYWKPVYYVLEDALECWLLNARHLRNVPGRKTDVADATWICQLVEHGLVRPSFVPPKPIRELRNLTRYRKAQIEERTREAQRLDKVLQDAGIKLSSVASDVLGVSGRAMLRALIAGTRDPETLAELARGTLRRKIPALRQALHGRFGPHHALLVGTILAKLEFLDEALGHLSAEIEQVIAPFAAEAALLRTIPGVDRRTAEAVVAEIGVDMSRFGAAGRLASWAGWCPGNNESAGRHGSGKTRKGSKWLHTYLTEAAKAAARTKGTYLGAQYARLRGRRGSARATVAVGHSILVAAYHILDRHEPYRELGPDYFRRRHSREHQTRRLVRQIEALGYHIRLEEVA

SEQ ID NO: 400800 - protein, 311 aa, unidentified
MNYVSTIGLDLAKHVFQVHGADMAGSPLFNRKLRRSEVLRFFEKLPPCLVGMEACGGAHYWAREIANLGHDVRLIPPAYVKPFVKRGKTDAADAEAISEAVIRKTMRFVPIKTAEQQADAMVLKTRALLVQQRTQSVNALRAHLAELGIIAASGLPSIAALMAIVREGEDTRLPAAARFALMAVADQIDSLTDQIDELERAIVTEAKRDEDMRRLTTIPGVGAITAATIKALVPDPGGFKSARHFAAWVGLTPRPHSSGGKERLGGISKMGNPELRVLLVLGATAVLRIARNDDRARPWLKALLAKQLPVG

SEQ ID NO: 400801 - protein, 289 aa, unidentified
MGSEKRRLANDGTGHRQLINWIKQMETNVQVICEPSGGYERMLIQALVGAQVKVSLVQANRVRQFARAAGILAKTDSIDAEVLCAFGQAMRPQTLSASKLQQEHLRELESQRRHLSRLLVMEQNRGARLGDSSVRTLNRSLTKQIQKQIERIDLLITEHIAGSQELSAKAHKLTAISGVGPRTAALLLAQMPELGQLNRREVAALVGVAPFNRDSGKWRGKRTIFGGRRHVRHGLYMAALVAARHNPILRAFYQRLRAAGKPAKLALTATMRKLLIVLNSALKPDPIYA

SEQ ID NO: 400802 - protein, 372 aa, unidentified
MQQKSKVFVGLDTSKLKISVAVAEDGRQGEIRFLGDIDNTPEAVRRLVNKLVSRHGELLFCYEAGPTGYGLQRQISALGHDCAVIAPSLIPKRPGERVKTNRRDALTLARLHRAGELTAIWVPDPGHEAVRELVRAREAAMEDLREKRQYLQSFLLRHGRIFSGHKPWTRAHARWLAELIFEHPAQYLVLGEYRQAIADAEARLERLTQQVAEVVSTWSMAPVVEAYQALRGVALLTAVTFVAEIGDVRRFESPRQLMAYLGLVPCESSTGERVRRGSITKAGNTRVRRVLIEGAWTYRFPARMSRVLQERQDGLPQVVRAIAWKAQVRLCARYRRLMAAGKRQTVVTTAIAREMAAFLWAIGREVQPRLAA

SEQ ID NO: 400803 - protein, 336 aa, unidentified
MQYVGMDVHLRTTTVCILDENGRRVKRMEVRGSWQKLLGELGRIQGVWQVCFEASCGYGWLYERLKVMAQKVTVAHPGQLRLIFRSKRKNDRVDAEKLAKLLYLDEVPSVYVPSVEVRSWRAMIEHCQKLLGERTRAKNGLRALLRTHAIVAARRVWTKKGVVWIRAQELPTLMDRLARDIPLERLESLGGMLRRVEEALEQIAETNAGVKQLMEIPGVGIRTAEAVMAYVDDPQRFHSVKAAGGYFGLVPCQDQSAGKNRLGHITHQGPATVRKLLTEASWQGIRRSPRIRAYFERVRQDNPERKKIALVATAHYLLRVMLAMLRTGEVWRAEAA

SEQ ID NO: 400804 - protein, 341 aa, unidentified
MAEVSTIGLDIAKLVFQAHGADASGRVVFRKKITRVKLIEFFASQRRCVVALEACGGAHYWGREIGKLGHTVRLIPPAYVKPFVKRQKNDAADAEAICEAAQRPSMRFVAVKDEAQQANGVVFRARDVLVRQRTQCINALRGHLTEYGWVVPKGTAHLPTLIGQIEDPNCSLPESARAIFRVLITTLTSLEENIAVLDIEISRRSKEDPVARRLMTIPGVGPITATAIAALAPPIETFASGRDFAAWLGLTPLQKSTGGKQRLGAISKMGERTIRRLLIIGASAVVSQACRRGAPAGSWLEQMLARKPRMLVMVALANKTARIVWALLAKGGVYTAPVGAA

SEQ ID NO: 400805 - protein, 349 aa, unidentified
MSGEAPRYYGSIPHTPAALRKLIKELGAAETLSFCYEAGPTGYETYRWITSMGAHCVVIAPSLIPKRPGDQVKTDRRDAEQLARLYRAGELTPVYVPEREDEALRELVRAREAAKEDAHRARQRILKFLLRHQIEPPATIKRRWTKKYRVWLGQLTFLYESMHVAFSEMLHALDEIEQRMGRLEKALVQQAATGSKASLIQALQSLRGIGLLTAITLAAEIGTFARFRSPAQLMAYLGLVPREYSTGLSTRRGSMTKAGNGRLRRTLVESAWSYRHRPAVKGDLAKRLDGMPADVQLLSWKAQERLHYKYRHLVFGKNKHKNVAVGAVARELIGFIWAVARTVEQPAAS

SEQ ID NO: 400806 - protein, 347 aa, unidentified
MKITTVGIDLAKNVFQIHGTDEHGHAMLKKQLKRDQVAAFFANLPVCLIGMEACGSAHHWARKLQAMGHTVRLMAPQFVKPYVKTNKNDAADAEAICEAVGRPNMRFVPIKSVEQQAVLAVHRARQSFVKARTAQANQIRGLLAEFGLIIPQGIGHVAKRVPELLEDASNELPGSFRVLMQRLLDQLKALDAQVDELESQIQAWHRASTLSSKLSQIPGIGPITATALVASVGDAKNFESGRQLSAWLGLVPRQHSSGGKSNLLSISKRGDTYLRTLLIHGARAVIYHSDRKASSGEECNWVCRVANRRNKNVAAVALANKNARIVWALLARDRNYEAGYLRLSERN

SEQ ID NO: 400807 - protein, 309 aa, unidentified
METEVGCDISMDWIDVCVLEPPRHFRVANKAKPVERFARELPPGSRIGMEATGTMHQLLADAMCAAGHTVYELNPRWVHRYAGGVGVRGKSDRADAMLIARYVHAEGAHLHPYRSPTPQQREIRTLLHRRAQVMKLKTASRQSLGHQANEVVQKFNQLVKDIDRRIATLLAADPQWKGLAAKLRRIPGVGPLVAAHLVEALARRPFEAVKAFIAYTGMDPRPNDSGRKKGIRRLTHHGDAHLRAALFMGAMAACKVAQWRVIYEHNRGKGLPSTAAFIVVARKLARVAFCLFKTGQDYDPKLIEGVAHT

SEQ ID NO: 400808 - protein, 457 aa, unidentified
MTEERVSPGAVTTENFAAFVALDWGDREHSWTLQASGSEKREAGTLAQTPEAIEEWAAGLAARFGERPIAVALEQSRGALVCALTRYRHLTIYPIPPAASAGFRAFAAPSGSKNDSQDAGMLLDMLLWHREKFRALRPDDEQTRKLQALVELRRQLVDQKTAATNQLTAHLKLCFPQALEWFDETGAPLTVAFLRRWPTLPQLQAAKPETVLAFLHSHNCRSESRNRKRLEEMASARPLTTDPALIEPAVLMIRTLLDLIESLRKGISDMERAIEPLFASHPDSAIFASFPGAGPALGPRLLAAFGSDRSRFASAAEVQTFSGIAPVVSQSGQSKWIHFRWACPKFFRQTFHEFAAMSIQFCDWARAFYDHQRSKGKGHHAAVRSLAFKWIRILFACWRHRTPYHDQCHTDNLMARSVPMLKPEPQKSATASVKAAKAVEFQFKSVAGFSKLSATAC

SEQ ID NO: 400809 - protein, 330 aa, unidentified
MKNLFCGIDISKDSLDYATCRGEDKTIVSSSKTKNNKKGIMGLIKLLPKESDEMHVWVCFEHTGNYGLLLASLLAKNKVAFSMVPSLDIIKSSGLTRGKTDAVDAKRIALYIATNNYKLKPTNLPSDEILKMKTLLTIRQQYVKIRTQLKNAVKSLAITDKIISLKPEIRQYQKEIIRYNDLIKKIETKIKDIIKSNDSLDKNFNKITDILGIGLITASLFLVSTNNFTAFENPRKFNCYCGLAPFEYSSGTSVKGRTKTSHYRNKELKSALFKAANTAITHDMQMKTYYNRKIGEGKHKMTVINAVACKLVYRVFAVVKREKPFVRMAM

SEQ ID NO: 400810 - protein, 399 aa, unidentified
MFVGWDWASATHAVTVLDDAGVVVDRWGFRHTEQDLVGALDRLARLAEPATLPVIIERASGLVVERLLAAGHPVVPVHPTAFWAARPRWGASGAKSDPGDSYKLADYLRTDGHRLRRLDPPDTGLRELQALVRLREDHVRARTAASNQLGALLEAHWPGPTAVFFRLASPIALAFLTDYPTPQAAARLGEARMASFCRRHSYRGGKTPAQLLARLRSAPTAPVGIPAATLAILVRAQVELLRSLLGTIAELDAAIATRVAAYPRAQLLAALPGVGTINLAQLLAEVGPVLDRVANAEQAAAECGAAPVTRASGKTTGVYFRWAANRRARKALTAFAHNARMQSPWAGRLYADARARGKRNPHATRIVARAWLRVIWACWHTGTPYDPHAHLAEQRLAAA

SEQ ID NO: 400811 - protein, 442 aa, unidentified
MSELAVLDPRAAFVDVGSEKMHVSIGGGPPRVFGTVTSQLQALRDYLIEHQVRSVAMEATGVYWLALYSVVEAAGLDVRMVDGRQTRHLPGRKSDMQDCQWGATLHAHGLLRAGFVPPAHIRRLQDYLRLRGDHVAAAAGHVQHMQKALERMNIKLHDVISSLTGASGLAVVRAILGGERDPAALLELCDVRIRKAKAERVLESLRGNWADEHLFALGQAVQSWDHYQAQIVDCDRRIAEVLAGMPGGEGPAAGAEQPAKRRTQPGVNTPQIDNLRDLLQRMCDGKDATTLPAHSEYTVLQLVGEVGTDLTRWPTEKHFASWTGLAPGSAQSGKRRAAVKRRRNRAGQIFCVMARALARSKYIALGAYYRRMAARRGGLVANKALAHKLAILFWRVMVKGMDYVEKGLAHYEAQVLETRQRLLRKLAKQFGQQLVPIQANPA

SEQ ID NO: 400812 - protein, 351 aa, unidentified
MIIIGVDYHPSDQYIAFVDTETGEGDERRLNHSDGEAEKFYRELAARGASVRVGMETTGYTRWFERLLAELGMELWIGDAAKIKTKRVRKQKTDRNDAQLLLQLLVDNKFPQIWVPSPENRDLRQLLWHRHRLVQMRTRIMNQLQALAMNEGQRRKKKLWSEAGRAQLEKLALAPWASRRRQDLLELLDRMNPSIEGLTAAIEQEAKKWPEVLRLMTHPGVGPITALAFVLIIGTVERFQCGKQIGSYVGLIPCEDSSAGHQRLGHITKQGSSLLRFLLGEAAQAAARCDADWRRRYMHLAMRRQRNIAKVAMARRLGVRLYWMWRKGWEYSDWIKFGSHAGQLGTGNGVQ

SEQ ID NO: 400813 - protein, 315 aa, unidentified
MYIGIDVAKGMLDVAVEPTGETWRTANLPEAIGELVTQLTARQPALIVLEATGGFEATVAAQLAAAALPVAIVNPRQVRAFAKSLGRLAKTDRLDAQVLARFADAVRPEPRALPNEAAQRLSALCARRRQLVEMLTAEQNRLPRAEGAVRPSIESHIRWLRQQLADLDRDLGTAIRESPLWRQKDDLLQSASGVGRVLSATLLAELPELGALNRKQIAALVGVAPLNRDSGTFRGKRSTWGGRAQVRRPLYMAALVATRCNPTLRNFYARLLAAGKPKKVALIACMRKLLVVLNAMVRDNRRWSSEMLVPADSCC

SEQ ID NO: 400814 - protein, 345 aa, unidentified
MHYVGLDVHWRTSTVCILDACGKEVKTATIRGPWEKMFSWLDREMTDRYVICYEASCGYGTLYDRLCGRASRVVVAHPGQVRLIFRAKRKSDRVDARKLATLLYLDAVPPVHVPRVGVRSWRRLIETRRRLVAKRTRVKNGLRSLLRGHGLRPPMRGLWTRKGLAWLRSVSLPEASSALERDLLLAELGLFTEQVTRLTAELDGLGRRHPGVALLETIPGVGPRTAEAVVAYIDDPDRFSRSAQVGAYFGLVPRQDQSAGVNRLGHITKEGPSSVRQLVVEASWQVIRRSATARGRFERLTGGLRERRKIALVAVGHWLLKCMHAMLRTGECWREAVPAAKDAAA

SEQ ID NO: 400815 - protein, 427 aa, unidentified
MRTYRIAGVDVHKKMLAVAVADIAADGEFRFTRRRVGTSPTELRELAAWLDTQAVEEVVMESTAQYWRPVWEVLERVWQPARRTREGASPTAGTLYLAQAQSNKGRRGRKRDFVDAERLVKRLVAQELVLSFVPDAEQRLWRTVTRRKYQLTRNRVQVHNRIEALLEEAHLKLSSLVSDLLGLSARRMLRAVAEGETDPTALATLADRRLRATTAQLTDALGATAELNPVYRQLIAMALDDLELIEAQILQLDREMGGLLRSHQDAVERLAEVPGLGVDSAQQIIAEVGPTAQTFPSAKQLSSWVGACPGAEESAGKNASHRTPSGNRQMRRLLYLAANAAVKTKGSIFQLVYRRLVPRLGHAQAIGAIGHRLCRLIWKILHDGVRYEERGPEVSRVRTQRRAAQMIRDLRKLGYRVEFGPSQLGTT

SEQ ID NO: 400816 - protein, 401 aa, unidentified
MSKCNAEQHHIETASALEQVVSAGQQERHAAYVGLDVHKETIAVAVAEVGRAEPVYRGEIANKPKNVEKLVAKLSATYDGGLLQFCYEAGPCGYVLHRQILACGHDCQVVAPSKIPRTPGERIKTDRRDALKLARLLRSDDLTAVWVPDQDQEMMRDLSRARDDMKGQERKARQQLNAFVLRHGQHWPRGKSRWTQAHYNWLESLRFERPWQQVTLQEYIEAAKAASARVAQLNDHLMRALPEWSLAPVVDSLIALRGIDKLAAIVLLAELGDISRFDSPKQLMGFLGLVPSEHSSGPRRRQGGITLTGNGRARRMLVESAWSYRFAARQTMHLKRKALSASVAAKKIAWKAQVRLCGRYRTLTRAGKNTKLVCVAIARELAGFIWDIVRQEMARVAPQAA

SEQ ID NO: 400817 - protein, 308 aa, unidentified
MPQPVVGCDLSRAFLDLCTLPSGQARRIPNTPDAIAAFVAGLEANDLVVFEATSGCDGNLIAALAERGQPFCRVNPRQAREFARATGVLAKTDRVDARVLAKMGRTLSLPVTVPVSAARARLSDFLRRRKQLVEMRKAEKLRRHSAGQDEIAKQIDAMIELLGEQISTLDRHIAGLIAADHTLSAQARLLAAVPGIGPTVLATLLGELPELGTLCRRRIASLAGLAPHARESGTWRGARRIWGGRRKVREALYIAALSASRRVPALSAMRERMRLKGKAPKTILIAVARKLLVIINAMIRKGQQIVLA

SEQ ID NO: 400818 - protein, 340 aa, unidentified
MRELYAGMDLHSNNIQLGILDQKDTRIFQKRLPNQPDVILAELEPFRTEIVSIAIESTFNWYWIVDCLTAVGYTVHLANPAAMQQYNGMKFLDDKHDAFWLARMDKFGILPQGYIYPKEVRPIRDLLRKRGHLVNLRTSLINSLQGIISRNCGFSLNGNKIKQMTENHVAPLLAENEDLALSGEVSKESIDFLSCQITRIEKICQDRMKINPQYTGLLTMPGIGKILALTISLETGPIERFETVGAYASYCRKVPTIWLSNKKQKGKGNSKNGNRYLSWAFAEAAEYARRYNDQARTFFNRKSAKTRSAVAYAALAHKLARAAYYIMRDKVEFDGNKLFT

SEQ ID NO: 400819 - protein, 364 aa, unidentified
MKKAKKKSMKTFSKEPVATIGIDLAKNSVHVFGVDAQGEMVFSRKVARKALSQFIAQQPTCRIAMEACSGAHHWARTFQGFGHEVVLIAPQHVKPFVKTNKNDAVDAEAICEAARRPRQLFVPIKNVEQQDIQGTHRMRSMVIDQRTALVNQIRGLLAEYGIVIAQGRAELMRRLPEILEDAENGLSERFRAELNGLLEELRHMDTRVKHYDTQIQAVADTNESVQLLRSIPGIGPLVATALIATLGDNWGLFNNGRALAAWLGLVPRQHSTGGKPRLLGISKRGDVYMRKLLINGARAMMRWVEKKDDALSHWARDLKQRRHANVAVVAMANKLVRIAWAVMTTGKAFDTARGALAKPAAVTA

SEQ ID NO: 400820 - protein, 426 aa, unidentified
MRKNNNSSNGKKPDSAGKNKKAVKLEKGNTATTANRNIAKRDSNMRISSKQRFGVRNLLHKLEAAKKTPKRKAPEENVEYYIGIDLGDKRSCYCILDKNSNIVADGSLATTVAELELYFKAIPKSRIAIEVGTHSPWISPLLEDLGHIVYVANPRKIGGGKKSRRRKNDKLDAEALARQVKSDPRMLFPIQHRGQKARQALVLLRTRYALISTRTSLICTVRGLVKSDGQRLPRCSTVSFHKMERNYVPEALQEALEPLFQQIGLLTEQIKKYDKKVKRMCREAYPETELLRQVNGVGELVSLAFVLTVDNPNRFSKSRDVGAYMGLIPRQYDSGDSRPQMRITKTGDRMMRQLLTQSAQYILGPFGRDSDLRRHGLKIAARGGKNAKKRATVAVARKLAVLLHSLWVTGEVYEPLRNSEPQEEAA

SEQ ID NO: 400821 - protein, 355 aa, unidentified
MEYFKDIKIFVASKHVFCGIDIHFGHWNLCFVCDGEVVEKTKIPNSYETLNMRLSKYSQARKISIVYEAGFSGFWLYRRLISNNYDCILTPPSKMPKSDNKVKTDKRDAQKLAFYFSAGLLKVVYVPPADIESDRRVVRRRAQLVKKQTRAKNHIKSFLHLHGLKTPENIKTNWSNLYLTWLEKLHFDHESDNFTLSQLIRNYRRIREDLAEVTRYLRMFSRSEKYQENYKRVTSARGVGLITAMTFLLEIFDFGRFAKEEDFSSYLGMTPSQFSSGDKVRLGHITRQGNSNLRRVLIESAWTVIKHDPHLREKYDRIKARGTNGKKAIVAVARSLAVRLRRCILDETEYVIGVC

SEQ ID NO: 400822 - protein, 397 aa, unidentified
MHTIGIDIGKSFHVAAIMDEKNRVVIPSCKFTNTKAGFESFITKCKEVGAHLETSKVAVEATGHYWMNLYAFLKERNTKDIIVLNPLQSKALRNLDIRGAKTDTIDARHIAQVVALGAHSVQHPLNEDVYALRQLSRMRAEFVQKIADNKRKVVRLLDLVFPEFSSVFSHTFGVTASAFMERYTTPEEIAKLSSKRMEALITKMSRGRLDPKKIAASLKQAARDSVGIRFATDAFSFEMRLFLQQIVFLENQTAEIERAMEAYKKKLPDIEFLMSIPGVSFILAATILGEIGDVKKFPKADSLVAYAGMDTKVVQSGSFAGTKTRLSKRGSPYLRWAYSCAAFVARVQDPALKKIFEKKKEQGKPYGIALSAVVHKMLHITYAVLKQQKPYECHLQN

SEQ ID NO: 400823 - protein, 317 aa, unidentified
MTAPDIFVGIDISKNRLDVAISPGDQTFTCPNNEAGIQQLVRRLQKFNPKIILLEATGGYEFLIIAALREAELPACFINPKLVRNFARGAGIAAKTDRLDAKVLALFASRMRPQPRPLPEASQQELKHLMTRRRQLLDMIQMEKNRLDPTPSPRIAQSIQQTIKSLEGQLAALNREIDDFFHQHPRWVELAKTLTSVLGIGHLSALMLIACLPELGRLNRKEIAALVGVAPFNRDSGQWRGQRHIEGGRSRLRHALYMATLVATRCNPVIQAYYQHLVSTGKAKKVAIIACMRKLLTILNAMVRKQQPWCPNAPINP

SEQ ID NO: 400824 - protein, 343 aa, unidentified
MKITRVGVDLAKNVFQVHGVDRAGRRVWQRQLKRSNWLSMLTEAVEPGCEIGMEACGGAHHWARELKSRGYQVKLISPQFVKPYLKSLKNDVNDAEAICEAMARHHMRFVAVKTVEQQDIQAIHRVREGLMNHRKAKANQIRGLVAEYGLVAPRQMAPLRRAIPCWLEDAENGLRQPFRVLLHGLWEDLQRMDERLKVLDKEILMLSESHPDAKRLKQLRGIGPLTATAMVAQFGDGRHFKRGRQASASVGITPRHAGTGGKNYLFGITKKGNPYLRSILIHGARSVVSKAKHKDDRLSRWVTELAERKHVNVAAVALANKTVRIAWAMLRNGTDYDPELAMA

SEQ ID NO: 400825 - protein, 407 aa, unidentified
MDVIYPRCAGLDVHKQTVVACARVAGNGPLLQEVRTFATTTSELLALADWLESLGVEHVAMEATGVYWKPVWHVLEGHFELVLANAAHVKNVPGRKTDVNDAMWLADLLAHGLIRASFVPPVAVQELRTLTRTRKQFVRERSAHVQRIEKVLEDANLKLSVVLSDILGKSGRAVLQAIIEGQTDPERLVSCVTTRVKASRAELLEALRGRISAHHRFMLKLHLGHVDALDQAVAAIEREVGLGLEPFRQAAKLLSTMPGLSDVSANVIVAEIGIDMSRFATPAHLLSWACLCPRNDESAGKRRSTRLRKGGKWLKTTLVQAAWSAIKVKDSYLQAQFHRLRARRGAKKAIIGVAASMLTAAWHMLRDGTEWHDLGAAHFDRADAQKTAKRLIRRLQQIGFAVQVTPA

SEQ ID NO: 400826 - protein, 430 aa, unidentified
MGLVVPTAIHPEQDDHDMPYEWFVGIDWGSQQHQVCVLDRDRRRLGERSVDHDGASLARLAAWLWSVSAGQPQRVAVAIEVPRGAIVEGLLERGFHVFAINPKQLDRFRDRHSVAGAKDDRRDAFVLADSLRTDRPSFRRLQLDAPHLLVLRELSRAEETLLEAFRRSANQLRDQLHRFYPQMLQLCSAADESWLWDLIDLAPTPAHVVLLSEEHVQRVLKTHRIRRVKAPEVLTCLQAPALPVAPGATEAAQAHCGFLLPCLRVLAEQLQACSQQVSALLHTLAQEPGEGAGPSDVAIVQSLPGVGRKITAWLFAEAAQPLAQRDFQVLRTHGGVAPVTRQSGKRRQVVMRRGCNPRLRYALYHMARVAMQRDAHFSQVYEALRTKGQRHGQALRTIGDRLLRILMAMLRDRICYDASRIHREPVVQRG

SEQ ID NO: 400827 - protein, 370 aa, unidentified
MKHTKFIGLDVHKSRISVAVAQVGEPVEYLGEINNEPTAIRKLCDRLSGRGIELALCYEAGPCGYGLQRQLASLGHRCDVVAPSLVPRKSGDRVKTNRRDASMLARLFRAGELTSVWVPDADHEAMRDLVRLRCIARQVLTRARQHLQGFLLRHGRKNGRGTAWGMAYRRWLSTLAFEHPAQQIVFQDYVDAVGDAERRLKRVEGQILALLSDWSLSPIVDALQAMRGIAVINAVVLVAEVGDFSRFANPRQLMAYFGLVPSERSSGQSVHRGGITKTGNRNARCALIEGAWAYRMKARVGRHKVDRIEALPKVVRDIAWKAQLRLCGRYRRLRACGKLRSVVNVAIAREMVGFIWAIACTVQQSGRKTA

SEQ ID NO: 400828 - protein, 343 aa, unidentified
MEHCGIDLHSKSSEVAVINEAGKIEEQARISTTESSLRRWFGGREPMVICLEAGGQSAWAMRILTSLGHDVVVANPGRVRLIAEATLKNDKVDAMTLARLVRADRQLLSPIIHRSAETQRQRGVLRVRRTLMNARTACLNASRGILRSFGYRTPGRKAERLAERLADASIPEEMVSVVAPLVQLALELDEKIAALDETVETLGSAYPEVALLRTVPGVGPLVALSFVLCIENPQRFVRSRDLAGYLGLRPKMRESASTSHYGGITRQGDIEMRSLLVQAAHGLLRSRADSDLKRWAKGLAERIGKNKAVVALARKLAVVMHTMWVRGEPFRPFRNAVEIAAAA

SEQ ID NO: 400829 - protein, 353 aa, unidentified
MSMLADLVEVVIGVDTHKHTHTAAVLDARTGAVLDRMTVTADPDGYAQLLALAGQRSGLRAWAMEGTGGYGAGLHRHLAAAGELVVELDRPKRPTRRAGAKSDPIDAERAARDALARTQLAQPKTGPERAALQMRLTARRAAVEAATTAQRQLHALIITAPETVRSRFRGQNTRAMITTAVRLRTTTISGDVEIITALTVLRDLARRIRALETEATSHERAILTIVRSWRPDLLTLTGVGPIVAATVLTAWSHPGRCRNDAAFAMLAGVAPIPASSGKTVRYRLNRSGDRQLNRALHTITLSRLRYDEPTRAYADRRRAQGKTDREIKRCLKRYIARDLYRRLEAPPQPLDAP

SEQ ID NO: 400830 - protein, 357 aa, unidentified
MRKRLNADKVNVNGKTANVGIDVHKLSWHVTVLVEGVIVESATIQPSYRVLKKLLAQYKGARIRIAYEAGFSGFNLYDELNADEIECIVVSPSLIPVESGNRVKTDKRDSRKLAQYLENNLLKRVYVLSKQERAHRQYVRTRRQLSNHRTDVMRQIKSLLLFHGLPSFDGNRGFWTRPVLRALRSITPDEYVSRSLNKLIDLYEYLTQQVKHMTREVRKLARTEKYARRVELLTSIPGVGVLSAMEILTELQDVSRFATADQIAAFLGLTPSQYSSGQHVRMGKITHAGNHRLRTRMVECSWIAIKKDPGLNKTYQAIKMRRGGKRAIVAVSRKLIIRIRRILLDEVTYRKECAIAA

SEQ ID NO: 400831 - protein, 337 aa, unidentified
METYVGLDVSQKSTAVCVIDGDGNPVWRGTVASDPQAVDSIIRQQAPEVRRVGMETGPLAVWFYHALRDRGVPVDCIHARHVHAALATQLNKTDSNDARGIAQLTRSGWYRAVEVKSIASHEVRLLLGARSQLVSMRTGLYNQIRGVLKTFGVVLPPGTRSAFEKLVEQHTPSTSLIRGVVDILLDSWRHIDRQVRETDKALERIARASDVCRRLMTVPGVGVKTAVAFAAAVDNPDRFRSVGDIGPYLGLTPRKYQSGDVDHNGGISKTGCRLTRHMLFEAASALLLRHKRDCALRRWAQALIPRIGLRKALVATARKLSTLLLSMWRSGKEFIPG

SEQ ID NO: 400832 - protein, 446 aa, unidentified
MVDSSGLSRGDRNRNNRLARLRALLPVVNAVVGIDLADDKQAAVVTDHDSRVLARRRVTARAWELGGLLDWALVAARKAGFASVTVACEPTGHRWRVLDQLAAERGLDLVCVQPLLVSRAREAEDFTRDKSDPKDAVIIARLAAELRCYLPERADEVWARLRHLGARRARLVAEDTACVQQLRDLLECAWPAVLGAAGAPFRSKSWCAALSVVLARCAGDLARVRRLGQARFTDAVRRELGCWGASRPCLRIIRSVFAALSDPAGVAAQRPGVLERAHLVLGDWQAIHRRLAEAQTRMVGVLDALELTELVTSIDGLSAVGAAAILAETGDLTRFPGPRAVVKHAGLCPRDNTSGRQEGKTSISGRGRPELRLAAWRAVWAALPNNAVMSARFSYLTTREDNRLTAQQARTACAAALLRWLHVVVTQHVHWNPAIAAGAKTLEAAA

SEQ ID NO: 400833 - protein, 352 aa, unidentified
MNSPFTIGIDLAKEVFAICVLDERGAVRERRVLRRAAFERWAAQAPDSIIAMESCSSAHHWGRWFSARGHVVRLIAPEFVTPFRKGGKNDAADAEAIAVAARQPTMRFVTVKTIEQQAILSWHRARQGWIEERTALINRLRGLLAEFGIVLGRSRSTLRTALPRLTDDPRLPAQVRALLLETREQFAALDARVARCDAEIASHLVDNAPAQRLRAVLGIGPLTASALVATVSNASSFKNGRQFGAWLGLTPQQHSSGGKARLGKVTRHGDGYLRGLLVQGARSALQSALRCLPERLSRLGRWIVDLCHRKGYHKALVAIANKHARMLWAMLAHDETYDPLARQRYRAPAATV

SEQ ID NO: 400834 - protein, 356 aa, unidentified
MLNDQKYIGMDVHTESISIAVRNGAGKIAMECVIETKASMILQFIDGLRGDLHVTFEEGTWAAWLYDLLKPHVTELVVCDPRKNASMREGNQSDKIDARRLAELLRLNHLSPVYHGEHGLRSLKELVRSYLTITKDLGRVMSRVKAIYRSWGIPCTGKQVYAPRHRAEWLGKISELGVRRRAEFYYQQLDALRALRQQVRRDLLAESKKHPAWKRLCQIPSIGPIRAAVLLGILQTPHRFRTKRQLWTYSGFGIETQSSADHRRVNGQLERAKKQISIRGLNRNCNHDLKNLFKGAAIVASSKPGPFQEFYAALLTKGIRPEMARLTLARKIATIALIVWKRGVNFDAQHLKPQTA

SEQ ID NO: 400835 - protein, 357 aa, unidentified
MEQTITIGLDIAKHVFQAHAVDPSSGEVTRSKLQRDELLQHFAQLQPSLIAMEACGAAQHWARELAKLGHEVKLIAPQFVKPFVKTNKNDAADAQAIWTAAQQPEMRAVAVKSEEQQAVLALHAIRERLKKARTAAVNQLHGLMGEFGIGLAKGWRTMLPKAAAALEPANSVIPALLRPQLQRQLREVRDLTQQMAEVEAQIASWKRRQEECERIAAIPGVGLLTATAAVATIGDARAFRSGRQFAAYLGLVPRQSGTGGRVQLFGISKRGDTYLRTLLIHGARSVLVQSRAAKDPNTWLGRLRQRRHHNVAAVAQANKTARQIWALLAHGRTYEPNYGSPQSSGNPGAELAASAGC

SEQ ID NO: 400836 - protein, 331 aa, unidentified
MKKIFIGIDFSKKTFDATVLMASHLQEKGVHRQFSNNKNGALKLIKWVEKFGAREECLFCGEDTGLYSKIVSETIVNAACFMWLDSSLRIKRSLGISREKNDKKDSRDIALYAARFNDRAECYVPLDQATEALKKIFTMRKQLMKMYDKLLVNYNESKRCLDNEMLSEAFAIQEELIAKIKEKIKELEKQMKKIIKSNPELNKTFEILTSMPGIALINATAFIVYTNNFKKFNYNARCIASFWGVAPFGHTSGTSIKGTPHVSHYADSYLKALLSEAALSASRFCPTINRYVNKLKKAGKHKNVVLNNAKNKMIHILVAMVRNNEKYRKTA

SEQ ID NO: 400837 - protein, 339 aa, unidentified
MTIVNAVRLFVGLDYHQDFVQVCVLDEAGKIVKNSRVDDDWRLLAAAVPAGATVQAGLEACCGAADLADELVEQAGWSVSLAHPGFVARMKQNPDKTDYSDARLLADLTRVGYLPKVWLAPAELRELRRLVRYRQQKAGERRDVKLRIRAILRDHRIKIDVARPWTRRWLQALAALKQIGPDSEWILQEHLTSLMRLKREIRDVERRLEERVANDAVVKKLREQKGIGLVTAATMRAEIGRFDRFQTGKQLARFCGVTPRNCSSGNKQADAGVIHAGNPQLRAVIVEAVHRIIHCDERWMRLAQQLKARGKHICLVVAAIANRFMRWLHHTMQPEALAV

SEQ ID NO: 400838 - protein, 313 aa, unidentified
MMASPDVFVGIDVSKDRLDVHVRPLGQGFSVSNEAAGHAALIARLRPLRSKRIVLEATGGYERALWLALSEAGLVAAVVNPRQVRAFARAAGRLAKTDRLDAAVIAHFAETFVPRLGKPDPVADRLGEHVLYRRSVQDEFVGLEHQLRRLETPALRQRAERRVAVLRAEVKELEREMRAIVDSDPAKKALFACLTAPKGVGLILACTLIANMRELGALSRHQAAALIGVAPLNHDSGVRRGYRAIAGGRRRVRNVLYVATLSAVRCNPTIREFYRRLAAGGKPAKVALVACMRKLLVMLNGRVRDQLAVTVSP

SEQ ID NO: 400839 - protein, 377 aa, unidentified
MKKELYLGLDVHKDCIITAVAEEGRKGEVRDTGVISNDLHALEKWVGRLRKAHGSDVILRACYEAGPCGFGIARRLKQLGVECEVVAPSLTPKRAGERVKTDRRDARKLARLLRAGELSPVYIPESTDEAIRDLCRARTDAVDDRCRSRHRLKGFLLRHGYHYQGKSSWSAAHERYLRELVLPHPAMKVILEEYLQGIAAAGERIARCEEAMRALLEKWHLRPAVEALMAMKGFRTVAAMILVSELGEVHRFTHPRQVMAYLGLVPTENTSSERRRQGHITKCGNAHARWLLVECAQHYATPPKVSQELSRRQQGQPAQVRAISWRAQNRLHRRYTCLLARRLQRNKAIVAIARELCGFIWELLRTQDCYQAQSTPV

SEQ ID NO: 400840 - protein, 335 aa, unidentified
MELTKQSVGIDVSKDSLEVKFKEKSTKGIKIKGSSKFDNTSNGFISLLEWCNKREKAENVVYVLEATGVYHEEVLYFLFGQGKKVSVELPQRIKYFAKSKGVKTKNDLIDSGVIADYGLERELKVWQPPGKEFKTLRDLSREHNTLTNSKSEAKNRLHAAKHSHDKNARVIERLQSTIKFYTNQLDEIEKDIKTTVNADKELSGKIKKVATIKGVGLMTVVKIIAETGGFYLFQNINQLISYAGLDIVENQSGNHNGKTWISKKGNADLRTALYMPALSAIRFNEKMKSFNERIMETHSYKKQGIVAVMRKLLILIYTLWKKNEEFSLNYKWGQA

SEQ ID NO: 400841 - protein, 324 aa, unidentified
MNLPPLGLDVAKLKFNACLMRAVGKLRHKVFPNNPDGCTQLCDWLKKQGVTRVQACMEATGTYGDSLAAYLHEQDHLVSIVNPAAIKAYAQRHLSRTKTDRVDAALIAGFCVERKPPAWHPPAREVQELQALVRRLESLVEMRTAEENRLSSGISVGAVRESVEELIVHLSEQIKRTGALIREHIDNHPDLKRQRELLDSIPGIGETTAAALLAEVPDFSQYKSARQVAAYAGLVPRERQSGSSVRGRTRLSKIGNARLRRALYFPAITALRCSPFFQAWAEGLRQRGKCKMSVIAAAMRKLIHLAYGVLKTGKPFDPEWGKIA

SEQ ID NO: 400842 - protein, 320 aa, unidentified
MTSKGAEKMILSTIGIDIAKDSLEVCRLPGGESARFDNNGSGHQQLIRWLAQTPIARIVFEPTGAYHRTLEQTLTAAGLPLAKVNPRQARRFAEAAGKLAKTDRADAAMLARMGMALAPQSRPPTSRMLSQLKELHLARQALIKDRTAAKNREKILTLPLLKRQNQNRQRQIEAQIAAIEAEIEARIAADPALAERLAILESIPGIAKVTACALLIDMPELGTLDGKQAASLAGLAPITRQSGRWTGRAFIRGGRASLRQALYMPALVATRFNPQLKAKYHQLITAGKPTKVALTAIMRKLIVLANALLRQRRNWAENPA

SEQ ID NO: 400843 - protein, 350 aa, unidentified
MTSMTSTRRVVTVGVDTHSDTHHAAVIDEVGRPLADADFPTTPAGYRQLLAWAREHGQITTFGVEGTGAYGAALARHLRAAGQRVIEVDRPDRRTRRQRGKSDPIDAYAAAAAVLSGAASGIPKTRDGLVEAIRTLRVARRSAIKARTQAINQLKAVLLTGPAELRQALTGQSTRELLATCRRLRSSDRPTNAADPVIAAAKLTLRRLARRIAALTEEIEELDAELRPLVTQASPALMEVYGVGTHVAGQLLVTAGDNPGRLHSDAAFAQLCGTAPLPASSGRTTRHRLNRGGDRHANNALHTIALVRLSSHPPTQAYAARRRAEGLSNLEILRCLKRYIAREIHHALVT

SEQ ID NO: 400844 - protein, 348 aa, unidentified
MLADQLDYIVGVDPHRDSHAVAVVEVVSGAVVFEATVAASSDGYAHALKLVDEHAAGRRAFAVEGTGSFGAGLTRFLTVRGERVLEVGRLRRERRSGGKTDALDAVRAARSVLAKERPGTPRAGGERQALQALVAAREGAVNAKRAGLCQLRDLLITTPEPLRNELRPLTRARLLQRLAATRPGGGRDPELRGSMLALRSIARRVLQLTAEERELAREIETITRKLAPQLLEQPGVGPHAAAQLLLSWSHQGRITSEAAFARLAGAAPIPASSGQTVRYRLDRSGDRKLNRALHMILVTRKRSHPATIAYIERRMHEGKTRREANRCLKRYLARNLYRILEHGAPPAT

SEQ ID NO: 400845 - protein, 339 aa, unidentified
MSKLLKKFVGFDVSKLWFDAAVVKSNDVVQSSHKQFSQNAEGFKKMVAWLTQQDVLLNDETLFCMEYTGIYNTTLVSFLVKQKAQLWVEMPLRIKKSEGLQRGSNDKASAFKIALYAYRYQDVKQLWKPVDTSIERIKLLIAQRDRIINAITQLKVPVQELSECGCINEAKAMERIQRNSLRQLQKAKENIENYIKEVVAADTIITRRVNQVQSIHGIGPVTAIALLAYTKGFTSFDNAKQLACYCGVVPFSKSSGISIRYKSTVSPHANKKLKKLLHLCALSAIKNDKEIRVYFERKVAEGKNKMSVINAVRNKLIQRVFAVIRDDRFYQQDYINKCA

SEQ ID NO: 400846 - protein, 398 aa, unidentified
MKRILRIGMDVHSTNYTLCAMEPVIGEDDRIFANIQVTPDYKNILMFIENLKMKLGLDAEYDIQCGYEAGCLGYSLYNQLTAAGVKGVILAPTTMLTPQGQRVKTDARDALMIAQCLSYGGYHAVYIPTEEDDSVKEYLRMRDDHKTALKKIKQQINALCLRHGYHYEGTKWTIKHVAWLRKLELLPLYRETLDEYMASYDEQTAKLERFDKRIGELASQSSYEEKAKRLGCFLGIKTHTALSLLVETGDFSRFAKGSTYAAFLGLAPGENSSGETINRRGITKAGNRHLGQLLIEAARGICKGAIGHKSRELRARQSGNTAEVIAYADRANTRLRSRYYKLIRHGKKKNVAVAAVARELACFVWGMMTDNTGMKMAERNSKDSCQSRALCTAGAAGP

SEQ ID NO: 400847 - protein, 357 aa, unidentified
MGRFLGVDLHRNRFEVCTLAENGRRYRRGWATRDVAKFAATLRPDDAVAVEVTTNTRFFYEAVAHRVSRVAVVNPRQFKVISESVRKTDRRDAETLAEFLSKDMVPEVRMKGKDHARLASLTQTRDMLVKQRTALKNKINNIFAAYGIALAKESLSSERGLKEITSWTFDVSGEVEVRVLADQIRSLTASIRRLEASIREAGAKQPGHANLKSIKGIGDVSASIFVSVIGDVNDFADAGKLASYFGIVPRVQNSNDTEHHGRITKRGSKLGRTTLVQCALIAKQYSPYLSDYYDRIQRRRGAGKAIIALARKFLTIIYHTLKNDWIFEDFPNFVLAEGATYQTLTTQTLPSWSGLSS

SEQ ID NO: 400848 - protein, 412 aa, unidentified
MDTVIERCAGLDVHKDTVVVCVRVPGPDGGRQQLIQTFGTTTTAVLALRDWLTAQGVTIVGMESTGVYWKPVYYVLEDALECWLLNARHLHKVPGRKTDVADAAWICQLVEHGLVRPSFVPPKPIRELRNLTRYRKAQIEERSRESQRLDKILQDAGVKLSSVASDVLGVSGRAMLGALVEGTRDPAVLAELARGTLRKKIPALREALRGRFGPHHALLVGTILAKLEFLDDAIAQLSAEIEQVIAPFAHEAALLRTIPGVDRRNAEALVAEIGVDMSRFGAAGRLASWAGICPGNNESAGRQGSGKTRKGSKWLRTHLTEAAKAAGHAKGTYLAAQYARLRARRGSARATVAVAHSILVAAYHILERRQPYQDLGADHFRRRHSREQQTRRLVRQIQALGYKVTLELVEAA

SEQ ID NO: 400849 - protein, 319 aa, unidentified
MGKNKIEFEQVIDRGCGLDVHRDTVVATVMGNGIKTETRTFGTTTSSLNELGVWLESLKVSDGAMESTGIYWKPVLHVLRAYPLNLIVVNARHIKNVPGRKTDKADSQWICKLLISGLLKGSFIPPENIQELRDLHRYKKKLIGTVASEKNRIIRVLEDANIKLSSVVSDTSGVTASYLIKGLIEGRKDLEKLIAECYHRKLQASPDQIKEAITGRLTAHHAFILKSMQKHIASVEEQIAEIDEEIEKYIKDFEKEIELLQTIPGVGKEGAIGIVAEIGVDMDVFPSEHNLASHSGMCPGNNETAGKKKVQEQDRGTNI

SEQ ID NO: 400850 - protein, 428 aa, unidentified
MTARDCTSVKEFWQLKKEIRGSKDHLIVGIDVAKDNHNAFFGTAYGKTLLKRLTFRNNIEGFDKLLTRVKTMKVKHNLNEIVLGLEPTANYHKPLGDFLIKCGHMVVLVSGVSVKRNRELLDGRWDKHDAKDAANIADLISQGKFLYYEYAPVLLKDLRGLLSLKRRLKKQEHGFRIRIRNSLLAQYFPELDKYYSKWEPEVLSVVRWCLDPSVIVGLEYDQFVRLISPGSENIRRQERLKWVWKKAVASIGCDVGEAAEFEAKVTVEELHHIREIIKETDAKIKDICVRFPEYEYLLTIPGFGPDISSKVLAAIGNPFRFNSRSQVLKLAGMDLNANRSGKSSDAAVPVIAKKGSAHLRYALYQAAFIASCKNRYFIMFYTNTLRGREREKGIKTKMRVKLAAKMLVIAWTLMKKREPFDAAYLKIE

SEQ ID NO: 400851 - protein, 407 aa, unidentified
MELVALYKRVIGLDVHQAQITACALIEECDGLIRIEQRQFGTFKKDRRALAQWVVQLQPDEVVMESTGIYWKSPYAALEAAGIRAKVVNARHVKNVPGRKTDINDAQWLATLSRAGLLRASFIPPAKMRELRLIARQRQKLTGQLASEKNRLHKILADGGIRLGVVVSDVHGQSARAMIKALIANKMPQEVLKFASRRLKASREELFDALQGELTESHRFVLNELMQHIEEIEQRIARFDQRLLAGLESEHNWLVLLQTLPGVDLIGAAMLLVEIGNNMDAFGSADRLCSWVGICPGNNESAGKHKSGRTRKGNAYVRRLLCEFAHAASRTTSAFKAKFSSLIVRRGYKRAIVALGHKILRTIFFMFKRREHYRDSATDYEKLSVQRNAARWIKTLIQHGFIKTAQA

SEQ ID NO: 400852 - protein, 344 aa, unidentified
MNKFKYYIGIDVSKLTLDVTVLQEVGNSTKSEHYKIENKEKSIAQFVKKQFGKYPKEDLLFCFEDTGIYSLPLAYYLNDNELACWQRPAIEIKRSRGITRGKSDKIDSKDIAFYAFTQNYKFRPNKLAIKEIQQLRLLFTEREKVLKSLSSFEKTSENEDFMTKEVFDSVASVNKTIVDQLRKALKAIETKMLAIISSEDTLNQQYKLITSIPGIGMQTTVYLLIATKGFSAFENWRQLACYAGVAPFPYQSGTSINGRNKVHHFADKKLKSLLNMCAIVAVRYDKELKDYYEQKVAEGKAKMLVINNVRGKLLARVFAVTNRKTPFINTQKFASSNLNNISKK

SEQ ID NO: 400853 - protein, 342 aa, unidentified
MAIAIVGLDLAKHVFQVHAVDETGRAVLRRQLRRAGVEAFFKTLPPCVVGMEACASAHYWARRISALGHEVRLIAPAKVKPYVQRGKKNDANDAAAIVEALMRPHMVFVPIKNEEQQAVLMLHRTRDLLVRQRTMLVNAIRAHLAEFGIVAAQGRRKVKDLITGLDNTEIPELARLALWQIADQIDECDKHIDVLERRILAWHKSDEASCNLATIPGIGPITASAIAATVPDPSAFRNGRQLAAWLGLVPRQNSSGGKDRLSGITKAGNPYIRRLLVIGATSVIRYARSKAPGTAEWLKKLLDRKSARLASVALANKMARIAWSVLTRGEVYRNTYPIPKPT

SEQ ID NO: 400854 - protein, 421 aa, unidentified
MEVLYRRCCGLDVHKETVVACLRIVSGGEIVREVRTFETTTASLIALSEWLAENGCTHVAMEATGVYWKPVWHILADGEFQLILANASHVKNVPGRKTDVKDATWLADLLAHGLIRASFVPDTQTQELRNLLRTRKQLVREKARHILRVQKTLEDANIKLDSVITDVMGMSGRAMIEALIAGESDPAKLASLANYRLKTSQEKLREALRGRVTKHHRFLLRLHINQIDALDAAIATIDQQVEAGIAPFRAAVEQVSSVPGIRDIGAQVIVSEIGTDMSRFPSDGHLISWAGLCPRNDETAGKRRSNRLRKGAPWLKTTLVQCAWAAVRKKDSYLRAQFLRLKARRGPKKAIIAVAASILTAIYHMLKDGTLYQDLGSNHFQSRSKGQQTKRLIKRLADLGYDVALTPLPTNGVPAEGAVSF

SEQ ID NO: 400855 - protein, 384 aa, unidentified
MRKVSTVARGQGRNFSQQRLTIGLDLGDRASCYCVLDEAGKVVLEQRLSTTAKALREVFGTMPRSRMALETGMHSPWVSRLLQELGHEVIVAHARNVRLIGESRRKDDRLDAQTLARLARIDPQLLCPVKHRSAKAQADLTLIRARAGLVRARTALVNTARGLAKSYGERLRGCNVRNMNREKAEGLSPELQAGLEPLLACIESVSEQIREYNERIEALAQHSYPQVQLMKQVKGVGTLIALTFLLTLEDPHRFGKSRDVGCYLGLQPGRRNSGQSEPQMHISKEGDPYLRTLLVQGAQHILGPFGVDCDLRRWGLKLAERGGRNGKKRAIIATARKLAVLLHHLWVSGEVYEPLHNSNRAAMPAAAQKHSSERKVKSQEAEFR

SEQ ID NO: 400856 - protein, 419 aa, unidentified
MHSLHVGIDVGLKDNTVVFTDETAMTRLARFTVPNDAGGAVRLVNEVADAMRRHKLSSLRIGMEATGVYAWHLAVFLSGSEVLRPFDAAVYLIQPRALKNHRKSFGSRLPKTDGGDAWLLTEYLGHPRLLPRPFRMDERTIPLQRLTRHRYHLVHQLTRTKNYAASYVFLKASGLAQAPPLADPFGAAAAAILLEFRTVEELAAAPLTELVQVLNQSSRGHISNLEAIARAYTQAARDSYRLPGVLKEPVHQILSLTLQDIRYLQKQVKVVDNLIQREPLARQNRLLSIPGIGPVLSAGILAEIGDIANFPDDDQVAQFAGLTWPANQSAAFEGEDTPLARTGNAYLRYYFIEAANSVRRYDASFAAYYTKKSKEVTTHQHKRALVLTARKLVRLVFALLRDDRAYDPGHRSLFRTTAS

SEQ ID NO: 400857 - protein, 402 aa, unidentified
MNAVGIDVSKGKSMVAIMRPFGEIVSAPFEIKHTASGINSLVELINSVEGESRIVMEHTGRYYEVLAHQLSEANLFVSAINPKLIKDFDNDSLRKVKSDKADAVKIARYTLDKWQNLKQYNVMDELRNQLKTMNRQFGFYMKHKTAMKNNLIGILDQTYPGVNTYFDSPARSDGSQKWVDFASTYWHVDCVRKMSLNAFIDHYQNWCKRKKYNFSQSKAEEIYGKAKELVPVLPKDAITKLIIKQAVDQLNSASTTVESLRTLMNETASKLPEYPVVMAMKGVGTSLGPQLIAEIGDVSRFTHKSAITAFAGVDPGVNESGSYEQKSVPTSKRGSSDLRKTLFQVMDVLIKTHPQDDPVYQFLDKKRAQGKPYYVYMTAGANKFLRIYYGRVKEYLASLPES

SEQ ID NO: 400858 - protein, 412 aa, unidentified
MFKIFRNNCCGLDVHKTWIYSCIGITDPNGRTEYKQARFSSFSKGLRELAAWLAKYSCTEVCMESTGKYWIPVFNILEKSCFVTLAHPKYTKPQKGNKTDRKDAKWICDLFMCDMIKPSFIPSPEIRQLRDLMRYRFKLTNMLTGEKNRAQNCLTVSNLKLDDVFSDVFGKSSRSITNYILDHPGKTFDVSPFVDPRCKTPVSEIQAAVDGVISPEQAVKLRQCLDHIDELEAHRKEIESEILRIAEPFSAVLDLLYTLPGLNKNPMTAIAILSEIGPDMSVFPSSKHLISWAGCCPRNDQSNQKVKSRRISRAGSYLKPLLVQVANALIKSKKHPEFKERYHRIKSRRGHKKAIIAVCKMLLTAIWNMLSKLEPYNPEGFLEHRPVKQEKTLTVSQALELLRLRGYTIANQ

SEQ ID NO: 400859 - protein, 337 aa, unidentified
MYYIGLDIHKKTISYCVKDAAGCVHREGKIGSSRRELDAWVRTLPQPRMMAMEATIFTGWIYDYLLPHAEKLKVAHPLMLRAIAAAKKKNDKIDAAKIADCLRCDFLPECHIAPTEIRDRRRVLRYRNLVVKQMVQMKNRVSGLLLETGVTYNKRQLHKVGYFGEMMSTNAEINDAVRPLLNLSRGMIRRSSKLEYDLVSSLERDPLLRERLRRLRTVLGVGLITALIWALEIGDYTRFSSNRQAISYCGLCADEKSSADKVMRMPLSKQRNKHIQRVLVEAAKLAPRLSPELAMIRARELERGNPNRATLAVARKMVCYMLAVERRQQDFVQTAAA

SEQ ID NO: 400860 - protein, 360 aa, unidentified
MVTMTSVALDVHARSTQATSVDMVSGEVVRARLSGDTDELVRFLRGLPQPIHACYEAGPTGFGLARAALEAGVRMEVIAPSKTPRKPGQRIKTDRRDADHLVRQLIAGALTPIRIPTADEEAARDVVRDREQVRVDLMRARHRLSKFLLRNGRVWPGKSAWTQRHRAWLARQRFDELDLELVYADLLATVDALSDRRDRLNRALEQIARRDAYWSTVSRLRAFRGIDTISALGIHLEAGNWTRFATAKDAGAYFGLVPSLDQSGESKSSGAITKTGSRYARRLLVEAAWHNAHPPRVGLTLRRRQEGIPEPVRQISWACQRRLHHISRRFDERRVIPNKANIARARELACFLWAAATWQP

SEQ ID NO: 400861 - protein, 363 aa, unidentified
MRDGSTEQKMKMTVGLDLGDKYSYLCVLDTDSGEVVEEGRLRTNPEDLRRRFDSAEQMKVAIEVGTHSNWVNRILKECAHEVLVANPRKTRLIYGDKRKTDKLDAQKLARLARIDPELLYPIEHRGEESQTHLALIHSRDALVRSRTQLINHVRGTVKSFGERLPQCSAESFHKKVVDALPSELAEALEDVVATVASLTEKIRDYKRRIERVCKKRYPQESELLRQVPGVGSLTSLTFVLTLEDPDRFEKSRSVGAYLGLVPGKDHSGDRDPGKRISGEGDEMLRRLLVGSAHYILGPFAPDSDLRRHGEKIAERGGKNAKKRAVVAVARKLAVLLHHLWVAGEVYEPLHNARLSGAVGEEVA

SEQ ID NO: 400862 - protein, 265 aa, unidentified
MTVYLGIDIASKKFDVAELCDGNYRCKAFENTSAGFLALYKWLGQSTMPDIHACLEATGDYGTSLATFLYENKIKVSVVNPARIKGFGASELSRTKTDKADSKLIARFCKAAVPDGWKPTPAPVRKLQALVRRISALNGMLRMECNRRENADANIQASLDRIISLLKTEIEVVRQEIKDHVRSDDELKKQDALIQSVPGIGEVSSNLILSFMSGKGFRKAKEVTAYLGLNPRHHQSGSSVRGKTRMSKMGDTRLRSALYMPALVV

SEQ ID NO: 400863 - protein, 420 aa, unidentified
MVSRAAKLLGCQFRGSLANFLSSTRGGLACSRLASRRRPARSDSKEVWEQSTRSRNVLRALMAEVRPKRRYARMKVLIGVDPHKASLAVAAVDEASGELLERASFRQDRAGSRALERWAKRFSERRWAVENAGGLGRYLAGRLAASGESVVDVPPKLSARVRVLSTGNARKNDELDALATALAASRNERLAAVDPEAASEVLRLLSERREDLVAERTRALNRLHGLLRDLLPGGVTGKLSADRLARILRGIRPKGGASDRLRGRLASEILRDVRTLDRKIADLNWRIDAEVEASGTTVTQIFGVGPILAATIIGVVGNAARFPSKAHFASYAGTAPLEASSGESVRHRLSLLGNRKLNYALHMVAVCQARSDARGGAYYRKKIAEGKSRKEALRCLKRRICDAVFRSLLTDSQVASRGAA

SEQ ID NO: 400864 - protein, 495 aa, unidentified
MLNTTTFVGLDVHARSIKAVALDAMTGEVRSATFGYDAAEVAGWVSSVDPSAKCVYESGVTGFDLQKRLSSMGIDCVVGAVSKMIKPPADRKRKNDRNDAEFLARMLSVGNVVEVWVPDDGCEAARDLSRALDDAREDLKRCKQRLSKFLLRHGYAFSETTPTGRRKGSWTAAHWAWIKSISFPEKADDDVLAYYVDAVRQAMEDKARLERLVEAEASKPRWKRRVDSVRCLKGIDVTSAADLVFEAGEFSRFKSARSFAAWLGLTPSEHSSGESVRQGGITKAGNKHLRRVLVESAWHYLGCSPHSKDLAKGQVPDPAARRHAAKGVRRLVERRRAMLERGVHKNKANVATARELACWCWAVGCMVENGYSLGGEQSGHVIFSKYSNTGDGINTSLRIIEAMLGSKKTLSELTEPVKIYPQLLKNVVVADKDAVMADERVKAAVAGVETALEGEGRALVRASGTEPMVRVMVEAATPAICEQYVGEVVRVIESL

SEQ ID NO: 400865 - protein, 322 aa, unidentified
MNKYTDYFGIDISKDSFDVINLQGKHFLFQNDKNGFSEFLKIIPKGSLCVMEVTGIYHLHLANFLHLKNIAVSVVNPLRIKRFSQMHLRRNKTDKADAKMISLYAQTQDVDLWTPPHEILDRCKDIYQVMEQYVNIKKSLNNKLVSLKYKKSEDFLIDNISNQIQLVTEAIEELELELIDLIKGYNLTLFSNLKSIVGIGNRTAILLIITTNGFKHFENAKQLSSYFGFAPTELSSGKSIRGSRKISKMGNPLVREKLYMCSLQAFRSNKACSELYQRLIAKGKPKKLALIAVANKLLKIAYAIAKSGLPYDPEYKSVRIIS

SEQ ID NO: 400866 - protein, 338 aa, unidentified
MLYVGMDVSKKTCYITVKDEKGRTMQTEKIANSLEALDEFVEGLEDKAKFIMEASYTWEHLYDRLEEKGHEVCLANPVKTKLIAETKIKTDKIDSNILADLLRADLVAKVYVPDKDVRELRSIVRHRASLVKMRSMTKNRMHAILAKEGIQTDVSDLFGKAGMLFLKSVQLREAHRFAMENYLKLLEELNERIDETSKHIEDLAKDDKQAQLLTTIPGIGIYSAMLILSEIGDISRFENEKKLSSYAGLIPSTYQSGNVEYHGHITKQGSTWIRWVLIQAAHVAVRQDNFLQRFYIKIAKRKGGKIAIIATARKMLEVVYFMLKENQTFHADGKRHSE

SEQ ID NO: 400867 - protein, 419 aa, unidentified
MQSQAPAAFAAFVGLDWADAKHEVCLQAAGTAQREFLSLEHSPEEINAWVQTLRTRFNGQPVAVCLELTKGPIVSALRTYDFLVLFPVNPLTVAKYREAFTPSRAKDDPTDAELQVEILLKHRDKLTPLRPQSPTMRALAQLVEHRRRLVGDKVRLTNRLTSALKNYFPQVLHWFPEKDTAIFCDFLSRWPTLKAAQLARRTTLEGFFRAHHVRSTDLIATRIEAIKSARALTTDDGVIAPNVLLVHALVAQLRVTVQAIADFDQAIAQRAQDHPDFPLFDALPGAGAVFAPRLLVAFGEQRERFTSADALQKYAGIAPVTERSGKKSWVHWRLQCPKFLRQTFVEWAAESTRHSFWAQVYYQQQREKGKAHQAAVRALAFKWIRILYRCWQNRTPYDESIYLQALNRRSAPLLHNLAK

SEQ ID NO: 400868 - protein, 315 aa, unidentified
MSHTPVFVGIDVSKAQLDVAVRPEGRFSVVHDEHGLAELVTKLQAIRPALIVLEATGGMELRLTSALALVGLPVVVANPRQVRDFAKATGQLAKTDAIDAQVLARFAEVIRPELRPLPDEQTHALAALVTRRQQLVDMLTAEKNRLASARTSVRKNLRAHIAWLERALRQADTDLADAIRQSPVWREKDELLRSVPGIGPVLTTTLLAHLPELGTLTHKQIAALVGVAPLNRDSGTLRGRRTVWGGRAHVRTALYMAAIVATRFNPVIRAFYHRLCAAGKAKKVALVACMRKLLTIINAMLKHRSGWNPTLGGHA

SEQ ID NO: 400869 - protein, 412 aa, unidentified
MKDLLEISCGLDVHKEKIVACILTGPLGKPTRSEIREFSTLIPDMIALRNWIVSKNCHHVAMESTGIYWMPIYEILEDAFYGDITLLVVNARHMKNVPGKKTDMRDSEWISTLLRAGLLNGSFIPEKRIREFRDLNRYRKSVIRDITSQKNRIEKFLQSSGFRLSSFISDIFGASGRNIILHLIEHGQIDKTALDSCLKTKTRNRIDEILMSVNGTLSEHQKAFLRILMTHYDSLKKHLAEIETSLEEDMAPFTLQVEQLNSIYGISTTASCAIIAEIGIDMNPFKTAEHICSWAGLCPGNNESAGKRKSTSVTKGNPYIKSMLCEIAWVIAGKRNTYLSAWYWRIKQKKGAKKAIVALARKLLVIIYTMLKQGTLFDESCFETRRKNCEQKQLSRYIRELEKHGYHVEAQS

SEQ ID NO: 400870 - protein, 341 aa, unidentified
MQITTIGLDLAKNVFQVHGIDGDEQVVVRKQLRRGQVMRFFQDLPPCLIGLEACATSHYWARELAKLGHDVRLMPARDVKAYVKRNKNDAADAAAICEAVRRPTMRFVSLKSAEQQAQLMQHRARDLLMRQRTQLINAIRAHMAELGIVSAQGRSGVKELLAIIADEGDIHLPLDARASLMVLAAQLEAMQTSIGLLEKRIVARHRSNQDSKRLETIPGIGVIGATAIAATVTDPAAFQSGRDFAAWIGLVPRQDSTGGKPRLGPISKQGDRYLRRILVGGAVSLLRRAKLSPQRYPWVTQMLARRPFKVVAIALANKMARIAWALLAKGGTYQRLRLAAV

SEQ ID NO: 400871 - protein, 344 aa, unidentified
MNCNAISIDLAKNIFQVCGVNARTKTLFNKKIKRKALLKFMAGHPPTTVYMEACYSSNYWGRELQALGHTPKLIPAQHVTPFVRGNKNDHNDALAIIEASQRPHIRFVPIKTEHQQEICCLHRIRERLIQSKTAVSNQVRGLLSEFGVVFETGKAAFISGMNEFINDDAYSHRLRKMMIDQFQEYNGLLKRILSIETELSQFINSTPNGKILMSIPGIGVIIASAILGAIDKGQAFKSPREFAVWLGLTPQQYASGNVSKMGGITKRGDRYLRKQLIHGARSVVNNTRDKTDQLSVWIKKLRERKSYNQTSVATAHRLARIIWILLQRQELYVPQAVIKAQGNA

SEQ ID NO: 400872 - protein, 315 aa, unidentified
MIPNIPNSCAETKSASCKAGNRKLMSETSFAGIDVSKERLDVETTLGQRWSCANRESDFAELIERLRKEPIELVVLEASGGYEGAVVGSLTAAKLPVVVINPRQARDFAKALGLLAKTDRIDAGVLALFGQRIRPEQRALKDEQTRELEALLQRRKQILGMLVAERQRLELARANDELMRQTPLWRETEELFKPVKGVGRQMLRVICASLPELGKLSGRKISALVGVAPYNCDSGKMRGKRQCWGGRADVRCTLYMATLAATRFNPVIRTFYQRLLKAGKAKKVAVTACMRKLLTILNAMMRDGTAWNENLHVTT

SEQ ID NO: 400873 - protein, 337 aa, unidentified
MGGVVMYQVFVGVDVSKDSFTACAIDQGRKKLFEISTSMDRKGFEELSRCLLKFQKDSILVGEESSACYHVNLSVFLAKEGYHTVVINPLLISNFMKLSLRKTKTDKKDAFVIACFLSMFHSSLQESSSLSSDFQELAREREKLSFQVSTLKNDIEKLLAVTFPEALKATNVYSKGILNLLKSYPSAWMIKTLSASEVAKLIKPEGKGRRPDISPEKILSLARDSIACMSPAREFILSQKISQLLLLEGELEKLNCILTDMCQECAVEDLEILKSIKGIGDVTAIHFLAEIGDVSRFDNYKKLIAYAGLDPTVHQSGRYVGQSKISKRGNRHLRRVA

SEQ ID NO: 400874 - protein, 403 aa, unidentified
MVVGIDVGKDKHHAFVGTARGICLFKKLVFENNLAGFARLLTTVDQLKAQNSLEKIVYGLEPTGNYHKPLARHLISSGCNVVLVTGQAVKNNRQLIDGRWDKNDTKDAANVADLVSRGRCLYYDCPSPQIYELRGLLSLRRRLKKEEHSLRMRIRNNLLAQYFPEMDKFYSASESESLAIVRWCLDPGKISVMEFDKFFNMVTKTRRGIAQTLRLRKIHSLAMESVGCPVGPAAEYEAELLVEKRWQVAKQIQKTADLIEDICLEFPEYSNLLTIPGFGPYISAKVLASIGDPFRFDNRKQVIKMSGYDLSAKRSGKTSNQAIPVISKKGNGELRYALYQAASVAAARTDLFRAYFTKILRGRERERGIKTKMRVKLAAKMLIIAWTLMKTKQPFDPEYLNID

SEQ ID NO: 400875 - protein, 345 aa, unidentified
MSIVGGLDIHRKQLTFDYLDTVTGEVKRGQITPADRKHVRAWLARFAGRGDVAFAVEGCTGWRYIAEELAAAGLEAHLAEPADTAAARGRKRHAKTDKTDARHLRTLLAEGRLPECWIPPEHILEYRALLETYHDLRAEHTAWVQRIHAVFFHQGAPRLGEGALRTEQGLAALRAAAAAHLSPAGQLQVATALDMLAATEARLQPLRHQLREAARHLTGAKVLAARLYGAGPVTALALTCWLAGAGRFSSSRKAVRFTGLDVTVWSSDRKGPPGRLSRQGPPVLRWAVYEAGKTHGRAAAPDHAYYAAVKDRKNGKRAALSEARKIVRQACHILAELGDDALTAT

SEQ ID NO: 400876 - protein, 339 aa, unidentified
MLIIGCDYHPSVQQIAWVDTETGECGERRLMHHVEAEQFYREMKGKQVRVGMEATGHSRWFERLLSELNFELCVGDPAQIRAKQVRKQKNDRRDAEHILKLMLEGNFPRIWTPTPQNRDLRQLVLHRHRLVGMRTRVMNQLQAVAMNEGIRRKKGLWSEKGRAQLESLSLMPWTARRRQELLELLDQFDPNIDELSQTIEQEAERIPEVKRLMTHPGVGPITALAFVLVIGTPERFGCGKQVASYLGLIPCEDSSADRWRLGHITKQGNTVLRFLLGQAAQSVARCEEQWRRQYVHLTMRRNKAIAKTAMARKLAVRLYWMWRNECDYQQLNKFGSHVG

SEQ ID NO: 400877 - protein, 370 aa, unidentified
MDVHYKFSNVTFRDSAGSVVRRERLEHPERDQLRARIGRWPKGTPVVLEASFGWGWLSDLMAEAGLEVHLSNCYKVEQMRKARGLVKTNKKDADLTSLLPLEATNWWELWRAPQDVRNRREQMRFRSDLIALQTTVKNRIHAMFHRHGIFHEFSDLFNGKGRLFLAELCINGSNCLSQEAMQAFRGQLLLLDHLRKQLASVERILKGQLDTTPLIRRLKTIDGFGLILSHVMMAEIGQIERFRGHKTLASYSLLAPRANDTGEVDPEHTPLGRHLGNRGNKTLKWAFIEAAHGAVRHGGKWRAMFDRVTDGGKKDRNRGYIKVARELVKAVYVVWKKNVDYTDNPSRRPGQGSKKSRSGTGQLYRPMVHA

SEQ ID NO: 400878 - protein, 309 aa, unidentified
MGTYVGIDVSKDRLDVHVLPQDEAFFVERNGKGLAALVERLAPLVPSLVAIEATGGFETTTAAAVAGAGLPLAVINPAQIRHYAQALGKRAKTDPIDAAIIARFAADIRPEPRALPDEITAFLADLVARRRQIVEMLQAERQREKRASIRRLKKSIARLIKALEKELAELDSDIDETLRGSPVWRQTEDLLVSVPGIGPQIARTLIAEMPELGTLDRKRIASLAGLAPYTRQSGLWKGKSMIGGGRKAVRCALFMAAMVASRHNPVLKAFRDRLVAAGKSKMVALIAVARKLITILNAIIRDKKPWQTA

SEQ ID NO: 400879 - protein, 330 aa, unidentified
MTNATSRESAPRPLDFVGVDMAQQTFEWALHGVRGTHGAANDDSGFQSLLEALKGRRVGLIVVEATGGLERALASFLLRHGLPVAVVNPRAARDFARGMGHLAKTDAIDALALAHLAQTLAAKADQAGVAFVAPSQQVEALQAMVARRVQLLNMRTAEKNRLNGAVRVLRKSIEAVIKTLDKEIAKLERDIDAHLERYFKEQTQRFEAIKSLGPATCATLLAFMPELGSVSNARAAKLAGLAPLNQDSGKARGQRHIWGGRRIVRCALHMAMLTAVRFNPVIKVFYDRLIAAGKPKKVALTACSHKMLRILNAMARTGQPWDEKSHAVTP

SEQ ID NO: 400880 - protein, 320 aa, unidentified
MSASSVVVGIDVAKAHVDVSVLGAKLDAQRFDNQAEAHSALTAALKPLDVALVVMEATGGYETELACALQGAGLPVAVVNPRQARDFAKSMGRLAKTDTVDARMLAEFAAVLLRRDDLARFLRPLADPQQQWLAALVTRRRQLLAMLLSERQRLQITPKGLHPSIEAIVAAIKAQLDEIEAQMVGHVREHFGELDRLLQSASGIGPVASATLIAELPELGRLNRREIAALVGIAPMANDSGSSKGRQRIQGGRFDVRRVLYMAALTATRRNPVVKAFYERLIAAGKLPKVALVACMRKLLTTLNAMVKSNKPWDNSLHGA

SEQ ID NO: 400881 - protein, 403 aa, unidentified
MEGPLISLDVSKGKSNYRFFENGTDRKGKKGVIRHDIQGFDSIRDEAEKMEERLRIKPSVILESTGVYSDVVEKYFTDKGFDVYVISPLLSASMRKEGVRPAKNDSLDTLSIAKVFYSKDDLRKCSENDKKAERLREMSYELDMMNRRIRPMKCQFLRLLDKVWPCLDEVSDYSSRFMPDFIIAFGHPENIKTVKGVLSVIRKSEMGTAGRKDKIAQDLFDYCHTHLSAVSKDSFYVELLKRMAIELKAMAKKKSELIDRMAEEARNKDEFVRLLTIPAVAKTTALKIMARVGDISRFRNAEALVAYCGLDPRVYQSGKMTGEHRTITKKGDCILRSTLFLAVKLMVMLYPDTKVARFVAAKAKNGLSYKQAVVAGSAKLARIIYSMLTHHENYVEFNADIVA

SEQ ID NO: 400882 - protein, 461 aa, unidentified
MKKNRARVGRRRAVSTESSIINIDTHPDAAGIDVGAEEFVAAVPRGRCEQTVRSFASFTSGVWALRDWLLQCGVKTVAMESTGNYWITLYDVLTAAGLDVYLVNARHVKGVPGKKTDVCDAQWLQQLHAAGLLRKSFRPALDIVPLRFLLRHRSELVGDAAKQLQLMQKVLTEMNLKLQHVFSDIDGASAQAIIAAILDGQRDPEVLAGLRDPRCRSPKQAVLEALRGDYRPEYLFVLGQCRQIYLKLRESVADCDRQIGELAARVQCEVVVGELPAAPKDQHKRSKNCPQFEVFQSAWRFYGVDLSTVPGVSAAVLCALMSEVGNREQLLAAFPTPERFASWMGLCPDNRISGGRLLKAKTRKVKSRLAGTLRLGAFGLQKSQSAMGGYLRRMKSRLGKAEGTTATAHKLARIIHGMIKSGKPYDEKEAFKPTPQNEARRRRSLEKQAAALGLTLQPMAA

SEQ ID NO: 400883 - protein, 485 aa, unidentified
MKQTKSSPCARAIPAHGGQLSRKERRELARQVQSEQVTLQIVHSNAAGIDVGKNTHYVAVPPDRDAESVRYFDSCTDGLQQMVAWLKKCGITSVALQSTGVYWIALYDLLQEADFEVYLVNARYTKSLPGRKSDVQESQWLMKLHTYGLLPNSFRPPQEIRWLRSYWRQRQNHVRSAASCIHRMDKVLTEMNVRLSSAVTDLSGATGLAIIQAIVDGERDPHELAAYRDPRVKATQEEIARQLHGNWQADLLFRLKQELQGYRFYQTLIAECDQELAQLLRAFPDRSAGVALPEETRKNRRKKKRGNSPQFDLRQLLYLMSGVDLARIDGIDVITAMTVVAEAGYDMSPWPTADHFVSWLRLAPDNRISGDKIIGKARTPTQNRLSQALKMAASSLKASKTYLGAQFRRLRARRGPAIAVKAMAAKLARLVYNMLRHGMEYVDRGTEFYEQQQRERRLHALTKNAAQLGFQLVPTELSLAGTGTI

SEQ ID NO: 400884 - protein, 342 aa, unidentified
MDHFAGLDVSVKETSICIVDDTGRIVREVKVASEPEALLKVLGNPTYHFKRIGLEAGPLSQWLFSALAEAELPVVCVETRHMQAVLKAQINKTDRNDARGIAQMIRAGLYRPVHVKTLRSQKLRMLLTHRKLLQSKAIAIENDLRGTLRNFGLKVGMVGQLKFEARIQELVENFPDLAVLVEPLPIVRRALREQIVILHRRLLAIVRDDEVCRRLMTTPGVGPVVALTYRATVDVPARFRKSKSVGAVFGLTCSKYQSGEIDWSGRISRCGDEMMRVMLYEAAQSMLRSKRWSWLKAWAMQIARRRGMKKAIVALARRLAVIMHRIWVDGTEFRWTKETAAA

SEQ ID NO: 400885 - protein, 394 aa, unidentified
MAVLRSKTDIVIRPFNVTHNSQGFANLLEKLGSLDGEVRVVMEHTGNYYESIANVLHENGLWVSAVNPLLLRNYGDNSLRSVKTDKADAKKIARYTLDNWEELRQYTPMDTIRYQLKTLNRQFQLASKNRTACSNNLIALMEQSYPGVRSLFSSPVRPDGSQKWVDFTQTFWHVDCVAKLSLSAFTVKYQKWCKRHGYNFSSSKAAEIHEHAKTLFPLVPKSDTTKLLVREAITQLNTISHTAEVFPAEINRLASQLPEYEHVMAMTGVGTSVGPQLMAEIGDVRRFAQKSSLVAFAGIDPGRDDSGSKVSNKGRIGKRGSPHLRKTLFIIMPILLQLKSEDDSVYPFLDKKRSEGKPFYVYMTAGGTKFLHIYYGRVRDCLKEKGLWDVSSID

SEQ ID NO: 400886 - protein, 321 aa, unidentified
MSAILGIDVAKLKFDVALYRNGKYKHKVFENNPAGFDALAAWLQQCNVSEVHACLEATGAYGDGVARFLFAAGHTVSIINPARIKAYGKSELLRTKNDKTDAKLIARFCEAHKPPAWRPDPPEIEHLRLLGRRREALVGMRTQELNRLGGPDAAVNESIQKVIDFLNQEIEQISATIREHIGKHDGLRKKRDLLKSIPGVGEVTIEAILSEVNGFEDFDTVEKVVAFMGLSPKDHESGTSVKGKPKLCKIGSARMRKVLYMPTLSAIQHNPFVTALYDRLKAKSKNGMIIACACMKKLVHIIYGVIKTGKPFDPAYNLKNA

SEQ ID NO: 400887 - protein, 414 aa, unidentified
MRALVERCCGLDVHQDTVVACLLIGEPGKPLRQEVRTWATTTRALEALRDWLQAEKVTHVGMESTGVYWRPIYAVLEGPFVLIVGNARHIKTVPGRKTDVKDAAWIADLVRHGLIAPSYVPPQPLRELRDLLRYRRKLVEGRASERNRLLKLLETANIKLASVMSDVFGVSGLAILKALVAGETSPERLADLGKGPLRKKRADLVRALEGKVEEHHRFLMGVQLRRLDAADHDIAALNERISERLKPYTAEHALLMQIPGVDGLAAAAIIAEIGVDMAVFLSAHHLAAWAGVCPGNHESAGRSKSGRTRKGNVHLRTILVGAAISAGRCKGTYLRDKYHRLKARRGALRAALAIAHKILIAAYHMLARGVSYRELGEAYLDQLSQTRTAAHLKRRLERLGYHVTLEPKTVAMVT

SEQ ID NO: 400888 - protein, 349 aa, unidentified
MIVVGIDPHMQTHTAVAIDKATGEVVAELTVKARTPGFERLVGWARELDEELLFAVEDGRHVSGALERHLIARGERSVRVPPRMMGESRRSDRIAGKSDPVDATAVGRAALRHPDLPEAVLAGPERQIGLLVAHRESLVRERTDKICKLRWLLHDIDPELAPVPRSLNRFVTLRRLAQVLQAMDARVEVEICLDLIARCAEITTRANELERRIGSLVRTHAAALLQIPGCAALTAAKIVAETAQVGRFPTEGHFARYAGTAPIPASSGARHRQRFNRRGNRQLNTGVHRIAVTQIRMYEPARDYMAKKQAEGKTKAEAIRALKRHITRVVFKTMTSMNQPTDRLTAEAA

SEQ ID NO: 400889 - protein, 361 aa, unidentified
MAKARTLVGLDVHASKVVAAMLDAETGELRFSRTAGETGRTLALCSELEAPVLVAYEAGPTGFGLARALRAAGIDCVVAAPGKIPRAAQDRVKTDRRDAEHLVRLLLAGKLEPVRVPSTEEEALRDLVRAREDVRGDLMRARHRVSKMLLRHDRRFSDGQQAWSQRHRDWLARVELDDPVAQLVLVDYLAAVEAMLIRRDSLERRIAELLPGSPWSELVPRLRCLRGIDTLTAAGLCAEIGDFERFARAGQLMSYLGLVPSEHSTGERRRLGSITKSGSRHARRLLVEAAWHYRRAPRPRGELSQRQAGQPEHVIALAWKAQQRLHRTWRRLDQERGKRRTLVAVAVARELAGFVWAVARA

SEQ ID NO: 400890 - protein, 374 aa, unidentified
MENTITYVAMDTHKKQHKIALHYPCQEEIVEFTINNTVRDIKKMVNKIKKQAPGKVKFCYEAGVCGFTLKRRIEQFDCRCIVIAPSLVPRKPGDRVKTDRRDARKLLMMFKAGLLTEVHAPNEHQEAARELTRLRETARDNLKRIRHQLLKLLTRHGYVYTDGRHWTQKHITWLRTVEFAESTLTNVFENYFNEMIYCIGRLENLDKEVGLLAGSPEYKEIVGLLCCYHGIDTLTAITIITEIFEFGRFESPRHLMSYLGLTPSEDSSGENQKKGAITKAGNKRIRRLLNETSWHYRHRYVPSAALKKRRKGQPQWAIEIADTAGRRLSTRHRYLTNKGKMPCKANIAVARELAGFIWFTVTQYQARKNTNDAA

SEQ ID NO: 400891 - protein, 460 aa, unidentified
MNEYFIGIDASKGYSDFVMINAKKQTVIENFQLDDTFQGHTRLYELLHGFNQDYPEATIYAAVESTGGYENNWFQSLLKFQASLPIKTAHLNPLGVSHNSKADLKRNNTDKISAKNVAEYMIAHPEKVSYQHQDSLASLRKQWGFVTMLTKQSTQLLNQLESLVYNANPEILIYCKGDTPQWILKLLTSYPTALRLSRAKVKVLARIPYISLDRAKQLIATAKKSVASASDKVTEQLIVATVKQIVHLKKTIKVQSEVLANECQIPEVALLKTFTGIGDYSAIGLMLQIQSVNRFLTSKKLASFFGIHPEYKKSGDGTYKYRMSKKGRKEGRRVLFIVAMSAIQSNPLIRDVYQQAVERGMEKMSAMGLCMHKILRILYGMLKHNKAFDPQIDLKNRQKKPPQKRKISQDKNRRYQNFDSKAPISRRQKMRRKERKQSQNVNNVEYGISEASVPSTQLAN

SEQ ID NO: 400892 - protein, 352 aa, unidentified
MRTSQKTAGIITTIGIDLGKNTFHLIGFDQRGAIILQQKVSRGQLERRLANIPRCLIGMEACSGSHHIGRQLQAAGHDVRLIPAQYVKPFLKGHKNDYRDAEAIAEAVQRPTMHFVAIKTPEQLDLLALHRVRSRLVGQRTGVINQIRGFLIERGITVRQGPMPLRKALAEILSSDTGVLSPRMVGLVTDLVQDWRRLDERIAAVSAEVEALAEQDDGCQRLMTVPGVGPIISSAVVAAIGNGTGFKQGRDFGAWLGLVPKQESTGDRTILGKISKRGNKYLRTLFVQAAHVVLARRPSAAMRGLWPWIEQASKRLHRNMLAIALANKLARIAWAVLARGRAYQPRISADAA

SEQ ID NO: 400893 - protein, 345 aa, unidentified
MECYVGLDVSLKLTAICIVDRTGKIEREGTVPSDPEAIATFVKTHAPHVARVGLETGATATWLWTELNKLGLPVICIDARHAKAALKMQINKSDRNDAVGIARIMQCGWYKEIRVKDLDSHAVKALLVSRALLVKIKRDLENQIRGLLKNLGLVIGRAKMNVFAVRAAELTEHRPELAAAVAPLLNARAAIELQIADLDRKVMRLARNNAQARRFMTAPGVGPITALCFLATIDDPTRFKRSRSVGAYLGLTTRRYASGEIDWTGRISKCGDKMLRSYLYEAANVILTRVARWSALKAWGIRVAKRTGLRKAKVAVARKLAVVLHRMWIDGTEFRWSKEAANQPA

SEQ ID NO: 400894 - protein, 379 aa, unidentified
MKHGNSAESVPVLTIGIDVGDRRSHACVVDRSRTPLEEFSFATHEVSLCQRLQREGCQVVLEVGPHSRWIQKSLEQMGHKVRVVDARKIQLISKGNSKTDKRDARLLAQLGAGAPEVLGDIKHRSDQAQADLTVLLTRDHFVQLRTATVNRIRGVLKASGVKVPKMATKSFHTRVGQLVPDALRPGIVPLIEELSSLHQRIRALDKEIVAMAGRYPAALKLAAVSGVGTLTALAFMLSLDDPSRFKKSREVGPFVGLTPRKHSSGEKDPQLSITRCGNPFLRRILVQAAHYVLGPFGPDCLLRRHGMRIVERGGKHAKKRAAVAVARKLAVLLHRLWVSETPYDPWYRSKDAPPSPDVKVKARIFERTSKKKKPVVRNA

SEQ ID NO: 400895 - protein, 360 aa, unidentified
MERNRMFVGLDVHAWSVTGHGLDAATGEVWQRKLTPDPADILAWVSGLPGPVKVTYEAGPTGFGLARHLVDHGVPCVVAAPSKLHRPAGDRVKTDARDAELLAHLLMLDQIVEVTVPSVVQEAARDLVRAREDVRGDLMRARHRVSKLLLRQGIVWTGGQAWTGRHDVWLRSQRFAQPGRQLAFESTYETMLLTAQRRDRLDQAITAMAEDSSYTDLVHRLGCLRGISTLTGFGLAVEIGDWHRFTGSTIGAFLGLVPTEHSSGQSRSQGSITKTGNGHARRLLIEAAWHHRKTYRNPGQVMRTRWEHASAAARARGHEGNRRLHHRWEGFTARRKRPVIANVAVARELAGWAWSLAVLE

SEQ ID NO: 400896 - protein, 376 aa, unidentified
MEHDSTLYVGCDVHKDSITIAYALDAGEVELPGKTGTTQADIDRLCKRLQSKAPRIRFVYEAGPCGYGLYRQLVNKGFDCMVCAPSLIPKKPGERVKTDRRDAIKLVRSLRAGDLSVVYVPSVDDEAFRDLARTWVSARDDLKRARQQLKAFLLSHGVRYTGRADWGAAHQRWLGAHAFDSAWQQLAFEEHRRTIEDRFAQCARLETALREAVPNWRFYPAVLGLQSMRGVQFTTAVGMLAELGDLSRFAHPRQLMAWLGVTPSEHSSGEKRRQGSITKNGNSCARKLLVEAAWSYRHPARVSPDIQRRHEGIPKPIVDRAWDAQVRLCRRFRKLVARGKQKNIAVVAVARELAGFIWDIGRLAMSLALPHEVLHA

SEQ ID NO: 400897 - protein, 433 aa, unidentified
MAKETIFETVHENVAGIDIGAEQIFVSPDGKEVRTFETFTSSYHACALYLKEKGIKKVAMEATGIYWIALYFLLEGLNMEVCLVNPKETKQIKGRKTDVKDCQWIQKLFSAGILRYSFIPEGKYMELRQLVRERLDIIDMGSTYVNKMQKCLELMNIKLKEVLSQIHGKSGIRMIKAILAGIRDGASLLSLCAEQIQKYKGEQVLKALEGNYNETYLFMLQQNMELWEIHQERVTAIDVRISQLLDELSMGKEEVAVGKKKPIRHHKPQIIGLHDTMARLYGVDLSSISGINDYTALRLIGETGTDMSRFPNVKSFVNWAGLAPKSHRSGKMNKNVRGTPCNPTGQIFKECAQGLMNSKYIAIGSFMRKLRGRKDSSIAIKAGARKLAMAYYNALTKGIAYVEQGIKQYEEQIKRKELASLKRLAKKHNMQLV

SEQ ID NO: 400898 - protein, 372 aa, unidentified
MEERTKFHVGLDVHKDSISVAAAELGRAPARLIGKVTHDLNKLVKVLTKIGSAEQLHIVYEAGPTGFGLQRALKERGYLCEIIAPSQIPRRSGDRVKTDGRDCIQLAECSRAGQLSAVWIPEPGDEAIRDLARAREDAVNSRVQARHQLKGFLLRHDIRYTGRTSWSIAYYRWLSTLNFGAGAAQTAFTEYWHAVEAADARVERLTKALEGSITGWRFEPVVGALQALRGVAAITAISLTAEIGDLTRFSHPRKLMGYLGLVPSERSSGERTSRGSITKTGNAHARRLLTEAAWNYRFKARIGREALARQEALSESIRTTAWKAQLRLTKRFAALRDRGVQINKACVAIARELAGFIWSIALQAQREKAQAA

SEQ ID NO: 400899 - protein, 471 aa, unidentified
MGKGSGTTRGDRRRNARRERLRAVLPRDGAVVGIDLAEDKQALAVIDHDVRVLARKTVKVKVFRLGEALDWAVAQARAKGFTAVAVACEPTGPRWLQVQRLCAERGLPLVCIQPLISHIAREQQDYTSHKTDEADCVMIARLAVELHCYLPEQLDETWAHLRHLGRRRAQLITQATASAQRIRDFLSVAWPTVTETCAQPLESNTWLAAMQVVTARCGADPARLAVMGVEEFTALVRGAVAGWGGKRAWGTICARIFAALTDTEGVVVSSRRGLLRRVADELGDLQRTRAQQRAAEADMVSVLAELGLSRLGDIPGLTAVGAAAILAETGDPRRYDSSSSLVKHAGMSPSDNASGAFYGEAHISRRGRPGLRLTVWRAVWPMLRFNPVMAAKYQAMTRAADTAAEAAAAQADAGSRQVTAAAAAARARRAKARVACAASLLRWIYIIVVHDTSWDPAAASGAAARHQAEAA

SEQ ID NO: 400900 - protein, 344 aa, unidentified
METRHIGIDLHRNKFTCCVRLENGRNYLSAWQLEDLPRFVSKLRSTDEVAVEVTGNTRLFYEAVAPQVARVVAVDPNQFHVISRSVKKTDDNDARALALYLSKGLLPEVRMKDKQQAQVASLAQTRDTLVKVRTALKNKVNNILSAHGINLEKETLSSEKALTAVLGLRFDAMVEMELKVIIDQIRSLNKSIAELEKTLSQEGSKLEGHKNLTSIKGIGPLTGAILLAVIGDIHDFADEGKLAAYFGIVPRIHNSNQTERSGRITKRGSKLGRTALVQCALIAQRYSPYLKQYYERIKARRGTGRAIIALARKLLGIIYRTLKNNWVFADFPNFVLAEPAEVEA

SEQ ID NO: 400901 - protein, 351 aa, unidentified
MNIKHYIGLDVHKKSISYCVKTADGKIVEEGKLRATRQALRAWAEKRTEAWHGAMEATLFSSWIYDVLKPFAAELQMGNPSMMKAIGAAKKKNDQLDARKIADLVRCNLLPVCYVAPPEMRDLRRLLRYRNLVVGQAVQMKNRMSGLLMEVGAEYSKQRLHGAKYFSELLEQLDEVPESVKDLLRLSRGALETFAATQRQLLDRLQKEPLLVKRVKLLRSIAGVGEVTALTWALEICDPRRFSSIADAVSYCGLTSALNASADKQQRGPISKQRNAHLQTVLIEAAKLAPRWNRQLAEVHERELKCGNRNRATLAVARKLVSYLLAVDKSGQPFVVRNPPAREREEIEQVA

SEQ ID NO: 400902 - protein, 360 aa, unidentified
MKKVSKQMQKMEAQEKPEMTVGLDLGDRYSHYCLLDGDGDVVEQGRIQSTEAALRRHFAGEFEMRIALECGTHSPWVSRLLTTLGHQVIVANARKIPAITGSESKNDRNDAEKLARFAAYDPKLLSPLQHRSAERQLDLNLIHARATLVRARTMIVNALRGLVKSAGGRLPACSTESLPARVAQVIPPALAVVTTPLTEQIALLNTQIDGMDKQIEKLAAKYPEIRLLRTVPGVGPIVAAAYVLTLDRPDTASNRSAGAFLGLRPGQSQSGDADPQKRISKTGDSCLRSLLVQSAQYILGRFGPDSELRRWGLKLAATGGKRGKKRALVAVARKLAVILHSMWRNGQSFQAFPQQAAMAA

SEQ ID NO: 400903 - protein, 376 aa, unidentified
MLYVGIDIAKNKHDVTALNVPGKTVLKPLTFSNNKAGFELLDLSLRQLNQDCLIALENTGHYAFNLLNFLHEQGYKVYTYTPLLIKEFAKSLSLRKTKTNKKDAHGIALKLLSDPNREQFQHDNRQVELKILARHIHRLKKKQSDWKVQYTRCLDIIFPELDKIVGKHSEYTYQLLTRYPNPQKRIEAGFDKLIEIKRLTASKIQDILSVAPRSIGTTSPAREFEIIEIIKHYKRLIDKAETCVNDLMAEFNSVITTVTGIGGRLGAVILAEIRNIHAFDNPAQLQAFAGLDSSIYQSGQIDLAGRMIKRGSPHLRWALIQAAKACARFSPAFKAYLKTKLEQGKHYNVAIIHLAKKLIRTLFYILKKSCHLTNKK

SEQ ID NO: 400904 - protein, 306 aa, unidentified
MKEKLRFLGMDVHAETIAAAIAEPDGEVRSLGTIPNRMESVRKLIKKLGPVEKLQVCYEAGPTGYVLYWQLAELGVQCEVIAPSLVPVKAGDRVKTDRRDAEKLARSYRSGDLTAVWVPDEGSEALRDLVRAREAAKQDELRARHRLGKFLLRSGHRPPSGVRAWTHLHLIWVSQIRFTQMAQESTRLDYLHEVEHMRERILRLEQAIAEAVKLASPALQEVITDLQALRGIAHISAVTIAAELGQVSRFAGARELMGYCGAVPSENSSGKRTRRGSITKTGNAHLRRIVAKQHGVINVLPPSGPG

SEQ ID NO: 400905 - protein, 427 aa, unidentified
MTQTIPASSFAATIGLDWADKKHDLWIQPATGGKPEHLILEQTPEAIHEWVAKMCARFPNQRIAIAVETSRGAIISALQAYAFIVLFPINPKMLCSYREAFCVSGAKDDRTDAMLLEEYVRFHFAKLRPLNPDTELTRKLGGLVENRRDLVDERTRLVNQLHSLLKTYYPLIEVLFDDLTTLLATQFLLKWPELASLKKAGAVALRKFFYGHNCRSAETLEQRLQALEKAQPLTTDPALIEPAVLKVKALAGMLKVLHEAIAEIEDHTNQAMDAHPEAPLFRSFPGAGPVMAPRLLVAFGTNRDRFENAQETQQFYGIAPVKKQSGQSKVIHMRHRCPKFGRQTFHENAGHALRKEGWTKEFYEQQRERKKGHHAAVRSLSFKLIRIYFRCWKDSKPYDRARYEKALDTHGSPLSAVLKKKVPSPTK

SEQ ID NO: 400906 - protein, 454 aa, unidentified
MKRKKKVLQVPKLESLKQINPNAAGVDVGASELYVCVPEDRDPRPVRVFQTFTSDLHEIAAWLKKCRVTSVAMESTGIYWIPLYELLEEAGFEVKLVNAREAKNMPGRKSDILDCQWIQQLHSYGLLTASFRPPRDIVALRSLVRHRDRLIVARAVHIQHMQKALHLMNLQLDNVLSDITGVTGMRILRALVAGERNLDTLVSYRDPSCKSSTQVIRESLKGNYQEEHLFPLRQSLELYDYHTTMIQQCDREIEQKYRALPSRVDLQRKPLPPSKKQQKKPRKNAPTFDLRSRLYEMAGVDLTAIDGCNAATIQVVLSETGVDMEPWRTCGHFTSWMCLAPHNDISGGKVLRSRAKKTKNRANTALRLAAQALTHSDSWLGAYYRRQRARLGAPKAIIATAHKIARIIYYMLKYQREFVDLGANHYEAQYRKRQINSLTKKAASLGLLLVPAKA

SEQ ID NO: 400907 - protein, 341 aa, unidentified
MQITTIGLDIAKNVFQVHGIDGDEKVVVRKQLRRNQVIGFFQDLPPCLVGLEACATSHYWARELARLGHEVRLMPAKDVKAYIKRNKNDAADAAAICEAVRRPTMRFVQVKSADQQAQLMQHRVRDLLMQQRTQLINAMRSHLAELGIIAPQGREGVKELLAIIANEADTQLPNDARASLIVLAAQLQALQTTIGAIEKRIVVQHRANKESKRIQTVPGIGVIGASAIAATVPNPKIFRSGRDFAAWIGLVPRQMSTGGKPKLGPISKQGDRYLRRLLVVGAVSVLRRAKLHPGKFPWITQMLARRPFKVVAVALANKMARVAWALMVSGKTCRAAWFAAA

SEQ ID NO: 400908 - protein, 458 aa, unidentified
MRKQDGKPAAPKVDWKTLEVVHPDAAGIDIGGQEHWVAISPDRDEQPVRCFECFTVDLGRMADWLVSHGVRSVAMQSTGVYWMPVFEILQQRGMEVYLVNARHTKNLPGRKSDIAECQWLLKLHTFGLLNNSFQPSDAVRAMRTLWRHRAGLVAQASSAIQRIQKTLIEMNIQLSNVLSDLSGVSGMAILEAIRAGERDPQKLAALADPQVKASKAVIAKSLQGNWRPELLFVLRQEMEIYRGCQAKITACDRQLQRHLRGMQSHIDPKKQPLGPRPKGKRARGNAPQFDLRAELYRLTGVDWSQVDGIDVQVAQTVIAEVGTRLDAFPSEKHFANWLGLCPTNETSGGKVLRRRTPKVVHRAKVAFRQAASTLLKSKSYLGAQYRRLRTRLGAPKAITAMARKLACLFYRLLTKGQQYVDKGAAYYESRHREQQVRSIMRKASQLGLKVLPAEGEVA

SEQ ID NO: 400909 - protein, 375 aa, unidentified
MEHHSEAFVALDTAKLRNAVAIADAGRNGEIRYLGEFDNTEAATRKLVTKLASKHSRLTFCYEAGPTGYGLYRLIKSIGHDCIVVAPSLIPSKPGDRVKTNRRDAVNLVKLLRAGKLTAVWVPDERHEAMRDLVRARDAAVKDYRIKRQNVSSLLLRLGRHYPGKKTWGRAHINWLTSLTLEHREQRIAFEEMLVAVRQVRERIERLEQAMREAVAEWTLAPVIEAVQALRGIDMVGAVVFLAELGDLSRFENPRQLMAYLGLTPSERSTGESVKRGGITKAGNTRARRLLIEAAWSYRFPPRVSKDMQARIGAAPQTAREIAWKAQMRLCGRFRTLTRKGKRPTIVVTAIARELSAFIWAINREVAGSHATANQ

SEQ ID NO: 400910 - protein, 393 aa, unidentified
MICVGIDVAKDKHDCFILNSEGEVLADVFTIPNNAEGFDRLLQTIRRCARPEDKMKVGLEATGHYSYNILGFLLNEGLPTYLINPLHTNLYRKSLSLRKTKTDRIDARTIAAMLMSDVDLKPYTDTAYHNEELKSLTRYRFDKVCERAKLKQSVSRLVTILFPELEKLVPTLHMASVYALLSEFPGAKQVAGAHLTHLKAVLYDASRGRYGRDMATTLREAARCSVGSVMPAKSLELQHTIRLIRELDAEIEDIETAIQSMMDEIQSPITTIPGIGVRMGAMILAEIGDFSRFDSPDKILAYAGMSPSTYQSGQLSLSGTYSHMEKRGSRYLRYALYNATKYVCLWNPTFAASLAKKRAEGKHYNVALSHAAKKLVRLIYAIEKSQKPYCSAA

SEQ ID NO: 400911 - protein, 347 aa, unidentified
MRIVVLGIDLGKNLCSLAGLDETGAVILRRRMKRASVLPFTAQLETCTVAMEACCGAHHLGRQLVAQGHLVRLMSPAYVKPYVKAQKNDERDAEAIAEAATRPTMRYVEIKSEAQLEVQSLHRVRGRLVAERTALINQLRALMLERGIAVPQGRCKLERHLPEISADERNGLGPRLRRLIEDMREEWRSIDQRIKGYDDELAERVRHEDTAKRLIRIPGIGVLTATALVAAVGNAQTFSCGRDLAAWLGLVPRQATTGGKPRLLHISKRGNGYLRMLLIHGARTALPGLAKKDTPLGRWVKALLARAHRNVDRSAGQQACADCLGGARTRPPVCHRSSYRQMKGREA

SEQ ID NO: 400912 - protein, 342 aa, unidentified
MQQSIFVGLDLGSSHCHQTVINADGTIIRSRPVPTSEQHLRNSFADLQGDIHVHAEASELSDWVRSIINPLVTRFVISHPRSLAWIAKDSVKDDSVDARKLAELLRFNLVHEVYYEDRADRRSFKQLVVHHEQLSREQARLKSKIKARLRTLGIIRKDSRLFSEAGQSELFASITDPLIEQMFRQSFAVLNQMLISLMDAKTAMIEFSRRLPEVRLLQTAPGVGVITACRFVAYIQTPQRFSNKQKLWRYARLGITRRESNGKRLSHPHLDPAGCGSLKDVSRKIFEAARRTKTDNSFKRLYEQSLANTKNAVHARLSTQRKILATLRAMWQANQPYRNDGG

SEQ ID NO: 400913 - protein, 347 aa, unidentified
MAAVMIGVDPHKGSHTAVAIDTAEEPLGEVRVRACAAQADRLLAWAAAWPQRVWAVEGAAGLGHLLAQQLVAAGEQVVDVQPKLGARVRLLASGDTNKNDPNDARSVAIAALRSPARRQVAPDDHAAVFKVWSKRHRDLGRSRTQVACRLHAVLCELVAGGVAKEITAGHAARLLESITPPGAVEAARCELAAAFLDDLRRIDAQLLETKKKLNAAVRASGTTLTSIFGVGPVVAATVIGDVRDVARFPGRDHFAAYNGTAPIEVSSGRRKIYRLSRRGNRRLNHVIHMAAVTQIRYRHSEGRAYYERKLAEGKTPKEALRALKRRVSDAIFAQLQADTRRAAAGSR

SEQ ID NO: 400914 - protein, 355 aa, unidentified
MRSTAIQYVGIDVHQATLVCVVKDETGQTTMESKVATRREAIESFVRGLGGRVRIAFEEGSQAQWLYELLRPISEQVIVCDPRKIATKGNKDDQRDAERLCELLRLNALQAVFHDHSDQKLKELVRCYEALVDDSLRVMLRIRAIYRSRAILVKARSVYHPARQAEWLEQITDGGGHFRAEQLYLQLDQLLELRRRARTMVLRQACNQRAYRLLRTVPGIGPLRAAEIIAIIGDPGRFRTKRQLWAYAGLGVITRSSGEWITDSSTGRIRRSSRPPLTRGLNRNFNRPLKKIFKMAAHDVTGRPGELDQCYERMTARGIRPEMAYLTLARKIAAIVLAVWKKGVSFDPRLIAQSV

SEQ ID NO: 400915 - protein, 428 aa, unidentified
MSENSTTHPEPEFVGFVGIDWADQKHAWCSPRAGATQREQGELEHTPEMVEAWVSQRAQRFGPGPIAVAVEQGKGALVFMLNQDEGLHLFPVPSTMSASMRKSLYPSGSKDDPRDAELLLDLLLQHRKKLRRLMPDKEVTRRIQNLVEERRTWVDEKTTQLNRLTGYLKVYFPQMLEWFEKLDTKLVCDFLERWPSLEELQKVAPAELRKFFRQRRGRHQELTERRLEGIRQAMPAIRDRAVLEAKQAMVQVSAQLLRTLLEGIANLDSKIEEAASAHPDFFIFKSLPGAGSALAPRLLAAFGSQRDRYGSAEEVQKHSGIAPVMERSGKKKWVHFRWACPKFLRQSFHEWAGHSISQSAWARAYYQQQRGRGKDHHAAVRALAFKWIRILYRCWQDRVAYDENKYLAALARRGSPLSFVLTVTAPTL

SEQ ID NO: 400916 - protein, 329 aa, unidentified
MKKSYIIGVDVSKLKLDMHCYGQSNGLVISNDGKGFKSFLKWVKKAVSKDITEVMVVMEYTGIYTYGLEQFLQQQAIAYVKRPALDIKRSVGMKRGKTDQADARMISQYGWYRREELKPMKPVSDAHQQLQQLMNYRDKMVADRASYEARVNELKTQLGEKLPAQITASSDYIMEVLSVEIRETQQAIERVIEGDKELKVNYDLVKSVQGIGFVTAVHMLIVTENFSRFSNPRKFACYAGVAPFEHTSGSSIRGRTKVSQLANKKIKSLLTLAAICAVKHDPELKAKYAQKIQEGKAKMSVLNMIRFKLIERIFAVIKRQTPYILSQAA

SEQ ID NO: 400917 - protein, 464 aa, unidentified
MRSRKTLASKKKQSGRKNVDWKVLDIMHPDAAGIDVGGNEHWVAVSPDRDAEPVRRCGCFTADLRAMARWLTEKGVRSVAMQSTGVYWMPVLEVLEQHGLEVYLVNARHTKNLPGRKSDIQECQWLLKLHTFGLLNNSFQPTDEIRIARALWRQRGNLVADASSAIQRIQKALVEMNIQLTSVLTDISGVSGMTIIGAVLEGERDPWQLAALSQPGVKAIPADIAKSLEGNWRQELLFILKQEVELYRVYQKKIADCDSQLRKHLKSFESKVDLRTQPLGPKPKGKKGSKNAPAFDLRTELYRITGIDWAQVNGIDVLTAQTVIAEAGADLSAFPSEKQFASWLGLCPSNEQSGGKILNRRTRKVVNRASVAFRNAASTLLRSQSYLGAQYRRLRTRLGAPKAITAMARKLACLFYRLIKHGQQYVDKGKEYYESKYREQQIRSLTKKAQRLGLQLVGQEMMPA

SEQ ID NO: 400918 - protein, 354 aa, unidentified
MTRTIKYVALDVHQATTLASVRAETGRVIARTILPTEAPALAEFFRGMRGTVHVAFEEGTQAQWLHDLLVPLVHRVVVCDRHGEPRRGNKGDRVDADQLSARLWRGELRAVYHGSTERATLKELTRAYRHLVEDATRVMLRLKALFRARAIPTRGTNVYQARARGQWLAQLADRGARFRAEALYAELDVLRKLRPKAKAAMVTEARQDPAWPVLRTIPFLGPVRVALLLATMQTPWRFRTKRNLWAYAGLAVVTRSSADYTIVAGQAVRRRRPPMTRGLNRNHNRVLKDVFKGAATAATSRPGPLQDFYHSVIARGTREELARLTLTRKLAALTLRLWKKGERYDPTKLTTPAR

SEQ ID NO: 400919 - protein, 351 aa, unidentified
MLIIGCDFHTRFQQIAMVDTTTGELVKRRLEHGTGEAERFYAALPAPARVGIEATIATQWFENMLTRYGHELWFGDAAEIRAAMVRKQKTDDRDALHILDLLMQNRFPRIWVPSTAERDVRQLVRHRHKLVRLRTSVMNQLHALAMGQGLCLRKKLWTTVGRQKLESLQLDPWASLRRKELLGLLDQLDPSIQQLDRAVISEAESRPAAVCLMQQAGVGPVTALAFVLTIGPVSRFANSKKLVSYLGLNPIEESSGGRQRLGAISKQGNTMMRCLLVEAGQTAARLDPELRRDYQRLKFRRGHSGVAKVAIARKLAVRLYWKLREAAQPNTAARMQGSPAHSVVGESLSSF

SEQ ID NO: 400920 - protein, 310 aa, unidentified
MLEAMINSCAGLDVHRRQVVCTLIRDATRTTRDYPTFDRELKDLARWLKGEKVELAVMESTGIYWKAVFASLERAGIEGRVVNARHVKQVPGRKTDVCDSEWLAELAQCGLLRSSFIPPADLRELRLMTRYRRKLSGMLAGEKNRLHRVLDDAGIRLGCVVTDIDGVSARAMVEALISGGSTPEQIAEKALGRLKEKKDALQLALEGEISDRHRLVLQKILSHVKWLQHQIAMIDGQIVAAMKPYQEEWKLLQTIPGIDVVSAAVLIAEIGVDMTRFGSKERLCSWGAMCPGNHESAGKRKSGKIRKANP

SEQ ID NO: 400921 - protein, 342 aa, unidentified
MSAYVGLDVSLKETAVSVRRGGKRIWRGKCASDPKVLADLIRARAPDAERVVFETGQLSTWFYHALKADGVPAICIDARHAKAALDMAANKTDANDADGLAHIAEVGFYREVRVKGFESMLMRTLVAARDQILKVIVQMSNQIRGLMKTFGLVVPKSAGGAFEGHVRRLLADNTQLERIVLPMLDAWRGLRMQAAKLDGQLRAASRLDQRCALLMSIPGIGPVTASSFVAAVEEPSNFKSSRAVGAWLGLTTRRYQSGEVDYGGHISRRGDPRLRGLLYEAAVVILTRSTGESTLKQWGVGLRERLGFKRAAVAVARKLAVIMHRMLHTGELFDRTAGAAVS

SEQ ID NO: 400922 - protein, 426 aa, unidentified
MFNESHDDEQIIERVAALDIGKAEVVCCVRLPAAAGTKRRVQEVTTHSTMVGSLSELANRLVDLRVTRVVMEATSDYWRPSFYLFEAHGLRPWLVNAKDVRHLPGRPKSDVLDAVWLCKVAERQMLRPSFVPPTEIRRLRDLTRYRVDVVGARNSEKNRVEKLLEDACIKLSVVASDIFGVSGRAMLAALIAGERDPKVLAEMARSRMRPKIAQLEEAFAGLSTGTFDDHHRFLLARMLSRVDQADADIADLDVEIEAHLAPFDDAVARLDEIPGIGPTAAAVVIAEIGTDMTRFPTPGHLASWAKFAPGVKSSAGKNKGNGSTGKGNRYLARVLGEAAVGAARTDTFLGARYRRIARRRGKKKAVVATGRSLLVVIWHLLSDPETRFEDLGADYYERHQDTTAKKRNHIRGLEALGYHVTVEPAA

SEQ ID NO: 400923 - protein, 482 aa, unidentified
MKPRQKDKDKRAAGRPTRPSWQEMNRKQRRETMRKIQSEELSLEVIHPDAAGIDIGNESHYVAVPPSRDIQSVRRFGCTTAELKAMAQWLKQCGIQTIAMQSTGVYWIAVFDILEEAGFEVYLVNARETKNLPGRKTDVQESQWLMKLHRYGLLRNSFRPSKEIRTMRTYWRQRNDLVQAGARHIQRIQKALTQMNIQLANVLSDVSGMTGQAIIKAILAGERDPHKLAAFRDPRVKASEEQIERSLEGHWQKDLLFVLKQEQDGYEFCQQQMAECDRQLDQYLQQQEDRSKGASLPEEKRKERLKKKKGNKPRFDLRTGLFRMAGVDLTQIDCIDVMTATTILSEAGSDMSKWETEHHFVSWLRLCPDNRISGNKIIGKGRLPTSNRITNALKMAASTLRTSNTYLGAQFRRLRTKLGAPIAIKAMAAKLARLIYRMLRYGMKYLDQGAAFYELQHRKLQIKHLKSKAAKLGFQIVQAPAA

SEQ ID NO: 400924 - protein, 337 aa, unidentified
MIHVGVDLHQRFCYVTVMDARGKILQQRAVSNEAGELRRWARSLPRPAQVVMEACSFWPAFQKSLSGEVEKMVLVHPARVKAIADAKLKNDRVDSETLAHLSRCDLLPEAWMADEATRQARQRVRLRVALGQQRARSKNLLQAVLHQEGQRKPVTDLFGKKGRAWLEEVELSAAGRESVDTYGELIEHYDRLIRERQQKLEQAASQSAEARWLATIPGIGPYLAMVILAEIGDIARFADKKALCNYAGLVPRVRESAGKRHYGGLSYQGSKLLRWAMIQAAHGATRGSPAVRAWYEKRRQRKRPQVARVALARKLLTCVWALLRHGVGFEETVFATR

SEQ ID NO: 400925 - protein, 315 aa, unidentified
MAMRVTLEKPIIGVDVAKNELVIYHDQYDRLEAIPNTKVAITQWLKALASSCAIAIEATNVYHVLFADAAHEAGCDVYMVDGYQLSHYRKGVNIRAKTDAQDARLLARYLKNELDELRPWIPASPLYRQLLSLFRRRAALVQARTGLVQSWTNEPFLRTAFTNQVNSMKRFEALVEKKIRDVLQEAGLMRQVNRCMKVEGIGFLTAARLVTSFQRGEFSGANAFIAFLGLDLRVSKSGQSDGPRRLTKRGDPEARRLLHNAAMSGSRTPAWKPFYEEQRKRGFSTTQALVMLSRKLARVVFALLKNQSEYQTKVA

SEQ ID NO: 400926 - protein, 331 aa, unidentified
MFPVGIDVSKNTLDLCMLYDGIKGRIKTRNIQNNRHSVENILRWLRLQHCGPEDVHVVMEATGVYHERLATELHDAGFRVSLANPHRSRKFARGMGIMTKTDKVDAYMLACYAFLKKPHRWEPPAPEIRYLGALLRRRDVLLGDALREENWLEKYLSTDTPADIISSCRRMAQLLREEVSNIERQIKAHIKACPALRRDYTLLTSIKSVGPQLGMHMLVVLRSHNFASAEQAAAFLGVVPIEKRSGTSVRSRPRMSKIGPPQLRAKLYMSALCGKIYNKRMRNIYDEMCLRGKPKMVAIGALMRKLVHWCYGVLKTGTVFNDEGLKQVLST

SEQ ID NO: 400927 - protein, 426 aa, unidentified
MRTIGLDVHKRFAEAAILEPGQPLRRRRIRTTPEALRAFADELGREDQVVLEATFHTWQLTDLLRTRAGRVVVSNPMKTKAIASAKIKTDKVDAEVLARLLAADFLAEVWVPDQTLRSLRRQLSHRLALIKQRTQLRNRIHALVNRNLLDCPYTDLFGKAGQRWLAQQRLPADEQAQVDSAQRLLTVLDTEIAAVDRPLAERALEDAEVLRLITIPGVGLVTALALIAVIGDIRRFPRPTQLVGYLGLDPRVRQSGESPAWTGHISRQGQAHARALLVEAALGAVRLPGPLRAFYERIRYRRGSQIALVAVARKLTVLAWHLLTHGTDYRWAPPSLGSRKRCRIERQAGRPGSGGPTSSMSDQERHILLQAEQAYRTLVQSRREREDAAASHGKRSLGSRPDARQGSHSLSPDLLHEGRPRPPLPY

SEQ ID NO: 400928 - protein, 320 aa, unidentified
MHKESTYATILDSRGKIVNQTRMSNERVLAYLSHFSVGKVAMESSNQVAALYRRLESLGYSVVLSHPKKTRYIAEAKIKSDRVDSRAIAELARLDALPLAYMPEKEVSVLREQVRRRAFLVRQRVKLRVKIKSILTYEGVRWPSESGLFTRKGVEWLHGLCLEPVESYLRIMRIFDDEIRLLNRQLRGLAENDEDVKLLMTIPGIGYYSALLVKSEIGDINRFPFGDRLCSYAGLVPSTHASGNTVRYGGITKEGSRWLRWVMVEAAQTHVHKYDTAITRAYHRIAERRGRKVAVVAAAHKLLMCCWAVLKYRESYHDQA

SEQ ID NO: 400929 - protein, 444 aa, unidentified
MQYQKVLQMLNCIPYLSVGLDVGADFTWMSIMLPNGTLTGKPFKIIHSDPQSRELAVTKIKEAQEMYSLKSRCFLESTGIYHIPLLCFLRDKGFDCSVINPIITKNSTNSNIRKLHNDKFDSKKAAKVGLDASLKTSIVPDDEIIDLRNLVRDYYYYKDLQSAVVLKLNAELKVSFPAYLQVFSKITTLTSLKLLESYPLATDMLAAAKDEIVKTIRETAHFGEKYALSKYEAIFIAAEDAAVFGRALPSNALRIRLYIETYREYQKHLDSILEELHKAVDGLQGKPVHNQICLIQSLRGVGFLSAVVLIAEMGSFELFSSPKKLYAYFGLDPAVKQSGKFNGDRVHMSKRGSSLARRILHMAALNNLKVDRGTKMPVNPVIHSYYTDKCRSKKKNVAVGAVMHKICNIIFAMLRDNKPFEMITPQEHCKRYEVDHPSKPDNAA

SEQ ID NO: 400930 - protein, 369 aa, unidentified
MRDRITYVGLDVHKQGIVAAVAEDGLRGEVREYGRTANTPAALDRLARKLSREGVKLRFCYEAGPCGYGIQRHLSAHGHECVVVAPSLIPKRAGDRVKTDRRDAASLARLHRAGELTAVWVPDAGHEAIRDLVRARLDAVHALRRARQQLSGFLLRQVCHYGRPAWTKLHRPLAGGSQVRAGGASHCARGLHQAVEAAAARRDRLTAQIEAILPDWTLAPVVAALQTMRGMALVNAATLIAELGDLSRFANPRQLMAYLGLVPSEHSSGASVKRGGLTKAGNSAARRLLIEASWTYRFPARVSRELLLRQEEQPRPIREIAWKAQLRLCARYRKLACSGKPANVVTAAIARELAGFIWAIARRVPPATN

SEQ ID NO: 400931 - protein, 341 aa, unidentified
MEYGAIDLHLRRSVFRIEDATGNLVQEGRIDTTRVDLTRIFGERAPMRLLLESSTDSEWAATLLESLGHTVIVADPSYLPMYGTRHRSVKTDRRDVRALVTACREGHYRRAHRVPASTRALRQELRVRRHLVQMRTQTINVLRSLLRQDGLRLPGGDANHALARLARLTLPPALAHVLAPLQEWLATLQALIARADTAVDERAATDPIARHLMTVPGVGPVIALTYRAVLDTPTRFGGDPSRASAFVGLIPSEYSSGEQQRRGHITKRGPRDLRALLVQASWGVWRNRGATSAPLRAWAQALAARRGRRIAIVALARRLSRILLALWRDQTDFEPRVLTQA

SEQ ID NO: 400932 - protein, 374 aa, unidentified
MNMIVMGLDQHRAQITAEWVDTATGEVSRARVAPVDRAGVRRFLERFRGRRLEVALEATTGWRFLVEELRGVGAVVHLAEPAETAARRGNKKRAKNDRADARHLRELLLAGRLPESWIPPDHILDLRAGVRLRHSLIEQHSEWQQRIQAVLYHHGCPQRRRLMEGDGRDWLAAQQLPETAREQVTVALAMIDFLDLQFAPLTQELCAWARRQTGCKALISAHYGIGELCAVTILAELGDCARFSSSREAVRYGGMDITVYQSDRHRAPGHLSRQGPPALRWALYEAAQRARFPASPDRAWYLEAAERLGGNRACLALARKLLKRCYHTLRELGDDALTPPDERAGSGAARHASSGSARRTERLTDPEPADALAA

SEQ ID NO: 400933 - protein, 391 aa, unidentified
MLNDAPRPAQAAIRTDLGAIFVSMELSRRTWLITSLSPGAGEKMSKHSVPASDVAGLLHRFAELKRKAAARTGRDFPIIVIQEAGLDGFWIHRVLQSEGIESHVVDPASILTSRRRRRAKTDRIDGEILVRTLMAFKRGEPRVCSMVRAPTPEEEDRRRVSRERRTLVGERVRHANRIKGLLFAQGVFGYEPLRKGRRERLEALRTGDGRPLPVHLKAQIIRELDRLEVVLVQLKTVGAERDALLKQVTDAECSPPAMLMQLKGIGPETAAVLWSEGLFRQFDNRRQLAAYAGLAPTPWQSGSIDHEQGVSKAGNPRLRTTMVELAWLWLQNQPASALSLWFHERVRRLGGRMRKTTIVALARKLLIALWRYTIAGVVIEGAVMKPATTTI

SEQ ID NO: 400934 - protein, 365 aa, unidentified
MLKISTMQTSGKNISQGRLTIGLDLGDRSSAYCVLNNAGEIVLEHKLATTAEAMKQVFGSLPRCRIAMETGTHSPWVSRVLTDLGHEVIVAHAQKVRLIVKSRRKDDRLDARTLARLARIDPELLSPVQHRSAQAQLHLAEIRARAGLVSSRTALVNAARGLVKSYGERLRKCGTPQFSRETTTGLSAGLREALEPLLREVESLNERIKEYDRRIEKMAKEKYPETSLLKQVKGVGDLIATAYVLTIEDPHRFRKSRDAGCFVGLQPGRRNSGESKPQMHVSKEGDEYLRTLLVQGAHYILGPFGEDSDLRRWGLKLAARGGKNGKKRAVVAVARKLAVLLHRLWVSGEVYEPLRNSQKAMRVAA

SEQ ID NO: 400935 - protein, 410 aa, unidentified
MDVFLERCAGLDVHQASIVCCVLIGAPGRKPQKLLRSFGTTPRDLEALRAWLAEHGVTHVGMESTGVYWKPVYAVLEGHVDLTVGNAHHIKNVPGRKTDVKDAEWIAQLVRHGLVAKSFVPPPTIRDLREMVRHRRTLIETRTAVRNRVLKLLEGANVKLSGVASDIFGVSGMAMLEALAAGTTNASEMAGLARGRMRSKHAALEAALQGRMGEHQCFLLGMHLRSLKAIGQDLETLDARIGIQLEPYQAQHQLLTQIPGVDWVTAASIIAEIGTDMDVFASARRLAAWAGVAPGTYESAGKPKGAGTRRGNVFLKSALFAAASAAVRTKGSYYRDKYNRLRARRGPVRAVMAIAHKLLVAAFHMLSTGEAFHDLGEGYLDQVARKRSTSKLVQRLTNLGYDVMLVPKAA

SEQ ID NO: 400936 - protein, 357 aa, unidentified
MGKSIEKLSSVTRLGLDLAKRVFQVHAVDANGEMVVARKLARGRLVGFFSQLPRCVVAMEACSSAHHWGRQLLALGFEVRLIPPAHVKPYVRRNKNDAVDAAAICEAAGRPSQRFVPVRSIENQAELMRHRARELLAGQRTAALNALRGHLAEIGVIAPQGVQHAYDLKRLAVDGFDEYGEVVVPDCVRVALRPLVSQIDALDAAIGAIDNEIAMSVKADETAKRLMTVPGVGPVTASAIVATIQDIGDFASGREFAAFLGLTPRQSSTGGKPRLGRVTKMGDRYLRKLLVVGACSTLSHRKGHNDALRRWASGMLERKTVRYKFKLTAVALANKVARIVFVLMTRGGQYDDRPLAA

SEQ ID NO: 400937 - protein, 346 aa, unidentified
MMIIGCDFHPSWEQVAWLDTETGETGEQKLVHADGDAERFYRGLPAPALIGIEATGNSHWLVDLLSELGHELWVGDAAQIRASYVRQQKTDKRDAAHILKLLVEGRFPRIWMPSSEVRDLRQLLLHRYKLVIIRARVKNELQHLCLNKGVQRQRKLWTKAGQQVLRELRLKPWAGRRRDDLLGLMATLNQQIEPLDEAVKTEAQRDKMALLLQTQPGVGPITALAYVLTMGDVSRFPRGKQVASYLGLIPREHSSGGRQHLGAISKQGNRMLRMLLVEAAQTAVRLDPEFRKEYLHRCHQKPKAVAKVAAARKLAVRLYWMLRTQQGYPEVVRIESSPRVRLVGEN

SEQ ID NO: 400938 - protein, 343 aa, unidentified
MTHVASQVASPNVPAVTPASPVFVGIDVAKDKLDLARSDNRQLLTVSNDEKGIGQIIKLLRDVAPACIVVEATGGFERLLVNLLIDAQLPVAVVNPSRVRHLAIGLNILAKSDPIDAFVLSQFARLAEPRLTQKRSANQAELDALITCRRQLVAARTDQGNCRLATPSKVARQSIDKVLKALDLQIELLDRKIRELINSDDDFKNLDKVLRSAPGVGPVLSSTLVAEVSELGTTDRKQISALVGVAPFDHDSGNFRGKRSIRGGRTQVRNVLYMATVAAIRCNPVLKDFAARLAKKGKPAKVIIVACMRKLLALLNAMVRDNLTWDQLNVVKMFNASGGPRHA

SEQ ID NO: 400939 - protein, 416 aa, unidentified
MKEWKEITHYAGFDWARDHHVVVIVNQQGQIVADFEFEHSVEGWKSFGEKTAGFANLAVAIETSQGAAVDQMLQRDYTVYPVNPAAAASYRQRKAPSGTKTDHIDGWSLADALRVDGQGWRALQPADELSTQLRLLCRDEVALIAQRTLLVNQLQQALVEYYPAALEAFEDWVSPATWDFVLEFPTPEALTKAGKRRWEKFLHTHRLWRPETVEKRLTIFSQADQFKASAPVTKAKSQLALSLCKLLRTLQQQLDQYREQIEALFKNHPDHDLFGSLPGAKKMLAPRLLAAIGSDPGRYGTFQVLQSFAGTAPISFESGKIHKARIRWNCDKFMRHTMHLWADCFHRVSPWGQAYYRKKRQEGMTHACALRCLGQRLLKILFRMISDKKSYDAELHARNQKKHGSWVLALIEKPAV

SEQ ID NO: 400940 - protein, 330 aa, unidentified
MTTNPPQIVFNHILAFEVSKEQLLVHTLPADEQCAIDNKPQAVRRLIKAEIKRNRNKQLGQMLVVCEATGGYERHVLDAAVEMGLSVHRAHGTRVRHFGGYCGLLAKTDPIDARLLAQYGLKTENIRLYSPPPPETAALRALHARRTEIQQMLIAETGRLDHAQHKNVLKSLKDHIASLKAALAAIEADIAQLVEKCEVLRKKVALMQTVIGIGPISAMVVLAYLPDIGRLTRGQAARLAGLAPINNDSGKKRGARHVEAGRTAIRRALYMAAGVAMRTNPVVKAFADRLRGKGYPFKYVVTAVMRKLVVILNAVLRDGQSWRGAQVASV

SEQ ID NO: 400941 - protein, 355 aa, unidentified
MNDAKYIGMDVHQATISVAVRDSRGNLVMEAILETKADTILEFIHGLRGSLSVTFEEGTWAAWLHGLLHPHVTRVVACDPRKNALLKVGNHNDRMDARKLSELLYLNKLSPVYHGEQSIRTLKELARSYITITRDLTRVMSRLKAIYRSWGIPCAGQQVYAPRYRAEWLAKISEAGVRRRAELYYQQFDALDILRQDVRRDLLAESRKHQALNLLRQIPSIGPIRAALLIALIQTPHRFRTKRQLWAYSGLALKTYTSGEYRFVEGQLQRSKRLLAIRGLNTNHNHDLKNIFKGAAIRAAAVAGPFQEFYAALVARGMKPSMARLTLARKIAAITLLVWKKGVRFDAQYLKQQAA

SEQ ID NO: 400942 - protein, 338 aa, unidentified
MELYAGIDLHSNNSVVTVLDEQDRTVYARRLPNNLDAIVSALRACAGSVRGVAVESTYNWYWLVDGLQAAGFTVHLVNTAAVKQYDGLKHGGDFSDARHLAHLLRLGILPVGYIYPREERAVRDLLRKRSQLVRQRCTQILSIENLMARNLGSRATGNAIKRWEPENIDAMELLDEQKQALKANLAVMKCIDCQVNQLERSILAKVKLREDYQALKTVSGIGEILAVTIALETGDIGRFAGAGNFASYARMVDSRRESNGKKKGVGNVKCGNKYLSWAFIEAAHFAVRYDATIKRWYQKKCAGSLSVVAIKAVAHKLARACYHVIKDGTPFDAGRAFS

SEQ ID NO: 400943 - protein, 370 aa, unidentified
MGNYSGTFVSFDVAKTKHAVAIAESGRAGEVRFVGEIENTPASIARIMKKLAGRYGRLHVCYEAGPTGYGLYRQIRELGHDCMVVAPALIPQRPGERVKTNRRDAVALARLHRAGELAGVWVPDAKHEAVRDLVRAREAAGDDLRRKRQQLLSFLLRNGRIYTAGRDHWTQAHRRWLARQSFEYPAQQIVFQEGVDAIEDAAQRMRRIDEQLAGIVPSWSMAPVVKAYQAMRGASFLVAVTFAAEIGDIRRFDTPRQLMAFLGLVPGERSTGNTVRRTSLTLAGNRRARRVLIEAAWTYRFPARISDALRARLEDLPKAVRDIAWKAQTRLCARYRRLSAAGKKLPVVVAAIAREIAAFLWAIGREVTPA

SEQ ID NO: 400944 - protein, 357 aa, unidentified
MKYIGCDFHPSFQQIAMLEKETGELVERRLLHTEEARRFYQGLQGPVVVGIEASGNTHWFESLLADCQHELWIGDAAAIARQEGRKQKHDRRAAALILKLMVENRFPRIWVPTVGERDLRQLLIHRQHLVRMRTRIKNQLQHIALNQGWQKKRKLWTESGLELLRSLKLEPWGQQRRDTLLEMLAELEEKIRPLELAVAREAEACEAARRLGTHPGVGPVISLATVLTMGDVQRFTDSRSWVSYLGLNPAEESSGQRRRLGAISKQGNPFLRYLLVEGAISAARGDKSLARMYARLKAKKHHGVAKVAVARKLAVRLYWMARTEKSYPEVVRTQGSQSHSVAAVEADRLSRPPVSHP

SEQ ID NO: 400945 - protein, 338 aa, unidentified
MYYVGLDIHSKSITICVLNGNGKVHRRCTVRQIDQMMAVLERLPEPFQVCYEASTGYGIFFELLSKVADHVAVAHPGLLKLIFRSKQKNDRRDAEKLAKLLYVGEVPIVHVPTADVRAWRELIRFRRRLVEKRTRAKNGLRGLLRSLTIRSPQRPGLWTREGIAWLEQLPLDNAMHALRRDLLVEEVATLSGQIHRVETELARDSIHNPAVKLLRTIPGVGLRTAEAVVAFLDDPHRFANSKRVGAYFGLVPSQDQSGSTNRLGHITREGSATVRHLLVEAAWQAVRRSPTVAAYWARIGRGDKARRKIALVATAHYLVRVMWSMLKNQTVWKETVAA

SEQ ID NO: 400946 - protein, 384 aa, unidentified
MQASSVATPTVEHCGTVFVAIELSQKSWLVTLHSPGRDRISRHKLDGGDHAGLLALIDRERDRASRTAGGVPVVASCYEAGYDGFWLHRLLLAAGITNYVFDPSSIAVDQRARRVKTDRIDGERMLRTLMAYLRGEPRVVRIVRVPTPEQEDARRASRERGRLTKEQTAHTTRIKALLRLLGMAVGNPRRRDWLTWLVKQRDWQGQAVPPQIMAEIKREHARLMLVREQLDALAQAPADLTPAAAQMAQRSELLLRLKSLGPAFATTLTNEVFYKDFRNRREVASYFGLAPSPWQSGGIDRDQGISKAGNPRARCAAIEMAWLWLRHQPDSKLTQEYRRRTLNASKRIKRVAIVALARKLIVALWRYLTTGLVPEGAMLKTAEV

SEQ ID NO: 400947 - protein, 359 aa, unidentified
MDVEEDTGRRIVGGVDTHKDLHVAAVVDERDRVLGTSCFATTRQGYRQMLAWMRSFGEIQRIGIESTGSYGAGLLRFTQKAGIEVLEVTTPDKHDRRRRGKNDDLDAQNAAHAAFARKRTVTPRSRDGMVESLRVLKACRKTAVAARRVALQMIQNTIVCAPDGLRDALRTMTRMQLVRALAAWRPDLTAYRDVESAYRIGLKSLARRYLELNDEIGDLDGMIRAIVDELAPDLVARPSIGHTSAAQLLLTAGDNPERLRSEASFAALCGVSPVPASSGKTIRHRLNRGGDRHANSALHIIAIVRLRPDPKTKAYVEKRVAEGHSKLDAIRALKRYIAREVFTLITRRHKEINQTRIAA

SEQ ID NO: 400948 - protein, 423 aa, unidentified
MSQKQPEIQYAAFLAIDWADQKHVWSLQEANSSTRLRGEVDHMPEAVETWVAQMSQRFAGRPIAVAVEQSRGALVFLLSKYEQLHIFPVPPAMTANLRKAFYSSGAKNDPSDADLLLDLLQRHREKLRRLSPDTEATRRIQNLVEERRKLVDEKTAQSNRLEAHLKIYFPQIPRWFGDVDIPLVCALLERWPTLEALQKARPDTLRSFFRKQHSRKEELIESRIKAIGEAMPALKDRAVVEAKVAVVKVLVQLIQVLHEGIEGLNRQIQEAAEAHPDFFIFDSLPGAGAVMAPRLLAAFGSQRERYQNAAEVQIFSGIAPVSESSGKSSWVHFRFACSKFLRQSFHEWAALSITQSQWARAYYELQRRRGKKHHAAVRALAFKWIRIIYRCWKEQVAYDENVYLAALAKHNSPLVAATKAVAL

SEQ ID NO: 400949 - protein, 411 aa, unidentified
MEAIVERCCGLDVHQATVVACVLLGGAEEKPRKVTRTFPTHTQGLRELRDWLKAQGCTHVGMESTGVYWKPVYAMLEGEFELVVGNARNIRAVPGRKTDVKDAEWIADLLRHGLIAKSFVPDAALRELRDLLRYRRKLVQSRSSERNRLLKVLETANIKLASVVSDVFGVSGVAMVRALVEGSLDAEQMAALARGKLRKKQAELKLALDGALQPHHCFLLRMQLRRLDELDCHIVALDELVEAKLEPYRRQRDSLMQIPGVDLVSSAEIIAEIGVDMSVFEHPDRLSSWAGVCPGNNESAGKRKRGKTRRGNVYLTTALVRAAQAASKKKRSYFKDKYHRLKARRGERRAIMAIAHKILIAAYHLLADSSTTYRELGDRYLDALDVNRTKRLLVLRLQRLGYDVELRPRAA

SEQ ID NO: 400950 - protein, 421 aa, unidentified
MGKAETGKVKFVKDGTLIVAVDIGMEMNHGYCTTTDGRDIKSFRFSNTREGMDKLWCMVVATKKRFQCDEVIVGYESTGPYGEPFLHYLVGKDVKIVQVNPMHTKRVKEINDNSPLKTDDKDPRVIADIIKLGRALSVVIPEGDAAYLRRLNNSRERHVRERTALLNQLQQLVFLLFPEFKKVFKNIKCMTPLYILKTYPTPETIGVLDKHALGKEMRKHSMGKFSERHAEILIDLARNTIGIKEGVLGLSMDISHILLQLELLNTLIVEIESEMETTLGRIPYSSKLLSIKGLGVVSVAGIIGEVGDFKKFQTRGEIMKFAGLDLYEISSGKWKGQRRISKRGRSLLRKILYYVAIQMIRNNGIMHDYYTRLTDGGMKKMKALVAVSRKILGIIYAIVRDDSEYMANFESVKRQVIQKAA

SEQ ID NO: 400951 - protein, 427 aa, unidentified
MPYRIAGIDVHKRMLAVVVSDVEIDGEYVFERRQFGGNPAQLRLLADWLLEQQVEEVVMESTAQYWRPVWGTLERYWKPVCQKRDGARPTSGTLHLAQAQSNRARRGRKKDFADAERLVKRLVANELTLSFVPDPQQRLWRTVARAKYQQRRNRVQLQGRLEALLEEAHIKLSSLVSDLLGASARRILKALAEGETDPAALAGLADYRLRATPEQLRDALGACQELNPVYRRLLKAVLEELELIDKQIAQLDQELADLLRPYQDQVERLAEVPGLGVDSAQQIIAQVGATAATFPSEGDLSSWVGACPGDYESAGVSYSHRSPKGNRPLRRILNQAANAAVKQKGSIFELLYRRYVPRLGHNQTIGLIAHRLCRLIWKILHQGVRYKEFGPAVSGKSKHRRAARMIRELRSLGYRIELANPQSAVPA

SEQ ID NO: 400952 - protein, 324 aa, unidentified
MTDAVLGIDVSKNTFDTNLGAGTKARSKSFANSPAGWHHLIAWLGEHKIGQVHACLEATGRHGLGIALALHEAGHVVSIVNPAQIRDFARTKLGRNKTDQVDAVHIREYAELFKPRPWTPPSPAMRRLCELQTIRAGTVAGLTEWKNRRHSGIMDDLAQSLAKTTIQHFTSQLEAVDQAIAETIDNDAELSAKRDLLVSVNGVGEALAGIVLAELPGPDILGSSAAVTAYAGLNPQQHQSGISVNRPVRISKIGNAVLRTALYMPALSAMRYNPAVAALVDRLKAQGRLKGKQIVIAAMRKLLVLCFGVLKTGKEFDPTMAMGK

SEQ ID NO: 400953 - protein, 316 aa, unidentified
MTGLICAAGIDVGRDYLDFAVAPQGRCGRVRNEPSGIAVLVARLRRYGVVRVALEAIGPYAERLLQALAAAGIAVGAVDPRRIKAWRTAEGRRAKNDRLDAALIARFALLMPDIVRPVPDRESRAIRALSARRRQIVEMIAMEKTRLKQAIEPEIADSHKNLIAQLGEERERIETQLDARLHAAGHGPRLALLQSAPGVGPAIAVTLVADLPELNRLDRRALASLAGLAPQINQSGIAQGRASIAGGRPCVRSALYLAALSAVRSDDGYKREYQAMRQAGKPAKVALIAIARKLLIALSSIVKQNRPWRSSHDQIP

SEQ ID NO: 400954 - protein, 430 aa, unidentified
MPKRNFLSVGIDVGSSFSFMSIVDPDENLILKPFKIFHDQLDSLTLALAAIRKAEESHSMKSRTFLESTGIYHFPLFCYLMESGFEVFVINPLITHSIKNSGIRKVKNDKLDSIGIAKLGLKPDLQVSVIPTKLVLELRALTRCYYRLVDIRSAYVNQLKTHLHTVFPQYLGIFCNVTGATSMMILESYLRPDKILKAHKGCLIEKISKTSRKGTRKATEKYEQLIAAAKSAKVFGCDLDSVFFNISTTLTLIKGMNEAIASTLARIHALVKDHPCENFIKQIHWLDSIPGVGFLSAVTIMCEIGDFSVFKSPKQLFAYFGLDPEVKQSGKFKATNVHMSKRGSRIARRAIFAAAIACIRKKRNGEAVNPFIYDYYQKKAASKPKMVALGAVMHKICNYIFAVLRNETEFCLRSPQQHRLIYNPPTPTAA

SEQ ID NO: 400955 - protein, 340 aa, unidentified
MSQNKINSDKVNIIYAGVDVAKATLELNLGGVNYSLGNESKDHRRIMKLLAGAERAQPGSKVHVIVEATGGCEARLVRALQEADRLVSVIQPSRVRHFAYAKNQRAKTDRIDAPILSEFGQAIRPTPTMAPSLAQSRLSELVDRRAQLVQSHSAELNRAGHYTERFVCRQSRQVLALLDRQLKACDKAIAAQIAADEAMKTRAERVQEVPGVGPVVAAVLQGAMPELGTLSDGEAAALAGLAPYNYDSGPRQGTRRIWGGRAQVRCALYMAAMSGVRHDPILKDFYLRLRAAGKKPMVALTAAMRKQIVLLNRLLKNPEFQLATRTEAFSAGEAKHARTN

SEQ ID NO: 400956 - protein, 481 aa, unidentified
MSKPTQHSKKPGEKKTAAGQGKRSRKRKGMCLEDRPILEPNAAGIDIGAREIFVAVPPDRDADPVWVFSTFTEDLEEMAKWLVSCGVITAAMESTGVYWIPAYDVLEQHGVKPCLVDAHGMKNVPGRRTDWHECQWLQFLHSVGLLRAAFRPEGDVCAVRSMMRHRTELVEMTNQHIQHMHKALTQMNVQIQHVISDLTGLTGLAIVDAIIAGQRDPAALAKLRDPHIKASEETIRKSLVGNWRAEHLFTLQQSRESYQHYQEQISDCDEAIEKMLMAFAPRVDPAARPLPPDRKRKQRGRKKKNVNPKTGFDLRTESYKLFGVDLTQIPGLMAMVLMLFSEVGRDMSRWPTAAQFVSWLALCPDNDISGGRVLWRGMRRVHNRAGDLFRMAAYSLHHDQTPLGDYLRRMKSKLGPAGATTATAHKIAIIFYTMVNKQIEYDATLWAQRDAQREKRFEAKLKRQAQQLGYKLVPIEEKPAA

SEQ ID NO: 400957 - protein, 354 aa, unidentified
MLNSQINKIQAITLDTLIVGVDIAKNIQWAQFINFRGIEVSKHICFENNYSGFNSIMEKIEEIKSKNNFLSVIVGMEPTGHYWKTFATFLHNNGVKVVQVNPYHTKKAKELDDNSQTKSDKKDALVIAKLIKDGRYSAIYFPEGEYANLRNLSNTRLEVSRLLNICKNRIHACVDEYFPEFETVFKSFIKGKVALHILKRIPFPTDILGLTLEDIISVIREAAKKSVGKKKAKELIRAAKVSIGVKVGLEGARIRLNNLLEEYELYHNQLEKIEKEMAQELEKTGYKDILTSIPGIGIISAASFIGEIGDPKRFSNPQQIIRLAGYNLVEDSSGKHKSKTMISKRGRKILRTIL

SEQ ID NO: 400958 - protein, 471 aa, unidentified
MHKEKQKKPERVERKKVIIKMKEGLAVEHPHAAGIDVGDTEFCVAIRSKEGGYEVRTYGAFTEDLDMIVRDLKENGITTVAIESTGVYYVPLFLKIQQAGIEPYLVNARHAKNVTGRKQDDTDAIWLQKLHTCGLLQKSFQPPVDGRAFRDYVRHRRTLVISGADWVRRMQKALELMNVKIHTVISDLLGKTGMKMISAIIQGERDATKLAAFKDNRIKASQQTIILSLQGIWRDEHVFALKQAYDAYQFSQKQLSECDEQIKMQLDKMTAVVRDGEIYSDQDKVEPSADNKSKKGKKHKSIAVKNQYGFDVRSCMTKLLGVDICDLEGISEITVMELIAEIGTDISQWKSEKRFSGWLNLCPNTKISGGKIISSRIMKKKNHAGLCLRMAAMTVARSKTPLGDYYRRMRGKLGGKGAVVATANKMARIIYSMLKEKKAYDKTIYEKATEKNNVKKIEHYERMIAKLKKVA

SEQ ID NO: 400959 - protein, 353 aa, unidentified
MSDLAEEREVILGVDTHLEVHVAVLIDLVGRVVATASVPTTASGYDQLIEWACGFGRLTRAGIEGTGTYGAALARRVQEHGVQVLEINRPDRSRRRLRGKSDPTDAENAARAVLAGEANAIPKAQSGVVEALRAVSMARRSAVKAKTQAINQLRALLVTAPASIRAALWKMKPEQCVACCARLHSLGDTPLLKALTSTLRLLARRWMSLAKELHQLDAALAELTQRAGRRLLARFGVGPQTAATLLVTAGDNPDRLRSEAALAALCGASPLEASSGKTTRHRLNRGGDRAANNALWTIAMVRMRSDPRTRAYVARRTAEGLSTKEIQRCLKRYIVRELYPLILADLAESACPP

SEQ ID NO: 400960 - protein, 341 aa, unidentified
MEHYAGIDVSMEFSSVCVVEATGKMVREGKVASEPEALIAWLGSLGMNLARIGLEAGPLSQWLFAGLRDAGLAVELLETRHVRNAFKTMPVKTDRKDARGIAELMRLGWFRPVHCKSMAAQETRVVLTARKQMQSKLHDVEMSVRGILRGFGLKVGKTTPKQFDGRIRELVAGHPTLEVIAEEMLSARAALLRAFNGFEKRVRVMARHDAKARLLMTTPGVGAIVALGFASAIDDPARFRSSKSVGAHFGMTPKKYQSGETDYSGRISKIGDSGVRTGLYEAAHVILTRPVKGSGLKSWAMRLAKRAGMQKAKVALARKLAVIMHRMLVEGKPFNLAAQAA

SEQ ID NO: 400961 - protein, 419 aa, unidentified
MKNSNTKKLKSINEETLLVTLDIGKIKHTGYWRFPNDTEGKPFEFFNSRHGFEEFWWRVCQARRSGNLKEVVVGFESTGPYAEPLLHFLQKRDVRLVQVNPLHTKRLKELQGNSPNKTDQKDPKVIADIIELGHALTVIIPEGTVAELRRLTQARERSIQRMRMLMSQLQDLIFLIFPEFMTVMQDITIKSTQYLLKNYPRPQDMVEQGIDGLTHILKKVSRGRLGQERAEALYQAAKESVGIAEGRESIVFEIKESISSIERIERFVKELEYCMSKYLKDVPYSRFILSMKGIGEITTAGLIGEMGDFRKYSTISEVIKHAGLDLFELSSGKHKGKRRISKRGRPLLRKLLFFASINVVRQGGILHKQYQHHLEKGMPKIKALVAISRKLLTIIFALVRTQSVYIMQYSKTQQVKEAA

SEQ ID NO: 400962 - protein, 319 aa, unidentified
MAQNDLVVVGIDVSKDKVDACIRRLALRQSCPSSAQGHRRLVAWLRKHQVNKAVMEASGGYERDWAKVLRASSIEVRIVDPKRVRSFAQSAGRLAKNDAIDAEMIAWFAETFSEAPGQTQDAAHEELVALVKARISLVDLKARLQSQNEHAAPRPVQKTRERLLKNLVCEIAKLEAAISVHIKATPHLAERAEIIESVPGLAETTSANLVAGMPELGQVSDEIAVALLGAAPYDDDSGNRRGERHIKGGRRWVRNAVYMPCVGAATLNNPVLKAYYDRLIAKGKKPKVALIACMRKLIVILNTMIARRQKWDPSRYALN

SEQ ID NO: 400963 - protein, 318 aa, unidentified
MTSHTVTIAAGIDAGQRFLDVGFAPSGKTFRVPNLADGIATIITRLTQAGIKRVVLEAIGPYAQCLVQALAIAGFEVGIVNPRRIKAFRDAEGRRAKTDRLDARLIARFALAMSDAIRPLPSAEQQALKALSLRRRQLTEMIAMEKTRLKQTLEPMLLDSHRATIAQLSAQCDRIEVELARRVGEDSELARIFRILKSIPGIGDRVATVLVTDLPEIGQRDRKTIASLAGLAPHISQSGNAPPRAAIAGGRPCVRAALYMAALVAARHHPQLKASYKAMREQGKPGKVALIAIARKLLVTANALVRDNALFGQQTLDS

SEQ ID NO: 400964 - protein, 464 aa, unidentified
MQDSEQRKDKAGSVSARQIVGLPVVRQRVAGIDLGSQRHWVCAPTVEGSGREVANFGATTTELVRMAKWLKERKVESVAMESTGVYWIAPHEVLEAEGLELMLVDTRQLARVPGRDQKSDPFDCEWIQRLHSCGLLMGSFRPKEAVCMLRTLVRDKGNLVAEAGDWLRRMQKSLDQMNVRVHRAVSDIDGVTGMAILRAIVDGERDARKLAKLRDWRCHKSEEEIAEQLSGHWREDHLFSLRQGLKMYDNIQERITDYEQEILRKLAEMEREECRGQEVPPLANPQKAKLIQKRGGEAMRQALYRMSGVDLTGIDAIGVETVQVVLSEYGPDLSRFPTEKQFVKHVTLAPHKPTSGGKPIKKKKRNGASTRVAGALRMAATSLRHSETALGAYYRQIARRIGADVAVFATARKLATIIYRLLRWGQPYVDEGAQAYEKRYQENRLKRLTATAKDLGYQLTPIQA

SEQ ID NO: 400965 - protein, 360 aa, unidentified
MNTTTVAVDLAKSVFQLAVANASWKVIESHRLTRTQFERWFQNRDVGLVIMEACGSAHHWARWLNGLGIEVKLLPAAYVRAYVRRNKTDAADACALIEAARASDIVPVRVKSIEQQAMQGLHRIRSLWMSNRTARINALRGFCREFGLAVPQGARTGVEAISRALADPNSPVPMLVRGSMKLLVEEIRLLEARIAQLERELSELAKQSPACTTLLSIPGIGLLTATAMVAATGGEVKHFKDARHFASWFGLTPREYSSGGSRVLGRISKRGDRYLRMLLTHGARSVLRAASTARQAGRSLDGLRNWATTVQARTNHNKAACALANKLARICYATLRDGTPYGEPVRQGRKINRTAFAIAA

SEQ ID NO: 400966 - protein, 329 aa, unidentified
MEPQLPLPVVGIDVSKASLAVCYQVNQQFKHLEVSNSKAGFQQLVKACGAQCLFVMEATGTYNLAVAYYLHEQGGQVAVLNPLVIRRFIQMHLGKGKTDRKDAQWLLRYGQQQAVKVWQPDEQVLVECRQLEQVNEQLIKQKTMVSNSLEALQQQPVISSLACERLQHTLQVLTDQVQAVEAELLALLEQRFQAEMTLLRSIPGIGRKTAGMLLLFAGGFQRFDNYRQLIALAGLSPREYSSGTSIRGKARITKMGGGLIRGKLYMCSMAAKKKNAACQALYERLVAKGKNGKVALIAVCNKLLKQAFAIVKSGQPYQANFTSKLALNP

SEQ ID NO: 400967 - protein, 324 aa, unidentified
MHYLGIDVSKATLDVSDASGDSRLSSANSRAGVRKLIKWAQDKHEDKLQFVIEPTSTYHHVLLDELSNSDIAFTVINPARTKAYSNSLGKRAKTDRVDAQLLASLGQTQQIAPSHQPEPSQEQIKSLRRHRESIEQQIRSLRNQIGSVTCSPWADPEVLRSLRSTIRHLEKQTVSADRRLEQLIDEDETYSTTSSLLQTIPGIGPKTAQLLISEMPPAWQCSTSRAWVAFAGVCPQPFQSGTSSYSRLSRMGSRRVRSGMYMAAVVSIKSNPAIAELVARLKERGKSGKLVVMAAMNKLIRICYGVIKSRRPFDPTLNVAPQNT

SEQ ID NO: 400968 - protein, 405 aa, unidentified
MNAVGIDVSKGKSTVTIRRPGDIVIMPPRDIPHTQSAINSLIGQIRALDGETKVCMEHTGRYYEPVATWLSDAGIFVSAVNPILIKDFGDDSLRTPKTDKADSKKIARYTLDRWAKLKQYGSMDKTRNQLKTMNRQFGFFMAQKTAMKNNLIALLDQTYPGANNFFDSPARNDGSQKWVDFVHTYWHVDCVRSKTLNTFTEHYRNWCKRKGYNFSAAKAEKIYQSSSDLIAVFPKDDSTKLLIRQAVAMLNTASETVESLRLKMDETASSLPEYTVVMAMNGVGPTLGPQLMAEIGDVTRFTHRGALTAFAGVDPGKNDSGQHIQKSVHTTKKGSPSLRRTLFQIMDGLIKRSPIDDPVYAFMDKKRAQGKPYYVYMTAGANKFLRIYYGRVKEYLSALVETEET

SEQ ID NO: 400969 - protein, 387 aa, unidentified
MYFVGIDISKYKHDCFITTETDTVITQNLSFQNNKDGFNEFLDLLKSLDNSQEIRIGFEATGHYHFNLMLFLEENGYSFMEFNPALVKKFISTTTLRRTKTDKKDASAIAKYLMSVNYKPYPKQFYHKYALKSLTRRREAFVHQRSYFKIELTNILDIIFPEFKPFFSNSFSATALFILSTYKSAEAIANMSDYDSVRKVSRGKFSYTKFIKLKELASNTVGLDSDIYTFQLDSLLSLINTMDKQISLIEDKISEIVDLLNPRCLSIKGIGNILCASIVAEFGDFNRFKSADACLAFAGLEPSTIQSGCAEHNGKMVKHGSHHLRASIMNAADFVFMHEPTFTIYYYKKRSEGKAHRVALSHVAKKLVRVIYKIETSDIPFDSSKLK

SEQ ID NO: 400970 - protein, 430 aa, unidentified
MKSNTQNAKIEAITEKTLVLGIDVGSEMHYARAFDYRGIEYSKKPFKFSNTEAGFVTFKEWIRDIKERHEKDKVVSGMEPTGHYWFNLGKFLQDNEMKPVLVNPHHVKKSKELGDNNPTKNDRKDPKVIAGLVREGRYMIPYLPEGVYADLRTASNIRFQLQAELTRIQNRISRWFNIYFPEYRMVYGKPDAKSGMLILKAAPLPEDILTLGIDGVNQIWRDAKLRAVGKARAKTLIEAAEHSVGSKEGAVSARMEIRMLLEDYESRNTRLQEVMVLIEELVRKIPMAEKLLEIKGVGIRTVSGFLAEVGDISRFNNPKELQKLAGLALVENSSGKHKGETTISRRGRKRLRYLLFEVAMSLVSKNQEFRELHNYYTTRRLNPLKKMQSLMAIAAKLIRVFYAMLTKGVDYDPKKMVSDIKRPAVYLQAA

SEQ ID NO: 400971 - protein, 358 aa, unidentified
MRVQSKELNFKGQNIYVGIDVHKKDWKVRIQSKELTYRTFAQPPSVAALVEHLRRNFPGATYYSAYESGFSGFWAHRELISQGVNNIVVHAADVPTTQKERAFKNDKRDCRKIAHSLCGGDLEAIHVPSIKTQEDRSLVRLRLTFRKDLTREKNRVKAMLNFYGKEIPERFLSSSHWSKAFIEWLKEVKFETGSAEQALKLLIGQVEQFRSGLLDVTRKIRKLAASEDYADNMRLMLKLPGVGPITGIAFLTQLETIDRFPCTDSLANYLGLVPNCHSTGDKENTGEMTYRGNKWLRELLIECAWSAARSDPALHLAHLNLCKRMKPNNAIIRIARKLLNRMYYVLKYKREYQKGIVQ

SEQ ID NO: 400972 - protein, 313 aa, unidentified
MSDNLPQTIGIDISKASLDCHVHPVGAERQFANTAKGHKALIAWARQWPVERIAYEATATYHRALEAALADWPCVKLNPERARRFAQATGTLAKTDRIDAMLLARMAATLQPPVRPARSAQQAQMAELINARDGLVRDRTACLNREKNLTIALLKRQCRQRIKQIEQHIKALDTEIATFIAADAELARRHQILTSIAGIGDLTANQLIATMPELGTLDGKQAASLAGLAPVARQSGQWKGKSFIRGGRANVRQALYMPALVAARFNPDLKAKYQQLVTAGRPAKIAITAVMRKLVITANALLKANRLWQQSPA

SEQ ID NO: 400973 - protein, 341 aa, unidentified
MDNIKVLGIDLAKNVFQLHGTDSNGEGVLRKRLSREKLVEFMSNLSSCLVGIEACGGAHYWARLFEEMGHTVKMMSPQFVKPYVKSNKNDANDAEAIAEAVTRPTMRFVAIKKMAQQDVLLLHRAKELAVKQRTAQANQIRGFLAEYGIIVAQGIHRLWKLPEILDSNEDKIISCSKRIFLQLYEQLKIYDEQAKYYDKEIREQAKTDPRCVAIQSIEGIGPITASAIVATIGDPTVFRNGREVAAWLGLVPQQRSSGNKTVLGSITKRGDRYIRTLLIHGARTVIKTCGNKTDKKSQWIIEKKLRIGFNKTAVALANKNARTIWAMLATGESYRKPLAIV

SEQ ID NO: 400974 - protein, 399 aa, unidentified
MWCVGIDWAAEVHAVCVLDERGGIKRSWDAAHDRAGVADLCKRLGALGTPGEVHVAIERPTGLLVDTLLDAGFVVVPLHPNAVKACRPRYSAAGGKDDRGDAYMLADILRTDGHRFGRLQPSSDAARALRAAVRTRDDLVAERVGVANQLRALLESFWPGAAEIFADVDSPIALAFLSRYPKPQSAARLGEKRLARFLAEHGYSGRRPAAELLERLRAAPTGKAGVVECDVKASLVRAYVEVLEPLVAQIVKLTALVEHLLESHPDGPIVASFPRAGKVNAAQILAELGDRRERFTSDEQLAAEAGVAPVTHASGKHRGVAFRHACNKRLRRAVTCFADNSRHASPWAAQVYRRARDRGHDHPHAVRILARAWVRVLWRCWTDKVPYDPARHGSAKKVA

SEQ ID NO: 400975 - protein, 405 aa, unidentified
MEFVTALDVSMGKSYAVIYQDQTCLYEGEIAHNQYGFQQLLEKIQRFTGKMMVVFESTGIYSKPVEAFCQKNKLPYCLLNPLAAKKQLEQGTLRSWKTDKHDAHVLAQSHPLHKREEKVHQSDVYQNLRDLSRFYQEIEEEIKRMRMYLHNALQLSFPELEQFFSSRLTPYALALIELFPHPALVLSSSITKIKNRFVNHTTKNISQARAKQKAVDIMNYAQSSYPAVSQSSVPTQKVQYYARQLLHLLEEKERISREMITEAKKLPEFDLLISFPGIGEISAALVIGELGDLFRFSNHKKVNAFIGIDIRRYQSGKYTGQDHINKRGNPKGRKILYFIIRNMIRQQKAAPNHIVDYYYKLKKQPTPKKDKVAVVACMNKLIKCMYSMIRNNTKYDYSYAVSMDQ

SEQ ID NO: 400976 - protein, 441 aa, unidentified
MSKSINEINSKAAGIDIGSESHFVAIPSGEVREFSAFTSSLKKIVNWLKESKVETVAMESTGVYWIPLFEILAAEGFDVNLVDARQAKNLPGRKSDVMDCQWIQQLHSFGLLTKAFRPKDEVCSIRSLVRQKSNLVKDSASKILQMQKALDQMNIKLHKVVRYITGVTGMKIIRAILDGERDVYKLAQMKNKGIRSDETTIASALEGNYREEHLFALKQSLDIYDYIQDKIAECDLKIQEKLGSMVLIEEEQKEEQQEEKHLGPGRKKKPRVIHEQLQKFTGVDLTKIPGISDETALLIVSEIGNVDQFKSGKHFASWLGLCPGCKISGGRVLSSHSRNVRNRLSTAFRMSANALYRSKSGLGHYLRRMKAKHGSPKAITATAHKLSRIVYVMLKNQIEFIDYDENKYQQNLKKIKEKQLVKLANELGIALPVYDNCAITS

SEQ ID NO: 400977 - protein, 424 aa, unidentified
MKPQPDVEFAAFVGIDWADAKHDICLQVANREEREFAVLAHRPEAIEAWAGSLRQRFEGRPVAVSLELAKGPLVYALQKYDFLVLFPINPSTLAKYRVAFTPSRAKADPTDAELALELLIRYRAKLKPLKPQSAAMRTLLRLVEQRRRLVGDKNRISNRLTDALKQYFPDVLDWFEDKDTLLFCDFLSRWPTLKQLKRARKATLQSFFYEHHVRSQARIEERLRAIKNATPLTDDVAVILPNRLLVLVLVEQLRVTLQAIQRFDAEIATVSQTLPDYPLFRALPGAGVTLAPRLLAAFGEQRERYESAADIQKYSGIAPVTESSGKKHWVHWRLQCPTFIRQTFVEWAGATIPRSFWAAAYYRQQRDKGCSHQTAVRALAFKWIRILYRCWQTRTPYDESKYLNALKRRGSPLLTSIVEAARNT

SEQ ID NO: 400978 - protein, 388 aa, unidentified
MTQASCSLSPPVTLDYENTLVLAIELSKTKWVLSAQVPGLLRVKAQQTIEPKAEALLAAIDGYRNRSRAAGRTIERVVAIYEASWSGFWLARWLGRHGVETHVVQPSSVPVDRRARRAKSDGIDAELLLRTLLAWLRGEPRVCSMVPIPTEADEDERRRVREREDLMAERVSLVNRIGAVLATLGTGDYNPLRRDRRTRLESLRTALGDPLPPHARARIRRMLDRLDLVCAQITELEQERDAVLDKEAPDRAEKMIQQLVELRGIGVQSATVLVREAFVREFANGKALGSYAGLTPTPFSSGATEREQGIDKAGNRRLRTVMIELAWLWQRYQPGSAQVSWFRERVGGTGRRMRKVMVVAMARRLLIALWRFATQGVVPEGAIVNPAG

SEQ ID NO: 400979 - protein, 314 aa, unidentified
MNTTNEINVGIDTGKKQLDIYIRPLDEFFSVDNTMQGVKQALKRLKAVCPTRIVIEATGRLELPFVVAAQKAGLLVTVANPMHVRRFASATGQLAKSDKLDAQTIAYFGEALKPEPTELKPENMRLISDLLARRSQLLNMSTMEKNRLSILPKPLHTSLKRHIKHLQTEVKRIELQLDTLIDQTPLWQERRDLLMSVNGVGKVLAYTLLSDLPELGQLNRREIAALVGVAPMNRESGNYKGKRCIRGGRARVRTVLFMAIMSAVQSNPKLKRKYLQLKAAGKPPKVALVACMRKLLTILNVMMKTGTHWDPEMA

SEQ ID NO: 400980 - protein, 445 aa, unidentified
MSLVHPNAAGIDIGSQFHDVAIPPDRAEETVKSFKSFTGDLHAMAKWLTACRIDTIAMESTGVYWIPAFEILENYGFKVFLVNAREAKNVPGRKTDSNDAQWLQKLHQLGLLRASFQPTSVIAELRAYLRQREKLLDYKAAHIQHMQKALMQMNIQLHHVVSTITGKTGMDIIRAIVAGNRNPQELVKFRDVRCKNSIETMTAALTGNFKPEHIFALMQSLELYDIYNEKAEACDREIQAVLDRLQQNSIPPDQPLPKAKYRECNKNAPAFDVRQTLFNIIGVDLTQITGLGSYLALKLVSECGADMSKWPTDKHFTSWLCLSPGNKISGGKILSSRTRPSSSRAAALLRLAATAIGRTETALGAFYRRLATRTGKAKAVTATARKIAVLFYNTLRYGMRYVDPGADYYEEQYKARILGQLRRRADSYGFSLQPMEIPDTAIGVS

SEQ ID NO: 400981 - protein, 427 aa, unidentified
MSVTQNEKIRQVTDTTMVIGVDIASEFHWARAFDWRGLELGKAVKFENSAEGFNFFLRWVSELTVEQKKDSVMVGLEPTGHYWFTLAAHLQGGDFKLVLVNPYHVKRSKELDDGHPSKSDKKDPKTIAKLVLEGRYVYPYIPQGLYAELRVAMNCRWRIRKELASIQNQIQRWLKIYFPEHSKVFGRFTGAGSMALLHSAPFPSDLISLGVEGISGIWKQMKLRGIGRKRAQRIYEAAQTSVGCTTGMEAARMELQILLEDYDAKLQQYERVMQVVENLCSQIPAVAELLKIQGLGRVTVAGLFAEIGDIRRFESPRQIQKLAGLAITENSSGKHKGPTEISRRGRSRLRAILFRAAIPLLAKNREFQLLHRYYTTRQNNPLQKIQSVIAICCKLLRVFYALATKDCAYSPEKMLADIQRNQPLKAA

SEQ ID NO: 400982 - protein, 429 aa, unidentified
MNFRPIAGIDVGKFFSEMAILSPSNEVIARMKIRHDSSTDVERAVELLKKTEKDFDSRPFVVMESTGHYHKILFHSLCKAGFEVSVTNPIQTDSIKNIGIRKVKNDKVDARKIALLYRFQELKTTNILDEDIECLRSLCRQYYKLSDELTAYKNRFTGIVDQLMLNFKDVFPNIFSKAALAVLEEYPTPAHILKADRNKLISMIQEKSHKSLKWATEKYELLVSKARDFEPLSIHNSSNIAMLGVYISMIRTLEENLEKVLKAIHKLIDEDLAKDMPVLALTLELLQSIPGIGLLSAATILAEIGDFSAFKKPGKLVAYFGIDPSVMQSGEFTGTRNKMSKRGSRLLRRVLFTIALANIRTKRDKTACNPVLLEFYQQKCRSKPKKVALGAVMRKLVNYIFAVLRDRKPYQLRSPQEHAKNLAAKHTAA

SEQ ID NO: 400983 - protein, 423 aa, unidentified
MMKLKYSICCGLDVHKNVIVATIVTTNKDGISEYLQKSFSTINSDIQRFHNWLIENNCYHVCMESTGKYWIPIFNYLENDIDICLTHPKYVKAIKGKKTDKKDSKWIADLYKFDLVRCSFIPPKDFRQLRELSRYRFKLVCMKSSEKNRIQNCMTISNVGIASVLSDPFGKTATEIMSYLLEHTADSMDEKAVRKLIKKGAKSKSDEIIEAIKGYTIETDQAKKLELARGHLEYLDDMITQTEVELYVRIKPYYEFVEFVSTMPGMTELSSTIVLAETGVDMDIFDDAKHLCSWCGLSPANNESAGKKKSVRIAKAGDYLKPIMVQCALAAIKSKKQPYFAIKYGRIKKRRGHKKAIIAIARMMMVCIYHMVSEKKPFTPTDYEELMEPQNHVESVVLNENNVFAYLESLGYDSSKLVKRNDN

SEQ ID NO: 400984 - protein, 314 aa, unidentified
MNTLVCVGIDVSQSQLDVAVRPGTRFSVPNDEPGWATVAAQMRRLAPVRIVLEATGGLEVPLAGVLAAAGCPVVVVNPRQVRDFARATGQLAKTDALDAQILAHFTEVIRPAVRPLPNEQTQALAALAARRRQLIEMLTAEKNRLRTASPSIRKSLRAHMAWLQRERTHTDTELAQAIQDSPVWREKDHLLRSVPGVGPVLTTTVLANLPELGTLTNKQIAALVGVAPLNRDSGTWHGKRMVWGGRAQVRATLYMAAIVATRYNPNIKTFYQRLCGVGKAKKVALVACMRKLLTTLNAMLKHRTHWRTEPPQHA

SEQ ID NO: 400985 - protein, 388 aa, unidentified
MTGNRRCIGLDVHREFAQVAIWQGGTVTQAGTFATTPEGVREFAAGLGPADEVALEATGNTWAIATVLASRAGRVVVSNPARTRAIAEAKVKTDKVDAAILAQLLAADFLPPVWMPDAATSALRRQVLRRAHIVRQRTRLKNQVHAILHRNLVPRCPAADLFGIKGRTWLAQQDLPPDEQAAACALLRQLDFHAQELTLIDRDPGQAALGRPEVLRLMTIPGVDATVALSIVAAVGDFTRFRTPEKLVSYLGLNPRVRQSSGQPASHGRITKAGPAHARGMLVEAAWSASKAPGPLRAFYQRVRARRGMQVAAVATARKLAVLCWHLTIKGEDYAFALPSLIARKQRKLELRAGAPPARGRKGDAAPYSLAAVRAACFRWSDGQSDRR

SEQ ID NO: 400986 - protein, 344 aa, unidentified
MKHYAGIDVSLEASSVCVVDAEGRIIREAKVLSEPEALIAWFQRLAAPVERIGLEAGPLSQWLHAAMAKAGLAVELLETRHVRTAFKTMPVKTDKKDARGIAQLMRLGWFRPVHCKSLPAQEVRAVLTARKLLQGKLHDVEMCIRGILRGFGLKVGTTTPRTYEDRVRALTEGHPTLEAIATALLNARGVFAQELRGFDRRVRELARDDERARRLMTVPGVGVLVSLTFVSAIDEPERFRSSRMVGAHFGLTPSRYQSGETDYSGRISKIGDTRVRSALYEAANVILTHSVRNSDLKTWALAVARRAGMRKAKVALARKLAVVLHRMLRDRTDFVAHQGAPMAA

SEQ ID NO: 400987 - protein, 314 aa, unidentified
MATSNETYVGIDVSKSKLDIAVLGKERVWQVDNTQTGIVCFVEQMQELQPELVVVEATGGYQRAVVEALFWAGLAVAVVNPARVRQFARACGLLAKTDKLDAQVLAVFGQKVQPRHYTGKSEAEKQLSALLVRRRQLDEMLKAEQNRLRTMSRSLKGAVERSIAFLKEEKKLLDTQIQQFVAEQTVWQEQREILKSAPGVGKVTTATLLAELPELGKMDRKKIAALVGVAPMNYDSGRKRGYRKTQGGRGDVRSVLYMATLVATRRNPLIRAQYQQLLKRGKLKKVALIACMRKFLTILNAMLRDKQSFRCAAM

SEQ ID NO: 400988 - protein, 449 aa, unidentified
MSQASRLSRGDKRRNDRLTRFRGIVRRDHAVVAIDLASNKQVVAVVDHDSRIVARRTFHCAPPQLATAIEWSRTAAAAAGFAGIVIACEPTGHRWKTVRDLTAAVGVDMVCVQPIAVARARETEDFTHDKSDDKDALLIARLTTQLHLYLPEHADEQWSRLRHLGVRRSQQLTRRSAAQQQARDLLESSWPEALDCAGQPFKSVTWLAAMAVIGADPTPLTAQGSRDQAVAWLREQVRAELPRWGGRRVTTRILVALVDAAFATETTITAEAGALERARYALDDFGHARTACEQVEHLMIEVLTGLGLRALAESIPGVSVVSVAAILAETGDLTRFDSARAVVKHAGLCPRENSSGNYRGTTRISGRGRPLLRVAAWRAAFAALTHNEVYAARYRHLTSRETNQLNPNQARVAIAAALLRQLFVVITTATPWNPDIAAGRTRPAERTAA

SEQ ID NO: 400989 - protein, 342 aa, unidentified
MDHYAGIDVSLECSSVCVVDANGKIVREGKVPSEPDALISWFRSLGYELSRIGLEAGPLSQWLHGGMKQANLAVELLETRHVRKAFEAMPVKSDRNDARGIAQLMRLGWFRPVHCKSIGAQETRAVLTARKLVQSKLQDVENHLRGILRGFGLKVGKTTNLSFTARIRKLVANHTSLEMIAEALLSVHAVLLREFRAFEKQVRSMARHDAKARLLMSTPTVGPIVALTFASAIDDPGRFKSSKQVGAHFGLTPKKYQSGETDYTGRISKIGDRSVRTALYEAAHIMLTRPIKGCSQLKSWAMRIARRAGMSKAKVALARRLAVIMHRMLADGTVFNAAAAAA

SEQ ID NO: 400990 - protein, 359 aa, unidentified
MGERDRRAEAKPVENPNSRQGREGEPELRKAGGRPGRKWVKVMGQYTELFVGIDVAKRSLEVALSSGESWAVNNNAPGVARLVKELAARAAALVVLEASGGYEREVWLALIEAGVPTARVNPRDTHHFAQAHRQLAKSDRLDARGLVLFAAQVRPQPDAAPGAADEQLKELVMRRQQLTAMLTAERNRLQQAISAASRRDIKAVIRFLERRREALDHAIEEHLSNHPRLRAISELLQSAKGVRRVVAATLIARLPELGRLTRNQIAALVGVAPYDRKSGDWDGRSHIFGGRVEVRCALYMAALSAVRWDPYLRAFYRRLRERGKEKKVALTACVRKLAVMLNAMVKNATPWSPPCPSLA

SEQ ID NO: 400991 - protein, 364 aa, unidentified
MEFLKYGLGIDMAMEKFDACISIIDKQQHVMIRAQCSFNNNKKGFETFILWVTKNTKLPIPAVYLMEATGIYYEQIAWFLHNKKCSVSVVLPNKAKKYKEALGLKSKNDRIDAKGLAQMACEQNNTIWKPLSGNLYVLRLITRQIQSVSEQSTVLKNQLHALEYCMYRDKAIEKMYAGQIDLLQKNKKSLQLRVEQIVEKDEILKKKFKNIGKIKGLGLQNLAVIVAETNGFTAFENIAQLVSYAGYDVVENQSGKRSGKTKISKKGNNHIRRCLHFPAFNMITYDVAPFKNLYERVYEKSKIKMKAYTAVQKKLLAFIYILWKKDEAFDPNYQDKESGDEESAPSFASVPQEPLIACGNEEKN

SEQ ID NO: 400992 - protein, 398 aa, unidentified
MTESSDYESVQVFIGVDVGKDTHHAVAINRSGKRLFDKALPNDENKLRSLISDLKQHGQILLVVDQPATIGALPVAVARSEGVLVGYLPGLAMRRIADLHAGEAKTDARDAAIIAEAARTLPHALRTLKLADEQIAELSMLCGFDDDLAAQTTQASNRIRGLLTQIHPALERVLGPRLDHPAVLDLLQRYPSPEKLASLGEKKLAAQLCKLAPRLGKRLAADIAQALAEQTVVVPGTNAAAVVLPRLALQLITLRKQRDEVALAVEQRVLAHPLYPVLTSMPGVGVRTAARLLTEVACRAFASVAHLAAYAGLAPVTRRSGSPIRGEHPSRRGNKALKRALFLSAFAALRDPLSRAYYTRKMSQGKRHNQALIALARRRCDVLFAMMRDGTFYTPQAS

SEQ ID NO: 400993 - protein, 345 aa, unidentified
MSEFYEGRQFVGMDLHRRRSMLVRMTEFGEHLETVRILNDRDSLAEVMSRAGESPEVVLEATYGWYWAVDALAELGATVHLAHPLGVKAFSYRRVKNDQRDAFDLADLLRMGRLPHAWIAPPATRELRELVRHRAKLVAMRSQCKAHVHAVLAKGGIWVPMTDLFGVEGNLLLDKVTMPAPYRERIASLRRFIEGFDAEIDLFTGLVQRRLAHDAGYTAIQQIPGIGPVLAAVFVAEIGDVHRFAGPAQLTCWAGLTPSHHESDTTVHRGRITKQGSRLVRWAAIESVKILPGTSRIGAIREQVAHRRGNRNIGAVAAARRQLELVFYGLRDHHVRALHRSPRAA

SEQ ID NO: 400994 - protein, 347 aa, unidentified
MPYHAQEEVQVFAGIDVSAGELNVACLRPEKDKETTATFTNTRSGHNALLAFLLRGNQRVRVCLEVTGNYSLDLALALQAHSQFEINVVNPRRARRFAESLGERSKTDPVDAHVLCEYALRMPWVPWQPPSSTALHLRAVMRAVEDLTSILTQEKNREHALAASHALPSLVLTELKRHQRYLKNRLTRLRREALRLVARDPQLSRRFQLMQTTPGIGENSALQILGELAVLPDTLDARQWVAFSGLDPRRFKSGTSVEQRPRISRAGSRHLRRALYMPALVALRHDPHLGSFYQHLLKHGKARLQAVVAVMRKLLHAFFAMFRSDQPYDGSRLCPFELANKLVDSCG

SEQ ID NO: 400995 - protein, 316 aa, unidentified
MQTKDHAEQFVGIDISKSHVDIGTYPQAHEQRFDNTEAGITLAVKALLKLSPTLIVVEATGGYETPLVAAIAISGMSIAVINPRQGRDFAKAIGVLAKTDRVDAHVLARFAQAVRPEARPQPSAETIGLAALLTRRRQIIEMITAENNRLHMAVPLVAKEIRKHVAWLEKCLKATDGDLDDMVRQSAAWQHKVELMSSVPGMGRVTAIALLAQLPELGGLGTREISGLVGVCPYSRDSGPMRGRRTIWGGRSAVRAALYMAALVGSRHNPILKAFYQRLVASGKPKKVALVACMRKLLVILNAMMKHDQAWHYEHA

SEQ ID NO: 400996 - protein, 351 aa, unidentified
MVVTIGIDVHKDTHCAVAVDDVGRQLGRPVTVRATDAGHRQLLRWSRREFAEDRVEFAVEDCRHVSSRLERALLDAAATVIRVPPKLMAQTRTSARTRGKSDPIDALAIARAALREPNLPRAEHSHASRALKLLVDRREDLVQVRTKAQNRLRWHLHELDPEFDVPARGLDQRRHQDRVAARLEELPGSLVRRLALEILADICDLTGRINALEKEITALVRVQAPQMLALPGCGPLTAAKLVGETANPARFRSEACFAMHSGTAPIPASSGRTNRHRLARGGNRQLNAALHRIAVTQIRLDGLGRAYYQRRRTQGDTTMEALRALKRRLARIVFNLLRPDRRGIPAAGGLT

SEQ ID NO: 400997 - protein, 318 aa, unidentified
MQTSIVFIGVDVGKFELQVAASDGEIVTGVLPNNRSSIVGWLKRVPATSVIAMEATGGYQELLARTAHERGFEVYVLNPTQVHHYAISLGNRGKTDRLDAAVIAQYIAQHHKKLHRYEPISPELQEVRALQALRSTVVRVGTSLRLSAQRHGCVSSHQKKALASLTAWSEQLEREMIAKIKAQSDWAKTYGLLTGICGIGPITGVALTSLFSRIDFASSDAAVAFCGLDPRPNESGRKVGRRRLSKQGDKAARTLLYNAASSAARTAQFKDYYAMLRARGLASTAALVIIARKLLRIAYGVWRTGQPFDSEKLRPTTA

SEQ ID NO: 400998 - protein, 429 aa, unidentified
MKIIYPRVCGIDVHKKFIVAVICISESVEPVYLKKRFSTFHNDLIRFRDWLIQNDCQNVCMESTGKYYIPVYNILESHISNIVVANPKWVRAVKGEKDDDKDAKWIADLFKLGIVKSSFIPQKDFRILRELTRYKYKLVNMRSSEKNRYQNALTSGNCKLDMVFTDIFGKSASNILNLILSNNPYTDEDILSKVHKNCKASPDMILNSINGTDLTPVQKSRIELVNNHIKQLSSNIQRLDKLIDLMIEPYEDYISFLCQIPGVSRNSAITILSEIGVDMNQFTSTRRLTSWAGLTPSSNQSAGKKKSVRISRAGVYLKPCLVEVAHATVKDTNHPYYANKFNKISKRRGKKRAYIAIARKILVAAYHMLLTGEIWNPADLAEVETPVEQRIKYVKNNLKSDIKQLLDIGLTVEELTLMIQQNANNIATQ

SEQ ID NO: 400999 - protein, 342 aa, unidentified
MQVTTIGLDIAKNVFQVHGIDAAEKVVVRRRLRRNQVLEFFKALPPCLIGMEACATAHYWARELTKLGHQVRLMPAKDVKAYVKRNKNDAADAEAICEAVRRPTMRFVQVKSAEQQSQLMLHRTRDLLMRQRTQVINALRAHLGELGITAAQGKAGLTELLAIIAGSANERLPAEAHASLIVLAAELQAMRTLIASIEKRIIAHHRWDEASKRLRSIPGIGLVGATAIAATITDPKAFRSGRDLAAWIGLVPRQDSTGGKQKLGPISKQGDRYLRRILVVGAHAVLKLARQKPEKYPWLTQLLARKPFKVVAVALANKMARIAWALLVKGGPYRARALVAAA

SEQ ID NO: 401000 - protein, 417 aa, unidentified
MTQYAAYLGIDWADKKHDLRLVDAATGKQTRQVLPHTPQAIAEYFSNLRRQYPGQLIAVALEQSRGPLLFALLQYDFLVLYPLNPTTLAKYREAFTPSRAKDDPTDADYATELIMKHSDRLKPWHPDDEQTRTLRYLVEHRRRLIGDRTRLSNRMTSLLKCYFPQVLSWFPELTTVLVCDFLLCWPALEQLRGVKRSTLLNFFRAHHSVRTDTLERRLAAIKESVPLTSDRAIIDSSLLMITALAAQMKTTIEAIKQFDAAIEKLCLAHPDFPLFQSLPGAGAVYAPRLLAMMGSQRHRWTTAEELACLAGIAPVMERSGQSVWIRWRYFCPKFMRQSFHEFAGESVKHSFWARAYYEQQIGKGKSRQAAVRALAYKWIRIIWKCWQTRTPYNEVQYLEALRKKGSSLLSYAAKNAT

SEQ ID NO: 401001 - protein, 339 aa, unidentified
MDITTIGIDLAKNSFSIAGANEHGKVVLRKTLSRNKLLPFIAQCPFCLIGMEACSGAHYWGREFQKLGHQVRIMAAKFIAPYRKGGKNDNNDAQAICEALGRQDIWFIPIKTPDQQAVLCIHRIRQGLMRERTAMINQLRGLLSEFGLVMPKGRYPAQRAILGILEDAENGLPMLARRVIDNLWQRIKQANEQIREYDRELAQLVKESPVAKRIMTIPGIGEQTASGIVASVPDPMMFKNGRNFSAWLGLVPRQYTTGGKIKLGRITKTGDQYLRTCLVHGARAVIAHLGDKQDRVSCWVRELITRRGYLRAVVALAARNARLIWTLMQKQEDYRAMPL

SEQ ID NO: 401002 - protein, 384 aa, unidentified
MKENSTGKVGGTEVSKQAQQRLQALVAARRRGEQAEARLTVGLDIGDRSSSYCVLDEAGEVMERGRTATDRQALTTLFSQLPAGTVALEVGGHSPWISRLLKQLGHDPVVANAREVELITRNSRKNDRLDAELLARLARADRKLLSPVEHRSGQAQADLMGVRVRAHLVEVRTATVSAVRGLVKSWGERLPKCDADTLGRRHAAGLPEAVRGHAERLLELVEELTEKIAACDREIEEVSRRRYRKETAQLQQVKGVGPVTALTFVLTLGDPHRFGKSRDAGAYLGLAPKSSQSGNSEPEMQISKEGDVYLRALLVQCSQYILSRRGPDTDLKRWGLGIAGKGRKKAKNRAVVAVARKLAVLLHSLWVSGERYEPLRQAQARAAA

SEQ ID NO: 401003 - protein, 371 aa, unidentified
MKSIIYIGMDVHKKTYSLCALLKETGEIIGETKIPADVSLIIKFIENAKKSVDSDDVQIKTGYEAGCLGYSLYWQLAAKGIECDILAPSTMHRSAKNKVVKNDRRDAKNIAANLANGTYKSVYVPTDEDVEIKEYIRMMHDFKIELKKVKQHINAFLLRFGHHYPGKSKWIPAHIKWLKELELSDMYREILDEYLSQLEILTEKIERFKYRLEELSQKETYNEKIGQLRCIKGIDTTAAMTMHAETSDFDRFPTANAFASYCGLTPGEDSSGDSYHRLGITKQGNSMIRTTLVEAAQVLVRGTIGKKGKKVKSKQKDQDVKVIDYADKAVIRLQKKYHHMIFRGVKRNVAITAVARELACFVWGIETGHIS

SEQ ID NO: 401004 - protein, 389 aa, unidentified
MTYCVGIDIAKYEHVASITDSSTGELIVDSLHFDNSLKGFNKLLSVLSKLNKQDIMIGFESTAHYHQTLFNYLTENHYKCYLINPLMISRFRSISLRDSKNDNIDSRAISGFLLLEHEHLIDEDFSINELKELCLQRSFLISSQTTLKIKLTSYLDRVFPELCSVIPDGTLYSKGVFGILKQYPTARQISETRIDRLVNLAKSASKGRYKESMVIKIKEAARSSIGLDSQAFSLKIRQSIEAIEIHKRQIDEINEAIINHHIVINSPLHQIKGINSIEIGYIMSAIISIDRFDSPTKLIAYAGLDPKVRQSGTWKAAKTRMSKRGNVLLRYALIWTANNIRKHPSRMKEYYLKKKSQHKSHYNALGHCAAKLCHYIFWILNNPEKQFIN

SEQ ID NO: 401005 - protein, 350 aa, unidentified
MLIVGCDYHPGFQQIAFVDTETGEFQERRLQHRGEAEKFYRDLAARGVKVRVGMEASGHARWFERLLAELQLELWIGDAAEIRAKRVRKQKTDRQDAQHILTLLVQDRFPRIWVADWENRDLRQLLWHRHRMVQTRTRIMNQLQAVALNEGLRCKKRLWGKKGRQQLESLRLAPWATRRRRDLLELLDRLNPLIAELTQAIEQEVEKHPEAQRLMTHPGVGALTALAFVLVIGTAERFQCGKQIASYLGLVPAEDSSGERRRLGHISKQGSAILRFFLVEAAQVTVRSVPEWRSKFFHLVMRRGRKIAKVAMARRLAVHLFWMWRKQWDYQQLKEFGPYAGKPGTGVGVH

SEQ ID NO: 401006 - protein, 461 aa, unidentified
MLVDASPVPPPAAPPSPAASCRAQIGIDAAITANHQVAVRRVGVDGDATTTRFVVAPTLAGLGTSTGRLAGCPGAVAVAEPTSMTWLALAWALTDAGGALALLGSRHAARLRGAISGKNKSDVIDADVLARAAEVFELTPLRLPGPEQLALRRVVTRRGAAVIDANRYLRRLISLARWAFPDVWNAFRGSLPTGKAVLARWPHLAALADARRSSLTAVVAEHTRGAADVPARVEAIRLAARDWAVFWAGRLDLDALAWDVSEQLADLADAAARVERATAQATLYWERIYGEDELLLSIPGMGPVTAPTVRAFLGDGSGFTTAKAAAGYVGITPSNWSSGTVTQPSRAITKEGPAVLRLAFYQAGNAARRTDPQLAAFYHRLMAQRGHCHTQASVAVARKLVERTWAVLHRGTPYRLRDLDGQPISERAAKALVAERFTVGADVRARARAHSAATHRSKLTR

SEQ ID NO: 401007 - protein, 402 aa, unidentified
MNSVGIDISKGRSTIAVMRPFGEIVISPFEVRHTDSELSELARRLKSLNGETRVVMEATGNYHAPVAKLLHDAGLYVSVVNAKLVHGYGNNDLRRVKTDRKDAVKLANYGLDRWLTLPRYVPEENTRLLLKNCYRQYRQYSKVQTVLKNNLISLLDMTFPNANRLFVSPARADGSEKWVDFVAEFWHCECVSERSLKSFVNKYWRWCRKHGYNFSEEKAHAIYDEASGHIGVMPKSETTKLLVEQAVSQLSATSAALAALKQEMQSLSSQLPEYPVVMGMFGVGPILGPQLIAEIGDVRRFYSKKALVAYAGIDAPPNDSGDVIGRHKSMSKVGASSLRRTLFLIMSAYLQNSPPNEPVYQFMDRKRSEGKPYRVYMMASANKFLRIYYATVKAYLETLEQF

SEQ ID NO: 401008 - protein, 354 aa, unidentified
MMIIGCDYHPGFQQIALVDTDTGELQERRLQHREEAEKFYRDLAAQGVKVRVGMEASGHARWFERLLAELNFELWIGDAAEIRTKRVRKQKTDRQDAQLILRLMVEDRFPRIWVPSWENRDLRQLLWHRHRMVQARTRIMNQLQAVALNEGLRCKKRLWREAGREQLEAFPLAPWASRRRRDLLELLDRLSPTIAELTQTIEQEAEKCPEARRLRTHPGVGSLTALAFVLIIGRAERFQCGKQIASYLGLVPLEESSGNRRRLGHITKQGNALLRFLLVEAAQVTVRSIPEWRNKYFHLAMRRGRKIAKVAMARRLAVQMFWMWRKGWDYEQVRKFGSHAGQPGNRDGVHSNTE

SEQ ID NO: 401009 - protein, 316 aa, unidentified
MTASLLFAGIDVAKATLDIAVRPSAQTWQVIYDDAHVEALVTQLNDLSPTLIVVEATGGLERPLVVALLTAGLPVVVINPRLARDFAKATGRLAKTDRIDARVLAHYGEAIRPSCRPLPDADMQQLRAMVDRRRQLVDMMTAEQSRLSCSPAHIQDSIECHIDWLRQQIASLDDNLESMLQNSPLWREHDAILQSVPGVGPIVSHTLMVHVPELGHLNRKQIAALVGVAPFNRDSGAYRGRRSIWGGRAAVRAVLYMGALVATRHNPAIREFYQRLLAAGKSKKVALTACMRKLLTILNAMMKHQRRWQPRGAASV

SEQ ID NO: 401010 - protein, 296 aa, unidentified
MTSTKYIGLDVHKESISIAVLNSAGKVVMECVIETKASTLLQFIHGLRGDLQVTFEEGTWAGWLYDLLKPHVTELVVCNPRKNALLKEGSKSDRIDARKLAELLYMSKLSPVYHGEHGLRMLKELSRSYLTITKDLGRVMNRLKALYRGWAIPCAGTQVYAPRYRSEWLAKIYEAGVRRRAELYYQQLDALRLVRQQARKELLAEARKHRATKLLRQIPGIGPLRAAHLVALMQTPHRFRTKRQLWNYSGLGLETHDSAQYRVVEGQLQRSKKPVTCAVSMTITTTTSKIFSRVRR

SEQ ID NO: 401011 - protein, 393 aa, unidentified
MVCVGIDVAKDKHDCCILDSEGTTLVDCFTIPNNMDGFKSLLQTIQDCSQKSDKIKVGLEATGHYSYNILGFLLDNDLPVYVMNPLHTNLYRKSLSLRKTKTDRVDAKTIATMLLSDVDLKSYTDTAYHNEELKSLTRYRFDKVRERAQLKQSVSRLVTILFPELEKLVPTLHMSSIYALLIEFPGAKQITEAHLTHLKSLLKDASKGRYGRDMATEIRDAAKHSIGSVMPAKSLELRHTIRLIRELDSEIEDIEAAIEAIMEELQSPITTIPGMGFRMGAMILAEIGDFARFDSPDKILAYAGMSPSTYQSGQLSLAGTYSHMEKRGSRYLRYALYNATKYVCHWDPGFAAYLAKKRAEGKHYNVALSHAAKKLVRLIYAMEKSRQPYKRAA

SEQ ID NO: 401012 - protein, 359 aa, unidentified
MLKYALGIDVSKKDIHVCLSSIDAKQQVKVKASSKFTNNEQGFKALLVWVNRHKKELDISLVNVIEATGVYYEACALFLFKAGLDVAVVLPSKAKKYLQALGLRSKNDKIDAAGLARMGAEQYLELWQPMDEFFYTLRAMTRHHQSLQELKTNISNQLHADEHSIYSTKAVIKQLKKLIATIEKQLKETDRGIHDHLYSNDEVAEKLNHIIDIKGLGYMTVATVLAETNGFALFKSASQLVKYSGYDVIENQSGGHRGKTRISKKGNSHIRRAMYMPAFNVVRFEKGNFKTFFERVLERHHQKMKAYVAVQRKLLVMIYTLWKKNEAFNRDAKINTSRKEETAPSFALTAGQLNEVAPA

SEQ ID NO: 401013 - protein, 375 aa, unidentified
MQEKLRFLGLDVHAETIAVAIAEPDGEVRSLGTIPNRAESIRKLIKKLGPVEKLRACYEAGPTGYVTYWQLAELGVKCEVVAPTLVPVKAGDRVKTDRRDAEKLARCYRSGDLTAVWVPDEGSEALRDLVRAREAAKQDQLRARHRLSKFLLRSGQRPPSGIRPWTRPYLIWVGQLRFTQVAQEATRLDDLHEVEHMRERVARLEQAIAEAVKLASPVLQQVINDLQALRGIADISAVTIAAELGQVSRFDGARQLMGYCGAVPSENSSGKRTRRGSITKTGNAHLRRIVVEAAWSYHRPPCIWYGLRKRQQSISEEAKEIAWKAQHRLHKRYMRLAAAGKDKRKITTAVARELLGFIWAIGIRAETVARQRIAA

SEQ ID NO: 401014 - protein, 358 aa, unidentified
MNRNTGMNAGQIIGTMGGKQVVGLDIAKHVFQLHTVDMSTGEIANVQIKRAKVLEHFVNKPKSLIAMEACGGAHHWARELTALGHTVRLLHAKIVRPFVSGNKTDATDARAIWLAVQQPGVKFVGIKTAAQQATLTLHRQRELLMKMRTMQTNALRGLLYEFGATFAQGRKAMFKDVEQTLEDLSAQLPQMVRDSLREQVARIKAMSDDILTIEKRLGLQLKADPHMQRIAQIPGVGLLTATAAIATMGEASAFKSGREFCAWLGLVPKQTGTGGKVRLGGISKRGDTYVRTLLIHGARSVLSHAKEPGPWLAQIQARRPANVVIVAQAAKMARTIWAVTAKEQSYQRGFQSVRPQAA

SEQ ID NO: 401015 - protein, 404 aa, unidentified
MIDTGDIDVFLGLDVGKGEHHATALTPAGQKAFDKRLPNTEPKLRELFAKLKAKHGTVLVVVDQPASIGALPLAVARDMGCPVASLPGLTMRRISDLYPGEAKTDAKDAFIIADAARAMPHTLRAIDREDETIAELEMIVGFDDDLAGEATRIANRLHGLLTQIHPSLERVLALRLQHPAVLALLERFGSPAQIRKAGRRCLVTLLRPKAPRMAERLVEEIFAALDEQTVTVSGTEAATLIVPSLAGSLTAVLDQRKLLAGRIEELLEAHPLSQVLRSMPGIGVRTGARILIEVGDGSTFPTAGHLAAYAGLAPATRSSGSSIRGELPSRRGNKQLKRAFFLSAFAALGDPASRIYYDKKIAQGKHHTQALLCLARRRADVLFAMLRDGTFYEPQPVRAVAPQT

SEQ ID NO: 401016 - protein, 339 aa, unidentified
MNATTFGLDLAKRVMQVHWVETATGEICRRQVKRGQLLEFFAQREASVIAMEACGSAHYWGRKLAGLGHQVRLIAAQFVRPFVKSNKTDAADAQAIWEAAQRPAMRLVALKSEGQQAVLMLHRMRSQLVEMRTMQVNQLRGLLYEFGAELPPGRRAGLERIPDELAKLESVLPAMVIDTVRDQLGRIEGLDQDIAAVERRLAGWKKDDEASRRLMDIPGVGLLTATAAVATIGEARAFKSGREFAAFVGLVPRQSGTGGRVKLLGISKRGDVYLRTLLIHGARSVITHGKQHDAWLTRLLARRPFNAAVVALANKMARTIWALLAHERTYQKGYATTVA

SEQ ID NO: 401017 - protein, 340 aa, unidentified
MRQLYAGCDLHSNSNLVGVIDGQGRRVFKKRLSNDLRWIRETLGPFKEELVGIVVESTYNWYWLVDGLMEEGYRVHLANPSAIQQYAGLKHADDKHDAFWLAEMLRLGILPEGYIYPKQERPIRDLLRKRGHLRRLRTSLVVSLQNILSRNLGRKVSVNDVKVLREDRITPLLEQSEDLAMAGQISKETIDFLTHQIDQIERRIDKGMKLKEAYRFLLTLPGVGKILALTIMLETGPINRFETVGDYVSYCRKVPSRWMSNGKWKGSGNTKNGNRYLSWAYAEASDYARRLHPEPRAYYQRKMQKTNAVVAHSALAHKLARAAYYVMRDQVPFDPEKLFR

SEQ ID NO: 401018 - protein, 337 aa, unidentified
MKKSCKSLTFFIGIDVSKLTLDVTVLSPKSSTKKYKQISNTVEGLQALNSWLRKIEGFKYPHALFCLEHTGVYTRVLLNYFSDKNANIWLESSLHIKKSLGLKRGKNDKIDSLRIAEYAYRFIDKAKLYQNNLPVITELKDLLTCRARLKKQLKINRVAINELKKSDPVQGEKVEFFSVAAVKGIKISIEEIEKEIMKIVEQNRELKEVYDLATSIPGVGPVLTLKLMVYTKMFTKFKNNRQLACYCGVAPFEYSSGTSVRGKAGVSKFANSDLKSTLHMAAISSVQHNPDLKAYYERKVKEGKNKMSAINAVRNKLLYRIVAVVKRKTPYVNVYNV

SEQ ID NO: 401019 - protein, 373 aa, unidentified
MPKYSTAFGMDVHLRSTTVCALDADTGEAVTRRFPGNPWGEIAGWMDGFPGPSLAAYESGYLGFAPQRELAGLGVECVVAAVSKIPRSAADSASKNDRNDAARMAKAILAHDISPAWVPSPEVEGIRDLAGAYDGAAARLATAKQRLLAFLAKRGFVYGGTTPAGNPRKYWTYDFLRWLDKVRPEDDGGVRALAALRNEVEAAAEARADLLSEYRAAVDASPIAAEVAALQSIKGCAFALAAAFSAEVGDFTRFRSGRQVTAYFGLAPSQRSSGDSVRLGGISGAGNALVRKLAVEGSWCYAAARHQPKLMPRDTGVPLEIRVHGRKGSERLLRRREEMLARGMPAAKANAATAAELVRWLWALGMMCREGTE

SEQ ID NO: 401020 - protein, 412 aa, unidentified
MKVAGIDVHKKVLMVVVVDASAPEEKPARRRFVTMPSELHRLLMWLREQGVEEAVMESTAQYWRSVWLELEPHMRLHLAQAFSNRAPRGRKHDFKDAERLVRRQIANELILSFVPNGEQRIWRSMTRMKLQLTRDRVRLQNQIECLLEEMRIKLSIVVSNLLGASGLRILHALAKGETDPKKLAQLGDERLQCTEEQLVDALTGRLQPVHGEMLALQLQRLQLIDQQMAELNRLIAQAMKSHHDAVIRLAEVPGLGVDSAQQIIAEVGAQASTFQSAAELTSWVGTCPGKEESAEQNRSSRSAKGNKYLRRVLNQAAHAAVAKKGSHFQAVFRRLLPRLGYQSAIWAVAHRLCRVVWKILHEGVRFIEQGQEVGPREKKKRAQMLARALRKLGYEVTITPTNQVAGTVAAQI

SEQ ID NO: 401021 - protein, 449 aa, unidentified
MSRPQVIDDEEHERVHDRVAAIDVAKDTGMVCTRTPHPSRPGAQRASVWTVRARMNAIRVLGRQLRKDGIEIVTLESTSDYWRIWFFVLEACGLAVQLVSAAQAKNLPGRPKTDKLDAMWLARLTEMGLLRASFVPPKAIRDLRDYTRARTRLIHERSRCWQRLEKLLEGALVKLSSVASKLTTLSAQDMIKAMIAGQRDPEILAGLARRTMKAKHDALVEALDGMFDDHHGELAALLLDQIAALDAKVAQLGARAAELAAAIPGGWGIDPDGTTGPGAGTGPDAPVLNAVARLAEIPGLSPDLARTIIAETGLDMTRFPDAAHLVSWAGLCPSARQSGPRTRSGRKGRGDTWLRGALGQAAVNASRTATFLGERYGRIARRRGKAKAQVAIARSILVIIWHLLANPEARFTDLGPGYYQTRLDTDRKLRNHLRQIQALGFTVTLTKAG

SEQ ID NO: 401022 - protein, 354 aa, unidentified
MEHYVGLDVGLEETSLCVVDSEGKTVREVKVSTEPVAIRSALEGYADRLSRIGVEASSLGLWLYRELQAAGLPIIVVEARHMRVSLSTMRNKTDRNDARGIAQMMRLSWFRAVHVKNVEMQKMRTLLTNRKLLKRKLVDIENHIRGALRTYGLLVGAVGRGQYEARVRELIERTDIVFSTMIETMLDVRRASFDGYAKLHRVLLQVVQHDQICRRLMTVPGVGPVAALSFKVGVDDPLRFTRSRTVGAHFGLTPRRHQSGTSIDYEGRITKQGDVSVREALCEAAASLLLRVRKWSALRAWGLRVTKRSSMLCAIVAVARKLAGILHRMWIDGSDFKVGFGAKVTQRLKLKPAQ

SEQ ID NO: 401023 - protein, 311 aa, unidentified
MEHSRFVGIDVSKAHLDVHVRPTGDSFRVSHDDAGFAMLIERVRPLTPTVLVLEATGGYEVTVTAALASAGLPVAVVNPRQIRDFARATGQLAKTDTLDARVIALFAEAVRPAARPVPDEQAHALGELVARRRQLVDMLGAEHNRRRLLRDRRLQRHLDAHIAWLEEALRRLDHDLTTLIRSTPVWRETEDLLRSVPGIGPVTACTLIADLPELGRLDRRRIAALVGLAPFARDSGAFRGRRMIAGGRARIRRVLYMATLTAAKHNPAIRAFYQRLVAAGRPGKVALTAAMRKLLTILNAILRDRRAWLSP

SEQ ID NO: 401024 - protein, 455 aa, unidentified
MPRKTTGDRPELKPLNVGAAAIDIGSKMHMAAVNPTCTDVPVRSFGTFTQDLHDLADWFKACGVTSVAMESTGVYWIPVYEILEQRGFEVILVNARYAKNVPGRKTDVSDAAWLRQLHCYGLLRGSFRPDAEIATLRAYLRQRERLVEYAAAHIQHMQKALMEMNLQLHHVVSDITGATGMRIIRAVVAGERNPDVLATYRDARCHSSIETIRAALVGNDRDEHVFALTQSLELYDIYQAKMLDCDRKLEVMIAALSSKGAKPVGKLSKPRIKTKQVNAPTFDVRTALYGVLGVDLTEIHGLGPSLALKLIGECGTDLKAWPSAKHFTSWLCLAPGNKISGGKVLSSRTRRSSSRAAALLRLAATTVGRSDTALGAFYRRLSSRAGKSKAVTATARKIAVLFYNTLRHGMSYKDPGAQQYEQQYRSRVLANLQRRAKSLGFVLQAIPDDANPAVS

SEQ ID NO: 401025 - protein, 363 aa, unidentified
MEQFIGCDAHKKFSVFVAVNEKGQAGEALRVAHDRQLYREFLSQLPAHSAIAVEASGSYSWLVDEMERSGHHPQLCNPLEAKRRMGLTNKTDKLDAKGLAILLRNGTLPEVWIPPSELRDQRELLRLRIFLVRLRARVKNRIHGTLARHNVQVPGADLFGVAARLDLGRRLPELPVHSREAVEQELATLDFLETQIESAEQRLNAIMNVSVEADLLKTLPCVGKILGMVLMLEIGRVDRFPTAAHLASYAGLVPRVHSSGGHTRMGQVCANVNRNLKWAFVETGNLIVINQRGLAGTHVVRLFNVSNEARIIRRQWSPWRATWPSSLVGTNQAGGLSRAAGLAATGSFVDARVSAAKRLAPRG

SEQ ID NO: 401026 - protein, 345 aa, unidentified
MPIVGGLDIHRKQITFDYLDTVTGQVQCGQITPADRAHLRAWLARFHGRDDVAFAVEGCTGWRYVAEELAAAGVAAHLAEPADTAFARGRKRHAKTDKTDCRHLRALLAEGRLPECWIPPGHILECRALLETYHDLRAEHTAWVQRVHAVLFHQGAPALGEGTLRTEQGLAALRAAAAAHLSPAGQLQVATALEVIDALETRLHVLRHQLLDAARHLAGAKVLAARLYGVGPVTALAMTCWLAGAGRFSSSRKAVRFAGLDITVYSSDRKGPPGRLSRQGPPVLRWAVYEAGKTHARSSAPDHGYYAAVKDRQNGKRAALSEARKILRQACHILAELGDDALAAA

SEQ ID NO: 401027 - protein, 433 aa, unidentified
MPLSEFSAYVAIDWADQHHCWRLADAEGKYRDHGDLRNTPEAIDTWVAGLLLRFPEGSLAMCLEQSRGGLVFQLGKYARLVLFPVHPATIASFRQAFFPSGAKGDPGDTALLLEVLLHHRQHLRRLDPDTPETRLLGMLIELRRRLVNERTRQSNRLTAWLKMYFPQPLDWIDNIDAPLGCDFLERWPTLQQLQRAKPETVERFFREHNSRSETRIQERLEAIRTAVAAVQDTALLEAGAAATDALVALLKSLNANIGSLDQRIAALPKHPETDLFAGLPGAGPVLLPRLIVAFGTRRERFQSAAELAAYSGIAPVTKQSGKSKSVQFRRACPAFLRQTFHEFAAHSIVKSSWARQFYDQQRQRGKRHHAAVRSLAFRWIRVLFRCWKDRQPYDEARYLEALQKRNGHPREGQGCDTASVTEPQGLAGDRTPE

SEQ ID NO: 401028 - protein, 420 aa, unidentified
MHETQSWFAGVDWASQKHDLWLADANGKRLGKRTFEHSGEGLAQMCDWLVATSGGRPEDIHVAIEVPHGAVVETLLDRGFKVYAINPRQLDRFRDRFSPAGAKDDSRDAETLSSSLRTDCRAFHQVSLADPAIIELREWSRMADDIRGGKIRHANRLREQLQRYYPQMLQFDSDLAEEWILKLWEAAPTPAKAARLRQAEVEKLLKRHRIRRIGAAEVLAILKQTALTVAPGVTEAAVAHIRVLIESIRLCAKQLKEAHRQLDRLCKLLAEPIASEDGKTAPEQEQAQRAVAILKSLPGAGRIVLAVLLAEAFDTLQRADYAILRILCGVAPVTRRSGKSRAVTRRLACNPRLRNAIHYLADAARRCDEKSKAKYLALKARGCSHARALRTIGDRLLYVACTMLKNGTLFDPSFESQKCA

SEQ ID NO: 401029 - protein, 442 aa, unidentified
MSHQTQQPEPEFAACVGIDWADRQHFWACQMPGSRRIEQGELPQTPEAVEEWAMELHRRFGGAPVAIALEQSRGALIFLLGKYAHLILYPVHPTSLANYRKTFRPSGAKDDPSDASLVLDMLVHHRDRLRRLSPDTAETRTLQMLVEHRRKLVNDRTRFTNRLTSQLKLYFPQILEWFDAVDSPLVGDLLERWPTLQELQKAKPATLRRFFTQHNCRGQEKIDQRLEQIRRAVPATGDSALLTASRSVVCALVAMLRALRYAIVAHDEQIEPLARCHPDFAIFASLPGAGPVLVPRLIAALGTQRDRYRSAHEIQCYSGIAPVKESSGQQIWVHWRWACPKFVRQTFHEWAGHSIGFSQWARTYYDRQRALKKGHHAAVRALAFKWIRILFRCWQNRTPYDEAIYLNALRRRQSPLIVPPQPIVELQLKKRGGFWKITPADA

SEQ ID NO: 401030 - protein, 352 aa, unidentified
MLIIGCDFHPRFQQIAYLDKESGEYGERRLNHPEEASQFYRGLVGKSVQIGLEATGSYRWFRRLVSELGHEIVVGDPSAIHATIPRRQQTDKRDARHILKLLVEDRFPAIWLPPVENEQVRQLLVHRCRMVQLRTRLMNQLDAVAKDECMLDPRVWQQKHRLQVEALPLTGWRAEQRNDLLGLLKELDKRIQPLNKAVRKLADENTEACRLMTHPGVGPIVALAYVQAIGDWQRFPRGKQVASYLGLIPQEASSAGKRQLGHISKQGNGMVRWLLTEAATIAQRHDPSLHRQYVRLSMQKHHGVAKVAIAHKLAVRLYWMLRSGNDYEQVKERGSHAGQSGYPTGCSLQPKG

SEQ ID NO: 401031 - protein, 343 aa, unidentified
MGEVSTIGLDIAKSVFQVHGVDAGGAVVIRRRITRAKLLEFFAALPPCLVGIEACPTAHYWSRRLQALGHNVRLLPPSYVKAYLKRSKNDANDAAAICEAVTRPSMRFVATKSEQQQSGLMLHRSRQLLVCQRTMLSNAIRGHMAELGIISAKGRNGTAELLKIIANEQDDRIPEAARFSLDVLARQYVAVRAEIVAIERRIHAWHRSSEESRRLEEIPGVGPIVATALVAEVGDWKVFSSGRSLAAWIGLVPRQHSTGGKERLGRISKQGNRHLRWLLVAGAMAVIRYARQHGTKRPWLARLMDRRPIKVAAVALANKIARMAWAMMVRGERFKEPRLLPAA

SEQ ID NO: 401032 - protein, 379 aa, unidentified
MTKSTTIIAFDQHAATTVAAMLRPGHRTPELYQLTSDAPTILRLVDRVRRERPVQCCYEAGPCGFELQRTLTEHHIPCEVIAPALIPRRPGDRVKTDRRDAGQLAILYRAGALTAIHIPTAQEEAARDLLRCREDIRADLLRARHRLSHFLLRHGRRFTATTRAWTTRHAAWLQAQQWPLPALEQTHRAYVRAVEDAVARLQTVDLELRDLLTLEPLRPRVERLRCFRGIDDLTALTIAAELGDPRRFPRAPSLMAFTGLIPSEHSSGTKQARGPITKTGNAHLRRVLGEAAWQYRHHAYLGPALRRRQQGAPREAIDIAWRAQHRLHRRYRRLAARGKTKQVIVTAIARELTGFLWAALVPRSDRPTSGRRTLEISVR

SEQ ID NO: 401033 - protein, 329 aa, unidentified
MVLLGIDVSKGRLDCALLADEGGSSLGGRAFPNDAGGTGRAASWASRVSGAAAADTHVILEATAAYHEPAAHQLAALGMRVSVVNPARVRSFAKGLGILGKTDRIDARLLARYGQLVRPKAWQPPAKAVADLQALVARLDDVEADLRREESRLEQARTRACPGVVEQSLLESIAALKSRRRSLRRAIVAHTAAHDGLQADLERLLTIPAVGPKTATRMLALLRARGFESARQAAAYLGLVPVEHQSGKSVRGRPRLSRAGNPRLRAALYMAAVVGIRRNPDIKAQYERLLKAGKCKMAALGAAMRKLVHLCFGVLKGGGDYRAGVATPA

SEQ ID NO: 401034 - protein, 357 aa, unidentified
MAPMLADKVEFVIGVDTHRDSHTAAVVTATGGVIERLTVATDAFGFRKLDAFAATHATGRRVWAIEGTGSFGAGLTTHLLERGEWVVEIDRPARPARRDGAKSDDLDAVRAAREALAREHLAAPRARGDREAMRVLLTAREGAISARTKAIGQLKAMIVNAPQSLRDQLRRGTTDEQLNRCARLRTLPAHSVEHRATVRAIRATARRALMLEAEAAEHETELELLVTAACPQLLDRLGIGVITAAQFLISWSHRDRIRSEAAFASLAGAAPIPASSGATVRHRLNRAGDRQLNRALHTVALTRLRFEPTTKAYAARRTAEGKTPREIKRCLKRAIAREVYRIMQTHAASITTTKLVA

SEQ ID NO: 401035 - protein, 343 aa, unidentified
MDHFAGLDVSVKETSVCIVDDTGKIVREVKVASEPEALLAVLKNPAYHFKRIGLEAGPLSQWLFGALAEAELPVVCVETRHMQAVLKAQINKTDRNDARGIAQMMRVGLYRPVHVKTLRSQKLRMLLTHRKLLQSKAIAIENDLRGTLRNFGLKVGMVGTVKFEARIKELVENLPDLAELVEPLLVVRRVLREQFVILHRRLLAIVRDDEVCRRLITTPGVGPVVALTYRATVDVPARFRKSKAVGAVLGLTPAKYQSGEIDWSGRISRCGDEMMRVMLYEAAQSMLRSKKWSWLKAWAMQIARRRGIKKAIVALARRLAVIMHRIWVDGTEFRWTREQAATA

SEQ ID NO: 401036 - protein, 334 aa, unidentified
MSSITCAGIDVSAKTLAVLLLADQERKGKGSAYEVPNTPQGHRKLIKTLLAREVDRVICESTGVYHLGLALALDQARLPVMVANPRQVKRFIEARLRNTQTDQVDAYELAQFGLRMDFVPWRAPSAAAYALHRIARSLHGYVEQATSAKNRIHASLAAPNTPRVVLKALRDELKLYERIEKSLTAEALAIISANAELKRRFELLLSVPGIGEISAVQLLGELCVLAPDLTAKAWVKLAGLDPTYKRSGTSVDTKPHISKRGNAKLRAGLFMPAMSARRWDPGLSSFADRLVAAGKAPLQAVTAVQRKLLHGIHAMFRLNEPWNSRMLVPAQGSA

SEQ ID NO: 401037 - protein, 501 aa, unidentified
MKAKQRKAKGNDHSSSRASKQRAKIAKAMQAPEQMEIVNRHAGGIDCGSEEHYAAVSPESVEEGEPFVRCFSAFTEGLDALVEWLKDCGVTTVAMESTGVYWVALYQKLEAAGIEVFLVNARHLRHVPGRKTDVKDCQWIQRLHSFGLLSASFRPEDMICRLRSLQRHRLNLVSAGAAEIQHMQKALQQMNLHLHHVVSDISGLSGLRIIEAILAGQRDPSQLAKLRDPRVRKSTVAQMEAALVGDYRPEHLFVLDQSLQAYRFYQARIEECDHEIEPLLQQLAERFECSSSPLAAESSQPEVIQDQAAQSQTARPIKPKRKRKPKANQPKIDLAGYLQRICGVDLTQVVGLDVLSVLLIVSEIGVDMSKWRNAKAFCSWLGLCPGNKISGGKVLDRRTCKVINRVATTLRLAAQAVGRSNTCLGIFYRRKKAHLGPAKATTATARKLACLVYHLLKYKDQYREPDPVTYQLKVQKTILNKLQKQAAALGYQLLPTALVPA

SEQ ID NO: 401038 - protein, 346 aa, unidentified
MDVYIGLDVSLASTAICAVSAQGKIVKETTAASEPETLVATLKAMPGEVIAVGLEAGPLSQWLYRFLNDAGFATVLMETRQVKGALKAMPIKTDRRDAEGIARLLQMGWFRSVHCKSMSAQEMRALLSARKAVQQATINLELSIRGVLRNFGLKMGRVAKGRFEARVRKLAEGNPMLEAAANPILASRQALRQELAGLEKVLRDHAKEDPVCRTLMTMPGVGTLIALTVKAAIDDPERFRSSKDIGPWVGLTPRREQSGERDIVGQISRAGDVGLRTALYQAATVMLHCGRKTWLTAWALTVAKRRGKKRATVALARRIGVVLHRMWKDGTAFRFAREDAVEVTPA

SEQ ID NO: 401039 - protein, 406 aa, unidentified
MKFCGIDWANDHHDAVSIDEAGRQLGSIRVAHSPEGLSQLDTYLEGIAGPEGRQQIACIVETTHGLLIAHLLEQGWPVYPVNPRTVEKRRAPSGAKTDTIDAYLLAKTGRADFPDLRRLNPDSKQIQELKTLTRDQDALIQMQTRLVNQLTACLKAYYPVALEVFGKLQQPSTLAFLRAYPTLQAARAASAEELTTLLKQARYPGARQKARQLVRHLQQPALQATEVTTRTKARLMLALVDQLDPLLKQIAAYDKEIERLFLSHADSELFQSLPGAGARLAPRLLAELGDDRSRYESASSLQALAGTSPVLFQSGTYQKAHRRLGCIKPWRNALHQFAWQSTQQEAWAKEYYQRKRAEGKSHTVAVRALANVWARILYAVWQTKQPYRTATFEAARRAHASHHPAA

SEQ ID NO: 401040 - protein, 367 aa, unidentified
MPNANSTHQGRIHLGLDVAKNSVAVAILRPDEVEPDTEKIAHDEVSIRRLIARFDDPRQLVACYEAGPTGYDLHRLLTSIGVRTDVVAPSLIPKAPGDRVKTDRRDSRRLARLHRAGELVAIRVPTIAEEGIRDLCRARQVVVEDRRRARQRLGSFLLRHNEIYRDATAWTAKHEEWIKSLHFADQATKSAFSFYRAAVAERDVTLSAITAELAPYFDRSPFADPVHRLAAYRGIDNLGALTIVCEVCDFRRFAHAGAFMGFSGLVPSEYSSGASVSRGHITHAGNVHVRTQLIESAWAYQHGPARGVTIARRQKGLSPETIERSWRAQVRLCSRFRRLGARKDSRNTVVTAIARELAGFVYAEMTA

SEQ ID NO: 401041 - protein, 347 aa, unidentified
MRFYTTQHPFYCGIDLHARTMYVCILDQAGEILVHRNMTATPEALLKAIAPYREQIVLAAECMFTWYWLADLCAEHGIPFVLSHALYMKAIHGGKAKNDKIDAHKIAVLLRGGMLPQAYVYPAEMRATRDLLRRRMHLARKRGELLAHVQNTNSQYNLPAIGKKIAYKANRDGVAERFADPAVQKSIEIDLALITYYDELLRDVELTIVKTAKHHDAQTLYLLQTVPGIGKIRSLVLLYEIHDIARFPRVQDFASYCRLVKCAKESAGKRSGTSGSKIGNAHLKWAFSEAAVLFLRDNPAAQKLLARLEKKHSKGKALTILAHKLARAVYSMLKRQTAFALETFLHA

SEQ ID NO: 401042 - protein, 393 aa, unidentified
MRYLGLDVHRDFCEVAICERGRARSIGRIASTRDALELFAASLAPDDRVVLESTGNALAIATILRGHVADVVLANPMQVRAISHAKVKNDRVDARTLAELLAADLLPQVWIADEPTRVLRRLTSRRTQLVRQRTRTKNEVSAVLVRNLIARPDVSDLFGKAGRQWMATLVLPVDERHTLDGCLRQIDFLGEELAVIDRAIAEHVLASSDMRRLLTIPGVDATTAATMMATIGRIQRFPTPRQLVGYVGLDARVRQSGNHPARHGRISRQGASAARHVLVQAAWAAIKTPGPLHAFYRRVKARRGAQIAIVAVARKLAILIWHLLTKQRDYAYQRPQLVARKLRRLELQTGAPPRRGQRASHPNTEPAALQRARLAEARYADLTSNWQTRPLRA

SEQ ID NO: 401043 - protein, 344 aa, unidentified
MLQPQPYVGIDLHRRRSVIVQRSAEGETLAVTQVTNDDVVAFSKAVTAAGEHPEVVIEACYGWYWAVDLLEELGCRVHLAHPLGNAWGNRRVKNDLRDAEDLVDLLRLGRLAEAWIAPTEIRELRELVRHRAKLVSLRTNLKLQVYSVLAKEGVAVPMTDLFGVAGRKLLQMAKLAPAYAARVESLLDLICSFDRQVAIFERDVERELRDDAGYHAVQAIPGVGKTFAAVFVAEVGDAGRFTSAAHLCSWAGLTPRHRESDTTVKRGPITKQGSRLVRWAAVEAAQRQAAGTKLRADFTRITASHGDTHSARKVARVAVARKIVTLVYYGLRDGTIRSKAIEAA

SEQ ID NO: 401044 - protein, 335 aa, unidentified
MRHIGVDVHYRSSTYCVLEENGREVQCETVRGHWPKLLERLRTVPGPWAICFEATCGYSYLYRELSRLATRVVVAHPGQVRLIFRAKRKNDRIDARKLAKLLYLDEVPPAYVPGQEVQSWRELIEHRRRLVDRQTTCKNAIRSLLRAHGKIAAKGLWTKKGLASLRQEEMPTPAAHLKRDLLLDELVEAKRRVRTVMKALDQIGERHPAVLLLRTIPGVGIRTAETVAAYIDNARRFVHSAQVGAYFGLVPCQDASAGVNRLGHITRQGPATARKYLVEAAWQGVYRSPTIRAYFERVQHGRPERRKIALVATAHYLLRCMHAMLVSGQAWHEAA

SEQ ID NO: 401045 - protein, 348 aa, unidentified
MTIVERARLVTGGVDTHLDVHVAAALDELGGLLGTESFPTTPAGYLELFAWFESFGPVARVGVEGTGSYGAGLARSLIALGIEVVEVDCPNRKARHRSGKSDTIDAISAARDALSGQAKGQPKGGTGPVEAMRVLLIAKRSARSERIRTLNQMRHLVFVAPDDIRSRFHGLNVYNLTRQAAATRPRPGHQVDYVTLMTLRELGRRALGLEDEIDRLDDLLEPIVADHAPGLLNVFGAGIFVAATLAVAAGDRPERIRNEAAWAHLCGVAPIPASSGKTTGRYRLNRGGNRQANSALHRIVLVRMGHHEPTRVYFERRRAEGRTTLEIMRCLKRYVARETFKQLPGGSD

SEQ ID NO: 401046 - protein, 356 aa, unidentified
MSNPSKLDFTGQPIYIGLDVHKKSWSVSIFTGHGEYKTFSQPPQVEPLVRYLDLHFPGALYYVVYEAGFCGFWIHHQLVTQGVHCTVVNPSDVPTKNKEQRRKGDRVDCRKLCRGLRNGELEGIYVPPRGRLEDRSLIRTRLSMGRKQTRCKNQIKSMLLFYGVQIPEEREIGHWTRRFIQWIEGIRMERASGDMALRIHLEELSHLRQIMAKLNRAILALSRTEEHREWVRLLRTIPGISTLTAMILLMELGEITRFRSIDQLSSYVGLIPDTQGSGEKEHVDGVTQRRHSHLRWMLIEASWTAVRKDPALMEAFDQYCKRMRKSKAIIKIARKLLNRIRYVLKNEAEYVPCVIE

SEQ ID NO: 401047 - protein, 317 aa, unidentified
MAMQAGRLIVGADVAKAELVIHHDNSDEVIKLKNSKADIKRWLKQQPLNTAIAVEATNVYHLDLVELAHGLGFSVYVVDGFQLSNYRKSVGGRVKTDPSDARLLCRFLRNEGEDLRPWSPPPAVYGKLQSLLRRRAALVSARTAMTQSWANETLLKAAFEAFVTSIDRLDLLMQKKMKEVLREAGLHEQVARCQAVEGIGFLTATALVMAFVRGEFKSSDSYIAFLGMDLRVSDSGQKAGRRRLTKRGCSEIRRLLHNAAMAASKSTAWKGIYEQHRNSGKATTQALVILARKLARVAFALMKNQDEYVTKASKPAC

SEQ ID NO: 401048 - protein, 428 aa, unidentified
MINEDIIRRRQYCQVVKEITGSDQHLVVGIDVAKEKHHAFMGTATGKSLFRKLIFENNIDGFSRLLKTAEEIKSQNDLSKIVYGLEPTGNYHKPLARHLVRCDCNVVLVTGQAVKNNRQLLDGRWDKNDTKDAANIADLVSRGRCLYYDCPLPSIIELRSLLSLRRRLKKEEHSLRMRIRNNLLAQYFPELDRFYNACESESLAIVQWFLNPDTIAAMEFGEFFHMVTTTRRGIAQTLRLSKIHRLATESVGCPMGPAAEHEADLLVEKLKQVRQQIKKTGDLIEDFCLEFSEYSYLLTIPGFGPYISARVLASIGDPFRFENRKQLIKMAGYDLCADRSGRTSDKAVPVISKKGNGELRYALYQAAHVAAARVDLFRAYFTKLLRGRERERGIKTKMRVKLAAKMLIIAWTLMKKKQPFDPAHLSTD

SEQ ID NO: 401049 - protein, 322 aa, unidentified
MTISAQSERVANIGIDVGKAQLDVVWHETGEHQAIENTPKDIKVLIKRLMKEQVQRIVLEATGRYERAFVLAAVEAGLPVIVVNPLMVRRYAGAIGRLAKTDKLDAGLIAEFAAVIKPKVRLATNAKTLQIKDLLLRRRQLMGMRTMELNRQQQYAAAQASSCKRVIALLEKEVALVERQLDLAIDDVAEWKAKKEVLLSVPGVGPTLAYTLLGDMPELGELNQRQIAALTGVAPFNRDSGSQRGNRRIHGGRAGVRTVLFMATLSATQHNPVIRAFYQRLVAAGKHKKVALVACMRKLMGILNTMLREGTCWDEKKAQIPA

SEQ ID NO: 401050 - protein, 339 aa, unidentified
MKLYAGIDLHSNNSVVSVIDEQDRVVAEKRLPNEIEGIVVLLAAFKRALVGVVVESTFNWYWLVDGLMAAGFRVHLAHPAAIVQYEGLKRTGDAHDARWLAHLLRLKILREGYIYPRQARGVRDLMRRRMQLVQSRSTQLLAMQTQLMRSTGRSLSSAQLKGRQAAAQLQGLVDDANVASALRANLAVAQALSGEIERLEREILAQVRLAAQFEPLLSVPGIGKILGLCIMLETGEIERFAKVGNFASYARCVDSERVSNGKKKGEGNAKCGNRYLAWAFVEAAHFAVRYNARIKRFYERKAAKTNPMVAIKAVAHKLARAAYHVMRTHERFEEARAFA

SEQ ID NO: 401051 - protein, 335 aa, unidentified
MDSTKYVGMDVRKDMISIAVMNSAGKVVMESILETKAVTILQFIQGLRGNLLITFEEGTWATWLYDLLKPHVTKVTVCNPRKNALLKSGNKSDRIDAQKLAELLRNGSLSAVYHGENGLRTLKELSRSYLTISRDLTRVMNRLKALYHSWGIAGAGTQVYAPCHRLEWLSKITEVGVRGRAEFTYQQLDGLQALRQGVRRDLLAESRKHQATKLLRQIPGIGPIRAALLVALLQTPDRFRTKRQLWAYSGLAIETHGSGEYRYLEGQVRRSKKPVALRGLLYRYSPIQVQGCDASRMVISPLLGEERWSYHVPSSFVHGCTAHDVVRDVLLGFVG

SEQ ID NO: 401052 - protein, 323 aa, unidentified
MNKDTNYYGIDISKDVFDVMDQKGVHYQFKNSQKGFVKLLKILTKKSHCVMEATGYYHYQLAYFLLENHIWVSVENPLSIKRFIQMKLSKIKTDKSDAKMICEYAQNVALKLWKGNSKDQQECLQIIRMLSVYSKQSTALKNKIHGENTLGNTKTCVVKSINRSIKSIKREVDLLEKKLQETVKKTYQDLLTRLESIPGLGRKTSLMLIVLTDGFERFETANALCSYSGLTPIIRQSGSSIKGRPRISKMGNRRLRNLLFMCSFTACKYNKACKAIYDRIVAKGKSKKLALIAVCNKLLKQAFAIAKSGLIYDETYRSTLVRN

SEQ ID NO: 401053 - protein, 355 aa, unidentified
MDSKKYIGMDVHKESISIAVMNGAGKIGMECVIETKASTILQFIDGLRGDVHVTFEEGTSAAWLYDLLKPHVTKLVVCDPRKNASMREGNQSDKIDARRLAELLRLNHLSPVYHGEHGLRSLKELVRSYLTITKDLVRVMTRVKAIYRSWAIPCTGKQVYAPRHRTEWIGKIGEPGVRRRAEFYYQQLDALRTVRQEVRRELLAEAKKHQAWKLLCQIPSIGPIRAAVLLGILQTPHRFRTNRQLWSYSGFGIETHSSADHRSVDGQLKRAKKQSSIRGLNRNCNHDLKNLFKGAAIVASSKPGPFQEFYTVLLTKGIRPEMARLTLARKIATIVLIVWKRGACFDAQHLKPQTA

SEQ ID NO: 401054 - protein, 416 aa, unidentified
MEVVYERCCGLDVHKKLVVGCLIIPGPGGKPVKELRTFGTMTEDILSLSEWLAEAGCTVVAMESTGVYWKPVYNMLEGLFDLLLVNAHSIKVVPGRKTDVKDAEWIADLLRHGLLKGSFIPDRERRELRELARYRTSLIQERTAERNRLQKVLEGANIKLASVASDISGVSARAMLEQLVAGSTDVAGMAALARGRLREKIPELEKALSGRFGEHQRFLVTQQLGHLDTLEELIERVSTEIRERMRPFEESIARLDTIPGVGRETAEAIIAEIGVDMSRFPSDRHLSSWAGLAPGNNQSAGKSGSGKTRKGNKWLRVSLVQAAKSLSRSKNSYLSSQYHRLASRRGKNKATIAVAHSILVITYHLLRRQQDYADIGPNYFDQRNQNKVRRVLVHRLESMGYKVTVEPTEQSDTEAA

SEQ ID NO: 401055 - protein, 394 aa, unidentified
MRSWVGFDVGKAFHWACVLDDEGEVLFSRRVEANERDIEACCEEIAALGSPGERLVATDLLGGPATLLEAVLLERGERVFHLPGMAVNRARDGYRGENKSDSRDARVIADQLRTRWRSLHEVLPRGDEAAELRALVAYRRSLVEEQARLITRLRALLLEVFPGLEAALDLSTDRALLATTRVATPSAARRLGASRLARWLRDRGVRRSEGLAGKVIEAAKGQHRELPAAEAKAALVSEMAAEILRARRRIATLDARLEELMAAKPEAEVVRSMPGMGPLFTAEFLSEVGDPSRFASADALAAAAGLVPATRQSGGASFQRRARRGNRTLKNLLYRSAFSCTVHHAPSRAYYLRKRAEGKPHHRAVIALARRRVNVLWAMLRAGELYREPAPEAA

SEQ ID NO: 401056 - protein, 411 aa, unidentified
MDVFCGIDWAEDHHDIALVDRSGQLLARRRISDDAAGLTALLSLLCEHGDSPDDPVPVAIETPRGLLTACLRVTGRKVYPVNPMAVARYRDRHSVAGRKSDHGDAVVLANILRTDMHAHRPLSADSELAQAIAVLARAQQDAVWDRTAAHNKLRSHLREYFPGFLAAFTDARGGITRPEARAILAAAPTPAAAAKLTAAQLRALLKKAGRSRGIDTEAQRLRDAFRAGQMRQLPLVEQAMGRQAVALLRQLDAACASADDLEAAAIESFNQHPDAGIITSFPGLGALTGARVLAETGDDRSRFSDARGLKAYAGAAPITRASGKTKSVTHRRVKNNRLAAAGYIWAFSALSASPGARGHYDRRRDAGDRHAAAQRNLFGRLLGCLHHCLLTGQHYDETIAFPTPEPLPAAA

SEQ ID NO: 401057 - protein, 415 aa, unidentified
MNSNPLIAGVDVHRKTNTYCLMTQDGREVVPRFTLDNNRPGTQRLIEKVGQIMETNGFSELRLAAEATGWYWFHLFESLRNNPELQTWPHELFLLNPRLTANFKKSYVDLDKSDPIDAYVIADRLRWGRDITTPFDYDENLLALRFLTRYRYHVVHQLASEKAYCTSILYLKASEYSNDDKQAFSNLFGAASRAVIQEFVSMEEVATLPFDELVTWLDEQGKHRFPDPAENAKRLQQIARDSYPLSEALQPSVNLVLSLSLKNISNLEALSKRLDTAITEQMETIPNTLTTIPGLGSVLTAGIIAEIGGVERFDCDQAKVAKFAGFKWRKSASAEFQAEESHLTRTGNPYLRYYFCEAAFSVQRCDREYGAYFQRKFKEARNHRHKRATVLTARKLVRLVVRLLATNQPYQPRRL

SEQ ID NO: 401058 - protein, 405 aa, unidentified
MKHVIAFDVSMGKSYMVVYNSLKKCELEKEIEHTRPEFTKLKLLIDDLIDGYGEQPHIVFEATGVYSRVLERFMRDNGYRYCRLNPLEAKLQCDTLRIHKTDRSDAHQLALTHFTNNRRFETNLDDVYAQLKGLSRHYGELDDELSVVRNRMHKVIQVTFPELEKIFTRKSELFLNVAQLFPHPDIVLTYSKTIIKNRILANTNKRMSAKKAEEKAIKLLEVAEKSYPAVSSTDVCCDQVIVYAKRYQELLGQKQQCIDKMATLAEGLEEYSLLLSIPGIATNTAVRLIAEIGDIRRFDNHKQLNAFAGIDIRRYQSGKFIAKDKINKRGNKHLRKLLYIIIQNMIRLRRFGQNHFVDYYDKLKKQPYNKCHKVASIACVNKLLKTIFFLVIHNMNYEYRLAANS

SEQ ID NO: 401059 - protein, 400 aa, unidentified
MLSIGIDVSKGKSTVCGMKPGGEIVYTPFEIQHTREGMSELVSLLRSSGEEVRAVLESTGSYHCPVVTALLENGIFVSVVNSLRMKRFCSQSIRKVKTDRIDAMQIALYGLAYWQELQPARLPEDTYRELQLLARQYYQMTSLLIKAKVDFNAICDQVLPGMQELMSDHAGRHKLSDFVLRYRHTTRILEMGETRFRKDYCKWAEKKGYRNCERMAALIFATAQNGIPVLPNAPSTQIVITEAIRVLHTVEASRDAILTQMQALAKTLPEYSLVREMPCIGDTLAPRLIAEIGDVRRFHSKRALIAYAGIDAPPYQSGKFCANNRHISKRGNRYLRKTGYEVMQSYVMHKPANDPIFTFIEKKRGEGKSGKLAMVAGLNKFLRVYYGKVTELYRSLPAIE

SEQ ID NO: 401060 - protein, 355 aa, unidentified
MDSVRYVGLDVHRDTISVAVLDEGGRLITQAVLATRASAILDFVQGVRGSVHVTFEEGTHSAWLYDLLVRRVAKLVVCNPRKNALLKSGSKSDAIDARKLAELLRASMLSPVYHGESSGLEVQHLARSYTMLTEDTTRVMGRLKAVFRGQAVACAGTKLYARRHRDGYLAELGTGGLRRRAQCLYQELDALQQLRREARRELILECRKHAAAKWLQSVPFLGPLRAAVLIGRVQTPHRFRTKRQFWSYCGLALETRDSGEYRVVNGQVERRKKPVMIRGLNWNHNHELKNLFKAAATTASACNGVFREFYLRLLDKGMQPEMARLTLARKIAAIALKIWKKGEAFDQAHVKSQAA

SEQ ID NO: 401061 - protein, 392 aa, unidentified
MFIVGIDIAKRFHEASVIAQDGSLVRKALRFANSQAGYNKLMNMVRGLNEPVVFGMEATGHYWMTLFTHLRNDGFTVHVINPIQSDALRGMYIRKAKNDAIDSMIIADVIRFGRYCETSVQPGDLQAMRELCRQRFYVIDMASDLKRKVLALLDQVFPEYEKLFSDTFGASSMELLSQYTTPEEMLSVSTGKLAELLETASRGRLGLAKAEEIQEAAKNSFGIVLASGSFALIIRQYIEQIRSLESSIAVFDTEIARLLAGFDTQLTTITGIGPTLAAVILSEIGGDIKRFSSPAKLAAYAGVDPTVKQSGDFTGTRMKMSKRGSPYLRRAIWLASTVAAFKDPAIHALYERKRSEGKDHMTVIGHVCRKMVSIIFAVLRDNTPYSPAVISD

SEQ ID NO: 401062 - protein, 347 aa, unidentified
MNNVATIGLDLAKQVFQVHGADVEGTPLFNRKLRRNEVLRFFSKLPPCLVGMEACGSAHHWAREIAAFGHDVRLIPAQYVKPFVKRGKTDAADAEAISEAVTRKTMRFVPIKSAEQQASVMVFRTRALLVRQRTQAINALRAHMGELGIIATTGIANIKPLAAIVRDESDARLPPAARFALEEIVDQIDRLAARIEKLEREIIVVAKQDEDMRRLATIPGVGAITAMAIKAFIPDPAGFKSARHFAAWIGLTPKSHSSGGKQRLGRISKMGNSQLRSLLVVGAASILRHVRSDDRTRPWLRELMARRPYKVVSVALANKTARMIWALLVRGGTYRGPTRLAAESVPT

SEQ ID NO: 401063 - protein, 348 aa, unidentified
MDTIGVDLHKRETQLCIGQADGTITEQRIVTSRERFTAVLGQRPPARILVEASTESEWVACHLESLGHEVIVADPNYAPMYATRSRRVKTDKRDARTLMEACRAGTYRPAHRLSAARRHVRAQLAVRDAVVRTRTRYVALAKALVRRDGLRVPSSAAERVGAHLAALAGSPALAAELAPLLTLLPPLNATIAAADQRLAELEHTDPSVALLMTAPGIGAVTASALAATIDDVQRFASAHQFEAYLGLVPGERSSGELRRIGPITKAGNRRARWLLVEAAWRILRSKDAAGAPLRGWARPIVARRGSRIAVVAVARRLAGILYAMWRDGAPYDADKIRRPRSARQNPAA

SEQ ID NO: 401064 - protein, 324 aa, unidentified
MSDGMLGIDVSKNTLDVSLSSCNKVRARSFPNSSDGWRHLLDWLINQKVRRVHACLESTGRYSLGVACVLYEIGHVVSIVNPAQIRDFARTKLGRNKTDGVDASHIREYCELFKPQPWAPPSEAHRRLGELQTIRAGVVAGLTEWNNRKNSGMVDAAALSLAAATISHFTSQLGAVDEAIAKTIDNDSELRCKRDLLLSISGVGETLAGVVLTELPGPDVLRSSAEVVAYAGLNPRRHQSGTSIDRVTRISKIGNAVLRAALYMPAMSAMRYNPAIVALVTRLKSRGRLKPMQIVVAAMRKLLVLCFGVLKTGKRFDPALAMGC

SEQ ID NO: 401065 - protein, 340 aa, unidentified
MKLYGAIDLHSTNNVTVVIDEQDRVVYQKRLPNDLALILNELSVYQAELQGIVVESTYNWYWLVDGLMEQGYQVHLANTAAIQQYNGLKYTDDNSDARWLAHLLRLGVLRQGYIYPRADRPVRDLLRKRSQMVRQRTTNLLSIQNLLTRNTGSSLNANRVKGLDVQRVDELLPDGDLALAVKANLSVMSSADEQTKILERTVIERVQLRPQFCFLKTVPGIGKILSLTIMLETGDIRRFASVGNYASYCRCVGSQKISNSKKKGKGNTKNGNKYLAWAFVEAAHFAIQFNSKIKSFYQRKKAKTKGVVAIKAVAHKLCRASYYIMRDRVPFNITKAFGQN

SEQ ID NO: 401066 - protein, 323 aa, unidentified
MQRIIIGVDVSQDFLDGHIRPTSVRQRFANTSAGIAELVAWVRPLAAERILFESTGPYQIAAVGALLAEGFPVVVVNARQVRDFAKAMNYLAKTDTIDAAVIAHFGEVATTKVRPLESEEIRTLRDLYDRRGQLVHMRAMEKNQRHSASVARVSANVLHSIDKHIEYLEKQIHDLEQRMDRLIEKSAAFQARNEILQTITGIGPHVSRTLLVHLPELGQYNRQKIAALVGLAPFNDDSGEHVGHRHIRGGRNKVRVGMYQAAIAAIRHCPRMKAFYATLKARGKASRVAIIAIARKILILANALVRDMKPYEDRTNSICLKTT

SEQ ID NO: 401067 - protein, 413 aa, unidentified
MAEETISWFAGVDWGSERHQVCLLDARGTTVGERAFPHSGEGLAELGDWLLSMASAASTVAVAIEVPHGPVVDALIDRGFVVYAINPKQLDRLRDRFSVAGAKDDRRDAYVQADGLRTDRRLFRHLQVADPRLIELRAWSRLAEELQAERVRLSNRVRHQLWRYYPQMQKLTNDLAAPWFLELWTIASTPAKAGRLRKSTVERLLKQYRIRRIDAETVLRILREPAIKVAEGVAEAASIHMRSLIARLRIVNRELREAERKLDEVCTAISEIEQTSGESLQRRDVAILRSMPGIGRINLATLLSEASGPLSRRDYEGLRTLSGAAPVTKRSGKSLIVVRRYAAHVRLRDTVYHWARVATQRDPKCRARYTALRKRGHSHGRALRSVADRLLALACVLLQRQTLFDPHFGRPTT

SEQ ID NO: 401068 - protein, 339 aa, unidentified
MRLYSGFDLHSNNCYLGVLDETGKRVAKKKLDNEPQPILRALDPYRQDLTGIVVESTYNWYWLVDLLMDEGYKVPLATPSAIQTYRGITHVDDTHDAFWLAEMLRLHILPEGSVYPKETRPIRDLLRKRGYLVRLRTSLIIRLQNIVARTCGVRLKANEIKRFRDDCIRPFLADNEDLALAGIVSKESIDFLTRQIRQIERVVEDRVDLAGVYHYVLTIPGVGKILALTIMLETGSIERFAKVGNYASYCRKVSSRWTSNGKTKGRGNDKNGNKYLAWAFSEAAELARRFDPQARADYQRKRQKTQTQVAHGALAHKRVRAAYYVIRDQVPFVPEKRFT

SEQ ID NO: 401069 - protein, 351 aa, unidentified
MYIVGVDYHPSFQQIAFLNQETGECGDRRLNHSDGEAERFYRELRQKGISVRVGLEATGYSRWFERLLGELEIEVWIGSAAEIKAKRVRKQKTDRQDAQLLLKLLEENRFPRIWVPNPENRDLRQLLWHRHRLVQMRTRIMNQLQALAMNEGKRYKHRLWSAEGRALLEKFPLAPWASRRRHDLLELLDRLNPTIDELMAAVEQEARRWPEAVRLMTHPGVGPLTALAFVLIIGTPGRFRRGKQLGSYIGLTPSEDSSGGRQRLGHISKQGNALLRFLLVEAAQAATRCNQDWRQRYWHLAMRREKSIAKVALGRQMAVRLYWMWRKGWDYAQLVEFGSHTGQLATGHGVH

SEQ ID NO: 401070 - protein, 388 aa, unidentified
MFHFTTLFIGMDVHKESFSLCYYDMMANQFKHSTKVGPNVSYIVNYVNELRRLYGQDVEVLCGYEAGCLGFTLYHQLQAHGIPCIVMAPTTVMKEGSKRVKTDKKDAAQLTKALAFHSYRPVHISTVEDEQVKEYICMRTDHKVALKKIKQQILAFCLRHDFRYTEGSSNWTQKHVRWLCPLNIDGLYAEILTEYLLTYEKLVDQIERYDARIEQLGQSDSYQEKVSQLFCFIGIKTLTALSIVTEIGGFNRFATAQHFDFASYLGLTPSENSSGDRERRGAITKTGNSHVRRLLIEAAQSLAKGTIGYKSKELKRRQSGNRVEVIAYADKANERLRRRYRTLVLGKNKKQNVAKTAIARGIIWFYLGDDDRKNSLKLALVFMYTFDN

SEQ ID NO: 401071 - protein, 441 aa, unidentified
MAKPKNKISVVNNSTAGIDIGSRKNFIGIADKPVVSFGTFTDDFVTAVNYLKENNITSVAMEATGVYWISLYDFLDQSGFDVVLVKADQAKNIPGRKTDVADCQWIQQLHSYGLLRSSFIPPQHIRTLRTFVRQRRTNLQLASDHIRRAHKALELMNIKLQNVITQINGKSGLAVLQAIINGNHNPEKLALLCEDSILKKKKEAVTKSLKGNFSQENIFLLKQAVDAYLFYMKQVDDCDRNIDNHLSLITLHLEVPKKINKPKPIRHHKPNIDDLHLKLVKLTGGKDPSQITGLTDSTLLQVISEVGTDLSRFPTEKHFTSWLGLAPNSHQSGLTNKKKKFKRHTSAGQIFRLAAQAIAQSKHLALTSFYHRIKSRKGSLGAIKATARKIAVIFYNVMTKGIEFVEQGIKQYEQKIKERQLKYLHKQAHRFGLTLTPQLQE

SEQ ID NO: 401072 - protein, 469 aa, unidentified
MSARHDTVNQNHPMSPRRKSNPPKPKSSAPLLPTLHPHAAGIDLGARQIHVAVPPGRGTRTVRAFTTFTEDLHALRDWLKECGVTTVAMESTGVYWIPLFQILEAAGLEVCLVNARHCKNLPGRKTDVQDCQWLQQLHGVGLLRGSFRPAEQVCAVRAILRHRDGLVRGASRCVGHLHKALTQMNVQLQHVISDITGVTGLAILQAILAGERDPVTLAQLKDHRIKASRDVIAKSLHGDWRAEHLFTLRQTYQLWQQHQSLIAGCDEQIATMLAAFDTRTPANATLAPARTSHKKAQRNEPHFAARQECFRLLGVDLTAVPGFAAPTVLTLVCELGPDFAQKFPTAKHFGSWLGLCPDNRITGGKIYSVKTRDVKSRVAEALRLAAQSLWQAQNYFGDLYRRWRARLGSPKAITAMAHKLARVLWHLLKYKEPFDPQVFAKEEEKMKRKKLARLQNLAAAMNYQLIPIQ

SEQ ID NO: 401073 - protein, 381 aa, unidentified
MHYTACSPTLAMPRERLLFVGMDVHKDTHAAVGATAFGEKLFEISLENNRADFDRLIKQSRLVASESGLGLVFGLEDSTAYGLRLAKHLFANNLLVKTVSPIYVDRERKYETHPEKNDSLDAYAAAKVLIQRIDTLPTYTITKQNELAKEIKELTLDREFLVKEQSRLKCHVHRLLHRAWNSDYQKKFKNLFSLKGLKFWLAHPLPTGATKDDIIGTPDILKNQIKRKIKRLLAIREELKEIEIELQSLIEQTGQKITTLNGCGIALGAKVLAEVKDITNFTSPSALAKYAGLCPRERSSGKTFRHVKTKSGNRQLNTAIHRIALSQIARSGNHFAKDYFQRKISQGKTKAQALCCLKRRLVDIIYMMLKHKQAYRQPDTL

SEQ ID NO: 401074 - protein, 322 aa, unidentified
MAMLSFGGVDVSKDRLDVMILPEEQSFSVSNDVAGWTELVEWLRGFSIVAIGIEASGGYERGVVRALLAAGMSVRQVNPFKLRQFAKASGVLAKSDPLDARMIASFVAIMPTRPVQRPAPAVEQLAGILAVRRQLSDEKVAAENASRLLEDTMLQRLSRRRIARLAADIELLDERLVKIVSADAALAQRYRLLTSMSGVGAVLACTLIALLPELGQMNRKQVAALVGVAPYAFESGKLKGRRCVWGGRAKVRRVLYMAAMSACNWNPALKAFHDRLEATGKKPKVVIVAVMRKMLTTLNAMVRDDIVWADHLSGRHTMPTAR

SEQ ID NO: 401075 - protein, 366 aa, unidentified
MAIIGMDIHRAFAEVVALAGKSPRRLGRIDMRRDRLAAFAAGLTKDEIVVVEATGNAAAVAEVLAPHVGRVVIANPKQVRAIAHAKIKTDKIDAAVLAQLYASGFLPEVWIPDQNTQALRRQVTRRNQIVRQRTRLKNIVQSILHAHLIPAFPAVNMFGRQGRAWLSAQKLPKDEQLAIERHIREIDRLGEDLKVIQRDLAQYGLADLRVKRLMTIPGLDMIVATALVAAIGDINRFGAPQKLVSYLGLNPTVRQSGSGPSYYGRISKQGPGRARGLLVEAAWAAARAPGPLRAFFLRIRSRRGQHIAAVATARKLAVLVWHILTKQQDYLWARPALHATKLRRLELTAGVRRGKPDTQPFVMDCS

SEQ ID NO: 401076 - protein, 393 aa, unidentified
MYLVGIDIGKLKHSFCLLEKETGEILVEPVFFENNRDGFNVLLSSFKHLPQKDILIGMEDTGHYNLALLKFLLDRNYQVALINPVATNLTRKMQGGISKNDKLDTLTICDVLSSSQRVKSYRISKYSSFDLYEQKLLTREHHNLKEEENQLSNRLQKCIDVVFPEFNSLFKSKYGIVYMNILKEFGSADAIAHADIRTIRKCFDTGRGKHISLTAEELKEAARNSIGFPSSSEATQIKHLVARIELIKEQIAEIDKKIEEFSIQNNSPILSIPGISHFSGTSILAELGDIHNYSKPSQIIKFAGVAPLTYESSQFTAQHTAITKKGCKYLRKTLYQIITPVIQYNPVFRKFYLLKIAQGKGHRCAQGHCVRKLMRVIYHLLSTGTQFDPALLR

SEQ ID NO: 401077 - protein, 362 aa, unidentified
MAKVRSWVGLDVHARSVLAVTIDGESGELRSRRLTGKTADVVDFCRSLPGPTRAAYEAGPTGYGLARALHAVEVACVVAAPGKIERPAADKVKTDQRDAERVLRLLMIDALHPVRVPTSEEEALRDVVRAREAVRGDLMRARQRLGKLLLRHDVRYEDTASAWTVAHRGWLTKLELGERGAQITLLEYLGAIDAIVIRRDALEQTIAQLIPGSPWEQTVARLRCLRGIDTLSAVGLCAEVGEFGRFAKPRQLMSYLGLTPSEDTSGEKRRQGAITKTGSRHARRLLVEGAWHYRRAPAKGQTLRRRQQGQPAHIIEISWQAQRRLHNVWQRLDTRRGKRRTIVAVAVARELAGFCWALANAD

SEQ ID NO: 401078 - protein, 432 aa, unidentified
MKLPKHLEHINRYAAGIDIGSKSHFVAVPEGTDEQPVREFSTFTADLERLAGWLISCGVTTVAMESTGVYWIPVFEILESHGLEVKLVNARHVKNVPGRKSDVLDCQWLQQLHTYGLLHGAFRPTDEVCTLRAYVRQRGTLVRSAASYIQRMQKALAQMNLQLHNVVADITGTTGMRIIKAILHGERNPDVLAAMRDARCKNSVATIARSLKGNYRPEHLFSLQQAVELYEIYQTKIADCDQQILDQLKSLDDSPNDTPPINVGDALIHMSGVDLTSINGIDTNTALKVLAEIGTDMSRWKSSKHFASWLGLSPGTKISGGKILSSVTKPVANKAAAALRMAAFTLFNSKSALGAYLRRQRARLGAPKAITATAHKLARLIYAMLTHGTAYVDAGQEYYEERYRVRVIQNLKRRAQELGFELVTVQKETAAV

SEQ ID NO: 401079 - protein, 372 aa, unidentified
MPTMAQHEPASQLDPATRSIVEITGGVDTHKDTHTAAALDAAGHLLGSCQFPTTAAGYTALLGWLCSFGTLALVGIEGTGVYGAGLAGHLHAAGVAMVEIDRPDRKMRRWQGKSDPVDAEAAARAAQAGRRTGVPKHRDGTVEALRVLRVARRSAIAGRADAQRQIKALVVTAPDTLRTVLRELGDRQLVTFCAARRPDRAAAGDPATTVVIALRSLARRHQQLTVEIDELDTLIAPLTVAVNPTLCGLLGVGPDVAGQLLVTAGQNPDRLRSEAAFAMLCGAAPLPASSGRTHRHRLNRGGDRQANAALYRIVLCRLRWDPRTRAYVERRTAEGRSKKEIIRCLKRYVAREVYTALLNPHPSSTPAIPSAA

SEQ ID NO: 401080 - protein, 408 aa, unidentified
MNPLFVGIDVSSKNNVAYLMKPDGSKHSSFSVQNNLGGAKLLSEKIVSALHSMQLNDVVIGLEATSIYGDSLVYALREDGSLGRFQRKIHVLNPKQVRKFKEAYPDLPKNDWVDAFVIADHLRFDRIAKEVYMDDYRYQALRTLTRARFDIIQNLTREKQRFANYLFLKCSGIAQDKDIQNTSATTLALMEHFETVDDLANADLDELTAFISEAGRGRFVDPDATAKAVQTAARGSYRLPKTVNDTVNQAMSVSIASMRALKEQVKVLDKAIEQQFEIIPNTLTSISGIGKVYSAGIIAEIGDIHRFNSQASVAKFAGLVWHRNQSGDFEAEHSQMIKSGNRYLRYYLLEAANSVRRCDSEFRRYYDLKFKEVNKYQHKRALALTARKLVRLVFRLLKDNRLYIPPEG

SEQ ID NO: 401081 - protein, 313 aa, unidentified
MNQENKNFIGIDVSKSTLDISFGGKYLKINNIAKDISNFIETEICLANDFPKLVCLESTGGYEKTAMQAFWNASIPIHRAHPNRVHSFARAAGHFAKTDKLDSKLLEKYAAFVFDQEKGDSALSQPTVELQELHNVESNLMDNLHASKCRLQHINGSGSKYLLKQIEFIKEQISLVRIEIDELINSNDDLRGKREILTSYKGVGKQVSSALLAGLPELGSLNKKEVASIVGVSPKLQHSGLKNPNGHISGGRFYIRKVLYMSALVAIRHNERMKNFYHRLISAGKAKKVAITAVMRKVIVCLNAMLKNNAFYV

SEQ ID NO: 401082 - protein, 414 aa, unidentified
MEVLYPRCAGLDVHKDVVVACVRIAQGGTQAPQEVRSFATTTTGLLALAEWLTQHECTHAVMEASGVYWKPVWHVLEDSIELVLANAQHVRNVPGRKSDVNDATWLSDLLAHGLVRGSFVPPTPIQEVRDLSRTRKQLAREIVQHTQRIQKVLEDANLKIASAISNVLGQSGRKVLEALIAGETAPEKLVDLCSGRLKASRRELVEALRGRVTDHHRFLLRLHLGQVDQLQQSVRDLEARMGDALGDFQEHLDNLTTIPGVSDTVAHVIAGEVGLDMTRFPTVGHLISWAGLCPRLDESAGKHRSRRIRKGAPWLKTTLVTAAWAAIKTKGSYLKAQFLRLKARRGAKKAIIAVAASMLTAVFHIIRDRVAYKDLGAEHFTKRNQAHLAKRLLKRLEDLGFAVEARPTTAVVSI

SEQ ID NO: 401083 - protein, 386 aa, unidentified
MTQHSHIAARHQLDYERTLILAVEVSGRSWVVAAQVPGLRQKGVKQQLAPRADALMAAVEGYKRRAAAAGMAVERVIVAYESGGSGFWLARWLQQRGVEVYVMQPSSVPVDRRMRRAKSDRIDADMLLRTLLAWLRGEPRVCSMVPVPDEAVEDARRPIREREELIRARVALVNRIEAVLTVLGAGEYNPLRRDCRERLGQLRTALDQPLPPHARAQIERLLDRLDLIRQQVADLEAQRDRAVEGETVGQAERMIQHLARVRGIGVQTATVLVHEAFVRRFRNARALGSYAGLTGTPYGSGGTHREQGISKDGNRRLRATLVELAWMWLRYQPGGALSRWFHDRLGGSRGRLRKVMIVALARKLLIALWRYLQDGAVPQGMELKPA

SEQ ID NO: 401084 - protein, 346 aa, unidentified
MKQITTIGLDLAKQVFQVHAASADGSPIFNRKLRRAEVLRFFERTPACLVGMEACGSAHYWAREIRALGHDVRLIPPVYVKPFVKRGKTDAADAEAISEAVTRKTMRFVPVKSADQQAAAVVLKTRALLVNQRTQAINALRGHLSEFGIIAAAGTVRIAGLISIVRDKTDERLPKAARLALMEVASQIDALKVQIEKLEQAIVATVRRDDDARRLVTIPGVGAIIAASVRALVPDPGGFKSGRHFAAWLGLTPRPHSSGGKERLGRISKMGNPALRSLLVVGATAVLRHARGNPNASRWSAALLARRPYKIVAVALANKMARIIWALLVKGGTYQDKGARNQIVAA

SEQ ID NO: 401085 - protein, 317 aa, unidentified
MQITTIGLDLAKHIFQVHGIDANEGVVEKRRLRRGQVLSYFAKLAPCRVGMEACATAHFWARELRRLGHDVLLIPPQYVKAYLKRGKNDAADAAAICEAVTRPSMRFVPIKNEEQQAVLVMHRSRDLLVRQRTQLINALRGHLSEFGLIEAQGPSHVRRLLESMQADSTVPQLARDTLALLASTLDAVSVQIDAIEAKIAAWHKVNPTSQRLATIPGIGPLIASAITATVTDPAAFRGGREFAAWLGLTPRQKSTGGKQRLGRISRKGDQYLRRLLIIGAQTVLLRSKAARATASSKLEMNWTAFLTFFLRRPDSDQ

SEQ ID NO: 401086 - protein, 392 aa, unidentified
MNTVGIDIGKRQHVAAVCRADRLEAERKVLRFRADRAGLAELGAWMARQGEIARVVMESSGHYWMPLAQALHRGGLAVAIVNPLEAKYFGKSRLQRTKSDPADARTLAALGMRDRPATREPLAGAELREAARFAMTLVTEQAKVCQRIVRLVDLGFPELGQAYEDPTCASALAVLRAVPTAAEAARRPSTTIAEARTPGRRIGPTKAAHIRALAKDTIAPPELAAQVGFEMRLLIAQHDFLEQQIGAAEARVAALLDGELARRLRTIPGVGPAICATLIAEIGDIHRFDDFDKLVAYVGIHPAEKSSGRKGADPETSWHMAKTGNAYLRAALYRMAVVGLQHNSVIKAHYARKRAQGKSKMNALGHCMKKALAIVWGVWRGEHDFVAEVQTS

SEQ ID NO: 401087 - protein, 356 aa, unidentified
MNGLKHQKEKRSMDHFAGLDVSVKTTSVCIVDDTGKVIREVKVTSEPEALLAVLKSASYRFKRIGLEAGPLSQWLFSALAEAGLPVICVETRHMQAVLKAQINKTDRNDARGIAQMMRVGLYRPVHVKTLRSQKLRMLLTHRQLLLSKAIALENDLRGTLRNFGLKVGMVGKVKFEARIRELVESLPDLAVLVEPMLIVRRVLREQIVILHRRLLAIVRDDEVCQRLMTTPGVGPVVSLTYRATVDIPARFRKSKSVGAVFGLTCAKYQSGEVDWDGRISRCGDEMMRTMLYEAAQAMMRSKKWSWLKAWAMQIARRRGMKKAIVALARRLAVIMHRIWVDGTEFRWTREQAAVAA

SEQ ID NO: 401088 - protein, 442 aa, unidentified
MNLRLGVDVACRAARQASCTDDTGKFLWAGHRFRTDPGDLDALWAKLPAGAREVTVIMEPTRNAWVPLAAWFRPHGATVVMVPPEQSADLRDYYNKHAKSDRLDSKVLARLPLLHPEGLTAETGIGPGDALKRAVKIRSGLVHRRTTSMQRLDCPRADGPSLGWRDRVGHVQDSIPVAVPLRQPAHRPQLGKRRLTDFLHRSSRGAWAEERATEIIAAATTTIELWGDEFDFGELAADIATEARLALSLCEEISMMDKRIGALYAKADPAGIVRSAPDVGVVGAQRIHGRLGDAKRFRNLAGVRSFSGLVPRRDDSGHTATAGGPTKAGDACLREALFTSADHARKIDPTLAQRYHRLMTVEGKHHTSALCHIATVLLTRIAACLRADQPYQLRDIDGTPITETEGRVIVADRYTVPKATRTARRAATTTSRQLVSPAFLGQ

SEQ ID NO: 401089 - protein, 370 aa, unidentified
MPETARYIGLDVHKASISVSVAEEGRDGEVRFIGAIANTSLDVAKLARRLAKEGHRLEFCYEAGPCGYGLYRQVTELGHGCTVVAPSLIPTRPGDRIKTDRRDSQRLAILHRSGELTAVWVPDAVHEAMRDLVRARIDAAMQLTRARHQLLSFMLRHSRIYETGKHWTQRHRSWLAGQTFEQPAHQIVFQDYVEAVFTARDRCDQLVERLTIMLPGWSMAPLVEALRGLRGIDFISAVTFVATVGDLGRFANPRQLMAYLGLVPSEQSSGERVVRGGITKTGNREARRMLVEAAWSYRYPARVATKKAEIITRLPKAVRDIAWKAQVRLCARYRRLSASAKKPTVVVAAIARELAGFVWAIGQAVTPAAA

SEQ ID NO: 401090 - protein, 391 aa, unidentified
MIYVGIDVAKDKHDCFIVSSDGEVLFDVFTIQNNMDGFEDLLFKIKSAEKDLGNVKVGLEATGHYSCNILGFLKNKGLTTIVINPLYTSLSRKSTSLRKTKTDKVDARTIASMIMSDVSLKPYSDKLYHNEDLKSLTRYRFDKVMQRAKLKQSVSRLVNILFPELETLVSTLHGKAVYELLLEFPSAQHIASANLKHLTHLLNTSSKGRFKRVTADEIREAARKSISSYLPAKSLELKHTIKLIRELTSEIAEIEAEIKKIMDAIDSPILSIPGIGQNLGAMIIAEIGDFSRFDNPDKILAFAGCSPTTYQSGQLYSSHAKMEKRGSRYLRWALLNAAAYVCNWEPTFAAYLQKKRAEGKHYYVALSHAAKKLVRLLYHLEITGEVYQATA

SEQ ID NO: 401091 - protein, 313 aa, unidentified
MAEACFIGIDVSKDSLDLHALPGADSGRFPNDEGGISQALSWTSDRKPLLVVLEATGGYQSHIAAQLAARDIPVAVVNPRQVRDFARATGQLAKTDALDAAIIARFARDVRPHPRALPDDAEQAIKALVTRRRQLVATRTAEINRLHQCPPKRVATSLKESIAFLDHQIDSLDCDIDDHIKQSPLWREKEDLLKSVPGVGSQTARTLLSQLPELGKLSRREIASLVGIAPLNRDSGALRGRRVIAGGRSQVRAALYMAALTATRCNQRIRTFYRRLRAAGKPGKVALTACMRKLLTILNTMLKNRTRFSHVTP

SEQ ID NO: 401092 - protein, 345 aa, unidentified
MKITTVGIDLAKNLFQVHAVDERGRAVLRKQLRRDQMARFFANLPPCLIGMEACASAHYWARTLQKFGHTVRLMAPQFVKPYVKTNKNDVADAEAICEAVSRPNMRFVPIKSVEQQAVLSLHRVRQGFVRARTAQGNQIRGLLGEVGLLIPKGIVNVVKRVPALLEDAGDEVPVSFRQLIERLTEHLKELDRQVDELEAQIKAWHRGSELSCKLEKIPGIGPLGASALVASIADATSFDNGRQLSAWLGLVPRQDSSGGKPKLLGISKRGDVYLRTLLIHGARSAILAAQRKAVNTNVWLASLLNRRHPNIAAVALANKNARTVWALLAHGREFRADYAPEASAA

SEQ ID NO: 401093 - protein, 386 aa, unidentified
MPQLNDLSRSLVILEQDATLIAVIEMGQSSWLVAGIVPGVERSPLKKLAVDESALLKLLNRWREEAEKAGHRIERIAIAFEAGRDGFWLARWLRARDIEAHVIHASSVAVSREHRRAKTDRLDTELLKRAFLGWLRGERDHCKMVAIPTLAQEDAKRPNRERESLVGEQSRIVNRMKAALARLGIRGFNPKLKKAVERLDGLRTPEGEPIPPNTLAELKHDMERRRLVRSQIRDIEGTRLERLEQAPGDGPHVMVRLLARVIGVGVETADMLVQEVLSRNLRDRRAVARYGGLTGSPDESGKKRREKGLARSGNARVRRGMIQLAWRFLMFQKDSALAHWFYARTKNAPQTRKTMIVALARKLLIALWRLVREGAIPEGVVLRPAL

SEQ ID NO: 401094 - protein, 406 aa, unidentified
MNQNTCITIDVSQNKSHIQGFIGPNKPLSKARTMRNTKQGFQFILILKNLIESKTNETPLIVFEFTGIYHKPLEKFLISQNLKYHIVAPLKAAKARNSEIRKQKTDARDCLSLSKLFYSNNLGIFYSENETYSNLRKLNRYYDTCMKHLIKIKVNFRETLAVVYPNYKKLFSSIYSDDSLTFLKEFPHPSLYTSKLEDRIIEILKNKWDHLESWTLSKVKILTPLINEVVSGCNVTEPDIIMLLSYISQIEYYLNQIEITVSQMNELAKKVPLYNLVHSLPGIQDILTCKFIAEVGDISRFSNYKQIVAYAGIDPMIRQSGDKDGLHLKMSKKGNKRLRTILHLMVSSLIKANREPNAIKDKYQKKTHQLNPLKPKVASMACANQLVRIIFYMHKTSSTYTYHECK

SEQ ID NO: 401095 - protein, 482 aa, unidentified
MKKKSIFQNRSQQLLRLFEKAGNRLKMMCVPIDYAKKDHMVMFCNGYGDIVRKPFSVKNTLEGVKYLIDQVMRSCRQRHIKKEFVFFGGEDVNSYAENFANALRTKGFLVANVNGHDAKKQRENLQASTDRIDLMGIAMMLLNLRAKCSPAQDGIYRNLRTLVRHRKKLVVMKTEVKNRVHTLVDRLFPGFLNEKNTGINPFSKSSLVLMEDRFSAQQIRRRQKSTLIKILKRCATPNAEKIASKLHSYSAQVITTPNEYAATLQLSLQHHIKHFRCLQENIDQLLSEIALVLAQTQGAFLTSIKGVGIVLAAGVSSEIGNPFEQKPLNNLTSYSGIIPRVKQSGGLEGHTHTGRVSKRSNHILKDYVVQSALQMGLRGPEPLLQDYKRREAAGQHADFGIGRRFLRMAMCLMRSSQVYLPPTLRSPKTQMQERAAYYLTTWPLLRDKWKKAHAHQAAFAKDQPLGQWRQVVQELYDIKLKL

SEQ ID NO: 401096 - protein, 423 aa, unidentified
MDNSRSFVLSKPGIVVLACDVSKADIHVYAMLGDRPWRSVLVNSSPGLDAGLRAFQSLVEAEVGPRTVVVVMESTGSFSDNLVRVAKALGLETAWVKAEGVAAMRIAAHGDQGKTDPRDAEAIHLMASHISRQKVRELPLVYRRLREWHRVYEASEDRIVELKGTAHAALRRLFPDLDFGVDFVFGPSGQALSQTYGFNPHRIVADGATTFRRRVLSVAPRIQKRSLERILAAASLSVQHGGNDVADILEFRVKEIFDDLAREEERLREVAAKMEELYAEARQQDPCLPQSEPSVITTLQLARLVAETGPMSDFGSWRALLRYGGFNLRERKSGQYRGKTRIAKKGRRLLRKVLNQAALPLVRKDRLFGPYYHRKRAEGMPGAKAMTVVGRKVLKMLFGWYRSAAAFNPSRVFVPASALPKAA

SEQ ID NO: 401097 - protein, 397 aa, unidentified
MYIVGIDIAKRKHEAAVIDGEGTVIIKPFSFTNNCSGYNRLLAMLAKAKLPLDEVSFAMEATGHYWLALFTRLQKEGFRVQVINPVQTNSIRSFYIRQAKTDPRDALLIAEVIRFGHFSESTLHPENIYELRELCRGRHAIVSMQADVKRKVVALLDQVFPEYETAFTNMFSDTSMAILQTCPTPKELSEIPLEELCHLIEVSSHKRFRMAKARELQELARNSFGFAMAGDVFSTMIRLYAKHLDFLKQQVREMDRKIAEIMDTLDTPITTITGIGPTLGAYILSEIGDISRFSSAAKLAAYAGIDPTMRQSGEYNGVRNRMSKRGSPYLRHAIWLAASSAVLHDPALKLYFQKKRDEGKPYMASVGHACRKMVSIIYAVMRDNKAYTPHIPNEISA

SEQ ID NO: 401098 - protein, 360 aa, unidentified
MAKARSLVGLDVHATKIVAAVLDAETGQLQVFAMTGENAKAAAFCAGLPRPVRVAYEAGPTGYGLARELIKRGVECVVAAPSKIPRASGDRVKTDRRDAEHLVRLLLAGKLHAVRVPGDEEEALRDLVRARDAVRMDLMRCRHRLSKLLLRHGIRFEDGAAWTQRHRDWLATVTLQWAAAQATLLDARGAVDALAHRRDSLEREIVAMLPSSPWVVQVGRLRCLRGVDTLSAVGLCAEIGDFERFARPGKLMSYVGLVPCESTTGQQRRLGAITKTGSGHARRLLVEASWHYRSRPSVGRALTDRQQSQPPEAIAVSWSAQQRLYRTWTRLEARAKRRTIIAVAAARELAGFCWAITQIE

SEQ ID NO: 401099 - protein, 403 aa, unidentified
MDVHKKTVTACLRIADKSGEVRKEIRTFGTMTEDLLVLHDWLRANGVTHVAMESTGVFWKPIYNLLEDSFTVLLVNARHVKAVPGRKTDVADCEWIADLLAHGLLKGSFIPPREIRDLRDLTRYRKSLIDERVREVNRLHKLLQSANIKLSSVATDVMGVSGRKMLEALLEGNNTDPEILSALAKGRLRKKLPELKKALVGRFRDHHRFLLEQILTHLDFLDESIEKISEEVAQRTSPFESKIELLSTIPGVSRRAAETLVAEIGVDMGRFPSHGHLASWAGMCPGNNESAGKRKSGKTRKGDQWLRRSLIEMSWAASRTKQTYLNALYHRLAKRRGAKKANVAVGHSILVSAYFILKFDVPYRDLGEDHFDRLNSAQIQRYHIRRLERLGFKVTIEPLEAAA

SEQ ID NO: 401100 - protein, 358 aa, unidentified
MNRNTGMNAGQIIGTMNGQQVVGLDIAKKVFQLHTVDMGTGEIINVQLKRAKTLEHFANRKPCLIAIEACGSGHHWARELQVLGHTVRLLHAKIVRPFVSGNKTDATDARAIWLAVQQPGVKFVGVKTVAQQATLTLHRQRESLMKMRIMQTNALRGLLYEFGATFAKGKKALFSDIETTLEALVDTLPQVVVDSLREQVVRIKKLDEDMLTIEKRLKLQLKQDPKMQRIAKIPGVGLLTATAAIATMGEASAFKSGREFCAWLGLVPTQTGTGGKVRLGGISKRGDTYLRTLLVHGARSVVNNGKTPGPWLQGLQARRPANVVCVAQAAKVARTIWAITAKDQEYQSDHKSVRPQAA

SEQ ID NO: 401101 - protein, 348 aa, unidentified
MKKVYVGIDVGSKQCAAVAIDSLGKTVDSEAFKTSERNLIAFAQRQKGEVRVLIEEGEMAGWVRRTIRPHVASVAVCDPKRNAWIAKAPNKRDAVDAAKLAELLRLDSFSAVWHPEEDDMAGFKVLVQHYDETSRRLARVKCQIKARLRRQGVVTSGNGVYGMVGRLKVLERVANPHVKRAMEQEFMLLDYLARAKAEAGRLLVEASRGYPVIKSLREIPGVGPVLSARFVAYVGDPNRFNKRTLASYSCLGIVKRSSDGSPIGREHLSKAGNAVLKDVSRTAFERAKTTKRPNGIKEFYAGSLSRTGSQTKARLNTQRKILAIMLAMWRDGTEYSDKLVTGKAFTGA

SEQ ID NO: 401102 - protein, 294 aa, unidentified
MNTTQVFEKRKIAVAIGIDLAKGHCDVVAYNADNKICFTKANWAYPHLMEWLANAQPAVVLMESCKGCHVRARDIADLGHDTRLVKGADVKALRNVCQKNAIRDADYIARLLYVPGTKFVFVKNQRQQSLQFLQNEYKSIQELRIQVGNQIHAGLEEFGCPGPKSKKFIQSRMMAHLEKNAELIPDEAMSSFLRRREMWLNLFEQEEEAKKRMEEITKTDDDAQRIMTVPGVGAQTAVGMLVHIGGDIGRFKNSGQFAASIGLVPKQNSTGGNTTLNGITKCGPKRLRANLVQC

SEQ ID NO: 401103 - protein, 311 aa, unidentified
MFVGIDISKERLDVGVRPSGERFVVTHDEAGLAELVKRLQAARPELVVLEATGGYEQIVLAALVGAGLPAVAVNPQQVRHFARALGQRAKSDPIDADVMAHFGEAVRPVVRPLADDAMRTLGELVTRRRQIVDMITAESMRRQQVSSRRIARGIDRHLTGLRKELSAIERDLDDAVRGTPAWREKEDLLISVSGVAEVVARTLIAELPELGTTDRRQISALVGVAPYTQESGKWRGKRHIAGGRASVRTALYMATLTAIRCNPVIAPYYRRLLAAGKIKKVAIVACMRKLLVILNAMMRDARPWRDGAAHA

SEQ ID NO: 401104 - protein, 316 aa, unidentified
MEDTLIFVGIDVSKAQLDVKIRPTGEKDSVANDKAGIKTLVKRLAKLQPTLIVLEASGGYERQIAQALVRAELPVVVMNPRQVRDFAKATGQLAKTDKIDADVLAHFAEVVRPQLRPLPDAVTLELRALTSRRRQIIEMIVAERNRLAMASKTIGKRIGAHIRWLEQELERANQDLDRAIEQSPIWKVKEELLQSTPSIGPVTSRTLLADLPELGTLDRKQISSLAGVAPFNRDSGTLKGRRSIWGGRAPVRCALYMAALVATRRNPVIRDFYKRLTAKGKLFKVALVACMRKLLTILNSMIKHRTRWSESFLKTA

SEQ ID NO: 401105 - protein, 345 aa, unidentified
MDQISRIGMDTSKHVFQLHGVNAAEEVVLRRKLRRKEMVTFFEKLAPTVIAIEACGASHHWARLLHSFGHTVKLIPPQLVKPYVKRGKNDAADAEALCEAMSRPTMRFVPVKSPEQQAALMLVGVRDQMIRHRTQLANAIRGYAAEFGLTAAKGMAHLVPLLERIQTDESLPALARELFAIQAKEYEQLQSQIDEIDAQLMAQHRADDRSRRLAKIPGIGPIGAMLLTMKTPAPELFRSGRQFAAWIGLTPRDHSTAGKVRLGVITRAGDEGLRSVLVVGATAVIQHARRHGKASPWLAGLLKRKSPKLAAVALANKMARIAWKLMLTGEAYTATPAPAALAGAA

SEQ ID NO: 401106 - protein, 330 aa, unidentified
MNLSVPSPALGIDIAKLKFDVCLLKENGKAKHKVFANTRHGFEQLIRWLDSHQITNLHACLEATGTYGEPLALFLFEAGCLVSLVNPAAVRAFANAGLSRTKTDKADAELIARFCLAQQPKAWQPPAPELRELQALARRLESLVEMRVAEENRLSSGVSAAVRQSLEEHIAYLIQQIKQTEALIRQHINNHPDLKEQSELLDSIPGIGETTAALLLAEIVNIKQYTSARQVAAYAGLVPRERRSGSSVRGRVCLSKIGNARLRKALYFPAITALRCSDFFKAWAEPLRMRGKSKMSVIGAAMRKLIHLAYGVIKTGKPFDPNWAKAIEIA

SEQ ID NO: 401107 - protein, 392 aa, unidentified
MVAVMIGIDPHKRSNTAPVLDGQETVLARRRFANDSRGYLDLKAFARAWKQRTWAVEGARGVGLSLAQRLAMEGELVLDVPAVLSARVRALGGGSGRKTDEADAYAVAVAGLRGHGLQVVKPEDEVAVLKMLSDRRQQLVEQRIAAVNRLHDMLQDLLPGGASTRLTAAKALEILAALSLSDPVGQARKQLAVEHADDVAALDVGIKTLAKRITQALTRRPSAVTAIKGIGDIGTALILGEVGDVRRFRSKHHFASYTGTAPIDVSSGDQNRHRLNRGGNRRLNYALHIAALVQIRFPGPGQDYYARKRAEGKKPLEAMRCLKRRLSNVVFHALQQDLQNKLQAAGPEGHSEATLQSSASDPTPMVSPSDQSLTGPATNNATPRPTRVKAAS

SEQ ID NO: 401108 - protein, 344 aa, unidentified
MQIASIGIDLGKTTFHLVTLGERNKVLIRKKFSRAQLLAYTAKIPSALIGIEACAGSHFMGAKLREQGHEVRLIPAQFVKPYRKSNKNDFKDAEAIAEAVRKENMRFVPIKTQEQLDIQGMHRVRDRLVQRRTALINEIRGFLLDRGIIFAADPKHLRKNLPAVIEDAEQNLTPRLRWLLDRMWQEWKQLELDIETMSDELERISAENELCRRLRKIPGFGPLVSTATVAAIGNGAAFGCGRDFAAWVGVVPRQYSTGGKQKLLGISKRGNRYLRRMLIHGARAVLFRVKYDTGGFGEWFRRLAQRAPRNKVVVAIANKLARMAWAVLSSGKEYQYHRLQATAA

SEQ ID NO: 401109 - protein, 437 aa, unidentified
MASEPTKVIAGIDTHADTHHVAVINEHGKPLADREFLAVGSGYRKIIEFITSYGAVTAVGVEGTGSYGAELARSLRGEGLTVLEVNRPNRAARRLNGKSDPLDAYQAAKSVLEGRTKAIPKAKDGPVECLRLVRSGRASAIKARTAAINQIKALLVSAPDKIRAKYRAMATSALITALQRTRPAGHLADPEYVTLLTLKALAVRCQALGAEIEAADTALKEILDSYAPMLRDLPGVGTEVASQLLITVGDNPDRLGSEAQFASLVGVAPVPASSGKTTRHRLSRGGDRSANNALHQVVLVRMASCQRTKEYVAKRTSEGKSKREIMRCLKRYAAREIYRQITNPRPAPDNSDLRRMRTDLGLTIATVAGELGQWVSILSRLERGHIRNDELAATYRQWLSEKQPNSEWMTKAHSLETPSPRRAAEHLLRTDKFVSWG

SEQ ID NO: 401110 - protein, 387 aa, unidentified
MPQPNDLSRSLVPLDQDSTIIAVVEMSQSSWLVGGVLPGIERQPRKKLEPSPERLLALLHRWRDESVRAGRTITRIAVAFEAGRDGFWLARWLEARGVEAHVIHPSSVAVSREHRRAKTDRLDTELLKRGFLGWLRGERGHCSMVRVPTIAEEDAKRPNRERECLVKERTRLVNRMKGTLARLGIRNFRPTLRNAAEHLAALSTPEGSPLPPNVAAELERDIARLRLVIGQIKQIEEARRQRLEEQPERGPHAMVRLLARVVGIGIETADMLVNEVLSRPLRDRRAVARYAGLTGAPDESGARRREQGLAKAGNARVRRGMIQLAWRFLRFQKNSALAQWYQARTADHRGATRKTMIVALARKLLIALWRFVTIGEPLDGVTLRPAS

SEQ ID NO: 401111 - protein, 409 aa, unidentified
MNLYLGIDVGKNKLDFCALDSDQRCCFQGETTNDLNGAIKIKQTVLTETQTHHYEKITAGMEATFVYNFHPMTFLAEDSELQALGLSVITINPYTSHHFSQLFNDGKTDAIDAKQLADLLRVEPLGTPVARQENYVALQRLTRERYHLVKQMTDSKNHFLNNLYYRCNTLERELPTSVFGSAMMTLITDEELTLDEAAALPLDELVTHLQQLAHGKFGDAEAVAKAIKKATRSSYRLSKVVTDSVDEILAVYANEIRMLKKQIQVLDKTITQISTQNTDINCLTSVPGIGPVYAAGIVAEIGQIERFPDESHIAKYAGLAWLPHESGTSVRQATPRTRKGNQYLRYYLVEAANSIRRYDITYQRYYHKKYEEVPKYRHRRAIVLTARKLVRLVEVLLRNHQFYIPPKVV

SEQ ID NO: 401112 - protein, 345 aa, unidentified
MKIVGCDLHTRYQQIAMLDTETGELVERRLEHESGEARAFYAALSAPVRVGIEATGHTRWFERMLGELGHELWIGDAAQIRASMVRKQKTDARDAAHLLDLLLSDRFPRIWRPTLEERDLRQLVWHRQKLVWMRNAVGNQLHALAMGEGVCRKKKLFTKRGRVELESLKLGPWASHRRQELLEILDRLDESLHELDQAVEQQAEQNAKVVLLMTHPGVGPVTSLAFVLTIGPVGRFERSKQVVSYLGLNPREHSSGGRQRLGAISKQGNPMMRSLLVEAGHTAARLDTELRQDYQRLKLRRGSGVAKVAMARKLAVRMYWMLRNQASYAQLVRMQGSPRGTLVGQ

SEQ ID NO: 401113 - protein, 453 aa, unidentified
MDQSCPFRREHLFIRLQIHRVAAGRVASGDWAEGFAQMLFIGDDWAEDHHDIEIEDDSGRRLARARLPEGLEGIAKLHALIAEHAPTCWEDLPTDQVIVGIETDRGPWVVALQAAGYLVFAINPLSAARYRQRHSTSGAKSDAGDAHVLAEIVRLDRDHHRQIAGDSELADAVKLLTRAHQNAIWERTRHTLRLRSALNAFFPAAVQAFPDLAATDALILLGRAPDPVRADRLTRSQVVSALQAAGRHHVQDKAEPLRTLLRTPGLRQPITIEAAYATVVSTQVKLLTAINEQIAQLKAALTEHFGRHPAAEIYLSQPGLGPVLAARVLGEFGDDRTRFSDSRARKNYSGQSPITRASGKKSLVMARYATNRRLGNALHQQAFSAISASPGARAYYNTIRGRGVGHHAALRQLANRLVGVLHGCLKNSTPYDEATAWQHRTDATKPSPIAAVA

SEQ ID NO: 401114 - protein, 346 aa, unidentified
MAMTIVESTRPVTGGVDTHADVHVAAAVDANGGVLGVESFATTPAGFAELHGWLTGFGAVARVGIEGTGAYGAGLARFLRARDLEVIEVDRPNRQLRRRAGKSDTIDAIEAARAALSGRASGIAKTADGDVEAIRVLMVARRSARDVRIKYLNQIRHLGFTAPDELRERLREVPAEHLARTAASLRPGAGTVMHATKLTIRTLGRRVLDLEADAQQIDRLIHELVQRTAPTLLDVHGVGTHTAAILLVAAGDNPDRLKSEAAFAHLCGVAPLPASSGKIIRHRLNPGGNRQANHALWRIVFTRMSSDERTRKYVARRTNEGLTTREVMRVLKRYVAREIYPHLAHA

SEQ ID NO: 401115 - protein, 378 aa, unidentified
MRNDIRFVGLDVHAETIAVAVVEPDGEVQFLGTIPNRPETVRRLVKRLGPATRLKACYEAGPTGYVLYWQLTGLGVHCDVIAPTLVPQKPGDRVKTDRRDAEKLALLYRGGHLTPVWVPDQAHEALRDLVRAREAAKSDQLRARHRLQKFLLRHGRRPPQGVQTWTQKHLDWVRREVHFEALAQEAVLVDHLAEVEHARERIRRLERLIDTAVEAAPACLRAVIEALQGLRGIAKVSAATIVSEVGSLSRFRKPRQLMGYSGGVPREDSSGERVRRGGITKTGNAHLRRIVGEAAWSYRHRPTVRGELLKRQAGLSEEVKAISWKAQHRLYSRYRRLIGKGKTKQQVVTAVARELLGFIWAIGVHVEQQHGTAARRAA

SEQ ID NO: 401116 - protein, 340 aa, unidentified
MGDITTIGLDLAKNVFQVHAVDQAGNVVVRKRIRRGQVLAFFSGIPTCLVGLEACATAHHWARELIALGHDARLMPPNYVKAYIKRNKHDVADAEAICEAVRRPSMRFVPLKTTEQQSALMMHRARDLLIRQRTMLVNALRGHLAEFGLIEAQGLHKVARLVTIVVDEVDERVPEMARQVLKVIVNQLKDIQTGIADLEKQVLVWHKNNPVSQRLATIPGIGPIIATAIAATIADPNTFRSGREFAAWLGLVPRQNSTGGKARLGGISKRGDSYLRRLLVNSAHTVLLCSKAAKNDPWLISLLSRKPRLVAAVALANKTARVAWAIMSRHDTYRHVTAAA

SEQ ID NO: 401117 - protein, 391 aa, unidentified
MIFVGIDVAKDKHDCFILNSEGTVLADVFTIANNRIGFETLLSRIQSCSQGESKIKVGLEATGHYSYNLLGFLIDSGLATYVINPLHTNLYRKSLSLRRTKTDRIDARTIAMMLMSDVDLKSYSNTAYHNEELKSLTRYRFDKVKERAKLKSSVARLVNILFPELEKLVSSLHIAVVYALLSNYPGASYIANANTEELAETLCTASKGRYTKSKTAEIQVAAGVSIGSKMPAKSMELKHTIALIRELDKEISEVESAIDKITSQMDSPIFTIPGIGRHMGAMILAEVGDFSNFASADKLLAYAGLSPSTYQSGQLQNCYAHMEKRGSRYLRYALFNAAKYVCLWCPTFSAYLEKKRSEGKHYNVAISHAAKKLVRLIFAMQRSGKAFLADY

SEQ ID NO: 401118 - protein, 459 aa, unidentified
MAKAFKTKKTKNKTKGEWDEELSALNRNAAGIDVGSAEHYVAVPGGRDPEPVQTFGSFTADLHRMAQWLKTCGIETVVMQATGVYWIALFQILESYGLQVNVVNARHTKTLPGRKTDVLECQWLLKLHTFGLLNNSFRPTEEIQILRTYLRQRENLVAAGSTCIQHMQKTLTQMNVQLANVISDISGVTGMAILRAIVAGERDPDRLSTLKHGRVRASRGEIARSLEGNWREELLFVLEQSLELYDLYILKIAVCDQRIERHLKTMKSKPEPGQSSDPTAVPAPKQEPRFSLKDHLCRVTGVDLTKVAGLQVQTVQTIISEVGVDMSRWKTEKQFASWLGLCPDNRISGGKILKSGTRQVVNRAATALRLAAWSLIRSQSALGANFRRLRSKLGAPKAITAMAHKLARLIYRMMKFGTEYVDKGMAAYESRYRQQQMKWLSKQAASLNLQLIPVPEVTG

SEQ ID NO: 401119 - protein, 337 aa, unidentified
MMYAGIDHHKAVFQAAMLDTEAGGAADERFEGSRDGLALWLERWQGRVSDVAIEASTGWRWIAQELEAHGMRVHLADPAQARAKRGRTKKAKTDKLDARWLALLLCKDDLPEAWIPPEEIQQLRAKTRLRKALVDDRTRWAQRLHAVLHHEGWPCRRSQLLTAKGRQWVVALRLSSAAQQQVNTYLLLIETLEVQLQPVESELRHFAQEDPRCQALMQLFGVGPILACHLLAEIGSALRFRRARQLVRLSGLDPKVEESGGRRQRGELAKQGSPLLRWAAVEAAQHGRRYNSPDRHLWAVSNHRCGPNRATLTVARKLLRRSFHVLRQIELQQLQAA

SEQ ID NO: 401120 - protein, 346 aa, unidentified
MYHHNVIALDLAKRVIQISKVTPPGEILFNKAVSPNKAKEIIANTKPCIVAMEGCGSFHYWGRFAQEHGHIVRGMPPKKVKPFVGKQKTDANDTIGITVAVRAPNMTFCQVMTIEQQNLQSIQSSRRFLDKSLTQIGNHIHALLYEYGIALNVGKKSLRQGMAEYLASDNDTLPPIVKRLLSTLQAQWLETEKHHKAADKLLLQQVKVSEPCKRLMALEGVAEIGAAGLFCSLGDGKGFKNGRQAAVYIGATPKQHSSGGKTIMVGIDKKGGDKKLRSVLYLGALSYISNLPGEPKTLKQRWLIDLVKRAGVKRTCIALVNKTIRTAWALLYSGESYQRLPLPMET

SEQ ID NO: 401121 - protein, 353 aa, unidentified
MFHKPGEATTMKSTTIGLDLAKNVFQVHGVDEQGKAVVRKQLRRNQVAAFFANLPPCLVGMEACGSAHHWARKIEQLGHTVRLMAPQFVKPYVKTNKNDAADAEAICEAVSRPQMRFVPIKNVEQQAVLALHRARQGFVKARTAQANQIRGLLGEYGIILPQGISHITKRLPAILEDGENELPGSFRALLARLGEHLKELDRQVGELEVQIHHWHRENEASRKLEQVPGIGPITASALVATIGDANSFKNGRQLAAWLGLVPRQHSSGGKSVLLGISKRGDSYLRTLLIHGARAVIRVAERKEGYAQSWLGQLLGRRQKNVAAVALANKNARIVWALLAHDRNYQADYAPSAV

SEQ ID NO: 401122 - protein, 410 aa, unidentified
MKLFIGIDSSQKNNQCCIVDHNGNKVSELRVSNDLPGAQKMQALIEHKASEFYVTELKAATEASSMYDFHILEFLSGSQTLTKYNLKLYRFNPRLIKAFKQSLKIRDKTDPNDAYAIAEYLRFQSEKAEEYRAKLDHLPLQRLTRFRCHLVSQLVRERNYFLNQLFLKFSAFSKVKPFSDTFGATALAVIEEFMTPDAIANADDEELIQFVIKHGKNQFPNPEEIVKELKYVARESYRLRPQLAESVHRILCLSLSNIRALKSSLKELDDTISKQLNAFSITLTSIKGIGTVYAAGIFAEIGDINCFSSESQIARLAGLAWIRHQSGNFEAETRRLDKQSNKYLRYYLVEAADSLRRHNPEFSAYYQKKYAEVTKNQHKRALVLTARKLVRLVDYLLRTNKLYQPNIILT

SEQ ID NO: 401123 - protein, 389 aa, unidentified
MFYVGIDVASEKHDCCILNEKKKIIQSFSFSNSSSGFAALLTSLEKLPANEIMIGLEATGIYSENLSVFLRRKGFDVTTINPLLIKKHQCATTLRKTKTDKADAKGIALFIAEEGFQPDLDVSYHIQELKSLTRARFSLVQNRSALKNKVKRLITLLFPELLGEFSDIFGVSASALLKQYPSAAKLAACHTDTLAALLRKSSRGRFGKAKAEHLKLLAKNSIGNHSNARVLELRMLLDQIDLLSEQIQTYDREIKIIMDQIDSPILSIPGIGYTLGAIIVAEIGNINRFASPAKLLAFAGLEPSIYESGKFIPRSGRMVKRGSPILRWALLQAAGFVANYSSTFALYHAKKLSEGKSAAIARSHVAKKLVRVIYSLLTHSNAFSDQLAA

SEQ ID NO: 401124 - protein, 353 aa, unidentified
MQFYCGVDLGARKSHVCLIDENDYKLLDKKMDNDLSGIEAALRPYKSSLEVVVESTINWEWLVYGLQKFGYEVELAHTLGLKAITWSKKKTDTWDAFTLAKLLRGRLIPQAYIYPYELRPVRDLVRERIRLVTKRATEYGAISRMLLKYNIQGFDRNSVKRLNDKDMHELYHHPFVRAKATMELQRIELLTEQIKLIEKALFERARKDDMFSLLRSIPGIGETLALTILYEVGDINRFANARAFCSYCRVVPGIHQSSNKAYRSPNSKQGNRYLKWSFSQAAIMAIRYYPKIRRLYERLAAKRKKAARLVARSIIAHKLAQAAFHVMKHHVAYKEELVFRFSKEYAEGKVVTP

SEQ ID NO: 401125 - protein, 344 aa, unidentified
MTNIQHKETAHEAKPDLFAGIDVGAEELILVIRKNGKPFDPQKFANTPADRDRLVKKLVKLPGIIVCLEATGVYHFDLSLALHDVGVLLMVVNPKASHNFAKVLMKNSKTDAVDANTLAEYAARMDFVMWTRPSDEQIALRSFARRINALTGQKAAAKNHLHALNATSETPKAVLKDAKLAITQLEKRIDRLTAGALVLIGKHPELERILALLIGIKGVGETSAIALMGELLLLPPDLSHREWVKFAGLDPRAFDSGKSVHKKTRISKAGNRHIRAALYFPAMSAKQHDKHVKAYFQHLMDNGKTPLQGVCAVMRKLLHAIHGMLKNNEPFDNTRFYAIQASAE

SEQ ID NO: 401126 - protein, 367 aa, unidentified
MKKISTAVTKQSRNISRQTLTIGLDLGDRNSWYCVLDETGRIQLEQRVRTTAKALQEVFGAMPRSRIALEIGTHSPWISRLLSELGHEVIVANARKVRLIGESRKKDDRLDAQTLARLARIDPELLYPVKHRSAKAQADLTVIRARAGLVRARTALVNTARGLAKSYGERLRGCNVRNMNPEKAEGLSPELQAALQPLLVALESLSEQIREYNERIEAWAQQSYPQVALLKQIKGVGTLIALTFLLTLEDPHRFRKSRDVGCYLGLQPGRRNSGQSEPQMHISKEGDPYLRTLLVQGAQHILGPFGVDCDLRRWGLKLAERGGKSGKKRAIIATARKLAVLLHHLWVSGEVYEPLHNCTRRALPAAA

SEQ ID NO: 401127 - protein, 338 aa, unidentified
MTNFVGVDLHRNNFTYCIRVNGEERKIGKCEITELKGFAAMLGPNTAMAVEATGNTFMFCSSLKAYVGRLVVVNPSQFKVISMSTKKTDKHDAKVLAEFLEKDMLPEVRMKDDLQAKISSLTQTREKLVQLRTVLKNKVNNLLAANFIVLKREELSTEKGLVKALSYRIDPITDTEMLVVVEQIRSLNKSIEKLDKAIEDHGSKMDGFSNLKSIKGIGTKGAAILLATIGNIHDFRSSKHLAAYIGIVPRVSNSNDTVCHGRITKNGSKTARTALVQCALIAKRYSPYLNAFHESVKSRRGGAKANIALARKFLDIVYKTLKNNWMFEDFSQFKLVKN

SEQ ID NO: 401128 - protein, 315 aa, unidentified
MTSTDERFVGIDAGKRKNDVHVHGLADESQYHNDAEGIRDLVDSMLQLSPALIVVEATGGYERLMVAELSAAGLPIAVVNPTRVRRFADSLGQLAKTDKIDARMIAHFASVVRPPVRTLKSEEEEYLGEVLDRRRQILNMQTAEKNRLHTSRGRIREDIQEHVDWLTCKEKELNKEIARLIQGNQEWSEKEALLQSVPGVGPVTAATLLADLPELGTINRQKVAALAGVAPFNKDSGKKRGKRRIFGGRSAVRRTLYMAALSCSRHNPVIKRFYQSLLDRGKEKKVALTACMRKLLVILNAMVRDQQAWHHIPAD

SEQ ID NO: 401129 - protein, 346 aa, unidentified
MEITTIGIDLAKEVFQIHGVDRHGKAVLCKQLRRNEMVKFFVNLKPRLIGMEACGSSPYWARKLNEFRHTVKLMAPQFVKPYVKTNKHDMADAEAICEAVSRPNMRFVPIKNIEQQAILSVHRARQGFVKARTAQANQIRGLLSEFGIVIPQGIHSIAKRVPDILEDAENGLPGTMRHLLERLNDHLKELNRQVEELELQIKLWHKENEASQRLEAIPGIGPITASAIVATVGDAREFKNSRQFSAWFGLVPKQRSSGGKQMLLCISKRGDAYLRTLLIHGARAIIRFAEKKAEPDSWLRKLIARRNKNVAAVALANKNARIIWALLAKGATFHHNHTTAAAATVV

SEQ ID NO: 401130 - protein, 436 aa, unidentified
MRLKDYGRKPALRKEFVQNPDLLTIGIDVSKDSHSACFGTKSMVLSKKFEFHNSREGFQKFEHNIRNLSKRNACKQVLIGMEPSGLYWYGLYERLKKCGFGVCLVNCMAVKNNRKTMPDGSSKTDPKDAYSVYDLMIQGKFFLPVERDPELAAAYRLMRKHMIIKKRISRVRNHIRGALHLAFPELNNEINNLTLPTSLRFLQSNPTPESVMRNGRKRFMKKWKPRKQSGQWRPEKFNRIYDIARQSIGIRDPQRIDEFEIKTMANDLADALAKSQLWLDKAIELVCDRDDFELLLSLPRIGKPTATAILTAVGNIDEFSYGKQLVKLAGLDIRLYQSGSSIKKRPRITHIGSGYLRHWVYHYALRLISFEPHFQNLFQRRKNSSPGKGSGQRALVAISDKVLRIIYRMLKDQEKYTPAKDKIVAAYYQRPQKLAA

SEQ ID NO: 401131 - protein, 407 aa, unidentified
MPYKIAGIDVHKKVLMVVVLDASTPEEKPERRRFPTMPSELRRLSLWLREQGVEEAVMESTAQYWRSVWLELEPYMRLQLAQAFSNRAPRGRKHDFKDAERLVRRLIANELILSFVPTGEQRIWRNLTRMKLQLTRDRVRLQNQMECLLEEMRIKLSIVVSNLLGASGLRILRALAEGETDPKQLAQLGDERLKCTEEQLVDALTGRAQPLHRAMLGLQLERLQLIDRQIAQLNGMIAQAMKPHQEAVMRLAEVPGLGADSAQQIIAEVGVQASTFASAAELTSWVGTCPGKEESAEENHSSRSAKGNKYLRRVLNQAAHAAVKKNGSYFQAVFRRLLPRLGYQSAIWAVAHRLCRVVWKILHEGVRFIEQGREPDPQAKKKRAQMLARALRKLGYEVAITPINLAQ

SEQ ID NO: 401132 - protein, 400 aa, unidentified
MDRNRTVAGLDVHKDSIYLCIMGHDEAIIFEKIYGVLTPDLRQMCNDMVERGVTEAAMESTAVYWIPVWNELCGSMELKLVNPYFIRQLPGRKSDVKDAEWIAECLLKNLIKGSFVPGPIVQDMRKLNRRIMDLNEDMTYNCNKLDSAMQRCGFRLSNYVSSIKSRSYQSILKAIIGGVTDAEELVKLVHGRIVNKHGRHTIKAAVTGLFSKTDITVFRQTKAVIDMLEAQLEECQRELTKLCEEYFPEQYRRILTIPGVKERAATAIIAETGVEMKMFATAANLVGWCGLKPRNDVSNGRYKSRKVTHGNKYLRQTLIEVSWTASRTRNSFFSNFSYTQTVVKKKSKMKIQVAIARKILVALWHMLTKEEDFIDFYLKHLREQREMEQQIKRLESAAVN

SEQ ID NO: 401133 - protein, 376 aa, unidentified
MLYVGIDVAKNKHDVTALNVPGKTVLKPLTFSNNKAGFELLDLSLRQLNQDCLIALENTGHYAFNLLNFLHEQGYKVYTYNPLLIKEFAKSLSLRKTKTDKKDAHGIALKLLSDPNREQFQHDNRQVELKILARHIHRLKKKQSDWKVQYTRCLDIIFPELDKIVGKHSEYTYQLLTRYPNPQKRIEAGFDKLIEIKRLTASKIQDILSVAPRSIGTTSPAREFEIIEIIKHYKRLIDKAETCVNDLMAEFNSVITTVTGIGGRLGAVILAEIRNIHAFDNPAQLQAFAGLDSSIYQSGQIDLAGRMIKRGSPHLRWALIQAAKAYARFSPAFKAYLKTKLEQGKHYNVAIIHLAKKLIRTLFYILKKSCHLTNKK

SEQ ID NO: 401134 - protein, 388 aa, unidentified
MNYVGIDISKYKHDVCIINAFGEVICDALSFTNDAAGFAELLNILSQSGQDEMRIGFEATAHYALNLKLFLEKNGYSFMELNPLLVNKFIKGQTLRRTSTDKLCANAIARYMLQVEYKPYPASFYHNYSLKSLTRLRDRLVRQRSGYLVRLTNVLDHIFPEFKPFFENRFSATALYILANYGSPEAIANMNSRSFDILRRKSRGAFTMDKFVKLKSLARNTVGGWNSIFELELETLLDIHTRIDDKINRLEAEITGIISEMNPPTLSIKGVGPISAAIIISEIGDIRRFTSPDKVLSFAGLEPGYFQSGTFEHSGRMVKRGSSILRYTIINCCRSMRLHNEVFSAYYYKKIAEGKPHRVVLSHMAKKLVRLIYKLETTGTPFDPSIQR

SEQ ID NO: 401135 - protein, 340 aa, unidentified
MTIVTLGLDLGKNWIHVVALDAEGRIVLRRRVGRDRLLKQTVNMPACLIGMEACCGAHHLGRALAAQGHTVRLMPPQYVKPFVKSNKNDYRDAEAGAEAVQRPTMRFVPLKSEAQLDLQTIHRVRQRLVGRRTALINQLRAILLERGITVPQRRRVLEARLPAICTDEEDRLSPRVRHLIEDLRAEWGALDGRIAAFDAELAAAAKRDDACRRLCEIPGIGALNASALVAAVGNGTAFDKGRDLAAWLGLVPREYSTGGKQRLLGISKRGNKYLRTLLVHGARAALPHLAARDDALGIWLRRLIARVHRNVAIVALANKLARIAWAVLAGERRYGARADA

SEQ ID NO: 401136 - protein, 409 aa, unidentified
MQEATQHDAVDVFVGVDVDVDVDVDVGKGRHHAVALDRNGKRLYNKALPNDEVKLRALIAELKTHRRLLFVVDQPSTIGALPVAVARAEGVLVAYLPGLAMRRIADLHAGEAKTDARDAAIIAEAARSMPHTLRSLRLADEQLAELTMLRGFDDDLAAQLTQTSNRIRGLLTQIHPALERVLGPRLDHPAVLDLLERYPSPSALAAANEKTLANRLTKLAPRMGKNWAAEIVQALNEQAVIVPGTQAATIVMPRLAQQLAALRKQRDEIAAEVERLVLAHPFWPVLTSMPGVGVRTAARRLTEAAQKAFATAAHLAAYAGLAPVTRRSGSSIRGEHPSRRGNKVLKRALFLSAFAALRDPVSRAYYSRKIQQGKRHNQALIALARRRCDVLFAMLRDGTIYPPKSAPDA

SEQ ID NO: 401137 - protein, 365 aa, unidentified
MNNAYYTVIGIDVSDKKSKICVMSKINGNLKVVQEATISTTKDGLAKFLETQDKASPVTFETGTHCRWMSEVASGMGFKVYVANPCRLKMITESKTKNDVNDARTLARMTLADVGLLHPVKLRGAEHQKMINLHEMRNILIKQRTGVIVQMRCIAKSMGFRIPKCSTTHFHNLDTASWPKELNDIAWPMMKNLEQLAITIKTYEKKIRELAQTPTFKAQVDRLMEIHYVGLYVATGFVSVTGGDMDRFTKPRDVGPWLGLSPKQDQSGDIDKQCHVTKAGSPFMRRLLVESAQMILHTGSIDTDLKAKGLRMCLRGAKIAKRKAVTAVARSLAVLMVAMLKKPNAPYVPLSERAEKELLSMRLGV

SEQ ID NO: 401138 - protein, 330 aa, unidentified
MYLGIDTHTRYSQVAVVDDDGNLQNEIRLPNDRLDELVEQYAGGEAAIEASGHYRPVYEMLDEHLDVTLVNPSKNRVIADATVKTDRIDAKRLAHMLRADMLAESYVPSDEIRTLRDLVRTRKALVEERTAEKNRVRAVLKRTDNAYDSELFGPTGREFLAELSLSDADRTIVEAHLSVIDEYDTQIEKLEEKIEQKTLESPAAQRLLSIPGVGQSTAALIVAEIGEIDRFDRQEELVSYAGLDPIVHQSGDMEVHGSISKEGSAPLRWALVQCAHVSVRYDDYLGNFYTRLKRRKNHQIAIVATARKMLVSIFHMLKRQEPYDPPEVSA

SEQ ID NO: 401139 - protein, 360 aa, unidentified
MLYLGIDVHRKQLTVNVRNEAGEAIERRQVSTEWKRVRAFFQRLSERARGEGGYVAILETCGFHDWVLALLDEYDCREAVVVQPTGRTKKKTDRRDAQALSETLWINRERLAAGQPIRGLRRIHPPEPRDAENRQLTALRVRVTQLRTRTLNKIHRILLKHNLEQHCPTKGLATKRARQWLDQLELPELDRLEMDLLLAQWSLWDRQLTSVDCQIRQRQAASPTATLIASLPGAGAFGSLALASRMDRVERFARPGSLANYWGLTPSVRNSGETTDRLGSITKEGSRLARFVLAQMVLRVLRRDPAMRTWYQRIKRRRGAKIARVAVMRRLATILWHMVKRKEPYQLGGVPRRPLMAAVE

SEQ ID NO: 401140 - protein, 347 aa, unidentified
MRKFFVGIDISKEKLNVCLLEGMNIVHEDEIENTEASLHKWFGRMRKSLKCCMDEVLLCAEFTGRYIYPLAVACHEEEAFLWMEDPSRIKNSFGLVRGKSDSVDARRIAEYAFRHQDKAVAYRLPSEELASIKILMADRELVLSDRKKYEAQLSDQKRFMSKKDYAMQSKMWMSIVRELQKQLDFIDEKIDKLVSASESLSHQVELLKSVDGIGQRIAVAMVVFTNAFTRFDNARQFNCYAGLAPFTYTSGKSIYSKAKVSQRANKQIKALLHLAAVCAATHMKSGDYKEYYDRRVAEGKHPLCVLNVIRAKLVGRMFAVIKRDELYIKNYDRSSSEKKLSTPVQIS

SEQ ID NO: 401141 - protein, 396 aa, unidentified
MYSFFVGIDVSKDSFSVCGLDAKEEMIFSLVAAMDRIGLSECIKTISSHSEDPSRVVVAMESTGSYHVNLFSFLTSQGIRTIVVNPLLIKNFSKLSLRKTKTDKKDAHTIARFLFGQRGSLDTFFTHQHKDLKDIARERESILKLIGSTKNDIKRMLKSTFPEVERICNVFGDVMLLFLKKYPSARCIRDANPENVIQAFQHKDQRLRITTPKEEIVKAAQNSIASLHPAIEQILPGKIETLLFLNDRLDEVTNMLVVWCESVMKEDLAILMSIDGINTKTAAPFLAEMGDHRNYETYKSFIAFSGLDPSIHESGAFTGMSKLSKRGNRHLRRIIYLMTFCVIRIKGPFKSYFLKRRNEGLPFKKALFATAHKLIRAIFAMLTKRTYYVSGEMITG

SEQ ID NO: 401142 - protein, 401 aa, unidentified
MDNIKMFYVGIDVSKDKSDICIKDEKGNDLIHRFEITNKKADLEMLYETVESIKRNIPGNSDVVFGMEATGIYSLPLYSALKRDGYKVKLYNPIQTNGYRKINIRKTKTDPIDSAIIAEMLRHSEAPQVSEIQDMHLFQLRELVRVRHRLIEEQALCKVQMVRNIDTIWPGYGGVIKRVFGAASLAILKKYSVPSKLRSESFEHFYELVKKKSRSKISRSKAEEIYANAGNVLTIPELDSVIAIEIKTLITQLELYDEQIQSVEGKIDQMMKLTDTKIMSIPGIVDILGPTILGEIGNVERFSNVKKLVAFAGLDPVVNQSGRFENKSGKISKRGSPLLRHALFLAANSAIQNDENLKRFYTKKRSEGKHHFSALNAVAAKLLRIVYWVLKNNKEYQIQLN

SEQ ID NO: 401143 - protein, 309 aa, unidentified
METSVGIDVSKDRLDVVVLPQGEAFAVGNDDAGIDELIGRLKTIGADVIALEATGGFETQAVAALSSAGLAVLVVNPAQVRAYAHAIGRRAKTDPIDAAVIAAFVLATKPEVRPLRDAETQALSELVARRRQIVQMIVSEENRLRMVLAKQAQKSIKRLLAALRRELESLDADLDDHIRKSPIWRVRETLLVSVPGVGPTTARTLLAELPELGSLDRRQIASLAGLAPWTRQSGKWKGKSFIGGGRGKVRAVLFMAALVASRHNPSLKAFRDRLVAAGKPRIVAIVATMRKLLTILNAIIRDNKPWQNA

SEQ ID NO: 401144 - protein, 319 aa, unidentified
MNRKGVFVGIDVAKLRLDVAVRPDGELKTMGNDEKGWAQLASWLVELRPELVVVEATGGYEANVLAVLLEKHLPVARVNPRQVRDFAKATGKLAKTDKLDAQVLAHFAEAVKPEPRPIPDEELQALSELVARRRQLVEMLAAEKNRWHQARREVRGRIMAHVQWLERELDELDDELHTEVEKNTEWRETDEILRSTPGVGRVLSMTLLTELPELGHLDRKKIATLVGVAPLNRDSGQMRGKRAVWGGRASVRATLYMATLSASRNNPVIRAFYERLRKAGKLPKVALTACMHKLLIILNAMIKNRTRWHSTVATASGST

SEQ ID NO: 401145 - protein, 256 aa, unidentified
MDWLDIHQPCRGERRIANGGRELTAFARRAAREGAWVIFEATGGYDRPLCEALERAGARFSRVNPRQTRDGACPLAGRWPDPGARAIGVAAKTDRVDARLLADMGARLRPAPTEPTSQARRALQAQAARRLQLVEMRKQEATRLKQTANAEACADIRSHIRLLDRRIARVEARIAELVAEDEAFARTAQRLRTAPGIGPVVVAILIAELPELGHLDRRRIAALAGLAPVARDSGTTSGRARPAPSLSAPACPRGAT

SEQ ID NO: 401146 - protein, 405 aa, unidentified
MRIYVGIDWAEAHHDICVLDEAGTVLAKRRIAEGLEGVGQLHAMLADHAQEPDQVVVGIETDRGLLVGVLLAAGYQVYAINPLAASRYRERHVTSGAKSDPGDAKVLADLVRTDRHNHRPVAGDSELAAALQVLARAHQNLIWSRQRLVNQLRNNLREYYPAALAAFGTELAHPVALGVLDLAPTPARGRTLSRAKLAAILRRAGRERGVDEKAAAIQAQLRAPQLAAPALIGEAYGKSVASTVRILRGMNAELASLESELAPSFEKHPDAEIYRSLPGLGIVLGARVLSEFGDDRTRFAHPKARKNYAGSSPITTTSGKSRVVLARLARNRRLADACHQWAFCALIPSAGARDYYHRLRQRGKTHHQALRALANRLVGILHGCLDHRQTYCEDIAWPRSLTVAA

SEQ ID NO: 401147 - protein, 340 aa, unidentified
MFQNFIGIDVSKAKFDLALIKDCDKEHVIQAVFENTQKGIKAMTRFLGKECQVQLSDALFCMEFTGIYCRPLTTFLTERECNVWLEMPVNIIRSLGLQRGKNDRVDARRIALYAYKNKEDIKLRKPQRDIILKLRDLLSLRERLISSRKSLMAPIDELIAMGDKQGAARVKRGCKLTLTSIEKEIEQIDQDLDDTIKDDPQLKELYSLATSVPGVGKYTALFMICYTNEFSIYNNPKQLACYCGVAPFEHSSGSSVKGKTRVSHMANKVLKRMLHMGALSAISRDPELRDYYQRKIALGKNKMLVINAVRNKIIHRLCAVIKRGYEYQSENIFKEHLVLS

SEQ ID NO: 401148 - protein, 406 aa, unidentified
MNAVGIDVSKGKSMVAALRPMGEVALLPQEFLHTGVGLEQMAYAILALGEDTRVVMEATGRYHEPVAAALHEYGIYVCVLNPLYIKQSGGGSIRKVKTDKADAMKIAKYGLDNWVDLREYTPMDTVRQQLKLCSRQYNLYMKTVVSLQNNLISLTDKTFPGVNVLFSSPERADGHQKWGDFVMTFWHCDCICRVSENAFTERYQKWCKRKGYHFSTEKALDIYAGSCGHFTTLPKNDNTKLLITTAAQQLLAGKMTLAALRAEMTRLAMQLPEYETVRTMYGVGETTAAQLMAEIGDVRRFPRRSSIVGFAGVDPGVDESGKHSAKSVPTTKRGSPHLRKTLYQIVCTYLRKAPTDEPVYQFLDKKRNEGKPYFVYMTAAQNKFLRIYYARVKECLEAFDAQQGSV

SEQ ID NO: 401149 - protein, 443 aa, unidentified
MKYVGLDWASQAHDVTVLDEAGQVLDRWAFPHSEAGWLMTVERLRRQGLPDDLPVIVERTSGLVVDRLLSAGHPVVPVHPTAFFAARPRWGASGAKSDPGDSYKLADYLRTDGHRLRRLSPLDTGLQELRALVRLRDDHVRARTAASNQLTAMLDAYWPGPRQLFASLMSPIALSFLTDYPTPIAAAHLGEARMASFLRRHHYRGGKKAADLVARLRAAPVAPAGLPTATLAAMITAQVQLLRTLQQLISDTERLIAARVVAHPRTGLLAGLPGVGVINLAQLLAEVGPILDRVDSAEQAATECGAAPVTRASGKTTGTYFRWAVNTRARKAITSFAHNARLRDPWAAKLYADARARGKRHPHATRILARAWLRVIWACWASQQPYDPARHRHARSSHPPVPPPPANPAGAQARSRWSTPRLNDLDRAEHRHTIEGGGTLPQT

SEQ ID NO: 401150 - protein, 332 aa, unidentified
MEHCAIDLGGRESQVCVRRADGHLLHEERWPTASLPDYLRQLPPSRVILETAAEAFRIADAAREAGHEVRVVPATLVRTLGVGARKTKTDKRDARVLSEVSCRIDLPSVHIPSVRSREWKTVCGMHDALMSSRTKLINNLRGWMRGQGLRLKRGTAETFAERMRLLQPLPEYVAAQVEALAELTERIRVSTRRIETLAMGDEVCRRLMTVPGVGPSVAVRFVAAIDEVSRFDSAEKVAAYLGLTPGESSSSDHQQRLSITKAGPSTVRWVLIQAAWIVQLRCRGDAARPLKLWAAEIARRRGRLIATVALARKLAVICYALWRDGTTYQPRQ

SEQ ID NO: 401151 - protein, 344 aa, unidentified
MEITTIGLDLAKSVFQVHGVDVTGRVVVRKSLRRAQMLPFFTRLPACLVGMEACGTSHYWARELIKLGHQVRLMPPAYVKPYVKRGKTDAADAEAVCEAVARPTMRFVPVKSPEQQAALSMHRARDLLVKQRTQLVNMIRGLLAEFGIDIPKGLERALLMARRIVNGEAPDVPMEAAKIVGTLSQQVLDIHVRLREVDRDLLVWQRGNDVSRRLVTIPGIGPIGATALAASITDPHQFRSGRQFAAWLGLTPLQKSSGGKERLSRISKMGDKYLRKLLIVGMTSLVRRAKYNPKTVDPRLAALLARKPVRVATVAMANRTARIVWAVMVREETYRADHQPALAT

SEQ ID NO: 401152 - protein, 323 aa, unidentified
MGAHMDRDTKVERTFVGIDVAKKTLEVALGSRRKSRIFAVDAAGMKQLVEYAREVPNPHVCLEATGGYERHLVDALALAKIDCTVLNPLQARLFIRSCGKLDKTDRIDAQALALFGERMQPEPTLPPSVQQARLKELQARREQVQEHMQSEKNRLNLTRQRDVQQLIQDGLRAANKELERLDKLVRKALEEDDTLRKNAELLCSVPGVAQVTAAKLIALAPELGRLTRRKIARLAGLAPVARDSGEFRGRRFIGGGRPALRKALYMPTMVAVKHNPTLREFYQRLLKSGKPKMLALTAAARKLLTILNSIIQRKEPWKNTLNA

SEQ ID NO: 401153 - protein, 360 aa, unidentified
MRRAQFIGLDVHCQETEIAVLTQSGRLTKRMRVATTIPTLVEALRSMGPPGELVLEEGPLADWLYRNLSAYVDRLTVCDPRRNHLIAKDSDKDDPIDAEKLARLYRGGYVKAVHHPQSFDQAVFKQQVGLYHDRVRNRVRQANRVMAQLRRHGVFVHERAFAEPTSRSKVLAGLPKSKILRLQIECLWDGYDVAVEQVGAMRAVLVRLARKEPQIRRFVEIPGIHWIRGATFFVYLDTPWRFRSKSALWKYLGIGLERSHSGSGPERVQLPRAVNRCLKSAILGAAKSAIVSRNNPFADQYERWLDEGLGPRIARRNVARSQAAVMWGMWKNGEAYRPEWVGVRAAVEAMSGSSRDRESA

SEQ ID NO: 401154 - protein, 396 aa, unidentified
MTIVEDARPVIGGVDTHLDVHVAAALDDLGALLGTESFATTPAGYAELFDWLARFGPVARVGVEGTGSYGAGLCRSLLGRGIEVVEVDCPNRKDRNRAGKSDVLDAVSAARAALSGQARGLPKGGDGPVEAMRVLLIAKRSAASERVRALNQMRQLVFLAPDDIRARFHGLNVHHLTRQAAAMRPRPGHQVDYITLFTLRELGRRVLGLEDEIDRLDTLLEPIVADHAWDLLTLYGCGTFAAATLSVAAGDRPQRIRSEGAWAHLCGTAPVPAGSGKTNGRMRLNRSGNRLANSALHRIVLTRMASHQPTRTYVERRRGRRPKHTRDHAITQALRRPRDLQAPAPTRPLITPSSGVGLAPVSGWRELLLPQERRADPPQPINRGQRGLLEACPPSG

SEQ ID NO: 401155 - protein, 341 aa, unidentified
MKQFIRIGVDLAKNYFQVHALAKEGGAAVKRKLTRSKMHEFFAQIEPCLIGMEACGSAHYWARELKAMGHEVQLMPPAYTKPYVKRGKNDAVDAEAICEAASRPGMRFVPIKSAEQQATLMLHKTRELLVKQQTMSVNALRGHLSEFGIVVAKGIGRVDELLDLAESDTTLPEVAKAAVKILAQHIEGLDKSIDDLEKQIGRAHAQSEMSRLLDQVPGVGKIIASVISASVPDPSVFKSGRDFAAWLGLTPRQNSSGGKQTLGGITKQGNRYIRKSLVLGATSLLHVVGKRKGALRDWIVALLAKKPARLVTVALANKLARIVWTMMKTGECFRAERFARA

SEQ ID NO: 401156 - protein, 343 aa, unidentified
MQTITTIGLDIAKSVFQVHGVDAGGQVIIRRQLKRRQVLTFFEKLPPCLVGIEACASSHHWSRELQALGHTVRLMPPAYVKPYVKRQKNDMADAEAICEAVARANMRFVPTKTPEQQSCLMLHRTRHLFIRQQTAVINSIRAHLAEFGIVAPVGRKGVTELLRVVADSNDKRVPEIARACLAALGTQLLALKEQIVGFDRMILAWHRSNQTSKRLHYIPGVGPMLATALVASVADPSTFRSARNFSAWIGLVPKQYSSGGKERLGSISKQGDRYLRSLFVAGALAVIRYAKIHGTGHRPWLTALLARKPTKVAAIALANKIARMAWAMMAKGERYREPIALAR

SEQ ID NO: 401157 - protein, 325 aa, unidentified
MFYLGIDVSKAKLDCALFDSSTGKQKCKVVSNDLDGFAKLLDWLAKQKAEAVHVIMEPTGVYHEPAALALTDAGMKLSLVNPAQLRNFAKGLGVKTKTDKADSSVLARFGSTQNPDLWQPPSVAARTLKALLARRDVLAEHLQREQNRREMIQFSEVPAPVQESIAASIEFLTAELARLDQQIQSHIDDDPDLRGKKDLLETIPGVGPRVALNMTALLTARHFERAEQLAAYLGLVPVQWESGTSISGRPRMSKAGPSHLRKLLYMPAVVAIRANPHIKALYERLLIRGKPKMAAIGAAMRKLAHLCFGVVHTGKPYDANFTLRA

SEQ ID NO: 401158 - protein, 364 aa, unidentified
MTVVGIDAHKNWHTLVAVDDVGKRLAVLTVEARAAGHRQILSWLEQFESVQVAVEDCRHLTRRLEADLLNAGHRVVRVHTRLMAGMRRSGREPGKSDPIDAEAVARVALREDDLPTAELPGPMREVKLLSDHRRTLVARRTAMQSKVRWLLHELDPDLRVPSRALRRYQLLDELIDHLDGRPGAVAEIARDLLDDIRSLTRRINDIEKRLARLVAVSHPSLLEVPGMGVLGAAMIVGETAGARRFKSKDSFARFNGTAPIPVWSGNNVRVRLSRGGNRRINTALHMAAVTQIRIGAEGSVYYAKLIAAGKTRTEALRLLRRRISDRVFIAMRSDETRLDAGRAAAPECGPRDDNHALTALPAAA

SEQ ID NO: 401159 - protein, 389 aa, unidentified
MKIFVGIDIAKLNHFAATISSNGEILIEPFKFTNDADGFQLLVSKLESFDKNSIIIDPPSTAHYGDNLVRYLVAEFYQVCVLNPIKTCQMRKNNVRKTKTDKLDTFVIAKTLMMQDDLRFIGFYDLDMMDLKALGRFRQKTIKQRTRLKIQLTTYVDQVFPEIQYFFKSGLHQPAVYALLKEAPSPNEIASMHMTHLANLLKVNSHGHFTKEQAKELRVLAQKSVGANDSAISIQITQTIQQIELLDSQLEKIEAEMTDIMKFNDSVIMTIPGIGYINGGMILGEIGDIHRFSNPNKLLAFAGLDPSVYQSGNFQAKTTRMSKRGSRVLRYALVNAAWNVVRNNATFKAYYDAKRAEGRSHYNALGHCAGKLVRVIWKMLTDEVEFNLE

SEQ ID NO: 401160 - protein, 371 aa, unidentified
MSRKHTAKEFNKSNKWLVIGVDLAKYDNTIVGITEDGEVQIIERISTEDLLKLASEIQPTTFAMEPCNGANILSLNLQAKGHEVKMISGAAVKDWVKVHLAGQKTDRNDALALAHLSRDTMLKPIRTKTVPEMRMQSIYAARKQLVKCRTSILVSLKGISQAWGILFSAQRRNLKKMKESLEDKVELLSQPVVDAMIQMIDSIARLDKEIEALESVMKDQLSQDERAQRIQSTLGIGFVGTHRLLSTCGDPNRFKGPKSFAAYYGLVPNNKSTGHNYRVGKCSCHGDAEMRSCLYQAAAVLYMQNVKHMLPECALKQWIDKKVSQKMMWGKMIIALAAKLARILWALLKYDAYFNLSKAGLSRSMLVQQTN

SEQ ID NO: 401161 - protein, 353 aa, unidentified
MANTIIETIGCDLGDKKSEICVLDAEGDIKLQVSVRTTRKGILAFFTRPAAHVVIEVGAHSRWVSSLLRGLGHQVTAANPRRVKLISESDNKTDRHDAELLARLGRTDVKLLAPVEHRTPQAQADLALAKARDTLVATRTKLVNHVRGTVKSFGERLPMCTTESFARQTRVLVPAELKPALEPIYQVLDRLDEQIKEHDKLIQRVAKRHVDVDVVSQISGVGVLTALVFLLTIEDKNRFAKSRMVGAFVGLRPRKSKSGDGDPQLRITKAGDPFLRRLLVNGANYILGPFGKDSDLRRWGLELAKRGGKNAKKRATVAVARKLAVLMHRLWVTGEVYEPLGHQSRRTEEAAAA

SEQ ID NO: 401162 - protein, 411 aa, unidentified
MEAAVITAVGIDVSKSKSTVAVRRPGGEIVLRPFEVHHTNSDLKKLTSTLKKLGGDIRIVMEHTSTYWRPIALTLKEAGFFVSVVNAMLIHDFSDNTIRKLKTDRADALKIANYALTFWDTLPPFNSEEETRLLLKMQSRANERITATATALRNGLIALADQTFAGVNIAFAPNTKNANGHEKWVDFFLRYWHKDCVCQYSMEAFTESYRGWCKRKNYKFRTDTAHKIYLLAQEGVATLPRCESTKMLITQACKSLNAVCEAKQSTQLEMQRLAAMLPEYEVVMQMEGAGPITGPALMAEIGDVRRFKNKKALVAFAGIDAPPFQSGAFESKARHVSKRGSPHLRRTIFIISNIILTRSNPENAVYCFMDKKRSEGKHYYVYTIAGSAKFLRVYYARVTEFLRSQPSSDAC

SEQ ID NO: 401163 - protein, 431 aa, unidentified
MTATDSTARDRVLVAIDIAKAKHEVLVELPTGKRRKMIVRNELSDFRQLADYLKRLEGALEIALEPTADYHRNLAYFLKAQGFAVKLVSSIAVARTREALHNSWDKNDPKDAQVILHLLRNGNTQYFYDPVIEQTNDLQELSKTHFQVSLRKTRVQHSLLNHYLPLYFPEAERFLSTSRSSWFARLLFEFPTPQAITQLTENEFLERGSQLLRRKQSKAAVLRALYAKAQESVALPVPLESQAIATFRLTLAQHLELCRIRTELEETAHELLQDQLDYQILRSVPGVGPIIALTVLAEAGDLRRFGHERQFLKFCGLDLATSQSGAYRGRTQLSKRGNSRLRSALWMAARRATHMQENTFRQKFSRYLRADPTNTDLRRNAYTACTAKMARTIYGMIKHQQFYRAYREDAIPEPGGRTRSHGPLRQAAAVA

SEQ ID NO: 401164 - protein, 311 aa, unidentified
MSGPQYLGLDVAKASVVLASEPAGRTGQFATDPAGLAALVAACQAQPVTLIVLEATGGYEAPVAAALATAGLPVTIVNPRQVRDFAKALGQRAKTDRIDAQVLALFGARVQPTPRPLPDEATQELEALLARRRQLLEMLHAERQRLPWARGREVRRNLRAHIRWLEHGSIDADAELERLIQQSPVWRVQDELLQSVPGVGPMLARTLLGLVPELGQLDRRQIAALVGVAPLARDSGTLRGRRTCWGGRPAVRTVLYMAALTAARYNPVLRPFYQRLRAAGKPAKVALTAVARKLLVVLNAILRDQRPWAYA

SEQ ID NO: 401165 - protein, 343 aa, unidentified
MNIATIGLDLAKHWFQIHAVDALGQTVVRRKLRRSEVIGYFRSLPPCVVGLEACATAHHWARELAALGHDVKLMPPGYVKAYVKRNKNDAADAEAICEAVTRPSMRFVPVKTAEQQSVLMLHRARGLLVRQRTMLVNALRAHMAEFGIVAAQGLRHVEDLIRQLAHEQERLPELARSILQVIAAQLNDTMARVHDIEVRLAKWHRHNALSRLLATVPGIGIIGATAIAATVTDPSLFRSGREFAAWLGMTPRQNSSGGKERLGRTSKRGDKYIRCLLVAGAVAVLRHTRNRTTKDAAWVRRLLARRPTKVAAVALANKSARIAWAVMTRGEAYRSANEVVHLA

SEQ ID NO: 401166 - protein, 352 aa, unidentified
MQTIKTIGLDIAKSVFQVHGVDASGQVVVRRKLKRRYVLAFFEKLPPCLVGIEACASSHHWSRELQTLGHTVRLMPPAYVKPYVKRQKNDAADAEAICEAVTRVNMRFVATKTSEQQSGLVLHRTRHLLIRQQTAVINAIRTHLAEFGIVAPVGRNGVEQLLNVVANPNDKRVPEIARACLLVLGAQLQRLKGQILEFDRMIRAWHRSSETSRRLDDCPGVGPALATALVATVADPKSFRSGRNFSAWIGLVPKQHSSGGKNRLGSISKQGDRYLRGLFVAGALAVIRYAKIHGSGHRPWLAALLARRPTKVAAIALANKIARMVWAMMAKDERYRSPLRLRRKRDRAGHLA

SEQ ID NO: 401167 - protein, 410 aa, unidentified
MEVLHPRCAGLDVHKDLIVACRRRIANGKIESEVQSFDATTRGLTELATWLGEFEIVQVVMESTGVYWIPVWNVLEEQGFTLTLVNPQHIKNVPGRKSDVKDAEWLAKILAHGLVRASFIPPAPQRELRDLVRTLRHFIEDSGQQVQRMQKVLQSCNIKLDSVLADITGASGVAIIEALIAGESDPNKLAGLVHRNVKAPRKTLVEALQGRVNVHSRFLLKLHLDTFRDLQAKIERIDAQIDEALRPFEQALALLSTIPGVGPGLARTIIAEVGVDMSRFPTAGHLVSWAGLCPRLDESAGKVRSRLVRKGNKHLKTALCQGVVAGLRCRKKNYLQAQFHRLKARRGGGKAIIAVAATILSSVHAMLTSAQPFRDLGNQYFLKRDQQKVVARLARQARELGYELQPCEAA

SEQ ID NO: 401168 - protein, 370 aa, unidentified
MGNASTLHVGLDVHKESIAVAYATEDGATAPVPLGAIGTRQCDIDALVRKLQSKSARLVFVYEAGPCGYWLYRYLTRKGLTCFVVAPSLIPRKPGDRVKTDTRDAVTLARLARSGDLTPVYVPAVPDEALRDLARAREDALHDLNAARFRLKALLLRNDVRYVGRANWGAEHRRWLARFVFPTPAQQIVFQEHVRTVTERTELLQRLEAELLEQAKTWRLSPVVEALQALRGVQFTVAITTIAELGDLTRFDTPRQLMSYLGLTPSEYSSGERRRLGGITKAGNRHARRVLIEAAKAYRHRAKVSEQIQVRQEHLPAVIRDIAWRAQVRLCGRYRKLLARGKHPNTVAAAIARELAAFMWAIAKARPVPA

SEQ ID NO: 401169 - protein, 322 aa, unidentified
MNKYKETFGVDISKDVFDVHGSNQGHDQYKNDEIGFKKFLKELPKSSLVVMEATGYYHYRLAQFLYKKGVVVSVVNPLSIKRFIQMKLAKVKTDKSDAKAICEYALINEVPIYNALTDTQSECLQLFRLLDAYLKQRTATKNKIHGEAVLGIPSKFVYRSLIRNKKQLNKEVTAIESKILSLVKEDQQEQLTLLTSIPGIGQKTALFLIVVTDGFSKFETASQLCSYVGITPTIRESGSSVRGRARISKVGNRKLRNLLFLCSFNACKHNKACREVYERIVNKGKSKKLALIAVANKLLKQSFAIAKSGRPYDEAYVSVLPK

SEQ ID NO: 401170 - protein, 347 aa, unidentified
MRFYNHQHQYYCGIDLHVKTMYVCILDATGQVLVHRNLPSRPDAFLEVVAPYRDDLVVAAECMFTWYWLADVCAAEGITFILGHALAMKAIHGGKAKNDKIDSHKIAGLLRGGLLPQAYVYPAAMRATRDLLRRRLHLVRKRGQLLAHIQNTRAQYNLPAFEKRLAYPGNRDGVVERFSDPSVRKSIEVDVVLIDQYDALVNDLELTIVREAKRHDGNAFHRLRSVPGIGKVLALTILYEIHDIHRFDRVQEFASYARLVKCQKQSGGRTLGTSGAKMGNVHLKWAFSEAAVLFLRHTKGGKKLLTGMAKKHGKGKALSILAHKIGRAVYYMLSRGTVFSMEKFLAA

SEQ ID NO: 401171 - protein, 427 aa, unidentified
MNNALTTTLFIGIDVSSKSNYVFALDFFGKKLLSFQVNNNLPGSEEIVSTILSCLKENNLTHLTIAMESTSFYSWHLANTLATHEALVWFKPKVHCMNPRVICAYKKSFIDMDKTDPKDAFVIADFARVGKITTAPWNGAQYIALQRLTRCRLHLMENISREKSYILSNIFLKFSELAVLDKSENPFSNTFGATSLAVLTEYMSTEELANASIEDLVAFLVEKSKNRFSNPEATAKLLQKAARDSYRLDKALYDPLNATIAASLNCIKALEKEVKGLDKAIEKAIKRIDNHEFQCLLSIPGIGPVLTAGIISEIGDIAKFNNQGCVAKYAGLTWRKKQSGNFTADNTFLTKTGNKYLRYYLLEAAASVVRHSDEYRDYYHKKYDEALVHKHKRALALTGRKLVRLIFALLHNNQLYTSKEVVGKAII

SEQ ID NO: 401172 - protein, 319 aa, unidentified
MFNLGIDVAKAKLDCALRLPNGKHRNKVVENNHKGFIALSEWLLKQDAGSPRVCMEATGTYWEKVAEYLAGCGMLVSVINPAQIKAFGASRLVRTKTDKVDAQLIADFAHERQPEPWLAPSPAEQALRAMVLRLEALQTMRQQECNRLDVAREAVRKGIVDHITWLDGQIKELIQAIKRHINDDPDLRGKSELLDTIPGLGERSIPVLLSYYANPERFDSAKQAVAFAGLDPRQHESGSSVRGKPRMSKVGHSFLRKALYMPAMVTVHRTAWGKRFGQRLRAAGKAKKLIIGAMMRKLVHVAFGVLRSGKIFDPTLHAA

SEQ ID NO: 401173 - protein, 345 aa, unidentified
MTQYKRIAIDTSKAVFTLHGIDQQDRPVLRINLRRAQMLPFFRKLPSTEIAMEACGGAHYWARQLITLGHEVRLIPPQYVKPYVKRSKNDRNDAEAICEAAGRPGMHFVPVKSVTQQAQGMVLKVRETLVGQRTLMVNTLRGHAAEFGVIAAKGLHQVGPLLAAIEQETAIPPEAKDMAVLLGQQIAELDTRIKEIDVKLNAAHKANEVSQRLATIPGVGPVTALTLAIEIDPAAFESGRHLAAWAGLTPKEHSTGGKQRMGGISRAGNERLRVLLVAGATSVINAAMRPGSQLMTGWLRDLLARKPRKVVAVALANKMARVAWALMTRGEVYRRPVAAAVAAAA

SEQ ID NO: 401174 - protein, 337 aa, unidentified
MKYCGIDLHSNNSVVVVSDEDDRIVLQKRLPNDLSLIRSALEPHREELTGVVIESTYNWYWLVDGLMDTGYRVHLAHPSAIKKYEGLKYSGDFADARYLAHLLRLGLLAEGYIYPREERGARDLARKRMQLVRYRTAQILSIENILARQTGARMNGEAVKRLTAEQVEELGFMPDVALAVQANRAVSQTLGQQIERLEKRLKERVRLRDEFKLLKTAPGIGEILATTIMLETGTVERFAKVGNFSSYCRCVDSLRESNDKKKGEGNAKNGNKYLAWAFVEAANFARRHCPQAKSFHERKKRKSNGILATKALAHKLARACYHMLREQKPFDVSRCFG

SEQ ID NO: 401175 - protein, 312 aa, unidentified
MNDTIGIDIGKDTLVIHRLPDTATLEVGNNKAGLTTLLRWLGRDEALRVVFEPTGPYHRLLEKTLAAANIAMIKVNPRQARRFAEAIGRLAKTDRVDAAMLARLGATLDLQALPPKSEILHDLRELRVSRQGRVKDRIALTVRLRHANLALIKHQLRLSIRQVEAHLAEIDAAILEAVRADEALSQRFDILTSIPGIGEIAACAMLIEMPELGQLEARQAAALAGLAPITQQSGKWKGLAHIQGGRAGLRRSLYMPALVATRYNAPLREKYQKLIASGKAAKIAITAIMRKLIVLANALLRDKRNWTPNTSC

SEQ ID NO: 401176 - protein, 314 aa, unidentified
MPERMFVGIDVSKARLDVAVLPSGEVFAVTNTAPGLTELLIRLSDIQPHLVVLEATGGLEQGAMLAVHDAGLPVTVLNPRQVRHFSRALGKHAKTDRMDAVLLARFAQTLQPEAHVPSDASQRALEALLARRRQVVDLLTMERNRLHSSRDAYVQGDVQDVITYLEGRRAQLDQALQDAVQHDPKFQATYTVLTSTSGVGPVMAFTLLAQLPELGSLSRQKIANLVGVAPLNWDSGKSRGHRRIWGGRAEVRQVLYMSAVSAVRWNPTLKAVFDHLVQKGKPTKVALVACMRKLLVYLNAMVRDQAPWHAQPAA

SEQ ID NO: 401177 - protein, 488 aa, unidentified
MKPDSPALYVGMDVSKGYADLHAINHARSVYATGRFDDTREGHERVLKVLTQWREQHPGAAMCVGVEASGGLERNWVRMFHERMPGVTVARLNPLAVKRSLAVKVHRSVTDQGSAAGIATYLAEGRPLHETRWDPRREGLQELYRDIRARIEHLQQTKNRLQSLLPRVHPGLVEFTRSDFAKWLLTVLTRYPTAPALACARVEDLVHIPYFKDEARAVEMIEAAKVSVAGQTDTLTARTVVSLASEILHQQQQIKALQDAMYEELKDDPGIRAMSSITGIGKWSAVCLRVEIGCVERFPTAEALTAYAGLDPVYHQSGDKTRVCRISKHGRRQIRAVLYMCVCSALRSNPVIDVFVNRLIAAGKPKMVALTAAMRKMLHLAYACWISETSFDPNHEQARRARRALAPRPDAAVPATNDEASHVANHPSIEETNTVVHDEATGGTAHAVTVASAKPGTVLPRISAPVSRREAQRRRRSAEEQSKRQRPE

SEQ ID NO: 401178 - protein, 350 aa, unidentified
MKKLSKTQKQMPKETIGIDLGDKMSRYCIVNQDGEAVEEGSFRNQVSSLEMHFAGEPRRIALEAGGQSAWISRELKRLGHEVIVANARELKWITASDTKNDPVDARKLALLARADVHLLAPVEHRTAEQQAELAVVRTRDAILRARTLLINSARGIAKGFGVRLPKSITSTFGKRALVDLPILLRTPLEGLLGQIDSLTQQIGNYDQQVGQLAGQRPEVNRLTSIPGVGALTAVTFVLTLGRPERFPHSRDVAGFLGLRPRQRQSGARDPQLGISKSGDPYLRKLLVQCAHHVLGHWGKDSALRRWGLAKTEGGKKATLRAIVAVARKLSVLLHRLWVSGEFYKPFPNMV

SEQ ID NO: 401179 - protein, 406 aa, unidentified
MSIIERFCGIDVHRDLLVVTILNDKSKETKRFVNDQDDINNLKNWLKTHECKRAVMESTSIYWVPLYLALEESGFDAMLANAHQVKAIPERKTDQSSSEWLAHLLRGGQIKPSYVPEKHVRDLRELTRLRVKLVENRSAYKNRIQKVLNRVNIRLGSRLSDVFGKAGKEILEGLMAGKTIDAILEHTQNKWLKNRSDEIRVVAKGALSENDIFVLKQLTETVEHLNDQISQVDDRIEMLVNQRDVAIVSSVPGVGKKSAAAIVAEVGDAERFADGKKIAAWAGLAPSVYQSAGTFVTGSITKMGSKWLRRVLVEAAHAAVRVRDSRLRAFYLRVKAKKGEKTAIVAVARKMLTIIWHLLVKGENYVEEGFEKTVRNMKAVYRGHVPLEQMAEILRSAGFVVSGPDG

SEQ ID NO: 401180 - protein, 350 aa, unidentified
MLIIGCDYHPSFQQIAFVDTDTGELQERRLEHREEAEKFYRDLAAQGIEVRVGMEASGHARWFERLLAQLNFELWIGDATEIARKRERKQKTDRQDAQHILKLLLKDDFPKIWVPSWENRDLRQLLWHRHCMVQARTRIMNQLQAVALNEGLRCKKRLWREHGRQQLESFRLAPWASRRRRDLLELLDRLNPTIAELSQAIEHEAEKVPEARCLMTHPGVGPLTALAFVLIIGSADRFQCGKQIAAYLGLVPLEDSSGNRRRLGHITKQGSSMLRFLLVEAAQVTVRSLPEWRSKYFHLMMRRGRKIAKVAMARRLAIRLYWMWRKGWDYEQVKKFGSHAGTLGTGRGVQ

SEQ ID NO: 401181 - protein, 401 aa, unidentified
MQLLYRRCCGLDIHKAAISVCVLIQREGREPEYRKRSFESFTDDLARLRRWLAQCKVTHLAMESTGVYWKPVWNVLEEGPWEMLLINPQHFHGIPGEKTDPKDSRWIAELLAHGLLRPSFVPPQSIRQLRDLTRYRVHLKQDRNRIHNRIHKQLEDANIKLDCVASDILGMSGRAMINALIEGRNGPVYIADHAARGHLRKKVPELARALKGRITAHHRLMLAELVRDLDATDEAIRRIEATLVERTLPYQDIVERLATIPGVDLITAWTIIAEIGTDMSRFGDADHLVSWAGLCPGLNESGGKRRSGRTRKGDRYLKRALCQTAWVISHTKDNYLTALFYRLAGRIGIKKATLAVAHQVLRIVFHIIRDGAVYRELGGNYFDRLHPEQTTKRLVRRLEQL

SEQ ID NO: 401182 - protein, 345 aa, unidentified
MEKTKYFIGLDISADDFSASCITTPDNIIFSAQKFQNNLDGFSEFFAFLLSREIKPTETIVCMESTGVYCEGIAYFLYSKGFNVSIEAPHKVKQKIKDTPRKNDFIDSLAIAEYSYRYLDKLPIWKPQVEILQQLKTLLSTREHLVTQKTASENVLKTLKRKYIQTPLALEIYEENIKKFNEQIKQIDKEIKALIEKDDNFKTKIDLAMSVPGIGLLLATNLLVLTDGFTKHLNYKEIASYVGICPYEQISGRTLHKQPRSKRYGPSRLRKLLYLAALSVATYNLNFRKYYLRKIEEGKSKRLVLNNIENKLLKIIFAVIKSGTKYIENYRSVNPIYLKKCLTMS

SEQ ID NO: 401183 - protein, 365 aa, unidentified
MTEGTCFVGLDVHARKTAAAAVQLGSGEVFRAQLPGTSPAVTVEWLQSLPGPVRAVYEAGPTGFGLARAGRAAGLEVMVCAPGAIPKQPGDRIKTDTRDALKLARLLAAGQLRPVTVPSLELEALRDLVRARDDVRGDLMGARHRIGKLLLRRGMVFPGPGEPWNSQRHLAWLGRIDLGEPLAQTVLGEYLACHEVLLARRTRLDGLIADQATRGPWAPTIARLRCLRGVETLTAVGLVAEIGDFTAFEHPRQLASFLGLVPSEQSSGTKRRQGAITKAGSSHARRLLVEAAWHYRRQPAVSLALSRRQHGQPPAAVEAAWRAQLRLSGRWAHLDARRGKRRTTVAVAVARELSCFVWEIARQPD

SEQ ID NO: 401184 - protein, 350 aa, unidentified
MPQRNMPRQAAVYGIDIGKNIFHVVGVGSDGVPVQKVRFRRDTLLHFFERAAPAIVGMESCAGSQWIARKIQALGHKVRLIPAQFVKPYVKSNKSDIIDAEAIAEAATRPTMRFAALKSEEQADLQALHRVRDQMIGTRTRLINQMRAFCLEYGIALRQGAGLFKLDLPQVVADQSNDLSPPMRKLLSDLFADLRQLERRIGDVTREIEAIASREDAARRLMTIPGIGALGATALLAAIGNGRQFQKARDLAAWLGLVPREYSTGGKQKLLGISKRGNRYVRKLLVHGARSCFRHLNRTRDRLGNWLDGLQARMHPNKAVVALAAKMARIVWVVLTRPGALYERRDPAFT

SEQ ID NO: 401185 - protein, 374 aa, unidentified
MQSIVYVGMDVHVENYTFACYEESKGIYAQNQVKDADWKSVVKYLEKIQKNRPGEDLHFVCGYEAGCLGYSLYYELLKAETFVSLDCIIMAPTTMAVQGNKTKTDRRDACMIARNLAYGTYSRVYVVDDEDNGVKDFIRMRDDTKTRCKSIKQQLLALCLRHGKRYSEGINWTARHREWLRKQDLGEKNSNKALQEYLHQLSQAEEDLERYDREIEMIAGEEKYSEKVGQLRCLRGIQTASALAIIVEIGDFHRFPTAEKYAAFLGLVPGEYSSGGTVNRTSITKQGNTHLRKIMVESAHSYAKGSLYVKSKAMKAKQRGQSQDIIDYCDKENLFMARKYQRLCARGKNCNIAKTAVARQLACSVWAIMTGNIT

SEQ ID NO: 401186 - protein, 320 aa, unidentified
MTKKKSKSFIGIDVSKQQLEVAVHGSDYQFRCANKVSAFGELIAELIALRPALIVLEATGGLETRVVRALHTAGLPVVVVNPRQVRDFAKALGQLAKTDRLDARVLAHFAAAIKPPLRPIKALEQQELDALTGRRGQLVEILDDEKNRQVSAASDTVRDQIKQHIDWLQDRIAELEAQIKVLLQTSPRWQAKDQILQSVPGIGPVASFSMIADLPELGTLNRQQISKLVGVAPLNRDSGQQRGTRHIYGGRAQLRRLLYMAALTATRHNAVVKEFYQRLLANHKPFKVAITACMRKLLTIINVMIRDSTTWRIKDEPISA

SEQ ID NO: 401187 - protein, 368 aa, unidentified
MIVIGADTHKSTHSFSAVDELTGRIVAEKTLAADERGMLATLRWAQSLEDQERVWALEDCRHVSGRLERALVAVGERVIRVAPKLMGESRRAERDSGKSDVIDARAIGRGVLKDGIDSFPAAFLDERAMEIRLLADHRADLIAERTRMQSRLRWHLLELDDKLEAQVPAGALSHVTWLDRVDRRLRRLPQSARVGVARDELRRIREHTRTANELERQIKQLVADYRPELLELKGCGTLSAATLIGRTAGAERFKTDGHFARQAGAAPIPASSGRKDRQRLNRGGDRQLNAALHRIAVAQGQWHPPAKAYLARKQAEGKSRIEALRCLKRHLARTVWQLLRDHPDRMNSLSINNINNNANAPAPALALT

SEQ ID NO: 401188 - protein, 335 aa, unidentified
MNNIALIGIDLGKHSFHVHCQDNSGRALIRKKYTRAKLFEFLANTPSSKVVMEACAGSHFMARRISSLGHEARLISPQFVRPFVKTNKNDYVDAEAICEAASRPSMRFVQPKTENQQAMQAMHCIRDSLIRDKVKTTNQMHAFLLEFGIGLPKGTAVIKRLSTVLTENELPPYLVQMLTRLHAHYCYLESQIKELDQLLQQELKPDDTGQRLLTMPGIGPITASILSSQLGDGKQYASSKDFAASTGLVPRQYSTGGKNTLLGISKRGNKNLRRLLVQCARSIMIHLDKYSGSLANWIRNQLCRKHSCVVACALANKLARIAWAITTSKTDFKFS

SEQ ID NO: 401189 - protein, 341 aa, unidentified
MQNVTLVGIDLGKHSFHLHGQDKAGKAVFRRKLSRKQLVEFFATFHACTVVMEACAGAHWMARKLSQFGHTVKLISPQFVRPFVKSNKNDFVDAEAICEAAARPSMRFVTPKTESQQTLAALHRVRQALVRDRVCTINQMHGFLLEFGVSLPVGYAVVKRLSVVLAEHQLPPRLVAILERLHAHFKYLTQQIVDIEKELDRQLAEDPVGQRLLTIPGVGPITASLLASELGDGKQYRCGRDFAAAVGLVPKQYSTGGRANLLGISKRGDKNIRHLLVQCARALMLRLDKQSGRVVDWVRAMLTRRHSSVVACALASKLARIAWAVASSNTVFDRQASVPAL

SEQ ID NO: 401190 - protein, 428 aa, unidentified
MNQTELSRVKEFRQLKIEIQASDTYLIVGIDVAKERHHAFFGTGTGKTLLKKLIFDNTSAGFSELLARVEAVRAQNGLSDIVFGLEPTSNYHKPLGRYLISKGCHVVLVGGKAVKNNRELLDERWDKHDTKDAANVADLVSRGKCFYYDTPSREIEELRDLLSLRARLKKEEHSLSLRIRNNLLAKHFPELDSFYSACEKETLAIVRWCLNPQKIAAMPFDQFFKLVATSGRGIAQKLRLQKIYRLAHESIGCPVGCAVELQAALLVEKIKQVREQISEVEQGIQQLCAQFPAYEDLLSIPGFGPYVASKVLATIADPWRFDSAKQVIRTAGYDLCAERSGKRSDQAVPVISKKGNSQLRYALYQAAMIASSRHRFFIPYFARMLQGRERERGIRTKMRVKLAAKMLVIAWTLMKKGEPFNPEYLNLQ

SEQ ID NO: 401191 - protein, 374 aa, unidentified
MEEFSKYVGMDVHKETIAVAVAEARGGEARYLGEITNSAEALQKLVKQLRKGDAGLSFCYEAGPCGYGIHRQLTELGWDCQVVAPSLIPKKAGDRVKTDRRDSLSLARLHRAGELTAVWVPDGAQEALRDLTRAREDMKHLQRQAKQRLLAFLLRHGKRYAGKSNWTQAHDRWLEGLKFSLPVQQIVFQEYVDTVKLLSQRVAALDQQMADAAGQSVWWPVIEALMALRGVSLLTATTIVAEIGDLQRFASAPQLMAYLGLVPSEHSSGGSKSRGGITKTGNGHVRRVLVEAAWTYRHPARKTACLQRRAERTSEAVQDIAWKAQKRLCARYRSMEGRGKLKVQACTAVARELAGFIWAIGQALPQPATQAKGQ

SEQ ID NO: 401192 - protein, 341 aa, unidentified
MKNKSFIGIDISKNVIDVSIFCEETPIKDFSHDVFNNSRKGFGEMCTWLKKNHVVLSNSLFGMEFTGSYSMELEKFLYARNYQFCMLSTHVVKHYPMGPKDKSDKIDSAKIADFLYRYNGTECVKPYNMPDKTMQRLKALMNERKFLVEQRTCFMNRRQLCITKEDAQLYDGYIKKFSRDIENIELEEQKLLATDDSLLSTYKNLLTIPGIGFVNAINVIVITRNFTAFETARQYASYVGVAPHSHTSGTSVRWRPRPSARCDGQAKADLSMAATVAVQYDAELQSFYNRKLGGKQDSDTKRKALNAVKFKLVLRMFAIGKQNRKWEPLDSKSSNEKLAIS

SEQ ID NO: 401193 - protein, 415 aa, unidentified
MEPIHKRVAGMDVHRMEHVATILLEQEDGTVSNETHKFGGFKRDMRALVDWLRSHRIQLVVMESTGIYWKSVFSHLEAAGIPALVVNAFHVKNVPGRKTDVSDSEWLAQLARFGLLRGSFIPPKDLRELRVVSRYRRKLVQTLTGEKNRLHKVLDDAGIKLGGVVSDIDGVCARKMVEGLIAGKTPAELSALGRGKLKSSDEVLQASMDGDLSPRHRLVLSTAWNHLRYLEQQVAQLDRYLIEAIKPYAWAWRLLQTIPGIDEISAAMILIEIGVDMQRFGSASRLASWTALCPGNHETAGKRKSGKIRHGNPIVRYLLCEAANATRRTKTVFQAKYTSLVIRRGHKKTIIAIAHKLIRTIYFVLTRRKPYHDTTVDYEAAIVARNAPRWIKALKKYGYWPKAAAANPATATAMA

SEQ ID NO: 401194 - protein, 353 aa, unidentified
MLAEVVDAVIGTGTHRDSHEVEIADLAGRPIATMRIGNDSKGFAQLLAAIAEVVPGPRVLVLVEGTRGYGIGLARALAAAGLRVIECEQPRRKQRRGKGKSGPIDAHLAVLAALRLEANRVAVPRADGDREALRILLVACQEITVACKAQASGLRALLLAGDDTDRRAARTTLSKTALAALAGRDLPAGASREQAVRHAETARLALAIGQARGQLNGSHAQLLAVVGDIAPGLTSRYGIGPVSAAQAIVSFSHPGRCRREAAFAALGGTSPLPASSGSTIRHRPNRGGDRALNRAIHAIALTRMRSCPRTRAYAARRTAEGKTTREIRRCLKRYIARELYRQLTRSMKPLTNP

SEQ ID NO: 401195 - protein, 410 aa, unidentified
MRRIRDRVAGLDVHRDSVVACVQLFENGEVRVEKTRFKTTLGGVRALAGWLADREVTTVAMEATGVYWKPVFYPLEGLFAELWLCNAQHVKNVPGPKTDMADAEWLADVVAHGMVRPSLVPAEPIRAVRETTRYRKTLVITRGQEIQRLDKVLQDAGIKLSSVASTVLSKSGRAMIEALIGGERDPEALAEMALRRMRAKIPELVEALEGRFRGHHALLCRQIIDHIDFLDRQIGQLDETIIEALRPFEPAIELLCSIVGWQRRTAEVFFAETGGDMTKFATAAHLAAWTRLAPANHESAGKRRSLSQRPGNSWLGRALIEAARAAARTKDTYFAAQYRNIARRRGPNKATVAVAHSMVVAAWHILTSGEPYQDPGGDYFQRRRDPQRQTDRLVRQLRDLGYDVNLKPAA

SEQ ID NO: 401196 - protein, 446 aa, unidentified
MSNEVAVTAAAGEPEWAAFVALDWADQKHYWRLAVAGSQKQEQGELDNTPEAVAAWAADLNVRFGGRPIAVCLEQTRGSLVYMLLKFPQLVLFPVNPKMAACFREAFYPSGSKGDPGDTEVLLDILVHHRDRLRRLKPDTVETRLLQRLVEQRRLMVNERTRQSNRLTACLKLYFPQILKWFDDVTSPLVGALLERWPNLEQLQRAHDGTLRNFFHQQNCRSKERNQERIEAIRQAVPATTDAAVLEAEATAAHCLVKLIATLRDNIAELDERIAKAFAAHAEKGLFDGLPGAAAVLAPRLLVAFGTDRERFASAHEMECYSGIAPVTTASGQSKWVHFRWACPKFLRQTFHEFAGHSIAKSQWARAFYDLQIGKGKEHHAAVRALAFKWIRVLFACWKNRTPYDEQIYLQSLRKRNSPLKDFLPPGAALGWKDVAGFQKFSEDPS

SEQ ID NO: 401197 - protein, 351 aa, unidentified
MQTITTIGLDIAKSVFQVHGVDAGGQVVVRRQLKRRAVLAFFQKLPSCLVGIEACASAHHWSRELQALGHKVRLIPPAYVKPYVKRQKNDAADAEAICEAVTRANMRFVPTKTPEQQSGLVLHRTRHLFIRQQTAVINAIRAHLAEFGIVAPVGRHGVEELLNVVADPNDKRVPEMTRACLSAFGAQLRRIQEQVLEFDRLIRAWHRSDEMSMRLDEAPGVGPVLATAVVATVADPKSFRSGRNFSAWIGIVPKQHSSGGKNRLGNISKQGDRYLRGLFVAGALTVIRYAKIHGTNIAQGCGYCACQQARANGLGHDGQGRAIQGTRRACGVNEIAPDNRRDVKVGRANST

SEQ ID NO: 401198 - protein, 343 aa, unidentified
MQIHSVGIDLGKTTFHIVVLGAAGKVVVKKKLTQRQLLTFTANLQTSLIGLEACAGAHFLGRALQKQGHDVRLIPAQFVKPFVKSNKNDFVDAEAIAEAVERKNMRFVPIKTDDQLDLQAIHRVRDRLISRRTAVINQLRAFLLERGMVFAQSPTKLKAAMADVLENADANLTPQMRNLIDILWSEWKTVEQQINELTEQLERISDADAGCTRIRQIPGIGPIVATAIVAAIGNGAAFRKGRDFAAWLGVVPRQYSTGGKAKLLGISKRGNVYLRKVLIHGARAAVLRIKRDRAAIGPWLDRLDARAPKNVVVVAMANKLARIAWAVLSSGQDYRPSPIVAAA

SEQ ID NO: 401199 - protein, 410 aa, unidentified
MEVLYQRCCGLDVHKETVVACLRIVSGGEVVREVRTFETTTASLMALSAWLAENGCTHVAMEATGVYWKPVWHILDDGDFQLILANAAHVKNVPGRKTDVNDATWLADLLAHGLIRASFVPDTQTQELRTLLRTRKQLVREKSSHILRVQKTLEDANIKLDSVITDVMGMSGRAMIEALIAGESNPAKLARLANYRLTAPQEKLREALRGRVTKHHRFLLRLHLNQIDALDAAIATVDQQVQAGIAPFRCAVELVTSIPGVSDIGAQVIVSDIGTDMSRFPSESHLISWAGMCPRNDESASTRRSNRVRKGAPWLKTTLVQCAWAAVRKKDSYLKAQFLRIKARRGPKKAIMAVAASILTATYHMLKDGTLYQDLGSNHFQTRSKGQQTKRLVQRLADLGYDVALTPLAS

SEQ ID NO: 401200 - protein, 371 aa, unidentified
MLYLGIDQHSKQITVCVRNQDGEVLLRRQVSTRPTKIKEFFDDLLERDVEFMAILEVCGFNDWLIDELKRRQCRDVVLIHPDKTSKKKTDRRDANKLCELLWLNRDRLAEGKRVQGLRRVQIASHQDTDDRQLTAFRKRIAQPKTQTLNRIHRILHKRNLMWDYPTKTFQTKKGRAWLAKVSLTEIDRMEMDSLLVQWELWDKQLEELDQRIVDRVQEKPAEPRDIMSAPELLMTIPGISFFIALTIASRIGDIRRFPSPRSLANYFGLTPGCRNSGNSNHRLGSITKEGSAMVRFVLGQAVVHVLKQDSRMRSWYQGIKRRRGSKIARVAVMRKLTTIIWHMLTHHQAYQRHRARPNSGSAKGTLEAQAA

SEQ ID NO: 401201 - protein, 317 aa, unidentified
MPTPTQKRCVGIDVSKHHWDVATTDNRHVRRFDANQAGLALLLAWLDTQQPTLVCLESTGGYEALLVEGLHQQGLPTAVLNPRRVRDFARATGQLAKTDAIDAAVLARFAAAVDPTPTEPPSDRQRRLKTLRARRQQVQQTLTQEKNRLGVARDEETREWVRRSIGFLQEQLGEIDQRLAEATQEDPEFRRRHQLLVSVPGVGPTTANGLIAELPELGSMNRGQAAKLVGLAPLNRDSGVLRGKRRIGGGRSAVRRSLYMATLVATRHNPLIRRHYQHLLQRGKAKMTALVACMRKLLLILNAIVKKQTPWKNTLPD

SEQ ID NO: 401202 - protein, 340 aa, unidentified
MKIIGCDFHPSFQQIAMVDTETGEQTERRIAREEAGEFYRGLSGPVRVGMEASGNTLWLERLLAELGHELWLGDAGRIRAMEVRKQKTDRRDAELLLRLMIQDRFPRLWVPSQEQRDLRQLLVHRHKLVGMRRQVKNQLQHLALNQGVQQKHKLWTRAGRKLLEELPLEGWTARRREESLQLLDDLEGRIMPLDQAVKQAAEKDRVAGLLQTHPGVGAITALAYAVTLGKIERFRHSRQVVSYLGLNPSEHSSGGRQRLGSISKQGNTMVRSLLVEAGQSAARLDTELKRAYQRLKHRKHSAVAKVMVARKLAVRLYWMWKREQPYAATRMQGSPSHPVA

SEQ ID NO: 401203 - protein, 338 aa, unidentified
MLHVGLDLHKRFSTVTVMDDNGTVLEREKLYHDDRARLTEFFRRLAGKAVVTVEATRNWYWLYELLEELGVTVKLANARKVRLIAEARLKSDTVDAEVLAHLERTCFLPEAYIPPRAIRDNREYLRYRLTLVRLRTGLKNKVHALLDKLGISHQFADLFGPAGRRFLSQLKLRPVYQEELTNYLGLVDDIERRIVAATKEIKQQLKPDPRAELLMTIPGIGHLTAYLLLNEIGDVRRFPTPGKLCAYGGLVPIVKQSAEHRWQGHLTSDGNHYIRWALAESACKAPSKDYQFGTFYRRLAARRGPLKARMALARKLLVIVWHVLTNGEPYKVKEIPTI

SEQ ID NO: 401204 - protein, 506 aa, unidentified
MKNLTKLDVYVKFDMGSEGSRVYGTSSPEIETSQDPPNTGLRHRTRMGNPSQLRNFSAAHIRTVDYMRKHRDRVCGADVHKDLIVATIRVRDEAEIRASFGTSPPELKRFKDWLISNDCEQVAFEATGVYWIPIYEALKESIDTIVANPYQIKSIPNDKSDAKDADRISEYCMNGMIKRSRVFSQSDRDLRTLTRTRSSYVKMRTQLKNRIHKHLSSCGIKLSSCIVDIFGKSGRHILNGLVSGTETSDIIKSIPSAVIRKKEDLIRVSISKGLDKLTKVLVSDLIDFLDSIESKIEATSRMIAEMLQPKSKDLAIVMSIPGIGFVAGATILAEIGNYRDFDTPEKLTKWSGLNPGENESAGKKKSSGITKRGSKYLRTILVEVAHVIARNGNSRLSRYFKRLRARKNYNVAVIALARKLLHLVYHLLTNQELYQEEDYEIKKQSSAGPYPDAQSSSAESLDDKVAAIVDAFYSLKSYNGKSVLRKLSRASQRSGLSSRRLSDGGG

SEQ ID NO: 401205 - protein, 404 aa, unidentified
MVRYIGMDVHREFAQLAVVEDGLVRDEGRIGVTPEALRAWAGGLRGDDQVALEATGNSDAIATLLTPLVDRVVVSNPSKTRAIAEAKVKTDKVDARILAQLLAADFLPPVWLPDERTRSLRRQVTRRAHLVRQRTRIKNQVHAILARNLAPTPPVSDLFGKAGRHWLSRQALPADERSTVVALLRQLDFHGDELAVVDRELAVEAFGDPVVARLMTIPGVDAIAGISIVAAVGDFTRFDDPDKLVAYLGLNPRARQSGNAAPVHGRISKTGRAHTRGVLVEAAWSASRAPGPLRAFYQRVSTRRGFQKAVVATARKMTVLAWHLATKDQDYAFAPPGLVNHKRRKLELAAGAPSRRGNHRLPGAAYNDKQRRAEETALVEQAEHAYQVLVAHWRPKPAHRPAST

SEQ ID NO: 401206 - protein, 370 aa, unidentified
MAQGSTLFIGLDVHKESIAVAYVAEEREAEVVFLGTIGTRQGDIDKLIRKLQSKGKPLHLVYEAGPCGYWLYRYLTKKGLKCWVVAPSQIPKKAGDRVKTDRRDAVQLARLLRSGDLTPIYVPGVEDEAIRDLVRAREDTLKDGKAAKVRLKAFLLRQDIRYEGRATWGPAHLRWLAEVVCPTPAQQIVFQEYVRAVSEHTERLQRLEAELQTLVQTWRWLPVVEAIQALRGVQFTAAVILIAELGDLTRFENPRQLMSYLGLIPSEHTTGEHRRQGGITKTGNSHARRALIEGAWAYRYPAKVSRHLQLRLEKVPKVIQDISWKAQVRLCKRYRRLMARGKNANQVVVAIAREMAAFVWAIARTVAGTH

SEQ ID NO: 401207 - protein, 367 aa, unidentified
MKHYIGCDAHKKYSVFAAVDEGGHVTFAKKVEHDRKIFRSFLETLPPASPIAIESTGNWYWLVDEMEKAGHKPSLVHAAKAKLMMGQINKTDKLDAQGLATLARNGTLPVVWIPPGELRDQRELPRMRMVLVSMRTKLKNRIHATLAKYGIMVDGEVSDLFGGRGRRLLEKVLSQLPSETTHSVQEQLQLLDQIEQSITQAEKRIHKVIKEDHTMQLLCTIPGVGPILAIVIALEVGDVNRFSRAEKLASYAGKVPRVNSTGGKTYYGKVRPDVNRYLKWAFTEAANVIVLQQHRMPDCHVLRLYWRVRKHKGHAKAITAVGRHLAEATYWMLKNDVPYQEPRAKQPVSSTPGQARRSHEFKEEFVH

SEQ ID NO: 401208 - protein, 356 aa, unidentified
MADKPIVGIDISKEWLDLCTSQAVEVERIANTPEAVAAWLERTGPGLIAFEPTGGCERFVSAAARERGIPFLRVHPNDVVAFRQSRGIKAKTDAIDARLLLAFAGDRLARRELRTSVLGDERLRALAARRRQLVETLQAEGCWLGAAALPAVRNSIEAVIAVLRHSLDALEAELAAVIAANPQTAELARLLQTICGIGPVVATALIADLPELGLLSSKQIAALVGLAPYTRRSGKTQFRETTGHGRVGVRRALFNAARATLRHPSPFKDFFDRLVSDNRRPGKVALTAVMRKILITANAVARDRQPWRGLRHTTPPPGAVGTRCRPHGEQTGHRPGRVKAAAALRAVARSASLDAA

SEQ ID NO: 401209 - protein, 353 aa, unidentified
MQVVHEVCCGLDVHKKSVTACVLWGSGRRRQTRAFGTFTHELLELGDWLRACGVTHVAMESTGVYWKPVWNLLEGQFEVLLVNAQHIKAVPGRKTDQKDSEWIADLLQHGLLRASFVPPTPIRELRDLTRYRASLAQEINRIANRIQKVLEDANIKLASVATDTLGASGRAMLEAIVNGEQDSQRLAEMAQGKLRNKIPELQEALQGRVSRHHRFLLRELLDHHYFVESKMQRIEQEVAERLGPFQSEVARLCTIPGVDRVTAWGLLAEIGLSMKQFPDAQHLASWAGLCPGSHESAGKRKSGKIRKGSLWLRRSSSREQSDYARFVRASGNGGEAAGTAEGRRAGEPLRHHG

SEQ ID NO: 401210 - protein, 356 aa, unidentified
MQTQVTKKIDFTGKDLFVGLDVHKKSWSVTIVVDGMEHRTFTQPPDPEALQKYLLRSFPGGNYQSAYEAGYCGYGIHRRLNDLGIKNIVINAADIPTTQKDKLHKRDPVDSRKLARGLEKNSLRGIHVFERDHEELRSLNRTRFYLMRDLRRSKNRIKSFLLYYDIPLPGEFDNNQWSLKFITWLKEIKLQTIAGQEAFSHLIASYEHHRQQLLILSRIVRLRISQHDKELFNLLKTISGIGPLTASALITEIGDINRFPHINDLGSYVGLVPRVRDSGETTHTGGITFRCNNFLRVLLVEASWQAIRQDPALMQYYHKHVINSKGHKVIIKIARKLLNRIRYVMKNRQPYVTGVA

SEQ ID NO: 401211 - protein, 412 aa, unidentified
MKIVHEICCGIDVHAKMLVACLILADGKKEIHSFSTMTADLLRLRDWLVAAGCTHVAIESTGVYWKPVFNILEDAVTVILINPDHARALRGRKTDVKDAEWLGDLLRHGLLRASFIPPLEIRELRELTRYRQSLVHEQSAVANRIQKVIESANIKLGQVASDALGASGRAILWELTRGETDPVKLASLAKGKLKEKRSELERSLQGRLTPNQRFVLRESLSHWEELERAEGRVTKEIDQYLNDRPKLAQARDNLDSIPGLATRAAENIVAEIGVEMEGNFPSDAHLASWAGMCPGNKATGGKRLSGRTRKGNTYLRSALVQAAWGATMKKNCYLSSQYTRLAKRLGRKKALVAVGHSLLIIIYHVLQSGQSYTELGGDYFDRNHVEHQRDYFIRRLQMLGLKVTIEESSAAA

SEQ ID NO: 401212 - protein, 341 aa, unidentified
MNQTLFCGIDLHSNNGVYVITDPQDRPLFQRRLPNELPLVLEALEPFRPQLQVVAVESTYNWYWLVDGLRDHGYPVVLANPAKITQYNGIKEANDLTDAAFLAHLARLGILPTGYIYPPADRPVRDLLRRRMLLVQYRTGVILSVQNMAVRQTGQNVTWRALRQLGDEERAELLGDHDCLQFVATQQVDLIEQLSEKIEQFEQKILAHAQLKPTYQCLLNLPGVGVILGLTIMLETGEIGRFEKVGDYTSSCRWVRATHRSNGKNKGQNNRRNGNADLAWAFVEAVHHALRSCPQAKQFYDRKKAKRNGALATKALAAKGSKAAYYMIKRQEAFDLARVFG

SEQ ID NO: 401213 - protein, 430 aa, unidentified
MKSNTQNAKIKAITETTLVLGIDVGSETHYARAFDYRGIEYSKKPFKFSNDEAGFVTFKAWILDIKEKHGKDKVVPRMEPTGHYWFNLGKFLQDNEMKPVLVNPHHVKKSKELDDNNPTKNDRKDPKVIAGLVREGRYMISYLLEGVYADLRTASNMRFQLQAELTRIQNRISRWFNIYFPEYKTVYGQPDAKSGMLILKVAPLPEDIMTLGIDGVNQIWRDAKVRAVGKARAKTLIEAAEHSVGSKEGEISARMEIRMLLEDYESRNTRLQEVVALIEELVKKIPMAEKLLEIKGVGIKTVSGFLAEVGDISRFNNPKELQKLAGLALVENSSGKHKGETTISRRGRKRLRYLLFEVAMSLVSKNPEFRELHSYYTTRKLNPLKKMQSLMAVAAKLLRVFFAMLTKGVDYDPKKLVGDIKRPAVYLQVA

SEQ ID NO: 401214 - protein, 398 aa, unidentified
MRAIGLDVHRDFCEVAIFEDGKLTRHPRVPARRAALVAFASSLRPTDHVGLEATGNALAIARLIEPHVARVVVANAAVTKGIGAARAKTDQLDARTLAQLLGTGFFPQVWLAEEPTRRARRQMSRRAQLVRERTGLKNQIHAVLHRNLVERPPASDLFGVTGLRWLDGVELPDDERQTVSSCLRQLQFLLEELEHLEKAIAQMALQERSIQLLLTVPGVNLTTAAAFMAAVGDIGRFESPGRLVSYLGLDPKVHQSGVVPARHGSISKQGCAGARWALVESAWVVARAPGPLHAFAERIRARRGANVATVAVARKLVVLFWHMLTNNEEYAFGRPSLTAEKLRRMELTAGSPSVRGKRNGGRVYASREQRLREQQVAVYAETAYRQFVSERRRLARTT

SEQ ID NO: 401215 - protein, 421 aa, unidentified
MTKIIVAQDAPVLVAIDIAKARHEVLIAIPDKKRRRRLTVLNELADFNRLATALKEYGRPVRVAFEATGNYHRALAYHLATSGFEVKLVSSVALARTREALNNSWDKNDPKDAQVILHMMEIGNEQYYHDPLVCGTNDIQELSKTHDIVSKSKTELWHRVLTHYLPLYFPEADRFYRSSRSDWFFAFLERYPSPHLITAMGKAAFTADAWDVIGRKVAKERLLADIYETAKSSVGLPVAPDSDAIRMFRLVLGEGRSLIAQRNQIEDRAVALLKDLPDYQLLTSIPGIGPINALTILAEAGDLRRFGHHRQFLKFCGMDLATIQSGTFRGQTKLSKYGNARLRRTLWMAGQVAILQRTNSFRDKFERYIAKDRQNTHLRRKAYSAIAATLSGHCCAIPCRAVNGPYCSRDYQTWRALSPLL

SEQ ID NO: 401216 - protein, 317 aa, unidentified
MIHLGIDIAKLKFDVALLAQGKFKTKVFANDSAGISACLKWLGTHADGPVHTCLEATGSYGEALACALHDAGHTVSVINPARTKAYAQSLGLRQKTDAVDAKMLARFVQTQEPAVWTPPPAELRALQALLPRLDALVEMRTQEKNRLGVAEPTVSASIAQHLDYLQSQIDALKAQIENHIDQHPGLKQQQDLLDSIPGIGAATSAWLIGELNLTRFDSARQAAAFVGLTPRKDDSGTSVRGRPRLSKQGNSLLRKLLYFPALTAMTHNPLVRALCLRLKAKGKHNMAIIAAAMRKLIHIAFGVLKSGKPFDPTLADT

SEQ ID NO: 401217 - protein, 364 aa, unidentified
MLEDRLSFGEPSWKTLRLLVSIWVRTLSIFIVRIHRGKAVYRKKFTRPKLIEFLATCPATTIAMEACGGSHFMARKLAELGHFPKLISPQFVRPFVKSNKNDFVDAEAICEAASRPSMRFVQPRTESQQAMRALHRVRESLVQDKVKTTNQMHAFLLEFGISVPRGAAVISRLSTLLEDSSLPLYLSQLLLKLQQHYHYLVEQIKDLESQLKRKLDEDEVGQRLLSIPCVGTLTASTISTEIGDGKQYASSRDFAAATGLVPRQYSTGGRTTLLGISKRGNKKIRTLLVQCARGIHTKTGTPVWQVGRLGQGVVVSEKQLCRHLCSGKQAGQNSLGTDGATANLRSIKAEIHQFKQSFIWFCEY

SEQ ID NO: 401218 - protein, 356 aa, unidentified
MSSDVKYIGLDVHKEAISIAVLNASGKLVMESIIETKASSILQFLQGLRGELHVTFEEGTWAAWLYDLVKPRVSELVVCNPRRNALLKEGSKSDKVDARKLAELLRAGILRSVYHGENGLRTLKELGRSYQTISKDLQRVMNRIKALFRGWGILCAGTEVYAPCHREEWLNKISQAGVRRRAELFYQHLDGLQILRRNARREFLAESRKHQAVKLLRQIPCIGPIRSAQLMALIQNPHRFRSKRQLWTYSGLAVETHDSGQYRYVNGQLQRSKKPQQLRGLNRNHNHEMKEVFKSTALSASRSAGPFSEFYARLLAKGMKPELARLTLARKIAAVTLTLWKKGARFDPEQLKTQAA

SEQ ID NO: 401219 - protein, 426 aa, unidentified
MTAGIDISQSHLDICVKNHGGVLANADFSNDTVGAKFTLELLAKHGCLDVAMESTGPYWYGIYDYLTAHGIRAILVNPAKAKTHLLNKTDRLDSNVLATLHMINQLKASYVPDHEIRRLRRLTRFRAWLMDVRTGIKNQVTATVSKYSSNLMSVFSDAFGVSGKMFLEMLTEGKGQDELVEELGGLELSEEKRSKIMEAISNAFEPNLDPWIIQFSSSMISEIESRIKTLDEAIAKAIDSIPHIKEYVNRLLTIKGVGLETAQAIAAEIADIKRFELSGSLVRYSGINPTVEQSGKMLKYGPLEKAGPPYLRRALYQAANTMAFQGPANFQRHYQAVRARYGKRKGHGVGVVSTARKLTRLIWAMLTNETDFIGSPKLLTEMKRARLRNRVKRFDSKRENDDATFKDLLINLHKMDPEVVQMLADL

SEQ ID NO: 401220 - protein, 345 aa, unidentified
MVVGVDTHKEIHVAAAVDRRGTPVGEECLPTTRQGYRRLESWARSLGDVLRVGAGCSGSYGSGLTRHLAKNGFAVLEVTFPDKTVRRKRGKDDFIDAEMAAEAAFTGTRTVTPKSRDGMVEALRMLQKTRSTAVAARKVALQTIRADAMSAPEGLRGQLRGMTRMRPIRRLAATRPGSTDFRTPPGAAETALKRLAKRHVDLDDEVSELDDMIAATLADAAPLLVQLKCVGAQSAARLMVTVGDNPERLGSEASFAMLCGVAPVPVSSGMTYRHRLNRGGDRQANSAIHIVAIGRLGTDGRTKEYVAKKMAEGHTKMGAVRCLKRYIAREVYCTIKKQRELVNCS

SEQ ID NO: 401221 - protein, 478 aa, unidentified
MIPFGRVLRFATRTIGLGNPFQTEDHMARKRINKTKKVTLPVMNPDAAGIDIGATEIYVAIPPDRDAEPVRMFATFTRDLNALADWLQQREIRTVAMESTGVYWIPLMQILEARGLEVYLVNAKHVRHVPGRKTDVSDCQWLQYLHSVGLLRPSFRPAQDICAVRSLWRHREALVELATCHVQHMQKALNQMNLQIHHVISDITGLTGLAIIGAILNGERDTQKLALLRDPRIRASHETIAKSLEGDYQQEHLFTLRQSVEMYQQYRKRILECEAEIQCLMEKLEGQADPLSLPPAKDSVKKCKVMKPAKALTLRSEGYRILGVDLTTIPGISVLHVQTILAELGPDHSKFRNAAAFSSWMGLCPDNDISGGRVLWSGTRKVKNRIALALRMAAQSLQQSQSSLGEFYRRMRTRLGAPKAITAAAHKLARIVFRLLITKEPYDDSVFARSEESCRQRAKKRLAAQARELGFNLVPVFC

SEQ ID NO: 401222 - protein, 409 aa, unidentified
MYFVGIDIAKKTHQAAIICSDGKLIGKPFKFSNTIDGFNLFLEKLTAVNTDLSQFEIGMEATGHYWLNLYTWLSDKSFRLHVINPLQSDALRNLYIRKTKTDSVDAKIIADVIRIGQYSETQLADENIIALRDLNRQRFYLVDMAADLKRKIIAMMDRIFPEYQDFFSDMFGKTSVQIMKEYTSPEQILQIPTERLTQLLKKVSRGRFTETKAKELKALAANSFAALLSSEMTTLLIRQMLEQLDLLEKQIADIEHIIAAQFAQFNTKLTTIPGIGTTLGATIFSEIGDINRFDKPKQLIAYAGMDPSVKQSGNFVGTQSHMSKRGSPYLRRALWLAAVVAVNHNDLFKYLFQQKMNAGKTYAQAMGYICHKLLNTVFAILKTGEEYKPVYPPQLDLSKLTDQPIHSLL

SEQ ID NO: 401223 - protein, 343 aa, unidentified
MERTDGIETFVGIDAHSKQCSIKAITRQGEELREVDVPTRGAALRKALKGLRRPVWVIVESSYLAPLMVDLIGGSVDRLIVCETRENRWISHSDDKSDQADADRLCRLLRMGEFKPVHVPSGHGRDRLEVLRMYQKAQGDVSRTKNRIKGKYREHGVTLHGKRVYGEVHRKDCLKQVARPQGRFLLEVLYQKLEAEERSCDDVLARLVELMRGDARYESLKEIPGLGKVLSAVVTAVIDDPDRFANKRKLWSYAGLGVRSRWSGDPSKAKVSGSKGGNRLLKYAAFTAATAALRGENRFSRHYRKMVAEGADPSMAKRTVARKILATALVLMKTGAAYEDDKK

SEQ ID NO: 401224 - protein, 461 aa, unidentified
MAKRKKEAPQAIPPMTTFEQMHLNAAGLDIGAEEIYVCVPADRDEQSVRAFRTFTADLHALAEWLAACGIDTVAMESTGVYWVPIYEILEAQGFQVFLVNARHLKNVPGKKTDILDCQWIQQLHTYGLLHASFRPPEEIVALRSLARHRDNLIRYRSAHIQHMQKALELMNVKLTQVVSDITGVTGLSIIRTIVAGERDPHTLAQLRDPKCTKSEAQIANALEGHYKAEHLFVLKQALAQYDFYLQQIRECDAQMEAMYGDLPPADPDTRAGPPPPPKKGKTRKNQADYDLRACLYRVVGVDLAAIDGLDALSVQKIVTEVGVDVSPWPTEKHFTSWLSLAPRNDKSGGKVLRSRTLKTGNPANLAFRLAAQSLSRSNSALGAFYRRMRAKHGPEKANVATAHKLARIVYHLLKYREPYDDPGEAFYEQHHRERTIRSLERRAANLGMELVPRSTNSVVVS

SEQ ID NO: 401225 - protein, 322 aa, unidentified
MRYIGIDVSKATFVVAYSSDKGGEIRTFNNTTTGIKQFIGALPKDGSIHCVMEATGNYSALLLYMLNVAGITVSMENPLKVKNFAKAMLSTIKTDKSDARLITLYGEKMNPRPFKVQGEAILRLRQKRTVIRQLTKQITAMSNLRGSLACLPVPDKGATHTVDETIKFLEKKRDRLQSELTDLVEVEFSRQLALLTTIKGIGITLATALIITTGGFTYFQNAKQVSRYLGICPTYEQSGTSVNIKGHINRNGDAYTRGLLYIAAWPASRFNAQCKETYTRLRQNGKSGKLAMIAVANKLVRQAFAVVAHDKEYVDGFVSNRP

SEQ ID NO: 401226 - protein, 347 aa, unidentified
MKILALDLGKFKSVSCCFDTEQQTTEYWTFSTDRSYLTKVVQQYQPQLVVIEACSIAAWVHDLCGELGYRILVCNPNQEAWRWKNVKRKTDRDDALKLAKLAALGQLVPVHIPAVATREHRWLVKYRKTVVGRLNRVQNIIRALFAQHGLSLPVRASCWALASLEAMQQQSRPLAECQTEELWRGQLAQELSAYQQLQTELKLLETKLADLAQCDERIQLLAAIPGVGRVTAEIIATHLDRPERFANARQVSSYAGLAPRRYQSGQMDRQGGITRRGSRLLRSALVECAWVMLRYNTWAREQYVRLVRGQKNRRKKAIVALARKLLVRCWAMLRDRRPWPTAKQVTA

SEQ ID NO: 401227 - protein, 345 aa, unidentified
MHIASIGIDLGKTTFHLVALGEGSKVVVRKKFSRTQLLAYTANLPCSLIGLEACAGAHFMGAALREQGHEVRLIPAQFVKPYRKSNKNDFIDGEAIAEAVTKQNMRFVQIKTQEQLDVQAMHRVRDRLVQRRTALINEIRGFLLERGIPFPAQPIHLRKNLPTGVEDAEQNLSPRLRWLLDRLWQEWKQTEIDIQTVTDEIERISNEDERCQRLRQIPGFGPLVSTATVAAIGNGAAFRRGRDFAAWVGVVPRQYSTAGKQRLFGMSKRGNIYLRRMLIHGARAVLFRIKYDTAGLGQWVHRLSQRAPRNKVVVAIANKLARIAGAVLSSGRDYRHQPLPQRAAA

SEQ ID NO: 401228 - protein, 362 aa, unidentified
MTELNRTATGMTIGIDLGDKYSRICMLDKAGEVVEESRLRTTAAALHRRFSGLERARIAFEVGTHSPWIQRLLVELGHEVLVANAGKVRLIAANDRKDDRLDAERLARLARVDPRLLSPIEHRGRQAQLDRALLRSRDVLVRSRTALINHVRGLVKAMGCRLRSCSAPSFHRQVPDQLPEELKPALLGVIATLADLTRRIREYDRRIEQLCKERYPETDLLRQVPGVGPLTSLGFVLRVEDPRRFSKSRAVGPYLGLGPRRSQSGDHDPELRIAKTGDPHLRRLLVGSAQYILGPFGPDTDLRRWGLQLAGRGGKNAKKRAVVAVARKLGVLLHRLWVTGEVYEPLRNSTRRDKRGRQADAA

SEQ ID NO: 401229 - protein, 354 aa, unidentified
MSRKTTNLEAVATIGIDIGKNTFHLIGLDEKGAIVLRQKLLRGQVVTRLANMPLCLIGMEACVRAHHLGRQLKALGHDARLMPARYVRPYSKGQKNDFRDAEAIAEAVLRPTMKFVAIKTVEQLDLQALHRVRERLVSQRTSVINQIRAFLLERGIAVRQGLRALRTEIPIVLAMTDKLSPRMIRMIEDLCTDWHYLDERIETVSDEIATLSEEDEGAKRLMTVPGIGPIISTATVAAIGRGDVFSKGRDFGAWLGLVPRQMSTGGRTVLGPISKRGNRYLRMLFVQAANAVLLHPQSWEKHGLKSWIEAAARRLNRFKLAIALANKLARIAWGVLQGGRNFEVRSMKSAAQAA

SEQ ID NO: 401230 - protein, 308 aa, unidentified
MKTVPFEQVILRGCGIDVHKDMVVATISGEGLKTETRSYKTFSSSLTELKEWLLSSGITHVAMESTGVYCKPVYKILECPDMKVWIVNARHIKYVPGHKTDKKDSAWICKLLLAGLLKPSYIPEREQRELRDLTRYRNKLIQHVSSEKNRIVRILEDCNIKLSSVVCSLDGVVANKLIDMLIDKGHVTMDDITCIYHKKLEASPELLYQACEGFIEPHHIYMLQTIRKDMEQTKAIIADLTCRIKEVLSPYENVMELLQKIPGLSRKTVEDLIAEIGVDMEAFPTEKHLASWAGVCPGNNESAGKKKW

SEQ ID NO: 401231 - protein, 375 aa, unidentified
MATVRFVGLDVHAETITIAVAESGGEVRSLGTIPNRLEAVRHLVRKLGPPDQLRVCYEAGPTGYVLYWQLTGLGVPCDIVAPSLVPVKAGDRVKTDRRDAEKLARSYRAGDLTPVWVPDAAHEALRDLVRAREAAKKDQLRARHRLGKFLLRRGRQRPVHLKMAWTAGHLDWIRSLTFEAVAHRIVLADYLHEVDRVAARIAHLNHAILEAVQTAPPQMRAVIQALQALRGVAAVSAATIVAEVGQLSRFANPRQLMGYSGLVPSEYTSGPRRRMGAITKTGNAHLRRVVIEAAWAYRFGPAVRGPLRARHAGLDPAILEIAWRAQKRLHDRYRTLAATGKNKNQIITAIGRELLGFMWDIGRTTERQVPIVAIA

SEQ ID NO: 401232 - protein, 387 aa, unidentified
MNRSKSRIVGLDVHPDSFAGAILQGMDPWKARVVSTSTRVALPLLEKWALRHTREEDILVMEASGNAFCVAERLRALKRKVVILESHRAGKVGKTYCATDRVDAIKIARIYLSALSPVVWQPDAKTRERREVFSAYQAVVKEAMRLKQQIKSMLNEHCVRLEKGFRLSHPSALGRLLLRRKWSEAQKMLLSQLHAGLVGARVRRQRLRHYMAQEILAEKELLRLTRLCGINLITLYGLIAAIGEIKRFASARKLSAYFGLNPTVEQSGNYEGSGALKRHGRGAIRALLVQSAKKLLQVNNPLQKWGLAVAARRGRNKAAVAVARKLCVAVWHVMQGHVIGAIERMDTLHTKLHKLATELGVPTIKQLGFETKEAFVQKKLYVLRSYP

SEQ ID NO: 401233 - protein, 308 aa, unidentified
MIVQNYVGCDISKQRLDFFDEASGRCQRIANQGDAIEAYVAGLCADRDFVVMEATGIHDRLLRHALAKAGVAFSRHNPAHTHHYAKSTTQRAKTDRLDARMLSDYGRRYQPAHEPAPCEKGEHLQSLARHRDHLVEIRARLKRYLSEAFDADVVDDLQDVIADFDTRIDALESRIVKTIRQAEDTALDYALMVSVPGVSTITALSLLAHMPELGQRSPKSIAALAGLAPFDNESGKLKHRSKITGGRPRVRRALYMAALGAIRANDRFKAFYVALAARSGSKKLAIVAVARKLLVTLNAIIRDKTAFA

SEQ ID NO: 401234 - protein, 387 aa, unidentified
MSRNARVPIPVTTLDQDSTLVVVLELSARSWLVGARVPGIGRMSRYALAPSAEALAAWLGTAKARAGAAGRTVVRVVLAYEAGRDGFWLARYLEARGVEVYVIQPSSVLVDRRARRAKTDALDVEMLMRTLLAWLRGEPGVCSMVPIPDVAEEDGRRPVRERQGLIGERLALLNEIDGLLATFGITGYRPLRQDRRAQLAALRTPEGDPLATNAAARIGRILARLELVMQQIAELEQVRDAVLAKEVASGEAETMIRGLARLKGIGAELATVLVWEAYVRSFPNRKALGAYAGLTGTPFASGSTTREQGISKAGNRRLRSSLVELAWLWLRYQPDSKLAAWFRSRTGSAGSRMRKVMIVALARKLLVALWRFCRDGVLPEGAALKAT

SEQ ID NO: 401235 - protein, 343 aa, unidentified
MQTITTIGFDIAKSVFQVHGVDASGEVVIRRQLKRRYVLAFFQKLPPCLIGIEACASSHYWSRELQALGHTVRLMPPAYVKPYVKRQKNDAADAEAICEAVTRATMRFVPTKTPEQQSCLMLHRTRHLFIRQQTAVINSIRAHLAEFGIVAPVGRKGVMELLHVVADPSDKRVPEVARACLAALGTQLFRLKQQIVEFDRMIMAWHRSNQTSKRLHYIPGVGPMLATALVASVADPRTFRSGRNFSAWIGLVPKQHSSGGRDRLGSISKQGDRYLRSLFVAGALAVIRYAKIHGTKHRPWLTALLGRRPTKVAAIALANKIARMAWAMMAKGERYKQPVALAA

SEQ ID NO: 401236 - protein, 346 aa, unidentified
MTHSTTVGVDLAKNVIQVSVISGRGKELSNRSLTRRKFAEFLGKQKPALVAFEACATSHHWARAAQRHGHVARIIPAKFVAPFRQGHKTDSNDALAVAEAARRPSIKEAPMKTVEQQGLQAIHRSRQLLIQESTALSNHLRGLLMEFGVVIPQGFASLLRAVPEVLEDGENELPDLYRPTLHRMYTRLLELREHIEAMTKEVEVLVKQHPICSRLTALEGIGPIGALLLYATLGSGNVFSSGREFAAYLGLAPRQYSSGGKTNIVGLSKKIGNCRLRSILILGARAYTYRLKEPKSAKDRWLKAAIDRNGHSRAAVALANKNVRTAWAMVTQGTEYQRRGQQKVAA

SEQ ID NO: 401237 - protein, 359 aa, unidentified
MQKYKISFKGQKIFIGIDVHKKNWDVAIAPEVGNVKRHTQKASAKELFDFLKKHYPDGDYLAVYESGFSGYSTYYALREVGIECIVIHAADVPTTQYEEVMKTDRVDSVKLVRSLKAGLLKGIYIREKENIDDRSVVRIRKIIQKQLSGYKARVKHMLHSNGVPLPERFEKPGSYWSKAFIKWLKEDVRLLSSSRNSLDLLIRQVETIRITLLEATKMMRDLSQTDRYKRKFDLLMTVPGLGVAVSMCILTEVYDIKRFHNEREFAAYLGLIPTSHSSGDKIAHGEMTFRGNKQLGPMIIEAAWITICKDTGLGSLYLRYKERMKPQMAIVRIARKLSNIIFTILKNEKVYVPYNTGNQ

SEQ ID NO: 401238 - protein, 310 aa, unidentified
MRTEVFVGVDVCKDSLDVAISAEKQILTFANDQKGVEALIEKLNRIGAELIVFESTGGYERLAASSFVEAGLPVVIVNPRQVRDFAKSAGILAKTDAIDARVITRFAEAVKPDVRPLKDRQTSELTALVTRRRQIIEMTVAENNRLKLANKRNKKDIKDHIRWLKKRLDKIESDIDKMIQSSPIWRCKDDILQSVPGIGPITSASLICDLPELGVLSPKKIAMLAGLAPLNCDSGKFKGRRRIWGGRASVRSGLYMATLAAIRCNPAIKGFYQRLTAAGKCHKVAITACMHKLLIIANAMLRDQTLWQQN

SEQ ID NO: 401239 - protein, 307 aa, unidentified
MTAVGIDVGKASLDLAVNGQAAVTRYPNTRAGITKAVKRLRTLKATRIVVEATGGYEEALLEACCDGGLWIARVNPRQARDFARATGELAKTDAIDARLLALMADLFADRLRCHVALPLWQRELRSWLRRRSQVVMTLQAQKQQSAMAPSEVRKLVAGTIAALVREQAAIDAAIRTLVKEHATPAVQSSKGLGPVFQATVLALLPELGHLDRRQIGKLVGVAPMNRDSGQGSGKRRIRGGRSSVRVALYMATLSAVRWDPMMKAHYLQLRERGKLGKIALVACMRKLLGIVNARRRDELRAEGLAMV

SEQ ID NO: 401240 - protein, 316 aa, unidentified
MNASPPFVGIDVAKAELMVALGPSGDLVAVPNDESGIRHVLEHLQAARPELIVLEATGGYETAAVAALAAAGLPVVVANPRQVRAFARAMGKLAKTDSIDAHVLALFAERVRPPIRPLPDEALRMLDALLTRRRQLIEMLVAERNRLAHALPPVEKSLKQHIRWLERRLADVDSDMDQAIQQSPVWRAKEDLLRSVPGVGPIVSRTLLADLPELGALNRKQIAALVGVAPLAKDSGTMRGKRMVWGGRAPVRAVLYMGALIASRHNPVIRDFYQRLVAAGKPKKVALTACMRKLLVILNTMVRNNTRWGERYALSA

SEQ ID NO: 401241 - protein, 341 aa, unidentified
MEQYVGLDVSMRETSIAVRQNGKRVWRGKCPSDPRALADVIRQRAPDAARIVLETGSLSTWLYHELKAEALPVVCIDARHAKAALDMAPNKTDANDADGLAQIAEVGFYREVRVKGYAPMLARALVGARGQLLRISIQLSNQIRGVMRTFGLIVPKGAGRVFEAHARALLGRNEAVARVVLPLLEAWRAVRARAAELDRQLIASARTSPACRRLMTIPGVGAVTAASFVAAVEAPGNFRTSRAVGAWLGLTTRRHQSGEADYDGHISRRGDGHLRALVYEAAAAVLTRTRTDSALRSWGLKLKEKVGFKRAAVAVARKLAVIMHAMLKTGATFDPAPNTTA

SEQ ID NO: 401242 - protein, 363 aa, unidentified
MKRGHFIGLDTHCQFAELAVVTHGGRTTKHARRAMTIPAIVEELQSIARPRYLVIEEGPLADWLWRNLRSQVDEMQVCDPRRNRLVCQEGDKDDPIDAEKLAQLYRGGYTKAVHHAESSYRSVFKQHVMLYHDRVRHRVAEGHRLVSLLRRHGVVVRERNFANPQERDGLLRRLPNSRTLRADVRVLWKGYDVAVLQEEWMRRRLVQLAKKEEVLQRMVTLPGIGWVRAATLWVWLDTPWRFAKKQALWKYLGIGLERRRSGNGPEKVRVPVHVNRVLKSTILGAAKSAAAQGKNPFADQYRRWLAAGLSPKMARRNVARSLALTWWGMWKNGSAYRPEWVGVAAAAVHAAKGFTAAAGCALV

SEQ ID NO: 401243 - protein, 345 aa, unidentified
MEQISRIGMDTSKHFFQLHGVNAAEKVVLRKKLRRKEMVAFFEALAPTVIGIEACGASHHWARILRPFGHEVKLIAPQLVKPYVKRGKNDTADAEALCEAMSRPTMRFVPVKTAEQQAALMMVGLRDRLIRNRTQLSNAIRGYAAEFGFTAARGMAHIDPLLDRIQADESVPVLARELFAAQAEEYAQLQAQIAEVDAKLMAWHKADECSRRLANIPGIGPIGATLLLMKTPAPEMFRSGRQFAAWIGLTPKDHSTAGKVRLGVITRAGDEALRSVLVVGATAVIQHVRRGGRGSPWIVGLLKRKPPKLAAVALANKMARIAWKLMVTGNSYAAKSAPAALIGAA

SEQ ID NO: 401244 - protein, 371 aa, unidentified
MGNDSEAFVAFDTSKLRNSVAIAEAGRSGDVRFFGEIDNTPAATEKLVRKLAAKYSRLTFCYEAGPTGYGLYRQIKTLGHDCVVAAPSLIPKKPGDRVKTNRRDALNLAKLLRAGELTAVWVPDDRHEAMRDLVRARGAAVDDLKSKRQQVLSQLLRLGRHYSGKKTWTRAHMVWLMSQKLAHREQRIAFEEMLLAVRQAQERVVRLDQAIAAAVADWSLAKVVTALMALRGLDLVAATIFLAEIGDLSRFASARELMAYLGLVPSEDSTGEQISRGSITKAGNHRARRILVECSWSYRHPPRVGKKKLDKIAAAPREVQEIAWKAQARLTTRYRALTRRGKRPTIVVTAIARELAGFIWAVGRAVDLPAM

SEQ ID NO: 401245 - protein, 423 aa, unidentified
MENTAARKLKQVPEGCLIIGVDPHKKRHAAVAITQDFTTRDKFKFDNTREGLEIMLRRARMEMVKSGCRGVMFAIETGGHYWRNVAYFLDEQGIPFRFINQFTLKRRREGKDLNRRKNDYRDSEVAAQLLCTGEFTESKVPQGVYAELRTAHNAYRRLVKERTRITNLIKGLLDGLSPEFTRVFKDPCGLTALSVLSTCAIPSVIAGTTEDEFVATIEAKHKGCLMRKKLRALHYSARTSIGIDAGARSVSSEISFLAEKLELIRRHIRIIGGTLISLVDETEEGKYLLSIRGLNYIAVGGLLAELGCFKAYRSAKQMIKMAGSNPTESESAGKRGSHTPMSKQGRPVLRYCAWTAVIPMLRFNPDFRAWSRQRRERPAHANPLNGREVVGAALNRLLRLASAMVKNQTYYQVSKPELTLVAV

SEQ ID NO: 401246 - protein, 344 aa, unidentified
MEYFAGLDVSVNETSVCIVDDAGRIVREVKVASEPGALLAALKNGGYHFKRIGLEAGPLSQWLYSALGEANLPVICVETRHMRAVLKAQINKTDRNDARGIAQMMRAGLYRPVHVKTLRSQKLRMLLTHRKLLQSKAIAIENDLRGTLRNFGLKVGMVGTARFEARIRELVENLPDLAVLVEPLLMVRRILREQVAVLHRRLLAIVRDDAVCRRLMTIPGVGPVVALTYRATVDVPARFRNSRAVGAVFGLTPCKYQSGESDYTGGISKCGDAMMRVMLYEAAQIMLVRSTRWSWLKAWAMQIARRRGVKKAIVALARRLAVIMHRIWIDGTKFRWTREEVAAA

SEQ ID NO: 401247 - protein, 404 aa, unidentified
MIFVGIDWSEHHHDVCLVDERGTQLAKGWVPEGMQGVVRLHEMIADHAQEPEEVIVGIEIDRGLLVGALVAAGYRVFAINPMSVDRYRDRRATSGAKSDPGDAKVLADLVRTDRHNHRPVAGDSELAESIKLIARTHQSFVWERQRHVNRLRSALREFYPHALQAFGTELASADAIAVLGVAPTPELGRRLSRSKIAAALARAGRQRNLEAKAEQIQRALRSEQLRASEGLERTYGVIVSSLVGLIDGLNDQIADLQEELEGSFEQHPSAEVLRSLPGLGIVLGARVLGEFGDDPTRYADARARRNYAGTSPITRASGTRRVVLARFARNERLFDACYLWAFSSLTKSPGARRHYDLQRARGKTHSQALRALANRLVGILHGCLRHGTIYREDVAWSGREQLVA

SEQ ID NO: 401248 - protein, 345 aa, unidentified
MESMYYIGLDVHKKTISYCVKDGSGRIHAEGKIPATRFDLDLWMKTLPRPWTVAMEATIFTGWIYDHLRPHAAAVKVAHPLMLRAIAAAKKKNDRIDANKIADGIRCDFLPECYMAPTEIRERRRTLHYRNLLVRQTVQLKNRISGLLMEAGVSYNKQKLHKVGYFRELLKTSPDIDERLRPLLQLCRETLVRLQKTESALIRSLARDRFLVERVERLMTIPAVGPITALTWALEVGEVSRFSSIKKAISYCGLCGAEKCSGEHIQRTPLSKQRNKHLQCVLVEAAHMAPRLSPELALLYDRERQKGNANRATLAVARKLVAYLVAIDRCQRDFLVVEKKNQAAA

SEQ ID NO: 401249 - protein, 416 aa, unidentified
MNYNPCITIDVSQGKSHIQGFIGYNNKNRKPDNITQPKVMRHSKQGFNKIIELISIIKSKTNLVPIVIFEFTGVYHKTLEKFLQKNNIKYHIVAPLRAAKSRQNDIRSVKTDKRDCLSLARMFYDIKKDSLGKFDSESESYESMKQLNRFYENIKLRQQELKVNFREYLAIIYPNYEITKSNLNGAFKNVYSKESLGFLKEFPHPELVVKKTVQEIEETIIKYLGKIHSKFSLSIASRLLDYCKDLVSGCSFDQPLVDNMQFYISQIELYENTLNDTLDKLITLAENTSLYHLLLTIPCVKENLASRFVAEIGDINRFNSYKAIISFVGNDPKIYQSGDDLGLHKKITKKGNKHLRTIFYLIAQQMTKAKNIESSIKDFYKKKTQQGLPKLAALIACSNKLIRIIYYMNKTGCAFV

SEQ ID NO: 401250 - protein, 351 aa, unidentified
MVQLHTSVNDQLCVGIDLHRDTMTVACLDPRTGEVTFRKLACKCRTQITEYFSTLPRPHSVAIEAVGFYRWLWDLLEPIVDELHLADATRCRALAATRPKTDRQDALNVADLMAAGRLPIAYAPPMHVRELRDWTRHRNGLARSHARVLTRVQSIMNANNRPGPKRAKADALIRYVKAHGTLLPQRHVRMLWLAVDQLTVIERQIDDAERTITGLLADEKFVTVDTLLRSIPGVGPVTSATAIAELGDLTRFTDRKQITRYAGLNPRTFDSADKQRTGRISKAGPRQLRWVLQQAAWCARRDHPIFRKRFGQLSKRVGKAKAGVAIARKLLLCMWAVVRDGKPYRPVGDAG

SEQ ID NO: 401251 - protein, 343 aa, unidentified
MDYFAGLDVSVKDTSVCIVDGTGKVVREVKVASEPDALLQVLRNRAYRFKRIGLEAGPLSQWLFSALGEANLPVICVETRHMRAVLQAQINKTDRNDARGIAQMMRVGLYRPVHVKTLRSQKLRMLLTHRKLLQSKAIAVENDLRGTLRNFGLKVGMAGATKFEGRIKELIENLPDLAVLVEPLLIVRRVLREQIGVLHRRLLAVVRNDEVCRRLMTTPGVGPVVALTYRATVDVPARFRKSKSVGAVFGLTSAKYQSGEIDRSGRISRCGDEMMRVMLYEAAQSMLRSKKWSWLKAWAMQIARRRGMKKAIVALARRLAVILHRIWVDGTEFRWTREVVTAV

SEQ ID NO: 401252 - protein, 387 aa, unidentified
MPQLNDLSRSLQAFEQNKTLVAVLEMSQSTWLAAGVVPGVERRPLKKLDPDPAALLRLVERWRDQAVKAGHAITRAVLAFEAGRDGFWLARWLRARGIEAHVVHSTSVAVSREHRRAKTDRLDTEMLIRVFLGWLRGEPRHCKMVAIPTLDEEDARRPSRERESLVGERTRIINRMKAALIRLGIRGFKPELLKAPQRLEALRTPEEIPIPPNMLAEMRRDMARLAWVREQIETIEQARLDRLEHAPANGPHAMVRLLARVVGVGVETADMLVQEVLSRNLRDRRAVARYAGVTGSPDESGAKRREKGLAKAGNARVRRGLMQLAWRFLRFQKESALAKWYRERTEGAGKRKTTMIVAVARKLLIALWRLVTVGEIPTGVTLRAVAA

SEQ ID NO: 401253 - protein, 339 aa, unidentified
MTVKTIGLDLAKDVFQVHGISENGRVIFNKAIKRAKLLAFFETLPPCTVGMEACGSAHHWGRTLRKLGHDVRLMPANYVKPYVKRGKTDAVDAEAICEAVRRPTMRFVEIKTEDQQAVLSIHRTRDLAVRQRTQMANMIRSLLREFGHILPIGIEAVTAFVKRHLDGDHPDMPDIANGMLGMQCYQFIGLNERIAGYTKLIEQHAMLSTDARRLMRMPGIGPITASAIVATIGDAKQFRTGRDLAAWLGLTPLNKSSGGKERLGKITKKGDRYIRKLLVVAMTSRAVMAKRSPEKVDLWTAKIIADKPFRLATTAMANKAARIIWAMLTKKQEYRQPAF

SEQ ID NO: 401254 - protein, 483 aa, unidentified
MSTQPKQRKGAAKKKAAAGKGKRRRKGMTLEDRPLLEPNAAGIDIGAREIFVAVPADRDENPVRVFPTFTEDLEEMARWLVSCGVTTVAMESTGVYWIPLYDVLEQHGVRPCLVNARNMKNVPGRRTDWHECQWLQFLHSVGLLRAAFRPDGEVSAVRSLMRHRTDLVQTAAQHIQHMQKSLTQMNLQIHHVISEITGVTGLAIVDAILAGERDPAVLAKLRDHRIHASEEIVQKSLVGNWKHEHLFTLKQSRQIYQQYQDSITACDEEIEKLVVAFEPRVDTEEHPLPPDRKGNQRKRKKRGVIPGTNPKTGFDMRTEAYKLFGVDVTQIPGLMMTPLRLFSEVGRDMSRWPTADHFASWLGLCPDNDISGGRVLWKGMRGTRNQAGQLFRMAAFGLHHELSPMGDHLRRMKSKIGPPAAQTATAHKIAIIFYTMVKNQVEYDASIWAERDAEREKRFEAKLKRQAHARGYKLVKFEQNIAA

SEQ ID NO: 401255 - protein, 322 aa, unidentified
MSMSNQRCAGIDVSKSTLDIAISNIAQSFTVPNEDGGFNQILKELKRNETQLILMEATGGLESGVAGYLQSEGFDVVVINPRQARDFARAMGYLAKTDQIDARVLLQMAKVINQHPEREKYIRPLPDAHRQLLAAMVVRRRQLTIMLTAERNRLHPSHPQNHESIRLIISVLKSEMARIEAEMSAYISKNFSELSALLSAVKGVGAATVAVLLAEVPELGTLSRREISALIGVAPVNRDSGTMRGRRTVFGGRASVRTALYMSALVGTRHNPVIKEFYTRLVAAGKPKKVALTACIRKLLTILNAMLKNNEAWDPLYHQHAS

SEQ ID NO: 401256 - protein, 370 aa, unidentified
MKKRITFVGLDTHKNSIEAALADGGRNTEVRLYGTIGGDLASLDKMIRKLQTTRVELRFVYEAGPCGYEIYRHLRAHGFHCDVVAPSMVPKRSGDRIKTDRRDARNLARLYRAGELTAIYVPREDDEAMRDLVRGRQDAIHAQRKARQQLGGFLLRHGSRYPGKTAWSLAHRRWMAEIKMPHPSQQVILEDYVHSVEECTQRVHRLTDQILQLMPDWRMHPLVTALQALRGVAPVVAATAVAEIGPMGRFERPRQLMGYLGLVPSESSSGGSTRRGGITKTGNGHARRALIEAAQAYSHPARISRVILNRQEAVPEPIRQIAWKAQLRLCARFRKLTARGKSRNRVVTAIARELSGFMWAIAKQVPVPQD

SEQ ID NO: 401257 - protein, 340 aa, unidentified
MSTINILGIDIGKSTFHLVGHDLSGREVYRKKLSRSKLIQYLSNSELTTIAMEACGGSHWLARKCQEFGHKVLLIPPQYVKPYVKTNKNDFIDADAIAEAATRPTMRFVSVKTESSQVISVIQRVRSSYLKDRTACMSRIGSILLEFGMAFPKSHAKMKTLFQWLAEHGEPIPPMLLLELRDHHDFYLKLNQLILTQDKKLKEIVSNDERAQLLKTIPGVGDLTASRCLSDISNVADFKNGRHLAAWIGLVPRQFTTGGKPTLLGISKRGNKGLRELFVHGARAVLVRPEKAVAVFGNWILELLSRKPFNVVVVALANKLARIAWSVLSTKQAFEVRVQA

SEQ ID NO: 401258 - protein, 375 aa, unidentified
MNDHSEAFVGFDTSKLRNAVAIADGVRGGEVRFLGEFENSAAATAKLVKKLAAKYQRLTFCYEAGPTGYGLYRQIKNLGHECIVVAPSLIPKKPGDRVKTNRRDALNLAKLLRAGELTAVWVPDRGHEAMRDLTRARETAMMDLRSKRQQVSAFLLRQGLHYSERKKTWTKTHMNWLASQKLEYAEQRLVFEEMMLAVRQAQERLERLEQAIRVAVPDWSLAEVVTALMAMRGIDLISAATFLAEIGDLSRFQHPSELMGYLGLVPSEHSTGDKINRGPITKAGNRRARRMLVECAWSYQHPPRVGQEKQEKVAAAPRAAREIAWKAQCRLHGRYRALVRRGKLKTVAVTAVARELAGFIWAVNRAITTARAVAK

SEQ ID NO: 401259 - protein, 402 aa, unidentified
MNCVGIDVSKGKSMIAVMRPFGEVVVSPFEVLHTDSELSKLAGLLKSLDGETRVVMESTGNYHAPVAWLLHDAGLYVSVINAMLVHDYGNNSLRRAKTDKKDAVKLANYGLDHWLTLPRYVPDEDTRLMLKTCYRQYQQYSKVQTMLKNNLISLLDTAFPDANRLFTSPPRADGSEKWVDFVAAFWHCECVCGLSEKAFTAKYHKWCRKHGYNFSEDKALDIYASACGHFGVMPKTDTAKLLVEQAIFQLRATSATLAALKQEMQSLATSLPEYPVVMGMFGVGPALGPQLMAEIGNVRRFHSKKALVAFAGIDAPPYQSGQMDVRSRSISKRGSASLRRTLFLVMSVILQRAPMNEPVYQFMNKKRSEGKPYRVYMMASANKFLRIYYASVKAYLASLDHD

SEQ ID NO: 401260 - protein, 314 aa, unidentified
MVAQTVQDIGIDVAKRWLDVAVFQTQEQAHFDNDKDGWAKLVRWLRGRTVRAIGMEPSGGYERGVAKALRSADLPARNVNPHKLRHYARALGRLAKNDRIDALLIARYTAELPTRPVRCDPIAEQLADLVVARRQLSDDKVSLANQLEQLREPMVRRIFTQRLHRIELDIALLAKRMAQIVASQPAFAAKDRLIQSFHGAGPILSHTILALAPEIGQASRREIAALTGLAPYDFDTGTFKGRRVIWGGRHALRRVVYMAALTASRSNPVLKAFHKRLIANGKQPKVVLVAVARKIMIIFSAMLRYNQPWNPGKA

SEQ ID NO: 401261 - protein, 335 aa, unidentified
MQIYGIDFAKDKFDVSFLTSTSKNVSNKPAHKVVRNNESGVTKFIKTLPTDAILVAEHTGVYGDLLLKHCTESHINIAYVGGYVIHTYKSAPDRAKTDMLDCAVLREFGERFADKLVYKSFPKKELYELKQLARHRTMLVEDRKRYVTANKGEDCRPYRSIQVKESMKRIMEILTEEIARTEKQMLDIIKAHEELSRNYDIITSVKGVGLVTAVELIVKTENFTTIKTASQYAAYAGTAPYEKSSGKMNKGAHISKIGNRRSKTLLYICAESARIHNKEIKLYYERRTIIDKKPHFYVLNAIVNKLLKIIFSLVTKGQMFDSDFIRKDPRVIKDN

SEQ ID NO: 401262 - protein, 337 aa, unidentified
MESNLFMGCDISQGKFNYCLRNSSGTLLEGCVENAAKPIKAWLNQLRKVHALKTEEILFCMEHTGVYASILLRELAARSYTIWLESAMNIKLSLGMQRGKNDRVDAQRIAEYAMRFKDKLRPWQPRREVLSKLQLLNRMRSRLVKAKADLSKFNETARRFLTKEESQLIIQGTKKSLSTITDEIQKADKQIEKLIKGDSHLKRLAELATSVDGIGMVTCSALLVKTNEFKDFQEHKKFACTAGIVPFEHTSGTSIRGKSRVSHNADKEMKKLIHMCAVSVIRLDGVLRDYYLRKIKEGKPKMLVLNAVRNKLISRVFAVVRNNTMYEKNYQYNLAMS

SEQ ID NO: 401263 - protein, 420 aa, unidentified
MKEPNINDFSVLVGIDWADKKHDVCEHVIGTDKYHYSIISSQPESLHDWAMSLKKRYPDQSIAVACELTKGPLIYALSKYNHLILFSINPSTVAKYRKAFANSGAKNDPSDAYIQTEILERHMEKLKSIRPEPAKVRALAQLLEYRRKVVQDKVDLTNRITATLKNYYPQALDWFKEKDTMLFCEFLTKWPSLSAVKKARKQTLMNFFNQHHSRYPTVNEKRIESIKSSMALTDDLGVIEPNQILIEILIPQLKCLLEAITRFDKEIKQRYKGQKDKVVFDSFPGAGPQMSPRIFVAFGTDRERYQDANAVQKYGGIAPVIEQSGQKKWTHWRYSCPKFLRQTFVEWAGQSVRYSFWAKAYYEQQKQKGKPHNTIIRALAFKWIRIAFRCWQTSTPYDESKYLNALKRQGSPLLNYAVNG

SEQ ID NO: 401264 - protein, 352 aa, unidentified
MNNIKFIGMDVHQATISAAVVSEKGALLLETVLEAREKCIVEFMQRWSGEVHVTFEEGTWASWLYELLQPHAERVLVCNPRKIAKRGNKSDKIDARKLAYWLRSGDLSPVYHHDCGVRHLKELSRSYMTLSKDLTRIMNRIKALYRSWGVACAGKSCYGERQRSQWLAKLPQGGVRQRADQLYQHFDAVHPLLQAARKAMLAESKKHMVCARLKKIPYIGPIRATLLIALVQTPHRFRTKRQLWSYAGLGLVTVASGEYQMVQGKPQRHKNPLIRGLNPDCNHDLKYVFKSTANRASGGQGPFHDFYQNLLAQGMRDDMARLTLARKIAAIVLVLWKKGVDFDPQQLKRQAA

SEQ ID NO: 401265 - protein, 420 aa, unidentified
MQHATKKKKIKANAVHVDHRNIVGIDIGKRKHAATAITPKGTVIASLTHFENNRSGVDLLERQVLVPATNRSKPMIALEATGQYWNAIHDELERRGYSCVVLNPIQTGQRGKQRIRRTKTDRLDSALIARTILAGDAQATLVPDEPMYELRLLVRHRWRLIKTHGMMLRYAIGLMDRVFPEYEDVFSKPFLSSVRTLIREIGLTPDVLVVKKKEVRATLEKASKKKLSTAVIDELLLRASKSIGTRQGMDVVNGQLRTIVDYFDFVEKQVEQIDEKLRSRMESLQSPILSLGVGPVIAATILAESGAVEKFAGPCEYSAFCGLDPSVFDSGDSINGVSHISKRGSPLLRWALYMAAQTVVKKHHDFTRIYERHLKNQPKGKRQKGHRYALIAVAHKVARVVWRLMKDGRKFTKRPPKRSV

SEQ ID NO: 401266 - protein, 326 aa, unidentified
MQGKEPSEQDTKTKSNVGIDVSKSWLDVYVLPSGVSMRVSNTLEGIRQLKRRLRHLDLALVLMEATGKWHRHLHRSLFASAIPVAVVDPYRVRMFAKAQGILAKTDRLDARVLAQFAAVMAPTMRPPAPEQVQELAELVRARDSAVAEKTSLKNQLSAAAVTFLRRQLERRIGRLTNDITALERQIHKRIEADQALARRYAILTSITGFGPVVAPTLIACLTELGACSRRQIGMLAGLAPVADDSGERNGVRVIWGGRPAVRRSLYLAALSAARDDPAMKAFFMRLTASGKPAKLAIIAVARKLAVLANTLVAENRTYTPQAPKCA

SEQ ID NO: 401267 - protein, 346 aa, unidentified
MNHSNSKNTVAVMGIDLAKQSFQLHGVDTTGAVILTKKLNRNKLREFIAQLPPCIIGIESCGGSNYWTRVFEYHGHTVRMIAPQFVKPFVKSNKNDAVDAEAICEAIQRPSMRFVPAKSVEQQDIQSLHRIRSQAVGRRTAQANQIRGLLMEYGIIIPKGISYVRKEIPCILEDATNELTFVFRELLSGLYDEMVHLDERIKMLENKLETVCKNNENCQRLLTIPGVGLLSATAMVAAIGDIGAFKNGRELAAWLGLVPRQHSTGGKPTLLGISKRGDTYLRTLLIHGGRTVVRVAAKYQDKRNRWITQLDQRRGKNISAVAVANKNARIAWAILTNKTTFQKSAI

SEQ ID NO: 401268 - protein, 399 aa, unidentified
MFVGWDWASTAHDVTVIDSAGERVHRMAIPHTEDGIARAVAKLADYGDPGELPVAIEATRGLVVDRLLGAGHPVIPVHPNAFHAVRPRWGAARAKNDPGDSFKLADYARTDIHRLPVLAPTLPETLELQALTRQRDCQLALRIAAVSQLAALLDQHWPGGKTIFALLHSPIALDFLDRYPKPQAAASLTPARIEAFCRRRGYSGRRSGAALLDRLRSAPIAASRLGEPVVAQMIRGQVAVVRALQAGIDALDIVIAEKATAHPYAGLLADLPRIGTLNLAQIIGEVGPILERATSFDQLAAETGLAPVTRSSGKTHTVAFRYATNRRARQALHTWLDNSRRSSDWAQQRYAAARARGQRHPHALRTIGRAWLRIIWACWRTKTPYDPARDERAKQPTAA

SEQ ID NO: 401269 - protein, 353 aa, unidentified
MEYASRVDFTGQPIYIGMDVHKKSWTVSIFLEHLEHKTFTQPPMVAPLVSYLHRHFPGACYRAVYEAGYCGFWIHDQLVENGIVCMVTNPADVPTRDKERRRKGDRSDSRKLARTLRSGQLEGIHVPTRARVEDRGLVRTRQAMVRKQTRCKNQIKSLLFLYGLAVPDAGSSWSRNFIRSLEALRFERDSGNLALKAYLTELMQLRQIIAQLNRDLRALSRTDEYREGVQLLKSVPGISTLSAMVFLTELGELSRFASFDKLCGYVGLTPDTHGSGEKQGIGDITRRCNQMLRSLLIECSWTALRKDPALALAYHCYCQRTRKTKAVVKIARKLLNRIRFVLNHRHPYVLKVA

SEQ ID NO: 401270 - protein, 355 aa, unidentified
MKTKGKNLDFTGQPIYIGIDVHKNSWRASIYSSHTFQKTFILQKPFVDNLVKYLNTKYPNGEYQCAYEAGFSGFWAQEQLQAKGVQTIVVNPADIPTTDKERQFKNDKRDSKKIALTLRSGELEGIYIPEKQAQKDRNTVRTRSQVAKNQRRIKNQIKSTLHFFGLEIPEDFSERYWSRKFVSWLEKVSNENKLEGLELLIEEHLALRKLELIAIRVLKKLSKEERHAELTKLLNSVPGVGLLTLMLLITEIIDMKRFKIEDKLYAYVGLIPTSASSGDKEKMGEITKRGNKRLKSAVIESAWVAIKKDPQLLMKYEEYRKRMGGHKAIVKIARILMRRIRRVWLKKEPYLITEY

SEQ ID NO: 401271 - protein, 312 aa, unidentified
MEYVGIDVSKDDFYADMGDGEAVRFANDDAGVAAFLGRLAERGLAPSSTTIGMEATGVYHFLVADRASAAGWGVRVINPLLVSRLGKATLRHAKTDPKDATLVRAATMQGLGHAPPGRETMRLRALVQERASLVAMRAKLRQLQHVRAVRGASLDDPGEDRYAPVETALSAQVSALDRAARRVDAATQKLLRSIPGIGPACAAALAAKVGDARNFPSPEKLVAFVGLDCRVHESGTSVRGKGFIVKRGDGMLRHLLFLAANVSRRHVPELGAYYAKKKGEGKHHYSALCAVERKLVHLVWAVWTRGTPYARR

SEQ ID NO: 401272 - protein, 459 aa, unidentified
MYTIGLDLAVQAAHKAVVADEQGRFITPILTLRTRPRELDQLLTRARNGKPDMALRVVMEPTGMAWFPIAVYLIRHDVTIYLVNSQEVADLRRYYKRHAKSDRIDARVLARLPLVNPEHLHRLHLPSAKASACQRSCKQLDRLGTLISAIQNRVQAIDRFAWPGLEEQVFADPFAPAARWMRTHWYEPQRVLEAGVAKIREQLQASSEAADSTGEWVEALVDLATEVIALYGAENQYLDFAQLQAEVCREQEWLTALEQQHQTLRKKIVRPLYRQIHPSRNLETLKGVGQDSAAVYASFIGEAERFSSTRVFRGWSGMVPDSAQSADSEAKGLHITQAGPGLIKKFAYLDAEIARRWDPQMAAIYYDQVINKGKHHNQAVCACATHLLDRVLVVLREDKAYELRDVDGTKVSVEQAQAIIAERYTVSQEARQRTTKRHRKAQAERQAERNSKGKGAEAW

SEQ ID NO: 401273 - protein, 324 aa, unidentified
MNAAEKVVLRKKLRRKEMVAFFKALAPTVIGIEACGAAHYLARLLGSFGHEVKLIAPQLVKPYVKRGKNDGADAEALCEAMSRPSMRFVPVKTAEQQAALMMVGLRDRLIRNCTQLSNAIRGYAAEFGFSAAKGKAHLVPLLERIQADESVPVLARELFTAQAEEYARLQAQIDAVDAKLLAWHKADESSRRLVKIPGVGPIGAVLLMLKTPAPELFRSGRQFAAWIGLTPKDHSTAGKVRLGGITRAGDEALRSVLVVGATSVIQHVRRGGRGSPWIVNLLKRKPPKLAAVALANKMARVAWKLMVTGERYAAKSVPSLANAT

SEQ ID NO: 401274 - protein, 468 aa, unidentified
MKKSGVVKRLRRLTRRAAADRSQSCVRRNSRQGLQPSMASEQPTPPGSGSSLTGISPDATSSVSRSAAANADIAGKQMAIGTLLGKLIAKAAARGGGRSREFSVKGEAVMENTMAKSKVGLSVGIDMHKDQLTIVVLQADGQVHDKRRISCRAPCRIKNYFIALPRPWHAAVEAVGFYHWLWDLIDPIADKLVLANAVEVRRRAGTRPKTDYRDATWLAMLLREGRFDEDHHLRCFVPDAQLRGLREMTRFRHRLARKLSHDKNSFRRILQKQNLSGPKTLDAQHALMWMKAYEDKLCEQRQFMLRQFCDGIIAYERQIDDAHRRIESMIVSDPEWSHQAELLMSVPGIGLLSAATLMAEIGDWQRFDHVNELVDYVGLAPRVFASDKTVRHGRINKTGPRDARWILQQAAWVAIRCDQNIKKLWWRIGQRAGRKKAAVAIARRMLVWMYFMICRDETFRRFDSKVAQ

SEQ ID NO: 401275 - protein, 359 aa, unidentified
MKKDNRFVGLDVHAETIAVAVAEADGEARSLGVIPNRSEAVRRLVKKLGPAELLQVCYEAGPCGYVLYWQLSELGVHCDVVAPTLVPVKSGDRIKTDRRDALKLARSYRSGDLTPVWVPDAEHEALRDLVRAREAAKKDQLRARHRLQKLLLRRTWVKTLQLEPAALAATLLDYIAEVDHAHERIERLERAIDQAIEAAPDPIRAVIEGLESLRGVARISAATIVAELGQLSRFARAKQLMGYAGVVSSEHSSGERIRRGAITKTGNAHLRRILVEAAWAYRHRPYLGGELRRRQKNASERVKEISWKAQHRLHSRYARLMGRGKTKQLAMTAVARELAGFVWAVGVERQLALRPARAA

SEQ ID NO: 401276 - protein, 319 aa, unidentified
MAQNDPVVAGIDVSKDKVDVCIRALGLQQIFPSCAQGHRELVAWLGKHQVNKAVMEASGGYEGDWAKALREADIEVRIVDPKRVRSFAHSAGRMAKNDAIDAQMIAWFAETFRQAPGQVHDAAQQELVALVKARIALVDLKMQLAAQSEHSASGQVQKARDRVLKSLIGEIAKLEATIAARIDATPPLAERAEIIASVPGFAKTTSANLVAGMPELGQVSNEIAAALMGLAPYDDDSGNRRGERHIQGGRRWVRNAIYMPCVGAATLNNPVIKAYYDHLIARGKKPKVALVACMRKLIVILNTMIARRQKWDPSRNALS

SEQ ID NO: 401277 - protein, 350 aa, unidentified
MTTMTPEPGSVTGGVDTHLETHVAAALDHLGGVLGTKSFSATGRGYRQLLGWLRSFGPLHKVGVEGTGSYGSALARHLREHDVTVIEVLRPNRQTRRRRGKTDVIDAIAAARAVLSGEATGTPKTHDGPVESLRLLKVITRSATKSRTQAINQMHNIVATAPDELRAKLRGHKARELVEVCAAFRVRTDDDTLPAITRLVLRELAHTVQHLDTQLAAAKVRLRRITTAVAPDLTAAHGVGPETAASILVSAGDNSGRLAKESAFAALGGVNPVPASSGKTTRHRLNRGGDRDLNSALWRITIVRLATDPATRAYLERRVSEGKSKTETIRCIKRYLAREIYSVLPDRAAA

SEQ ID NO: 401278 - protein, 510 aa, unidentified
MNNFAASASSGYELSSFSEKMNSTRLSNLAVVLEPGNEYSDEDESSLRGAITSGYKEFASVSGRANHQVPPPHLSWKGSNMNESVSEQPLSPKVVAFVGIDWADQKHDVVLRSADDPAKPEHQVIKSEINALNDWIAQMQERFGAKGKVLVCLEHSRGALIYQLMAYELFELYPINPSQLANYRKTFFSSGAKDDRPDADLLSELLLCHRDRLRAWKPDDQLTRELASLNEGRRNAVDRRSELANEIKSQLKLYFPVALQILQNDITTALAADLLVQWPTLAELQKVSPGKLRKFFYGHNSRQEKKILERLALIKEAKPLTADLAIIRPMALRVKLLAQQLKSLLPFIAEYERRIAELFGSHPDRFLFDNLPGAGPALAPRLLTAYGTDRDRFEVAGDLSNLSGIAPVRIASGKKTGKNASVHCRRACPKFLRQSFHEFGECSIRYCPWAQACYQAQRNRGKGHHAAVRAVAFKWIRILFACWKQRIPYDPDRYLKALQNRGSQYAQTAA

SEQ ID NO: 401279 - protein, 420 aa, unidentified
MKIVYPICCGVDVHKTFLVATIITTREITPHYARKRFSTFNNSILQFKQWLLTNNCLDVCMESTGKYWIPVYNLLEDSIRVTVANPKWVRAVKGNKDDVKDSKWIGDLFRLGLVPGSYIPPRPIRELREYTRYRSKLVSCRSSEKNRFQNSWTVCNVALDAVVSDMFGKSAASITDYLLTTDSFDPQHCISLLQRSLKKKADQVVASIEGYQMSNSQKERALLVRSHLDFVDQAIDSLDQKLDVMVAPYESAVLLLGTIPGVDRSSAITIISEIGTDMTQFGSSKRLCCWAGLTPGNNESAGKKKSVRITRAGVYLKPALVQVAHAAVKSNKSSYYKTKYERICKRRGKKRAIIAIARMILTAIYHMFTTGEVFNPSDLYKIDMPQEMLLKQQEKAVKQALKLLASLGLIQSADISVPVA

SEQ ID NO: 401280 - protein, 346 aa, unidentified
MPVYMGVDFHARVQTISYLTTEDGVIEQVELDHLKDDVRGFYQQFAGEVIVGFETSGYAYWFEEMLEELGHRVWIGDPAEIRRLARRRQKNDRRDANLILELMLRGDFPCLHRQSPESREVLQQLRYRQRLVKMRTMTINTLRFMALSRGVSIRGHLSSQASQERMKSLPLSPVLSQQRDELVSLVQELTLKIGRAQQWLEQQARQDPQVRLLMTHPGLGPLTGLCLVHTLSPISRFGNGRRVTGYVGLDPMEDSSADRQRFGSISKQGSRLLRFLLVEAGQVAARQDHDLKQFYRRVQLRRNRPKAKVAVARRLLVRAFIMLRDQIDYAEFLRRGVAARSARNSP

SEQ ID NO: 401281 - protein, 346 aa, unidentified
MEIHTLGIDLGKTIFHIVGLNTSGETVVRKKLSRKQLLLFTATSQVRLIGMEACGGAHFLGRALRQQGHDVRLMPAQYVKPYVKTNKNDYIDAEAIAEAVGRPKMRFVPIKSDDQLDMQSLHRVRERWVGRRTSVVNQIRGLLLERGITVRKGRRHAEAALPGILEDPESNLSGPLRMLLVQLQRELRQLQSQIEEVDAVILKAAHEHEACQRLMAIPAIGPVIATAIVSAIGNGAEFKKGRGFAAWLGLVPAQYSTGGKQKLLGISKRGNCYLRSLLVHGARAVMQCREKQSSGLSAWLGQLASRVHCNVAVVALANKLARIAWALLAKGETYRPPVLAANAVAV

SEQ ID NO: 401282 - protein, 342 aa, unidentified
MQWTVAIGIDTHKHTHVAVALDRLGAQLDAFEAPATSAGYLALYRWAHELGGAAFALEGAGSYGAGLARFLRAAGCSVYECERPKRAERRRGKNDLIDALSAARQLLAGERLGTPRGLSGPREDLRLLLLERRGAVRARTATLNQLQAVLVTAPARLRSRLGERTSEQLARSVARLRAGEGEQAVVRGVLRRLGRRVLSLDAELAELDRELETIVSALVPELIAECGVGPVCAAQLVVSSGDPARMATEASFAALAGTSPVDASSGQQQRHRLNRGGDRQLNRALHVIALTRVRYHAETAAYHQRLLASGKTTREARRCVKRTLARYFHRKLRSLPALALTT

SEQ ID NO: 401283 - protein, 342 aa, unidentified
MDEYDGRQFVGIDLHRQRSVIVRQSESGDQLSAVRIVNDQIALRLELERAGTDPEVVLEATYGWYWAVDVLRDCGAQVHLAHPLGVKGFRYRRVKNDVRDAGDLADLLRMGRLPEAWIAPPQTRELRELVRYRAKLVAIRSGLKAQVHAVLAKAGVLITVSDLFGVGGRQRLAKVPLGAAYAERVRSLLELIDVLDGHEARFAGLIAKRLCNHRGYQALQQVPGIGPVLAAVFVAEIGDVHRFTSPAHLCSWAGLTPKHRESDTVVHRGHITKQGSKLVRWAAVEAIQRYPTTSKIALDRTRIESRRGKNIAKIAAARKLLTLVYYGLRDGHIRALDRPRAA

SEQ ID NO: 401284 - protein, 418 aa, unidentified
MKSWQEITHWAGFDWAKNNHEIVIVDQQGQIVADFVFEHSLEGWQRMRKEVSGFAGLAVAIETNQGAAVDQLLQHGFIVYPVNPVAAASYRKRKVPSGTKTDHVDAWALADALRVDGHGWKVLPPTDPLTQQLRILCKDEVTLIEQRTALVNQLQQALSEYYPAALEAFDDWTHAFTWDFVIKFPTPQALVKAGKRRWEKFMHTHKLWRPETTEKRLKVFAQADQFKASDAIVCAKSQLALSLAKLLRTLQQQLDLYREQIEELFKDHPDHDIFGSLPGAKQVLGPRLLAAVGTDPERYGGHQALQCLAGTAPVSYESGQMHKVQVRRACDKFLRHTVHLWANCFRKTSAWGQTYYEKKRADGMSHACALRCLGQRLLKILFKMISTKTPYDAELHAKNQKKHGSWVIALTTNNEVSA

SEQ ID NO: 401285 - protein, 400 aa, unidentified
MNDSDEIGVFLGLDVGKSAHHGHGLTPAGKKVFDKQLPNTEPKLRDVFDKLKTKFGTVLVIVDQPASIGALPLSVARDAGCKVAYLPGLAMRRIADLYPGEAKTDAKDAAVIADAARTMPNTLRSLELTDEITAELTVLVGFDQDLAAEATRTSNRIRGLLTQFHPSLERVLGPRLDHQAVTWLLERYGSPAALRKAGRRRLVEVIRPKAPRMAKRLIDDVFDALDEQTVVVPGTGTLDIVIPSLARSLGAVHEQRRATEAQISTLLEDHPLAKVLTSMPGVAVRTAATLLVTVGDGTSFPTAAHLASYAGLAPTTKSSGTSIHGEHAPRGGNRQLKRAMFLSAFAALHDPASRTYYDKCRARGKTHTQALLRLARQRINVLFAMLRDGTFYEPRTPRLA

SEQ ID NO: 401286 - protein, 433 aa, unidentified
MEEVTDEPLYRDRVCGIDIGKAGLVATIRVPSDRDPARRMAETRSFGTTRRQVLALADWLRCWQVPAVVMEATGDYWKGPFYRLEAEGFECVLADAKQVKNLPGRPKRDPADSRWLAACFERGAITPCFVATPEFRIIRLHTRYRRDLTEERTREKQRAEKLLESAAIKISSVLTDLHGVTGRDIMDHLIGGERNPKVLAQLARAAARRKISQLEEALDGAEFFTAEHAALLAKVLARIDRLSADIEDLTEVIERLLAPYEEQLAQAESMPGWGRRAAQDAVAETGVDMTRFRTGAHLSSWAGRAPLDHQSGKRAGRAKAKKGNRYLGAITGETAVAAGRTQTREGARHRRLARRRGKAKACVATGNTQLKVYHKLLSNPGMRHQDLGPDYYERQRDIRRQIAHHVGKLGSLGFEVTLCRIPEPDGPGQTQAA

SEQ ID NO: 401287 - protein, 410 aa, unidentified
MAERFVGIDVALREHRIAVLDRDGEAVGPSFTIAASQDGVATLLRTLDARGATAAQTLIGLEASGHLWENLEAALIGAGYRVLVLNPLQTRRYRDVVRRKAKTDDIDAHVIAGLLRSGAAQASYVPDEPIQSLRELARLRARLMADRQDYLRQLVAQLDVVLPEHRTVLGDLLTARARGILAQFPTAPHLANANPRAIRRAAAEAGARGFSLDDATGVRDRARRSLYSGKAAAARAHVVRTLVSQLERLTSAIDEVDRAATALLPPSAPGTGPSDAELLQTIPGIGPQTAATLLGELGALTRFTDARALVAYVGFYPVINESGDRAAPPRLSPVGSRIARHSLYLAAVNAVRRSGEWRTIYLRKKAQGKTAKQALVVVAVKLLHALYAMLKHRQPYNPSRLLVAPATIGS

SEQ ID NO: 401288 - protein, 330 aa, unidentified
MKGSKSRMQGKAMPEPDAMLEVYVGIDVCKDRLDVHVHPLSQRFAVANDAGGWRRLKRKLAAHRVVRIVMEATSKYHRAAHRSLSAAGYAVAVTNPLRSRLFAEATGQLAKTDGVDAAMLARFAEQLAPVTTIPAAESLEELRELTHARTAGVKDHTALRNRLGEATSGFVKAEIAQVLECVAASNRRIDEAIAAHIANDPALARRSELLRSIPGIGPAVASTLIADMSEIGTMTPKQAAALAGLAPYPRESGAKVGQRRIRAVRGTTRHALYMAALVAARFNPSLKAFYKRLVEQGKAKKVALIAVARKLVILANTIISEDRPWMPRTT

SEQ ID NO: 401289 - protein, 461 aa, unidentified
MAKQLGKRKKDGAREDATAGLPPLNLHAAGIDVGGAEHYVAVPADRDDEPVRRFGSFTADLHRMARWLKDCRIKTVVMQSTGVYWMALYDVLESHGLEVNVANARHTKTLPGRKTDVQECQWLQKLHTFGLLNNSFRPTEEIRVLRSYLRQRENLVAAAATCIQHMQKALTEMNIQLANVISDISGTTGLAILRDIVRGERDPHRLAMHKNSRIRASRQEIARSLEGTWRQELLFVLEQSLDLYQTYQEKIQTCDQRIDEQLRSMEPKIDPLSEPIPEPRRGKDARGHQSGFDLRGQLYRITGVDLTRIDGIEVQTAQTIISEVGVDMSRWKTEKHFASWLGLCPDNRISGGKVLKRGTRHVVNRASTALRLAASALLRSQSALGAKFRRLRSKLGAPKAITAMAHMLARLTYRMLKFGHDYVDRGIEFYEAKYQQQQLQRLTKQAAALRLQLVPSMPHVS

SEQ ID NO: 401290 - protein, 439 aa, unidentified
MPDVPWVHRKKGGASMSKKNSSPAGLQALYARVCGLDLHKKLIVACVRVLNTKDGTVQSTLRKFGTMTPDLIELRQWLTEQKVTHVAMESTGIYWQPVFNLFEGHFKLLLVNAQHLKKVPGRKTDMKDAEWIAQLLQCGLLKASFVPDRQQRELRDLTRQQTKLVQQRNAVDNRIQKVLETANIKLGSVASDVLGVSGRKMIEGLIAGEKDVTALAELAQRQLRGKIPELQRALEGELTDHHRFLLRQLLEQYEFLEKKIASVSERLGAVAPPSFRAAVEQLDAIAGVGERGAQALLAETGTDMSRFPTHKHFASWAGQCPGNHESAGKRRSGKTPAANRHIDAVLTEMAHAAERTKNSYFKSQYHRLAGRRGKKRATGAVKHSLLVTVYFMLRDNKPYKDLGVDYFNKLNPQQRIRYHVRKLQELGQEVELSPMADAA

SEQ ID NO: 401291 - protein, 371 aa, unidentified
MKRRSSFGCRNMNNVVAGIDLGDSVSAVAVLSPNGDVTDRFSFPMDDEGYSLFSSRVPKDARIAFEALGTAYPFSRTLMELGYQSITVAHPKELSWIVKSKKKNDRVDSLKIAKLHLVGMLPEAHLLDRDEQIARDLLVQRVTLGVEIGRMKNKLTGYLKREGVYQSLPQTYDDFSAVRRLALASLKFNDQRDLVVKTMLDRLEFLEGQCIPFENEIRKMARGSDDVKLLITIPGVDFYLGSLVSSYIGDVNRFPTFNHLASYLGIIPVSRDSANVKRRGRMSKDGPPIARWALGVMVDTVMQRNKQVRSYYVAQKERTGNGKYAHVLTMKKLARMIYHMLKTRQHWKWEDESLTERKLSKLEYGEEGNEF

SEQ ID NO: 401292 - protein, 311 aa, unidentified
MNNTIGIDISKDTLDAHRLADGQHKQFLNGKTGHAQLVKWIGKQSDPLIIFEATGAYHRQLERVLCTHIIPFVKVNPKQARRFAQASGKLAKTDRVDCEMLAKMGAALQLMPKPFTAENLYDLKELLSARRALIKDRTAAKARKATVINALIKQQLEKRLRQIKNDVAKIDALMLDVAREDQYMSERLDILFSIPGIGVITALMILVDMPEIGALNNKQVASLAGLAPMSQSSGKWMGKARIQGGRPNLRNAIFMPALVAIRHNADLKTKYDQLVTAGKEKKVAITAVMRKLLVLANALLRDNRKWAEKAA

SEQ ID NO: 401293 - protein, 341 aa, unidentified
MEEYIGLDVSMKETSVSIRRAGERIWRGKCASDPRIIAELIRKRAPAVRRVVFETGPLSIWFYHSLRTEGLPAICIDARHAKAALDMATNKTDANDADGLAQLAEVGFFREVRVKGFDSMLTRTLVAARTRLVRITTELSNQIRGVMKTFGLLVPAGKGSTFEKNVRSLLADQDRLASIVLPMLEAWRGIRVRAAELGRQLVRDARQSRACRILMSIPGIGAITATSFTTAIEEPDNFRKSRSVGAWIGLTTRRYQSGEVDYDGHISRRGDRPLRGLLYEAAAVILTRCSTHSTLRTWGLQLRERIGFKRAAVAVARKLAVIMHTMLKTGQLFNPNAGAAA

SEQ ID NO: 401294 - protein, 331 aa, unidentified
MKKKSNYIGIDVSKKTLDIVLYNMDLGKKSPHLNVSNTKEGFEEIINWLKMQNVKLNKAFFCMEYTGIYSDDIASFLSKKKISYIRVSPLHLKRSMGLTRGKNDKIDAFYIAKYCYSNKDELTSEKASIPVIKDLKRLLSERIRLVKLKTANKIFIAEKKLHVNKRAAIRAKLLLEIYQTQIKEIESEMENIITNNSDIYINYKLMRSVIGIGLISATMIITYTNNLLNISDARKFASYCGVAPFEHSSGTSIKGKTRVSPFANKKIKGALSNGARAAVQFDPELKKYCERKLNEGKHYGVVMNAVKFKLINRVFATVKRGTPYVVLKQAG

SEQ ID NO: 401295 - protein, 378 aa, unidentified
MKVTYQTCCGVDVHKSFLVATIVKTTGGIEPSYQKKRFSTFNNSILEFKQWLLDNNCHDVCMESTGKYWVPVFNLLEDEINVVIANPKWVKAVKGNKDDTKDSKWIGDLFRLGLVKGSYIPCKIVRILREYTRYRYKLVSCRSSEKNRYQNALTVCNVALDSVVSDIFGKSSTSIIDYLLEQSGTSINHEEINDVDKMIENMISSNSDSENAVQLLCTIPGVKRDSAITIISEIGTDMSQFSSSKRLCCWAVLTPGSNESAGKKKSVRITRAGVYLKPALVQCAHAAVKSDKFPYYKKKYESLVKRRGKKRAIIAIARMILTAIYQMLSTGEQWNPSDLYKVDMPVALVEKQKAKAIRQAKKLLQREGMLPPDESLAS

SEQ ID NO: 401296 - protein, 393 aa, unidentified
MKVTRIGLDIAKHIFELHGVDRHGRVAIRKTLRRERVLEYFSQLPACEVALEACGGAHYWHREISKLGHTVRLLPAHKVKPYLDGNKNNAHDAAAICEASSRPSMRWVEPKTIAQQDLQSLHRVRQVTVRQCTLLANHLRGLLLEYGIAVARGTAALQRALAQLLEPDEQRLSPLLKQLIAGQWRMLKLHEQQVKVHDRRIANIARHDASCQALLKVEGIGPLTATALVATAGNGRQFKNGRHLSAYLGLVPGHSNTGNKTVMLPITKRGNRYLRTLLVHGARSTLYHARRKTDPRSLWLQRLQAKRGHNVAAVALANKNARIAWALLRFGQAYRPNLAHAPVAERGATPAASAPGRRAGLTLKLHRVSAASAESPIFPSRPQRVKGGTEKCS

SEQ ID NO: 401297 - protein, 333 aa, unidentified
MVEGTKGSHHKEGSTKMSRHTMICAGIDTGKCKLDVALDQGPDRLEVENAGEGHATLLAWLRKHRVKRVGIEASGGYEQAVVSTLRRNGFVVIVFQPAQVRAYAKYQLQRAKNDKIDAALIAICTAEAKKIHPPPDPRLAPFAELLTIIEQLTEDVARDKTRREMSRNEESRRFWSEEIARLKRLVRQRLKQLVTAIRQHRDLAQRLDLIASVDGVGLRTAVAILVRMPEIGRITRGQAAALVGVAPYDEDSGGHTGARHVEGGRERLRESLYTAALPAAFHWNPELITIYRRLRAAGKPHKLALIACTRKLIIFVNTVVARGTPWVPRAAIV

SEQ ID NO: 401298 - protein, 408 aa, unidentified
MYNAVGIEASKLKSTITIIQPAWVVIRNPFDVLHTSDKLNTLVTYLKSLEGETRAVIECTGRYHEPVVKSLSEAGIFISAVNPKLIKGQKQNTLRKVKSDPADARKIAKYALDNWAELREYSSMDTTREQLKTLNSQFTFFMKQKVAAKPNLISLLDNTYPGVNKLFDSPTRDDGSEKWVDYAYSFGHVDCVHKIGLKAFTERYEAFCKKHHYNYQKNKPALLFEESKQLVAVFPKEKSYKLLIQQSIQQLRLVSEHIEIIRKEMNGLASTLPEYETVMNMYGVGETYGPQLIAEIGDVSRFTHREAITAFAGVDPGVNESGQFMQRSNRASKNGSTRLRKTLFQVMSTYLKNKPVNEPVYQFLDRKRAEGKPYLVYMTAGANKFLRIYYGRVKECLRNLEQSQIEEF

SEQ ID NO: 401299 - protein, 442 aa, unidentified
MAAGKKDANGRGSAPAGTAGVAAEHGGDGAEVSEEQTRVIERAAAIDVAKGSGMVCTRVPGSRPDRRRQKVWQVPAAYHAVIALMDHLRCEGIQRLVLESTSDYWRIWYYLAEAAGLEVWLVNARDVKHLPRRGKSDRLDCVWHCKLNERGMLRRSFVPPQAVRDLRALTRTRSRLAQDQARHQARVEKILEDALLKISVVISDLFGASGRRFLDALVAGERSPAALAALGDKRLKATRQELEDALTGQFRDIHAFEIQTHLRILDVITEEIARLDEAIGQQLALVPRTAPACTACGEIGGCHPPGCAAAGTALLGLAERIDEITGVGVCNARVIIAELGTDPSQFPTPGHAAAWARLTARTLQSGQSARPGRTGKGNPYLRGALGQSAMAAAHTDTRLGAMYRRIARRRGKQKAIVAVARVICEIAWILMCATRRIDVSPA

SEQ ID NO: 401300 - protein, 409 aa, unidentified
MLFAGIDWASAEHAAAVHDDAGRALASFMVAHSEDGLDKLVGRLRAFGEPGELTVAIERPDGRLVDRLLEAGHPLVAVSPNAIKAWREGEVVSGAKSDPGDAAVIAEYLRLRFHLLKPLRPFSDHTRALRAAVRARGDLVAQRTAAHNQLEATLDAFWPGAKEVFSDVTCKIALAFLQRYPTPASAERLGDKQMAAFCKKHGYTGRRSPAELVERLRRAPVGIAAGAETAARKVAVLGYVAVIASLNAAIKDLDKEVATRLGEHPDGEIFTSLPRSGSISAAQMLAEWGDCRQAYAGPEAVAALAGMSPVTKKSGKHKAVHFRWACNKRFRTAVHIFADNSRHGSDWAAGIYAQARARGADHPHAVRILARAWIRVIYRCWIDGVSYDPAKHKAAVALTTNSDVTSQAA

SEQ ID NO: 401301 - protein, 354 aa, unidentified
MRGFYQLEVGLDMGWTSFRYEVRDEADRRIERGGEESTPAGLRRVLAKYQGKERVRVSYEAGTQMYWVDEVVKGMGMESYPFHAASFALIVKSRNKTDKKDAETIARAAVKEILPAKIVVAEGEERELRELMSERETRKRELVSYGNQLHALAIREGFSLYASIRSTKEEDWEQAVSRFEGRARAEAKRVYRMALVLFQILEEVEGRIQELTSTGELGEARRRLETHPGIGRWLAWCGPRAARFANGRKAASYFGLVGSTYESGQVSRLGSITKAGPPLVRRLLMQAAWAFLRSREGQRSGWGRWFARQAKGKKRIKIAVVGLARRIVTAAVASLRNQTDWDAQRLLGVGGTRG

SEQ ID NO: 401302 - protein, 375 aa, unidentified
MKEKVRFLGLDVHAETIAVAVAEPDGSVRSLGMIANRAESIRKLVKRLGPVEQLKACYEAGPTGYVVYWQLAELGIPCDVIAPTLVPMKAGDRVKTDRRDAERLARSFRSGDLTAVWVPDAGSEALRDLVRAREAAKQDQLRARHRLSKFLLRSGQRPAAGLKAWTQLYMAWVRQLRFEQAAQESTRLDYLHEVEHMAERVVRLEQAIAEAVKLASPEIQEVVKDLQALRGIAQISAVTIAAELGNISRFESARQLMGYSGAVPREDSSGKRTQRGSITKTGNAHLRRIVVEAAWSYRLRPGVGPGLRKRQEGVPEELKEMAWKAQNRLHKRYSRLAAAGKDQRKIITAVGRELLGFIWAIGIKAETAAKQRMAA

SEQ ID NO: 401303 - protein, 350 aa, unidentified
MLIIGCDFHSRFQQIAMLDTQTGEIVERRLEHESGEAERFYRSLPRPVRVGLESSGHAQWFERLLAELGHELWVGDAARIRAAVVRKQKTDTRDASHILDLLMTNRFPRVWRPSPAERDVRQLLVHRQKLVWARIKVKNQLQTLAMNQGVCIRRKLWASAGRRALEGLTLGPWTSRRRKELLQMLDQLNGSVEELDRAVGEEAQKRADVVRLMTHRGVGPVTALAFVLTLGPVERFRRSKQVVSYLGLNPQEHSSGGRQHLGSISKQGNTMMRYLLVEAAQTASRFHPELRRNYQRLKSRRGSAVAKVAIARKLAVRLYWMLREKADHAQLVRMQGSPRGTLVDASPSRF

SEQ ID NO: 401304 - protein, 349 aa, unidentified
MRIIIGCDFHPGYQRMAMLDMDTKELVEKTLSHENREEVRAFYAGLPRPVLVGLESSGQSQWFEGLLAELGQELWIGDAAKIRAAAERKQKTDRRDALLILQLLVEKRFPRIWVPTASERDVRQLLLHRAKLVRMRTQVKNQLQALALNQGVRRKGKLWSAAGRKELQGLPLLPWAGRRRAELLVLLQQLEIAIGDLDAAVAQEANTRSAARRLMTHPGVGPVTALAFVLTLGPPSRFARGKQVASYFGLIPSEASSGGKQRLGHLSKQGNSFMRWLLVEAAQSAVRHEPQLRRAYQRLAHRKCRALAKVAMARKLAVRLYWMLREEMDYAQLIQGSYAGEPGSFRGRS

SEQ ID NO: 401305 - protein, 316 aa, unidentified
MKTVVAAELFVGMDVCKAWLDVAVHEPAEVWRVNNDDDGRARLVERLHQLRPTLIVLEPTGGFEMLATAELTQAGLPVVVVNAKRVRDFARASGQLAKTDKLDARALAHFGAAIRPPVRSLRSEDEEQLTALLTRRKQVLDMLTMEKNRLVTVRAKMGSDIEAHIQYLVHSLKDLDQEIAAFIANSPIWKAKDALLQSAPGVGPVTSATLLGMLPELGRLNRQEIAALVGVAPLNKDSGRKQGRRRVYGGRGDVRRVLYMAALSAKKFNPVIKAFYERLLKQGKAKKVALTACMRKLLVILNAMMRSNQPWRTPSA

SEQ ID NO: 401306 - protein, 347 aa, unidentified
MPSNENTIHVAIELSTSLWLVGTRLPGAAKCRMHRMDAGDTAALLTLLSKLRTRLAKAADHDADLVCCFEAGRNGFWLHRLLTANGVSTYVVEPTSILVNRRARRAKTDRLDAEGLLRVLAAYVAGDHQICSMVRVPTPEEEDAKRPHREREHLVQERTRFENRILALLATQGIRERPSLRTWERDLDALQTGDGRPMPSHLLAELHRLRRRLVLTMELIREVDAERTAALAAAPNAAASQKVTALQRIRGIGENFAAVLVREVLYRPFTSRKQLASYVGLTPTPYQSATMDRDRRIGRAGNPRARTTMVQLAWLWLRYQPESALIALWHYAETGQIPEGVTVRAAA

SEQ ID NO: 401307 - protein, 387 aa, unidentified
MYFVGIDISKFKHDCAIVDELGDVITPSWSFQNDREGFSLLKELLDALDGEKKIGLEATGHYGQNLKLFLENNDFSFIEFNPLLINQFVHSKSLRKTKTDSIDALMIAQYLMTVEYKPYPPSFYTLERLKSLTRFRDNLIRQRSKQLVELTNILDKVFPEFKPFFKGRFSATALYILSHYASPEKISNMNSKSYEPLRRLSRGRFSMVDFVELKTLVRNTVGSTCDYLLQEMEITIDIYNQLQSKVEEIELQIHDCVLALAPPILTIPGIGAASAAVILSEFGDLSKFNSPSKLLSFAGMEPGYFQSGTSESTGKMVKHGSSHLRYAMMNCAQTVINNEPTFAAYYAKKRAEGKEHRVALTHVAKKLLRVIYTLQTKELSYNPDLVR

SEQ ID NO: 401308 - protein, 408 aa, unidentified
MPNRIAGIDVHKRVLMVVVLDPEQAVIVGKRRFGATTAELTHLKAWLQEQTADEVVMESTAQYWKPVWLTLEGHFRLRLAQAWSNRAPRGKKTDFKDAERLARRHQAGELTLSFVPEAAQRQMRDLTRRRTQLTRDRVRIQNQVESLLEETRIKISSVLTDLFGSSGLRILTALAGGENDPATLAALADARVQKSPQELTDALTGTVNLVQRKLLAQHLEHLRLIDRQMEELSGLTAEALHDEQDAITRLTQIPGIRVQSAQQIVAEAGSKAESFHSAGQFSSWVGVCPGKQESAEKNQSSRSTKGNSYLRRVLCQAAQAAVRTNNSFFQQKFRRLLPRLGYVKAIWAIARHLSVVIWKILHDGATYKEFGGPPTPQAAKRRLQRLKKELRAMGYSDELQPMPSAHPA

SEQ ID NO: 401309 - protein, 356 aa, unidentified
MQTQVTKKIDFKGKDLYIGLDVHKKSWSVTILVEGMEHRTFTQPPDPRILFNYLQKMFPGGTYYSAYEAGFCGYGIHRELNDLGIKNIVINAADIPSSQKDQLQKRDPVDSRKIARALEKGLLRAIHIFDRDMEELRSLNRTRFYLMRDFRRSKNRIKSFLQYYSIFIPPEFDNNQWTLKFIGWIKQIQMKTSSGQDAFSNLIRSFEYNREQILILSRQIRIRVREYDKELYNLLKTISGIGPLTSSALITEIGDINRFPHINHLSSFVGLVPRVKQSGETSYNAGMTFRCNEYLRTLLIESSWQAIRLDPALMQYYQQHIINNKGQKVIINVARKLLNRIRYVMKNRQPYVTGVA

SEQ ID NO: 401310 - protein, 416 aa, unidentified
MRNAADASPPAGADSGPAHSAVQMNGTQKETSAMRSVALDLAVKKISFCEVEAGAVLARKTVSSLSSLKEVLGPGCVPARVAIEACREAWHVHAVLTKWGNEVQLVDTTRVRRLGIGGHGRKTDRIDAEILARAVEKGSLPKAHLLSPGRQRLRAELGVRRALVATRADYVTTLRGLARAHGVSLPSCGTDQFVSKLRKLKLPPGLQELIAPMAEVLEKVDLELATAELRLQRIVDEDPQIKLLMTVPNVSVVVAAVFVSVIDDARRFTDAHQVGAYLGLVPLENSSGDRRRLGAITKQGNSYARATLMQASWGLIRMARRDDPLTQWALAVACRRSKYIAAVALARRLAVILWAMWRDDTAYDAARVGIRSAAGLQRHAQDITMRATAMERAAQKARRRARPLERKLAQKKEKEL

SEQ ID NO: 401311 - protein, 427 aa, unidentified
MSQGTADWSERAAFVGFDWASDHHDVVVVDGRGMIVEEFRFEDTAEGWQLFHKKLSPHPNPAVALETSSGATVERLLAAGYAVYPINPKAAKRYRERKAPSGTKTDRIDAWSLADALRLDGHTWRALKPDDPLTVELRLLCRDEIGLIGQRTALVCQLRAALGEYYPVALQAFDDWTSPSSWAFVEAFPTPQALHQARKRRWEKFLHVHKLYRPETYEKRLALFAQARAFCGSKPATQAKSLLALALTAQLRALQSHLDKYRERIQELFTQHPDHELFGSLPGAGEKLAPRLLAELGDDRERFDSPQALQCHAGTAPVSYQSGQINKARFRIACQKLLRHTVHLWANLSREKCPWAEAYYRTKRAEGQSHACALRCLGQRWLKILWKMWQTRTSYDAELHQRNQLKHGSWVLNLMTPKTTALAAGEA

SEQ ID NO: 401312 - protein, 364 aa, unidentified
MYDSTTTVAIGLDVHARSIRLAAVRADELLEERTLPYDEEAVERAVRRWPGVRCCYEAGPTGFSLHRFLVERGIDCQVVAPGLVPQRPGDRVKTDSRDARKLARLLAGGLLEPIHVPAPELEAARDLVRAREDARLDRMRDRHRLSKFCLRHGRRLPGLSWGVARRKWLSEQRFEFAAQQQTFDTYVHAVDLVDARIEQLERAIRETADQQPWRELVGKLRCLRGIETLTALALVAEIGDFGRFRTAEEFMAFVGVVPSERSSGEQRRQGSITKVGNAHVRRLLVESAWHARRRPTVGYELARRQRGQDAVVVERAWRCQQRLYTRWQRMAGRGKPQQKIVVACARELAGFVWAIATDQPLRRS

SEQ ID NO: 401313 - protein, 338 aa, unidentified
MTLYGGIDLHSNNSVVALVDADEHVVYRHRLANDAAVMLAALAPFREEIEGLVVESTYNWYWLVDALMDAGYRVHLANTAAIVQYSGLKYSDDDSDAAWLAKLLRLGLLPEGYIYPKEQRAVRDLLRRRSRLCQQHTANVLAVQNLFSRNRGRSLSANAIRRLTPERVRELLPDPNLALAVQSTLIAMRGQEAAMDLLERQACTQVRWRADYLHLLTVSGIGKVLGLTIMLETGPVGRFARVGNYASYSRLVGSERLSNGKRKGRGNTKSGNKYLAWAYLEAANFAVRYNPTIKRYYQRKRAKTNGVVAIKTVAHKLARACYYMLRDGTDFAVERAFA

SEQ ID NO: 401314 - protein, 356 aa, unidentified
MKYYTTTTEFNCGIDLHARQMYVCVMDRQGKKLVHTNVKNNDFEFFLKLVAPYRHDLTVCAECMFGWYWLADACHAANITFVLAHALYVRAIHGGKNKNDRVDSEKLTHLLRSNLIPPAYVYPSAQRPLRALLRQRIFYVWRRSELLARIQSHQLAHNRKTARQTRSNRDPWEEQLLAAEDHPLRQLALKNDLAMIRHFDTQLIGLEQELLKLSKQSAQRDYTLLQSVPGIGENLGLTILHEIGQIERFATVKDFLSYCRLVKGTVASAGKIKGLRGAKLGNPYLRWAFGEAAVIAKRDHPILGPLSQQLEARMGGNKFKANTVVAIKLARAVYFMLKNKTVFDPDRLVAVLSKAA

SEQ ID NO: 401315 - protein, 339 aa, unidentified
MTAVYGGIDLHSNNSVVVVKDAEGKVLYRRRLENDLVRIAGALAPYRDALSGVVVESTFNWYWLVDGLMAAGYPVKLANTTAIQQYSGLKHTDDESDAEWLAEMLRLGILPTGYIYPPAERAVRDLLRKRTHLVRQRTANVLSVQNIMRRSDGARLKGDVIKTLSVQELHELMPQPDVALAMGARVAVIQCLAEQIEAIEKSVLERGKLRKPFRLLKTTPGIGDILALTIMLETGAISRFASVGDFASYCRCVRSTKLSNRKKKGEGNRKNGNRYLAWAFMEAANFAIRWSAPIQRFYERKKQRTTGVVAIKAVAHKLARAAYYILRDEVAFDVTKAFA

SEQ ID NO: 401316 - protein, 368 aa, unidentified
MDEIITGFVGLDAHAESTAIGFAEAGRAAPRFVGTVGAKRTELSKALGKLGEPGSLLVVYEAGPCGYGLARDLTAAGYRCEVVAPSKIPKKPGERIKTDRRDALKLSSLARAGELVAVTVPDERDEAIRDLSRARTDAVRARLKARQQLKALLLRHDRRYTGKTSWSTAHERYLATISFPHQAQEIAFAEYRQAVGEGEARVQRLTQALAQEVERWRMQPVVRALMTLRGLDAVAATTIVAELGDLKRFAHPRELMGYVGLVPSEHSTGSARRQGAITKTGNSHVRRVLVEAAWNYRYSARISRDLQLRQEQQPPAIRAIAWRAQLRLNHRYRRLAARGLQHNKLCVAIARELVGFIWDVGRHVGPSA

SEQ ID NO: 401317 - protein, 410 aa, unidentified
MPKIVFPVCCGVDVHKSFVVACIATTNEQLVTTYKSKRFSTFTGDLRRFAAWLTEHACVNVCMESTGKYWIPVWNILESTCKLVLAHPKYLKAIKGKKTDKRDAKWIADLFKHDLLNGSFIPPEDIRQLRDLVRYRYKLTNFSVGEKNRAQNCLTVSNIKLDDVFSDVFGKAASAITERILESNDPFDVRPYLTKNIKASPDEIQAAVDGVMCAQQAEKLRIIRSHMDSLDLCKMNLESEILTVAEKFLPQINLVLTVPGIQSFSAIAIIGEIGVDMTVFETSRHLCSWAGLAPQNDQSAGKKKTTRISRAGAYIKPLLVQCALAATKSSKHPEVKNRYQAIKKRRGHKKAIIAIARMLLTAIYNILKKNEPYNAELYRQSEKLPTQREVSVEQAIYILQRQGYLVTNST

SEQ ID NO: 401318 - protein, 410 aa, unidentified
MLLVGIDWAERHHDVCLMATDGSVLARERITDGMAGVARLHELIASWVEEPAEVVVGIETDRGLLVGALVAAGYQVIAVNPLAASRYRERHTISRAKSDRGDARMLADLVRTDRHHHHHHHHRPVRGDSGLAEAVKVLARGHQQLVWARQRQANIVRSALRAFYPAALAAFGSDPGGRDAVAVLGLAPTPELGRRLSEAELVAALRCAGRRRQVDARAAAIRAALVGQQLEAPPVLAAAYGQVVAAAVAVIANLSEQLAGLEAALMAAFTAHPDAGIVRSQPGLGVVLAARVLAEFGDDPNRYASARARKAYAGTAPITRASGLRQVVLARAVGNRRLSTACHPWPFAALTGSPGARRSYDAHRARGATHHQALRALANRLVGILHGCLRHPQPYDEQLAWPTSTASAAA

SEQ ID NO: 401319 - protein, 313 aa, unidentified
MEVVPIFVGIDVSKARLDMAVRPSGIKESISNDEAGIKALVERLGGIEPTLIVMEATGGFERHAARALACAELPVVVINPRQVRDFAKATGQLAKTDSIDAEVLARFGEVVRPALRPLPDAVSQELRALTARRRQITGMIVAERNRISGASKAIRKRIEAHIRWLAAELERVDTELDQSIRQSPIWREKEDLPKSVPSIGPVISRTLLAELPELGSLNRKQIAALVGVAPFNRDSGTLRGRRTIWGGRATVRAALYMAALVASRRNPVIRDFYTRLRAAGKAPKVALTACMRKLLTILNAMLKHKVRWSPVMA

SEQ ID NO: 401320 - protein, 357 aa, unidentified
MPPITPEDAAIIEVTGGVDTHQDTHTAAVIDPVGRVLGTEQFPTTPAGYAALLAWMRGYGRVRRVGVEGTGAYGAGLAHRLRGEGVEVIEVDRPNRKTRRFQGKSDPIDAIAAAKAALAGERTGTPKQRDGRVEALRNLRVARRSAVEQRADTQRQIKTLIVTAPDDQRTRLRGLTTQQLITTCASRRPDRGDAATPSTAVTIALRSLARRHQQLSTEIAELDELLEPLVNAINPDLTAVHGVGVDTAGQMLVTAGENHDRLTCEAAFAMLCGVAPIPASSGKTTRHRLNRGGDRQANAALYRVVLSRLRWDPRTRDYLQRRTKQGLSKKEIIRCLKRYVARELYQIITSNDLQLAA

SEQ ID NO: 401321 - protein, 407 aa, unidentified
MNAVGIDVSKGKSMMAALRPMGEVALQPKEYPHTEVGLERMALDILALGEDTRALMEATGRYHEPVAAALHEYGIRVTVISPLFIKQSGGGSIRKVKTDKADAMKIAKYALDNWVDLREYTPMDAIREQLKLCSRQYNLYMKNVVALQNNLTSLTDKTFPGVNELFSSPDRADGSQKWIDFVTTFWHCECINLVSEAAFTERYRKWCKRKGYHFSERKAAELYMDSMGHVTTLPRNSNTKLLITTAAKELASAKATLAVLRAEMTRLARQLPEYETVRAIYGVGETTAVQLMAEIGDVRRFPRRSSIVSFAGVDPAVDDSGKHISKSNPTTKRGSPHLRKTLYQIVCTYLRKAPFDEPVYQFLDKKRAEGKPYFVYMTAAQNKFLRIYYARVKECLIAADAKELSKD

SEQ ID NO: 401322 - protein, 346 aa, unidentified
MSVSSPTPQYQLYVGVDIAAKTLTAAWMAPGATPGRPLTVDQTPQGFATLQDRLLATGHPAAAILVVMEATGSYWVGLATTLAQAGFVVSVVNAAQAHHFAKALLKRAKTDAIDAQTLTQLAARLEPAPWTPPPAIYTELQQRLAQRDTLMTLRQQVRNQRHALQHLPVVIASVLERMEALIATFDAQIAAVEQEIEQVLSQDAAWATTATLLLSITGIGLLTAAWLLVTTLNFTICATAEEATAYAGLAPHPYESGTSVRGRAAIGHGGNGRLRTALYLATLSAAQHNPHIKPFYARLRAAGKPKKVARCAAARKLLHLAWAVATKGVAFDPTYQTQHACSGSST

SEQ ID NO: 401323 - protein, 314 aa, unidentified
MYHYIGIDVSKKVLNIFDGKKDLIFDNKENLSSFKKYLKKRYSDFSSLVILFEATGIYSYHLKAFCATHMLKAYIINPQASHNFTKSLGTRSKTDTTDARTIWAYHGLIVDKDIRIPKVDPVLTTLSSYLTSYRLTLKQRLSLTNHLEGVKDKTLYRLLKKEQERLCKLEHELLIQMDTYIKKYPKLNEDYQRLLSISGIGQKTAISLLTLFHTYPDTNRNQITALIGLDPIQRQSGTSVHGRSRISKHGNQMMRKCLYMPTLSSIKYNQKIKVFYDRLVLKHKPKKVAVIAAMRKLLLIAHAVYKNKTVYVPG

SEQ ID NO: 401324 - protein, 390 aa, unidentified
MITFGVDIGKFFHTAIAVDAGGQALAPSFAFENSEEGFQLFLQKVALYQKQDTICVGMEATGHYWLNLYCVLLDLGIELHVVNPLLTDAMRRMSVRKTKTDTVDCGYIADVIRMGRYSDVAVQTEDVQNLRELCRYRCSLVDEIAKHKNHVIGVLDHLFPEYHKLFSNIFGKTSLDLLSKYPSPDAILKLGTKRLADFLAKHSRGRFGEEKALEVRSACKHTVGVNRANAALCFELHQTVELIQFVEDQIDEIEKRIEQIYSQCECYLDTIIGVGVTSAAVIYSEIGNIENFDNPKKLAAFAGIDPSIKQSGNFTSTHNKMSKRGSPYLRRALWNAATVAAQKDPVMSAFFQKKRDEGKDYMTAIGAVTHKLCNIVFAVLRDKKPYVPRA

SEQ ID NO: 401325 - protein, 424 aa, unidentified
MKVTYQTCCGVDVHKSFLVATIVKTTGGIEPSYQKKRFSTFNNSILEFKQWLLDNDCHDVCMESTGKYWVPVFNLLEDKINVVIANPKWVKAVKGNKDDAKDSKWIGDLFRLGLVKGSYIPCKKVRILREYTRYRYKLVSCRSSEKNRYQNALTVCNVALDSVVSDIFGKSSTSIIDYLLEQSGTSINHEEIASKLLRSLKSKEDAVIESVEGYQMTDAQKYRMRLVRAHMDYITAEINDVDKMIENMISSNPDFENAVQFLCTIPGVKRDSAITIISETGTDMSQFSSSKRLCCWAGLTPGSNESAGKKKSVRITRAGVYLKPALVQCAHAAVKSDKSPYYKKKYESLVKRRGKKRAIIAIARMILTAIYQMLSTGEQWNPSDLYKIDMPVALVEKQKAKAIKQAKKLLQREGLLPPDEPLAS

SEQ ID NO: 401326 - protein, 456 aa, unidentified
MGSEKGHGRSLSLECIEPNAAGIDVGATEIYVAVAADRDVEPVRCFATFTEDLRAMAGWLQQCGMVTVAMEATGVYWIPVYEVLEDAGLRVCLVNARHVKHVPGRKSDVRDCQWLQYLHSVGLLRASFRPESAICALRALSRHRANLVEMAAVHVQHMQKALTQMNLQIHHVLSDLTGKSGLAILDAILAGKRDAEQLASLADGRIHADRETVIKSLVGNYRCEHLFTLRQSLEAYRQYQKMLVDCDRELEQGMGQLPNHPDGGQPPASFEGSKRGKRRKNQFHFDMGKELYRVLGTDLTTVPGLSALTVHTLVTEIGTDLRRFPNVAAFTSWLTLCPGSKKSGGKILSSKTRKSNSRLAAALRLAAQTLHKSHSYLGAYYRRMRARLGAPQAITAAAHKLARIVYHLISTRTAYDESVFAQEEQKQTIRHQHRLHKQALALGFQLVPLPHPEVVH

SEQ ID NO: 401327 - protein, 307 aa, unidentified
MSNSSQIQVGIDVSKPIIDCSILSQSHSLPNSPAGFRRLCALLPPNAHVVLEATGGYERKLVTHLQASSIPVSVVNPRQVRDFARAKGRLAKTDAIDARVLADYGKAMQPKPTAQADPTRQALNELVALRDQLVAIRTQLLNHNEHLKLSVARSALKASLSTLQRKIKALEAAIQKQIHSDPVISSHYSALTAHHGIGQLTAATLLAQLPELGAASRGQIAALAGLAPFNRDSGSLRGQRHIHGGRSRVRRALYMASLCAIRKGPLKPFYLRLRSNGKPPKVALVATARKLLILLNTSLKSSLTIPT

SEQ ID NO: 401328 - protein, 369 aa, unidentified
MKQRDCSRVDEFRQLRDEIRGSEEYLIVGIDVAKAKHTAFFGTATGRSLLRRLVFQNDREGFERLLIQVEAIKVRHGLKKVVLGLEATGNYHKPLGEYLIKSAHQVVLVSAKSVKRNRELLDGRWDKHDTKDSANVADLISQGKCLYYEYPDMKLRELRALLALKRRLKRQEQGLKVRIRNHLLAQYFPEFDRYFSRSETEGLAIVRWCLAPSVIAGLEYEEFVGLVAPRKRGISQQNRLGAIWQKASVSIGCEVSDGVRFEAKVMVEGLRQVRQSLGDTAARIEQVCLGFPEYRFLLTIPGFGPDVSSKTLGAIGDPFRFMVGDQVLKMGGLDLVANRSGKRTDTVVPVISKNGKADLCYSKQSAARD

SEQ ID NO: 401329 - protein, 431 aa, unidentified
MKVINNNFKEVINHWYRHFKKGCVHMNQTTCITIDVSQNKSYLQGFIAPNTPLSKARVMKHSKQGFQFIVTLIDLVKVKSKTQDQPLIIFEYTGIYHKTLEKFLILNELKYHIVAPLRAAKARNKEIREQKTDARDCLSLSKLFYENNLGMFYTENETYSNLRKLSRYYDTNMKHIVKIKVNFREILAIIYPNYKSLFDSPYSAESFVFLKNFSHPDILLEKSKDDVIKLLCDKWDHKVEWTLSKIQKIYSYVNNIVSGCNKDDPDSKMLLSYIEQLEYYFKEIDSLILQMVKLTSSLPMYNLIHSLPGIKDILTVRFIAELGDISRFTCYKQIVAYAGIDPMIRQSGDKDGLHLKMSKKGNKRFRTILHLMVNSMIKSNREDNAIKDKYRKRTQQVNPLLPKVASMACANQLVRIIFYMHKTSSEYDYIK

SEQ ID NO: 401330 - protein, 384 aa, unidentified
MNKHNILFIGLDTHKEFVEVAYIEAQRGAQAVHFGRVSSAKASITKLARQFQSKYPEATLHFVYEAGPCGYWIYRLLTSLGHCCYVIAPSLIPKKTGEKIKTDKRDALKLAKLLKSEDLTAIYVPEPEDEAIRDLSRARETAMKDLKDAKYQLKALQLRNNINYRGTANWSLKHLRWLTELILPHPSQQIVLQEYLQTISERIARLKRLDNELEHHVKKWRYYPVIKAIQALRGVRLLVAAGVIAELGDLTRFDHPRKLMSYVGLVPSERSSGGKRHVGAITKCGNGRARRLLVEGAHSYRYPAKISTEMQIRQEGLPKEIIDIAWQAQIRLCSRYQKLMYKGKHNNVVVTAIAREMIAYIWAISREVVLTKVNPKLRLSRVPA

SEQ ID NO: 401331 - protein, 367 aa, unidentified
MKQALFAGIDLHSNNVMIGIVDQSGRRLKHQKLGCDLKEITSFLEPWKPQLKSVAVESTYNWYWLVDGLRALSYPTKLADPAQIEQYSGIKHADDKNDAFFLADLQRLNILPTGYIYDPALRPVRDLLRRRLGLVHQRTALLLSFKSLYARTTGQAMSLSRLKAMEPNDTKTLYRHPANCLIALLQKEHIDKLCQSIELIEKSVLAQARELPCYQKLLSLPGVGRVLGLTITMEVGEISRFKTPGQFASYCRTVNSQRLSNNKKKGDNNRKCGNKYLAWAFVEAANFAKQHHPHCRRWFDRKAARTSKVIATKALACKLAKAAWYLMSQGSDYDPERMCPEGAMKGGETEICESCRQPENRGWQKPF

SEQ ID NO: 401332 - protein, 389 aa, unidentified
MKIFVGIDIAKLNHFAAAISSDGEILLEPFKFTNDADGFQLLVSKLESFDKNSIIIGLESTAHYGDNLVRYLVTELYQVCVLNPIKTCQMRKNNVRKTKTDKVDTFVIAKTLMMQDDLRFITFFDLDMMDLKALGRFRQKTIKQRTRLKIQLTTYVDQVFPEIQYFFKSGLHQHAVYALLKEAPSPKEIASMHMTHLANLLKVNSHGHFTKELAKELRVLAQKSVGANDSAISIQITQTIQQIELLDSQLEKIEAEMTDIMKFNDSVIMTIPGIGYINGGMILGEIGDIHRFSNPNKLLAFAGLDPSVYQSGNFQAKTTRMSKRGSRVLRYALVNAAWNVVRNNATFKAYYDAKRAEGRSHYNALGHCSGKLVRVIWKMLTDEVEFNLD

SEQ ID NO: 401333 - protein, 343 aa, unidentified
MDHYAGIDVSLEYSSVCVVDANGKIVREGKVASEPEAPIAWLRSAGLSLARIGLEAGPLSQWLYAGMREAGLAVELLETRHVRDAFKAMPVKSDRNDARGIAQLMRLGWFRPVHCKSKTAQETRALLTARKLVQSKLHDVEASLRGILRGFGLKVGATTSRRFAARIKELVAGHPTLEVVAEALLAAHAVLLREFNGFERRVRTMARHDAKAQLLMSTPGVGPIVGLTFASAIDDPGRFKSSKQVGAHFGMTPKKYQSGETDYTGRISKNGDKGVRTALFEAAHIILTKPVKGSALKSWAMRLAKRAGMKKAKVALARKLAIIMHRMLVDGTTFDFAAAATAA

SEQ ID NO: 401334 - protein, 339 aa, unidentified
MARYIGVDLHRNQLTVCVIAENGREYLSVYRLEQMPRFVHKLRPTDEVAVEVTGNTRLFYDAVAPHVAKVVVVNPKQFRVIRDSVKKTDRNDAKTLALYLSKDMLPEVRMKDKLHAQLASLTQTRDTLVKQRTALKNKVNNILSAHGINLKKEALGSNKGLDSVLALHFDTIVMIELQVIVGQIRALNASIAELEKTIKAESPQLPGHKNLLSIKGIGDTSATILLSAIGNIEDFAHPGKLAAYFGIVPRVRNSNETERSGRITKQGSKQARTTLVQCSLIAMRYSPYLAKFYHRIRAGRGTGRAIIALAKKFLGVIYNTLKNNWVFADFPNFVLAEAS

SEQ ID NO: 401335 - protein, 386 aa, unidentified
MQNLNDFSRSRIALKPDGTLIAVIEMSLSSWLVAGIVPGVERQPLKKLAVDESALLKLLHRWREEAEKAGRRIERIAVAFEAGRDGFWLARWLMARSIEAHVIHAASVAVSREHRRAKTDRLDTELLKRAFLGWLRGERDHCKMVAIPSIKNEDAKRPNRERENLVSEQSRIINRMKATLIRLGIRGFNPKLKRAAGRLDDLRTPEDEPIPPNTLAELRRDMERRRLVRDQIRQIEETRLQRLDHAPDDGPHAMVRLLARVIGVGIETADMLVHEVLSRNMRDRRAVARYAGLTGSPDESGRKRREKGLARSGNGRVRRGMIQLAWRFLLHQKDSALARWFRVRTENGRGTRKRMIVALARKLLIALWQLVRQGVVPDGVVLRPAQ

SEQ ID NO: 401336 - protein, 322 aa, unidentified
MDEHGKLVKETKVASDPGALSDCIRGMPGVVEAIGIEAGPLSQWLHKSLTDLGLPVVLMETRQVKAALRAAPVKTDRRDAAGLARLLQMGWFRPVHCKSLSAQELRVLLGARRCVQSAAVNIELSIRGMLRNFGLRLGRIGKVSFEDRVRELTEGNRLIQLSIEPMLRARSALRSELVRLERMARDITREDPVCRLLMTMPGIGAVVALTVRSSIDDPGRFRRSKDVGPAIGLTPRRYQSGETDIVGGITKAGDLDMRTALYQAATVVIHRSKKQTWLRAWAERVVRRRGAKRAAVALARRMGVILHRMWVDNTEFQAVRQV

SEQ ID NO: 401337 - protein, 443 aa, unidentified
MTRRCIGLDVHREFAQVAIWQDGLVRQAGQIATTPEALRLFADSLAPSDEVALEATGNTHAIVRLLQGRVARVVVWNPQKTRAIAEAKVKTDKVDAEILAQLLAADYLPGVWVADEDTQARRRQVARRAQLVRQRTRLKNQIQSILHRNLVPRCPAADLFGLKGRRWLAEQELPADERQAVAALLRQLDFHAQELGLIDSELARIALGCEDTRRLMTIPGVDVTVAMSITAAVGDFSRFGSPNKLVRYVGLNPRVKQSGGQPASHGRITKQGRAHARGMLVEAAWVAVKTPGPLRAFFERVRARRGMQIAVVATARKLTVLCWHMITRGQDYAFARPSLTAKKLRALELKAGMPSRRGQKGTAAAYSLNDVRAREKALAEQAERAYTQMVANWQAKAPAANSVGVAAANGARLSRPLAGQAARQDKAPDPALRSGVDHAQIGA

SEQ ID NO: 401338 - protein, 320 aa, unidentified
MSNITLGIDVGKYELAIALRKDGKFTDKLVENNPKGFQKILKFLKNNAPEAEVYLEATGRYDEKVTDFLSSQGFDVKVINPTQIRDFARTKLARHKTDKVDARIIAEYGSIFGGRTYTKIKDNVRELKELYRMSLSLKDELVATKNHLENQDTFPKFVADLWKKRAKDLENDIKLVEKRMKEIILADPDLKLKFELLIKVPGIGEGTATAVLAEVTRLENFRTARELAAFIGLTPKHRTSGSSVRGRPRISKMGLKILRKALYLPALTAMKHHPSLKNFAEKLRERGKKFKQIICAIMRKLVHIIFGVLKYDVQKFKAEG

SEQ ID NO: 401339 - protein, 400 aa, unidentified
MHLTANISIPQKNFIAIDLHSDNAVICVRRNALNKAGELVGKNIWCGRVSIRDGLDNFIKALLPYCQDFDHVAVVESTYNWYCLADAFEERGWLLRVADPSTVSQANLKFSDDRTDAQYLAERLRIGSLKHYLPLNYSSRALRDLCRYRMAMVQDCASLKIKLINLYRNQLSKNVRVADLLERCQPHMQPNYRFNSDILEEFKDPNIRPRVAFEISRIAMLEEMIKECNAEIQKQCKDQELVKLCKTIPGCGPVLSAVICTEIGTMQRFKSAGDFVSYCRLCSTSKLSNGKSKGLGNAKNGNAYLSWAFTEVAQYASRNPVIREILQRLLRKYGGLRVKAIRTLAAKIARVTFNMLKNKQPFNAAKCFGIELTKSIKKKLPHKPLREDAAVVLPAVAGQA

SEQ ID NO: 401340 - protein, 407 aa, unidentified
MDVIHAKCAGLDVHQKTIVACARVMTGKTVQHHLQTFGTTTDDLLALGDWLARHEVTHVAMESTGVYWKPVWYALEGQFQLLLANPMHVRNVPGRKSDVNDATWIADLLAHGLVRSSFVPPEPIQELRDLTRTRKQLTREIARHTLRIQKTLDQANLKLTGLLTDILGVSGRAILDALVAGERDPDRLADLATGRLKASRAELVAALHGRVTPHHVFMLQLHLTQVDALRAAVRDLEARLGDALAPFRAAVERLTTIRGIGPLAASVLVAELGVDMSRFPTAGHLRSWAGLSPRQDESAGKRRSTRTLAGNPWLKTTLVQAAWSAVRKDGTYFRAQFLRLKARRGPKKAIVAVAASILTAAYHVLQREVSYEDLGGDYFSQRDKAKLARRLIARLHDLGLTVEVRAA

SEQ ID NO: 401341 - protein, 338 aa, unidentified
MVVIGIDPHKGSHTAVAIDEDETKLDEVRVRADRRQLEALKTWASAFPKRSWAIESANGLGALLSQQLVGAGEEVFDVPPTLSSRVRVLASGKSQKNDPNDAFSVAIAALRSSRLRVVVVEDHIAVLRLLWNRHKNLTSLHTQAVCRLHALLAGMVPGGLPRRLSADRASALLSGSRARTAVEKARKAQAHELIGDVRRLDAQLKASKRTIVEALSSVPTGLGELSGVGPVATCIILAHTGDIRRFASQDDYASYNGTAPIDASSGPRKRHRLNPRGNRQLNHAMHIIAFSQLSHPGPGRDYYERKVAEGKSQKEAVRSLKRQISNVVYRQLVADSQR

SEQ ID NO: 401342 - protein, 391 aa, unidentified
MIFIGIDAAKDKHDCFIVSSYGEVLCDVFTISNTLTGFNDLLSKIKSFSKDLSKTKVGLEATGHYSYNLLGFLLDTGLPTYVLNPLHTNLYRKSLSLRKTKTDKVDARTIASMLMSCQSLKTYTRALYHNEELKSLTRYRFDKVSERAKLKTSVSRLITILFPELEKLVSVVHCISIYALLSEFPSAKHIANANLTRLTNLLYSASKGHYNRGTAIRIREAARNSIGSVMPAKSLELKHTIKLIGELDDEISEIEAAIKQIVDSLGTTILTIPGIGYATAASILAEVGDFSNFETPDKILAFAGMSPSTYQSGQLSNCYAHMEKRGSKYLRFALYNATKYVCKWDSNFAAYLAKKRSEGKHYNVAISHAAKKLVRLIFALEKSRLPYMPVA

SEQ ID NO: 401343 - protein, 401 aa, unidentified
MRSIGMDVHRSFAQIAVVEDGLCRDEGRVGVKPEDLRAWAETLKPDDQIVLEATTNSDAIATMLRPLVARVVVSNPRKTRAIAEGKVKTDKVDARILAQLLAADFLPETWVADDQTRVRRRLIARRTHLVRQRTRLKNQVHAILSRNLVPTCPHADLFSKVGRRWLFTQQLPADEWRSVNALLRQLDFHGDELVELDHEIAVDAIEDPVIARLITVPGIDVSVAMSVVAAVGDFSRFSSPDKLVSYLGLDPKVRQSGDGPAVHGRITKAGRAQARGMLVEAAFSATRAPGPLRAFYNRVNRRRGFQVATVAAARKLAVLCWHLVTRDEDYAFARPSLTAHKRRKLELAAGAKSRRGSVPGPSRDYHVKQLRDQEKAIVEQQERAYEVMVAHWQPKKPAVTR

SEQ ID NO: 401344 - protein, 337 aa, unidentified
MASLPIFVGLDYHQDTIQVCVMDQNGKTLKNQACTNDWRQVRRIVGPRRKNVAVAVEACCGAADLAQELADEAGWTVSLAHPGYVACIKQSPDKTDYSDAKLLADLTRVGYLPKVWLPPEQIRELRKLVRFRGQLVDDRRRAKLRLRAILRDERIAVPDMRAWTVPWLRWVREEADLSTTSHWIACRHLDKIKELDREIRVVERELGDWAESDQVCLKLMELDGIGLITAVSLRAEVGRFDRFNSGKQLSRFCGLTPRNASSGNRQSDSGLIKAGNPQLRCVLIQAAQRLKRYNARWRSFAGRLKRKGKPHNVIVAAIANRWIRWLYHQMQPDQLAS

SEQ ID NO: 401345 - protein, 454 aa, unidentified
MAHIVARKLISSKVDSILPDDQSLSVLKLQLSGGTFLSFKILKNNCCGLDVHKTWIYACIGITDSLKRTEYKEARFSSFSKGLQELCDWLSKYNCTDVCMESTGKYWIPVFNVLEKNNIWVTLSHPKYTKPQKGNKTDRKDAKWICDLYMCGMVKPSFIPPADIRELRDLVRYRFKLTCMITSEKNRAHNCLTVSNLKLDDVFSDIFGKSSRSITEQILQHPGETFDVAPFVDGRCKTPIEEIQAAVDGALSTEQAVKLRQCMNHIDELEMHKAEIEREIFRLSDKYESVLNLIRTIPGFDKNPLTAIQVLSEIGGDMSVFPTDKNLVSWAGCCPRNDQSNHKIKSTRISRAGSYFKPVLVQVANALIKSKKHPEFAARYRRIKARRGHKKAIIAICRMILTAIWHILTDLKPYTSEGFLESRPVNEAKVLTTSQALNLLKQRGYIIKDDVSVS

SEQ ID NO: 401346 - protein, 346 aa, unidentified
MDHVAIDLGSRESQICVRTSDGEIMEEKRVGTRSLAKYLAGRPKGRVVMEACAEAFSVADAALEAGHETVVVPASLAPALGVGDRGIKTDVRDARNLSEASCRMSRLPKVHVPTKESRNRKAMCGMREGLVQTRTKLVNSVRGWARAQGLGVVRSGSPMTFTHRIREHVGQKKALTPTYVERVLIAIETLSVQIHEADEELEAVAKSDAACKLLMTAPGIGPTASVRLAAAIDDVKRFPNAHKLESYLGMTPGENSSSTRKRRTGLTKAGPPKVRWAMLQSAWVARRYYADHPLVAWSFEVEKRRGKKVAVIALARRLVGVLYAMWRDQKPYDKNHHVTRAQTSAA

SEQ ID NO: 401347 - protein, 395 aa, unidentified
MEVQDETGRRLGRARLEEGVAGIARLHKLIGAHVGEDTRPDQVVVGIETDRGLWVQALVAAGYRVYAINPMQVARFREAISTSGGKSDPSDAHVLTCMARLMRQQLRPVAAAAGGAEVVKIVARAHQTLIWEQTRHTLRLRSMLREFFPAALHAFGEDLDGADALELLAAAPDPAAAARLSLAQITAVLKRARRRGVAAKAAAIQAALRTEHLTQPAEVAAAYTVGVRAQVALLTVLHEQVKTVEAQVEADFGKHPDVKIYRSQPGLGTITGARVLAEFGDDPHRYATAKTRKNYAGTSPITRQSGKKKAVFARHVRNDRLADALMQQAFTAIRVSPGARAYYDQQRTRGLGHRPALRQLANRLVGILHGCLKTGTLYNEATAWPTHQENLADAA

SEQ ID NO: 401348 - protein, 309 aa, unidentified
MKQSVVYIGIDVAKAHLDVAWAGTFRRLPNERSGHAALVRWIKQSTTPVQLICEASGGYEQALLESLEKSEVKVTLVQAVRVRQYARAAGILAKTDRIDAKVLAAFGSAMQPQPTSPLSAEQKRLRQYEAQRRQLSRILVAEENRLAQLSCTELRTLSRSLISKIKTQIKTLDRGISDLIAQDQTLCVKAQKLTAISGVGVRTAALLLAQMPELGQLNRRQAAALAGLAPFNHDSGSVRGKRAIFGGRPALRSGLYMAALSAARFNPILSSFYQRLRTKGKPHKLALTAVMRKLLLALNQTLKPLPCST

SEQ ID NO: 401349 - protein, 402 aa, unidentified
MDVHKETVVVCVLPADGEAGPPVKKVYGTFRNDLGRMRGWLKQLQVTEIAMESTGVYWRPIWNVLEGHGFHLVLANPKQVKALHGRKSDKRDSQRIAEFLQDRRIDPSFVPPPEIRRLRELLRYRVSLLEQRNQTHNKIRDLFETANLKLSSVATDLLGVSGQRIIAALIAGETSPDKLSWKVKGKLRKKEREVRQSLVGCFDEHHRYLLDLLWKQYQFLSRQIAQVEDQIRREMEPHRELIELLDGVPGMNETVAWTLIAEMGTDMGVFPTSGHVASWAGMCPGTNESAGRQMDTKTRKGNCYLRRALLEAAWAATRKKDSYLRAFFYRLMYRKGWGKAIVALGHKLLVIAYEILKTRTPYYELGAGYYDQLNPEKTIQRLVQRLGKLGVEVAITPKEANA

SEQ ID NO: 401350 - protein, 383 aa, unidentified
MNMNAVGIDVSKGKSMVAILRPYGEIISKPFEVKHTVSGIRSLIEQIQSIDGESRIVMEHTGRYYEPLVRELSKADLFVSAINPKLIKDFGDNSLRKVKSDKADAVKIARYTLDSWTELRQYSLMDEIRNQLKTMNRQFDFYMKHKTAMKNNLISILDQTYPGANTYFDSPAREDGSQKWVDFSATYWHVDCVRKLSLNAFIDHYQKWCKRRKYNFSRSKAVEIYEASKELVSILPKDDLTKLIIKQAVEQLNTASQTVEQLRTMMNEAASKLPEYPVVMAMKGVGKSLGPQLMAEIGDVSRFTHKGAITAFAGVDPGVNESGSYEQKSVPASKRGSSTLRKTLFQVMDVLIKTKPQDDPVYLFMDKKRAQGKPYYLHDSRCE

SEQ ID NO: 401351 - protein, 421 aa, unidentified
MSKRSYTSQKFKQVDWKRINERQQGQRLVVAVDVAKEDFYAAIMDERRAVLVIFSWRHPRQTPEVVEQMHHLGQTHRLEAVLEPSGTYGDVLIWQLRQAGIPVYRISPKRVHDAAEVYDGVPSLHDAKAATLIGRLHLEGISHVWQETDERRRSLKAVTTQLSLSKARGQATCNRLEAQLSRHWPELPHLLGLGSMTLATLISVYGDPASVASDPEGAAALMRRIGRSGLREEKIQAILNSARHSLGMPMLDTERSFAQWLGHEARTAHQQVRQIEQRIMRLIAQERELSEQARIIGKVSAGVILAAIGPAAGYPNAASYLKAMGLNLKERSSGKHKGQLKLTKRGASVARHYLYFAALRLIAHDPVIKQWYQLKTSRPGAIKTKSVIELMRKLVKALWHVARGERFDSHKLLNLKAVAGV

SEQ ID NO: 401352 - protein, 442 aa, unidentified
MLWPSVETEGPLISQAIGVRSLQGGNLLRVITQKKGDPTMFYLGIDVSKKSCRYLLLNQDGLKVKSFSLDNTHEAFQNLLKRLEDLSIPEEDLLIGLEASGGFWENLYAHLKDNGFHVVLLNPYHTNKFREALAKKAKTDDIDALVIAQLLRTGEYVQSQVAEELIQSLRELTKLRYELMTERKNYQRQVFSLLSIIFPELEKTALKNPFSVASMAILQRFPTAKDLAQAKPKQIEKIVRSIQGNNFNIKEIDKLIQTAQTSIYSGRAKEARATSLRILLRHVETLSSSIEELEAQIKQILTPQEPQDSFPGENLLTIPGVGDKTLAAVLSYLGADGSNFSSSTKAVGYVGYFPKIYQSGQTHRENTICKRGPKLLRWALYMAAVASLKHNPEMRTLYHKKLSQGKTEKQALICVGKKLFQIMLAMLKSGEPYNPAKVFVSC

SEQ ID NO: 401353 - protein, 376 aa, unidentified
METSMKRNIIYVGLDVDDTQYHGSALDKNSGEVIDFKCRPTLKGLLGQLEKLGKYFPRRTLKLCYEASYIGYTLQRDLAAKGYHCDVVAPTSIPSPRGKQIKTDRIDAGQLAQFYANGLVSVVSIPEAEREQDRDLLRSRQNLLQQQTELRKHIQALLRRNGLHYKAQTQNKTHWTKHHYCWLERTIDCASGSLKVNLELLVRQLKCLNAILAEYTQQIEVLAKTQRYEKPVQALICYKGIKNIFALTMITEIGDVKRFPHPRQLVSWIGMDIREYSSGGKHRRFGITKHGNRYLRTAFIEANQRGYRSARLSKAIRARRAYAAPEFIDIADRCLRRLNRKGNRLLLAGKHPNKVKVACAREMVGFVWESLHHAAA

SEQ ID NO: 401354 - protein, 413 aa, unidentified
MEAYYVAGIDVHKAMLAVVVSEVKPGEVEFHRRRFGTTRSQLRELNQWLIEVGVQEIVMESTARYWRPVWVALEETGIKRHLAHAHSNGARRGRKSDFRDAERLVHRLVAGELVLSYVPEDEQQGWRWLTRTRYQLVCERGRVQSQIEGLLEDAQIKLSSVITDLLGASGRRILEALVREQGQHNPAKLAELGHAKLRASREELTDALDGRWLDRHRFLLGLHLDRIRQLDSQIERIQQQTAMAMQSCQEAVARLIQVPGIRTEGALQMLAEIGPTAAAFPSPEQLASWVGVCPGQQESAGQSYSQRSAKGNWQMRRLLSQAAHAASHAKGSFFQNLYRRLVVKIGPQKAIWAVAHRLCRLIWKILHQGVSYQEQGSPTASPKSIQRRQHKLTAEFRKLGFQVQFTPINPSHP

SEQ ID NO: 401355 - protein, 346 aa, unidentified
MVLIGCDYHPSWQQVCWFDRATGETGDEKLVHASGDAEEFYRRFSSPVRVGIEATGNCQWFLELLNRLGHEVWVGDAAKIRASDSRQQKHDKRDARLLLQLLREDRFPRIWTPTREQKDLRQLLIHRYKLVGLRARVKNELQHLAMNQGVTKKQKLWSKAGEQVLRELALAPWASQRRKDLFRVREMLNEQIDLLDRAVVEAAEKNEKARLLMTQPGVGPITSMAFVLTMGDVKRFPRGKQVASYLGLIPREYSSGGKQHLGPISKQGNRFLRMLLVEAAQAAVRYDPGFRNEYLHRCHKKAKGVAKVAAARKLAIRLYWMLRTNTGYPEVVRVESSSRVALVSAS

SEQ ID NO: 401356 - protein, 409 aa, unidentified
MDVFHERCAGLDVHKEKIFVCVLIGRGSGYQKITFQYGTFHHQLVEMRQKLVELGVTHVLMESTGVYWMPVYDVLEGFVEVVVGNAQHIMNVPGRKTDESDAEWLAKLLRFGLVKPSFVPAREFRELRQLTRYRRAVVQTRASEQNRVEKHLQISGVKLSSVASRVFGVSGTDMLNRIAEGTTDPGELAGLARGRLRKKMPQLRDAFAGSISEHTQHLIALQMEQMNRLESTIAQAELKIDEKVKPYEELLARLDDMPGLNLRSSIDVLAEIGTDMSPWATHRQIAAMAGLCPGNYISAGKRLKNRSRQGNPYLKSILVQAACSAINVDGSYYQAKFKALKKRRGHKRALVAIAHAMLVAIYHMIKKGEPYRELGAKVVSDHELSRKKEYLVKQFQNLGFAVSLTPLTA

SEQ ID NO: 401357 - protein, 388 aa, unidentified
MNVGADKSEPLTAIHTDLGAIFVSLELSRSSWLITSLSPGGGEKMSKHSVRGGDFAGLMERFAQLQEKARLRTGQSFRIIVVQEAGLDGFWIHRALQNEGIESHVVDAASIATSRRRRRAKTDKIDGETLVRALLAYKRGEPRVCAMVKAPTPGEEDRRHLCRERKALTAERVRHVNRIKGLLFSQGISGYQPLRRDRRQRLEELQTGDGRAFPQHLKALVNRELDRLELLLKQIKTVEAARDALLAVGQTAKPAPAAMLLDIRGIGPEFAAILWSEGLFRHFENRRQIAAYAGLAPTPWQSGAVDREQGVSKAGNPRLRTTLIQLAWLWLRNQPRSALSVWFHERVSRNGGRLRKTTIVALARKLLVALWKYVTAGVVIEGVTMKVA

SEQ ID NO: 401358 - protein, 314 aa, unidentified
MRNYIGIDISKATLDVYDGKKSYKFENNETGFKEIVALAEDINNTILIFEPTGVYSYALTDFCSIKSIKIVMVGPKESRDFARSLKVRSKTDKIDAKVLYKYQSHIEPSMVKVPVVNHQGIKVQEMLNVYENIQSSKQTFKNQIESTSKSDKYLLRTLNRIIKNLDAEALKLFNKIELLLLEDKEIKAKYDAIITIPSIGQKSALYLTAFFLKYPMANAKEMTALIGLDPVMRDSGTFKGKQRISKQGGQQLRNIIFLPTLCAIQHNDRIKAFYTRLTSNAKSKKLAVIASMRKLILMAFSLFKSGEVYIKIEV

SEQ ID NO: 401359 - protein, 404 aa, unidentified
MWFAGVDWADDHHDAVVLDDSGRQITSLRVAHTPAGLVQLTTALSQICGEAAKEQLACIVETNRGLLISALLEAGFAVYPVNPKTVDRRRNAAGVKTDQIDAYLLAKTGRSDLADLRRLRPDSPLVAELKALTRDQDSLIVMQTRLLNQLTACLKAYYPVALQLFSKLHQPSTLAFLRAYPTLQEARAASIEAIAAVLKQAGHTRAACAADSIAQTFQQEQLSADAITTRTKARLMLALLAQLEPVMQQIAAYDTEIERLFLLSADSALFTSLPRAGKRLAPRLLAEIGDDRRRYADASGLQALAGTAPVCFESGKYAKAHRRSACLKPLRNAMQQFAWQSTLQEQWALAYYQRKRTEGKSHTVAIRTLANVWLRIIYAMWRDRTPYVSATFEAAQQQKLCKAA

SEQ ID NO: 401360 - protein, 360 aa, unidentified
MKLDAALDTSATTTAICVVNSRDGAIVLETTVPTNPRAIFRALEPFLPRLHLVGHEATGWSAWLQRELEARGVPMVLLETHHTARMLEAQRNKTDKNDARGLAQIVRSGWFKPVHAKSDASNRMKLLLAHRRTLKRKLMDIENEIRQSLKMFGLMVGRRVQRASFETRVTALVADDPLLGSTTACMLRCWAALWTEHKRLHTLLVQVVGRDELCRRFCGIPGVGPVAALTFKAAIDDPARFAKSKIVGAHFGLTPKREQSGTSVDHDGHISRRGDGEVRTALYEAANAMMTRSQKHCAVKAWGLRLAAKRGHKRALVAVARKLAVIMHRMWLDGSEFRFAASDQPAGKERNPAPAAPACA

SEQ ID NO: 401361 - protein, 391 aa, unidentified
MPQSNDLSRSLTALDQDSTLIAVVEMSQSSWLVGAIIPGVERRPAKKLEASEGMLLALLHRWRDEAAKAGCTIDRITVAFEAGRDGFWLARWLRQRGIEAHVIHATSIVVSREHRRAKTDRLDAALLQRAFLGWLRGERGHCTMVAIASLAEEDAKRPSREREALVGERTRIGNRMKSTLARLGIRGIRPGLRKAAERLEQLRTPEGAPLPPNTLAELRRDLARLRLINDQIGEIEAARLERLRQQPDEARHPMILLLARVVGIGIETADMLVQEVLSRKLRDRRAVARYGGLTGSPEESGARRREKGLARAGNARVRRGMLQLAWRFLMFQKDSALAQWYRARTADARGATRKTMIVALARKLLVALWKLVTTGELPNGVVLRPAIQAAL

SEQ ID NO: 401362 - protein, 365 aa, unidentified
MNKCHLNTELSSDEGTRCQFNGGTGAIKLGIDVHQDFYVVVMQEGGANPKPPQRFGKQAFLHWVAKLARSGSEVHAVYEACGFGFTLQRQLSALSIRCYVVCPQKLDEQNRRVKTDGLDAKALVLKLDRFVEGNRSALALVRVPTQEEEQKRAIHRQREQLVKVRKQLEAQGRSLMVNHGFEPVKSWWKQRTFAALQLPAWMKELLLANTQPLLLALQEKIGALTVQLQSAADPKQPRGLGLMTSVIIDREIGDWNRFNNRRQIASYTGLCPGEYSSGNTRLQSCVTKHGNPRLRAALVELAWRLVRFQPNYKPIFKWRRLLAKGAFATGAARKKAIVAVARQLAVDLWRVRTGRCKAQALGLFI

SEQ ID NO: 401363 - protein, 373 aa, unidentified
MNYSTVYVGMDVHKESFSLCCYTNEKEQAEYPQKINAHYSKVLNYLEAMRFHYGDDALFICGYEAGCLGFTLYHELTAHNVKCVILAPTSMPVPGGKKRIKTDRRDAAMIARCLAHHDYSPVHIPTQKDEQVKEFIRMRDDHRLALKKIKQQILSFCLRHGCHYNGIQNHWTQTHLSWLRTLHIEGLYQELLEEYLLTYDYLTAKLERIEQRIEELASEEEYRENVHKLTCFLGIKTQTALSVVTETGDFRRFPDACHYAAFLGLTPGEDSSGGNQNRLGITKTGNRHVRMLLVEAAQSSARGKTGYKSSALKARQEGNAPAVIEYADKANERLRRKYYRLTLKNGKKSNVAKTAIARELACFIWGMMTEHYA

SEQ ID NO: 401364 - protein, 385 aa, unidentified
MQKCNDLSRSLTPLDPDGTLIAVIELSLSSWLIAGIVPGLGRQPLKKLAVDESALLKLLHRWRDEAAKAGHRIKRVAVAFEAGRDGFWLARWLSARDIEAHVIHASSVAVSREHRRAKTDRLDTELLKRSFLGWLRGERDHCKMVAIPTTKDEDAKRPNREHESLVGEQSRIVNRMKATLIRLGIRGFNPKLKKAAERLDGLRTPEGEPIPPNTLAELRRDMVRRRLIRDQIRQIEDARLARLKQAPDNGPHAMVRLLARVIGVGVETADMLVQEVLSRSMRDRRAVARYAGLTGSPDESGRKRREKGLARSGNARVRRGMIQLAWRFLMFQKDSSLAQWFRARTESARGTRKTMIVALARKLLIALWRLVREGVVPDGVVLRPA

SEQ ID NO: 401365 - protein, 402 aa, unidentified
MNFSIGLDWASQTHAVCVMEATGQVGWQGTVEHSAAGLAELLRRLARFGPPAALPVALERPSGLLVDTLLAAGHPVVPIHPNALKASRPRYSAAGSKSDPGDAFILADLLRTDGHRFRRLQPLSDETRALRALVRGRDDLVAERTALANQLRALLERVWPGAAALFAEVESPISLAFLTRYPTAQSAERLGEKRLARFLGQHSYCGRRSPAELLARLRAAPASDVSDLEAEASRDLVHALVAVLTPLGVQIQQLSAAIVAALAQHPDGPLLQSFPRSGGVNAAQILAELGEDRTRFPTDEQLAAEGGVAPVTRESGKHRQVAFRWACNKRLRQALTTFADHSRQASPWAATIYTAARRRGCAHPHAVRILARAWVRVLWRCWQDRRPYDVTLHRAAQRGAAA

SEQ ID NO: 401366 - protein, 294 aa, unidentified
MNTTQVFEKRKIAVAIGIDLAKDHCDVVAYNADNKICFTKANWAYPHLMEWLANAQPAVVLMESCKGCHVRARDIADLGHDTRLVKGADVKALRNVCQKNDIRDADYIARLLYVPGTKFVFVKNQRQQSLQFLQNEYKSIQELRIQVGNQIHAGLEEFGCPGPKSKKFIQSRMMAHLEKNAELIPDEVMSSFLRRREMWLNLFEQEEEAKKRMEEIAKTDDDAQRIMTVPGVGAQTAVGMLVHIGGDIGRFKNSGQFAASIGLVPKQNSTGGNTTLNGITKCGPKRLRANLVQC

SEQ ID NO: 401367 - protein, 421 aa, unidentified
MEVEPQELEKVFRERACGLDVHFAFVVACLIIPGKGKRLRILEETFETNVKGLKRLKVWLTENGCEAVGMEATGVYWMPVYAALEGAFDLEVANPLQIKTLRGRKTDRKDARWIAEQVRHGRIRRSFVPPPEFRDARRLARFRRQLIQARTTISNEIQRTLAESGITLAAWVSDILGVSGMAILEALAEGKSIQEELPDCLKTTLKKKLAPIAAALEAPLGEVSRSILTLHLERLEALQGHIAKVEADLFKVLEPHADKLALLVTIPGLARMSAAIILAEIGVDMAAWTTEKHFAAWAGVAPGCKETGGKAKRAPVRKGNPYLCTILMECAAPAVKKKECHLNPKYHKLCKQLGSKKKARMAIAHKLALIIFRNLAAGSQYKEPSPKPLTKKAQAKIRQKRVADLERLGYKVILEPLESVS

SEQ ID NO: 401368 - protein, 522 aa, unidentified
MWSSVSDRAQQTGCPRHFRRDGDGPWRARPRVDENRVRASPADVVTAWPWQAVEEIDAGASTFGCPPVAAMSASTSRSVHIRGFAGGARAVVVRVRKGWWVMQVLYERCAAVDVGKDVVAVAVRVPGDGPDGRKTVKRTFRTFYGVLREAARWLTDQRVTHVAMEATGIYSMPVYHALVEHGDFEQVVVCNAGHVKNVPGRKTDLSDAEWLVHLLECGLLRGSFIPPVEIKAARDVIRYRTKLTESRTSELQRLGNVLQDAGIKIDSVASTITTMSARAMVEALIDGERRPKTLADLAKGRMRAKIPDLARALEGRFGDHHALMCRLHLDHLDHLDEMIAKLDAQVEEMMEPFRPQRELLITIPGIGQMSSAVVISEIGDDVAAYFPTAEQLASWTGLCPGNHESAGKRYRGKRRKGNQHLQPWLVECAWAAVRTDGYLREFYRRQVRVHGGFRSPTAKKKAIVAVAHKLAVIIWHVLTTGRQYEDLGADYFTTRIDPEKEKNRLVAKLEAQGYTVTLEPAA

SEQ ID NO: 401369 - protein, 453 aa, unidentified
MKKEKPKMGIVKMGSGLPVFNPYAAGIDIGDTLHCVAINDGKGGHEVKTTSAFTCDLHEIVGYCKSNGVTTVAMESTGVYWLVLYLLLEEAGIEPYLVNAKHAKNVTGRKKDDTDAIWLQKLHTCGLLQKSFQPDNETRLLRSYTRQRKNLILLAADSIRRMQKALELMNIKIHTVISDLLGKTGMAMVKAIIAGERNPEILCNLCDPRIKASREDIIKSLEGIWEQEYLFMLEQAVENYEFLQKQVKSCEEKIQQQLLRQVAIVKEGDITCVEETKKKKVKAKAKKNQFDFSLLPYLIAIAGIDLCKIPGISELTALEFISEVGVDMSKWKSSKHFAAWLNLTPNTKISGGKIISSKMMKKNNKAGQILRQAASCLKTNKTPIGDYYRAMRARMGGRGAALATAHKLARIIYTMLLKKSEYNSEVILENQEKIKEEKIKKLEKLLVRLKQAA

SEQ ID NO: 401370 - protein, 338 aa, unidentified
MNIVFLGIDLAKNVFQLCGLNQAGKPVYTKRTGRKELLQTLANIPACLIGIEASTGAFYWQREFEKLGHKVKVISPQYVKPFVRGQKNDGNDAQAIAVALMQPTMQLVPPKSPEQQDIQALHRARQRIVNHRTATVCQIRGLLLDRGIPIGSAVSRARRAIPLILEDAENGLSSRMRRTIAELYDLFNDLGRRIHFFDKEIETVFRQSEVCQRIAKVKGIGPETATAVVAAIGKGTEFKNGRHFAAWLGLVPRQHSSGDRQVLMNMTKKGDRHLRTLFIHGARAVVRVATNNNDGHMNQWVNQLKERRGFNKTTVAVANKNARIIWSMLRNETGYQVV

SEQ ID NO: 401371 - protein, 326 aa, unidentified
MQISTIGLDLAKNVFQVHGIDANEKVVVRKQLRRSQVMAFFEALPPCLVGMEACATAHHWARALRTLGHEVRLMPAKDVKAYVKRNKNDAADAEAICEAVRRPTMRFVTVKTAAQQGRLMQHRVRDQLMRQRTQLINALRAHMAELGIVGAVGREGLTELLAIIADANDGRLPMDARASLMVLAAQLQACQTLIGTLEKRIIGQHKSNDRSRRLETIPGIGVVGATAIDATLTDPKAFRSGRDFAAWIGLVPRQDSTGGKPKLGRISKQGDQYLRRILVVGAHAVLRRARQHPEKYPWLRTMSASCSPCSTTSNGRALGSIARPLV

SEQ ID NO: 401372 - protein, 348 aa, unidentified
MIWIGVDAHKRLHEAVAISESGVVGSRRIHNDPPQWAQLLEWATQWPQRVWAVEGAWYLGRGLAQFLAEHGEEVHEVNGRWTAQRRRGMRRPGKSDRLDAHSVAQLLREERATLPRVYAEDDELASVQLWSRLEAELTEDRTRLLNRLHDLLLLCDPRYATALPDLTTQAGIAAARAYVAPGARAVAREREQAVRVTAEQVARLDAQIRDLRRKLERASKSSFRALRAIEGVGALTACTIVAELGAPRPGFGDEQLAALAGVAPLEASSAGVTRHRVNRGGNRRLNLALHRIVLTQARMYEPARAYLARRRAEGRTDREARRALKRLLCRRIIQAWRACFDQPLAAAA

SEQ ID NO: 401373 - protein, 348 aa, unidentified
MALTIVEDTRAVTGGVDTHADMHVAAALDPIGGLLGVGEFPATTAGYARLLGWLGGFGTVALVGVEGTGSYGAGLARHVTAAGIRVVEVDRSDRQDRRRQGKSDPLDAVSAARAAQSGRARGAPKGRDGAVEAIRALMVAKRSARSERTQTINQARALIVTGPDDLRARFARHTAAGLVSELAALRPRPGATVGYATRIALRELGRRAEFLDGQLGRLDELIVPMVTARAPALLALHGVGPDTAALLLIAAGDHPHRLRSEAAWAHMCAAAPIPASSGKRTRHRLNPGGNREANHALWRIVITRMSSHAQTRAYVERRTTEGLSKKEIIRCLKRYVAREVYRHLRPAG

SEQ ID NO: 401374 - protein, 406 aa, unidentified
MSVHDCASSMVVVAVDVGKNTVACSVTDDKRHRLLGPVDFAMTRAGLAATLTKIHATVPPDVSVKVGIEAAGHYHQPLMVPASWPSGWQLLELNPGHVTEQRRVQGPRRVKTDAIDLEAITELVLAGQGRPVTDRAVVLGELASWVRHRSRRVEARSALKNQLLGQLDRAFPGLTIALPDVLATKVGRLVVEHFPDPARLAALGESRFIRFAATRDLAVRRPVAVRLVAAARDALPTPDAAVAREMVANDLQMLQILDRQVAAAEAQLDALLPTTPFAPLTTVPGWATVRASGYGAAIGDPGRWPGPSQIYRASGLSPMQYESAGKRRDGRISREGSVTLRRALIDLGVGLWLNEPAAKAHAAGLRERGKKGGVIACALAHRANRIAYALVRDQHPYQATRWTQED

SEQ ID NO: 401375 - protein, 362 aa, unidentified
MERENCNRLAEFRQLRKDIRGSDDHLIVGIDVAKERHNAFFGTATGETLYRRLIFENDKDGFERLLLQAEAMKVQHGLKKVVFGLEPTANYHKPLGEYLIKNGHTVVLVATDAVKKNRSLLDGRWDKNDKKDPANVADLISQGKCLFYEHPRQEVCDLRNLLSFQRKLKKLEHSTRMRMRNHLVAQYFPELDTCCNWGANEGLAIVKSCLDPAVISTLQHDEFLRKIQTRGVTLAQQRRLSTVWQRAFKSIGCEFGLSAEYEAQMMVKMLGQVRMSIADTQQIKAVSEKFPEYKYLLSIPGFGPDISAKALGAIGDPFRFDNASQVLKLVGLDLSASRSGKNYRLYPKRANQNSDMPYTRQR

SEQ ID NO: 401376 - protein, 410 aa, unidentified
METIVERPAALDVHKAQVTACVRVPAADGKGREQHVAEFATTVRGLLTLRDWLAAHRVGQVTMEATGVYWKPVWAVLEDEFPLLLVNARHVKQVPGRKTDVSDASWLCQLAEAGLLRASFVPPKPIRALRNLTRYRKTQIQERAREANRLHKALEDTGIKLDCVATDILGVSGRRMLEALINGTTDPEVLADLARGRLRAKLPALREALEGRFDHLHSVWIGAILDHVDFLDAQIAGLTDTIGEQIAPFEPAVELLCTIPGVQRRTAEVIIAEVGVEMSVFPTAKHLASWAGLCPGNDQSAGKRRSGTSRHGSKWLDWALEEAALAAVRSNDTYLAAQYARLRPRRGHKKALGAVKHSIICACWHMLTTGELYHDLGGDYYQRRNPQKTTRRLVRQLEALGHTVTLQEAA

SEQ ID NO: 401377 - protein, 417 aa, unidentified
MSEEILAWFVGVDWGSEAHQACILDLQGNIAGERSFPHSGAGLAELSDWLLSIAGAASGVAVAIEVPHGPVVDSLIDRGFVVHAINPKQLDRLRDRFSVAGAKDDRRDAYVLADGVRTDRRLFRRLNVADPRIIELRAWSRLAQELTEERVRLSNRVHHELWRYFPQLPKLTDDLAAPWFLELWTLAPTPARARQLRKSMVEQLLKQHRIRRVDAETVIRTLREPAIKVADGVAEAASVHMRSLIARLRVINRELREAQRELDKICSAIGDSEAAASGDCLQRQDVVILKSMPGIGRINLAALLSEGSGPLSRRDYPALRTLCGAAPVTKRSGKSRIVIMRYAAHVRLRQTVYHWARVAAQHDPKSKARYVAFRRRGHSHGRALRGVADRLLGLACVLLQKQTPFDPQYGHPATIVR

SEQ ID NO: 401378 - protein, 411 aa, unidentified
MIVGIDVGSETHFARAFDWRNYEYSKKPLEFSNTQAGFATFKAWMEDIAEKYGKDVVIPGMEPTGHYWFNLGAYLQDNGMKPVHVNPHHVKKSKELDDNNPNKNDRKDPKTIAVLVNEGRFSYPYIPTGIYAEIRSLSNFRLQTQEEITRIKNRIARWFSIYFPEIKDVYKKPDSVSGLMVLKVAPLPQDIVKLGVDGINQIWRDAKLRAAGAKRAKTLITAAEHSIGSQEAPDSARIELKNLLNDYEIYRKREEELMGMIEEKLSEIPSIDKLLEIKGVGMKTVSGFLAEVGDIKCFDDPKQSQKLAGYAIVECSSGKHKGESHISYRGRKRLRYVLYEAAISLIGRNEEFKEIHRYYRIRKENPLKKMQSVIAVACKELRIFYTILAKGVTYDGVKMLQDIKRPQVTAA

SEQ ID NO: 401379 - protein, 337 aa, unidentified
MKSYEKVVGIDVSKETLSISLYDGKSHISYETRNTVKSFFNDFVKKEKGIDFSKVLFMLENTGVYHLRLATHLSKECGYIVSVANPLVIKRYSQMNLKRAKTDKADARLIAEYGYINGDDWLFSPRDIDYYKIDMKLKAVEDFHKQINMLSNQIEAIEYLPFKDNSTLNAYKKLIENFKKEIKKIEKELDILLREKYVEEYKLLSSIPGVGLKLTGVILGKLNGFANFDRGKDVTSFVGICPSIYQSGTSVNGRGKISKKGNGYMRTILYLCSLSACKYNKSCAELYERLVAKGKPKKVALIAVANKLIRQAFGVLKSGKPYDPDHAKNLTLVAKNA

SEQ ID NO: 401380 - protein, 339 aa, unidentified
MAILYVGIDLAKNVFAVHGVDEHGKPALVRPSVPRARLHQLVAALPPCTIAMEACSGAHHWARLFAQCGHTVRLMAPKFVAPYRMSGKRGKNDAADAQAICEAVQRPNMRFVPVKSQDEQARLCVHRVRQGLVEQRTATINRIRGLLSEFGIVLAQKAATVRREAAAHLEDLPGWANTAVGDSLSELHRLDERIAEYDRHVVHMAREDERSRALMQLSGIGSTTASALVSTIGNARDFKNGRQLAAWLGLVPGQYSSGGKARLGGITKAGDGYLRTLLVLGAKAVLAAARSKHDRLSRWAMALEVRRGYWKAVVAIAAKNARMAWAVLAKGDEFKPLVA

SEQ ID NO: 401381 - protein, 411 aa, unidentified
MFEAWIGLDWGDKQHAFALYDPSGRSEQGLIEHSAETLHAWLKALGERYAARPVALAIEASRGAVIHALLQYPWLTIYPINPMTSARYRSAFTPSGAKDDLPDAAVLLDLVRVHADKLRALQMADAATLKLAALVEARRGMVDRRTALINQLTSLLKGYYPQALHLVGQLTTELAVAFLKRWPDLIHLKTAQPGTLKRFYYQHQIRSPELVEERLALIARAVPLTSDEARVSVAILQLRQLLDQLEVFHTHIPLLNAEIKNAFASHPEAPLFRELPGAGPQLAPRLCAAFGTDRALYPDPASLQQYAGIAPVREKSGAQLWTHWRWRAPAFLRQTFVEWAGQTVHYSAWAKAYYQRMIQKGKKHAVIIRALAFKWIRVLWKCWQERTPYEEARYLKQLIHRKSPNAVPLTP

SEQ ID NO: 401382 - protein, 316 aa, unidentified
MREPTVFVGIDISKTRLDVALRPTGKAFTVSYDETGITTVIQRLSTLSPTGIVLEATGGLEVLLSGALATAGLPVAVVNPRQVRDFARATGRLAKTDALDAQILAQFAEAVRPACRPLPDASTQQLAALITRRRQLVEMLTAEKNRRGSAPRLMRTQIQQHIEWLQQHLAQLDQELTNAVQASPIWREHDELLQSVPGIGPVVTRTLLAELPELGTLTHKQIAALVGVAPLNRDSGAFRGKRTIWGGRATVRAALYMGALVAARHNRVLKAFYQRLRQAGKAPKVALTACMRKLLTMLNAILKHRTSWRETVVATT

SEQ ID NO: 401383 - protein, 402 aa, unidentified
MNTEDIEVFIGIDVGKSEHWATALSREGRKVFDKALPNDEERLRALYKKLVDHGHLLVVVDQPATIGALAVAVAQDMGITVGYLPGLSMRRIADLTPGSAKTDAKDAAVIAGAARSMPHTLRAINASDEDAAALSMLTGFDLDLARQVNQSANRIRGLYTQIHPTLEQVLGPWLEHDAVLEVIAAWPTPADLKRAGKARIDARLKKHGCRRHATWAGQIVSALEHQSVVVAGTDAAAVVLPHLARQLISLHAQRADVAAQVEALVEAHPLYEVLISMPGIGVRTAAVFLAETLGKTFDTGAQLASYAGLAPVTRRSGSSIRGEHVSHGGNKRLKRAMFLSAFASLRSDPVSRAYYQRKRDQGKRHNQAVLALAHRRILTLHAMIRDGALYDPQPATKLPAAA

SEQ ID NO: 401384 - protein, 340 aa, unidentified
MTITTIGIDLAKNVFAVHGVDQNGKTVLVKSRVTRAALPGLIASLPPCVIGMEACSGAYYWARLFLQYGHEPRLMAAKFVSPYRMAGKSGKNDAADAQAICEAVRRPHMRFVPVKDESQQAMQCLHRNRQGFIEEKTATYNRLRGLISEFGVIAPQSTDALRHMVSAQKSSLPLQVQQCVDDLLEHVDRIEANITEYDRILSRIAKTDHRSQRLMKLKGVGPTTACALVACIGNAHDFKNGRQLAAWLGLTPSQYSSGGKSKLGRRTKAGDSYLRTLLVQGARSVLIGAEKRTDLFSRWVCSLVERRGYWRAVVAIAAKNARLCWASLHYGDDFRLYSAS

SEQ ID NO: 401385 - protein, 317 aa, unidentified
MQTFPNIGVDVAKDAVVVACAAQSFPVHSITNQRASLLAWLKSLPAGSRIGLESTGCYHELLADLAYAQGHAVFLLNPLDTRHYAKAMGNRAKTDRVDAELIARLIEQEHTRLRPYTPPTANQRKLDRLIRRRAKIVRIKSSLKLTMLNLSGFAAELKAVLCRLDALIAKIDAAMSAIAACSPQHVEAQQHLQTIVGVGPVVGMALTNTLERVPFHNADAFVAFTGFDPRANDSGHKAGRRRLSKRGPAELRRLLFNAAMSAAKTKVWKPIYEHYRTQGWATTAALVIIARKIARAAWSIHHYHSTFNPDRITKCLT

SEQ ID NO: 401386 - protein, 385 aa, unidentified
MQKLNDLSRSPSPLDPDGTLIAVIELSLSSWLVAGIVPGVERQPLKKLAVDESALLKLLHRWREEAVKAGHRIKRIAVAFEAGRDGFWLARWLSARDIEAHVIHASSVAVSREHRRAKTDRLDTELLKRSFLGWLRGERDHCKMVAIPTTKDEDAKRPNREHESLVGEQSRIVNRMKAALIRLGIRGFNPKLKKAAERLDGLRTPEGEPIPPNTLAELRRDMVRRRLVSDQIRQIEDARLERLKQAPSDGPHAMVRLLARVIGVGVETADMLVQEVLSRSMRDRRAVARYAGLTGSPDESGRKRREKGLTRSGNARVRRGMIQLAWRFLMFQKDSTLAQWFRARTESARGTRKTMIVALARKLLIALWRLVREGVVPDGVVLRPA

SEQ ID NO: 401387 - protein, 341 aa, unidentified
MTEVSTIGLDLAKNVFQAHGADAAGAPVFRRKLRRDQVLAFFASQPSCVVAMEACPGAHHWGREIGKLGHTVKLIAPAYVKPFVKRQKNDAADAEAICEAAQRPTMRFVAVKSEAKQASAVIFRTRDVLVGQRTQLINAIRGHLAEYGQIVPQGPAHVERLIAQIEDPASDLPPAARASLAVLVGTLRHLQEQTAALDAEIAARAKADDTARRLISVHGIGPLIATAIEALAPPVETFRSGRDFAAWVGLTPVQRSTGGKERLGRTSRMGERTLRRLLIIAASAVVRWAKRKGVPAESWLGQMLARKPPMLVIVAVANKNARIAWALLTKGGIYRAPAATA

SEQ ID NO: 401388 - protein, 487 aa, unidentified
MVPMSVDESLAVRDLIEAYDVRDIGLGFLTPKLITMAKLAKKKQTAKGLRFEVVNPNAAGIDISPKEMQVCVPADRDGDCNRTFDVYTEDLHYIAEWLKACRIDTVAMESTGIYWLPIFRVLKDAGFDVILVNASDVKNYSGRKTDASDAEWLMMLHSYGLLKPCFQPENIARTMRNLIRHRDNLIRSASREVLHLQKAMEQMNLKLDNVFSDILGKSGQAIIKAIISGERDPKNLSALADPRCKTSKEEIEKSLQATWDEEHLFEMKQSDSLYQTYQRLIAECDDKISEIATEYAAMVDAPKAKLLRSEKYNTKKNQVGFDVEKAAFELWGVNVMRMPGMSRASLLRLLGELGQDFTTKFADVRHFVSWANLVPNNKISGGALLSSKVPKKKNPVGIIFRQAANTLKAAKCPLGDYFRHMRAKGGHLQAMVATGKKLASIFYLMVQRKVEYDENIYTNHRKTELQNKVSYLQKRLTRMQLELSNCG

SEQ ID NO: 401389 - protein, 349 aa, unidentified
MSLPQPAAWAGIDTAKATFDASIAHPSQALVFDLTLLHVMPVRTFARTRDGVNEFVAWARKQTQEVGTGLRVVMEATGNYSIELAAWLTEIDGALLPAIANPRRTANYIKSLGLRNKTDKLEARALALYGIQRSPAPYEPLTTERAELRSLLRYRDALVDERVAERQRADETHVCKAVSAMQKRRIEQLDRDIKSIEKNMRVLLTKTPTLKQDYELLTTIYGVAFVTASVILAEIGDLRRFTRARQLSAFAGLCPRLVHSGTSQRGSHLSKDGNRRVREALYMAVSTALRGDNQIAHFHRALVQKGKRPMAAHAAAMRKLLTIMRAILITNTAYDSQQGIGGKLCGKNT

SEQ ID NO: 401390 - protein, 347 aa, unidentified
METEQDTVGYRLFVGVDIAAATAMAAWQPVGGKVSRPLQIAQSPEGHAELHEKLRASGVPAEETLVVMEATGSYWITLATTMAQWGYAVSVINPSQAHDFAKALLKRAKTDAIDAQTLAQLAALLQPELWTPPPAIYMELQQCLAQRDSLLDLRQQVRNQLHALEQGPVVIAAVRQRMEALIATLTVQIKEVEKEITPVLAQDAAWAKAAALLQTIIGVGLVTAAWLVTSTLNVSVCPSPDAAAAYAGLVPYVRESGTSVRGKQAISRGGNKRLRRTLYLATLAATRWNPRIKAFYTRLRAAGKPAKVARCAAARKLLHLAWAVVTKGRAYDPAYQQGSTAQPSSAA

SEQ ID NO: 401391 - protein, 389 aa, unidentified
MSLDHPGEGPTAIRTNLGAIFVSLELSRSTWLITSLSPGGGEKMSKHSVSAGDIAALLARFSELMKKAFARTGRTFPIIVIQEAGLDGFWVHRLLHNEGIESYVVDPASIATSRRRRRAKTDKIDGEALVRALLAYKRGEPRVCAMARAPTPEQEDSRRLCRERKTLTVERVQHVSRIKGLLFSQGVSDYEPLRCNRRQRLDELKTGDGRCLPQHLKAQISRELDRLELLLEQIKAVETERDALISPKAKTEQSRAPQAMLISLKGIGPEFAAVLWSEGLYRSFSNRKQVAAYAGLAPTPWQSGSVDREQGVSKAGNPRLRTTLIQLAWLWLRHQPQSALALWFKERVRRNGGRLKKTTIVALARKLLVALWKYVTAGVVIEGAVMKGA

SEQ ID NO: 401392 - protein, 312 aa, unidentified
METKFVGIDVSKLTLDFDCLPVDAPQQFANDSVGVEALVALLKGSGVERIVVEATGGYETAVVSALAVAGLPVVVVNPKQVRDFAKAKGHFAKTDKLDAKVLALFGERMKPPLRAFQDAAQRALADVLNRRLQLVTMRAQEKTRLASVPTVAKKDIELHIAWLDKRIAKLETDLGDRLKTSPVWCHKAELLESVPGVGDVTTFSLLADLPELGTLNRQEISALVGLAPFPDDSGTRKGKRYIRGGRAEIRCVLYMATLSAKTYNPPIKAMFERLTKAGKPFKLAMTARMRKLLTILNAMLKKDQAWKIQPSA

SEQ ID NO: 401393 - protein, 334 aa, unidentified
MEKITTVGIDLAKSVFSLHGVDRTGRMVLRRTVRRDQLVKLVAGLSPCLIGMEACSGAHEWGRRFQELGHTVRLMAPKFVVPYRKSGKNDGNDAEAICEAVGRPSMRFVPVKSAEQQALLAMHRVRQGFVVERTATINRLRGLMSEFGVVLPLRSIVVRRQGAAAAENLPELARRAIGDLLDQLRVLDERIVGYDREIETQAKLCEPAQRLMKIRGIGPTTALAIVATVGNAREFKNGRQFAAWIGLVPGQYSTGGKTRLGHISKRGDAYLRNLLVQGARSVLHTAAAHRDPVSRWALELQPRRGYYRTLVAIANKNARIVWALLAKNESLRTV

SEQ ID NO: 401394 - protein, 360 aa, unidentified
MTGTMTWAAMDVHARSIYTASLDVMSGELRRQRFDTGAAEPVVQWLVGLPGPVRCCYEAGPTGFGLYRAAVAAGIDCQVIAPSKTPRASGDRHKSDRRDTDLLLRQLMAGALTAVTVPSVTFEAARDLARAREQVRVDLMRCRHRLSKLLLRHGRVWDRSAWTKAHRQWLSAQTFTQPNTELAFIDNLAACDGLSARREALDERLSHIVTDPEFWPTVRRLRAFRGIDTLSALIITLEVADFTRFSRAPQLGSWLGLVPSREQSGESDAYGSITKTGSKYARRILVEAAWHYAHQPRVGRTLYERQEGLPDHVVQIALRAQRRLYRVHKRMRERNKAGNVITVACARELACFLWAAATAP

SEQ ID NO: 401395 - protein, 391 aa, unidentified
MIFVGIDVAKDKHDCFILNSEGTVLADVFTIANNRIGFETLLSRIQSCSQGESKIKVGLEATGHYSYNLLGFLLDSGLATYVINPLHTNLYRKSLSLRRTKTDRIDARTIAMMLMSDVDLKSYSNIAYHNEELKSLTRYRFDKVKERAKLKSSVARLVNILFPELEKLVSSLHIAVVYALLSNYPGASYIANANTEELAEILCTASKGRYTKSKTAEIQVAAGVSIGSKMPAKSMELKHTIALIRELDKEISEVESAIDKITSQMDSPIFTIPGIGRHMSAMILAEVGDFSNFASADKLLAYAGLSPSTYQSGQLQNCYAHMEKRGSRYLRYALFNATKYVCLWCPTFSAYLEKKRSEGKHYNVAISHAAKKLVRLIFAMQRSGKAFLADY

SEQ ID NO: 401396 - protein, 387 aa, unidentified
MIYVGIDIAKQKHFAAAMTADGEVLIPPFGFTNDAEGFKLFLSKIKSFKKENTLIGLESTAHYAENLICHLFDLGYHISVINPIQTSTLRKTNIRKTKTDKVDCLLIIKSMIVNKPRLYSKSDIDSLRLKSLCRFREKIKKAKAKLKIQLVAYVDIIFPELQYFFKSGIHTNTCYQLLKKHSSPDDIAALHLTYLANLLQKASHGRFGKEEAIALKGLAKSSVGTDNTAVSIQITQSIAQIELLEQQLADLDGIIESIMLEMDSVILTIPGIGFLNGAMILGEIGNISRFSNPSKLLAYAGLDPTVNQSGKFNAKSTKMSKRGSKLLRYALINAAWNVSLNNKTFNDYFNLKRSQGNNHYAALGHVAHKLVRIIFKMLKDNVAFNLD

SEQ ID NO: 401397 - protein, 519 aa, unidentified
MHQTKYRGIITEAGSLTTPPWEPAFRLVKPPIKSVSPFGGDLCFGWLGSLRLYLYKPLGCVSAFWKWIPARKDNIMHYQKVLKMLESIPYLSVGLDVGADFTWMSILLPNGTLVGKPFKIVHCDPASRELAVSKIKEAQETYSLKSRCFLESTGIYHIPLLCFLRDKGFDCSVINPIITKNSTNMNVRKLHNDKFDSKKAAKVGQDTSLKTSIVPEDAVIDLRNLVRDYYYFKDLQSAVVLKLHAELKVSFPAYLNVFSKVTAQTSLKLLEAYPLAADMLAAPRDELVETIRNTARFGEKYALSKYDAICAAAKDAAVFGRALPSNALRIRLYIKTYREYQAHLDSILEELHKAVDNLQGGPVYDRICLLQSLQGVGFLSAVVLIAEMGSFDLFSSPKKLYAYFGMDPGVNDSGKFHGDRVHMSKRGSSLARRILHMIAINNLKVDKAAKAPVNPVIYDYYIRKCANKKKIVAVGAVMHKICNIIFAMLRDNKPFELITPKEHCERYAAEHPGSVNIAA

SEQ ID NO: 401398 - protein, 323 aa, unidentified
MSSFVGVDIAKNTFDIATHLPNGKHKTKAKLTNDAKGFKEFEAWLLKQAEPSALIVMEATSVYHLELAEFVYNKGYRVCVVNPATTHAYAASELRRIKTDKSDAKLIADFAREKARKLKLWAPEPLKYRQLKAMVRRLDDLQEMEQMELNRLEVSDEKVKDSINSVLRHIEKEIAETHRAIKNHIDDDPDMRQMRDLIVTIDGIGEKTIERLLAELGDLRQYDDPRKLVAAAGLNPKLQDSGLLKGRTVISKIGSARVRAGLYMPGLVALRHNEAIIAMKDRLKANGKAPKQIICAAMRKLLHFIYGVLKSGQPFDPKLALAR

SEQ ID NO: 401399 - protein, 577 aa, unidentified
MTTASALDRLGVGIDTARYGHRVSFLRPDRQPAAKPLTVLETHAGYQALRERLEQLQQQHPQVQFHVRIDAAGQYAANLEAFLRSLPLPLTVSVGEPKRNKDYQKAHFPKRTTDDTDSQALARFAVVEQPAATPASTPALDLLREVTGRLQAQVKQTTQAINRLHNLLARVFPELATLTDNLAAQWVLQLLDQYPSAARIGRARRTSLEQIPYLSADKAHAVHQAAQRSVGSLHGAVAETLVRDLVRQVRQCQEAEQRLRDLAMAAYEDLPAAGHRQLVTIPGIGRATAAVLVGKVVAIDRFATPAQLVGYFGIFPEENTSGVDKHGNPVPPGTLRMSHKGNDLVRGYLWNATRSALVCNPAIRALYRRLKAKGKRGDVAFGACMRKLLHLVFAVWKTDRPFDAQHFPWEAPAAPAAATSPAAPAAADDKAVGHTRDVPAEEVVTTAASSVAPAATPVNPPTPATGSARPRVDFAFLRSQVSLEQVLRHLGFLDALRGRGQQRRGPCPVHGRPTDRTPCFSAHLGKNVCQCFQADCAVHGNVLDLWAAVQRLPLYEAALHLAATFQVPRNREEEPVS

SEQ ID NO: 401400 - protein, 324 aa, unidentified
MVDSILGIDIAKLKFDVALLKNNKYKSKILKNNSKGFEELLAWLKEKDVQSLHVCLEATGIYGEALSCYLADKGFMVSVVNPAQITGFAQSELSRTKTDKADAKLIARYCQAMKPTVWQPLPQHIRELQGWVKRLEALQSMYREESNRLEVAQPAIKSCIQEVCEMFAKKIEEVKKNIREHIESHPDLRIQKNLLETIPGVGEATIAQMLSFIGTTKRFENARQLAAFVGLNPRQHESGSSVRGRSRLSKTGSSSLRKALYMPAISAKRYNPVIKAFCERLQKAGKPKMLIIGAAMRKLLHIIYGVLKTGKPFDANWQTILPQS

SEQ ID NO: 401401 - protein, 310 aa, unidentified
MQNLCGVDVSKDWLDSFIPPSHFERFENSPEGIGRLADFIRIHAASLVVMESSGGLERVPFYLLWERQVPCAIVNPRSVRDFAKAMGHLEKTDRIDAGVIAHYAATKSLKPTPPPSRNQQRLSVLSDRMRQVVSDLTVQKQRLHTAHDDIAREGLLEIIAVLKRQGKSLSAEIASLIDNDPLWAALDATLRSVKGVADRTVATLMADLPELGILSNKAIAKLAGVAPLADDSGKRQGTRRTRGGRASVRVILFLVADIARKYDQSLTAFRQRLIAKGKCKMVIRIALAHKLLVRLNAKARETRAAFANNP

SEQ ID NO: 401402 - protein, 357 aa, unidentified [sequence omitted]

SEQ ID NO: 401403 - protein, 348 aa, unidentified
MSEIGTIGLDIGKDVFQVHGVNQLGARVLERKLRRHEVAVFFETLQPCVIGMEATSSAHYWARLFVKMGHTVRLMPAAYVKAYVKTNKNDARDAEAICEAVQRPTMRYVSIKSAQQQAVLTLHRSRDLLVRQRVMLVNGLRSHLAEFGFVTRAGRGGATQVLQFVNEATSAQLPLDVRFVSRVFVRQIRTLTKQIETLERRILRCHRHDSSSVRLSTIPGVGPLTATVLVATIGDGRQFRTARHFAAWLGLVPRQFSSGGKQMFGHISKRGERNLRRLLFLCASRALRQREKAKSRAVEWAKSLRSRKPYRVAVVALANKLARIAWALLAHGGVFNAQPPERAELQAG

SEQ ID NO: 401404 - protein, 361 aa, unidentified
MKRVQSNTLDFIGQNIYVGIDVHLKSWSVAILSEHSVLRRFRQDPEPEVLHKYLVSNYPGANYFSVYEAGFCGFWIHEKLTDLGINNIVVNPADVPTMSKEKLRKTDAVDCNKLARELRSGSLEGIYVPGADILEMRSLIRLRNLIVKDSTRAKNRIKSLLRFHGVEIPEEFTRCSIGCWSKRFLSWLHSLELSTEYGKKTLGLHLEQFIRLRKMLLQETRAIREISRKAPFDKPIRLLRSVPGIGVTTAATLMVEIDDIVRFSNAEHLASFIGLVPMCHSSGDNDNVGDITPRRHFMLRCLLVEAAWIAIRKDPAMTQAYTEYRKRMNPQKAIVKIALRLVNRVYYVLKHEKEYVPCVVK

SEQ ID NO: 401405 - protein, 348 aa, unidentified
MAMPIVEASRPVTGGIDTHLDAHVAAVVDVNGGVLAVESFPTTTAGFAELHDWLVGFGEMERVGVEGTGAYGAGLARHLRGCGLEVIEVDRPNRQARRRAGKSDPADAIEAARAVVAGRASGIAKTGDGPIEAMRSLLIAKRSGREARITCLNQLRHLGFCGPDDLREAFRGVPRKALAARAAGLRPRAGSDDVTYATKLAMRTLGQRVLAIEADNTELDTLLADLVETTAAGLLAVQGVGVDTAAILLVAAGDNPERIRSEAAWAHLCGVAPLPASSGKVTRHRLNRGGNRQANHALWRIVFTRLAADPRTRTYVERRLNEGRSKPEITRVLKRYVAREVYRHLPRA

SEQ ID NO: 401406 - protein, 339 aa, unidentified
MKITTVGLDLAKNVFHVVCFNERNKEVKKRMLRRKQILEFFTQLAPCQVSMEACAGSHYWGRQLRGLGHDVKLIPPQHVKPYLRGNKNDYNDARAIAEAAARPGMPFVGIKTVEEQDMQAIHRMRSQCMRDRTALSNSIRGLLGEYGIVFPKGVPTLRKKIPEILEDADNGLSVLFRNLLARRYEQLVELEAYIAFYTKELEAISQQDDACLRLQTVPGFGPIVASAYRSVIGDGRSYARGRGVAASVGLVPRQHSSGGKHVLLGISKRGDKYLRKQLIHGARSVVLQAASKDDPLSRWVNRIRKERGWNKAVVALANKMARMGWAILRHGTTYQAPTI

SEQ ID NO: 401407 - protein, 373 aa, unidentified
MAHDSEAFIGIDTSKLKNAVAIAEAGRGGEVRYWGEIDTSEAATRKLIAKLEAKYSKLTFCYEAGPTGYGLCRLVTGLGHACDVVAPSLIPRKPGNRIKTNRRDAESLAKLLRAGELTAVWVPDAHHEAMRDLSRAREAAVKDLTAKRQQISSLLLRHALFYAGKTTWGRKHRTWLAQLRLAHRGTRLAFEELMAAEREAQARVGRLEAAIREAVPDWSLAPLVGALQAMRGIKLVTAVVVLAEVGDLSRFESPRQLMGWLGLVPSEDSTGGDVERGAITKAGNKRARRALVEAAWSYRHPPRVSLDMQARVAAAPGPARTIAWQAQTRLSARYRALVKRGKRPTVAVTAVAREMAGFVWDICRQVMPGGVRP

SEQ ID NO: 401408 - protein, 370 aa, unidentified
MTTYYIGADVHSNSTELAVERNKKIVARYNLPTSISALSSVLDSLKGEKHLAIEEGPMAGWLYRNLSKKVDELIVCDSRRNKLIDSDGDKDDKIDAAKLACLLRGDYLRPIYHSEDAGRTELKHWVSLYQDRVRDAVRNINKIRARCRMHGISIPRLVVRQVTPRDKWLSKTNNPALAAQLKLLWLGCDATSQQVRIARRRLSILSGKYQIIKFWSNLPGIGLVRATTLFAYLDTPWRFRKKNKLWKYCGVGLQRTTSGTDKKGKPKPARLQLPWAVNRTLKNAVLGAATSAINQKNNLFKDYYERMLADGIMPSNARHAVARKLLTAMWAMWKTNSPPSARPRQQAGRFNESVWCKPNTKMALVSSRLS

SEQ ID NO: 401409 - protein, 342 aa, unidentified
MYYIGLDVHKKTISYCVKDAAGHVHREGKIGSTRRELDAWIPTLPQPRTIAMEATIFSGWIYDHLLPHAVAIKVAHPLMLRAIALAKKKNDKIDASKIADCLRCDFLPECHMASTEIRDRRRILRYRHLIVRQMVQTKNRVSGLLMETGVEHTKSRLHKVGYFRRLMTINSEIDDSIRPLLRISRENIERCQKTEYALVSSLEHDPLLKERIRRLRTVPGVGPITALNWALEMGDISRFRSIKQAVSYCGLCGDEHSSADKVMRMPLSKQRNKHIQHVLVEAAKLAPRQSAELALIHQKAMEKGNRNRATLAVARKMVAWLLAVDRENREFIPAEQREIRAA

SEQ ID NO: 401410 - protein, 312 aa, unidentified
MIKTTIGVDISKDVFDAHRLPDGAQRQFANDKTGWRAFIKWLDGSSVERIVFEATGAYHRAFEQAIDKAGLPLCKVNPRLARRFGEALGKLAKTDRMDAAMLARFGTALQPPVRPAPTRLQCDLKELLVARMALVKDRTAAKNRQKNLSCALLKRHAEQRLKKIERQIDEVETAIRDLIEANPDLARRFRILTSIPGIAERAAFALIIDMPELGSLDARAAAGLSGTAPMTRKSGKKTGKAFVQGGRPNVRAALYMPALVAARFNPDLKAKYNQLLAAGKPAKVALTAVMRKLVILANALIRDDRSWSPGNP

SEQ ID NO: 401411 - protein, 355 aa, unidentified
MKYYTSTTEFNCGIDLHARQMYVCVMDRQGKKLVHTYIKNNDFDYFLKLVAPYKHDLTVCCECMFGWYWLADACQAAGLKFVLAHALYVHLIHGGKNKNDRIDSEKLTHLLRSNLIPQAFVYPADLRPVRALLRQRIFFVWQRSELLARIHSHQLAHNRTPPKQTRRVRDTWEEQVLAAEEHPLRRFALQNELAMIRHFDQQIPQLESELLRQTKQLASQQFALLQTVPGIGEILALTLLYEIGTLERFPTVKDFLSYCRLVKGTVASAGKIKGLRGAKLGNPYLRWAFGEAAVIAKRDHFRIGPLAQRLEAKMNGNKFKANTVVAIKLARAVYFMLKNKTVFDPDRLVAALAKN

SEQ ID NO: 401412 - protein, 401 aa, unidentified
MNAVGIDVSKGKSMVCVMRPFGEVVLEPFEVLHTAQSLNDLAGKLKALDGETRVVMEATGNYHKPVAFVLHDAGLFVSVVNPVLIHDYDNNSLRRVKTDRKDAVKIANYTLDKWTRLRQYLPEDDTRLALKNCYRQYQQAVAIRTMLKNNLISSLDLTFPDANKLFSSPAKSNGCEKWVDFIGDFWHSECVSSLSSDAFAKKYLKWCQKHGYNFTRSKSDTIYACAVNAASLPKSPTSKLLIQQQVAQLKAVSQSVAAFQQEMLRLSQQLPEFDTVMEMYGVGPSLGPQLMAEIGDVRRFSSKKSLIAFAGIEPQPNDSGKIVGNDSGISKVGSAVLRRTLFLIMTVILKTQPQDEPVFQFMNKKRSEGKPYKVYMMASANKFLRIYYARVKAVMDSKHSK

SEQ ID NO: 401413 - protein, 346 aa, unidentified
MMIVGCDFHPSWEQVAWVEMETGETGEQKLVHEGGDAERFYRRLAAPALIGLEATGNCHWLLDLLRDLGHEVWVGDAAQIRASYVRQQKTDKRDAAHILKLLVEGRFPRLWVPDREQRDLRQLLIHRHKLVEIRARVKNGLQHLAMNQGVQRKARLWSAAGQQVLRALPLHPWAARRRADLLGLLEALNGQIAPLDGAVQQAAEENVEARLLMRQRGVGPITALAFVLTIGDVTRFQRSKQVASYLGLIPREHSSAGRQKLGAISKQGNRMMRMLLVEAAHQAVRYDPQFRQEYRRRCHSRPKQVAQVAAARKLAVKLYWMLRSASARPQSVATESSPRVPLVGVS

SEQ ID NO: 401414 - protein, 538 aa, unidentified
MEAIHERCCGIDVHQGKLVVCCLTGSAETRPRKVLREFGTTPGELRVLGSWLRSEGCTAVGMESTGVYWMPVYEMLEAAGGFEILVVNAQHMKRVPGRKTDVKDAEWIADLVRHGLVRASFIPGQPFRNLRWLTRARVKLVGAHTSECNRLIKLLEASGLKLASVMSDVLGVSGRAMLWKIVEGETDVEKLAALARGVLRKKIPELKVALECRLGSEQRRTLRMHLTRLESTEAEMAGLEGRIRELLVPYAREMKLLQTIDGVDFLVAATLIAELGTDLSAFPTPHALAMWVGICPGNNESAGKRHSGRIPQGNRYLKVALVEGAHAAAHKKQGFLRDKFHRLRARCGAKCALVAIAHKLIKIVWHVLTGGEPYREFDSGHLDQVARQRHAQRAVRQLERLGYVVQITAAAPPTDGAAAGKVRDYELRPVAAKPAVSADAAATTVADRNTSLAAPTNARSATSDVTPLPDLGLVGSSQPASAPPTPRPVRKPRRATAPAHPAKTTHVANKPKRRTSVRSVDKPKRRTSVRSVAKPKTR

SEQ ID NO: 401415 - protein, 405 aa, unidentified
MAGLDVHRDTVVACCQVKQPDQSIEVIKQSFATTANGLGELATWLSDAGVDTVAMEATGVYWKPVYYCLEGLFDELWLCNAQHVKNVPGRKTDLSDAEWLADVAAHGMVRPSFVPPPEIRELREITRYRKTQVEARAKEIQRLEKTLQDAGIKLSSVASKVWSKSSREMIEAMINGERDPKVLAQMAKSRMRAKIPQLEEAFSGHFGAHHALVCRQVIEHIDFLDRSIATLTSDVTARLCPFESAVTILCSIPGVSRTTAEVMIAEMGVDMTRFPTSGHLCAWAGVAPASHESAGKRQPAGTRKGSTWLQRALVEAARGASRTKGTYLSAQYSRLARRRGSNKATIAVAHSILDVSWHLLTTGVFYDDPGARFFELRHDPAVEAKRLQRRIEELGFEVSIAPAAA

SEQ ID NO: 401416 - protein, 408 aa, unidentified
MNTLYVGIDVSSKSNVVYLMLPNGDKHSNFSVANSHEGSTLLVKKIYSALTSHSLDTVLIGLEATSVYGDNLVYFLREDATLAPFNRKIHVLNPKQVKKFHDTYNDLPKNDYVDSFVIADCLRFGRINKEVYMGDYRYKALQNLTRARFFAVQNLVKEKQRFMNVLFKKYSTMTQEKVFSDAFSTTALAVYDEFESAEALANMDLHELTDFIIEKGKNRFPDPDAVAKAIQKAARSSYRLPKTVNDSVNQVLSISITSMKALESQIKEFDKAIKALMELLPNVLISIPGIGPVYSAGIMAEIGDINRFDNQASLAKYAGLAWKQHQSGGFEAEVTRLIPSGNRFLKYYLCEAAFSLVRCDKEYSDFYHLKYKEVNRCQHKRALALTARKFVRLVFRLLKDNRLYVPAK

SEQ ID NO: 401417 - protein, 494 aa, unidentified
MATRRATTDTQTQPRSAYRRRKARARAKAARAHEAEERRVEGLPVTQAHAAGIDVGSRSHWVCVGAGAGDPAACVREFPAHTAGLHQLLDYLRQHHVTTVALESTGVYWIPLYELLESNGFEVLLVDPSYTKQVKGRPKTDRLDCQWIYRLHSVGLLAAAFRPDEKTCQLRSYLRQRANLIRYAGQHIQHMEKALEQMNLKLREIISDITGVTGQAILRAILKGTRDPQKLARLRNQKCKASEAEIAQALHGSYRDEHLFALRQAYEAWQFYQKQLDQVEEQIQQQLARMKQDRALPPLKPRPRTSGRKPNQPRFDVRTALYYVVGIDLTEIEGIAELTALTIISEIGPDVSKFATVKHFCSWLGLCPQLKKTGGRVKSSRTRPGVNRAAVAFRLAANSLYASKGALGAFLRRQKGRLGAPQAVTATAHKLARIVYLALKHGLAYVRQNQQEYAAKVREQQIKGVQRRARQLGLEVIEKQPSTSTAAQTAAVPC

SEQ ID NO: 401418 - protein, 415 aa, unidentified
MRKSNFIEFEQIVERGCGMDVHKETVVATIRGKGIKTVTKSYSTFTSSLKKLKEWLKKHGITHVAMESTGVYWKPIFNVLGDDFEILLVNARHVKNVPGHKTDKRDSRWLAKLLLSGLLKGSFIPDRPFRELRDLARYKKKLTNQVVADKNRFLKILEDANIKLSMVLSDVFGVSGTKMINHILAFDDYRPEDLMQYVHGRVKANREDIKEALTGYVTPHHRFIMNTILGNIAKTQSTIAEIDVHLDKVLAPYKLEKELLETIPGVGPDVSIGIIAEISTNMEHFPDHRHLASWAGMSPGSNESAGKNKSGRTTFGNRSLRGFLTEGGWAASKTKNTYFSSKYKSLVGRRGKKKAIVALGHKILIASYFIIRDKVEFKELGEDYLDNFRRDKLIAYYKKQIERLDPEIESEEVAA

SEQ ID NO: 401419 - protein, 455 aa, unidentified
MRKVKSKKTKAKNVIQMPIVNPYSAGIDISDKEHVVAVAEGLATERVRSFGTMTCDLAELIKWLQECEIETVAMESTGVYWKPLFSMLVCNGFEVYLVNASYVKNVTGRKTDESDAMWIQKLHSCGLLKSSYLPNDEQEALRTLVRYRRTLVQDSSRFINRMQKSLELMNIKFHTVISDIIGKSGQAVIKAILGGERHAENFLRYIDKRVKADKATIEKSLEGNWRTEHLFTLKESYKMFLIYKDQIAACDQEIEKQLQQYEAKRNDGIIEMDKKPKGKPIQKRKDKNHPQFNVRGYLEKIHEVDVLNIYGLSETCGLELLAETGSDLSKWENDNHFVSWLNLCPNNKISGGKLISSNLLKKKSNPASQAFRQAANAVQKSNNWLGDYFRRMKAKGGQKYAIVATANKIARIYYKMVRYKQEFNPVELELYQQKYKQAKIAYFERKLSQLKNDAA

SEQ ID NO: 401420 - protein, 352 aa, unidentified
MSLYIGVDFHPHQQTACWVDATTGELKINTFHHQNRDELIRFYQSLPPSVVGIEATGKASWFEDLLFENNHQLLVGDPRLIRKRATSVHKSDKRDAEHIFNLLSNNEFPTLWRRAKESSNVLELIKLRSSLVRQRTQIYNRLQALAHEVGLNKGKMETKHFQTLLQSVKLNAIKSVQRETLFQTSEFLSQQINHLEKVLQLKAEADEQVKLLLSQRGVGFLTALCVVHTLGDVHRFNSTKKISSFVGICPLEKSSGSRVKFGSISKKGSALLRFLVGQSANIAIRYDDKLKAFYQRLSKKKPKAVAKTAVSRKLLVKLSIMLRDKITATEFDLRGRTVGNARANKGQKMTAA

SEQ ID NO: 401421 - protein, 387 aa, unidentified
MTKIASSPSPAAVDFDATLILAVETSNKNWVLAAHVPGLGQVKAKQTIEPNVDALSKAIEGYRRRAKASGATVERVIVVYEAGYGGFWLARWLEAHSVEVHVVQPSSVPVERRKRRAKSDKIDADLLLRTLLAWLRGEPRVCSMVRVPDEADEDARRPTREREELVRERISLTNRIGATLATLGIDDYNPLRRDRRTKLETLRTPLGKSLPEHARAKILRILERLELILGQIAAIERRRDAALEDEAPGRERGMIQRLAGLRGIGAQSATVLVYEAFIRSFANGKALGSYAGLTGTPFNSGGSEREQGVSKSGNRRLRGTMGELAWLWLRYQPESALAKWFRERLAGANGRMKKILLVALARKLLIVLWRYVTLGVVPEGAVFLPAS

SEQ ID NO: 401422 - protein, 410 aa, unidentified
MLFIGDDWAEDHHDVEVMDASGRRLAKARLPEGMAGMTRLHAMIGQALGDDIDAEDGVAWVKIGIETDRGPWVQALVAAGYTVYAVNPLQASRYRERLAVSGAKSDAADAHMLADMVRTDSHQLRPMAGDSADAEAVKVVTRMHKTLIWERTRAGQRLRHALREYFPAALAAFEDLHAGDTLELLAKAPDPGSAARLSVSQISVALKRARRRDIAAKATAIQAMLRAEHLGQPAVVTAAYAVSVRALVALLVTLNEQVKTLQGQVEAYFGRHPDAEIILSQPGLGAVLGARVLAEFGDDHHRYASAKARKNYAATSPITRASGKKRTIAARFVHNDRLVDALMAQAFTSLRASPGARAYYDRQRARGASYRAALRQLANRLVGILHGCLKTGTPYDEATAWSHHLNEAPA

SEQ ID NO: 401423 - protein, 310 aa, unidentified
MSRIQGKTFTDTHQVYAGIDVCKASLDLHVLDPGGDGVSRHFANTNTGIRSLIACLGGSPCRVALEPTGRFHLAVWRALDAAGHEAVLLNPFRVRRFAEVLGTMAKTDAIDARVLAQAAAGLDAAPSSPPSDVCLRIKELHGVRCGFADALVAARNQRGAATDKLARRLLAGQIALIEADPALTRRRDILASVPGLGPVCVTALIAELPELGTASDNQIAALVGVAPFNRDSGKWRGKRKVKGGRAHLRRILYMAAVTAARFNPALTAFRERLRAAGKPPKAAFIAVLRKLVILANALIRDDRLWTPQKP

SEQ ID NO: 401424 - protein, 362 aa, unidentified
MKNIKQTNGLNLNTATFIGIDAHPTEHTALAINRFEEEKGVLRFENTKEGIASFLHWIPTLDAQADNVVIGVEGSGGNGHALVSYLLPLYEYVYEVNPLYTKQRRTLGTRGRKSDPVDAKLVAEVLTRKVSELPRITTSTLSSHLVSLKKIVWFYEEKVRHGTRLKNQLHRLKREHGLCVNPDEKRILALTIREKHSELQSVKRVQKKLVREMGMLLKGQGDNLTTLPGIGTIIAAKLVARINGIERFRTVSKFLQYAGIAPKEKSSGKVKRHVQSNKGNRHLNSVFYLIALTQTQWNPKAKVYYQKKIAEGKTKKHALRCVMKRVACIVYGMLRSGEAYRTEKAGEELLHNSASASSYAGL

SEQ ID NO: 401425 - protein, 316 aa, unidentified
MTHTIAAGIDASQNYLDVGFAPSGATFRVANAAEGIAKLIERLTKEGVRKVVLEAIGPYAQRLVQTLSLADFEIGIVNPKRIKAFREAEGKRAKTDRLDARLIARFALFMTDAIRPLPSPEQLVLKSLSGRRRQLTELIAMEKVRLKQAIEPIVAQSHKRAIERLSEELKVIEAELGRRIANDPELSKTLAILTSIPGIGTRIATLLVTDLPEIGNRDKKAIASLAGLAPHVSQSGNAPPRAAIAGGRPCVRAALYMGALVAVRHNPELKKAYQAFRAQGKPAKVALIAIARKLLVTANAHVKTKTPYVKNDAAST

SEQ ID NO: 401426 - protein, 369 aa, unidentified
MKQDSVFYIGVDVSKAKHAIAVAEGGRHGEVRYFGEIEAPPAAVERLVRKLEKKHPHLHFCYEAGPTGYGLYRQIVELGHRCDVVAPSLIPKRAGERVKTNRRDAVSLARLLRAGELKGIWVPDAVHEAVRDLVRVRAAASEDLRKKRQMLLSFLLRHGRVFTGRKNWSRAYACWLAAQKFDHPAQQIVFQDQVDVITDAQNRLERLDGQLAELAPSWSMAPVAAYQALRGVSFVVAVTFVSEVGDVRRFDNPRQLMAFLGLVPSERSTGDTVKRGGLTLAGNRRARRVLVEGAWSYRHPARVTEPIRVRLEGLPKAVREIAWKAQTRLCARYRRMMAAGKKKPIVIAAIAREMAAFLWAIGHQVEPVN

SEQ ID NO: 401427 - protein, 339 aa, unidentified
MSFGTVAAVTHDRTVAWLPIVRARQVTVAKIICGVDVSSDMLDARIGPNGPSVRVERTAEGIERLAAFCREHSAELAVMEATGGYEKLPFALLWAAHIPCAIVNPRSVRRFAEGMGTLEKTDSLDTGMIAWYAEVKGIVACEPPSETQQELTALVGRLRQLTDVKVMQENQRRLVTDATVLGSINDLLALLRSQIREFERAIATLIASDRLWHKLDQTFRNIKGVADRTVARLMADLPEIGTLSNKAIAKLVGLAPIAKDSGKIKGRRSVRGGRASVRSILFVVAEIVRRHDPDFAAFHRKLKEAGKAPKAIRVALARKLLVRLNAKAREVRQELALCA

SEQ ID NO: 401428 - protein, 394 aa, unidentified
MIYAGVDIAKMDHVIGAVDERGAEMCRPMPFKNTEAGLERAVAWLEGLAESPSDVVVGMEATGHYWMACYSFLVARGYSVAVINPMQVKAVRKLKGLDKVKNDRVDAGLIAEALRIGQYDETRLATDEVASLRSLSRYLQSLRGMIAELKTQCVCLMDAHFPEYAGIFSDMFGAGSRAVLSKSPLPFELARRRSDSLARDIAEASRRGGRSAGYAAEIKAAARSSIGVRLGQEAASFQVKSLIRQIEFAESECAKVEARVRALLDEVEPLVLTIPGVSYVTGAQIVSEIGDVSRFRNAPALVSYAGLNSSVSQSGQFDSGGGPITKHGSPYLRRALWLAANRARQCDPGLRAFYEKKRAEGKPHRVAVTAVARKLCHIVFAVMRDQAPYDPGRE

SEQ ID NO: 401429 - protein, 346 aa, unidentified
MKINRVGVDLAKNVFQLHGVDRKGKALWKRRLTRGKWLAVLCDTVEPGTEIGMEACAGAHHWARQLMQRGYPVKIIPPQFVKPFIKSNKNDANDAAAICEAMGRPDMYPVKVKTVEQQDLQAMHRIRDEIKSHRIAKANQIRGLVTEYGLVAPQQLHALRKAIPDWLEDAENGLSFLFRQLLQGLWGDLYALDQRMTELDKQIAVIAQEDPTARRLQQLRGVGPLIATALVATIGDGKQYRKGRDMAAALGLTPRQHSSGGKDRLLGISKRGDAYLRCLLVHGARSAVRTAKDKDDRLSHWIINLQARRHANVVAVAMANKMARMAWVIMTRDVDYDPDLAAASVS

SEQ ID NO: 401430 - protein, 362 aa, unidentified
MFRPHALYIRIRIVRKVLKPVFAMQDQDVSDVIKTKNRTAMKYIGIDVSKATFVVAYSSDKSGEIRTFNNTTAGIKQFIGTLPKDGSIHCVMEATGNYSALLLYMLNVAGITVSMENPLKVKNFAKAMLSTIKTDKSDARLITLYGEKMNPRPFKVQGEAILRLRQKRTVIRQLTKQITAMSNLRGSLACLPVPDKGATHTVDETIKFLEKKRDRLQSELTDLVEVEFSRQLALLTTIKGIGITLATALIITTGGFTYFQNAKQVSRYLGICPTYEQSGTSVNIKGHINRNGDAYTRGLLYIAAWPASRFNAQCKETYTRLRQNGKSGKLAMIAVANKLVRQAFAVVAHDKEYVDGFVSNRP

SEQ ID NO: 401431 - protein, 389 aa, unidentified
MIYAGIDVAKDKHDCCILGSDGENLLPIFTIPNNRSGFNEFYEKLFSVSKDVSEIKVGLEATGHYSRNLLGSLIEKGLTTYVINPLHTNLYRKGLSLRKTKTDKVDASSIAMMLITDKTLKPYTSSSYHNEELKSLTRYRFTKVQERSKLKTSVSRLVNILFPELESLVPSLHMASVYALLTEMPGASHIAECHLTHLTNLLKSASRGRYGREKAILIRDAARKSIGLESASKSMELKHTIHLVEEMSKEIREIELAIKKAMLSIHSTIMTFPGISYRMGAMIIAEIGDFDRFENADQILAYAGLSPSTYQSGQLTSSHSRMEKRGSKYLRYALFNAAKYVCKWDPNFASYLAKKRKEGKHYNVAISHAVKKLVRIIFAMAKSGEPYRG

SEQ ID NO: 401432 - protein, 342 aa, unidentified
MLVMIGIDPHKVTHTAVVVDDDENVIGEFTVEASNDQVGGLCDWVSMFTKREWAVESVNGLGYLIAQQIVAGGETVFDVPPVLASRVRLMGSGRSQKNDPNDARSVAIAAFRSDRLAVVEPDDHVTVLGLLVKRHRDMARLRNKHCSRLHALLLEVKAGGIGGKISVTNASRLLDRIGVTDEATRYRILVAREVVDDIERLDQSLTASKNRIAVAVTASGTSLTDIVGVGPVGAATIIGYTKNVSRFPTRGHYATYNATAPIEVSSAANTRHRLNLRGNRILNHAIHIAAVTQLRYDTNGRVYYDKKIAEGKTPKEAIRALKQRISDAVYKSLTADAATTTN

SEQ ID NO: 401433 - protein, 343 aa, unidentified
MYIGLDVHKKLSYYSMVDGRGTEMQRGRFPTTCEGLDEFASKLPEDAKVAIEASTSGIFAYERLDESGIEVHLAHPVYVKPFAKKHVKTDKVDARVLAQLLRMAYLPESYVPGKEIRDQRVMIRHHASLVRLRTSIKNRIHALLAIEGVQTSEFSDLFGKKRMEFLRGVKLRQVRREALDNYLEVLKALEERIEEMEAILKERAKITDEAKWLMSIPGIGYHNALLIQSELGEIERFSNPRSMVSYSGLAPKVEQSGDYKRYGHINKHSNGFLRWAFIQSARAAVRSSKPNRFQRIYNKIKARRGEKVAIVATARHLAESVYWVLTRKEYYKENRAIRASYFS

SEQ ID NO: 401434 - protein, 350 aa, unidentified
MTMLAEQVDGVIGVDTHRDTLAAAAVSPIGAVLETTDTPAYARGYQRLLEFAHQHVPGRRCWALEGTGSYGASLAAFLADAGEQVIEVCRPKRPPVRGGRKTDMLDAVRAAREALATEHVIQPRMRGAREAMRVLLATRQGAVHASTAAINQLKALIISAPDDLRADLRRLNRPAQITRCTGLRDRPALSTEHRMTIRALRPTAQRIRHLQAEARDLENEILQIVRQQAPELLELLGVGPITAAQILVSWSHPGRFRSEAAFASFAGVAPIPASSGLTNKHRLNRGGDRQLNRAMHTITLIRMRLDPTTKTYVARRISEGKSSRDAQRCLKRNVCRQIFKILERRTQPNA

SEQ ID NO: 401435 - protein, 444 aa, unidentified
MKYQNVLMMLQSIPYLSVGLDAGADFTWMSIMLPNGILTGKPFKIIHSDPVSRELAVTKIKEAQEAYSLESRCFLESTGIYHIPLLCFLRDKGFDCSVINPIITKNSTNMNVRKLHNDKFDSKKAAKVGLDASLKTSIIPDDEVIDLRNLVRDYYYFKDLQSAIVLKLHAELKVSFPAYQKVFSKITTQTSLKLLEAYPLAADMLAAPKDRIVETIRKTARFGEKYALAKYDAICTAAKDAAVFGRALPSNALRIRLYIKTYREYQEHLDGILEELHKAVDKLEGTPAYDRIALLQSLRGVGFLSAVVLIAEMGSFDLFSSPKKLYAYFGLDPAVKQSGKFNGDKVHMSKRGSSLARRILHMVALNNLKIDKGTKTPVNPVIHSYYANKCKSKKKNVAVGAVMHKICNIIFAMLRDHKPFKIITPQEHCEQYLAAHPGKTHNAA

SEQ ID NO: 401436 - protein, 362 aa, unidentified
MSTVTTRSEQPARTLHLAFDLGNRVWKLAFATSVAHAPRLRTMAARDLAQLATEIAAAKARFGLAPDAPVVSCDEAGRDGFWLHRALAARGLTSHVVDSASITENRRARRAKSDRLDATALARLLVRHHGGERGVWSVLHVPSVEEEDRRHLHRELFTLTRQRARQVTRIKGLLALHGIVLAKPRGVPARQPELRDWCGAPLPPTLAARVTREWARLRAVQRDVVALLAARRQMLASPEAARDPLLRQVEQLRALRGIGEVSAWLYATEFFSWRAFRNRRQVAGLAGLTPTMRASGDREQEQGISKAGNARIRALAVELAWSGVRRQPTSALTRWFRERFAAGGGRLRRIGIVAVARKLLIC

SEQ ID NO: 401437 - protein, 387 aa, unidentified
MTVPAQVFKIIPRHYDIFGGLDVAKKNMAVTFTDHEALMRSLRLPYSSAHLLHYVRKHFPDRRVAFVYEAGPTGFGLHDELVTAGYRCLVVAPSMVPTAPGDKVKTNRLDSRKLSVQLRGGELRSIHVPAPRYRELRHLVQLRDTQVGQLRATKCRIKSLLLCEGLAFPPAPESSQWSARVLSELLELPCSPAVRFELDQLIGTLHFHFNSAVAAQKQIRYFCQNDPELRQSIRLLASLPGIGVIVATHLVARLGDWRELSNVRQIAAFLGIVSREHSTGEKANRGRITRAGDSRLRNKLIQSAWTAIRKDAELRAFYLRIYHRHPKKIAARKAIVAVARKLTTRIYAVLKEQRPYVLRPENLPAPLTAEETVGPRGRLVGPQNEQP

SEQ ID NO: 401438 - protein, 341 aa, unidentified
MKPEMNVLGIDIAKHVFHAVGMDDRGNVVSRKRLSRHDLMPFLAKLPPVRIGIEACGGAHYWARRFREHGHEVKLMAPQFVKPYVKSNKNDSRDAEAIAEAVTRPTMRFVPIKDVDQQDIQALHRVRERLIGERTALVNAVHGLMHEYGIVMPKGVAKFRQAVVGKLESEKDKLTPLSQEMFWKLVEEFAALEAQLAYYQEKLEALAQTHPECQRLMTIPGIGPLTATALVAAVSDASAFKNGRQFAAWLGLVPRQYSTGGKERLLGISKRGDSYLRKLLIHGARATLRWVGRKTDRRSQWMRQLVERRGHNRTAVAVANKNARIVWALLTSHQAYEPAKG

SEQ ID NO: 401439 - protein, 390 aa, unidentified
MTSSQFDTLAAGAKDGTLYVAFELSKSKWLIGTVLSGESKLSRHLVPGGDTAAVWQLISKKRAQAEKKLGRSVQVVSCYEAGFDGFWLDRWLADQGIENRVLDPSSIEMPRRARQAKTDRLDLERLMRVLIRHEGGEPRVCSVVRPPSPEQEDARRLSRERERLIGERTAHGNRIKGLLHGQGVRDVEPRRKDFREQLAGARTGDGRALPSRLVAEILREHDRLMLIAGQLAEVEGLMKAEREAAVPDSRARQVNQLIELKSIGAVGSETLANEVFWRDFQNRRQVGAYFGLVGTPFDSGESSREQGIAKSGNARARTLAIELSWLWLRYQPDSALSRWFKERVGDQKGRIKRIAIVAMARKLMVALWRYLTQGVVPENAIVRAAAPAGR

SEQ ID NO: 401440 - protein, 392 aa, unidentified
MVCVGIDVAKDKHDCFILSSEGEVLADVFTIANNRDGFETLLQRIQSCTRLTDNIKVGLEATGHYSYNILGFLLENGLHTYLINPLHTNLYRKSLSLRQTKTDRIDARTIASMLMSDVDLKSYTDTAYHNEELKSLTRYRFDKVQDRARLKQSVSRLVNILFPELETLVPTLHMASVYAMLSEFPGARQISDAHLTHFKTILSDASKGRYDREKAVEIREAARRSIGSAMPAKSLELQHNIRLIRELDEEIAEIETAIKALVDEMAPPILTIPGIKYRMGAMILAEIGDFSRFDSPDKLLAYAGLSPSTYESGKLKATGAYAHMEKRGSRYLRYALFNATKYVCIWEPSFKAYLAKKRAEGKHYNVAISHAAKKLVRLIFVLQTSGKAFQPA

SEQ ID NO: 401441 - protein, 417 aa, unidentified
MNTNLPEGNIFAGLDWGDAEHAVCLIDGAGNTLEAFTVEHTHEKLGELVARLGAFGPCAGVAIERTGGLVVHKLLQAGVPVYAINPKVSKIWRDSYKADASKTDAIDAFVLADGLRHFQKQLRPLALDHEQTRELALLCDDESALIAERTAMVNRIRSTLKEYHPEALKWFTTWTSPAAWDFVLCFPTPDALASASRKKLAGFLKTHRIALTPLWQERIDAVRDAERWPRDPAVIAAKSFLAVRIARQLRALQAALDDYRQRIQELFDEHPDKDIFSSLPGAGPKLGPRLLTLFGSARDTFASAESVQALSGVVPVTIKSGNMKYEKMRRACDKDARKTMFQFAACSLRSSRWAKAYYLHATKTLKQSHARALRNLGAKWLKIIFRMWQNGQTYDETLYIASLIQHKSPIVAFINPL

SEQ ID NO: 401442 - protein, 347 aa, unidentified
MLHAGLDLSRKRLDVCLLGDDGEHLDQLAVAPDVDSLKTLARRIDETHRQPVCAVIESMTGARVVHDTLEQAGWSVEIADAQKVKGLAPLAAKTDRIDSKVLAVLSQRDLVPAIWLPDPRVREERELARFRLHLVKHRSMLKNRIHSTLINFGRPCPVSDLFGVEGRELLERLEVPEPWRGNVAASLALIDDLEGQIEDANRRLKESHAEHPYIPLLMSAPGIGWVLAFTIAAEIGEIGRFASPAKLTGYTGLCPKVVQSGDSDRRGPLSRHGPAYLRWALIEATMHALRHPAYSERYQRTKRRLGRQRGAKVAQIEIARRLAHAIWHMLTRNEEFAPRGAAFRLAA

SEQ ID NO: 401443 - protein, 319 aa, unidentified
MAQNDPVVAGIDVSKDKVDVCIRALGLQQIFPSCAQGHRELVAWLGKHQVNKAVMEASGGYEGDWAKALREADIEVRIVDPKRVRSFVHSAGRMAKNDAIDAQMIAWFAETFRQAPGQVHDAAQQELVALVKARIALVDLKMQLAAQSEHSASGQVQKARDRVLKSLIGEIAKLEATIAARIDATPPLAERAEIIASVPGFAKTTSANLVAGMPELGQVSNEIAAALMGLAPYDDDSGNRRGERHIQGGRRWVRNAIYMPCVGAATLNNPVIKAYYDHLIARGKKPKVALVACMRKLIVILNTMIARRQKWDPSRNALS

SEQ ID NO: 401444 - protein, 340 aa, unidentified
MPSMQIGVDLAKSVFEVAVSTVPGQVHERRRLSRAALGPFFAARPPAEVLLEACGSAPHRGRELQRLGHTVTLLHPRDVARYRDGNKTDRADAKALLEAARNTALSRVPVKSLEQQAVVALHRLRQGYLQTRTARINAVRGHLREFGCVIPLGPQQLLRQAAAALEQETVPALLRPALHIGLEEIVALEDKAEAVRTELTRLAEQMPDAQLLLTVPGVGVLTATALVAFVGDIHRFRAGRHFAAYLGLTPREASSGLVRRLGAITKQGNSYVRMLLVHGARSALRAGAVTQHPDDLRTWARALAARKGHNVAAVALANKLARVCWRVWRDQRPFERRDAR

SEQ ID NO: 401445 - protein, 431 aa, unidentified
MTTSSVPMETEILAYVGLDWADQQHVICCQAAGSASVETAVVRQRPEELQAWVAQLRQRFPQGLVAIALEQSRGAVIAALMHYDFLRLYPINPKSLARYREAFFSSGAKDDPNDAALLLDLLVKHRDRFSPWVPDDPLSRQLALRVEHRRQLVNLQTELTHKLSSHLKLYFPQALDWAGELNSLQACDFLQRWPTLQAVQKARPAQLKKFYNQHHCRRPQLIEQRIEQIGQAQALTQDTALVEASYRMVLALVAQLRPLISTLVQWQQEISQLFAQHPDATLFASFPGAGPVFAPRLEAAFGSRRDRFSSAQEILQFSGVAPVTQKSGKSHQVHRRWARPKFVHQSFVEFAAFSIPHCDWARALYQQLRARGQRHWAAIRVIAYKWIRILFRCWKDRVPYDEPKYLKSLERRNPRLWTAIQQLALEKPEVA

SEQ ID NO: 401446 - protein, 394 aa, unidentified
MALCVGIDVSKEKFDACAIGEGGEKIFSVSCPMDRSGFDRFILQLPADKTTLVIGMESTACYHIPLFSYLTAQDYPVVIINPLLIKNFAKRSLRKTKTDKKDALTIAQFLMREKETLSTDRPSHLINELRDLARRREKLADQVTSLKSDMKRILSVTFPELERVTGVFTKSTLRLLAAFPSAHALKEASHPAVAGIVISRSRGRKSQASVHARMAAAVSSVGMASAAKELVLKQEASLLLHVEQQMKETTELLISLCNERIREDTEILCSMEGIGENTATTFLVDMGGDIGIYANDKKLIAAAGLDPSTYQSGKYEGESKISKRGNRHLRRVIWLMTTKVITNREVFRAYFFRRREEGLIYKKAVLATAHKLIRVIFAMLSHKTSFVGGRIKYS

SEQ ID NO: 401447 - protein, 349 aa, unidentified
MIIIGVDFHPGFQQIAFVDSESGEFQEKRLAHREEAESFYRGLASAGEKIRVGMKSSGYARWFERLLSELQIELWIGDATEIERKRARKQKTDREDAQHILQLILKDDFPKIWVASWENRDLRQQLWHRHRLVQMRTRIMNQLQAVALNEGLSYKKRLWRGSGRQQLEGFQLGLWATRRRRDLLELPDRLNPTIAELSQAAEQEAEKCPEANRLMTHPGVGALTALAFVLILGNAERFECGKQVASYLGLVPLEKSSGKRRRLGHITKQGNSILRFLLVEAAQATVRKNPEWRSKYFHLALRRGRSIAKVAMARRLAIRLYWMWREKKEYQQTRSFGSHAGQPGNLYGA

SEQ ID NO: 401448 - protein, 351 aa, unidentified
MMIIGVDYHPSSQQIAFLMEETGECGEQELNHSDGQAEKFYRDLKQRGISVRVGMEATGYSRWFERLLAELGFELWIGDPAEIKAKRVKKLKNDREDARLLRRLMLEKNFPRIWVPDPENRDLRQLLWHRHRLVQMRTRIMNQLQALAMNEGYRWKKKLFSEQGRAQLEKLSLAPWASRRRQELLELLDRLNPTIAELTAAVEREARKRPAVQRLMTHPGVGPLTALAFVLIIGTWERFPRGKQIGNYVGMIPSENSSAGKQRLGHISKQGNSLLRFLLVEAAQAAARCNPDWRRRYFHLAMRRHRSIAKVAMGRRLAVRLYWMWRNGCEYSQSLEFGSYAGQLETGHGVK

SEQ ID NO: 401449 - protein, 426 aa, unidentified
MAVSAGEKQLGRLRVRKSAGQARQLTEWAAAWPERSWAVEGASGLGHLLAQLVAAGERVLDVQPKLGARVRLLAAGDTNKNDPNDARSVAIAALRSDGCRQVRADDHTAVLKLWSKRNHDLGRSRNQVACRLHSLLCELVPGGAGKEITASHAARLLAAAEPSGTAEIARWQLASDFLEDLRRVDEQMKQVKKKLAAAVKASGTTLTEIFGVGPVVAAIVLGETEDVARFRDRDHFAAYNGTAPVEVSSGRRTVHRLSRRGNLRLNHAIHMAAITQIRYAHSEGRAYYDKKLAEGKTPKEALRALKRRISDALFRRLRADASRAAAESAGVTGPGGRAGNGTDASAAGSHPGCRLFGEATPGPEPTTPRPSRTAAKPQLTSLKKRTQSLRMDVRPQRPCSRWVLRHAHGEWRVTPEFRSSEADLGR

SEQ ID NO: 401450 - protein, 375 aa, unidentified
MATVRFVGLDVHAETIVVAVAETAGEVRSLGMIPNRPEAVRRLVRKLGPPEQLRMCYEAGPTGYVLYWQLIGLGVHCDVVAPSLVPTKAGDRVKTDRRDAEKLARAYRAGDLTPVWVPDAEHEALRDLVRAREAAKKDQLRARHRLGKFLLRQGRRRPTHLKMAWTAGHIDWIRAVRFESTLHQIVLADYLHEVERGAARIAHLNQAILEAIRTAPPQMRAVIQALQALRGVAAVSAATIVAEVGQLSRFENPRQLMGYSGLVPSEYTTGSRRRLGAITKTGNAHLRRVVIEAAWAYRFGPAVRGPLKARQDGLDPVITEIAWRAQKRLHDRYRTLAAKGKNNNQVITAVGRELLGFIWDIARTVERQVPIAATA

SEQ ID NO: 401451 - protein, 344 aa, unidentified
MPCFAALDVSQETTAICVVDETGRVLAEKKVPTCPDAIADYLAIKAPELVRVGLETGPLAVWLWNELAIRRVPILCIDARHANAALKMRPVKTDRNDAAGLAQIIRTGWFKEVRIKGRDSYQVRSLLVSREMLVRIRVKIENEIRGLLRTFGVLFGKRVGGFTGRADEIIAGELDASPEMRIIAETLMKARASVRDQIKVLDRRLMAIAKATPIVRLFMTAPGVGVITALSVASAFDDASRFKRSSSAGAYLGLTPRRYESGETSRNGRISKQGDKMTRKHLYEAATTLLTRNLRFSTLKAWGLKLAKVSGFKKARIAVARKMAVILHAMWKTNTPFRWSSSAA

SEQ ID NO: 401452 - protein, 392 aa, unidentified
MIYVGIDAAKRKHDCCILDPQGKPYPVFSFSNSHDGFQSFFQKLFSICSDKGQIKIGLEATGPYSENLFNALVDRSLPVLRINPLLVKNFKSSMSLRRTKTDKVDAQAIAQMVKEKGDSLQTYSTSLYHMEELKSLTRYRLKLVGEQSKLRVSVSRLVTILFPELESLVSSLHLASIQALLIEWPGHQQLADCNLKRLTNLLKKHSRGQFGKPKAIAIQQAARQSIGRVSPSKSLELRQTLKKVAYVQQDLDEVEAQIKEMVDSLHSPILDIPGIGYTTGAMILAEVGDFNRFANADKLLAFSGMSPSKYESGEFKGTTGKMEKRGSSYLRYALYTAAKLVSQFAPQFKSYYQKKRAEQKPYNVALSHVAKKLTRVLYKLGTTGEAYRPQAA

SEQ ID NO: 401453 - protein, 343 aa, unidentified
MDHFAGLDVSVKETSVCIVDDTGKIVREVKVASEPDALLAVLKNPAYHFKRIGLEAGPLSQWLCSAVAEAELPVVCVETRHMQAVLKAQINKTDRNDARGIAQMMRVGLYRPVHVKTLRSQKLRMLLTHRKLLQSKAIAIENDLRGTLRNFGLKVGTVGKAKFEARIKELVENLPDLAILIEPLLIVRRALREQVVILHRRLLAIVRDDAVCRRLMTTPGVGPVVALTYRATVDVPARFRKSKSVGAVFGLTCAKYQSGEIDRRGRISRCGDEMMRVMLYEAAQSMLRSKKWSWLKAWAMQIARRRGMKKAIVALARRLAVIMHRIWVDGTEFRWTREAVTAA

SEQ ID NO: 401454 - protein, 343 aa, unidentified
MEHYVGLDVSLKKTAICVVDGAGKVLNEGSVPSDPEAIAMFIEENAPGVVRIGLESGPTSTWLWTELNARGLPIICIDARHAKAALNMQINKSDRNDATGIARIMQCGWFKQVRIKSLDSHAIKALLSSRALLVKMKCDIENQIRGLLKNIGLLPGKGKGNAYATRVSKQIEGRPELVIVVQPLLDAHKEIYRQVAELDSKVRKLARKDSEARLFMTAPGVGPITALSFKATIDDPRRFKRSRSVGAYVGLTARRFASGEIDWTGRISKCGNSMLRSYLFEAAGVLLTRVPQWCALKAWGLRLAKRSGFMKAKVAVARKLAVILHRMWMDKTEFQWSQLDAIA

SEQ ID NO: 401455 - protein, 370 aa, unidentified
MMKQIAYVGLDVHKNSITMALFVEQRKDEEFIKKMANNRKELFKSLTKLSEEYHLRICYEASGCGYSIYRKLTKHGMDCIVVAPSLIPTDNKKVKTDKIDARKLAIYLRSGLLTAINVPCEEQERDRDLVRFRVFQINELVRIKQAICAFLLRKGIEYSESTPFTQKFMNFIGMLDLPHDDRLMLNRLIGHYNYQNTLVNELTDDIEKLSQTDRYRERCAYLCAFRGVQTITAMTVLTHIPDFRAFPHPSKLMSYIGLTSKEDSSGDTVLRTGITKQGNSILRKAFIMAAQQYNRAEHTGCHMISKRNGLPSSIVSLAQRADRRCKNKYYRLTMRGKHSNIAKTAVARELVSFIWEAMIMYHQGELREAV

SEQ ID NO: 401456 - protein, 367 aa, unidentified
MEKSSKVYVGMDVHKESIEVTLAEQGGELRRLGQIGGDRVSFLKMVRRLQSKGGERVFVYEAGPCGFWIYRELAALGERCMVVSPALVPRRAGDHVKTDRRDSERLASLARAGELDAIHVPDIRDEAIRDLVRGRDDAVIAQRRVRQQLKALLLRNDIRYVGKTSWTGAHRRWLSELKLPEPAQQIVFEEYVDAIVVATSRIERLTRAIQTETLTWRFAPVVGSLQAMRGIQFVHAVTLIAELGDLTRFPSARQLMGYLGLVPREASSGEQRRQGSITKAGNSYARRALIEAAWAYRHPARVTRIIATRQTGLPKAACDIAWRAQLRLSSKYRRMNARHLHHNKIVVALARELSGFVWAVGQSVKPL

SEQ ID NO: 401457 - protein, 360 aa, unidentified
MVGIDIAKATFAACLGSIDTTQRLRLGKVVEFANDAAGFEALQEWVAATQAEAERPLWYVVEATGVYYEELAYYLSARQQALRVLLPNKVKHFAGSTEQKSKTDALDARLLCRLGLERQLPAWQPLTPAMRQLRSLTRERAALRTQAAQTKNRAYAYAHSYEPDPQALTRLQQRQALLEEQLQAIDAQTAAVVEATPELARKLAQLTSVPGIGLTTAVTIVAETSGFALIENERQLTSYAGLDVVQRQSGNLARPTAISKRGNARLRTALYLPAVSSLRYNEQQKAFYARLRARSPNGKVGVIAVMRKLLVLCYSLWKKDQMYDPAYHPATTPAPEVAPTPIGAEATQDAPTGAPLEVLT

SEQ ID NO: 401458 - protein, 349 aa, unidentified
MTVYVAVDFHAREQTISYCDTTEGEIHRTKLRHQVDDVRGFYEQFTGEVIVGLEASGYSAWFEQMLAELGRTFWLGNPAEIRRKAPRRQKNDRRDADLMLDLMMKGDFPRIHTFSEASRTVLRQLRYRHKLVKVRTIAKNSLHAIGINAGLPLKRQLLTAKGIAQLQTVKLSPVLAQQRDEWLELVAEMNRRIATIEEALQRQAHDDDQVALLRTHPGIGLLTALALRYTLWPTSRFSTTRRVTAYVGLDCMEDQSSERRRMGSISKAGSRLLRFLLNEAGQTAARKDPDLQRFYKRLAHRRNRPKAKVAVARKLLVRSFIMLRDQIDYAEFLRRGVAARAAREAHSLP

SEQ ID NO: 401459 - protein, 343 aa, unidentified
MVYIGMDVSSKEFVVHAIGPRKQKVFEGRIPPSGAGLRKLIRDLGVGPKLFVFEAGNQMKWIALTLMRQAGVRIHVVHPNEVKWISQSNGKTDQVDARKLAHLGWGNLLPRPVHIVEGTTRQLRELVSAREQLQGKRVALINALRGYIRQEGVRFPAKFFQRLGWKASLEKLSVGPTQGLIFKSFMEAIDALKRSEEELTARLAEIQDDRCDLLETIPAIGKIASRVLVGALDDARRFDNKKCVANYGALTPTIYQSGGTTNLGRINRDGRQEVRKVLLQCAHTIQRMVTHDAAPLREFFERIEKRRGKKRAVVATARKLLTTAYGVLKSGVPYDPERLRAFA

SEQ ID NO: 401460 - protein, 351 aa, unidentified
MYIVGVDYHPSFQQIAFLDQETGECGDRRLNHSDGEAEKFYRELRQKGISVRVGLEATGYSRWFERLLVELGIEVWIGNAAEIKAKRVRKQKTDRQDAQLLLKLLEENRFPRIWVPSPENRDLRQLLWHRHRLVQMRTRVMNQLQALAMNEGKRWKHRLWSAEGRAQLEKFPLAPWASRRRQDLLELLDRLTPTIDELTAAVEQQAKKWPEVLRLMTHPGVGPLTALAFVLIIGTPGRFRRGKQIGSYIGLIPSEDSSGGRQRLGHISKQGNALLRFLLVEAAQAAARCNQDWRQKYWHLAMRREKSIAKVALGRQLAVRLYWMWRNGCAYAQSLEFGSHAGQLGTGHGVK

SEQ ID NO: 401461 - protein, 364 aa, unidentified
MNKCQLNTELSSLEGTRSEFNRSTAAIKLGIDVHQDFYVVVKQEGGTNPKPAQRFQKEAFLHWVAKLTKEGAEMHAVYEACGFGFELQRQLTALGIHCYVVCPQKLDERNKRVKTDGVDAKALCLKLDRFVEGNRDALALVRVPTQAEEQKRAIHRQREQLVKARKRLEAQGRSLIVNHGIEPVNKWWKRRTFAALQVPAWMKELLQNTQPILLALEEKIRALTVQLQEAAISRQPRGLGLLSSVVIDREIGNWDRFKNRRRVSSYTGLCPGEYGSGNTRVQSCVTKHGNPRLRAALVETAWRLVRFQPEYRAVKKWRHLLAKGALATGAARKKAIVAVARQLAVDLWRIRTGRVAIETLGLIN

SEQ ID NO: 401462 - protein, 355 aa, unidentified
MDNRKYIGMDVHKEAIAIAVLNAAGKLVMESIIETKANTILEFLKGLRGELHLTFEEGTWASWLYDLLQPHVKRVVVCNPRRNALLKEGSKSDRVDARKLAELLYTKMLRPVYHRDNGMRAVKELARSYVTISKDQARVMTRVKALYRSWGIACSGKQIYTVRHRASWLGKIKEPGVRRRADFYYQQLDGLRSVRRQVRRELLAESEKHKASKLLRQIPSIGPIRAALLLALVQTPHRFRTKRQLWTYSGFGIETHDSAEYRYVAGQLERSKKPQQVRGLNRNYNHDLKNLFKSAATNAIAKSGPLQEFYLALVKRGIRPEMARLTVARKIAAITLAIWKKGVSFDAEHLKQQTA

SEQ ID NO: 401463 - protein, 420 aa, unidentified
MISAAIERCAGIDVGKKFLSVCVMVGPLKGEPQVEIRKFGTIRAELQALRDWLKQQEVTHVVMESTGSYWKPVFNVLEDAVKVYLANPQEVKNRKGHKTDNKDGWWLAHLLRHAMIHPSFIPPRAIRELRDLTRRRKRLLGAGTSERNRVQKVLEDANVKLGNVLTDLFGVSGQLMLEALLQGQANPEEIAQFAKRRAKKKIPEIIAALEGHQMSDHHRRMIRYSVDHMRFLEEQIEQLDQDIAMQIREAHLEPQWQLVQSVPGVQETSAAAILAETGGDMNQFPSEKHISSWAGICPGNNRSAGKNRSSHTTGGNRWLRGTLTECAWAASAKKNCFIKEKFWRITAKSGGKKSPAVVAIAHTLLILVYQALLTGQGYQDKQAPVLNQRQKERMIRHHIRRLGKLGVAVYSPRPAASATG

SEQ ID NO: 401464 - protein, 346 aa, unidentified
MEHYVGLDVSLKLTAICIVDRTGKIEREGVVASDPETIAAFIKSHAPHVARVGLETGATSTWLWTELSKLGLPVICIDARHAKAALKLQINKSDRNDAVGIARIMQCGWYKEVRVKDLDSHAIKALLVSRALLVKIKRDIENQVRGLLKNLGLVIGQAKMNVFAVRAAELADARPELAAAVEPLLKAREAIGRQIADLDRKVMRLARNDAQVRRFMTAPGVGPITALCFLATIDDPTRFKRSRSVGAYAGLTTRRYASGEIDWTGRISKCGDKMLRSYLYEAANVLLTRVVKWSALKAWGIRLAKRSGIRKAKVAVARKLAVILHRMWIEGTEFNWLSKEATNQPA

SEQ ID NO: 401465 - protein, 413 aa, unidentified
MKDKTITAVGIDVSKGKSTIAVRRPGGEVVLTPFQVEHNAAGLSGLVKTLRSIGGDIRIVMEHTGMYWRPIALALKEAGFFVSAVNAMLIHDFSDNSLRKVKTDKADSMKIANYALSFWAELRDYSPEDETRHMLKMQNRLYLRTKKSSVALRNGLISLLDQTFPGVNTLFDTQPKRSNGHFKWVDFVKRFWHRDCVAGVSLVAFSDAYRKWCARSGYRFSQSDTEKFYTAARNAVATFPKNDSTKLLIAQAVDSLNAVYDALYILRGEMLRLASLLPEFDIVMAMQGAGEATGPQLMAEIGDVRRFTHKGALVAFAGMDAPPFQSGTFDSESRRISKRGSPNLRKTLFMVASTILQHSDPANPIFQFMDKKRTEGKHFYVYTVAGAAKFLRIYYARVKAHLAALDSGANTAA

SEQ ID NO: 401466 - protein, 340 aa, unidentified
MKGPIVSIDVSKGKSDYQAFKDLNVKYTGSRSIKHNKEGFDEIVNLVREMEKKLETEVCVVYEATGVYHRVLKKVLEDNNIKQFIINPLLSAKTRKNDSLRSPKTDKLDPKSIAKTYYSHSLHNSHKQETIYHELRELSRYYEDILVHIRKDKVAFRAQLDIVFPGYDTLYDDLYGPVALAIIEKYPHPEMLQKKKINTVSKVIQNKTCHRQAVSDTMADKAIEYSKTIYSGCDKDDIEVLILQRFIKKLNEDMAEAERTIGEMIKLAQELPDFNIIKSIPGIGDNLAARIIAELGDMTRFKKKNELVAFAGLDPRISESEYSTHSEPHRPALRATHSII

SEQ ID NO: 401467 - protein, 368 aa, unidentified
MMGWMAPLRHLSAMLLAVRESAANGEPSMGEVTTIGLDLAKHVFQVHGVDADGATVLRKSLRRAQVLTFFSRLPPCLVGLEACATAHHWARELSALGHEVRLMPAQYVKAYVKRNKNDAADAEAICEAVQRPTMRFVAIKTAEQQAGVLLHRGRERLVRQRTGLVNALRAHLAEFGIIAPQGLHHVGKLMAIVRDDNDARLPGLARQVLMVLAGQIEQLEAAVAALERQLVAWHRVNPVSQRLATIPGIGPIIATAIAATVTEPGQFRSGREFAAWLGLVPRQNSTGGKTRLGGISKRGNQYLRRLLINGASANLLRSRATKADPWVIGLRRRRPSLVVAVALANKTARIAWAVMQRQQPYQRMAAAA

SEQ ID NO: 401468 - protein, 381 aa, unidentified
MKKELDLGLDVHKDCIITAVAEEGRKGEVRESGAISNDLHAVEKWIGRLRKAHGKETLLRACYEAGPCGFGLARRLRQLGVECQVVAPSLTPTRSGERVKTDKRDARKLARLLRAGELTPVYIPEPTDEAIRDLCRARSDAVDDRRRSRHRLKGFLLRHGYRYQGKSSWSAAHERYLRELVLPHPALKVILEEYLQGIAAGGERIARCEEAMQTLLEKWRLASAVRALMAMKGFQTVAAMILVSELGEVHRFAHPRQVMAYLGLVPTENTSSDRRRQGHITKCGNAHARWLLVECAQHYVAPPKVSKELSQRQHDQSAEVRAISWRAQNRLHNRYRRLLGRRLQRNKAIVAIARELCGFIWELLRTQPCYQAQTTSVSTKG

SEQ ID NO: 401469 - protein, 427 aa, unidentified
MNTTPYAAFVGIDWADAEHAVCLLEEDVVEHTIVLQGAAELDAWVAGLRQRFGGRPIAVCLEQSRGALLYALLKYDGLVLFPLNPKQLARYREAFGPSGAKNDPDDAELLARFVREHHQRLRIWKPDDALTRSLRLLTEDRRHWVAERTAAGNRLLGQLKQVYPLALDFLGKHVYAERFLNLLQKFPSQHELQRAAPRKLAEWLHKLRRTVDDPPADAGRDPRVVALKQAPPLVTDEAVLRHGRLAVKHLVTQLQQLNDTITEYDREIAALVEQHPDRKLFASFDGAGDALVPRLVAAFGTDRQRFASAEEVQQFSGIAPVQLQSGKSCVVKMRRACPKFLRQTFHEFAKCSLQNCRWAQAYHALLRSRGHGYHSAIRALAFKWIRILFRCWQTRQPYDDARYLRQLQLKQSPLLAYLPPQIQPSEA

SEQ ID NO: 401470 - protein, 459 aa, unidentified
MSRKGKRTAGMEKAHPFTGMSRVNPNAAGVDIGAVEIVACVSGDETTQIVRAFGNYTVDLQAIGGWLREFHVRTIAMESTGVYWIPLFEELERQGFECLLISSRSLRRVAGRKSDITDAQWIQTLHSYGLLESSFRPQAELVALRTLIRHRSQLIEHRSPHVQHMQKALLQMNVQISQAVSDVTGITGQAIIYAILAGERDPQKLASLREPGCKKSEEEIGKALTGTWREEHLFILKQSVEMYVFYTQQIQACDEEIERVYGMTRTDWEIGEVIPLSPRKRNSHSKNKPQNPENIRKHLKRISGVDLSVVDGFGVSLAQTVIMECGTDMSKFPSEKHFCSWLGLAPKHEISGGKVLKNKTLKTKNRAGQAFRMAAQSVKQADCVFGVMYRRLKARLGPAQATVATAHAIARVVYRMLKYQVEYEMISVEEYEKKYRDQQLKYVKKKAAKLGFQLVPVPI

SEQ ID NO: 401471 - protein, 570 aa, unidentified
MIKNKNPYRGVWGDAGRHLRVFFIRAILYLATTLVAWEKSIMGNRRTRRKRKQHINKVQGQRLAAEFKGQDLSRVLVVAIDGAKKSHKALLADGFGEIITDTFGFPNDLAGAKMFAGSVRKAAVDINAFKIIVGLEPTGHYAENLVAYLLEQGFDVRQVNSFAVSREREAGLTWSKTDEIDLCAIGQLIINGKSSPLGHTEAIYDNMKYAARARRSTIQRTVLLESQIHAYMDRLFPGFLDRDLFSDPFGLTSMAFMARYSSANAACRAGATRIERWLSSRRGVSNPHEITQAVVELAQGALRRPADHEEALIEALRFRLREHDLLEEQIGNFNIRLAEYLVETPGIWLLAIDRVSVVSAAEYLGELGQISRYDGANQIIARAGMVPRETQSGMIAYSGGITKLGHPKLRYILGVIGHNLLTSNRYFQAFYNRLVDRGGKNERLAKTAVAGKFVRVSWAMMNLKGAFEAPTWCEDDLKKDIRTKMERFLKQFGASQIYRNSIGPRLDKVLVSGGQPSTSNSITGSHQLPSASGTHEEHDRASTKPIHIGSLIPVVLGQMAAEHDVEAHMA

SEQ ID NO: 401472 - protein, 356 aa, unidentified
MGDRRHRFCALDERGEVVEEGSICNERDSLRKLAGRYHGALGVMEAGAHSPWISRFLEALGWRVVVSNPRKVRAIYQHERKSDQRDALMLARIGRMDLALLYPVGHGTAEAQQDLLRIKLRDSLVRARVAVINSVRFTLKSLGYRVRNPSSARFHKVVMEEVPESVREMITPSVQALAELTARIKMLELEINTLAQMKYPQSAQLQQIPGVGPITALYFVLKIEDPNRFAHVRDVGAYAGLCPRRDQSGESDPQLRISKRGDAYLRRLLVSAAHYILGPFGPQSALRAYGLMLAADGTARAKKRATVAVARKLAVLLLSLWKSQQPYQPFPGARLNGQQEDRRSGTIALHRMEATD

SEQ ID NO: 401473 - protein, 529 aa, unidentified
MATKRKSRKSSSKSFIGKPRGVIHPRVQAVGPDKFAIVAVDCAKGRSKLMIYDFFTNVLLEPIAVLHNRGELNLAVTQVRQVLEKHNILDHIVAIEMTGTYHRPVQQVFRKSGSDTRLVHPFATVHYRAPANADIKTDETDLQAIARAAINGFGLEQFPISEDYRRLQILGRHRRDLVRKRAKIQCQIRELLDPCMPGYAALFPDDDFWTSTVALFVAQRVKTPNEILDAGVKGITRWLNDRKVRFFARTVERIVAWAGNAADPDPLAPQLHRVWREHYEDWLLKTKQIKQVEIECAEILAKTPYILLLSIPGINIVSASEVAGELGPIENYASHRAITGRAGLFPSRYQSENVDFNGRLAHQRNARLRAALLLIADNLIKCNSHFRGKSELWKHRGFDARDIRCRIGNRAARTIFQMVSGRQLYHPCVKVDRQYVLDKLLTFHQEHETSPDQILRDMHEAANWIPKHEQAAECEPFQRRYEKSRRSQSKGPQQIATIVLAVLARYGITQVESPDEAQGPIAAQSVTSN

SEQ ID NO: 401474 - protein, 424 aa, unidentified
MEVQHERCAGLDLAKDSLVACARIQSRRKVTRHIETFGTSTRELLRLSEWLQQHRCTHALMEATGVYWDAVWQILHGAVETVVANAAHVKAVPGRKTDVCDSQWLADLLAHGLVRASFVPPPPIQQLRDLTRTRAQRVREKRRHVQRIHKTLERANIKLAAVLTDIMGQSGRAILEAMIAGESDPKVLVGLVNYRVHADRQKILDALQGRLTDHHRFLLRMHLAHVNQLDADIELLDLKTDQQLEPLRTQLQLLKTIPGVDTVAAHVLLAEIGADMSRFPSAGHLVSWAGLCPRNEKSAGKSFNTRIRNGNPWLKSTLVQSARAGARTRSSYLRAQYHRLSARRRKNKATIAVAAWMLVATWFMLRDGTPWNDLGVDFFDRRDPARSAPRLTRRLEALGYQVAITKAPHPAEERPAPTLGSVSQ

SEQ ID NO: 401475 - protein, 326 aa, unidentified
MRKVFFVGADVSRDKIDFCFLTPVENTRPKFVSLPNDTDTIKAYFQSFIKDDIFIVFEHTNNYHVPLQSALTDLNIKHSVLNPAKISHFLKHLTFQKSDVTDAYGLALYCRIFKSDLNPSAYNHEYNLIKSYNSTILLLSKIQTQLKNFKKSQDFVADTELSELIKSLTLHVQKTREKIKLIAFEILKSFVPNCEQIIKDNKGFGIDLALNLFPQLHFNRAKSEKQFISFLGLSPRIYESGSSVHKSPKINKRGSSAIRRILFLNAISCARFNDKFKQRYENLVSKGKKKKVALVAVMCAIVRYLKSLFPLNESYINENLYHACTS

SEQ ID NO: 401476 - protein, 402 aa, unidentified
MNSKIVYKICCGIDVHKTFVVACIASTNKQGVTAYKHHCFTTFTQGLKELLQWLLDKHCKDVCMESTGKYWIPVYNVLERDCTIVLAHPKYVKAIRGKKTDKKEAKWIADLCKHDLVAGSFMPVADIRQLRDLMRYSFKLTCFISNEQNYLQNDLTLSNIQLASVVSDTFGKSSQRILDKILENPEDTSFDIVSLIHSSMEKKLPELELAIDGFITSEQAGKLKIIKKHFEDLESRKAELEELILAFASPYQRELELDLILTATSFKNTFTAIGIIYEIGVNMEAFPSEKHFFSWVGITPTNNESAGKKKSVRVSKSGCYIEPLLVQCANSVVKSEKHPQIRNRYLRLRKRRGHKKSMIAVARMLLTALYNMLKIRNPIMRNYTEKVMVFLSIMKSQLNKLS

SEQ ID NO: 401477 - protein, 385 aa, unidentified
MNRIIKIGMDVHSKTFNLCAIEANIAGEDKILGSTQVTADYHEVVKFIEGLKKKLNTINPVDTFDIECGYEAGCLGFSLRNQLAAMHIKCHILAPSTILQPNGKRVKTDARDAEWIAKQLAWGSCTFVHIPTEKDAGIKEYLRMRDDHKSDLKKNKQRINALCLRNGYVYSGTKWTARHWEWLKKLELLEFVRETLDEYMATYQLQQSSIERFDARIEELAADGEYAESVKKLGCFLGIKTHTALSVIVETSDFSRFAKGSTYAAYLGLAPGESSSGEHICRTGITKAGNCHLRRLLVESAAGLCKGKIGAKSKALKARQSGNTSEVIAYADRANIRLRSKYYHMIRNGKKRNVAVTAIARELACFIWGMMTGNTLPRNDLRVVA

SEQ ID NO: 401478 - protein, 336 aa, unidentified
MEVLHERCCGLDVHKKSITACIITPKGKEIHTFSTMTRNLIELVDWVKDNRCSHVAMESTGDYWKPIYNLLETEDLQPMVVNAQHIKTVPGRKTDVKDAEWIARLLRHGLVQGSFIPNRDQRELKEVVRYRRSIVEERTREVNRLQKVLEGGNIKLSSVASNVLGVSGRNMLEAMIKGEEDTSVLADFALKKLKDKKEDLKLALEGLLGAHQLFMLEKQLAHIDYLNELISKLDEEIEKRMTPFAEELKLLDSIPGVGKRTAEQIIAEVGTDMSRFPTPGHLCSWAGMTPGHDESAGKKSPQRRVKEIRSFEAPLPRQQKRLLVKKITTYRHNIIG

SEQ ID NO: 401479 - protein, 408 aa, unidentified
MKQSYFLGIDAAKHKIRVALSDGAERMLFEKDLPVNAAGRRELLAKLKEHVKEPEQLLVLIEATGVLHLHWSAALTRAGYSVAVINPLIARRLYRVENSIRDNKTDPIDARGLCAIGALHGEKLLGHYRFCLKPEQLALQRLQTVRKALRSALTNLKKTYQSLLDLSFPELGGLLELDGVGIRELLAQAPTPAAIARVRRSTLEKNWMVRPKAAALKTLAADSIADPELAAASAPALVGMLQGLAVLEAQLRRVDQQIEQITRASVDPQTKALLETIPGLGPINAAKILAWLPTQILHAGSNRKVAARLQAFMGNDPRLRQSGQWEGHTKMSKRGVEMLRTAFFQCAFSAAQHDPELKAYYQRKRAQGKKHAVAISHLMRILTRRLVAVLRSAKPYSPNHNLTLAHAA

SEQ ID NO: 401480 - protein, 350 aa, unidentified
MDTTTPRLASIGIDIGKEVFHIVGFSADGTIAFRRKIKRLALIETFKRLPASIVGMEACLSAHFVSRALRQLGHEPRIIPAIYVKPFVKGQKNDYNDAEAIAEASLRPNLRTVREKTQDQLDLQACHRVRSRLVSRRTATINQIRAFLIEQGIAVRTGSRALRNSLLAILKNRQDEISPRMGGLIAGLYEDWISLDKRIDTIASEIEKISEKEANCQRLMSVPGIGPLISTAVVAAVGTGEAFERGRDFGAWLGLVPRQYSTGGRSILGRISKRGSKYLRTLFIQAANVILMRPHNWERFSFGTWLLNAAPRLHRNKLATALANKLARIAWSILRNEKTFDINRHEAMAI

SEQ ID NO: 401481 - protein, 340 aa, unidentified
MSLVLQSILPYPDSCLGTSPHQQGWDTKMEKLSCGGIDVSKDRLDVVVLPEGWFFSVSNDTAGWAELVARLRPLGVSAIGLEPSGGYERGIIRALLAAGLSVRRINPNKLRQFARARGVLAKNDRLDARLIAEYVAIMPTRVVQRDDAVERLAEIVTMRRQLCDEHVAVENQAAHLEDAMLRRLSKRRLIRLEADIRVLDKRLAEMVATNAAFAQLYALLTSMPGVGPVLAFTLIALLPELGKMSRKQIAALVGLAPYDFDSGKLRGHRSIYGGRMPIRNVLYMAALSASRYNPALKTFSNRLSDADKKSKVIIVAVMRKMITTLNAMLRDNTAWQPQSA

SEQ ID NO: 401482 - protein, 433 aa, unidentified
MKVLHERVAGIDVHKDMIKVAIRSPGEKPWTRNTEILEYRTFYGVLQATARELRRRGVTHVVLEASGVYTEPVYYALCEQDFTQVAVINPAHAKALRGHKTDAKDCARLAELFECGLLHGSYIPAPELKEVRDLTRYRMKTVQARTSEIQRLGKALESAGIKLGSVASSITGTSSTAMIEALIDGERRGPVLADLAIGRMRTAGKLADLSMALAGRFTEHHALLCRLHLDRIAGFDDAADGLDKQIAGKAARWQRETGLLTSVPGFGDVVAQAWLGEIGPAPHRHFSSHEKLASWVTLCPGNNISARKRKHGRTGDAGTYIKPMLVQAAWSAIRVRGRLQARYSRLVRRFGGDKNPAAKKKAITAIAHTLLKIAYQVLKSGTPYQDLGADFYTRRESPEQKQAWLQRQLQRLHPGCTITITISPPEAALPPAA

SEQ ID NO: 401483 - protein, 343 aa, unidentified
MKPAKHSLGIDIAKDKFDVNLRTLESAEGRSATTFKNNPKGFKALHQWLVKKGAASSELVHACLESTSRYGDALAQFLHQNAYQVSLVNPRRTRRYADSQLTRNVNDKIDAGLIADFCAAQRETLSLWEPLSPEHRQLRDLTRARQTLVEERERFANLLETASGLARNTFLKQVRQLDQQIKQMDKAIKQFLRLAPDLHKQVELADSIKGVGWVTAATVVAELPPIDKIPQAAQAVALFGLDPIKKTSGSSVDTPARLSRMGSRRGRRALYLPALVALKWNPIIRQLGQRLQNKGHSGKYVIVAAMRKLLRLIYGVLKQGCPFDPNWNGKAQRAPKTQTPVLT

SEQ ID NO: 401484 - protein, 349 aa, unidentified
MGMVGGLDLHRRQITFDVVELESGVEWRGRVWQPDRERFRRWLREEVTRRANGGPVALAVEGCTGWRYVVEEIEAAGFDAHLAEPAETQAARGRKRRAKTDRSDARLLRDLLVANELPKSWIPPEPVLEWRERVRLYVSLVNQRTVWCQRIHAELYHHGVAVPEGAIRTVKTRVMLADTGLQLSPAARERIAAGYRMIDATDLEAQPLKRELQRFGARQPACRALVNAQYGIGGLIAVAVWSELGDCRRFSRSEQIVRHTGLDVTVDMSDRRRAGGFLSRQGPETLRWALYEAAKNSSHHRSPDHQYYAQVKQRHDGKIAAISVARQFARRCYHVLRNLDPDTVYAMPN

SEQ ID NO: 401485 - protein, 327 aa, unidentified
MIIIGCDYHPGFQQIPFVDTETGECGERRLEHREEAEKFYRDLGAQGAAVRLGMEASGHARWFERLLGELRFELWIGDAAEIRTKRVRKQKTDRQDAELILRLMLEDRFPRVWVPSGENRDLRQLLWHRHRMVQARTRIMNQLQAVALNEGLRCKKRLWRDAGREQLESFVLAPWASRRRRDLLELMDRLTPTITELTQAIDQEMEKCPEAQRLQTHPGVGALTALAFVLIIGRTDRFQCGKQIASSLGLVPLEESSGQRRRLGHITKQGNSLLRFLLVEAAQVTVRSDQEWRSKYFHLAMRRGRKIAKVAMARRLAVRLYWMWRKG

SEQ ID NO: 401486 - protein, 348 aa, unidentified
MDDITTIGLDIAKNVFQLHGVDAQGQVVLRKALRRANMIAFFTKLPPCLIGMEACSTAHHWAGTLMELGHEVRLISPAYVKPFVKRHKNDAADAAAICEAVVRPSMRYVSVKSEEQQATLMLHSARELLISQRTALMNALRGHFAELGMVVAQGARNVGDLLLILERMGQGSNEKALPETMRLALQPLATALIGIEAEIAKLDKEILAIHRKDGVSLRLASIPGIGPITASFLSASIPDPGLFEGGREFAAFLGLVPRQYSSGGKPRLGRISKMGNRHLRKLLVVGAHAALYSIKNGKTKSPLADWARALLAKKSFKLVAVALANKMARIAWAIMTRAGHYQPNLATQ

SEQ ID NO: 401487 - protein, 392 aa, unidentified
MIYVGIDIAKDKHDCFIINSDGEILFHTFTISNNHEGFNTLFQRIESVSDDFTKVKVGLEATGHYSYNLLGFLLDKGLPTYVINPLHTNLYRKSLTLRKTKTDKVDSRTIATMIMSDMNLKSYSDISYHNEELKSLTRYRFDKVKERAKLKTSVSRLVNILFPELEKLVPSLHLSSVYALLSEFPGAAQIAASHLTKLSNLLSQASKGHYGKETAILFRETARSSIGSVMPAKSLELKHTIKLIQELTTEIDEIEAAIKQIMDEEIHSPILTIPGISYRMGAMILAEIGDFNRFDSADQILAYAGMSPSTYQSGQLNNCYSHMEKRGSRYLRYALYNATKYVCQWDESFSAYLAKKRSEGKHYNVALSHATKKLVRLIFAMEKSGRTYQPAA

SEQ ID NO: 401488 - protein, 333 aa, unidentified
MDSETGELQERRLQHREEAEKFYRDLAAQGMKVRVGMEASGHARWFERLLAELQLELWIGDAAEISSKRVRKQKTDRQDAQLILKLMLKDDFPQIWVPSGENRDLRQLLWHRHRMVQARTRMMNQLQAVALNEGLRCKKKLWREAGREQLESFRLAPWASQRRHDLLELLDRMNRTIAKLTQAIDLEVEKCPEARRLKTHPGVGPLTALAFVLIIGRADRFQCGKQVACYLGLVPLEKSSGNQRRLGHITKQGNSLLRFLLVEAAQVTARSLPEWRSKYVHLTMRRGRKIAKVAMARKLAVRMYWMLRKGWDYGQLTKFGSHAGKPGPGDGVK

SEQ ID NO: 401489 - protein, 265 aa, unidentified
MDEVTLIGIDLGKHVFHIHGQDAKGHAIFRKKLSRQQLLSFFSNLRAVTVVMEACAGSHWLARKLNAMGHVTKLISPQYVRPFVKSNKNDYIDAEAICEAASRPAMRFVEPRTEAQQLLAALHRTREGLVTERTATINRIHGILLEFGVVVPMSKATLRRLPDVIAIHDLPLRLLQIIQRLHEHYKYLDAQVVETEKELVAQLHEDENAARLLSVPGIGPITASLLASEIGSIAQYVGGRNFAASIGLVPRQKSTGGRTTLCGIS

SEQ ID NO: 401490 - protein, 401 aa, unidentified
MKRLSGGIDVGSESHHITILDEEDKVLYNQKVAHKLNEFAESIKLFKQIEKKEGGKISFALEGKNGYSAPFDRILLEQGFTLYNVDNLKLKRFRQAFAGEWRDDQRDALMLSKMLKLKEHLNSEREKVFIKIEKPSPVTESLKLLSRHQQTLIDERIRFINRLRKKLLEVSPQILKLGKLKNKKIIAILAKYPDFSKYKRITLKSLLKIKGIGKKQAPFLLKRLNHLEYMPGLTSIYQTIISSYAKRILQLEEEIKDLDKKLDEIGEKNKEVNHLKTIPGVATKLASRLIGEIGDVHRFPSEKQLAIYCGIACVDNNSGKVTKARVVYKANKICKQTLIMMAGCSIHFNPQCKVYYLKKQAEGKNHNHILRCLARQLIKVIYKMLTEDRDYIIRKELKKVA

SEQ ID NO: 401491 - protein, 331 aa, unidentified
MDATLIRYESQSDREQQLAYTTVENNPKGFRSLVSWSKKNAGRGVKTDTMLFCCETTGGYDRALCDWLYGNDLDIWRESALQIKRSMGLRKGKDDKADSEMIAYYALRFRSKATLYKPLDGNMRSLRDLFLYRQSLVAERQAKLVSAKEKQHISSKSKVDDFIYRDAQKAINILTKSIQECECRMLEIIKEDEQMYRNYLHLISCKGVGLVTSIMLIIYTDNFKGWNAKKMASYCGIAPFYESSGSSVFHKANTGGYSNRRLKGILTQAARSAITHNPTLRQYYLRMKAQGKSYGVILNNVNNKLVHILFSLVLHDCDFELDHETKRALRA

SEQ ID NO: 401492 - protein, 379 aa, unidentified
MSKVIMVGCDLHDRSMFLKYAVGTEEPLQAVYVNDVRGRLKMILESQEFAKKHKSKRIVFVYEASGLGFGLCDQLHEEGIECHVLSPTHLPKTVKSAKQKTDEKDAQMLLEQVRGFVLAGNSMPVVWTPPQRLRDDRDLVRARIDLADSITSIKLQVLSLLKRHQIVKPEWFTSSWTKVVLKWLKEIPEKIDAAVAAVLQSYLARYESSQTELKTLDNAIQALSKTSRYKVNCEELRKLSGVGLLTAMTFLTEMGDLNRFKNRREIAAYLGICPASYESGEANDRKGHITRQGPARLRRMLCQAAWAAVNHDETMRATYERIRGNKKGQAKKAIVAIMRRLSIVMWHVAQSQGISNELIGRGGPHGGSPIAKTPPKKAA

SEQ ID NO: 401493 - protein, 310 aa, unidentified
MERLFVGIDVSKDRLEVYVRPTGERLTVASDEAGITQLLGRLQVLQPSVIVLEATGGYEARVAAALAHAGLPVAVVNPRQVRDFARATGQLAKSDGLDAAVLAHFGEAVSPPVRPLPNAQAQALAELVTRRRQLVEMLTAELNRQQQARQRLVQTRLQRHVTWLRAAIAELEEDITRLIRSSPVWREKENVLTSAPGIGDVTAHALIAELPELGRLSRRRIASLAGLAPFIRESGRWKGRRMIRGGRAHVRRALYMATVVAIRYNPPIGDFYRRLIGAGRPKKLALIAAMRKLLTVLNAMLRDSRKWQTA

SEQ ID NO: 401494 - protein, 338 aa, unidentified
MNNTNLIAIDLAKTIFQVCIMDKHNKILLNKAFSRKALTEFIMQQPPGVIAMEACYSSHYWGRLFNSLGHNTKLLPAQHVKPFVRGNKNDHNDAIAIAEASRRPGIKAVPVKTLAQQDIQCLHRLRERCVCQRTHLSNQTRGLLSEYGIIFNKGFKYLTTTLVELISPEDERLSETIKKELRYVYTEFKQLNQRLNELNKSLLQIANDNIQCRRLMSIPGIGVVNATAIFSAIGDGDQFKNARELSVWLGITPKQFSSGDKNTMAGITKRGNRYLRKQLIHGARAVIYRYKNRDDKLSNWVNSIVLRRGPNKACVALANKMARLCWVLLQRKQMYIAQ

SEQ ID NO: 401495 - protein, 355 aa, unidentified
MVMLAEQYAFVIGGDPDRDTIDLAVLDTATAGVHGHITAVADAAGYAQVLTWAQEHAGGTRVWALEGTGNYGAGLAAFLAEAGEDVVEIDRVKRTRRGAKNDRIDAVRAAREALSREIQVSPRQRGLREALRVVLTTRHAVLVSRTKAINELKALIVTAPEYLRAGLRGCTLPQQLARIEQLHTPSTSSPEHQMTVIALRSVTARILFLTEQVRELDAELTRLVPAHPAGPALLAEPGVGPVVAAQVLISWSHPGRVRSEAAFAALAGASPLEASSGQQARHRLNRGGDRALNRALHTVAMTRMRCHPETRDYTAKRTSEGKTHREIRRCLKRAIARRLYRRMEANSRTHSPTRT

SEQ ID NO: 401496 - protein, 358 aa, unidentified
MSRCIPTDAQAITLGVDTHKDVHVAVALDGIGRHRGTLSVPANLAGYKRLVDWAEEFGPLKHAGVEGTGSFGAGLTRFLKGRRIKVSEVIRPKRRDQYRAGKSDPIDAEAAARTVLAGTATGQPKSADGEVEMIRTLRITRRSAVKARVGAANQLQNLLITAPEGLKSELCGLSTARLVAIASRFRPGPNPSDVEAATKFALRSVARRYQRLSEEISELDEQLDRLVTEAAPELVAVEGVGTDTAASLLIAAGDNPERLENEAAFAHLCGAAPIPASSGKHVRHRLNRHGNRDANRALYVIAVCRMNRDERTRSYVAKRTAEGKSKKEIIRCLKRYIAREIYRVLSSISLHKPSISVP

SEQ ID NO: 401497 - protein, 458 aa, unidentified
MAKRRQKTKSRSFKIGNLPAQLQHINLNAAGIDIGSERHLVAVPEGRDEVSVREFGTFTADLEALAAWLKKCGITSVAMESTGVYWIPLFELLERRGFEVKLVDARHVKNVSGRKSDVLDCQWLQQLHTYGLLAGAFRPPDEVCVLRSYLRQREMLTQTASMHIQHMQKALQQMNLLLHNVVSDITGVTGMKIIKAILAGERDARALAANRDERCKNTTATIAKSLVGNYREEHLFALRQAVDLYETYQAKIADCDQAIIKQLEKQPDVSDDGPPSSDKRVPARDRLRNGTDVRELLFKKSGVDLFAIPGLAVDTLLTLASEVGFDLSPWKTEKHFASWLGLCPGTKRSGGKVLDAKTKRNPNRAAQAFRLAASSLYRSQTALGAFYRRIKSRSGGQQAVTATAHKIARIYYAMLTKGTSYVELGQQLYEQRYKERRIDHLKIQAKSLGFQLVPCVTT

SEQ ID NO: 401498 - protein, 321 aa, unidentified
MERRGVFIGIDVSKAHLDVAMLPSGQAWQEHNDDEGIVRLAERITAVAPTLVVLEATGGLEMPAACALGLEDLPVAVVNPRQVRDLAKSLGLLAKTDTLEAQGIAQFAQRVQPVPRPLPDAQAQELSALLTRRRQLIQMRTAEAQRLSRSVVPALRREIQEHLTWLQEHLRQLDDDLGTRLRESPLWREKEDLLRGVPGGGPVLSVTLLAELPELGHLDRKQIAALVGVAPVNHDSGRRTGQRHIRGGRASVRSALYMATIASIRCNPVIRSFYQRLCAQGKPKKVALVASMHKFLIILNALLSHQTPWNPHVTLDMQYSR

SEQ ID NO: 401499 - protein, 408 aa, unidentified
MNTTLYVGIDVSSKSNVVYLMLPNGEKHSNFSVTNSHEGSAQLVRRILSALTSHSLDSVLIGLEATSVYGDNLVYFLREDATLAPFNRKIHVLNPKQVKKFHDAYNDLPKNDYVDSFVIADCLRFGRINKEVYIGDYHYKALQNLTRARFFAIQNLTKEKQRFINVLFKKYSTMTQEKVFSNTFSTTALAVYDEFESAEALANMDLQELTDFIIEKGKNRFPNPNAVAKAIQKAARSSYRLPKTVNDSVNQVLSISITSMKALESQIKEFDKAIKAQLELLPNVLISVPGIGPVLSAGIMAEIGDINRFPNQAALAKYAGLAWNQHQSGGFEAELTKLIPSGNRFLKYYLCEAAFSIVRCDKEYSNFYHLKYKEVNRCQHKRALALTARKFVRLVFRLLKDNRLYRSA

SEQ ID NO: 401500 - protein, 348 aa, unidentified
MLADELDYLLGVDTHRDEHVLAVVTAPAGGVVAGAAAATNGRGYRELVRVAERHAPGRRAWAIEGSGSYGAGLARFLSEHGEAVLEVSRTLRAERRLAGKNDTLDAVRIARAALASEALALPRAGKRREAIRLLLIARRSAVDVRREALTQLRAVIVTAPEPLREQLRRLSLAKLLDRCSRLRRSARPAPDELAVRLVLRSLARRVLAATSEADQLEREILAHVRALAPALLDEPGIGPIVAAQLIVAWSHHGRLRSEACFARLAGVAPIPASSGQTQRHRLSRGGDRQLNRAIHTIVLHRRHHDPATRDYIARRIAEGKTAREATRLLKRYLARHPYRLLEQQPAMT

SEQ ID NO: 401501 - protein, 351 aa, unidentified
MEGYVGQQYVGIDLHRRRSVLVRTTDLGEVLEAVQITNTPLALAEVMTRAGEHPEVVLESTYGWYWAVDVLQGHECEPAVHLAHPLGVKAFEYRRHKDDLRDAADLADLLRLGRLPESWIAPPATRELRELVRHRAKLVALRSHCKAQVHAVLAKCGVPVPMSDLFGVGGIDLLDRVELPKPYAARIASLRRIMDLLDFEIDVFDKLARGRLARDPGYTAVQTIPGIGPILGAVLVAEIGDVHRFATAQQLGCWAGMTPKHHESDTKVRRGRITKQGSRLVRWAVVESVQRLPKHAVLGAFRDQVAARRGTNIGVVAAARRQLEYVYYALRDHHVRGLRPRPAPSPAAAAS

SEQ ID NO: 401502 - protein, 444 aa, unidentified
MAQRKRRRKRLAVADLPEHLQHVNLNAAGIDIGSDRHVAAVPAGRDEVSVREFGAFTTDLNALADWLTKCGITSVAMESTGVYWIPLFELLERRGFEVKLVDARQVKNVSGRKSDVLDCQWLQQLHTYGLLAGAFRPPDQVCVLRGYMRQREMLVQASSMHIQHMQKALQQMNLLLHNVVSDITGVTGMKIIKAIITGERDPKVLARHRDQRCHSSAATIAKSLLGNYREEHLFALTQAVSLYETYQAKIVECETAIACYLKQQPNRTDEEPPPTDKSVRNRDRQRGGVDVRSQLYKMTGVDLFNLPGLAADTLLTLAGEVGFDMTPWPSEKHFTSWLALCPGTRKSNGKVLSRKTKRSANRAAAAFRIAAASLTRSKTALGAFYRRIRVRVGPAEAITATARKLAVLYSVPPTSKLVKQSMKRNINNVVSIVFKNKHLPWVIS

SEQ ID NO: 401503 - protein, 370 aa, unidentified
MPSMTATSTTVEPDHMVLGVDTHRDTHHAAVVDHLGREVADAEFTTTPDGYRQLLDWARQHGPIARAGVEGTHSYGTALTRHLRNAGVTVVEVDRPDRRTRRTRGKSNPVDAYAAARTALSRPHAPKPKNADGLVEAIRVIRITRRSAVKARTQTINQLKSLLVTGPAELREQLRGLKTPVLVKACIALEITTRPTEPAEATTTALHRLAQRYQQLTTEIRAADRELRPLITAVAPAMLERLGVALEVTGQLLTTIGDNPDRLRSEAAFAHLCGVAPIPASSGRTHRHRLNRGGDRAANNAIYTVVLTRLRLDDRTRAYYRRRTAEGLSKRETIRCLQRYVARELYQLLISLPLSSAPLPAQRGVGTAQP

SEQ ID NO: 401504 - protein, 344 aa, unidentified
MHIASIGIDLGKTTFHLVALGERSKVLVRKKFSRTQLLAYTANLPCSLIGLEACAGAHFMGAALREQGHEVRLIPAQFVKPYRKSNKNDFNDAEAIAEAVAKQNMRFVQIKSEEQLDVQALHRVRDRLVQGRTALINEIRGFLLERGIIFAAGLTHLRKNLPGVIEDAEQNLSSRLRWLLNRLWQEWKQMELDIKAITEEIERIGKENALCQRLRQIPGFGPLVSSATVAAIGNGAAFRCGRDFAAWVGVVPRQYSTGGKQKLYGISKRGNVYLRRMLIHGARAVLFRIKYDTGGFGQWVHRLEQRAPRNKVVVAIANKLARMAWAVLSSGKDYRHQPLQPVAA

SEQ ID NO: 401505 - protein, 374 aa, unidentified
MREPTTFVGMDVHKQDIAVAMLIPDATSAVEWRVANEPAAVQRLAKRLQRESGGPVHCVYEAGPCGYALQRQLLAAKLSCDVVAPSMIPIRPGERIKTDRRDARKLAEMARAQLLTVVRPPSEDEEAVRDLCRGRDDARLDLMRARHRLGKFLLRRGRVFREGAHAGWSQRHRTWLGTQAFEGTAERVMFEDYLLAVEQVEARKRSLEQHLEDLAHESRYAEPVAWLRCFRGIDTVTAITLLAELHDFRRFRSPSQLMAYLGLVPSEYSSGPRQQRGGITRTGNRHVRRLLIEAAWHYRHKPRVGEKLALRRHGQPAEIIALADRAQLRLCRRYRRMERRGKHTSKIVVAVARELVGYLWATLTPAARTASATR

SEQ ID NO: 401506 - protein, 317 aa, unidentified
MKTVPFEQVILRGCGIDVHKDMVVATISGEGLKTETRSYKTFSSSLTELKEWLLSSGITHVAMESTGVYWKPVYKILECPDMKVWIVNARHIKYVPGHKTDKKDSAWICKLLLAGLLKPSYIPEREQRELRDLTRYRNKLIQHVSSEKNRIVRILEDCNIKLSSVVCSLDGVVANKLIDMLIDKGHVTMDDITCIYHKKLEASPELLYQACEGFIEPHHIYMLQTIRKDMEQTKAIIADLTCRIKEVLSPYENVMELLQKIPGLSQKTVEDLIAEIGVDMEAFPTEKHLASWAGVCPGNNESAGKKKVVEPPMATNS

SEQ ID NO: 401507 - protein, 343 aa, unidentified
MQTVTTIGLDIAKSVFQVHGVDAAGNVIVRRQLKRRYVLPFFQKLPPCLIGIEACASSHHWSRELQALGHTVRLMPPAYVRPYVKRQKNDAADAEAICEAVTRANMRFVATKTPEQQSCLMLHRTRHLFIRQQTAVINAIRAHLAEFGIVAPVGRNGVEQLLDVVAEASDKRLPEIARACLLALGAQLRTLKVQILNFDRQIMAWHRSNEASKRLDEIPGVGPALATALVATVADPKAFRSGRNFSAWIGLVPKQRSSGGKDKLGGISKQGDRYLRSLFTAGALAVIRYAKIHGTKHRPWLTALLARRPTKVVAIALANKIARMAWAMMARGDRYKEPVALAA

SEQ ID NO: 401508 - protein, 335 aa, unidentified
MTIVTIGLDTSKSWFQVHGVDEDGQAVVRRKLPRSKVLEFFANLPRCTVGLEACGGAHYWARELEKLGHIPKLMPARYVRPYVKTNKHDAADAEACCEAVQRPGMRFVPTKTTEQQSMLMVHRVRDLLIRQRTAAVNALRGHLSEFGIVRPKGTASARELMSLVATDERVPDLAHEALDSLVNQIRDTEEKIEAFNERIAAMAKNNDVCRRLMTVLTIGPFVATALVATTGDPNYFSSGRHFAAWLGLTPKQHSTAGKERFGGISKRGDSYVRKLLIHGARATVHNIRSGRVKGAWVAGLLARRHFNVATVALANKTARIAWAVMTTGQSYRAAA

SEQ ID NO: 401509 - protein, 410 aa, unidentified
MELLHQRCCGLDVHKDTVVACLRLVSNGKVTTEVRTFETITADLLKLSEWLATNDCTHVAMEATGVYWKPVWHILDDGEFMLVLANAAHVKNVPGRKTDVNDAMWLAELLAHGLIRASFVPDQPTQEMRNLMRTRKQLVREQSRHLQRVQKTLEDANIKLDSVLSSLMTKSGRAMIAALIAGETNPAKLARLADPRVKASPQDLREALRGRVTDHHRFLLRLHLKQIDTLTAALAEVDAQVATNLEPFRTAVDLIKSIPGFDDIGSHVVVSEIGIDMSRFLSAPHLVSWAGICPRNDESAGKRRSNRLRKGAPWLKTTVVQCSWAAIKKKGSYLQALYHRIKARRGPKKAIIAVAASILTAIYHMLKDGTMYQDLGADHFNRRSTDRQKTRLVKRLADLGYAVELKPLAA

SEQ ID NO: 401510 - protein, 343 aa, unidentified
MKRYLGVDLHKDNFTVCYLDSEDNKIFKEYKLTSLNRFKKTLNPEDEIAVEAIANSRIFCEELVTIVEKVVLVAPGNFKIISSSSKKTDKRDAETLAEFLMMGKLPEARIMNKQQAYIKSILKTREKFVKQRTQCKNKIHNILIGNGVFVYPKKPFTKKGFEFLKNLRCDPLVKKEIELLVKHIIYLDESISEIENELKKEENQLPQHKNLISIKGIGDVTAAIFTSGIGNIDDFEDKKNLNSYFGMIPSVRQSNNTIHYGRITKKGNRMVRAALVQCTLGMISHNPILKEFYQRIKRQKGSGKAIIATARKLLEFIYFTLSNNIVWEDSNAGVIQSMSNSSV

SEQ ID NO: 401511 - protein, 262 aa, unidentified
MFPVGIDVSKNTLDLCMLYNGIKGRIKTRNIQNNRHSVENILRWLRLQHCGPEDVHVVMEATGVYHERLATELHDAGFYVSLANPHRSREFARGMGIMTKTDKVDAYMLACYAFLKNPHRWEPPAPEIRYLGALLQRRDVLLGDALREENRLEKYLSTDTPADIISSCKRMAQLLREEVSNIERQIKAHIKACPALRCDYTLLTSIKSVGPQLGMHMLVVLRSHNFASAEQAAAFLGVVPIEKRSGTSVRSRPRMSKIGPLS

SEQ ID NO: 401512 - protein, 316 aa, unidentified
MVPSPLFVGIDVAKATLDIAVRPTAETWSASNDATGIDALVLRLGALAPTLIVLEATGGYQGPLVAALVAAALPVVVVNPRHIRAFAQAVGILAKTDRIEARVIAHFAEAVKPAPRPLPDAETQELRALLVRRRQLVEMVSAERARLDTVPPSIQDAIQAHIAWLTTQIAGLDDALTRASQTHPVWQAKDDVLQSIPGVGPVLARTMLGQVPELGTLGPKPLAALIGVAPFNRDSGTLRGRRTVYGGRAEVRAVLYMGALVATRHNPVIKTFYERLLAAGKAKKVALTACMHKLLTIMNAMVRDLKPWQPQEVPSA

SEQ ID NO: 401513 - protein, 346 aa, unidentified
MQPVVGCDAHKKFSVFVSVDHAGKSSRPVRVDHDRDLYCKYLCSLPPESDIALGATGHWYWIVDAMEQAGHHPHLANPFEAKRRMAKSNKTDALDARGLAILLRCGTLPESWIPPGELRDQRELLRTRMALRDLRTSLKHRIYAAIDRCGLHPEAISDLFGTKGRQYLASALQRLPSETSQMTAMQLHSIDQLEEKIETIECRIAERLRMSPEIRLLRTIPGLGPVLAPLVWLEIGDVERFPRAEHLASYAGLVPRIIASGGHVRHGGTCRNVNHYLKWAFVEAANIAIRTKAQRRQHIGLLYQRLYPAKGHGRAAVAVARHLAEASYWVLRKRQNYRAPQAHIAG

SEQ ID NO: 401514 - protein, 317 aa, unidentified
MNNIEIQTPVNIGVDVGKANLDIALHPSGQFYSIPNSEAHIRKFVKILKNDSIERIVVEATGRYEHALVQACNQAGLPIIVVNPVSVRRYAQAIGVLAKTDRIDAQVIAQYAATLKPEFKPIPDKTSQKIKDLLVRRSQLMEMSTMEKNRLQILPKSLHRSIKSLLRMLQSQIETVTRQIEQEVAKVDHWRTKMEILTSVPGVGKVLAYTFLSELPELGALNRKEIAALVGVAPINRDSGTLNGKRRIRGGRHRVRTVMFMAMLSSIQCNPVFKRFYEHLKAQGKIPKVAIVACMRKMIVVLNTMVKNQESWRVNMA

SEQ ID NO: 401515 - protein, 343 aa, unidentified
MDHFAGLDVSVKETSVCIVDDVGKIVREVKVASEPEALLEVLRNPAWHFKRIGLEAGPLSQWLYSALAEAGLPVICVETRHMRAVLKAQINKTDRNDARGIAQMMRVGLYRPVHVKTLRSQKLRMLLTHRKLLQAKAIALENDLRSTLRNFGLKVGMVGTVKFEARIKELVENLPDLAALVEPLLIVRRVLHEQLGILHRRLLDIVRNDEVCRRLMTVPGVGPVVALTYRATVDVPARFKNSKAVGASFGLTPSRHQSGESDRPGAISRCGDEMMRVMLYEAAQVMLTRTNKWSWLKAWAMKIARHRGMKKAIVALARRLAVIMHRLWVDGTEFRWTREVVAA

SEQ ID NO: 401516 - protein, 336 aa, unidentified
MRSWSVTILSETSVLKRMSQGADPDALHRFLTSHYPEAEYYSVYEAGFCGFWIHDRLTELGIHNIVVNPADVPTMSSEKLRKTDAVDSKKLAVSLRAKQLKGIYTPDSEALEIRSLIRLKNSITKDMTRQKNRIKSQLRYLGIEIPVEYLEPYSNWSKRFLNWLKQVAMRTPSGRQAMDILIMQFNALRMQKAEMTRKLRALSHTERFEETLELLMTVPGIGQTTGLALMAEIVDITRFANAEQLAAYVGMIPMCHSSGDHEDVGDITLRKHAILRSNIIEAAWVAIRKDESMQLCYLNNCKRMVPSKAIVKVARKLVNRIYFVLKRHQPYVNAVA

SEQ ID NO: 401517 - protein, 410 aa, unidentified
MERQIERCCGLDVHKETVAACVRIGGGPGRRGEQHVQTFGTTAGDLVVLRDWLTAHQVTHVAMESTGVYWKPVYYALEGDFTCLLVNAAHIKQVPGRKTDVKDCVWIAQLLEHGLLRGSFVPPAPIRELRDLTRYRKALIQDRTRVVNRLHKTLEDSGIKLASVASDVLGISGRAMLEALVQGTTDPAILADLARGRLRGKLPALRQALAGRFRGHHAFLIGQLLAHLDYLDEAVGILSGQVETMIAPFAEALARLDSIPGINRRTAEVIIAEIGVDMTAFPSAGHLASWAALCPGNDESAGKHKSGKTRKGNRWLRTALIEAAAGASRAKNSALQARFRRVLRHRGPKKAVVAVAHALLRVVYHVLADGNVYRELGGDYYDRQHSQRVTRRAVRLLERQGYRVMLERAA

SEQ ID NO: 401518 - protein, 309 aa, unidentified
MLTAEADKRKTKVVVNTAAGVQALLAWCAKHGAQPAQLHAILEPTGLYHEQAATALPQVRVSLVNPAQARDFAKALALRSKNDALDSYVLARYGQTLSPALWHPAPLHARQLRALLTRREALSKDLLRELNRKEKSQFSPSAPLVDGSIDKAIAFLREQIKQIERAIDQHIDNHPDLKQDCELLNSIPAIGPQAGNAILAVMHNRHIDSAQSLAAYLGVVPVQRQSGSSLNSCAHLSKAGPSQVRATLYMAALVGTRHNPHIRALYQRLLKAGKSKKAALGAAMRKLVHLCFGVLKNRIPYQPNYAMNG

SEQ ID NO: 401519 - protein, 408 aa, unidentified
MKTLHQRCAGLDVHKQDVVACLRLVTQGRVHREVRRFPTTTRGLLELAAWLEAARCTIVAMEATGVYWKPVWHILDGSFELVLANAAHIKGVPGRKSDVNDATWIADLLAHGLIRASFVPPQPIQDLRDLTRTRKQLSREIVRHTQRLQAVLEEANVKLASVISDILGASGRRILKAMITGETDPSHLAELGSRRLGCSRDTLVEALDGRVRDHHRFLLDQHLKTIEQLEETMAAFDARIEAALAPFRDTVERLTQVPGLSTRAAEVVIAEIGLDMSRFPTAGHLLSWAGLVPALDESAGKRRSTRVTKGAPWLKPVLVQCAWAAANKKNSYFEAQFLRLKGRRGPKKAAVAVAASILTTVYHMLRDGTCYQDLGPNYFARRNPARTARKLADRIRSLGYIVEIRSAA

SEQ ID NO: 401520 - protein, 368 aa, unidentified
MSRKSSKLFVGMDVHKESIDITLAEQGGEVRHYGGIGGEQSALIRTVRKLESLGKSLVFVYEAGPCGFWIYRLLRERGHPCWVVAPSNTPRRVRDRIKTDRRDSLKLAGLARAGELTPIYVPDAADEAMRDLVRAREDAVATQRQARHRLAALLLRNDIRYGGKTAWTEAHRRWIARLHLPGAAQRIAFEEYVLTVDEATASVQRLTRSMEQELGHWRWQPVVHALQACRGIQLIHAVRIVAEVGDLSRFTHPRQLMAYLGLIPSEDSSGERRRQGPITKAGNRSARRALVEAAWAYRHHAAVSPLIVRRQTGLAKPVLDIAWKAQLRLCARFRRLTARGINRNKIVVAVARELAGFVWAIGQRVKLN

SEQ ID NO: 401521 - protein, 342 aa, unidentified
MEGYVGRQFVGIDLHRRRSVIVRTTATGEVLETVRIVNDVDRLTEVIARAGEAPEVMLEATYGWYWAADALAAAGARVHLAHPLGVKAFEYRRVKNDVRDAIDLADLLRMGRLAEAWIVPPPVRELRELVRHRAKLVALRSLGKAEVHAVLAKCGVQVPMSDLFGVAGTQLLDGLELPAPYTARIRSLRRIIESLDFEIGIFANLARGRLARHPDYAAVQAIPGIGPTLGAVLLAEIGDVTRFPAASQLACWAGLTPKHHESDTRVHRGRITKQGSRLVRWAVVESVQILPKTSMVGQIRDRIAARRGRNIAVVAAARRQLEYVYYALRDGHVRALHAPTAA

SEQ ID NO: 401522 - protein, 368 aa, unidentified
MNKNTLGTALTVGAEELKNQKAAKAKRIVMASDVHLRGYQVARKIDNGPIGPVANFRSQEELLLYVEKQKEQAEEVVLVYEVGPLGYGLYRALQACGVTCYVCAPDSSEQKKKRRKTNAIDTRTLTSNLFNFLNGNERALQLVRVPTEEQEQARLQSRQHDQLVEERKRLGAKGNALLLSQGFGSWKNWWRPKAFSRLSQLVPGRLLELLETWVDLLRKLDEKIGRAKAALAKRCSGPRPKGAGAPSLVQLQSEVLDWGLYSNRRKIGCLAGMVPSEWSTGDSQWRGSITKVGVPAIRRIITEMVWRMILFQPQYKAVQKWQEVLRGTNRGLKKKAVVAIGRQLMVDLWRLQTGRVSAQELNLVMIGG

SEQ ID NO: 401523 - protein, 334 aa, unidentified
MENIALIGIDLGKNSFHIHCQDHRGKAVYRKKFTRPKLIEFLATCPATTIAMEACGGSHFMARKLEELGHFPKLISPQFVRPFVKSNKNDFVDAEAICEAASRPSMCFVQPRTESQQAMRALHRVRESLVQDKVKTTNQMHAFLLEFGISVPRGAAVISRLSTLLEDSSLPLYLSQLLLKLQQHYHYLVEQIKDLESQLKRKLDEDEVGQRLLSIPCVGTLTASTISTEIGDGKQYASSRDFAAATGLVPRQYSTGGRTTLLGISKRGNKKIRTLLVQCARVFIQKLEHQSGKLADWVRELLCRKSNFVVTCALANKLARIAWALTARQQTYEA

SEQ ID NO: 401524 - protein, 449 aa, unidentified
MGSASDGVVIGMDPHKRSATIEVMTGEEAIVGGGRFGTDRDGYAAMVRYVKRWPGRVWAIEGCEGIGRHIAMRLLADGEQVVDVPPKLSARARVFSTGQGRKTDATDAHSVALVGTRVAGLRPVVDDEQLAVLRILVDRRRSLGEDHTRMVSQLHRLLLELIPGGAKKDLSAAQAKALLAKVRPRDAAGKARRRVAAELIADLERVYQRKKAADKELKALVAATGTSLMDLHGIGPSGAARLLVEVGDITRFPDRAHFASWNGTAPIDASSGDQIRHRLSRAGNRQINQTLHIMATVQLRNRTEGRAYYDRKKAAGKTSNEAMRCLKRRLSDIVYRRMIDDAITTTMTGPGGHRETSLHSSVTGSHSHTGSSDQSLPGPANTQPTTLVPAALDTEGSHERMTGQREGSLRVRLSHTISLVACGATTGSSTPVPGGIAAASRAAPWTPAR

SEQ ID NO: 401525 - protein, 350 aa, unidentified
MDKELYIGVDVSKQTLDLAYYDGESIDWKKAHIKVSNNNAGFKKIGSWVAKVSKRFDIVLFCMEYTGLYTQDFRLWLEEKHYIYRMVEPRKMHRFEPDLDDGLRSLDRIKTDELDSFRIAIYCEQNHRKILRNPSKLPPPVYFKLKRLLAERKQTVKQSVLYKQQLHDICAYDTDLSVERKNGQLKTLNDALKGIDNEIDMYIKEDADISKNFSLLTSIPGIGRVVALETIVLTENFMAIDNPRKYACYIGVAPFKKESGTSVRKGSSVSKKGFKQAKADLSIACLVCMQHIPNIRDYWERKRKEKCSGIVFNAIKFKMILRMFAVIKRGTPYVETDNYRNGKNKQPGVN

SEQ ID NO: 401526 - protein, 412 aa, unidentified
MILEAFCGIDWAEDHHDIALVDRDGGLLARARIGDDAAGLARLLELLAEHGDSAESRIPVAIETPRGLLTACLRASRPVYAVNPMAVARYRDRHSVAGRKSDHGDAVVLANVLRTDLHAHRPLPADSELAQAIAVLARAQQDAVWDRTQAHNKLRACLREYYPGFLAAFATAKGGIMRPEARAILAAAPTPADAAKLTLAQLRSLLRKAGRSRGIDAGAQRLREAFRAPQMRQMPLVEQAMGRQAVALLRQLDAACASADDLEATAIESFNQHPDAGIITSFPGLGPLTGARVLAEIGDDRSRFTDAKGLKAYAGAAPITRASGKTRSVTRRHVKNNRLAQAGYIWAFSALTASPGARTHYDRRREAGDRHAAAERNLFGRLLGCLHHCLATGQHYHEATAFPSHAATLAAA

SEQ ID NO: 401527 - protein, 310 aa, unidentified
MEKVTVGIDVSKDRLDIAVRPGGDVFVVERNAVGLDSMVERLRQLAPHLVALEATGGFETVVAAALSAAGLPLVVVNPAQIRSFARAVGKRAKTDPIDAAVIAHFAEAIAPEPRPLPDEATQLLADLVARRRQIIAMIGAERQREKRARAKSLKQSIARLIKALAKELTSVDTDINDAVRGSPVWREKEDLLASVPGIGPVIARTLIAEMPELGQLDRKQIAALAGLAPWTRQSGQWRGKSFIGGGRVGVRCALFLGAMVAARHNPTLKPFFERLVAAGKPKMVAIIAVARKLLTILNAILRDQKPWKIA

SEQ ID NO: 401528 - protein, 313 aa, unidentified
MAAAQFEAAIWFGEKRSKRAAFANHPTGFQQLGRWLQPHGAASWRVGLESTGHYGQALAQWLHEHGHQVHVINPERTTAYARSIGQRNKTDSADAEMIAAYTAKHELTRWTPASAEQETLRAYTRTRHQLQQQRQQLANQLSSAPAVVQPVFQALIADLDRHLATLEEKIDQHLAAHVVLAEQVRRLSTVKGIGRRTATIAIAELPTIQPHTDARAICAWVGLTPKRHQSGHTERRAHLSRKGNMYLRDALFMPALVAKRYNPLLKTFAQRLALKGKSNNSILGAIAHKLLRILVGLLKSNTNFDPNWSPKKT

SEQ ID NO: 401529 - protein, 318 aa, unidentified
MHQATVVACLLTVGKGGKVQKQIRTFGTTTRELLSLRIWLLTEGCSHVAMESTGVYWKPVYAILEGPFQIVVANAQHVKKVPGRKTDVKDAEWIADLLCHGLLRSSFVPPKPIRELRDLTRYRRKLVEAQAGERNRLLKLLESANIKLASVATDVFGLSGRLMLRALIEAETTPQEMAEVAKKKLRSKIPQLELALEGRVEERHRFLLKLQLDRLERVESDIAFLEQRLQEKLKPYADQLARLDEIPGVDWTLAAVIIAELCVDTSVFPGVSQLTSWAGDCPGNNESAGKRKSSRVPKGVYLKTALVEAANAAALPQT

SEQ ID NO: 401530 - protein, 379 aa, unidentified
MTVGEFFRQCVGIDISKKKFTACLYMYDRASDAGCCTQSVDFANTKTGFNQMVKWSRKEAVKGQPLTYLMEPTGSYYEKLAYHLNKIGLTVYVVLPNKARQWCEAEGVKTKTDAMDARCLALMGCASRKLSPWSPPAAIYRELRQITRFHADLCKVRTSVANRMEALDNMYGPDKSVRKHCEKLLEEIDNLMEKNDEALLCKLAEDKDLKSKVERIAGAKGVSIQTVACVIAETDGFHLIRNRKQLTSYAGFDVVAKQSGGQDPKHKISKKGNANIRAALYMPALVATRYNKQMKAAYDRICQKHPNEKKIGVTAVMRRILLLIYTLWKNGEEYDENKDKANAKGKKKQAQEHGPEDRLAVNEEHVEGVAEDENGQPSS

SEQ ID NO: 401531 - protein, 367 aa, unidentified
MPRLHRDGEVVHVAFDASKNVLVTGVLRPGEETPTIERVFNDEPSVRRFVKGFPEPGRLRTCYEAGPCGYELQRLLQSLKVPCEVIAPALIPVAPGHRVKTDKRDARRLVRQFRAGELVAIRVPSRHDEAVRDLCRARADAVEDLTRAKNRLGHFLLRHGRIWRGGATTWTFKYRNWLGQQSFDEAALRVTFARYRATVECREAELESLESELTNYLEEEPFATPVQRLSAYRGVDRLGGLVLQAEVCDWRRFANGGAAGAFCGLVPSEYSSGDSVRRGSLTHTGNAHLRRQLIESAWAYTNGPSLGVTLRRRQDDVSPDTQARAWASQVDLCRRFRALDKRKPVRGVVVAAIARRLITHLHAEMVA

SEQ ID NO: 401532 - protein, 483 aa, unidentified
MKPKQEEKIKKATCHPAQSHWQQMNRKQRREMTRKIQSADISLEVVHPDAAGIDIGNESHYVAVPPTRDSEPVRRFGCTTAELKEMAVWLKQCAIRTIAMQSTGVYWIAVYDILEEAGLEVYLVNARETKNLPGRKSDVQESQWLMKLHTYGLLRNSFRPSQEVRTMRTYWRQRNDLVRAAGRHIQRIQKAMTQMNVQLANVLSDVSGVTGQAIVHAMLAGERDPYTLAAFRDCRVKASEEEIARSLEGNWQEDLLFVLKQEQDGYEFCQKQMAECDQRLHQYLKQRENRSAGANLPEEKRKERLRKKKKGNTPQFDLRTELFRLTGADLTQIDGVDVMTTMTILSEAGWDMSKWKTEHHFVSWLRLCPDNKISGDKVIGKGRLPTKNWVTTALRMAASSLRLSNTYLGAQFRRLRTRLGAPIAIKAMAAKLARLVYRMLRYGMQFVDQGAEFYESQHRKLQINYLKWKAGNLGFQIIEAPAA

SEQ ID NO: 401533 - protein, 385 aa, unidentified
MAQFEDLSRCLAAFDQNSTLVMVVEMSQSSWLVAGLVPGVARQPLKKLEPDGAALLRLVQRWRSEAVKAGRMIDRIVLAYEAGRDGFWLARWLRSHGIESYVIHPTSIPVSREHRRAKTDRLDAAMLLRALLGWLRGEPKHCAMAAIPTIEEEDAKRPSRERESLVSERTRIVNRMKGALARLGIRGFKPELRKAAQHLGGLRTPESTPIPPNTLGEFRRGMARLAVIHAQIKAIEVARLEHLEQAPDSGPPAMVRLLARVLGIGVETADMLVYEILYRKLRDTKAVARYAGITGSPDESGAKRREKGLAKAGNARVRRGLIQLAWRLLLFQPDSALVQWYRARIAEGARKTSMIVALARKLLIALWRMVNTGEIPDGFVLRPAV

SEQ ID NO: 401534 - protein, 309 aa, unidentified
MKQSVVYIGIDVAKAHLGVAWAGTFRRVPNERSGHAALVRWIKQSTTPVQLICEASGGYEQALLESLEKSEVKVTLVQAVRVRQYARAAGILAKTDRIDAKVLAAFGSAMQPQPTSPLSAEQKRLRQYEAQRRQLSRILVAEENRLAQLSCTELRTLSRSLISKIKTQIKTLDRGISDLIAQDQTLCVKAQKLTAISGVGVRTAALLLAQMPELGQLNRRQAAALAGLAPFNHDSGSVRGKRAIFGGRPALRSGLYMAALSAARFNPILSSFYQRLRAKGKPHKLALTAVMRKLLLALNQTLKPLPCST

SEQ ID NO: 401535 - protein, 328 aa, unidentified
MFYLGIDVSKAKLDCCLLNQDAPEKRKSKVVANSVAGVADLLLWMGKQGAQPSDTHALLEATGVYHESAATALHDSGVTVSILNPAQVRDFGKGLGLRTKTDAVDSYLLARFGLLQKPPTWQPAPAHVRTLRALLSRRQALSEDLQREHNRLEKAQVTETPERIHQSLRDCIDFLERQLAQLEKDIDDHIDQHPDLKQDLALLQSVPAVGPQVGSHLLCVMRSSAFRTAEQLAAYLGVVPVERQSGTSVRGRAHLSKAGSARIRALLYMSALVGIRYNRHVKALYERLLAKGKSKIAALGAAMRKIVHLCFGVLKNRTPYMENFLSHS

SEQ ID NO: 401536 - protein, 336 aa, unidentified
MDTVYATVGIDVSKKKLDIALLVDGKIKTKVVENSAPGHQALLEWLGKSKLPLSALHVCLEATGVYSEPVALVLHQAGMLVSLVNPACIKGFGQSENIRNKNDVVDANLIARYCAAMKPQRWTPPPLEQRQLRAWSQRIHTLKDIRQQEENRLEALTISGMNDVAEHVKQSIAWLSAEIERLESDINDHIDRHPGLKHDAELLSSIPGVGMTTVAKILGQLGDIRRFANAKAFAAFIGVTPRQRSSGSSLRSRTVISRTGNTALRAALYMPSLVARRHNPILRQFAERLANNGMAKKAVIAAVMHKLVHLIYGVIHNDKPFDPNYQIKRLVIQDGI

SEQ ID NO: 401537 - protein, 351 aa, unidentified
MKILALDLGKYKTVGCEYERESGWHRFRTAATSARALQQLMQEVKPDRVVIEICSIAGWVSDLVREMGIEIQVANTSEDSWRWRKVKKKNDREDALKAARLSAVNQIREVYIPQVEVRQWRALIAYRQQMVGRRTKIKNHIRDLLLREGQILPRGHRCWTQVGMAALAAMARPFNEVGLEELWRAELGQELVQLGEVQQNVVAVEEKLNAIGALDVRVQLLRTVPGVGPRLSEAIVALLDDPHRFGRAGEVSAYIGMVPKELDSGETSRRGRITRHGNRLVRSLLVEVAWAGLRHNPWARATYQRISGGKKSRRKIAIVAVGRKLLVRCWAMLRDHTAWRYETKLDIPAAA

SEQ ID NO: 401538 - protein, 359 aa, unidentified
MTQIVERVTDRYDVVVGVDTHTDTHTAAVLDRFGAVLAQVTVCTDSDGLSRLLAFAAAHTPPDGRRLWAVEGTRAHGQGLCRLLTAAGEPVCEAPKPVVASRRRGGKSDQLDAVAAAHTVLALSTDRVAVPRSDGPREALRLLLVCRRHHSDTRTATVNLVKALILTADDALRHALRGLSTTHQIARLAALDLPENTHLPTEEHTRRRELATLARHIHTLDTALADNHRRLRALVTDLCPPLLDQPGVGPVTAAIALTTWSHPGRVRSEAAYATLAGAAPIPVASGRTDRHRLNRGGDRTLNSALHTIALTRRRIHPETRDYINRRRAEGRTTREITRCLKRYIARQLYRTITTHHRTT

SEQ ID NO: 401539 - protein, 443 aa, unidentified
MSRKQRTHLRGKRGQAFADRIRGIALERILCVSLDISKYCHVVMIHNGLGEIVTPTFEIDIFQSGFDRLCQAIDEAVAQTQAQVVLVGMEPTSHYFENLARHLRARSRPVTLINSYAVKQNRDQQLMRREKTDEIDVAAIGDLLRRGEGSPFQPAGGVYLHLQQLDRVRLSKVKMRTMLKNQILGHLDRIFPGLVLIGAEARQRYTPLFTTDFWTCQTLQHLIRVCPDPHRLSAMTPTDLVAAFHAQHFALGRLRAAKILAYARTVLLPETELVAIRCELLQHDLALLEEVERHIADLEDRLRDLLAQTPYTIWAKLKGLSDIQVASLAAAIGDPAQYAYAGQVFRRTGLVSGRNDSGTRPRKGKGKRVVKTGDVYLRRAVLNGLRSLILHQPVLRQYDRRLQQSKPKGVAFVATARRGMGILWATLRDQRPATLILQRGAMM

SEQ ID NO: 401540 - protein, 414 aa, unidentified
MVDETTRCFAGIDWGSERHQACLLDAAGTVVGERSFAHGGTGLAALCDWILLVAGNPDTVAVAIEVPHGPVVDALLDRGFAVHAINPKQLDRLRDRFSIAGAKDDRRDARIAASGLRTDPHLFRPVQVGDPSVIALREWSRLAEELQQERVRLGHRMRQQLWRYYPQLLELAGGDIAAEWVLELWSMAPTPAQATRLREATLAKLLRQHRIRRLDAATALGILGQPAITVAAGVTEAAVLHLRSLVARLRLANREFHQAERKLEKLCATLTESTPAVKEGRPSDAAILRSLPGVGTVTLAALLTEATGPLARRDYPALRTLSGVAPVTKRSGKSCVVVMRYAAQARLREAVFHWARVAVQHDPKSRARYEALRARGHSYGRALRGVADRLLGVACVLLQRHTLFDPDHCTPAAP

SEQ ID NO: 401541 - protein, 392 aa, unidentified
MIYVGIDVAKDKHDCFIINSDGEILFHTFTISNNHEGFNTLFQRIESVSDDFTKVKVGLEATGHYSYNLLGFLLDKGLPTYVINPLHTNLYRKSLTLRKTKTDKVDSRTIATMIMSDMNLKSYSDISYHNEELKSLTRYRFDKVKERAKLKTSISRLVNILFPELEKLVPSLHLSSVYALLSEFPGAAQIAASHLTKLTNLLSQASKGRYGKETAILFRETARSSIGSVMPAKSLELKHTIKLIQELTAEIDEIEVAIKQIMDEEIHSPILTIPGISYRMGAMILAEIGDFNRFDSADQILAYAGMSPSTYQSGQLNNCYSHMEKRGSRYLRYALYNATKYVCQWDESFSAYLAKKRSEGKHYNVALSHATKKLVRLIFAMEKSGRTYQPAA

SEQ ID NO: 401542 - protein, 350 aa, unidentified
MDRYIGIDAHSESCSVAVMGPSGKRIHLHVVETHAKVLINLMKGMAGNKFVCLEEGELAEWLVEALTPHVKEIAVVQPDKPRGRKSDADDAWARAEQIRVRAQVTHVFKPTTKYRPLREAVRAYNIAIKDQTRTKNRLRSLFRSRGVRELDKSIYDPTSRPDWIKKLPKDYRRRAEWLGQQVDAMTSGRKLAQSWLEEEAIKCGEVTRLKTVPGLGVVRAAQIVALVVTPHRFRTTRKFWSYCGLGIVTRSSSDWKHDDKEWRRRNKVQTLGLNLNRQPVLKSIFKGAAKTLLTTPNPLHESFDRVVARGTAPNLARLTLARRIAAVTLTIWKKKEDYDPTKHRSIQEAA

SEQ ID NO: 401543 - protein, 332 aa, unidentified
MSLELALRKAGPIGKEHVVNPMTRFAGIDVSKAHLDVAVRPDEIEWRSPNTEAGVKEVAVQLKELCPDLVVLEATGGMESAAASALAIMGVPVVVVNPRQVRDFAKSTGHLAKTDALDALVLAHFAEAVKPEPRPLPSEQAKQLSALLSRRRQISEMLTAEKNRLQSADIIVRRRLKVHIRWLERELSDLNGDLDVAIQESPLWRMKAEILKSVPGIGPIVSFTLLSELPELGQLNRKQIAALAGVAPLNRDSGTRTGKRTVWGGRARVRAALYMAALVASRYNPVIRIFYQRLCAAGKPKKVALTACMRKLLLILNSMIKHDQKWNVPEAA

SEQ ID NO: 401544 - protein, 353 aa, unidentified
MLIIGCDFHPGFQQVAIFDNRTGEIEQKRLQHREEAEQFYGSLAGQEVRVGMEACGHYPWFERLLAELGFELWLGDAAAIRATVVRKQKTDRRDAEQVLTLMREDRFPRIWVPSLEERDVRQLLVHRHKQVQARTRVKNQLQAMALSQGVQKKRKLWAAGGRLELEKLELLPYAAERRKQLLQALDGLEVEIEQLNRRVEEEVGKRPAAVKLQTHPGVGPVTALAMVLTLGPAERFASGKQVGSYFGLIPSEYSSGGQQKLGHISKQGSSFLRFLLVEAGQTAVRYDAELGRFYRRLAVRKHRALAKVAVARKLAVRLYLMLREDWTYAQLCRAVVQASPSHPVVGRQNRALE

SEQ ID NO: 401545 - protein, 408 aa, unidentified
MHNHKVYVGIDVHRREHRVAILPVALLHKQTLNWKKAKTLVIKNNRDDFERLDAAIREEVLFPEEAVIAIDHTGGHYSEPLVYYLQGKQYSICHLEAKAVKAARERLLDEENKSDMIDAAGAAFLLYLRDTHGLSFRISAVIPELGSKASTLRCLLHQRQQYVKMITQSTNRLHHLLLAVFPEAEAHCFRKLLRVASHYPTPEDILNNPDLEGVKRIGCANRNNIVALAAQTVGAPGKLYRGLILYLVRQRNEAVAKRDEVTELIEHEVIDNPYGLILLSFPRGGVITAATIIGVLRDIDRWSNKKKLKKAFGVYGTIKESGTTTIIRKQGREGNKDARRALFQLVSRCIQKDAPENDFRDYYARQVRRGKPKLKAIISTAGKLAEIVYHCLKTRECYEYQGTYRHTV

SEQ ID NO: 401546 - protein, 332 aa, unidentified
MNLVSTLGIDLAKNTFSVHGVDCKGAVCVRRTVSRNQLSELVAQLPPCLIGMEACSGAHEWARQFGRFGHTVKLMSPKFVAPYRKSGKNDGNDAEAICEAVTRPNMRFVPVKTVEQQANLGLHRVRQGFIEERTGTLNRIRGLIAEFGYVLPQGPEHIRRGIPAIIEALPARVARCVRDLLEHAEDLATKVLEYEREIRLGVHDNELARRAQTRQGIGPITASALIATVGNGHDFKNGRQFAAWLGLVPCQYSTGGKTRLGHITKRGDPYLRTLFVMGARSVLQRAARETDPLSRWARAVQARRGYHRACVAVAAKNARVAWALLAKQAVAA

SEQ ID NO: 401547 - protein, 390 aa, unidentified
MNPYDVVAGVDVGKSFHWLHAITESGQVITSRKINQDEHELEAVFHQLNTGQKRVLVVVDQPKNIGALTLACAARAGCDVRYLPGLAMRRAAGILKGDAKTDQRDAQVIAKTAQSMPESLHVVDLDGDRARMEALVAYDHDCQVDKTRQTNRLHALLAEVNPVFEKTIGKQIDSPFILDLLARFGGPWGMRAAGKPKVTRWAATRHRVPVKLFDKVLDAAYAMQHQPAGAAIHEQLAIPAAARRIAELAAARQANQKLINKMLAVDPTYQALLTMPGVGPHTAAALVTLVDIKLFPDQEKLASYAGIAAHTQQSGTSIKGETAPRAGNKTLKNALFMSAFAAITWDPKGRAFYQAKIAAGKHHNTAVIALARKRLKIMYAIMRDNTPYQT

SEQ ID NO: 401548 - protein, 347 aa, unidentified
MSFIGVDLHQNSFTVCRRSSDGTESFETLSLSASDLERFCLSLDADDQIAIEATGNSAWFRDQVLPCAGRVVVVNPSQFKVIRKSVKKTDRNDAAALALFLAKDMLPETRVKSQDEGELASLTQTRDLLVKQRTRLLNKIHALHVRKGLKLKKESLGSKRGLTAIDLGLFSACEAIEIGVLREQALSLSASLARLDREIETIASTFQGYESLISIKGVGPRSAAVLLSSIGNVHDFESADKLAAYFGIVPRVSQSNETDSRGRITRRGNKLARTTLVQCGLIAMRYSPYLKQFHQRIRGRRGSGKAIIATARKLLSIIYDTLKNGWVFDDFTQFLRRDEKIPAGQSS

SEQ ID NO: 401549 - protein, 432 aa, unidentified
MEKIRNNVSGIDIGAKKVFTAVEGQPVVSHFTFTEDFLKLRDYLIQQKVESVAMEATGVYWVILYEILEEAGIDVWLVDGRQTKQVPGRKTDVKDCQWIQELHSYGLLNRCLVVEADIKELRSYLRLREDHIRSSSMHINHMQKALTQMNIRLKEVLSQLHGKSGIAIIEAILNGERDREVLVGLCHISILKGKRDLVYKSLEGRYTESGLFALKQAYDAYKFYQHQIQQCDARINTVLNRMGKSGQGQNTDQKRKPIRHHKPQVDHLGSNLLNIFEGKDATLISGITDYSWVQLLSETGNDLGKWPSEKHFTSWLGLSPGQNDSGKKKKKVKKKGRPVAGQIFRTIAQGLINSKNIAIGAFGRRLRGRKGAAIAIKAMARKLAILYWRIMQKGLDFAEKGIKKYEEQLSAQKLKTVMRLAYELKLNISHYQ

SEQ ID NO: 401550 - protein, 352 aa, unidentified
MSVKKLFIGMDLHKNSSTFCVKDYDGELVASEKVATNKSEVLGFVNQFKEHNLSLAVEPVSQWYFMADILQQAGVDVHLANPLKVKAIASARIKTDKIDAGVLADLLRTNLLPEAYFSDKEMRMWKELVRFRLSLVNLRVQAKNKIHAILGKNGCISKFTDTFGKAGRVWLAELQLPEHFRNSLDEYLATHDYLSEQIKRAEKNIEAVVVGNKLMTLLTTIPGVSYFSALTIMAEIGDIHRFPSAKQLMGYAGVVPSTYASGDKVVHGRITKTGSRWLRWIMIEIAHKQLRCKRKPGLGWYYAKIKKNKGSKTAAVATARKLLAVIWRMLVDERPFKSPLEVREAYRKNVVR

SEQ ID NO: 401551 - protein, 320 aa, unidentified
MRNTVGLDISKLTFDATTIVGNAEYSAKFDNDSKGLDQFSDRLKSLGCQNLHICMEATGNYYEEVADYFAQYYSVYVVNPLKISKYAESRFKRTKTGKQDAKLIAQYCRSAQESELVKRQKPTDEQYRLLRMTAAYAQIKSECAAMKNRHHAAKDEEAAKAYAEIIKAMNEQLEVLKEKIKEQTEKPKCKEGVKCLETIPGIGRMTAAVLFHHLTSSKFETSNKFAAFAGLSPQQKESGTSVRGKGKLTKFGNRKLRAVLFMLTMVAYRIRAFPDFIKRLEEKKKPKKVIIAALMRKLAVIAYHVHKKGGDYDPSRYKSA

SEQ ID NO: 401552 - protein, 494 aa, unidentified
MGACELESGDVALATIPIRKMTIGIAQTLLLIIEWRIAMPKKRTAGDRPELKPVNVGAAAIDIGSTMHMAAVNPACTDVPVRSFGTFTRDLHELADWFKTCGVTSVAMESTGVYWIPVYEILEQRGFEVILVNARYAKNVPGRKTDVSDAAWLRQLHSYGLLRGSFRPDAEIATLRAYLRQRERLVEYAAAHIQHMQKALMEMNLQLHHVVSDITGATGMRIIRAIVAGERNPDVLATYRDVRCHSSIATIRAALVGNDRHEHVFALTQSLELYDVYQAKMLDCDRKLEVLIAALNNKGAKPIGKLSKPRIKTKQVNAPTFDVRTALYGVLGVDLTEIHGLGPSLALKLIGECGTDLRAWPRAKHFTSWLCLAPSNKISGGKVLSARTRRSSSRAPALLRLAATTVGRSDTALGAFYRRLSSRAGKSKAVTATARKIAVLFYNTLRHGMHYRDPGADHYEQQYRGRVLANLQRRAKSLGFVLQVIPGAPDPAVS

SEQ ID NO: 401553 - protein, 408 aa, unidentified
MKDSGKRYIGLDVHKHYLIAIGVDDELHVVLPARRVELFHLESWMKKTLTKQDDVVLEMTTNTWQLYDELCEHAGSVTVVHPPHVALITRSQVMNDKIAASILARLLAKGLLVGIWVPPQEIRELRGLVAQRKKMTGLATQAKNRLHAVLQRHHLVPPEGNLFHESQQDWWLTLPLGPLEKVNVQSDLETLRFAQAQQMRLTCMMEEITNQQEQVTRLLQVPGFGVVTAVTVWAAIGTIQRFEDPQHLVGYAGLGTRVHNSGMSTRTGRITKAGRRDLRVVLIEAAQIAANTHPHWKAELARLQPRLGRNKAIVAIARKLLIAVWYILAQYKTDRFAEPQAIAQKLLKFAYQLGKANRPPGQSAAQFVRQRLDALQLGQELTSIAWGSKKPIPLPPSTNKVSDVPNTK

SEQ ID NO: 401554 - protein, 399 aa, unidentified
MFYCGIDIAKYKHEASVIDTNGKAMLDSISFTNDKQGCEKILAVFQKFEISPADVIIGMEATGHYWLSVYAFFLELGYNVKVINPIQSEAFRKMYIRQTKNDSKDSFIIAQIMRFGQYSATSLSEENIIALRQLSRYRLALVDACGDCKRRVIALLDQVFPEYDNLFSDTFGSSSTELLLNCPTPEDMLAISTRKLTNILNKASRGRLGKEKVEEIKAAAEGTFGIAFAKDAFAFQIKQLIQQIVFTEKQLSELEEQIADLLHKTNQYITTITGIGDVLGAIIVSEIGDINRFERPNQLVAFAGLDVTVKQSGEFSGSKNKISKRGSPYLRRAIWLAAQRAAFCDPILSEYYQSLRARGKHHLTAVGGVARKLCNIIFVILKENRPYQPTPPKNTQNIT

SEQ ID NO: 401555 - protein, 348 aa, unidentified
MKVLIGVDPHKASVAIAVVDEVVGELVERASFPQDRAGMRRLERWAERFPERRWAVENAGGLGRHLAGRLAAAGESVVDVPPKLSARVRVLSTGNARKNDGLDALATALAASRNGRLAEVDAEAASEVLRLLSERREDLVAERTRALNRLHGLLRDLVPGGVARTLSADRAACILRGLRPRGGASARLRRRLASEVLRDVRTLDRKIAGLNGRIEAEVEASGTTLTEIFGIGPILAARIIGTVGDVARFPTKAHFASYCGTAPVEASSGQAVRHRLSLAGNRKLNYALLHMVAVCQARSDARGGAYYRKKIAEGKSRKEALRCLKRRVSDAVFKSLVADSQAPSRNAA

SEQ ID NO: 401556 - protein, 341 aa, unidentified
MQITTIGLDIAKNVFQVHGIGAAQKVIVRKQLRRGQVMAFFEALAPCLIGMEACATSHHWARELTKLGHMVRLMPAKDVRAYVKRNKNDAADAEAICEAVRRPNMRFVRIKSAEQQGQLMLHRARDLLMRQRTQVINALRAHLAEFGITAAQGREGIKELLAVVVQDEGSRLPVDAHASLTVLAAQLQSVQTMIGTLEKRIVAQHRSNEASKRLETIPGIGVIGATTIAAVVPDPRVFRSGRDFAAWIGIVPRQDSTGGKQKLGPISKQGDQYLRRILIVGAHAFLRRARQQPDKYPWLTQLLARRPFKVVAVALANKMARIAWALLAKGGTYRAPQLAAV

SEQ ID NO: 401557 - protein, 322 aa, unidentified
MNKYKETFGVDISKDVFDVHGNNKGHSQYKNDETGFKKYLKELPQGSLVVMEATGYYHYRLAQFLYKNGVIVSVVNPLSIKRFIQMKLAKVKTDKSDAKAICDYALINEVPLYNALTDTQSECLQLFRLLDTYLKQRTATKNKIHGEAVLGIPSKFVHRSLVRNKKQLNKEVVAIESKILSLVKEDQQEQLTLLTSIPGIGQKTALFLIVVTDGFSKFETASQLCSYVGITPTIRESGSSVRGRARISKVGNRKLRNLLFLCSFNACKHNKACKEVYERIVNKGKSKKLALIAVSNKLLKQSFAIAKSGRPYDESYVSILPR

SEQ ID NO: 401558 - protein, 368 aa, unidentified
MTRMPDKTDLDQDRRVFAGVDTHKELHVAAVIDTDDTVLGTRSFPTTRTGYRTMLTWIGEYGDLIRIGVEGTGSYGAGLTRHLAKAGVTVLEVDRPDRSDRRRKGKDDDLDAINAARAAKTNQRTTTPKSKDGAVESLRVLRVTRAHAVRERRSALQLLRMTIISAPDELRDQVRDLTRMQLIRLLAAWRPDVANATDPVTAYRVSLKSLARRYLELTDEIADRGELINPIVKALAPQLLERVGIGVEVAGQMLVTAGDNSDRMKSEAAFAMLCGVAPLPASSGMTQRHRLNRGGDRQANRALHLAVIGRIRLDPKTQAYLEKKTSEGHSKLETIRCLKRYLAREIYYLLNPGQQTITPNTRPHRKAA

SEQ ID NO: 401559 - protein, 386 aa, unidentified
MPQLNDLSRSLITLEQDATLIAVIEMGQSSWLVAGIVPGVERQPLKKLAVDESALLKLLNRWREEAEQAGHRIKRIAVAFEAGRDGFWLARWLRTRGIETHVIHASSVAVSREHRRAKTDRLDTELLKRAFLGWLRGERDHCKMVAIPTTKDEDAKRPNRERESLVGEQSRIVNRMKATLTRLGIRGFNPKLKKAAERLDDLRTPEDEPIPPNTLAELRRDMVRRRLVSDQIRQIEGARLERLEQAPCDGPHAMVRLLARVIGVGIETADMLVQEVLSRNMRDRRAVARYAGLTGSPDESGKKRREKGLARSGNARVRRGMIQLAWRFLMFQKDSALAQWFRARTENARGTRKTMIVALARKLLIALWRLVRDGVVPDGVILRPAQ

SEQ ID NO: 401560 - protein, 340 aa, unidentified
MNSTQVAVDLAKSVFEVAVSRSPGKVHESHRLSRGRFQKYFAVREPVEVLMEACGTAHHWGRTLEAMGHRVRLLPPGDVSRYRDGNKTDRADAKALLEAARNDAIDAVPVKSLDQQAIAALHRIRSGYQQTRTARINAVRGHLREFGIMIPMGASRVVPMARVALEGDGVPAYLREVLEEVLDEIETLSLKAKAVHRRLERLSKQMPEAQALMTVPGIGVLTATALVSFVGDPRRFRSGRQLAAYLGLTPREFSSGTKRRLGRITKRGNTYVRMLLIHGARSALQAGKRSHEPDDLRTWALDVERRRGHNVATVALANKLARVAWRVWRDQRPFERRCPA

SEQ ID NO: 401561 - protein, 309 aa, unidentified
MEMLYAGIDVSKKQLDVHLVPGVEAFAVPRNGEGLDELCQRLAGQALALIVIEATGGFETVVAATLTAAAFPVAVVNPAQVRSFARAMGTRAKTDPIDARVIALFGEATKPSIRPLADKETRQLADLVVRRRQIIAMIVAEKQRETRASGRMQRSIARLVKALEKELNSVDADIDGAVRGSPVWRAKEDLLASVPGVGNVTARTLLAELPELGHLTRRKISALAGLAPYTRQSGQWRGKSFIEGGRAGVRSALYMAAVSASRFNPPLSQFYQRLIADGKPKKLALIAVARKLLTILNAILRDQKPWQNA

SEQ ID NO: 401562 - protein, 372 aa, unidentified
MFNSIVYVGMDVHKKSYTLCCYTFADDEVKYKQKIKADYRMILKYIEGVRDRYPEGSTFLCGYEAGCLGYSLYHELTDHGVDCKILAPTTMAVTNNRRVKTDKRDAANIARCLALKTYSEVFVLSDEDNAIKEFIRMRDDQMKMLKSTKQQILAFTLRNGCKFEGGKTHWTIKHKQWLRTLKLDGVFQETLDEYLVAYECLVDKIERLDRRIEELALGEKYEENVKKLSCFIGVKTHTALSFLVEIGDFHRFARANNFSSFLGLTPGEDTSDERRNGLGITKAGNGHLRKLLTESAQGYTKGQIGYKSKALKARQKGNSSEVIAYADKSNERLRRKFYKLTLNNNVNRNKAKSAIARELACFMWGMMTDNIA

SEQ ID NO: 401563 - protein, 313 aa, unidentified
MQQSFVGIDISKNSLDVHVLPEGTSYSFGNEPQKVKTLIRKLKKLKPTLIVMEATGGYEISLAVELSGAKLNAAVVNPRQVRDYARAIGKLAKTDAVDAYVIARFAQDVRPEAREQLNLKERQLKELVMRRQQLIDMRTAEKNRLSRAYTSQVQEELRCHIDELTTRIKAIDEQLHNEIKNDPNWNQKLKIITSVPGIGANTAHNLLMCLPELGTLNRRQIAALVGVAPMNRDSGMMRGKRTIAGGRAVVRRMLHMPTLSAVTRWNKRLKTFYDHLRQQGKKHRVALTACMRKLVIMLNSMLKNNQPYSENYC

SEQ ID NO: 401564 - protein, 343 aa, unidentified
MQTVTTIGLDIAKSVFQVHGHDGAGQVVIRRQLKRRSVLAFFQKLPPCLVGIEACASAHHWSRELQALGHKVRLIPPAYVKPYVKRQKNDAADAEAICEAVTRANMRFVPTKTPEQQSCLVLHRTRHLFIRQQTAVINAIRGHLAEFGIVAPVGRHGVEELLNVLADPNDKRVPEIARACLSAFGAQLRRIKEQVLEFDRLIRAWHRSDEMSMRLDEAPGVGPVLATAVVATVADPKSFRSGRNFSAWIGIVPKQHSSGGKNRLGNISKQGDRYLRGLFVAGALSVIRYAKIHGTKHRPWLTALLARRPTKVVAIALANKIARMVWAMMARGERYKEPVALAR

SEQ ID NO: 401565 - protein, 342 aa, unidentified
MKITTIGIDLAKSVFQVHGVDRRGKVVLKKQLRRTQMAAFFGNLAPCLIGMEACGGAHHWARKLQGFGHTVRLMAPQFVKPYVKTNKNDAADAQAICEAVARPSMRFVAIKSVEQQAVLALHRARQGFVKSRTAQANQIRGLLTEYGLILPQGIAHIAKRVPELIEDASNELPGAFRVLVDRLMDNLKGLDQQVAELEAQIKAWHRDSDASRRLEQIPGIGPITASALVASIGEAKNFDNGRQVAAWLGLVPRQHSSGGKATLLGISKRGDSYLRTLLIHGARSVILAARRKTDPGGWLQALLKRRNPNVAAVALANKNARIAWALLAHDRRYRADYAGAGA

SEQ ID NO: 401566 - protein, 391 aa, unidentified
MIYVGIDVAKDKHDCFITNSDGEVLFKAFTIQNNHDGFDDLFQKILTVTDDLPKVKVGLEATGHYSYNILGFLLDKGLTTFVINPLHTNLFRKGLSLRQTKTDKVDAHTIALMLMSDVNLKSYSDTSYHKEELKSLTRYRFDKVCGRAKLKTSISRLVCILFPELEKIVPTLHMVSVYKLLAEFPGASQIASAHLTRLSNLLSEASRGRYGKDDAIRIRNAARLSIGSVMPAKSMELKHTIRLINELTSEVNEIEAEIKSIMDNISSPILSIPGINYRMGAMIIAEIGDFGRFDSPEKILAYAGLSPSTYQSGQLKSSHSHMEKRGSRYLRYALFNATKYVCHWDPTFAAYLDKKRCEGKHYNVAVSHAAKKLVRIIYHLEKSGQLYVKAA

SEQ ID NO: 401567 - protein, 479 aa, unidentified
MHLVMTNSQKSSISDSTIRLSQDQVCPLSGDDSMLDTIRAVQQEPEWAAFAAIDWADQQHTWTLVPAGSSLPQRGKVENTPEALHLWATALSVQFGGRPIAVCLEQCRGLLIYALSKYAHLVLFPVHPTTAARYRQTFSPSGAKDDPRDADSLLDLLLHHRDQFPRWQPDTVTNRHLQRLVEQRRLMVHEKTRQSNRLTACLKTFFPQILQWFDDITAPVVADLLKRWPTLEQLQHSHPGTLKKFFLQHNSRSEKRIQARLNAIYQAVSSTHDEAVLESESIAALGFLRLLKTLGENIEILDHRIQQLVATHPDAPIFASLPGAGPATIPRLIVAFGSRRERWTSAYEMQCYSGIAPVKEASGRHEWIHFRRSCPKFLRQTFHEYAFLSTNQSPWAQAYYRHQREKGIAHPAAVRSLAYKWIRIIFRCWKDSQPYDEARYAAAQQKRNSPLAALGIDTKEVAGFQKPALKKSCSKRLTE

SEQ ID NO: 401568 - protein, 414 aa, unidentified
MEVLYPRCCGLDVHKSSITACALLREQGQVRIERQRFTTMTRDLQDLAAWLRQLQVTHVAIESTGVYWKPVWNVLEGQFTIILANAQHIKNVPGRKTDTKDSEWIAELLQHGLLRSSYVPPEIIRDLRDLTRARVRLSQEASRLGSRIQKVLEDANIKLSSVASNTLGKSGRAMLDAIVGGQTDPEQLADLALGHLRAKIPQLRLALEGKIREHHRFLLKRLLHQLRFIEDEIDLLDQRLEQLGQQDSTLAAAVNRWITVPGVDRIAAWSLAAEIGVAMEQFPTAAHLASWAGLCPGNCESAGKHLSGKTRKGSPWLSRMACQCAWAAARTKNTYLSVQFRRLAARRGKKRAIIAVAHSILVIGYSLQKHQRDYCDLGSDYFDRLNADGLKRYLVRRLEALGQKVTIESAAGAT

SEQ ID NO: 401569 - protein, 330 aa, unidentified
MAKHVFQVHEVDAAGATVLRKQLRRAQVLAFFSRLPRCLVGMEACATAHYWARELSAFGHEVRLMPAQYVKAYVKRNKNDAADAEAICEAVLRPTMRFVPAKTAEQQAAVLLHRGRERLVRQRTMLVNALRAHLAEFGVIAPQGLRNVGRLIAIIRDEEDTRLPGLARQVLQVLATQIEQIEAAVTGLEKQLMGWHKSNPISQRLATIPGIGPIIATAIAAMVAEPSGFRSGREFAAWLGLVPRQNSTGGKNRLGGISKRGNQYLRRLLINGASANLLRSKATNADPWVIGLRRRRPSLVVAVALANKTARIAWAVMHRQENYQRMATAA

SEQ ID NO: 401570 - protein, 491 aa, unidentified
MKSGEKVLRSRHACRGRIAPGGSRSLVPDPMRIRLSLPARLSAPVPTSERTKAHEAPGIRSTHDGATMHTRKTTRMKNWKDLTHYVGFDWAKDHHAVVIVDGEGQIVADFEFAHSLEGWKSFVEKTSAWPKLAVAIETSQGAAVDQLLQRDYSVYPVHPVAAQSYRQRKAPTGTKTDHLDAWGLADALRVDGHGWRALQPLDPLTQQLRLLCRDEVTLIEQRTALVNQLQQALAEYYPTALEAFDDWTDHFTWEFVLAFPTPQLLVTAGKRRWEKFLHTHKLWRAETVEKRLKLFAQADQFKASEPIVQAKSQLAVSLCKLLCTLGKQLDLYRKQIEALFRDHPDHDLFGSLPGAKKMLAPRLLAAVGADPGRYGSHEVLQSIAGTAPVSYQSGKLNKVHVRWACDKFLRHTMHLWADCFRKASAWGQAYYQQKREEGMTHACALRCLGQRLLKILFRMLTDKKQYDGELHARNQQKHGSWVLKLVKKPAA

SEQ ID NO: 401571 - protein, 339 aa, unidentified
MVDKVTEAAVVGGVDTHKDLHVAAVVDQNNKVLGTQYFSTTRQGYRQMLAWMTSFGTLKRIGVECTGTYGSGLLRYFQNAGLEVLEVTAPDRMARRKRGKSDTIDAECAAHAAFSGIRTVTPKTRNGMIESLRVLKTCRKTAISARRVALQIIHSNIISAPDELREQLRNMTRMQLIRTLGSWRPDASEYRNVTNVYRISLKSLARRYLELHDEIADLDVMIAAIVDELAPELIKRNAIGYESASQLLITAGDNPQRLRSESGFAALCGVSPVPVSSGKTNRYRLNRGGDRAANSALHIIAIGRLRTDDKTKEYVARRVAAGHTKMEAIRCLKRYLTED

SEQ ID NO: 401572 - protein, 372 aa, unidentified
MNHNIIYIGLDVDDTRYHGSALSKHTGEVIDFQCRPTLKGLLVQLNKIVRHFSGCSLRLCYEASYIGYCLQRDLSEKGFHCDVVAPTSIPTPRGRAIKTDRIDAGQLAQFYANDLLTIVQPPDAEQERDRDLLRTRQNLLKHRTDLRKHMQSLLRRGGLHYKAETGNKSHWTGLHYAWLDRTIDGLSGSIKVNLELLLRQLKGMNDILTAYGQQIEVLAQSPRYEKPVQALNCYKGIKNIFALTMITEVGDIKRFAHPRKLMSWIGMDIREYSSGGKHNRFGITKQGNRYLRTAFVEANQRGYRTTRVSNALKARRANTTPELVAIADRCLRRLNKKGNRLLLAGKHPNKVKVACAREMVGFVWESLNQAAA

SEQ ID NO: 401573 - protein, 352 aa, unidentified
MTVTNLPRCITGGVDTHLDVHVAAALDDRGALLGVESFDTTIEGYKKLLAWLSDFGSVELVGVEGTGSYGAGLTRHLQAEGIRVVEVDRPNRQRRRRKGKSDPEDAISAARAALSGDASGEAKTRDGNVESMRILRVARVSARKGRTQALNQMRSLVSTAPEPIRDELRGLNVFHLLERASAYRPGTKRDIASLTKLSLRMLARRAMTLEEEVAEIDAILKTLVKETAPELVGTLGIGTDAASALLVAAGDNPERLRSEAAFAHLCGTSPIDASSGKQHRHRLNRSGDRQANSALWHIVITRMVYDPRTTEYIDRRIKEGLSKKEAVRCLKRYVAREVYGLLPHEKLGLDSP

SEQ ID NO: 401574 - protein, 337 aa, unidentified
MKYCGIDLHSNNSVVIVSDEEDRIVFNKRLPNDLGQICAALEAHEEELAGVVIESTYNWYWLVDGLMDAGYEVHLAHPAAIKKYEGLKHSGDFADAAYLAQLLRLGLLAEGYIYPRAERGARDLARKRMQLVRYRTAQILSIEGILMRQTGARMKGEVVKRLTAEQVDAFAFAPDVALAVEANRAVSQVLGQQIEALERRLKERVSLRPEYRLLKTVPGIGQTLATTIMLETGTIGRFAQVGNFSSYCRCVDSLRESNGKKKGEGNTRNGNKYLAWAFVEAANFAMRYCPQAKSFYDRKKSRTNRVLAIKALAHKLARACYHMLRDQKPFDVTRCFG

SEQ ID NO: 401575 - protein, 354 aa, unidentified
MLIIGCDHHPSFQQIAFVDTDTGELQERRLEHCEEAEKFYRGLGVQGMKVRLGMEASGHGRWFERLLAELNFELWIGDATEIARKRERKQKTDRQDAQHILKLMLKDDFPRIRVPSWENRDLRQLLWHRHRMVQARTRIMNQLQAVALNEGLRSKKRLWREHGREQLESFRLAPWASRRRHDLLELLDRLNPTIAELSQAIEQEVEKCPEAQRLMTHPGVGPLTALAFVLIIERADRFQCGKQIASYLGLVPLEDSSGNRRRLGHITKQGNSLLRFLLVEAAQVTVRSLPEWRSKYFHLAMRRGRKIAKVAMARRLAVRMYWMMRKGWDYEQVNKFGSHAGQPGYRDGVRLNTE

SEQ ID NO: 401576 - protein, 416 aa, unidentified
MKKNTNSPTKKEPRAKRAKAQRPVQREAKEVLAELVEKLRGKLELKSTSASAAEAGPRGELSPNLDRLTVGLDLGDQWSHFCILGFEGETLSEGQLQTREAEVAEFFQALAPARVVMEVGTHSAWMQEIIAGEGHEVVVANPRLMEGSKRRKRKNDRIDAKKLARLGRVDPQSLHPIRHRSREVRQDLVVLRAREALVAARTELINATRGLVKSMGTRLPKCSSPSFGQKVKDVIPEKVREALLPLVQLADALSDCIQSYDQKIEELGSEKYGHTKLLRQVKGVGPITALAYVLTLENPEHFAKSRDVGPYLGLVPKQEDSGESQPQLGISKTGDTMVRKLLVGSAHYILGPFGPDTDLRRYGLRLCERGGKNAKKRAAVAVARKLAVLLHRLWVSGEVYEPLGYAASRAIVQPAA

SEQ ID NO: 401577 - protein, 436 aa, unidentified
MARKKTIPHPELKAVNDNAAAIDIGSTLHMAAVNPEHCDAPIRAFGTFTHDLHGLAEWFASCGVTSVAMESTGVYWIPAYEILEQHGFEVILVNARSAKNVPGRKTDVNDAAWLRQLHSYGLLRGSFRPDAEIATLRAYLRQRERLVVYAAAHIQHMQKAMMEMNLQLHHVVSDITGATGMRIIRAIIAGERNPDVLAGFRDVRCHSSTETIRAALVGNERAEHIFALTQSLDFYDFYQSKMLECDRRLEAVLAGLAVDKDYDATTLPRARTKTKQVNTPSFDVRAALYGVLGTDLTQIHGLGPSLALKLVGECGTDLKAWPSAKHFTSWLCLAPGNKISGGKVLSSRTRRSSSRAAALLRLAAVTIGRSDTALGAFYRRLAARAGKAKAVTATARKIAVLFYNTLRYGMTYKDPGASHYEERYRSRVLGNLQRRA

SEQ ID NO: 401578 - protein, 343 aa, unidentified
MYYIGLDVHKKTISFCVKDAAGCVHREGKIGSTRHELDAWIRTLPQPRMIAMEATIFTGWIYDHLLPHAEKVKVAHPLMLRAIAAAKRKNDRIDAVKIADCLRCDFLPECHMASTEIRNRRRILRYRGLVLRQAVQMKNRVSGLLMETGVSYNKLRLHRMGYFAELMSTNEEVSESIRPLLRLCREHIDRAIRLDTTLLRSLEQDPLLADRLRRLRTIPGVGPITALTWALEVGDTSRFRSIKQAISYCGLCSAEKSSADKVMRTPISKQRNKHIRQVLVEAARLAPRYSDELALLYEKERQRGNGNRATLAVARKMVALMLAVERRNTDFVPAAEFRRTAAA

SEQ ID NO: 401579 - protein, 356 aa, unidentified
MSYDVKYIGMDVHQEAIVIAVLNDSGKLVMETILETKASSILQFIHGLRGELHVTWEEGTWAAWLYDLLQPQVQEVVVCNPRRNALLKEGSKCDKVDARKLAELLRTGMLRPVYHGENGLRTLRELGRSYQTLSKDLTRVMNRLKALYRGWGIPCAGTQVYAPRYREEWLSKIVQAGVRRRAELLYQQLDGLQALRRNLRPEFLAESRKHKAAKLLRQIPCIGPIRAARLIALMQTPHRFRSKRQLWTYSGLGIETHDSAQFRFVRGQLQRSKKPQQLRGLNQNHNHEMKEIFKSTATRASCGGGPFHDFYAALLAKGMKPEMARLTLARKIAAITLTLWKKGGRFDAEQLKTQAA

SEQ ID NO: 401580 - protein, 375 aa, unidentified
MSKHSEAFVAFDTSKLRNAVAIADGGREGEVRFLGEIDSSMAAITQLVRKLEANYERITFCYEAGPTGYELQRHIKALGHECIVVAPSLIPKKPGDRVKTNRRDAVGLVKLLRAGELTAVWVPDRRHEAMRDLTRARETAVIDLRAKRQQVSAFLLRQGRWYLAGKKTWTKVHMEWLAQQKFEQPERRMAFEEMIFAIRQAQERVARLEQAIRAAVPDWSLAKMVTAFMALRGIDLVSAADLLAELGDLSRFPTAPEVMGYVGMGCSESSTGDTIQRGPITKSGNRRARRTLVECAWSYQHPPRIGVAKQQKVAAAPPKVREIAWKAQSRLNRRYRALIRRGKRKNVAITAVARELAGFVWAVAREVASAERAAK

SEQ ID NO: 401581 - protein, 368 aa, unidentified
MQHRTSQSSSSALTSVQLPTTVGLDLSDRTSHFHVLRGDGVKLDAGKVATERAALALLFDSWAGCRLVLEAGGHSPWVSRLATRCGMESVVANPRRVQLISKSDRKTDRTDAELLARLGRSDVTLLAPITHRSEQAQAHLAVQRSRNVAVSSRTLLINHVRGVMKSFGVRAPSCSPECFHTRVAAHVPEALAMALTPILKLIGRLNTEIRVFEREMERLCREAYPETAALQQVPGVGSIVSLTFILTLGSHERFASGRDVGPYTGLVPRKQSSGDSDPQLHITKAGDRELRRLLVLAANYILGRFCPDCDLRRFGTRIAGDGSDKKAKKRARVAVARKLAVLLHHLWRTGATYDPLYQAKRRGEVPAA

SEQ ID NO: 401582 - protein, 375 aa, unidentified
MQNKVRFLGLDVHADTIAVAIAEPNGEVRSLGTIANRAESIRKMVKKLGTVDQLRACYEAGPTGYVLYWQLAELGVNCEVIAPTLVPVKAGDRVKTDRRDAERLARSHRSGDLTAVWVPDAGSEALRDLVRAREAAKQDQLRARHRLSKFLLRSGLRPAQGMKAWTQPYMIWVKQVRFTQVAQESTRLDYLTEVEHMGERVLRLEKAITEAVKLASPELQEVVKDLQALRGIAQISAVTIAAELGNISRFEGARQLMGYSGAVPSEDSSGKRLKRGSITKTGNAHLRRIAVEAAWSYRLRPGVGPALRKRQEGVPEEIKEIAWKAQHRLHKRYIKLSAAGKDQRKIITAVGRELLGFIWAIGTKAEATVKQQKAA

SEQ ID NO: 401583 - protein, 313 aa, unidentified
MDCMELDVGVDVSKPLLDVAVVQTDEEFQVTNDEAGWADLIKRFKGRKVRVIGLEASGGYERGLIKALRKAGFRVHRVDAYRLRQYARAMGRLAKNDRIDARMIARFAAQMPTREPYVDPLVEQMAELVVARRQRTKDKVRLSNQLEQVRDPMLRRITRQRLQRIEAEILLIGKRLAEIVASDANLATRDRLVQSFLGAGPVLSHTLLALAPEIGEVDRRELAALIGVAPFDDQSGKRNGKRHIWGGRAEVRNVAYMAAMTAARCNPALRAFKERLIANGKCKKEAIVAVARRMLGIITALLRTGQEWNPHHA

SEQ ID NO: 401584 - protein, 420 aa, unidentified
MEEITEEPGALVERIAALDIGKASLTACVRVPHEDKPGARRQEVRTYATLTPSLLELRDWLVCQGVTLVVMEATSAYWKPPFYLLEDDIECWVVNARDVKNVPGRPKTDKLDSVWLCKLAERGMLRASFIPSRPQRQLRDLTRYRRTLTHERTREKQRAEKLLEDAQIKLSSVISDIFGKSGRAMLDALIAGQRNPRALAALACKNMRAKTSVLQEALTGHFTDHHAFMLGMMLARIDALTTQIDTLTARIGQAIAPFAAQVAQLDEIPGIGITAAQDLLAEIGTDMSRFPDAGHLVSWAKFAPRARQSAGRSKAASTGKGNPWLGGTLGEAAASAARTKTFLASRYRRLARRRGKQRALVGIGNSILTIIWHLLCDPAAHFTDLGPDWHDRLTPLRRKRQLITELERLSGKKVTLHDAA

SEQ ID NO: 401585 - protein, 358 aa, unidentified
MKVVYSTCCGVDVHKKFFVATIITSERIQPTYQKKRFSTFNNQILQFKKWLLENSCLNICMESTGKYWVPVFNLLEDSINVTVANPKWVRAVKGNKDDTKDSKWIGDLFRLGLVPGSFIPCKAIRILRELTRYRFKLISCKSSEKNRYQNVFTVCNVALDAVVSDMFGKSASSITDYIINSDTFDPKHCVSLLKSSLKDKADEVIASIEGFQMEPEQKSRARLVMEHYEFLVDEIKKIDDMLDVLAAPYEGVITLLCTIPGVDRHTAITIISEIGTDMAQFLSSKRLCCWAGLTPGNNESAGKKKSVNITRAGVYLKPALVQVAHAAVRDTKNPYYRIKYERISKRRGKKRAIIAIAR

SEQ ID NO: 401586 - protein, 384 aa, unidentified
MNEHTLYVGLDTAKNQIDVGVAEPLPGGEVRYWGKVANEAAALDRVIKRLQQGSRRLQVCYEAGPCGYGIYRRLNAKPHVSCEVVAPSLTPRRPGVRVKTNRRDCLTLAKLLRSEELTAAWVPDAAHEAIRDLVRARGAAVEDLVRCRQRIAGFLLRQEIRYAGKPWSKKHRVWLGRIELAAPAHRLMFGEMLEALDLAQARRDRLTEHMAELVPSWSLAWLVEALQALRGYRLINAASLVAEIGDPRRFASPRELMGYLGMVPSEHSTGNRVQRGGLTKTGNRRARKVLIEAAWTYARRAKVSSARASRQPPVVRAIAEKARHRLSGRYRRLRARGKLGVVAIAAVARESLGFIWAIAQAAGPTNSIDADRPAGGAGRGSRTW

SEQ ID NO: 401587 - protein, 400 aa, unidentified
MLSIGIDVSKGKSTVCGMKPGGEIVYTPFEIQHTREGMSDLVSLLRSSGEEVRAVLESTGSYHCPVVTALLENGIFVSVVNSLRMKRFCSQSIRKVKTDRIDAMQIALYGLAYWQELQPTKLPEDTYRELQLLARQYYQMTSLLIKAKVDFNAICDQVLPGMQELMNDHAGRHKLSDFVLRYHHTTHILEMGETRFRKDYCKWAEKKGYRNCERMAAHIFATAQNGIPVLPNAPSTQIVITEAIRVLHTVEASRDAILTQMQALAKTLPEYSLVREMPCIGDTLAPRLIAEIGDVRRFHSKRALIAYAGIDAPPYQSGKFCANNRHISKWGNRYLRKTGYEVMQSYVMHKPANDPIFTFIEKKRGEGKSGKLAMVAGLNKFLRVYYGKVTELYRSLPAIE

SEQ ID NO: 401588 - protein, 317 aa, unidentified
MNNTEFQTPVNVGVDVGKANLDIALHPSGQFYTIPNTEAHIRRFVRILKNYEIERIVVEASGRYEHALVQACDKAGLPIIIVNPISVRRYAQAIGVLAKTDRIDAQVIAQYAATLKPEIKPIPDKTSQKIKDLLVRRSQLLEMSTMEKNRLQILPKPLHRSIKSLLRMLQNQIETVTRQIEQEVAKVDQWRTKMEIMTSVPGVGKVLAYTFLSELPELGSLNRKEIAALVGVAPINRDSGKLNGKRRIRGGRHRVRTVMFMAMLSSIQCNPVFKRFYERLKAQGKIPKVALIACMRKMIVVINTMIKNQESWRGEMA

SEQ ID NO: 401589 - protein, 365 aa, unidentified
MDTIYIGVDFHARQQTICYLKTETGELVTCELQHQDKPKVRAFYAEFRGHVIVGLEASGYSPWFERLLEELGCEVWLGHATEIRRRARWRQKNDRRDAELILDLMLHDEFPRLHRPAVQSREVLRMLRYRQKLIKIRTMSKNSLQALALQAGLARGSRLFTKDGQQQLGAAEMSPVMHWQREHWLQLMQPLNQQLLETMVWCKTQSKGDVCITRLRTHPGIGLLTSLCLVHTLQPVSRFRNSRKVAAYAGFDPVERSSAERKCFLGISKAGSRVLRYLLVEAAHTAIRKDEDLKRFYQRLAERRGRPKAKVAAARKLLIRAYIMLRDEIDYAEFRRRAVAARLARRGQRPNVPEVLIGQPASPAQ

SEQ ID NO: 401590 - protein, 336 aa, unidentified
MEITTVGLDLAKHVFQVHGVDAAGNVVLRRRLRRAQVHAFFAGLKPCLVGMEACATAHFWARQLRSLGHEVRLMPAQYVKAYLRRGKNDAADAAAICEAVTRPSMRFVPVKGEAQQAALMLHRVRDLLVRQRTQLINAIRGHPAEFGIVEAQGPWNVARLLAGMDEAAGLPELARELVRVLAGQLEEAEGRIAEVDARILARHKADAVSRRLATIPGIGPLAATAIAATVPDPAAFRGGREFAAWLGLVPRQNSTGGKARLGRISRQGDAYIRRLLVIGAQSVLRCSKAARSDPWLQRLLAKRPRLVVAVALANKTARIAWAVMARGTAYGTAAAA

SEQ ID NO: 401591 - protein, 386 aa, unidentified
MHQATTLPAPQRTCSRGDCATLFVSLELSRSTWVATALAPGSNKMSKYTLVGGDGHKLLDLLARLKSRAEQRIAAPVKVVTIHEVGLDGFWIHRLLEANGVESHVVDPASIAVPRRHRRAKTDTIDGETLLRTLMAWQRGEPRVCAMTVPPSPSEEDRRRISRERAKLLQERVRHTNRIRGLLFGQGITNYNPLHKNRRKNLEQLRTGDGRSVPAHLKSAILREIDRLELVLRQISEVETERDEMLQLAQPSSPAALLMRLKGIGAEFATVLYLEGLFRRFDNRRQLAAYAGLTPSPWKSGSIDQEQGISKAGNPRLRTTMVELAWMWVRYQPASALSCWFRQRVGSKRGRIRRISIVALARKLLIALARYLSHGEIPAGAVMNAG

SEQ ID NO: 401592 - protein, 351 aa, unidentified
MNYMGIDHHKQYSHMTLMDEKGKILKAGRVMNFRSEVEEFLEGAGDKVEAVIEAGFSSYVMVDLLETLGVGIKIANPSEVKAIAKAKIKTDKRDSKILAHLLRADLIPEVYRRSGENQRAQRVLRQRAFFVESLTRVKNRIHALIANQREEVLRDLNKVKDIFSKRGMELLKRIELPSTDKQLLEALLKTYRHLEEMKKESNDLVKSLYKEMPEAQLIDTVPGFGTFLSVLTAIEIGDIGRFDSASNLNSYAGVIPSTHSTGNKTYHGKLIKGGNRWLRWAAVEAVIPATRKDFELKVFYDKRARRKNANVAKVATAKRLLTIIYKILKEKRCYEPYKREWEEKKKESAAL

SEQ ID NO: 401593 - protein, 309 aa, unidentified
MEDNNTYIGIDVAKNHLDVCILPLNKTKRFKNNELGILSLIEFIGDNKKIERIILEPTGGYEEFVLETLANKGYQISMVNASQIRAFARANGILAKTDKIDAKVLADYGMKLPSRLYIPLPMELKRLKKYVTRRRQLLHMLVEEKNRLKKERDGEIIKLIEETLKFLNVQKEFLEQRIIKGIEQNEKLKRMKEILTSLKGIGDITAAILMTEVPELGKLGNNQISKLIGVAPLNRESGMMRGKSKIYGGRGYVRDSLYLAALPAIRFEPKLRDFYLRLKNNGKPGKLAVIAVVRKMITILNARLQLFYA

SEQ ID NO: 401594 - protein, 351 aa, unidentified
MWYVGVDQHKRFSQVAVMDDRGEVVDERKLYHDNPEELRTYFRQWSDGVAILEATRDWDWLYDLLEDQFTAVKMSNPGRTRIIAEARVKTDKVDARVLAHLARTGFLPEAYTPSSDIRDAREMHRYRIWLLRIQTQVKNRIHTILDRLGIRHPWTDLFGKRGRAFLEELSLRPPYDLEMKGLLRVLDGLAAEANSAMKAIRKTLREAPEGALLMTVPGIGEVLAYLILYEVGEISRFPSQKKFAAYCCLVPSTRQSAEHTYHGRTGRNGNLYLKWAFVEAAHKAIKGDPYLGAWYERLCRKRGKGKAIVAVARKLAVAVYHMLRKGVEYRLHHKGDFGSGKPAETTGCRQR

SEQ ID NO: 401595 - protein, 328 aa, unidentified
MFFIGIDVSKAKLDCSLLLDVASNKRRAKVVANSKTGIVDLLAWCTKQQVPVHELHAIMEGTGVYHEQAALALSDAGATVSIVNPAQVKDFGRSLGVRTKTDGVDSFVLARYGALLKPKSWTPPAQEARTLQALLSRREAIAQDLQRERNRLEKADAIDTPPPIRQSINDSIDFLEKQLAKLQQDIDNHINNHPNLKDDRDLLISIPAVGPQVSNHLLSVMHNHDFQSAEQLAAYLGLVPVERQSGTSVLGRPRLSKAGPARIRAVLYMAAIVATQHNPHLKALYRRLQERGKSKMSALGAVMRKLAHLCFGVLKTRQPYQADYGIST

SEQ ID NO: 401596 - protein, 316 aa, unidentified
MGNESVFLGVDISKGRLDVAVLPQGESFGVENTPEGLEELVSRLKGFEPESVVMEATGGLEWPVAGALSAGGLNVAVVNPRQVRDFARATGRLAKTDKLDAFVLARFAEAVKPEARPLKDEAAQELAAVMLRRRQLVGMLTAERNRLRIMPKKVRRSIKAHITWLERRIEEVDKDLGDLIKASPMWREKEKLLKSAPGVGSTVARSLLAFLPELGLLNRRQIAALVGVAPFNRDSGQFKGLRRCWGGRASVRTPLYMAALTAIRCNSFFKAFYGRLVAAGKTRKLAITACMRKLITILNAMIRDNSPWSTPQIINP

SEQ ID NO: 401597 - protein, 311 aa, unidentified
MKKNSTVQQSPKRATARKAGPITIGMDLGDKTSRYCVLGEQGEIVQEGSVGTTKKALAQKFGALRRCRMAMEVGTHSPWVSRLLKSLGHEVIVANARQVKLISQSSRKDDRLDAQTLARLARVDPQLLRHPAPQRRSASALDGDSGASGTVEMRSSLVNTARGLAKSVGERLPKCDTDQMGVERMEGLPAELQQALQPLLEQIESVTEKIKESDGRIEQIARTKYPETALLKQVSGVGTLIALTFVLTIEDRDRFQKSRDVGCYVGLRPKRSESGESQPQLRITKEGDVYLRRCWCKEHITFSVTGGRTRI

SEQ ID NO: 401598 - protein, 413 aa, unidentified
MADNLKNSSVKVMIAIDIAKTSHDAVILWPSGRTKTFKLPNTLVGYQNLINAAEAPAEDILGAFEPTADFHRNIAYWLRSQGALCHMVSSLACARAREMLFKSWDKNDKKDARVIMYLMQQGMMQPFYDPLVNEMLDIQELANTYYQISLARSRCQHSLFNHYLTLFFSEMERFFNSSRAVWFCRFLLKSPTPLSITRYKKTTFVQRAWEVVGRKVAKQRFLEEMYEVAEQSIALPVPLNSPAIATFKLQIRRYLTLTEQRQQIEEAADQLISHRDDYQRLRTLPGIGPVIALVIIAESGDLTRFCHYRQYLSFCGFNLSASQSGKQQGHYRLSKRGNARLRYAFWLAATVAIRQRENTFRQKYERYIRATPDDPDIKRKARVAVAVKLARVAHALIKTGSDYRGYYEFGCET

SEQ ID NO: 401599 - protein, 344 aa, unidentified
MEQYAGIDVSLEFSSVCVVDAAGKIIREARVVSEPASLIAWFAALGMDVARIGLEAGPLSQWLYAEMKTAGLAVELLETRHVRDAFKAMPVKTDRKDARGIAQLMRLGWFRPVHCKSLPAQEVRALLTTRKLLQGKRHDIEMSIRGVLRGFGLKVGPTTPKTFEHRIRELVENHGTLSLVADALLKARAALGLEFRAIEKRLLTIARADKRVRRLMTTPGVGALVALTFSAAIDDPDRFRSSRMVGAHFGLTPRKYQSGETDVTGRISKIGDHEVRVVLYEAANVMLTRPVKGSTLKRWALAVAKRAGMRKAKVALARKLAVVLHQMMRSGTAFSPTGQPVAAV

SEQ ID NO: 401600 - protein, 355 aa, unidentified
MLGPKNRAQKMTCQPNLREPRTIKWDQDPEFNKYEDQMNKKNLTQVFVGVDVSKKFLDIHINPENSSFRIENSNLGINQLIKKLSPYNVKQVVCESSGGYESLMLKKMYKAGISVWRANPVLIKGFIVSEGIHFKTDAHDAKMIALFASKKDPKYIPIVSFSKENELFVSFVKHYEQITESISNEKKRLKQENISFGKALIKSRIRLMERQLKKIREKIDQIIENNNELKKSFSILESMPGVGWVTATTLLALVPELGKLNQKQIAALIGVAPYTKKSGKYVGAAKISGGRTIPRRKLYMAALTASRYNPKIKAFYQRLIGKGKKAKVAIVAAMRKIIIILNFMIQRGQMWKYNI

SEQ ID NO: 401601 - protein, 409 aa, unidentified
MKKLYVGVDVHLKQHIVSIVPITMFQDNKTVWKKTKSITIGNNRHDFEYLDLLLKSQDISAEQVSIAVDHTGGHYSEPISYFLKSKGYEVYYLGSASVKAAKEKLLGEENKTDKIDSATLAYLLYLRDFYKVSFHISAMSVNFESQSSLLRLILLQSRYYSKLGTQTTNRLRQYVHAVFPEGEERYFNQLIKILPHHPTPAEIISDPDAFNKSRIPLNSRKILRELAKKTVGVPGETYKYIIQDLALLRVSNEEKMVAIDDTIRALVIKHPYASILMSFPGVKEKSAAIIISTVKDINNWPTKNKFKKGLGVYGTIRETGEKHVNFRRGLSGDRMCRQGLYMVCFTAIRLKSNNDFHDFYERQVRKGKPRRKALVATMGKLAEIMYHCLKFNEPYKYQSLYHVKPKVED

SEQ ID NO: 401602 - protein, 403 aa, unidentified
MEHVIIGVDPHKLSATIEVVDEREQMLGSGRFSTDRAGYAAMRKYVGAWADRVWAVEGSNGAGRPLAQRLLEDGEQVLDVPAKLAARVRLFDTGHNRKTDARDAHSIAMVAVRTKTLRVLQLDGELEALRMLTDRREALTRRRVQTVDRLQALLADLLPGQAKRDITTGQAKAMLASVRPRDVAGKTRRRIAAEELAELIGVEAKIKKSTAELKAIVLARGSRLMDLHGVGPVVAARVLADVGDVTRFADRNRFASWTGTAPLDASSGEQNRHRLSRAGNRRMNHMIHIAAISQIRLDTDGRAYYRRKRAEGKKSLEAIRCLKRRISDAIYRQLLEDAQAAARQDLGTGPGGHCGAAQESGAVDSHPHIDTSDQPLPGPAEPTLQPADRRRKRATPQTLPAAS

SEQ ID NO: 401603 - protein, 435 aa, unidentified
MRVFVLLYRHHLICNYSQKPVRHSATARRQYVVTPNLHNVDLPVYLNCNKLVTGITIIQKEATTMTSIIYVGMDVHTTNYTLSCYSMEEDRSFSTVTMAPDYMNIVKYLEQVELNIGVDCHFLCGYEAGSFGYSLYHQLTGQNIDCVILAPSTMATTRKKKGIKTDKRDAINIAKCLAYKTYSPVYVLSGEDGAVKEYIRMRNDAKDMLKKIKQQTLAFCTRHGKRFIEGRNYWTLKHLAWLKELTFEDAILQETLQEYLTLYHQLVDKIEMFDNRIAELARTESYEEKVKKLTCFIGIKEHTALAMIVETGDFKRFPTAQHYASYLGLVPGEDSSGDSVQRTGITKAGNSHIRKLLVESAQCYSRGRIGAKSKALKSRQKGNDPSVIAYADKANERLRRKCYKISFRSKHNIAVTAVARELACFAWGMMTGNIA

SEQ ID NO: 401604 - protein, 344 aa, unidentified
MRTDISDHKSFTIPSKCEVLYNYVEKNFGDHEVSLVYEAGCCGFGASRYFLNLGWNVLVVNPSDVPRMDKQNYQKSDSIDCRNLAKQLHAGQLKSIYIPDEPQDLLKSLLRQRAETSRQLRCIKSSIKSLLLYHAIVIPIEHDNSTWTKAFLDWLTQIKWSFATGKLCLESKLRMYAVIHKEYLQLANELRSYCRKHNKKDYYLLKSIPGVGGYLASAILAEIGDLRRFNNESSFASYVGIIPTMRNSGGTEIIQGVTPRCRGLLRSYIIESSWVALRMDPSMQSYYRKHTGKNSKSIIIKIARKLLNRMLSVIKTETPYQINYSLNNGIETIVKSKQIKVSAK

SEQ ID NO: 401605 - protein, 551 aa, unidentified
MTRYVGMDLGISTKHKAVVMDGTERRGKPFAVEVSRDGFEELLTRAGEGSDGPATIVMEPTGLAWVPVAAYLSAAGHQVHLAKPQKVSHLRKFLKQHTKSDVIDAEANARLPQVDPDGVHKLELPTPDQMALRRLVKRRERMAQEGADQKRRVHALMVMVNPPLMAALGDSAFSRPARSFYRKYADPEPVAKMGREKLRQFWDKHNRGPVDEKLIDRIVTSCAITTDLYAELRRNQKLPFEYADIQDELRAELDWMEQAEQQVERLNESIKSVYDRCDPDHTLEQIRGIGTIIAAAIEALVANVLRFHNGRQFVSYSGLCPRKRQSGQSDPPLPITKCGQRLLKKYFYLAADVARHWDAEFAAYYARRYARGDHHNLIMIALARKMALRVYALLKRRDLARHAGSPQSKASFVLRDPATGNTVDKTQARALVVENYTRAAANPERNKRERARRSVKAQGTGLAKEEWPSKDATSQHAVPDSQITHTPDGGNNSAFVRAVEHGTTRGGGWFSIADILSQWAKVVSVEKPVDSQRKNCEQTSLPSLKFAKKRS

SEQ ID NO: 401606 - protein, 533 aa, unidentified
MERFVGVDLGLRTRHKAVVFDGVVRRGKPFAVEVSQAGFDRLLERATEDTQQRVTFVFEPTGMAWLPVAAYVSAAGHRALLAKTQKVSDLRKFFKKHTKSDVIDAEALARLPQIDPEGVHPAPLPGARQNALRQLVQRRDRLTDEVAATKKRIQSLLVAVNPPLIGALGKKKFGRAACAFLRSYCDPQKVIRRGRQWLRAFWKKHGRGHTACESRADKVYEASQQCVALYRSLRQAGQLPFDYEAMQAEIRWMLDWLETNQREADELERQIAQRYRELDPDQTLKQLAGIGDIIAAGIEAFVGHALRFPNERAFVCYCGISPRKKQTGNRDQRMPIMKTGQRLLKKYLYLAADIARQLDPDFASYYARRYAQGDHHNRILVALARKMAVRVFSLLKRRELAAQSAAAGREKSSVRYELRDADGQVLDRKKARALILRKYTRARVAPERHAKDRARKDFSPPSSEAGKLSGRHKDATTSIAEKTSHSRLAIRACSGNEENEPTADALHRANRPVQVGEIVRTVIRQLRQTEDDH

SEQ ID NO: 401607 - protein, 412 aa, unidentified
MDRFVERCAGLDVHKDSVAATVHVPGGGRQRLQETRTFAATTRGLVTLADWLESHGVTLVGMESTGCYWKPVYYLLEERFECWLLNAQHLRNVPGRKTDVQDSAWICQLVEHGLVRASFVPPRPIRELRDLTRYRKAQIEERSREVQRLDKVLQHAGIKLSSVASETLGVSVRRMLDALVAGTHDPEVLAELARGRLRRKLPELREALAGRFRSEHHGLLVSQILAHIDYLGETIAFLSERVEQLIAPFSRERELLMTIPGVARLGAEVLIAEIGVDMSVFPSDAHLASWAGQCPGSHESAGKRRSGKPRKGSRWLQTTLNESAKAAARSKGTHLSAKYQRLRGRRGPGKATGALRHSILIAAYHILERKVPYQDLGADYFDQRRSLEQRTKRLVRQLQQLGHTVTLEPLSA

SEQ ID NO: 401608 - protein, 456 aa, unidentified
MSNYYLGIDVSKGYADFILLDETKRIVEAGFQLDDTFEGHHQLFDFLTKFFTDHPDSSVYAAVESTGGYENNWFGTLHKFQETFPLKVARLNPCGVNHNSKAGLDRIITDKIAAKNVAQYLIAHPEKVSYHAVDYYYSHRRKWKFIKSLVKEKTKLFNQLEKMLYETNPDILTYCKDGVSQWVLKLLQVFPTATALAAASIDTVAQIPYLSTTKASKLIERAKVSIAAITDDLAADTIMTIATEILRLEQLIDQQVKLLTEYCPLPEVTLLKTFPSLGDFSAIGLLIEIGAVERFGSVKQLASFFGLHPVYKTSGDGTRCVHMSKQGRKEPRAILFMVTMTAIRHNPLIKEIYLHHLCKGKAKMDAIGICMHKILRIVYGMLKNKQPFDPEIDRKNRDKQLQSKPAIQDDRRRRFQKNDENAPISRRQNRKRNEKKIIQTEHIILNQVKFPPLSLN

SEQ ID NO: 401609 - protein, 342 aa, unidentified
MEQVSVVGLDLAKSVFQVHGVNAQGEAVLRRRLTRGQLLKLFERLPPCLVGMEACASAHHWARELAALGHEVKLMPPQYVKPYVKRGKNDAADAEAICEAVTRPTMRFVGAKSPDQQATMMLHRVRKILTRQRTQLSNALRAHMAEFGITAAIGRGGLDRLIAVIADQDDARLPDEARACLAVLSTQLEMVKEQILDNDRRILADARRTEAGRRLMKVPGIGPLLASAIVACVPDPSTFGGGRSLSAWIGLTPRQNSSGGKERLGSITKAGNTYLRELLVVGAMAVVRRAKQGSAKRPWVAQLLTRKRPKVAAVALANKNVRIIWAMMTTGEPYREPELAAA

SEQ ID NO: 401610 - protein, 447 aa, unidentified
MRFIGLDVHRDFCEVAICEEGRVRSGPRIPTSPETLARFAQTLGPGDEVALECTGNALAIARMLEPHVARVVIAHAKAVRAISWAKVKNDRIDARTLATLLATGFLPGVWTPDERTRLLRRLVGRRAQLLKHRTSAKNAILATLQRNLVGRAPATDVFGRRGRTWLSSVELPRDEQDTVDACLRQIDFLDAEISRLDQALASEVVDSPEERRLMTIPGVNVTTAATFLSAIGDIDRFPTPRHLASYLGLTPRVRQSGIAEPRLGHISKEGSARARHVLVEAAWAALKTPGPMRAFGERVAARRGRNVAAVAVARKLAVLCWHLLSTENDYAFARPSLTAAKLRRMELVAGAESRRGWRGPGATFASKDQHARERAIVIQAETAYRRLVADRTGRRRGAGAITGARISSALQGQAARQDQAPGPALQLEAARTLFHPAKEVAAGPDNT

SEQ ID NO: 401611 - protein, 401 aa, unidentified
MVSDFKKGRYNLMKIFVGIDIAKLNHFAAAISSDGEILIEPFKFTNDADGFQLLVSKLESFDKNSIIIGLESTAHYGDNLVRYLVAEFYQVCVLNPIKTCQMRKNNVRKTKTDKVDTFVIAKTLMMQDDLRFITFFDLDMMDLKALGRFRQKTIKQRTRLKIQLTTYVDQVFPEIQYFFKSGLHQNAVYALLKEAPSPKEIASMHMTHLANLLKVNSHGHFTKEQAKELRVLAQKSVGANDSAISIQITQTIQQIELLDSQLEKIEAEMTDIMKFNDSVIMTIPGIGYINGGMILGEIGDIHRFSNPNKLLAFAGLDPSVYQSGNFQAKTTRMSKRGSRVLRYALVNAAWNVVRNNATFKAYYDAKRAEGRSHYNALGHCAGKLVRVIWKMLTDNVEFNLK

SEQ ID NO: 401612 - protein, 433 aa, unidentified
MINPISVSSPPSNVAAWVGLDWADQQHVVCLYDVGSGQTELSTLEQKPEALQSWLGQLRQRFGGRPVAVVLEQARGAVIYALLSVDFLVLYPVNPQSLASYRKAYATSGAKSDPTDAALLMEMVRNSPQRFRPWKPDDADTRSLQLLTQNRRQLVNQCTAFTNQLTGLLKSYYPQALELAGELDSLQACDFLEKWPTLEALQQARPAQIRKLYLDHGKPRSELLEQRLEQIGRARPLTTDPAAVLSGTMMVRALIELIRPLRATLERFDQQIAALFRKHPDRLLFESFPGAGAVLAPRLVAAFGTDRDRFQSAQQIQQLSGIAPVTEQSGKQRWVHWRWACSKFLRQSFHEFADHSRKWCSWAKALHQRLRRSGKGHHAALRVLAFKWIRILFHCWKTRTVYDEQIYLKSLEKRNPTLWAEAQALPPRKKKAA

SEQ ID NO: 401613 - protein, 357 aa, unidentified
MAPAKIKSFQRVANRMPDLDATPSSGRQRIGIDVSKGKLDVAVLDERDKIKSHVFANDSKGHAALITWLEQRGCGAQLAQVCLEATGCYSESIATALVDAGWQVSVVNPARVKGFAQSELMRNKTDRADAALLARFGQALHPEPWIAPPVEVRQLRALVDRLQSLKEMHQQEVNRLEGATNRSGTRESIESHLQWLQQSIQQLERQINDHIDGHPGLRDDAKLISSIPGVGKATAAKVIAYLGDVRRFKNAKALAAFIGVTPRLKLSGSSVRGRSMISRSGHAEMRRSLYMPALVALKHNPIIKTFGVRLRATGLAPKAVVAASMHKLVHLIYGILKSGTPFTANFMVASLDIQDGI

SEQ ID NO: 401614 - protein, 440 aa, unidentified
MKEKKNAFPVIQPEAAGIDISSKEHYVAVNPERDIKPVRCFGAFTEDLHAIAQWLKQCGASTVAMEATGIYWVSLFLVLEDAGFEVFLVNARHVKNVRGKKTDMSDAEWIRQLHSCGLLTASFQPDEFTRTLRTYMRHRKNLLEMAATHIRMMQKAMEQMNLKLQHVIADITGKSGQAIIEAILLGERDPEKLVSLLDGRIKANKDDVKRSLQGVWREENIFELRQSFEMYHVYRSKILACDKRIKELLIKKADHQSISDETKKEIVKSNKNNLHFDAKVMLQHITGTDLTEVFGINDSTAVEIISETGLDMNKWPTAKHFTAWLNLAPNNKISGGKILSTRIPKKKNRAGQAFKLAAYAVQRSKNWLAMFFHRIKAKAGVKKAITATARKIAVIFYHMLKEKIMFTPIAIETYQESFRQRQIKRIERQAKSFGLQLVQQ

SEQ ID NO: 401615 - protein, 464 aa, unidentified
MPLRLGIDIACRAAHQVSLADEQGRFIWSGRRFRTTPQDLDRLWAMLPEGTELADLLVVMEPTRNAWVPLAAWFRRRGASVVLVPPERSADLRRYYAKHTKSDRLDSQLLARLPMLHPDGLYAEQGLGPGDALKRAAKLHSTLTHRRSQSLARLDALLEILGPAWHAAIGADLANRTPLKFLAAGYADPHVVKRLGRTRLARFCYRHSRGAWGEPHADALLAAASETLELWSGGELDYPDLAEDIAIEARLALQLTEELKDLDERTTLLLREADPSGILTSAPGVATITAAAILGRLGDPNRFTSLAGARAFTGLVPSLDASGLNGRHGGPTKRGDAVLREALFMAAGQARRIDPTLAAKYHRLMIEAGKHHNSALCHIATTLLTRIIACWRAGQPYQLRDVDGTAVTIDQARAIIAERYTIPKDARARRRTTDPAGTDRRNKRSPSAPSTGPFTTHARRAGAA

SEQ ID NO: 401616 - protein, 338 aa, unidentified
MKVYAGIDLHSTNNYIGIIDEQDHRLYQKRLPNNLENILMALEPFKKSLEGVVVESTYNWYWMVDGLQEDGYKVHLANPSAIKQYEGLKHTDDKWDSFWLAHMKRLNILPEGYIYPKEERPVRDSLRRRLLYVRHRTSHILSLQSAITRNLGYKMSGRDIKKLNESDADKLFNEPFLILSAANSISTIHFLGKKIKEIEKAVKSHVHLKPEFKYLRTMPGIGDILGLTIMLEVGDISRFPNVGKYSSYCRCVKSERFSNKKKKGEGNRKNGNKYLAWAYVEAANFANIHYPEVQIFYKRKKAKRNGVVAIKALSNKLARASYYVMKDKVPYDASKLFK

SEQ ID NO: 401617 - protein, 405 aa, unidentified
MEEGRFAGVDWASEEHAVCVNDADGRIVEGRRYRHDERGIKALCARLVELGVVLVAVERPDGLLIERPLDAGLRVIAIHPNQVAAMRPRFSAAGGKSDGFDSFVLAELARTDSHRFRVLVPDTDATKALRALSRAREDLVGHRVALANELRAQLECFWPGAAQVFAQIDSPIALAFLKRYPSPGDAHGLGEQRIARFLARHHYCGRKPASELLGRLRGAAEGRAATLESEARRQVVLALVAALEPIVARIAELTSEIRGALHDHVDGPTFRSLFIDPKSAVCAAAMLAEIGDCRERYPTKATLAADGGQAPVAVESGKSKRARFRWACDHRLRAAICTLADTSRHHNPWATDIYDRARARGCSHQHAIRILGRAWCGIIWRIWHDHDIYDPARHTARQHLTAATT

SEQ ID NO: 401618 - protein, 338 aa, unidentified
MKVKRQNVGIDVSKNSLDSCLVFFNEDFEIKIKASKKFQNNTSGFSELLNWANRKKDGNVKISFTMEPTGVYYEGLAYYLFEKNQAVHVVLPNRAKKYADSLQEKAKTDKLDAKSLGRLGAERKLDKWHVGSSVYRKLKALTRERNALIKERTVFQNQLHALNHSADPFKKSVTRLKQMIRFVNKQIEAIEKDCENIVNKDDFVKAKVDKVMTIPGVGFITAIVVIAETHGFALITSIKQLVSYAGLDIRIRESGKWKGKSKITKKGNVQIRKALYFPSYTSIKYSETNSKFYKRLFEKKGLSMVAATAVQRKLLSLIYTLWKNDTTYVENYQQNIAA

SEQ ID NO: 401619 - protein, 338 aa, unidentified
MDNFIGLDISKSTVSVFIPQGELEIEIANTAKGFIQLFSKLKKRYKKEYDSLVFVYEPTSSYSSTLELFCAHKQIRVFKINPKASHNFAKALSIRTKTDKVDARMLCQAGMLAKEEEIHIPVVDVIVEQINDLMSYYQLLVKQRVQTSNHLEKLQHKESITTLKKALEKEIFAFKQKEQHTINEIKRLIMENSMLALKYQSIQTIKGLGDIATIALIHLFLKYPNANQKQIISLAGLDPIERTSGTSVRGKTRISKAGNKLYRRSLFMGTMVAIRFNEEMKCFYDRLKEKGKHTTVAQIAVMKKLIIIARALFHSNQGYSSEIYQAHCGIVAQKSNIA

SEQ ID NO: 401620 - protein, 412 aa, unidentified
MQDILTCAMGLDVHRDIIVACLVKGAVDAEPEAETRTFSTLIPEMQKLRDWVIESECRNIAMESTGIYWQPIYEMLESCFDGEISILVVNARHMKNVPGRKTDMKDAQWIATLLRAGLLKGSFIPDKAFRELRHLTRYRKSVVHDITAQKNRIDKFLQSSGFRFTAFLSDTFGASGRNIIRHLIEHGSIDREALDKCLKTKTRNRIDEILVALNGSLSEHQRRFLNMVFRHLEDLEAHKHTVEDEITEEVLKHTDTLNLLCSIPGIDVTAAAAIIAEIGTDMSSFPDSQHICSWAGLSPGNNESAGKRKSVHINKGNPYLKSMLCEVAWIMASHRKLYLSGWYWKVKQRKVAKRATIALARKILSIIYTMLKTGTPYNEECFEQRRLRCERKRANRLVNELQKLGYVVVAPD

SEQ ID NO: 401621 - protein, 418 aa, unidentified
MTKKKDSTLIQIVHPICCGLDVHKDKISACLITVDDNGAEEYELREFTSFTHDLQKMKKWLIENNCPILAMESTGVYWHPVYNTVEDAMEVTLVNARHIKNVPGRKTDIADSKWLAGLLRHGLVKSSFIPPEKVREWRELSRLRKTYTESLADYKRRVHKLFITANIKIDSVVSDLFGMTGLNLIELLCNNSELTLEKVQECTKGRLKKKVPELYSSLHGYFKDHHRFQLVGMMETINMFQKRIEQINTRLGSLTREHRDLLERLDEMPGIDKKSAQSILGEVGITLDDFRSMSAFVSWAGLCPGNNESAGKRKNGRNAVRNHPFKTILVQVAWAAIKKKGSYYKTKYYKLKARRGAKKAIVAIAHRIAKAIYNIIKNGDSYKDLGEDYLSKPTKQRVLKNLMRKANELGMKLVPCEN

SEQ ID NO: 401622 - protein, 330 aa, unidentified
MKKLHIIGVDISKKTFDFHCYGHTSTPEPLSNNIKGFRQFEKWLKLKVSKEKQEVIIVMEYTGIYTYNIEHFLDERGWPYVKRPALDIKRSAGIKRGKTDSADARMISKYGWMQQDVLKPMKPLSDNLVEMQQLMSFREKLVTDRAGHVARLKELQQQMGERISDQISKSANFIIEILTVEILEVEKAIKECVAKDENLQKNYNLMTSISGIGFVLAVTFLITTENFTRFDDHRKFACYCGVAPFMYTSGTSIRGKTRVSQLANKKIKSLLTMAAFVAIKYDPDLKAKYEQKLVGGKAKMSAINIIRVKLIERIFTVIDRQTPYILRAAA

SEQ ID NO: 401623 - protein, 350 aa, unidentified
MNHKCKIIIGIDTHKATHVAVALDLQGTRLAALSIPTNPKGYLELERWSQSLGEVHAFGIEGTGSYGAGLSRSLLAQGHNVVEVTRPNRQLRYTQGKTDTLDAEGAARSVLSGQATARPKTQTGISEMIRHLKVARDTAVKSRSQAMVTLKTLIINAPADLRDVLDKIRGKVALIRHIAAFRPGEINNTMASAKAAMRALARRWLWLHEEIITHDKELERLVTERAPDLMTSHGIATLTVAEMLIVVGDDPTRIRSEAAFAKLCGVCPIPASSGKTHRFRLNRGGNRQANAALYRVAIVRMRSHEPTLAYVRKRTKDGKSKSEIIRCLKRYIVREIYSQLCVPKSAQIAA

SEQ ID NO: 401624 - protein, 437 aa, unidentified
MDRGLARERQSRMRREPVMGETITWVGIDAHKKTLVVAIRYPGKDDAEELEIANDERSIRKLVHKLERDARGREVRICYEAGTCGYTLQRRLESSGRVVCEVIAPSLIPRKPGERIKTDRRDARKLAELYAAGVLTAVKPPTPEQEAVRDLCRCREDVRADLGRCRHRLVKMLVRRGHVFNSTSRLWSEAHRRWMAGIAFDDEVDRVVFAEYKLAIEQAERRLRAMDSEIEKAARLPLYRDHVAWLRCFRGIDTTIAMIFVAELHGIERFESPRALAAYLGLVPSLYASGESARRGAITKTGNGHIRRALVQACWQYRHRAHVGPKLRERQKGQPERVLTIADEAQRRLAGRYRRLAARGKHHNKIVIAIARELVGFMWAALRDDHELARHGARNSARLEGPTRAPRRAQPETATRTTLRGPKQASDARHERRKRAS

SEQ ID NO: 401625 - protein, 479 aa, unidentified
MKKIGFLAADVSKGYADFTLWNHEGKCLEPAFKLMDNKEGHLQIRQLVKDFMKRYSINELYAGMESTGGYENNWFVLFKSMSTQGVSRVIRINPKAVKAMGTARMVRTVTDAVSADNIAQYMFSFANEAKVVYNQDNGFKTVRHVGAWIRNINKQITQTSNHLEKLVYQTFPELLVYCRHGFPVWLLNLLQKYSLPSEVIKAAKSRLAKLDFITEEKAAAIISKAKNTVAMQEADELLSATIKGMVTLLNGNRQQIVLQKKALVNQFKEAHEVQLLDSIPGIAEETAILLMIDIESIDNYSCAKQLCAQFGMHPTFKQSGDGTWAARLSKMGRSSVRGLLYMPALAAIRSNEYFKTLYAQQRAKGKKHRQAICVVMHKMLCIVFGVLKSKTPFNIEIHSKNQQQGEQKQKEAEIKQQQHNKEKKTKRERYMSINELEAPLSRKQSKRIKKELPVPIDKNQHVRDLEALNKDKQIPCLSS

SEQ ID NO: 401626 - protein, 338 aa, unidentified
MKLYCGVDLHSTNSYLAVLDEQLQAVLDRRVPNRLDAVLEALEPFREQIQGIAVESTFNWYWLVDGLMEAGYRVQLVNTSAVRQYEGLKYVDDRHDARWLARLLHLGILPTGYIYPKSERALRDLLRRRAFLVRQRTASLLSVKNLFSRNTGIQVPANELKRLTPEQVVEQFSDPHLALAITSSLAVARVIKEEIGGIEKAVLKEAKLRPEFELLESIPGIGQTLALTIMYEAGSMTRFADAGHFCSYCRCVPSRHLSNGKVKGTGNVRNGNSYLSWAFTEAAHFAIRFEPLAKRFYERKKARNNELVALRTISHKLARAAFYVLHDRVPFRPAQAFG

SEQ ID NO: 401627 - protein, 370 aa, unidentified
MADERRRCGESSEEVVGEVVLGVDTHLDAHVAVALDGLGRRLGELAAPTTKKGYEDLVSWAEGFGPVRCVGVEGTSSYGAGLARHLRSAGIGVFEIERPKRRHLRRKGKSDPRDAESAARAVLAGQTAGEPKSGDGHVEMIRVLRAARRSAVKARTQAANQLQGIRVTAPEELRHRLRGLSTKGLVATAARFRPGGEPCDVETATKLALRSVARRYRALSVEVSELDAQLARLVAEAAPELVSLPAIGTDHAATLLIVAGDNPERLGSEASFASLCGVSPVEASSGKVVRHRLNRGGNRDANRALYLICIVRMRIDERTRHYVARRTAEGKSKKEIIRCLKRYVAREVYRVLMPQVAFADLSVDGAASSP

SEQ ID NO: 401628 - protein, 350 aa, unidentified
MLIIGCDLHTRYQQIAMLDKETGEVVEHRLEHESGETRAFYASLPCGAVVGIEATTPAHWFERMLTEFHHELWVGDAAQIRATSVRRQKHDPRDAWHLMDLMASGRFPRIWTPSPRERDLRQLLAHRDKLVRIRTAVKNQLHALALSQGLCRGHRLWSARGQAELQSLTLLPWAGRRRQDLRELLTPLDTTIAELDKAVAREAEAREEVKLLMTHPGVGPVVGLAFVLTLGAIERFPRSKQVVSYLGLNPREHSSGGRQRLGRISKQGNVMMRWLLVEAAQTAARFDPELHRRYHRLKFRRGSSLAKVAIARQLAVRLYWMLRNQKGYAQLVRMQGSPGSGVVDPGPSTN

SEQ ID NO: 401629 - protein, 340 aa, unidentified
MEHIGIDLGSKDSQVCVRSADGEIVGEWRWRTDKLVAILQGRPAARVILETCTEAFRIAALAQRAGHDVRVVAATLVRSLGVRHRGLKNDVRDARVLSEASCRMDLPSVHIPTAISQEVKALCVSREALIKTRTQLIGRVRGYVRARLGRVLRATPESLPKRVRQALLEDPEGLPAHLERVLVALEAVSQQIVEADTELRTLAEADERMTRLMIVPGVGPVTAARFVAAIDDVGRFPTAASVASYLGLVPGENTTGFRTKRTRLTRAGAPQVRWALGQAAWSLYIRRKTDPMVQWATQIADRRGPQVAIMALARKLAHVLYALWKHEQSYDPSRAARIAA

SEQ ID NO: 401630 - protein, 315 aa, unidentified
MRNCIGVDISKRSFDVYVLETNKAFQMQNNSEGITRCAKLCHEILPELIVMEATGGYEMLLASHLQAEGFPVAIVNPRRIRDFAKALGQMAKTDKIDAKIIAKFAATLEPMPHEFIDDNSRKLKALISRRKQLLQMHTAEVNRREHALEKEIKQSIKAIITAIETQLQNVDKEIDDAIKEAPELKQKTEFLQSVPGIGKTTAHMLVAELPELGILNRRQIAALVGVAPINRDSGVFRGKRMTGGGRKQVRTKLYMPTLVATQFNPVIKKYYRNLVDERGKCKMVALTAATRKLLCIMNTMLKNSQYWQPNLTENA

SEQ ID NO: 401631 - protein, 335 aa, unidentified
MEITTIGLDLAKHVFQVHGIALDGSVVLKKRLRRGQVHAFFASLKPCRVGMEACATAHFSARQLRQLGHDVRLMPAQYVKAYLKRGKNDAADAAAICEAVTRPSMRFVPIKSEDQQAALMLHRARDLFVRQRTQLINAVRGHLAEFGVIAAQGPWNIPRLLAGMEEAGLPDPVPGLVRLLAGQLEEVELRIAEIDSQITAWHKASPVCQRLAAVPGIGPLVATAIVATMPDPTVFRSGREFAAWLGLVPRQNSTGGKTRLGRTSCQGNAYIRRLLVIGAQSALFCSKATKANPWIQALLAKRPRLVVAVALANKMARIAWALMARQTTYQAAAAA

SEQ ID NO: 401632 - protein, 409 aa, unidentified
MTAYRFYVGIDWATEAHRVVVLDADRRSLHDRTVRHEGVALETFAHWLAQDVAAGVASDVAVALEVPRGAVVDTLLARGFHVFALNPKQLDRFRDRYTVAGAKDDRRDAQVLASALATDQPAFRRLEPEDPLIVELRELSRLEDDLRQELGRLTNRLREQLHRYFPQLLQLVPAANEPWLWALLERAPTPSAAQHLPRATLRTLLTRHRIRRVDAETVRTLLRTPALAVAPGTVQAARRHLAVLWPRLRLVHQQQAECATLIDGLLERLAESQEHRDVPILRSVVGVGRVVAATMLAEASRLLAARDYHGLRAQAGVAPVTRQSGRRTLVAMRHACNPRLRHAAYHWGQSAARHDPVSRAHYAQLRARGHSHARALRGIVDRLLRVLIAMLTAGTLYDPTRRRVVADAA

SEQ ID NO: 401633 - protein, 321 aa, unidentified
MAKIICGVDVSSRFLDVFLKQRLQRFPNTVPGIADLLAFCQQQQVDMVAVEASGGYERRMYSQLWAAGLPVAICNARAVRDFAKSMGRLEKTDSIDAAIIAEYAAANRKLVAHPPESSEHAQLRALVTRLRQLTEVRATQLQQQGLVSDTQTLETFTRLLAFLTAEIRQLQGRIAQLLDADPLWRELDRAFRSIKGVADRTVACLMAELPEIGRLSHKAISKLVGLAPLADESGQRRGQRSIRGGRATVRHLLFIVASVVRRYHPDFAAFSQRLAAAGKAKKVILVALAHKLLIRLNAKARDVRRQQLPTASPAVTTLIPS

SEQ ID NO: 401634 - protein, 338 aa, unidentified
MKSNIGTPVSVGIDVAKATLSVSICDHDGHEQALAIRNTDTDITTKVLPYLRHYSGKVVMESTGHYHWTPALVLREAGIDIRIVNPLLAKQYTSGTIRKVKTDPADARGLARMAMVCDNLPETFTVSRARLIIRKKLATISTMSRHLQALKANLASLREGQALLNEPDTTVVMELAESIKQLGLSIKHLENECVRLTTSDTNSRGTMERLETIPGVSEFCAALATNWFDINTATSAKSFIGYAGLDVSSRESGTWRGHCRLTKRGNPFLRKRLYSAAWGAAMNYPEYRLYYDQLKASGRGHREAVVIIARKLVRTMYCLLRDGVSYDSVKVSFPNRII

SEQ ID NO: 401635 - protein, 415 aa, unidentified
MTMEMEVIVERCAFLDVHRDTVMACARTPDGAGGRSEEVAEFGTTTSHLLKLADWLAERRVTLVGMEATGVYWKPVHWVLEGSVPEVWVINARHMRNLPGRKTDVADAIWGASLLEHGLVRPSFIPPEPFRALRDLTRYRKSVIEERARESQRLHKVLEDAGVKLSSVASSVLTKSGREMIDALIGGQRDPEALAEMAKGRMRSKIPQLRDAMAGRFNEHHALLCQAMLARIDQADATVEVLGARIEELLGPYEAAVTLLVTIPGVAHRSAQVILAEIGADMSRFPTAGHLASWAGMCPGNNESAGKHRAGRTRHGSKWLRKALVEAGQAAGRTKDTYLAAQYAQIRGRRGSQRAAVAVGHSILVIAWHLLSTGEPYHDLGGDYFDKHRNNAARQRRLVAQLEAMGHRVTLEPAA

SEQ ID NO: 401636 - protein, 362 aa, unidentified
MNGDYAGRQVVGMDLHRRRSVLVRMTEDGRKLGTARIANSPAALRAELARAGENPRVVLEATYGWYWAADTLAAAGAEVHLAHPLGVKAFSYRRVKSDARDAADLADLLRMGRLPEAWITPPEVRDLRELTRYRHKLVGLRTSCKDQVHAVLAKLGIPVTCSDLFGAWGSAWLDDLRLPQPYAGKVTSLRQLTGELSTEITMLNEVISDLLAGHPGYLVIRQLPGIGPVLAAVIIAEIGDVTRFRRPGQLASWAGLTPRHHESDTTIIRGHVTKQGSRLLRWALIEAIQRTPAGFGPRDAKDAIIARRGAGARNIAKVAAARRLLTLIYYGLRDGQIRCLPEPARAGTSRRDDCSQRHCRER

SEQ ID NO: 401637 - protein, 355 aa, unidentified
MSCEKYIGMDVHQATISVAVMDSMGKVIMESILETKASTILEFLGGLRGTLSVTFEEGTSAAWLYDLLKPHVAHVLVCNPRKNAALKQGNKSDKIDARELANRLRLNDLKPVYHGETGVRMLRELARSYLTIVKDLSRVMNRVKALYRSWAIPCAGRDVYYTRHRSQWLEKIPEAGPRRRAERLYQQLDMLQYLRQQARRELLAESRKHSITAKLRQIPSLGPIRSALAVALIQTPHRFRSKRQLWKYSGLALETRISGEYVYVHGERRRSKKQISIRGLNKDHNHDLKGLFKAAATRASVIPGPFREFYQRSLAKGIKPTMVRLTLARKIAAITLTLWKKGENFDLEKLKSQAA

SEQ ID NO: 401638 - protein, 340 aa, unidentified
MKFYTKSHSHFCGIDLHARCLYVCILDASGEPCVHKKLSASPEALLKLITPYREDIVIGVECMFSWYWVADFCEDQHIPFILGHALYMRAIHGGKAKNDKIDSLKIALLMRSGMFPLAYAYPRELRGTRDLMRRRINMMRKRAELLGHVHNTVSQYNLPPISKNLRYAFNRVGVADRFADTSVQKSIAFDLALIDFYDKQLSKIEWHIKQQARAFDQHALVLLRSVPGIGLILSLVILCEIHDIARFPRVQDFASYARLVKCKRESAGKAYGTGGGKIGNAYLKWAFSEAAVLFLRGNPEAQAWLEKKANQHNKAKALTILAHKLGRAVYFMLKRKVPFE

SEQ ID NO: 401639 - protein, 358 aa, unidentified
MVNKVTEAAVVGGVDTHKDLHVAAVVDQNNKVLGTQYFSTTRQGYRQMLAWMTSFGTLKRIGVECTGTYGSGLLRYFQNAGLEVLEVTAPDRMERRKRGKSDTIDAECAAHAAFSGIRTVTPKTRDGMIESLRVLKTCRKTAISARRVALQIIHSNIISAPDELREQLRNMTRMQLIRTLGSWRPDASEYRNVTNVYRISLKSLARRYLELHDEIADLDVMIAAIVDELAPELIKRNAIGYESASQLLITAGDNPQRLRSESGFAALCGVSPVPVSSGKTNRYRLNRGGDRAANSALHIIAIGRLRTDAKTKEYVARRVAEGHTKMEAIRCLKRYISREVYTLLRNQNRRINSIPITA

SEQ ID NO: 401640 - protein, 366 aa, unidentified
MEVTTVAIDLAKNVFALCGADAKGRVVLRRELRRAQLPDFMRRLGPCVVGMEASGGAHHWARQFAAFGHEVRLISPSLVRPYRKGNKTDRDDAEAILEAVTRPTMRFVAVKSVAQQDLLALHRVRSQLVKTRTALCNQLRGLLRERGVVVRVGPTALKRALPPALADEGNELSGEMRELLGEMSQWLRALEERIASSEAKIARQFKRDERCARLAKVPGVGPLAATALVAAVGNAREFRNGRELSAFLGLVPRQHSSGGKRVLLGITKRGDRYLRTLLIHGARSALRWCTLKGDKQNRWAARIKAERGPNVAVVAMANKNARVLWALLSRGDRYRPDSAITQTVLRPGSPSPVERARGAKLRLTQN

SEQ ID NO: 401641 - protein, 332 aa, unidentified
MENFYFIGVDVSKKKLDFCVMFEGKVVHEEETANHQNAIMALLHQFEEDYGIAGGQMLVCAEHTGQYTFPLACACKAVECKLWLENPAEIKYSSGVQRGKNDKVDAKRIAIYAKRFQDRVQYYERPTEDIERLKQLESERTLYVTDLAKYKGQMKDQKDYMPRKLYERKMKRLQTLMDDLEKAIQAITYEMDEVIASCPVLCRQRELLMSIDGVGRVVATNMIITTEAFTRFDDPSKFNCYAGVAPFSYSSGSSQHSKARVSHRADKVMKRLLHLAAVAVTHRIGGELKKYYERKVAEGKNKMSVINALRAKIVARMFAVIKRNEKYKPILS

SEQ ID NO: 401642 - protein, 426 aa, unidentified
MNYKQNAKIEQVKESTLVVGVDIGSETHYARAFDYRGKEVSKRVFKFSSDLHGFTCFYEWLVENDKRAGKTDVLIGCEPTGHYWYTFEKYIREHGMKLVFVNPFSVKRLKELDDNSPKKTDHKDPKTIAKLIVDGRYCYPYIPEGIYADLREVVSSRDRIQKELNAASNRIQRWLKIYFPEYLKVYRKFDAQSGLQVLEKAPLPDDIIRLGAEGINKIWRTNKMRAVGMKRAMTLIEAAHNSVGIHGGAGARCELRLLLNDYETKKIQMETVTQSMVEVVMQVPHVEKLLAIKGVGIVTVAGFLAEIGDIRRFDSPKQIQKYAGLELVENSSGKHKGQTRISKRGRRKLRRVLFQVVLPLIGQNPEFREVYDYYSTRIRNPLKGHQAMIAVSCKVIRVFFAILRNGCDYSAERFRKDIRRPESKVA

SEQ ID NO: 401643 - protein, 411 aa, unidentified
MELLHPRCAGLDVAKDEVVACVRVPDGQGGRAQEVRTFQTFTSGLEALAGWLAGEGVTQVVMEATGQYWKPVWYVLEERGFALMLVNARHVKILPGRKTDVCDAAWLAELLEHGLLRGSFVPPVPIRELRDLTRYRKRLIQAHSAEVQRIQKILEDAGIKLDSVAADVLGVSGRAMLAALVAGERDPGVLAELAKGRLRAKLPQLRQALRGRFSDHHALLVRLALAHLEQLEASIAELDTHIDRVLAPFARTRDQLDTITGVGKRAAETIIAEIGVDMTVFPTAGHLASWAGRCPGNNITGGKRRSGKPSRGNRWLGEMLTECAWAAARSRDTYLSAQFWRLARRIGKKKAAMAVGHSILVIAWHLLTNDCDYQDLGGDYFVRRDTDRQRQRAVAQLQALGYRVALEPLAA

SEQ ID NO: 401644 - protein, 433 aa, unidentified
MLKINYMSTLFVGIDVSSKSNSVYAMDFEENKYLSTSFGNNQPGADELVNRIAACMQKHKNLDTLLIVLESTSVYSVHISNFLASSEVLMPYKPYVFCVNPKATANYRKSYIGMEKTDPTDAYLIADFARVGRTKKLEPWRGGQFIALKRLTRHRMHLSECITREKTYMVSNLYLKFSELQLLEGDDKPFGNLYGATSSAILTEFLSPQEIIDMPEEDLLAFLAQRSRNRICDLSKTSELLRKAARDSYRLDKCMYEPLNISLASSFNCIQAYQKEIRLIEQAIEKCIKGMNPNALIILQSIPGIGPVWASGILSEIGDISAFHSSDALAKYAGLYWPKGDSGDFISEDNQMSKAGNPYLRYYFGEAANSIRKHIPEYADFYARKYAEVSKHQHKRALALTSRKFVRLVFGLLAKNQLYTGEKLDTEHNTESN

SEQ ID NO: 401645 - protein, 354 aa, unidentified
MDVSKDSISVAVLPPDKDVAEVDKIFHDTDSVRRLIKRLGRPNGLWACYEAGPTGYDLQRLLATLGVKCDVVAPSLIPKSSGDKVKTDRRDARRLAGLHRAGALTPIAVPTPVQEGVRDLVRTRGDMVQDLTRARNRLSGFLLRHSVVWRGGSQWTDRHRRWLQAQCFDDKALASTYAHYLATVRFRSTALEAVEADLVPYCSAEPFGTQVVRLAAYRGVTNIGALCLAAEVFDWRRFPRARPFMCFTGLVPGESSTGLSQHRLGITRAGNSHIRGQLCEAAWAYQHVPNVGVGIRERQRDAPPATVARSWAAQVRLSKRFRQLAAHKNVRSVVAAAVARELAGFLWAEMVTED

SEQ ID NO: 401646 - protein, 321 aa, unidentified
MTSQNEAVCFGIDISKHWLDIAEYPSAQVTRIDNTAAAIRGWLRTLPRGAQRIACESTGSYHCTLVELLIKAGHQVFLIDGFKLSRYRDTVGQRAKTDRHDARLIARYLAHEGTDLRPFSMPAPAVTELRSLLRRRATVVRSLGRIRQSMEDLPGFGRDVRVALARLTALIKRFEQRIASLINESGWTEPYRRILKIEGVGALTAAGLCATFHRAPFSGADAFIAFLGMDVSVRDSGKKTGRRALSKKGDSEMRRLLYNAAMAASRSTTWQPFYQRMLQRGFSRTQALVALARKLARVAFSLMKNAADYVPKQHENACGGT

SEQ ID NO: 401647 - protein, 391 aa, unidentified
MTNVGIDVAKEVHWVCAVDSHGALLLNHKLLNTPADMQDLVDELRRLPAPIRVGIDILGGIASLIQAVILEARFELLHIPGVAVNRAREGTAGGEAKSDPRDARVIADLIRTRRDLRKVTADSEIDIELRLLVSRRRDLTEEQTRRLARMHDLLASIFPELERCLDLRRKTDLSLLRTWVTPEEFRAVTNDQILAELKSGKVLVFARKLIAQVRACAEQQTIALPGEQLTARLIRELADEALRNRQRETELDREIEARLTAHPDAALIRSLPGMGALLTAEFIAVAGPVIRFRSPDALASAAGLAPVLKQSGKSSWLKRPKKGDKRLKRIFYQSAFASMRCPESAAFYARKRKEGKRHHQIIIALARRRVNVLWAILHNRTPYAPKPLLVS

SEQ ID NO: 401648 - protein, 339 aa, unidentified
MTRIAVFVGVDYHQKSVQVCVVDVEGNVQMNRKLPSTVEAILSAVGQGSDVRGVAIEACCGAADLAEKLVQRAGWSVSLAHPGYVARMKQNRDKTDFGDARVLADLLRVGYLPKVWLAPKELRQLRHLVRLRQDLVAQRRKIKLQIRALLRENRIIAPDRRKPWTCAWLAWLRETDELTDDDRWIMDRRLESLGEVFLKIRAVEKRLRERAQEDAVIQKLCRFHGVGLVTSVTMRAEIGQFDRFGTGKQLARFCGLSPRNVSSGERQADAGLVKAGNTQLRVVVIETAQRLLWQPDNDWARLAMRLLRKGKPRNVVVAAVANRWVRWLYHQMQPDRLAV

SEQ ID NO: 401649 - protein, 448 aa, unidentified
MAAVMIGVDPHKASHTAVVISAADEPLGELRVRACAAQAERLLAWAAAWPARTWAVEGAGGTGHLLAQQLVAAGERVLDVPPKLGARVRLLAAGDVNKNDPNDARSVAVAALRSAGVREVRPDDHPAVLKIWSKRYRDLGRSRTQVVCRLHAVLCDLVPGGVSRPIYASCAARILQQITPPDAVAAARCELAAAFLDDLRRIDTQIRETRKKLAVAVQATGTCLTGLFGVGPVIAAAVIGDVRDVSRFPGRDHFAAYNGTAPIEVSSGPRKIYRLSRRGNRRLNHAIHMAAVTQIRHRHSQGRTYYDKKLAEGKTPKEALRSLKRQISNAIFACLQADAARAAAHAGGPGGQQGNDSASSAAGSHPRHRLFGQATPGPGHHTTTAASSPAPRPARAVGGAGHSSIAAKLPSATPQVQVERPQRSEDERPGGAARRRPHSAARKATGTS

SEQ ID NO: 401650 - protein, 297 aa, unidentified
MSVYVGIDVHRKRSQVAVVTEDGTVQLNKNVVNGSEPFLRLIGDLPSGTPVAFEAAFGWSWLAELLEDYGFEAHLVHPLRCKAIASARLKNDKVDAAILAQLLRADLLPEAWLAPPRVRQLRALLRHRASLVRLGTQLRNRIHAVAADHGYDRSASYWTGPGRGWLAELDLPAASREIVGDCLAVIDGLAPVIDRIDGELHACARADPRVKVLRTLPGVGEFTALVMLAEIGDITRFGSARKLASRAGLTPTVRGSDLKVRHGHISKMVCAGGMVPLHRPGGVRWRWLEDWICIGVS

SEQ ID NO: 401651 - protein, 332 aa, unidentified
MGWTTNVFQLYGLNQTGKPVYKKRTDRKTLLQTVANIPACQIGVEASTCAFYWQREFEKLGHKVKVISPQYVKPFVRGQKNDGNDAQAIAIALMQTTMQFVPPKSPEQQDIQALHRARQRIVNHRTATVCQIRGLLLDRGITIGAAVSSVRRAVPLILEDAENGLSVRMRRTIAELYDLFDDPGRRINFFDKEIDTVFRQSEACQRIAKVKGIGPKTATAVVAAIGKGSKFKNGRHFAAWLGLVPRQHSSGDRQVLMNMTKKGDKHLRTLFIHGARAVVRVAANNNESHLNQWVNQLKERRGFNKTTVAVANKNARIIWSILHNETEYRPAV

SEQ ID NO: 401652 - protein, 365 aa, unidentified
MTGVDSRHRPHLDWKPAAASADRPRMSLVLQSFLPFPNSCQGTSPHQQGRGTKMTEHCYCGIDVAKDRLDVQVLPHRQRFSVDNNATGWDELVERLHALPIAAVGIEPSGGYERGIIRALLAAGLSVRRINPGKLRQFARARGILAKNDRLDAQLIAEYVSIMPTRVVQRAAAAERLAEIVTMRRQLCDEHVTVENQAAHVEDAILRRLNKRRLARLKADIHLLDKRMAETVAANANLAQRYELLTSMRGVGPTLAFTRIALLPELGQMSRKQIAALVGLAPYDFDSGKLKGHRCIYGGRMPVRNILYMAALSAARYNPALKVFHNRLAAANKKPKVIIVAVMRKMITTLNAMVRDKAAWQPRAA

SEQ ID NO: 401653 - protein, 339 aa, unidentified
MDKLYGGIDLHANNSVVVVLNDQDQVMFQKRIPNELVTLLAHLGPFQSQLQGIVVESTYNWYWLVDGLQEAGYRVHLANPAAMKQYDGLKHTNDHSDARWLAHVLRLGLLPTGYIYPKEERAVRDLLRKRSQLVRQKTANLLSIQNLLTRNTGQGMRGNQIKQLTPARISELVTLPEHALALQVTVAVMQHLAEQITQVERAVHARVKLRPTFQSLLTVPGIGQTLALTIMLETGEIGRFPTVGQFASYCRCVGSTKLSNGKRKGQGNTKNGNKYLAWAFVEAAHFAMRHEPQIRQFYQRKQAKTNVFVALKAVAHKLARACYYIMRDAVPFDVTRAFV

SEQ ID NO: 401654 - protein, 346 aa, unidentified
MTEAYDGRQVVGMDLHRRRSVLVRMTMDGRKLETARIENSPAALRAVLARCGKNPLVVLEATYGWYWAADVLAEAGAEVHLAHPLGVRAFSYRRVKNDERDAADLADLLRAGLLPEAWIAPAGVRALREVVRYRHKLVQQRTSCKDQVHAVLAKLGVPVTHSDVFGRGGGLWLDQLVLPAPYAGKVASLRALIGVLDGEIARLGDQAAAMLAADPGYAAVRELDGIGPVLAAVICAEIGDVTRFGKPGQLCSWAGLTPRHYESDTKVIRGHVSKQGSKMLRWALTEAIQHQPAGTRPREAKEAIIARRGEQARNIAKTAAARVLLTQVFYALRDGHARSAGHPPAA

SEQ ID NO: 401655 - protein, 402 aa, unidentified
MESNLVWVGIDVGRYFHAWCGLDGTGQVVWRRNRVSNTTKAMTQALGQLRKALPGAALRFAAEEAGGNAAALARLLAAEGETAFLAQPLRVHRFHLALGAPHKSDPYDAQVIAEFARQYAPRLPRIRPGTPELRALRVLSRRLESVNRDLRRSLNRLRSTLAEYAPEWLICGVFSDWSTAAALGTLERFGRISKLRRTTLGRLALALSGWTRGRFKRDHAQRLLEAFDQVSLPPLLEEAYFQSIRSQVTQIRHFLAARKELEGLLAQSQVPAFQALQAEFGYGLETAAVIVSEVGQIADFDREARFAAYCGVTPITRRSGCSAGSARLGRFTNKRLLRAIFQATVATVRRDPASQAYYQAKLNGRTDPRARTTALLALCRHRVRRLYKLLKAADPPPLEAAA

SEQ ID NO: 401656 - protein, 336 aa, unidentified
MLYVGLDVHARQSTYCILDDNGKRVKTHTVKGRWDKVMLEINKIERPFKICFEATTGYGWLYDRLCRLAETVQVAHPGHVRLIFRAKRKNDRIDAQKLAKLLYLDALPAVYVPSPDIRAWRRLIEFRHREVKSRVRTKNQLRALLRRHAIAAPRRLWSRKGVAWLKDIELPSPEAALERDLLIDTLAHLDRVIARVEEDLNRRAKHHSDVNLLRTIPGVGIRTAEAVVAHVDRAERFARLNAIGCYFGLVPCQDASAGKNRLGHITQQGPGTVRRVLGEATWQAVRRSPEIRAYFERIRQGNPERKKIAIVATAHYLTRMMLAMLKTGEICRFAAA

SEQ ID NO: 401657 - protein, 271 aa, unidentified
MKLQALGIDLAKNVFHLVGLDSNGQVVIRKRCSRRQVLAFTANVQVQVIGMEACSGAHFLGRALREQGHEVRLMPAQYVKPYVQTNKSDYIDAEAIAEAVQRPRMRFVPIKTEEQLDLQALHRVRERWVMRRTAVVNQIRSLLLERGLTLAKGRRHLQQALPSIFEDAELKLSGMFRALLAQLKLELEQLSVRIEQMDTEIQREACDNEACQRLTAIPGVGPVTATALVGAIGNGSTFRKGRDLSAWMGIVPGEYSTGGRQKLLGISKRGQ

SEQ ID NO: 401658 - protein, 340 aa, unidentified
MGKSVENFVGVDISKLTFDVALLQVNKPDNITHRQFQQTVKGFTEMKEWLQDQGVLLNEDTLFCMEYTGIYNNRLVDFLSNEKVQLWVEMAIRIKKSAGFERGGNDKTDAMKIVQYAFRYQDRKKLWTPTDERLSQIKNLIAQRDRIVESISQLTVPINELKEVGNATAARQMENLQKPVIKSLLTAQAKIEIAIVKTVSADEKLSHKVALVKSIKGIGSVTAIAFLVYTQGFTTFESGKELACYCGVVPFIKKQSGTSVKSKSKVSPFANKKLKCLLHLCALSALKHDQEIKGYYERKIQEGKNKMSVINAIRNKLVLRIHAVLRDDRVFVENYGTKCA

SEQ ID NO: 401659 - protein, 341 aa, unidentified
MQITTIGLDIAKNVFQVHAIDGDENVVVRKQLRRGQVVRFFQDLPPCLVGLEACATSHYWARELAKLGHDVRLMPARDVKAYVKRNKNDAADAAAICEAVRRPTMRFVSLKSAEQQAQLMQHRARDLLMRQRTQLINAIRAHMAELGITAAQGRSGIKELLAIIADERDMHLPLDARASLMVLAAQLEAMQTSIGLLEKRIVARHRSNQDSKRLETIPGIGVIGATAIAATVTDPAAFQSGRDFAAWVGLVPRQDSTGGKPRLGPISKQGDRYLRRILVGGAVSLLRRAKLSPQRYPWVTQMLARRPFKVVAIALANKMARIAWALLAKGGTYQRLQLAAV

SEQ ID NO: 401660 - protein, 342 aa, unidentified
MNITTVGLDLAKNVFQVHGINATGDIVVRRQLRRSHVRAFFAGLAPCLIGMEACGTAHFWARELMALGHDVKIIPPSYVKPYVRRNKNDAADAEAICEAVTRPNMRFVPIKTEDQQAALMLHKARELLVRQQNMLGNALRAHMAELGMIAPQGRSRIKDIIALILDVEDESIPTLAKAALRPLVMQLDANDHAISLLDDEITAWHKNNEASQRLATIPGIGILTASAIAATVPDPSFFHSGREFAAWVGLVPRQNSSGGKERLGRISKQGNQYIRRLLVIGATSILRYARAKTAPGADWVNNLLERRPARLVTVAMANKTARIAWALLAKGEIYRAPSAAAD

SEQ ID NO: 401661 - protein, 413 aa, unidentified
MSDQKRWYAGVDWASESHHVRLIDEAGRTIGEKIFKHAGKGLAEMVGWLLATSGAAAPGQIHVAIEMPHGPVVETLIERGFNVYAINPKQMDRFRDRYTMAGAKDDSRDALVMASALRTDPHCLRKLAVTDPTVVELREWSRIAEDLGGERTGLTNRLRQQLWRYFPAFLDLDADLGAPWLLELWQAAPTPDKARRIRQASVAAILKRNRIRRFDAAQLLEILRQPPLTVAAGTAEAARAHIVTLIARIRLINRQLADAHHQLDTLTARLGGAEEAEPGQIKQRDADILASLPGIGRIVLATLLAEATDALQRRDYPALRTLTGVAPVTKRSGRSHFVVRRHACHRRLANAVYHWARIATQHDRTSRAKYAALRARGHSHGRALRSVADRLLNVACSMLKTRTIFRPAFDNPN

SEQ ID NO: 401662 - protein, 403 aa, unidentified
MSSFFAGLDWASRNHAVCIINRRGAVCEQLAVTHDAAGLAQLQRRLIHYGRPPIAIERPSGIVVDTLLEGGFTVVPIHPNAVKATRPRYRSHGAKSDTADAYLLADLLRTDAHRFTPLTAQSDDIRALRALVRGRDDLVATRVQLANQLRSLLQSFWPGAAEVFAAVDTPIALAFIDRYPTPESAQRLGPKRMAAFCAQHAYCGRRSPDQLLARLHAAALGVCSELEIEAKAELARSLARTLAMLVQQIRLLSSRIEHHVASLDDGKLIMSFPRAGRICAAQIVAELGSVRERFASDQRLAAEAGVTPVTYQSGKSKAVTFRWACNHRLRAALTCFANNSRHASQWAASVYARARARGCDHPHAIRVLTRAWVRVIWRAWTDHKPYDPTQHRGAAGVLCAAKG

SEQ ID NO: 401663 - protein, 387 aa, unidentified
MPQLNDLSRSLVALDQDSTIIAVVELSQSSWLVGGVLPGIERQPQKKLEPSAERLLGLLHRWRDEAVRAGKKITRIALAFEAGRDGFWLARWLNARGVEAHVIHPSSVAVSREHRRAKTDRLDTELLKRGFLGWLRGERGHCSMARVPTIADEDAKRPNRERECLVGERTRIVNRMKATLARLGVRNFKPTLRKAAERLATVHTPEGMPLPPNTLAELQRDMARLGFVVSQIREIEQARQKRLEQETETEPHAMVRQVARVIGIGIETADMLVNEVLSRPMRDRKAVARYAGLTGSPDESGARRREQGLARAGNARVRRGMIQLAWRFLRFQKQSALAQWYRARTADSRLGMRKTMIVALARKLLIALWRFVTTGEILEGVILRPAG

SEQ ID NO: 401664 - protein, 397 aa, unidentified
MIAVGIDISKAKSTVAVIDSDGTVLASPFTMAHTQPEMEAFVSYLKGLGEPTTILMEYTGHYHYPVLKKLQDEGFPVCIVNPYQMKKYGDVEIHKAKTDKKDALRIAAYALEKSYKLVPYSSMEQKYEDLKFLSRQYNQRISYVAKLKVQLIALLDQTMPGITRILPLNSRNPEKCALLLFIRRFKSFDEIHRIGKARFLASYDVLAKKTSERSASSKGLSIYELAVDSITTRGEDPYIWLSQNQCVDLLSTTQNAADEIISQMRNIAETIPEYKVLRAMHGVGDRLGPIILAEIGDVHRFHSGKALNSYAGNDAPPYQSGQFESRNRHISKRGSSTLRKACYEVMQALKLTKPQDDPVYLFMLKKEQEGKPFNVAKMAGVNKFLRIYYARAMELYK

SEQ ID NO: 401665 - protein, 354 aa, unidentified
MADAPKHSIAFVGIDIGKNSFHVVGLDGRGAIVLRQKWSRGQVEARFANMPACLIGMEACVGAHHLSRGLQKLGHDARLMPARYVRPYSKGQKNDFRDAEAIAEAVQRPTMKFVATKTADQLDLQAMHRVRERLVSQRTGIINQIRAFLLERGVAVRQGLRFLRSELPGILAGPSDALSPRMVHIIEDLAGDWHRLDERVEGLSKEIEAIARRDSSCERLMSVPGIGPIISSAMVAAIGAGDVFTKGRDFAAWLGLVPKQISTGDRTILGKISKRGNRYLRVLFVQAAWVVLIKPKSWERHGLKSWIEAAKKRLHRNVLAIALANKLARIAWSVLAHGRSFEASKPAAATAQSD

SEQ ID NO: 401666 - protein, 312 aa, unidentified
MGDKPIVGVDVSKEWLDLCLAGQIKVERIANEGAAIAGWLRRHGPGLLACEPTGGYERTLLRVARDLGIVILRAHPNRVIAFRTSQGIKAKTDALDARLIAAFAEDQVARGKACPQIAGNEALRALAARRRQLIAMLQAERCRLALAAPGEVRESLEVLIGALTQNLELIEAKLAQAIAADPQAQRLSQLLRTIYGIGPVSAATLISDLPELGKLNAKTIAALVGLAPQTRDSGKARYRAPTGYGRPHIRQVLFNAARSAIRCPSPFKTFYDRLVTENKRPGKVALVAVMRKLLVTANAVARDQQPWKHYAA

SEQ ID NO: 401667 - protein, 336 aa, unidentified
MKFYLGMDVSKLWVDITLMPVIDHEKQPTITERFENDHAGMKVLIKWLKKHLVTFDENSLLVIENTGVYHRLVWEYCSKEGLPLYIGNAAHIKWGLGITRGKNDVVDSKRLCSYAFRNADELKATPVLNPVFLKLKDLMTARSRLLAQKNSIQVYLGELKMSNMKETQLMLEQAHKAAIEGIDKSMKVVEKNIREIIKKDTAIKNNYDLLLSVPGLGHQTAVYLICCTNNFICKITGKQLASYAGVAPFGNSSGTSIKGRDKVHKMANKDLKKLFHMGAVSAITHYDEFRDYYERKVKEGKHEQSVINAIRSKIALRAVAVINNQAKYVNNYKKVA

SEQ ID NO: 401668 - protein, 418 aa, unidentified
MLTASWFVGIDWASEAHEVCVLDRDGHVCERRQVRHTAPDLQTFVDALLARADGDPRAVAVGIEVPRGGLVDLFVERGFLVYAINPKQLDRFRDRFTAAGAKDDRRDALVIGDSLRTDSQAFRHVRLDHPVIIQLREWSRIDEDLGGELTRLTNQLRDLVYRSTPGLLSLCPAADEPWFWTVLGMAPTPAAQQRLSERRLERLLHTRRIRRLTAKQVREVLQQPPVFTAPGVAEAVADHLAVVLPRVELTATQRRAAERQLDRLLEALDQDMPSAGDQREHSDIAIVRSMPGIGTRVAARMLAEGSQPLVDRAYHVLRACMGVAPVTKQSGKRRSVSMRYGCNARLRNAAYHWARAGAQKDPASRTYYETLRARGHSHGRALRSVADRLLRILMTLLSRGQIFNPSHGQSPPSVPATA

SEQ ID NO: 401669 - protein, 366 aa, unidentified
MKKISTMQVFGNEVFKEQKLTIGLDLGDRWSFYCILDEAGKIILEQKLPTTPEAMKQTFGKIPRSLIAMETGTHSPWVSRLLTELGHEVLVAHAQKVELITKSNRKDDRHDARTLARLARIDPELLGPVRHRSAKAQIHLTVIRARAELVSARTALVNAARGLVKSFGQRLPKCGTQQVSGKLAEGLSAELREVLEPLLREVESLNERIQEYDARMEKIAKEVYPEASLLKQVKGVGTQIALTYVLTIEDPYRFPKSRAVGCFLGLRPGRRNSGESEPQKKISKEGDRYLRTMMVQGAHYILGPFGEDSDLRRWGLKLAARGGKNAKKRAVVAVARKLAVLLHRLWVSGEVYEPLRNSQKAMRAVA

SEQ ID NO: 401670 - protein, 416 aa, unidentified
MDKKVRKFGYDLNEKTLLVTADVGKFENYCYARTPKGEELEPFKFHNTGLGFRMVYGIIEVFRKRHNLVKTVFGIESTGNYGEPLVHYMKKRGIQMVQVNPLHTKKVKEMRGNSPNKNDKKDPKVIADIISLNNGLTIVIPEGPAAELDRLVHLREILLEDKKRAYNQLESAIVPIFPEFLHVFKDLKIKTVEYLLKSCPTAELIIELGLEDLVGILWQFSRGRFGRNKAEQLYDAALSSAGIKEGVESTLLIIDNLYDKINLIIKQLKVVEEKIETKLDDVPYSSYIMSIKGIGPIITAVIIGEVGDLRKYSYARQLQKLAGINLYEISSGKQKGQRHITKRGRHLLRKMLYYAAINVTKKDRILYDTYHLHIKKGMTKVQALTAISRKLIGIIYALVRDSSDYIERVDGNKIAA

SEQ ID NO: 401671 - protein, 370 aa, unidentified
MPKTRVRFVGLDVHKDSIVIAVAERGRDSARDIGSFPSDWNSLHKQLRKLSMGFTLKLCYEAGPTGFELHRRLVEAGFDNQVVAPSLIPRKPGERIKTDRRDARKLARCLRAGDLTSVYVPNEETEALRDLERARDAAKKAETTCKHQLGKFLLRHGRRFDGGSNWTVRHFAWIRQQTFEWEAQQRVLRDYLKALEDATERVEGLTSDIKELVETSTLAPLVTALQAMRGVATISSVVIAAEIGDLRRFDSAGAFMSFVGLVPSESSSGQRKQRGSITKTGNRHVRRILVEAAWHYFRPAGMSKALRARNAKVSDEVRAIAWKAQKRLHRKFQHLVYEKGKQRNVAAIAVARELAGFLWAIGQEQTLTAA

SEQ ID NO: 401672 - protein, 360 aa, unidentified
MAKAKTLVGLDVHATKVVAAVLDAETGEIAFFAMNAEIEKAAGFCAALPRPVRVAYEAGPTGYGLARELGKRGVECVVAAPSKIPRASGDRVKTDRRDAELLVRLLLAGKLHAVRVPGAEEEALRDLVRAREGVRVDLVRCRHRLSKLLLRHGIRFEDGDAWTDRHRAWLNGIVLQWPAAQATLLDVRGAIDALTHRRDALEREIVSMLPSSPWTAQVGVLRCLRGVDTLTAVGLCAEVGDFTRFGRAEQLMSYVGLVPSENTTGQQRRLGSITKTGSAHARRLLVEAAWHYRPRPNLSKRLTERQAGQPQEAVAVAWTAQKRLHRTWARLEARGKRRTIIAVAAARELAGFVWAIAQIE

SEQ ID NO: 401673 - protein, 419 aa, unidentified
MSKSLFCGCDVASDNNTIWLMLDDGSQPVKLFSVDNNQPGAEILVERVYSIAKEHCVSDILIGTEATSMYDWHLLEYLAESKLALEFNFKLYRFNAKWIKNFKKSLTPRGKTDPIDSFAIAERLRMGRLPKEYVPDIKYQPLRKLTRFRFHLMQQIAREKDFFLANLFLKASAYSAVKPFGSTFSATSLSIINDFFSVDELAAMPIEELTEFILEKGKAHFSKPDEIVDNLKRVARESYRLKPELAPTVNLILASTFNNIRCYKEQVKLVDSAITENLKAFKHTLESISGIGPVYAAGILAEIGDVHRFQDDSALAQFTGLTWPKHQSGKFQAEETRMSHTGNQYLRYYLVEAANSVKRCDATYKAFYEKKYKEATKHHHKRALVLTARKLVRLVWTLLTKQVLYQPGYCSFEDLSKIG

SEQ ID NO: 401674 - protein, 400 aa, unidentified
MKRLSGGIDIGSASHHITILDEEDHILYDQKVSHKLNEFTESIKQFKKIEKKEKGEISFALEGKNGYSAPFDRILIDQGFTLYNIDNLKLKRFREAFAGEWRDDGRDALMLSKMLKLKKHINSKREKVFIKIENPSPVTESLKILSRHQQTLIDEKVRLVNRLCKKLLEVCPEILKLGKVENKKTIAILTKYTDFSKYKKITLKSLLKIKGIGKIQAPFLLKRLNNMEYIGLTDIYKTIILSYAKRISELQEEIKDIDKKLDEIGTQSKEVNHLKTIPGVAIKLSSRLIGEIGNINRFPSEKQLAVYCGIACVNNDSGKVTKAKAVYKANKICKQTLIIMAGCSIRLNFQCSTYYLKKRAEGKSHNHTLRCLARQLIKVIYKMLTEDRDYIVRKALKKVA

SEQ ID NO: 401675 - protein, 355 aa, unidentified
MSQEKYIGMDVHQATISVAVLDSRGKLIMESILETKAATILEFIQGLHGSLSVTFEEGTSAAWLHDLLKPHVTRLVVCDPRKNALLKDGSKSDRIDARKLAELLRGNQLTSVYHGEHGMRTLKELGRSYLTMTQDLTRVMSRIKALYRSWAIPCSGTSVYAPRHRAEWLDKIPEPGVRLRAERLYQQLDLLQPVRQQARRDLLLESHKHPAVRLLRQIPAIGPIRAALLVALLQTPHRFRTKRQLWAYSGFALETHDSGEYRYVRGKLQRNRERMTVRGLNNNHNPDVKNLFKGAAISASTRPGPLYDFYVALLEKGTRPTMARLTLARKIASITLTIWKKGVDFDATQLRRQEA

SEQ ID NO: 401676 - protein, 362 aa, unidentified
MTHATTTLTTLSIGIDLGDRFSHFCVLDSNGEVVEEGRLRTTQDAFRQRFVGIAAARIALEAGTHSPWVSELLKQARHDVLVANPGKLRMIYKSDNKTDRFDAEQLARVARMDPRLLSPIQHRCHQVRADLAVLRARNSLVVSRTMLVNHVRGALKSFGTRLPRCSTPSFASKMLERIPDELRPALVPVLETIRSLTSQIRGYERELNTLADQVYPITNVLRQVNGVGPITSLAFVLTLQDWRRFRSSRSVGAYLGLRPKSDQSGERNPELRITRAGDRDLRCLLVQSAQYILGPFGTDSDLRRFGSAIAARGSKVAKRKAVIAVARRLAVLLHSLWRTREEYEPLRNSSRHAAVETAVAAG

SEQ ID NO: 401677 - protein, 387 aa, unidentified
MYYIGIDISKFKHDCAVIDDSGEIVTPSWSFTNDAEGFSQLKLLLNSLDTETRIGLESTGHYGMNLKLFLESNNFSFMEFNPLLINRFVKSKSLRKTKSDSIDCMMIAHYLMTVEYKPYPSSFYHTEKLKSLTRFRDSLIRLRSRQLVELTNILDKVFPEFKPFFGSRFSVTALYILSNYSSPEKIANMNSKSYEALRKLSRGRFSTVDFAKLKQLAKNTIGTTEDYLLLQMQIVLDIYRQLDSKVDETEVSIKECVSDMNPPMLSVPGIGIESAAVILAEFGDFSKFKNASQMLSFAGLEPGYFQSGTSETTGKMVKHGSSYLRYALMNCAQTVVNYEPTFAMFYSKKRAEGKPHRVALSHVVKKLLRVIYTLQTKNIAYDADLVR

SEQ ID NO: 401678 - protein, 342 aa, unidentified
MVVIGVDAHKATHTLVGVDPGGRKLAELTVKATPEGHLKALDWARREFADDVVWGIEDCRNLSRRLERDLLDAGQRVVRVPPRLMAKTRASARSWGKSDSIDALSVARAVLREPDLPVACHDEGSRELKLLVDRREDLVVHRSAVINRVLWRIHELDPSRAKGRSLRTDKNMHAVREWLATQTGLVAELARDEIDEIIAITPAIKALDKRIAVRVRAVAPSLLTLEGCGVLSAAKLVGETAGVTRFRSEAAYARHAGVTPIPHSSGAKSVHAKIGRSGNRRINNALYRIAMTQIRHGGVGEAYYRARRDLGDSHAEAIRRVERRVVRRVYRHLHNDHLHRQD

SEQ ID NO: 401679 - protein, 410 aa, unidentified
MEVLYPHCAGLDVHKETVVACMRHMVGGTVRREVRTFDTITTGLLALADWLASEGCTVVAMEATGVYWKPVWHVLSDGDFTLVLANAKHVKNVPGRKTDVNDATWLADLLTHGLIRGSFVPGAETQVLRNLLRTRKQLVRERSSHIQRLQKTLEDANIKLDSVVTDIIGMTGRAMLQALIAGETDPGKLAALAHYRIKAPPARLREALRGRVMKHHRFLLQLHLQQIDAIDTAIAEIDREVDERIEPFRITVELLTTIPGISELSARTIAGEIGNDMSRFATAAHLISWAGLCPKNDESAGKRRSTRMRKGAPWLKTALIQCSWAAARKKGSYIQAQFHRIRSRRGAKKAIGAVAASILTAIYHMLKNGTCYQDLGPDHFDRRAKTTKTKYLVARLQNLGYAVQITPLAA

SEQ ID NO: 401680 - protein, 335 aa, unidentified
MTRGIFVGVDVSKDRLDVAFRPSGEKLIVPNDRRGITRLVRTISGFTPECVVLEASGGYERRLLERLAEEELPVALVNPRNIRELARASGRLAKTDAIDAAVLAHFAEVMKPELRRLPDPETRKLRALITRRNQLVRMMTAEQNRQLQALESVRAGLTAIIRCLKKQIAVLDKQLAALIRATPAFRQKAELLRSAPGVGPVVSATLIAHLAELGTLNRKKIAALVGVAPFNRDSGRLKGKRAIWGGRGDVRAMLYMSTLAAVRLNPSLRAFHSRLRSAGKSPKMALTASVNRGNSATARHSIGPRTPFDRSANLAFVAPMSPNSMCSCEKPIGAS

SEQ ID NO: 401681 - protein, 376 aa, unidentified
MRKTTRFVGLDVHADSIAVAVAESGREGEVRSLGTIPNRPESIQRLLKKLGSPRDLRVCYEAGPCGYVLYWQLIKHGVACEVVAPTLVPVKAGDRVKTDRRDALKLARCYRAGELTAVWVPDAAHEVLRDLVRAREAAKKDQLRARHRLGKFLLRHGRRPAVKTRAWGTAYMAWVRVVKFEQFAQQATLIDYLTEVDHAAARIVRIEQAIDQAISEAPAETRAIIDALQALRGVAKMTAITVVSEVGRLSRFDHPRQLMGYSGAVPSEHSSGGPGKARRGGITKTGNAHLRRVLVEAAWSYRHRPGLKGDLSKRQEGLSESIKEVAWKAQHRLHQRYRRLANSGKPLPQVVTAIARELLGFVWAIGVQAEVEQPAA

SEQ ID NO: 401682 - protein, 413 aa, unidentified
MIYCGIGWAERTHDVALVDDSGQLLAKRHITDDAADYKILLDLLAENGDTEENPIPVAIETSRGLLVAVLRTGKRQVFAINPMAAARDRDRHSVSRKKSDPGDALVLANILRIDMHAHRPLPQDSDLARALAVLARAQQDATWNRQQISNQLRSLLREYYPSALAAFESWKNGLCRREAHELLKAAPTPSRASRLTRTQLQAALKRAGRQRGIEAEAERLWDVFRADWAHQPPLVEDALGKQMLALLIQLKAACTAADNLAEAVEEAFPQHPDAEIILSLPGLGIQLGARVLAEIGDDRTRFADARGLKAYAGASPITRASGKKSSITRRWVKNDRLNHAGYLWAFSAITASPGAKAHYRRRRDDHGDWHAAAQRNLFNRMLGKLYHCLQHGERFDEQAAFPAPSSTAETAAA

SEQ ID NO: 401683 - protein, 395 aa, unidentified
MFSARVPPVPGVRSDSKEVCVCVRHEVGMSFARADGTGVRPKRRCARMKVLLGVDPHKASVAVAVVDEAKGELVERATFPQNRAGLRSLERWAKRFPERRWAVENAGGLGRHLAVRLAAAGESVVDVPSKLSARVRVLSTGNARKNDGVDALATALAAWRHERLAAVDPEAASEVLRLLSERREDLVAERTRALNRLHGLLRDLVPGGVAGTLSAHRAARILRGIRPQGGASASLRRRLASEILRDVRTLDRKIADLNERIEAEVEASGTTLTEIFGVGSILAAKIIGTVGDVARFPTKAHFASYSGTAPVEASSGEVVRHRLSLAGNRHLNNVLHMVAVCQARSDSRGGAYYRKKIAEGKSRKEALRCLKRRVSDAVFKILQTDSQEAPSRRAA

SEQ ID NO: 401684 - protein, 402 aa, unidentified
MTYDYVIGMDVGKYFHHACVLDIDGAQVLSKRINQNEKSLRTLFSTFSANDHKVLVVVDQPNNIGRLTVAVAQDIGIDVRYLPGLAMRQLSRIHAGNAKTDIRDAYIIAHAAQNLPESLRSVDRVEEAFLQLKVLNGIDEDLARSYTRLINQIRSALVGCYPQFEQALRGQIIHRKWVLHLLARYGGPTKIKRLGKAKAAAFARRYKARNPEPVLDAIFAAISEQTVTIAGAHYAEMGVAMSAKDALLKLEHRKQIEQEVIELINDIPHTQILLSMPGIGPKTAAQILMTAGDMSGFPTAGHLASYAGLSPRTNQSGTSIMSNSLNRAGNKKLKNALWQSSFASIRFHERSRQFYERKRREGKRHNAAVVALARRRLNVLYAMMRNHQCYRDPASQQEGIAA

SEQ ID NO: 401685 - protein, 329 aa, unidentified
MDTQARHKVVGIDVSKDSLAVCHLADGKAQHLEIGNDKAGFKLLVKRCGADSLYVMEATGVYYLQLAYYLFEQGAPVVVVNPVVIRRYIQMHLGKGKSDRKDAQWIMRYGEQNQVACWQPEERVIVECRQLEQVIEQLIKQKTMVTNALEALERQPVVSQLAVKSLRQTHKLLDKQVREMEDKMLHALEAVYEKEIRLLCSIPGIGRKTAAMLLLFAGGFRKVDSYRQLIAKAGLSPREYTSGTSVRGRVRITKMGGGLIRGKLFMCSFSAKKSNAACKALYDRLLAKGKNGKLALIAVSNKLLKQAFAIVKSGVPYRADFTKNYSCEA

SEQ ID NO: 401686 - protein, 338 aa, unidentified
MYYTGIDLHKFTSYLTTVDSSGAIVKQENLKNVAHNFIQYFSSIPGEHKTTVESTMTWYWLNDLLTSINIPLVLAHAKYVKAIAYAKVKTDKVDSHTLAQLLRMDYIPVAHKISNENRLLRDALRARLKIVQRHTSITNSMQLLLAKYNYDSPTQLSGISKFQYEQLSEVEALLDEQMLDLEKQLYPFLIPDDDIQRLLWIPGIGKMNAFTLLLEIDEINRFPDVKNFFSYCRLVPSARNSGGSSKQRSSKDGNKYLKVAFSNAATHAVQYYPVIRKYNNSLTRKKNKQIAKTIIAKEIAKIVFHVLKNKTDINNKFKAQLLEHTKSLQWPRVVSPDV

SEQ ID NO: 401687 - protein, 339 aa, unidentified
MVEGTEGSHHKEGSTKMRKHNTVCAGIDTGKHKLDVALNERPPELQVDNTSDAHGTLSAWLRQHRVKRVGIEASGGYEKAVVARLRRDGFVVLMFQPKQVRAYAQFVQQRAKNDKIDARLIAACTAAIKTIHAPPDPRLAPWAEHLTLIEQIEEDLARAKTRLESCREPQFAAHWRAEIKRLNKSLKSELKTLVSAIRQHQDLAARLELIESVDGVGLRTAVAILVRMPEIGRLTRERAAALAGFAPYDDDSGDHVGVRHIAGGRKRLRRSLYAAALPAAHRWNPQLIALYRRLRAKGKVHKVALVACARKLLIYVNTVVGRGTPWVAKPPIPSALRAA

SEQ ID NO: 401688 - protein, 327 aa, unidentified
MDVLHPRCCGLDVHKSSISACILLREAGRVQKHQRRFGATTQELQALAEWLRQFGVTQVAMESSGVYWKPVWNILEGQFTVVLANAQHIKNVPGRKTDQKDAEWIAQLLQYGLLRASYVPCEIIRDLRDLTRMRASLSQEASRLSSRIQKVLEDANLKLASAATNVLGKSGRAMLEDIIAGEDDPEHLASLALGHLRVKIPQLRLALEGKIRSHHRFLLRRLLDQIQSVEHEIALLDERLEDIGRQRPALAQAVARWDTIPGIDRVAAWAFLAEIGDNMGQFPTAEHLASWAALCPGNLGRAARRTIGWMRRLWHGWPESIPSCCVR

SEQ ID NO: 401689 - protein, 331 aa, unidentified
MNYSHFVGLDVGKKTFDASLMSADEKELSHKSFDNTPTGIQSLLDWIAGYHLSLSKLLFCAENMGSYVTELSVSSVSMGFSLALVCPLTIKKSIGLQRGKNDRIDAKRIANYAVLHYRKLELYKLPDKDLMRLRGWIIIRDNLVKQKVSSIKLLETFSWMAKLADVTESISFLEEQLKSIKERILEVEEDMEQLIAASTSLYTNYLLLRSIKGIGIINAIVLLCVTDNFQRFDNPRKFACYCGAAPFEHTSGISIRGKTQTSSLANKEVKVYLTRAAITAISWDPQMKAYYKRKIAEGKHKASVINAVRAKIIARSFAVIRRQTPFVTLAV

SEQ ID NO: 401690 - protein, 462 aa, unidentified
MKREKLASKAEKPRGKKVDWKTLEIMHPDAAGIDIGGREHWVAISPDRDEDPVRRFDCFTADLEQMAKWLIEKGVRSVAMQSTGVYWMPVFEMLEQSGLEVYLVNARHTKNLPGRKSDVQECQWLLKLHTFGLLNNSFQPADEIRVARTMWRHRSNLVAQAGATIQRMQKVLTEMNVQIHNVLSDLSGVSGMAILKAILKGERDPWQLAAFAHPAVKASPADIAKSLHGNWREELLLVLRQEMELYQSYQDKIAECDHHLRKHLQSLASRVDLQAQPLGARPKGKKAPRGNTPQFDLRSELYRITGIDWSQVNGIDVQIAQTVITEVGVDLSSFPSEHHFASWLGLCPMNEQSGRKILNRRTPKVVNRATVAFRLAAHGLLRSQSYLGAQYRRLRTRLGAPKAITAMARKLACLFYRLLRHGQPYVDKGAQYYESRYREQQIRSLAKRAKKLGLELVEPSAA

SEQ ID NO: 401691 - protein, 349 aa, unidentified
MDHIGMDLGKKESQIAIITEAGELVEKRMRTERERLTQYFKDRLPAKILIEAATISEWVARLLEGLGHEVIVADPNYAPMYAQRSRRVKTDRRDARALAEACKLGAYRPAHRTSEEQRHVRAQLAVRDSLVRDRAGLVTLSQAILSREGLRVPTGSSGCFGERVERLGLPPQLAAEIAPLLAMVVPLNEQIGRLDEKLSELGRKDERVKRLMTMPEIGPVTAVAFVATLDEAGRFRGAHQVEAYLGLVPREWSSSEVQRRGHITKAGNSRMRWLLVEAAWRVATHRKRAETQALREWTERIARRRGQRIAVVALARKLSGILYAMWRDGSAYDPAKLKGALRSKAEQVA

SEQ ID NO: 401692 - protein, 418 aa, unidentified
MATVDIVYPICCGMDIHKNFLVACIATTDERSNTKHQVRRFSTFTGDLRKLADWLTANNCKDVCMESTGKYWIPVFNILEKTCTVFLTHPKYVKAIKGKKTDKRDAKWISELFKCDLIRASFIPPADIRQLRDLCRYYVKLTYMNTSEKNRAQNCLTMCNLKLDAVFSDVFGASATRVREAFFEHNSTDFDIAPLLHKGCKASVEGVKEALEGELSDVQVEKLKFIQQHQECIRNLQDALESLILRLAAKYQPQIDLLLTVPGISSPLTAIRIMAEIGVDMSVFETAKKLCSWAGLTPQNNESAGKKKTTRIGRAGVYLKPLLVQIALAVGVSNKHPELRDKYQALKKRRGGKKAVIAISRKLLTAIWHILSKNEPYNAELYRKSDAPPVNRVLNHEQAFALLRSRGYLICDAEGVVT

SEQ ID NO: 401693 - protein, 346 aa, unidentified
MKEKNNQMLKQNVGVDLDKDKFEAAFFVIHAHMDTSVVATRKFENREQGIANFITWLNKHRREDLSVHITMEATGVYYELLAYRLVEKQFPVHVMLPNKAKKFAQSLDMKSKTDKLDAKALGKMGIERKLRPWQPASKNLRKLRFLTRERESLINEKTRASNSLHALKHSHEAPEKSIARYEAQIEFFEERIKEVETDIHSLIQKDEILEQKVQRIVTTPGLNINTVAILIAETNGFAAINNIKQLISYAGYDPRIQESGQWKGHSKISKQGNSHIRRALYFPALSFKQHSQWHGKFFERLKTRKEKGMVAAVALQRKLLILAYVLWKNDDVFRPQYAQKMTSGIG

SEQ ID NO: 401694 - protein, 370 aa, unidentified
MNVTTFAGLDVHARSIKAVALDIVTGEVRSATFGYDACAVAEWVRSIDPGARCVYESGVTGFDLQKKLSSLGVDCVIGAVSKMIKPAADRRRKNDRNDAEFLARMLSVGNVVEVWVPDDECEAARDLARALDDAREDLRRQKQRLSKFLLRHGLVFDEKTPSGQRKGNWTGAYWTWIKGISFREKADNDTLAFYVDAVRRAEEDKRCLEKLVADEASRPRWKKRVDSLRCLKGIDVMTAADIVFEAGEFARFRNARSFAAWLGLAPSEHSSGEKVAQGGITKAGNKHLRRVMVEAAWHYLNASPHSKGLAPGQAPDPAARRHASKGVRRLVGRRAALLERGVHKNKANVATARELACWCWAVGSMAEGAR

SEQ ID NO: 401695 - protein, 342 aa, unidentified
MQITTIGLDIAKNVFQVHGIDAAEKVVVRKQLRRSQVLAFFKALPPCLIGMEACATAHYWARELTKLGHQVRLMPPKDVKAYVKRNKNDAADAEAICEAVRRPTMRFVQIKSVEQQGRLMLHRVRDLLMRQRTQVINALRAHLAELGIVAAQGREGIKELLKIIASEEDAGLPVDAHASLVVLAAELQAMQTMIGSIDKRIMAQHCSNEASQRLESIPGIGVTGATAITATVPDPKIFRSGRDFAAWIGLVPRQASTGGKQKLGPISKRGDRYLRRILVVGACAVLRYARQQPQKYPWLTQLLARKPFKVVAVALANKMARMAWALLAKGGTYRAPALTAAA

SEQ ID NO: 401696 - protein, 420 aa, unidentified
MNKITISKKGQYVNSDVLVIGVDIGKGFHMAVARRRDGSFTKALKFSSDAVGFNNLKVWLDQWYVQDRFSRILIGLESTGHYWMTLAFWLQNQGIEVVQVNPLHTHKAKDLYDNTPGKTDKKDARIIADLVSQGKFLNCIIPRGHYADLRYLVLLRKRLITERTRQLNNIHRILDVLFPECTKVFDNLKTKSSLYLLRYYYTPALLLSCSHKRLVKRLHKISRGKIRLDKLTQLYELARSSVGITEGINGLRVMLFRGLLRYEQLAQELGALEDRLEELVSGLPETVYLRSVKGIGLVTVAVILGETGGLRYYSSAEEVIKLAGLNLYELSSGKHRGKRRITRRGRSVLREGLYLAAVGVVRRDGPLHEFYERLRSRGKYGTVALVAVACKLMRLLFALVRDQRYYVADYTHSNVISRVA

SEQ ID NO: 401697 - protein, 417 aa, unidentified
MNTENYAALVALDWGETEHAFAAQVGESPVETGTMPATPETLHGWLEELYKRVGGRPVALALEGGKSAVMHALVAHPWLVIFPVHPATSDRFRKAFVPSGAKDDIPDAIVLLKILSQHREHLRPLKLDSAETRKLAALVAARRKAVDERTRLACELGSTLKSYYPQALELCGREPATALALDFLTRWPELRSLKAARRATLLAFYTSHNSRRPEVIDERLAIIAQARALTEDRAVIEPAILQVKMLVDLLRPLQKNIALMDESIAEAFNAHPEAALFHGLPGAGPTTAPRLLAAFGTDRSKYPDASSMQKYAGIAPVKQKSGRQLWIHWRWNAPKFLRQTFVEWAGQSVPKCAWAKAYYMQQRAAGKRHQATLRALAFKWIRILWRCWHDRVPYDEARYLASLRNQKSPLAARLAIT

SEQ ID NO: 401698 - protein, 352 aa, unidentified
MQHFIGTDMHTRDQVVAWIDEQTGEIKKRRLEHEGEEVRKFYAQFPRGTVVGMEATFPAYWFERLLGELGHELWVGDAARIRASEVRYQKTDRRDAEGILDLLRTGRFPRIWVPSLEERDLRQLLVHRMKQVRARTQVKNQLHALAISQGVCRGRKLWSAKGRKELESLALLPWAARRRKELLESLDRLDEQVRELDRAVEEAGRARPEVALLRTHPGVGMVVGLAFVLSVGPIERFPRSRKLVSYWGMNPRENSSAGRQRLGSISKQGNTMMRWLLVEAAQTAARLDPQLRRIYQRLKKQKTSGVAKVAVARRLAVRLFWMLRTRNNYAQLVHMSGSPSSAVVPPKAEPNV

SEQ ID NO: 401699 - protein, 342 aa, unidentified
MSQGRVGIVVVERGRPGSMETTQGACFAGIDVAKAKLDVAWTTEPTASWQTTNDAAGWSVLVSRLLPLAPTLIVLEATGGYEAGAASALALAGLPVAIVNPRQVRDFAKAMGILAKTDALDAHVLATFAARIQPACRPIADELQADLRALVARRQQLIEMLLAERNRFELARPAVRSSIRTHVRWLEARLRDVDRDTRDRIQQSPIWRAHDRLLRSVPGVGPASSARLISSLPELGHLTAREIGKLVGVAPLNDDSGRRSGPRRIWGGRAGVRHTLYMATVSAISCNPVIGAFYRRLRGQGKPGKVALIAAMHKLVTILNAIMRTHQPWTLTPAHLTDGASA

SEQ ID NO: 401700 - protein, 344 aa, unidentified
MGEVITIGLDIAKAVFQVHGIDGVGAVVIRKRVSRAKMLEFFADLPRCLVGIEACPSAHHWGRELQALGHTVKLMPPSYVKAYLKRGKNDANDAAAICEAVTRPSMRFVPIKTKEQQTALMLHRTRQLLVRQRTMLSNALRGHLAELGIVSTKGRNGTGELLRIMADGADSRLPPAVRGILDVLARQYGAIGAEILSIDKNILALHRSCEASRRLAEIPGIGPIVATALVAEIGDWKTFSSGRSLAAWIGLVPKQHTTGGKDRLGSITKQGNRYLRWLLVVGAMAVIRYAKMHGTKNRPWLGRLMERRPTKVAAVALANKIARMAWAIMVHGDRYKEPKLLLAA

SEQ ID NO: 401701 - protein, 359 aa, unidentified
MDVRDPAKRHVVGGVDTHKDLHVAAVVDERDRVLGSRSFTTTRQGYRQMLAWMGSFGEVQRIGIESTGSYGAGLLRFVQTVGIEVLEVTTPDRHDRRRRGKNDDLDAQNAAHAAFAGQRTVTPRSRDGMVESLRVLSACRKTAVAARLVALQLIQNTIVCAPDGLRDVLRSMTRMQLIRTLAAWRPDLTAYRDVEAAYRITFKSLARRYLELHDEIADLDIMIGAIVDELAPDLVERNSIGHVGAAQLLLAAGDNPDRLRSEASFAALCGTSPVPASSGKTIRHRLNRGGDRHANSALHIIAIGRLRTDPKTKTYVAKRVAEGHSKLEAIRALKRYIAREVFTLIMRRHKTINQTQIAA

SEQ ID NO: 401702 - protein, 347 aa, unidentified
MVETMTVAGFDVHARSVHGAALCVPSGELLRIRFGGGVEGPVAWLGSLPGPVRACYEAGPTGFGLYRAAVAAGIDMCVVAPSKTPRGPGDRVKTDRKDAELLARLLLAGSLKAITVPTPEVEAARELVRAHDAARRDLMTARHRVSKALLRHGRVYPKPSTWTQEHRRWLARQAFGEAMSELAFADALAAVDGLSARKAALAERISRLACEGPWSPTVARLRCFRGIDRQRFTHPKALGSWLGLTPSLSQSGESARAGSITKTGSTLARRLLVEAAWHYGRDPRIGATLANRQAGQPDHVLQIANRAQPRLHRVYHQMRKRGKPHNVATVAIARELACFLRAAATTD

SEQ ID NO: 401703 - protein, 370 aa, unidentified
MKTKTTPSVVPTSPATVTPGVPQCVIGLDLGDRSHHVCVMDATGQIVREGSLLNTRPALAKLMAEFPRATIAIEAGTHSPWISRYLTELGATVLVANPRKLHAISRSERKCDRRDAQMLARLARVDPALLHPIQHGSAQAQHDLLGLKLRDALVRTRVNLINAIRFTLKSLGHSVRNPSSESFHKTVLADVPADCLPVIQPLLTVLAQVTEQIKGMERDLVQRSRKDYPATQRLQQIAGVGPLTALCFVLKIGDPQRFSRGRDVGAYLGLCPRRDQSGGTDKQLRISKCGDGLLRRLLVSAAHYILGPFGPACALRAYGQHLIGTSAREKKRAVVAVARKLAVLLLSLWKHGTDYEPRVPAAPTLVLTPA

SEQ ID NO: 401704 - protein, 391 aa, unidentified
MFYIGVDIAKSNHEASIINSDGKLVSESFSFSNSIRGLGKFQKFISSFSIDSNNCIIGMEATGHYWLSLYSFLLDLGFYCVVINPIQSDAFRKMYIRQTKNDSVDSFVIAQILRFGEFSVSHFSDEDTFALRNLSRFRFALVDEASDWKRKLVAILDQVFPEYSSLFSNIYGVASRELLSKYPLPEDMISIPADELAKLLSKCSKGHFGIDKAKEIQVKASNSFGVKFALKSFSFQIKQIIAQISFLEDQILEIEDEISSMINSLCPVITSITGIGDVLGAAIFSEVGDISRFERANQLVAYAGLDVAVKQSGNFNATDTKISKRGSPYLRRAIWLAAGVAAFKDPALSVYYQKLRQRGKAHGTAIGAVARKLTNIIFAVLRDNKAYIPNI

SEQ ID NO: 401705 - protein, 350 aa, unidentified
MSQTLNAAIAVVGIDIGKNSFHIVGHDARGAIVLRQKWSRGQVEVRFANMPPCLIGMEACVGAHHLSRKLSSLGHDARLMPAKYVRPYSKGQKNDFRDAEAIAEAVQRPTMKFVATKTAEQLDLQALHRVRERLVSQRTGIINQIRAFLLERGVAVRQGLRFLRAELPRILATPPDVLSTRMVRIVEDLAGDWRRLDERVEILSDEIEAIARQDAGCERLMSVPGIGPIISSAMVAAIGTGDGFSKGRDFAAWLGLVPKQMSTGDRTILGKISKRGNRYLRVLFVQAAWVALVKVKPTRWGYGLGRWLEAAKKRLHHNVLAIALANKLARIAWSVLARGRAFETSELQAA

SEQ ID NO: 401706 - protein, 370 aa, unidentified
MKNGNTLYVGLDVHKESIAVAYASDDGPADPVALGTIGTRQCDIDALIRKLQSKSGRLVFVYEAGPSGYWLYRYLTGKGLTCMVVAPSLIPRRPGDRVKTDRRDAATLARLARSRDLSPVYVPEPADEAIRDLARAREDTRRDLNAARFRLKALLLRNDIRYAGKADWKPEHVRWLARLVLPSPVQQIVFQEYVRTVTERTELLGRLEGQLREHSQGWRFAPVVAALQALRGVQFTVAIITVAELGDLTRFDSPRQLMSYLGLTPSEYSSGDRRRQGGITKAGNGHARRALVEAAKAYRHRAKLSEAMQARQQELPAAVRDIAWKAQVRLCGRYRKLHARGKHPNTIAAAIARELAGFVWAIVKAQPLAG

SEQ ID NO: 401707 - protein, 461 aa, unidentified
MAKKAKKVKTAKGAELRIVNPDAAGIDIADGIMQVCVPADRSKDNNRAFGAYTSDLHAISAWLRECGIKTVAMESTGVYWIPLFCRLQEDGLDVVLTNARDVKNITERKTDESDAEWLMLLHQYGVLKASFQPHNDAKRMRTLTRHRDTLSREASSIVLRMQKAMQQMNIKLTLVLSDITGKSGIRIIEAILAGERDPKRLADLADIQCKTPKEEIAKALEGNWEEDLMFVLRQNYDTFKHYCTQLGECDAELEKLMENYRAEVAKVEDTSYSPAKKRRDYKKTRHTVGFDVERKAYEMWGVNVFEIPGISHLTALELMSELGHDFTRKFPSSKQFCCWCNISPNTKISGGKRISSHVPHRRNNVGLIFRSIASSLANAKNQLGNFYRRIRSRAGGKAAVIATAHKVAEIFFAMVANQTTYNPERVGIDKKVLLEKRITRYKRELERITGTHIEIGNACVP

SEQ ID NO: 401708 - protein, 328 aa, unidentified
MEGPIISIDVSNGCSHFRCFIDRNKAFGKVHKIKHDVDGFQYLLDCMERLNEKTNEEVCVVYEATGVYTKPLTRFLNKHKVRHYMVNPLQAAKMRKTDLHSKKTDKNDPNSIAKVYYDKDLYEYADEEPIYHTLRVMNRNYEDQLDHLRKYKVTFQNILCIVFPGYGSLFKNPYCDIALAILKKYPHPDMIRNKKPETVANYIEKHTCHHKDSCLKWAVKVIEYANKTYPGCDKDEIEVIELLRIIKELEVCIASCDTQLNEMVQLAEQLPNYFLVLSIDGIGPNLACRILAEIGDIKRFSSTKQLISYAGIDPHISQSGDVLSLIHI

SEQ ID NO: 401709 - protein, 460 aa, unidentified
MRGKRRGRPRRKHLEMHVVNPNAAGVDIGSEVHYVAVVPDRDPEPVRSFRCFTADLNALADWLDACGIETVAMESTSVYWIPLYQILEARGFEVVLVNARHVKNVPGRKSDVLDCQWLQQLHSYGLLRASFRPEDRICVLRSYIRQRDNLIKSAGAHIQRMHKALEQMNIQLHKAITDITGVTGMRIIEAILDGERDPIKLAQLKHYNTRSSNETIAKSLEGDWREEHLFSLRQEFELYGIFRQKIAECDRKIEACLSSFESKVDPDHKPLPPYKHGNKKPHGNQPDLDLRNPLYRMIGVDLIAIDGFDVLTVQTIISEVGLDMTRWPTEKHFASWLGLCPNNKVTGGRVKDTRSKKVVNRAACAFRMVAQAAGKSHSALGGYYRRMKIRLGPSKAVTALAHKQSRIFYRMLRYGMNYVDPGLHYYEQKYRQRVLNNLKRRARLLGYELIQNPEIVPAVS

SEQ ID NO: 401710 - protein, 345 aa, unidentified
MHTTTIGVDLAKEVIQVCVVQHGKMLSNTEMMPGAFAAWLSTQRPAMVVFEACSTSNYWKQKATACGHDAQLISAKLVASIRQNQKTDKNDALAIVQASQLTDIQFIKGKNFSQQELQSISKMRELAVRQKVALTNQITALLLEFNIRVSPKSGGLAGVVQTTLEDAENGFSMAFRDALSETWQALLAVHNRIARYDTSLAEAIEANPDCKKLLALESVSSINAVHLYTTLACGDENLFTSARDASACIGLTPVQYSSGGQVKLGAISRKVKNSLVRSHLISGAMAVIHQVVKREPKTAKEQWLKALVERRGKKCAAVALANKTVRTAYAMLRDSTEYRAQPIRA

SEQ ID NO: 401711 - protein, 324 aa, unidentified
MKHFAGLDVSLDETAVCVVDEEGRIVKEARVPSEPEALVGLFRGLGLALERIGLEACSLSAWLHEGLTAAGLPAVCIETRHAKAAMGAMANKTDRNDARGIAQIMRTGWYRAVHVKSPACRSWRALLAARRLVLNKMRDVENGLRALLREAGLKLGRPGRKEFAARVRELTADDSVLSAVAEPLLAVVEVMTRELARLTKQILAVVRDEPVCRRLMGVPGVGPLTALAFRATVDRPDRFRRSRDVGAHLGLTPKRYQSGETDVQGGISRCGDELARTALYEAAHSLLVRSRRRPSLRAWGPRVAERRGVARARVAVARKLAVTC

SEQ ID NO: 401712 - protein, 334 aa, unidentified
MENIALIGIDLGKNSFHIHCQDHRGKAVYRKKFTRPKLIEFLATCPATTIAMEACGGSHFMARKLEELGHFPKLISPQFVRPFVKSNKNDFVDAEAICEAASRPSMRFVQPRTESQQAMRALHRVRESLVQDKVKTTNQMHAFLLEFGISVPRGAAVISRLSTLLEDSSLPLYLSQLLLKLQQHYHYLVEQIKDLESQLKRKLDEDEVGQRLLSIPCVGTLTASTISTEIGDGKQYASSRDFAAATGLVPRQYSTGGRTTLLGISKRGNKKILTLLVQCARVFIQKLEHQSGKLADWVRELLCRKSNFVVTCALANKLARIAWALTARQQTYEA

SEQ ID NO: 401713 - protein, 343 aa, unidentified
MQIHSVGIDLGKTTFHLVALGVAGKVIVRKKFNRKQLLVYTANVPASLIGLEACSGAHFLGRALRKQGHDVRLIPAQFVKPFVKSNKNNFIDAEAIAEAVERKNMRFVPIKTDDQLDLQGIHRVRDRLICRRTAVINQLRAFLLERGMVFAHRPANLKAAMADILENAEADLTPQMRSLINMLWDEWKLVEEQIKKLDLELERISAADAGCTRIRQIPGIGPVVATAIVAAIGNGAAFHKGRDFAAWLGIVPRQYSTGGKAKLLGISKRGNIYLRKILIHGAPAAVLRIKRDRAPIGPWLDALDARAPKNVVVVAMANKLARIAWAVLSSGEDYRPMGNTVAA

SEQ ID NO: 401714 - protein, 310 aa, unidentified
MDRITVGVDVSKDRLDVAVCPSGEAFVVERNAAGLQRLATRLRQIAPHIVALEATGGFETVAAAALAAAGLPVVVVNPGQIRSFAKALGQRAKTDPIDAAVIARFAEATKPDIRPLPDEATRLLADLVARRRQIIEMIGAERQREKRVTTPHLRKSIVRLLKALEKELASVDKDIDDAVRGSPAWRDKENLLASVPGVGPAIARTLIAELPELGQLSRKQVAALAGLAPFTRQSGQWRGRSFIGGGRIAVRTALFMGAMVAKRHNPVLKAFFDRLVTAGKPKMVALIAVARKLLTILNAILRDRQPWQIA

SEQ ID NO: 401715 - protein, 367 aa, unidentified
MSVLYVGLDVHKATIAVAVAEEGRRGEVRSCGTIDNTPLQVDRLMKRLAKGGQELHFCYEAGCCGYILQRQIAAAGHACTVVAPSRIPRKPGEHVKTDRRDAMKLARLHRAGELDAVWIPDAAHEAIRDLIRSRGDAMEQLKACKQQLQSFLLRHGRVYDGRTNWSRDHYYWLSLQKFEHPAQQIVFQDYVHAIHDGDKRHAQLVRQIEEHVNHWSMKPLVDALCLMKGINLVAATTLLSVTGDLRRFPTPMQLSAYFGLVPSEHSSGDNIKRFRLTKAGNGEARRVLIQGAWCYRFPARGPTAKQSALSVADKSIRDVAWRAQLRLCARYRRLIALGKKSPVVCAAIARELATFIWEMGQIVPITS

SEQ ID NO: 401716 - protein, 456 aa, unidentified
MSRKRRSSKKTSAPVLHSLNPNAAGVDIGATEVYIAIPADRDPQPVRHFSTFTEDLHAAADWLKSCNIETVAMESTGVYWIPLFQILEARGFQVFLVNAHHVKNVPGRKSDVSDCQWLQYLHSVGLLRGSFRPEQEVCTVRSILRHRDGLVQMASSHVQHLQKALDQMNLQLHHVISDITGMTGLAIIEAILAGERNPQTLAKLRDRRIKATESTIAKSLVGDYRREHLFTLSQSLAAYRHYQELIGACDKEIEQYLETFESKADPPEDPKWKSQDGQKTRGGRPAFDLQSHLYRIFGVDLTEIPGVHTLTTQTLLGEIGPDLSRFANAAAFTSWLGLCPDNRISGGKILSVKTRKVKNRAATALRMAAQSLYRSQSYLGHYFRRMRAKLGAPKAITAAAHKLARVIYHMLTTRQPYDETICGQNELQNRQRLEARLRKQARDLGLEIVAARTGAV

SEQ ID NO: 401717 - protein, 421 aa, unidentified
MSDTMLHLGMDVHKDSLTLAVLPAEASAPTHVDRLPNDLQKLRRYLARHAPVPAATRVCYEASGAGYVLQRALTDWGYHCDVIAPSLIPKRPGVQRKHDRRDAVELARLYRAGELVVIRIPSAAEERVRDLVRCRETFQREILKSRHYVLKFLARRGVVYREGRHWTSAHERWLRQVLAASPDLGAEDRLVLGEYLALLDYKLQRRQELDRQLEQLVLAPAMATAVAWLQCFRGIQRQSALVLATEIVDWRRFENPRQLMAYLGLVPREHSSGDRERRGAITKAGNTHCRHVLVQAAWAYRYRPLVSQHVKRRQEGQPALVVAQAWKAQHRLHKVYTKLAVRRRPQIAVVAVARELAGFLWAVLREIEPTTAAAATVAATCGSTGHGRAISPQPAASPNGSLELSRIHRRSVRWSHPRLAV

SEQ ID NO: 401718 - protein, 332 aa, unidentified
MAEVTRFVGIDVSKAQLDVALGDNEGTFSIANDEHGIRELLKRLTPGADLVILEATGGLEVAVAGALATAGIAVAVVNPRQVREFARATGRLAKTDRLDAQVLARFGEAVKPPVRPLKDEQAQALEALVMRRSQLVAMLTAEKNRRTNAAKVIRRSIDEHIRWLEKRLSGFDDELSDLIRATPIWRARDELLRSVPGVGAVLSVTLLAHLPELGTLTRKQIAALAGLAPFNRDSGTLRGSRCIWGGRAQVRRVLYMATVAAVRANPNIRSFYTVLRQRGKHPKPALTACMRKLLVILNAVLRTNTPWQTLTPAASISTFSPLPGAVTQHGCC

SEQ ID NO: 401719 - protein, 367 aa, unidentified
MKKVSTASGKATKNFPQPKLTIGLDLGDRSSWYCLPDEVGEVLQEQKLSTTPKAMREVFGTLPRCRIALETGMHSPWVSRVLSELGHEVIVAHARTVRLIGESRKKDDRLDARTLARLARIDPQLLCPVKHRSAKAQADLTVIRARAGLVRARTALVNTARGLAKSYGERLRGCNVRNMNPEKAKGLTAELQRALEPLLAGIESLSERIREYNQRIEQLAQQSYPQVALLKQVKGVGTLIALTFLLTLEDAHRFRKSRDVGCYLGLQPGRRNSGQSEPQMHISKEGDPYLRTLLVQGAQHILGPFGIDCDLRRWGLKLAERGGRNGKKRAIVATARKLAVLLHHLWVSGEVYEPLHNSQQSSLALAA

SEQ ID NO: 401720 - protein, 365 aa, unidentified
MKKNNTVATRRKQIVREEKLTIGMDLGDQFTYYCVLDEAGEVMVEGKLPTTKQGKQVFGRIPRSRVALETGAHSPWVSRALTQLGHEVIVAHARNVRLIGESSRKDDRLDARMLARLARLDPRLLSPVQHRSAEAQVHLTVIRARAALVGARTALVNTARGLAKSYGERLRKCGTQQVRQDLAAGLSAELRAALEPLLAEVESLNQRITEYDRRIEQIAKDVHPEVALLKQVKGVGTLIALTYVLTLEDPHRFRRSRDVGCYLGLRPGRRNSGHSQPQLHISKEGDRYLRTLMVQGAHYILGPFGQDSDLRRWGLKLSERGGGNAKKRAIVAVARKLAVLLHKLWVSGEVYEPLRNNHTVVTAVA

SEQ ID NO: 401721 - protein, 409 aa, unidentified
MNITCVGVDVSDGHSTVSAYAWGDKMVMRPHDVPHTVGALRKLADEIGRLPGEVRVVMEHTGRCWLPIAQSLRTAGLYVSAVNPKLIRDFGDNKLRNVKTDKADSKKIARYGLRYWNELQLYAPTEATRQKLLEFSRQLDNSNKLLTAQKNNLQAIVSVTFPGVRKLLTSPAREDGHIKWVDFVCDFYHCDVVRKLGEAAFVERYRKWCKRKGYKCTKIGCAKIYALACDCVPSLPCDRDTKLLVNEVARQLTAISTAVEAYRSKTYELASTLPEFDCVMSIFGCGKTTGPQLMAEIGDPMRFKDRIVDGKLIRGKKQLGQFAGVAPGNNQSGSYEQKSVKASKKGSPHLRKTLFLVVSTYLKQKPDDPIFHFLDRKRAEGKPYYSYMTAAGNKFLHVYYARCKDALAA

SEQ ID NO: 401722 - protein, 312 aa, unidentified
MKAYVGIDISRDTLDMAVYGEDKLWQFKNNPKDIARLCSLMNKVKPALVVFEATGGYEMPLYIALCETGLPAAPVNPRQVRDFAKATGKLAKTDALDAKVIARFASVMLPEPRPIPESQEIKEIVARRNQLVQMIVAEKNRLHNAREKIQERIQTHIQWLEEELDSTNKELALSIEDNPEWQKKNALLQSVPGVGPVLATTLLSDLPELGKLNRKQIAALAGVAPLNRDSGSMRGKRAIWGGRATVRASLYMGTLVAARYNPVISQLYQRLLEAGKCKKVALVACMRKLLIILNSMVRYNTKWLYAPIEVAV

SEQ ID NO: 401723 - protein, 352 aa, unidentified
MLVTIGADSHKATHTVVAVDEVGRVLGEKQVRATSEGHLVLVQWAARFDQVVFALEDCRHLTRRLEADLLKAGHRVVRVPTRLMAQARRSAREPGKSDPIDAQAVAQAALRYPDLPRAELDGPAREVKLLSDHRRDLVGQRTRIAAQVRWHLHELDPGLDIPSRGMRRRSVVTQLQAGLAGASGVVARITRELLARCQELNTQINGLDAELRVLVRAQAPALLAIPGCGVLSAAVIIGETAGVHQFSSRARFARFTGTAPVPVWSGASAGKVRLNRGGNRDMNCALHTIAITQARQGVGPGSSYIAKQTERGKDTTAALRLLRRRLSDTVFTALRTDQHVIARPATTLAEVA

SEQ ID NO: 401724 - protein, 344 aa, unidentified
MSQAITIGLDIAKTVFHAHGADERGGIVFSRKLSRAKLLDFFAKQPACLVAMEACSGAHHWARELQAMGHEVRLIPPAYVKPFVKRHKNDAVDAEAICEAVQRPGMRFVAVKSEEQQAAGMVFRTRDLVVRQRTQLVNALRGHLAEFGWVAPRGLAQVTMLADLLDEEEMASSLPEAALAMLRAMADMLAGLDDRIADLDKEIAKRAREDEVARRLMTIPGIGPIAATAIVALAPPVETFTKGRDFAAWLGLAPLQHSTGGKQKLGRISKMGERTIRRLLIIGGSSVVRQATLHGAPAGSWLERMLARKPRMLVSVALANKMARIAWAVMTRNEEYRAPAAVAA

SEQ ID NO: 401725 - protein, 351 aa, unidentified
MNYVGIDLHRDFFVAAAQDKKGNELFKKRYSNSIVSVDELVSQFDFPPMVVVEATRNWMWFIAALQKRGCAVQLAHPFRTKAIASARIKTDSIDAKTLCDLLRANLIPQSYIANSEELDNREVGRGRINLVHDQTLLKNRILAILGKENLRFGGSDMFGAKGKIWLKEQSLSDAKHQMVAVYMERLTNVQEAIASVDTLVKQRSSSIPEVELLQTIPGIGTTTAFLLASEIGTINRFPNAKKFTSYFGLVPRLSQSGNHAYYGRITKLGNPYVRWSLVQAAHRLARTDKASKRFVDRISYKHGKKKAIVALARKLATIVYAVLKEKRVYQKEYKKDPAVCPVIIPESQPIG

SEQ ID NO: 401726 - protein, 343 aa, unidentified
MDHFAGLDVSVKDTSLCIVDDTGRITREVKVASEPDALLAVLTNPGYHFKRIGLEAGPLSQWLFTALAEADLPVICVETRHMRAVLKAQINKTDRNDARGIAQMMRVGLYRRVHVKTLRSQKLRMLLTHRKLLQSKAIAVENDLRATLRNFGLKIGIVGTAGFEARIKELVENVADLVVLVEPLLVVRRVLREQIGVLHRRLLAIVRDDDVCRRLMTVPGVGPVVALTYRATVDMPARFRKSKSVGAVFGLTCSRDQSGERDRPGTISRCGDEIMRAMLYEAAQAMLLRSAKWSWLKAWAMQIARRRGMKRAIVALARRLAVILHRIWVDGTEFRWTRETAVA

SEQ ID NO: 401727 - protein, 423 aa, unidentified
MARKRKQGNKTNSAALPVMRPDAAGIDIGATEIFVAVPADRAAENVRSFPTFTQDLYALADWLKQCGIKTVAMESTGVYWIPLFQIMESRDFEVCLVNARHVKNVPGRRTDVCDCQWLQFLHSVGLLKASYRPDQEVCAVRSLLRHRESLVQMAATHVNHMQKALDQMNLQLHHVISDIVGQTGLAIVDAILAGEHDPQILAKLRGERIKATEEVIAKSLVGDYRAEHLFTLKQSLAAYRSYQKLVEECDHEIRTQLQEFQPPSSPAAPTVAPSAPASKKSSADGILKSELRRVFGIDLTKIPGIRTGIAQILFGEIGPDFTKFRSASAFASWMGLCPDNDISGGKVLWVGTRKVNCRAATALRMAAQSLHHSKSALGDFYRRMRAKLGAPKAITAAAHKLARIIFHLISTRQEFDDSKFAAD

SEQ ID NO: 401728 - protein, 417 aa, unidentified
MSKLLARPLGRCVGLDVHLDFCEIAICEEGKVFWAGRVPSTPEGMETLAESLQPSDRVALEVTGSSWEIVRLLEPHVSRIIVVSPGDTGISGARANTDRLDARVLARLLWTGELEAVWVPPEWVSRMRRRLHRREQLVRARSRAKNEIHAVLMRRLQGRPPVSDLFGVKGREWLRGLQLPLEEAETVQAGLRHIEFLDTEIEQLERLIATEALKSRQVRRLMTVPGVNVICAAIFLAAVGDIRRFKGSRPVVAYLGLDPRVYQSGSGPARGGRISKQGSPQARWALVEAARSVVLQPGPMHAFYERIRARKGHNAAIVAVARKLAVLFYCMLTREEDYAHQQPSLTAQKLRRLELKAGAPTRKGNPSGTRATREKMRQAEKRLAAQAEASHKRSVADWKAASPKNKHAGASVTAGRA

SEQ ID NO: 401729 - protein, 344 aa, unidentified
MNKLSRVGIDLAKNVFQLHGVDRYGKAVWRRRLTRDQWLKVLLGKVEPGCEIGMEACAGAHHWARQLQAKGFTVKLIAPQFVKPYVKSNKNDANDAEAICEAMSRPNMRFVAVKTVEQQDIQAAHRIRAELIGHRTAKANQIRGLVAEYGLVAPQQLSRLRAALPDWLEDAENGLTSRFRGLLSDLWDDLMTLDHRVAELDHEIDLIAKSDPVAKRLQQLRGVGPMIATALVAAVGDAEQFANGRQMAASLGLTPRQHSSGGKDRLLGISKRGDAYLRSILIHGARSVIRTAKQKDDRLSQWVTSLAERRHQNVAAVALANKTARIAWAMLRNGTDYEPHYIVA

SEQ ID NO: 401730 - protein, 349 aa, unidentified
MKKIVKQVLGIDVAQKELVVCLGRMYDDWTPELYSHRTFANSKKGFDAMIKWVQKLTIEDTAVRYVMEATGVYHESLAYYLEEKGYEISVVLPNKISNYVRTLEVKTITDKTASEAIARFGLERKLDKWKQPKQIFKNLKQLTRERDQIVETRTLAKNQLHAEMAEAFPNPSSLHRIKALIKFLDKQVAEIVKELTQLVKQDDQVNESIDLICSIPGVGRLTAATVLAETNGFELIRNKRQLTSYAGLDVKEKQSGTSIKGKTHISKKGNRHLRKAMHLPALAAIRHEKKFKSVFVRLVSKHGIKMKAAVAVQRKLLEMIYTIYSKNTAYDRNYLNQNEAELDKQTCLA

SEQ ID NO: 401731 - protein, 339 aa, unidentified
MKNNSITLPAAVGIDVAKATLSVCIRSHKGAERALTLRNTEADISAQLIPELAGMSGRIVMESTGHYHWTAALLLSSAGFDVRVVNPLLAKQYTSGNIRKVKTDPADAAGLARMAAVSDNLPASFCVPKERLYLRKKLATLASMYHQLQALTASLKSMQEAQTILDGCDSPAIVAVREAVRVLKRSLETLERECSADACRDAQSKETVSLIASIPGVSVFCAALALQWFAPMPDTNHKSWIAFAGLDISSRESGTWRGRCKLTKRGNSFLRKRLYSAAWGAVMNDAQFQSYYSELRGQGRAHVEALIIIARKLVRTMFVMVKTNTTYDASKFHYRMATA

SEQ ID NO: 401732 - protein, 476 aa, unidentified
MKNNTTTLHDCKLESIRFGGCGNSEAMVWKLGLDIELRAVAVAMQCGRGVIGPAAKWSREQLLQWVKEKRARGEAVHTVYESCGFGYTLHEQLSAAGANSLVTTPMRLNLERKRKNDRIDARELCVRLSRYLDGQSHELRPIRIPSRCEQQRRELGRQREFWKREVRRLENHGRALRIEHEHETLEAGWAGPRKWKRLAPQCSQFVREQLTPVVAQIRSAKAQLDRLSEQIESLVKKEQIPVGLGALTVSLIEGEVCQWERFAHRKAVGSYTGCCPSEHSSGPIQRFGAIDRHGNKHLRVLLVEAVWRLLRWQPHWHARQKYLLKLRHGSKKKIAVALARQLAIDLWRWRTGRASAQELGWSLPTLPLPEQPKPALVFTKPHQPRQSVPQGGTLLDAAADPKGSSLRMGAFHPQALPQVQARHHGRRSPLTTARIGAGDREKPPHINGKPPIAEQTDLGKNRTNKNENLKQHPVRD

SEQ ID NO: 401733 - protein, 409 aa, unidentified
MPTTFDCPAGPVAGIDTHTDTHTVAVISDTGRHIATDTFPATNPGYVAISEFMATYGVTTVGVEGTSSYGAGLTRHLRTQKYSVVEVLRPTRAVRRRDGKSDPVDAVAAARQVLTGEALSIPKDTSGPVESLRGLQITRRQLVMTAAKLMTTIKSLLVTAPDEIRRRYSAMSPLVMVEALSRCRPSADLADPRNGVLLALKTFATTYRDLHKQGTQLEKHISILVEMINPHVTSIFGCGAVVAADLIVSVGDNPSRIHSEAALAHLCGVAPIPASSGRTHRHRLNRGGDRRANSALHRIALVRMHHDQRTRDYVAKRTKEGLSKKEILRCLKRAIVREVYRVLCLGQAVLPMGQVEVDELKARRIERKLSQAQVAEKLGCAPARISDIETGKRPLPELRLAYEEFLKSA

SEQ ID NO: 401734 - protein, 415 aa, unidentified
MIMETVPQAEARTQVCQKLDAPETLILGIDAGKGRHVACIATSQARILQRRLILRGDAEGMAAMEKALKHWGPLTSYVAAMEPTGGYTACLDQFLRDRGVPVVYVHPLKVKSNRQTLDLSANKSDERDTVNVVDLVRQKKFYLPQERDTSQRLLLLAVKRHADLTKRRTRRVARLRLILEEHFPELERAFAQVPCATLLALLRHDVHPEAIRRLSLPAFLKPFVGMSGVSMPRMEEVFRLAHHSMGCRGTQAVFREQLDAWLQEWQGFETQEEEARKRMEQLAQAHPAYPHLNSIPGVGLVTIATFLAHLPDPSRFPYASRVVKFFGLDVVERSSGQRNPVQRHISKRGAPLMRKSLYNAALACLQHNPILRAYYDHLINKGKRPKVALVALMGKLARLLFAIYRDRSFWDTDAV

SEQ ID NO: 401735 - protein, 351 aa, unidentified
MTRKTDSVVARTIGIDTGKNTLHLIGLDDKGAIVLREKLARGRIAARLANVPKCLIGIEAGMATHCVARELIALGHEVKQVPPVYARPFRQGHKNDFRDAHAVAEAVQRPSTRCVPVKTDDQLDLQALHRVRSRLISERTAVINQIRGFLLEHGIPVRQGLRFLRQQLPDILAKRIDVLSSRIIRIIEDLSGDWRRLDERIENVTEEIEELAHGTEGCRQLMTVPGIGPIIASAMVAAIGSGTAFARGRDFAAWLGLVPKQMSTGDRTILGRISKRGNRYLRTLFMQGARVILLRPANWAKHSFGPWLAAAAKRLHHNVLATAVANKLARIAWTVLVQARSYETRVTSEMA

SEQ ID NO: 401736 - protein, 352 aa, unidentified
MIIGCDFHPSFQQIAYVNQETGQYGERRLNHREEAVGFYRSLAGRKVVVGLEATGNDGWFRKLVRECGHELLVGDASAIHAAAPREQRTDKRDARHILRLLVENRFPSVWQPSVANEEQRQLLMHRCRLVRMRTRIKNQLDSIAKSEGLTGSRSWSGQRRGQIEALPLAGWYSQRRADLLQLLDGLELRIKPLDRAVEAAAGQDAEARLLMTHPGVGPVVSLAYVLVMGDWRRFPRGKQVGSYLGLIPSEASSGKRQQQMGHITKQGNTLLRWLLVEAATTAQRYDAHWHRQYVRLSMTKHHGVAKVAIAHKLAVRLYWMLRSGQDYGQIKERGSHVRQSECPVGRSRRPIE

SEQ ID NO: 401737 - protein, 336 aa, unidentified
MKEVITIGIDLAKNVFQLHGVDRHGKPSLRKMVARAKLLETLANLPPCLIGIEACGGGHHWARKIAELGHTVRMIAPQFVVPYRKSGKNDANDAEAICEAVTRPNMRFVPIKSQEQQAALTLHRVRESIKVDRTALINRIRGLLQEFGIVLPQGAAKFSRRLLEAITDADMPLDAIAIFAALRGDLLRLDERLAECDQRIAHLAQEETAQRLAGIPGIGPVTATAVVATVGDANLFRNGRELAAWVGLAPKQSSSGGKTRLGRITKHGDSYLRSLFVQGAMTVIRHVGEKSDPRSQWIRNLVSRRGVQKTAVALAAKMVRTAWALMARGESYRMAA

SEQ ID NO: 401738 - protein, 335 aa, unidentified
MLYVGVDAHSKRSHITVMDEKGKIVKRAEVASSRESISRALGRYREPLKATVEASRCWGPMYDWLDEVAEEVVLAHPLKVRAIAEARIKTDKIDSETLAHLLRADLIPAAYAPSGEVRGTKRVLRQRMFLVRVRGMVKNRIHALLGQHEVRPPEVSDLFGGKGRSWLESLVLPSPDGELLREDLVLLDVISERIKGTEHLIEQLAKGDEAVVWLSSLPGIGPFLSVLIRYEVDRIERFRSAKKFAGYTGLVPSTYASGERMVHGRITKQGNKWLRWAFIEAVRPAICNSPSLRRFYERLKARRGAKDAKTATARKLVELVWTVWTEKRCYEEHRH

SEQ ID NO: 401739 - protein, 343 aa, unidentified
MDHFAGLDVSVKDTSVCVVDEAGKIIREVKVASEPDALLTVLNNPAYHFKRIGLEAGPLSQWLLSALAEASLPMICVETRHMRAVLKARINKTDRNDARGIAQMMRVGLYRPVHVKTLRSQKLRTLLTHRKLLQSKAIAIENDLRATLRNFGLKVGMVGTAKFEARIKELIESLPDLTLLVEPLLVVRRALREQIGILHRRLLAIVRDDEVCRRLMTVPGVGPVVALTYRATVDVPGRFRKSKSVGAVFGLTCSRDQSGERDRPGAISRCGDEMMRAMLYEAAQNMLVRSTRWSWLKAWAMQIVKRRGMKRAIVALARRLAVIMHRIWIDGTKFCWTREAAAA

SEQ ID NO: 401740 - protein, 346 aa, unidentified
MYQDNLFCLDLAKKSIQGCLLDKNHQVRFNRTFSRKKLTEWLSRQQPMTVAMEACSTAHYWSRVFERLGHRPLLVPTRTANRYREGHKTNATDALAVGVATRQPTTRFVAPKTIEQQEMQSVERIREHIGDDLTATSNMMRALIGEFGLEIPKGKAAFKRHVVELLEDAENDIPMVLRTELINEWMRYRQLELRLKEAEHTRDLLCKGHESCQRLIQLGSVGPVNAIGLYLALGDRGGSFKNGREASTCIGTTPKQYSTGDEVTMLGISKKCANKRLRSNLIQGARSVIMALKRREPKNAQEAWLKSLIERRGEGRAAVAFANKTIRIAWAMLHHGDDFKLHRNLA

SEQ ID NO: 401741 - protein, 388 aa, unidentified
MTQVPVPHSVPTAPDYDRTLVLAIELSNKSWVLAAQVPGLPRVKAKRTIEPTAEALLTAIQGYRDRAKAAGRQVERVVATYEAGWSGFWLARWLATHGIETHVVQPSSVPVDRWARRAKSDGIDAELLLRTLLAWLRGEPRVCSMVPVPAEADEDARRCVREREELVAERVALVNRVGAVLATLGVDEYNPLLRNRRERLSALRTALGTPLPPYAHAKVSRMLDRLDLVRAQIAALEQERDAVLENDAPDRAGEMIQQLATLRGIGVQSATVLVREAFVREFANGKALGSYAGLCATPYSSGGTEREQGISKAGNRRLRTVMVELAWLWQRYQPGSTQVSWFRERVGGTGARTRKVMVIALARKLLIALWRFATQGVVPDGAVMKPAS

SEQ ID NO: 401742 - protein, 415 aa, unidentified
MKTYSELKYYGGLDWAKTHHQVCILDGQGQQVERFGFAHSGPGWNAFRERLQGYPDLGMAIETSSGGVVDQLLGCGVTIFPVHPKAAKSYRQRQAPSGVKDDDLDAWSLADALRLDGAKWRGLSEQGPLIEELRLLCRDEEELIEQRTALVNQLQQALAEYYPAALEAFEDWTQAYTWAFVKQFPTPQKLVAAKAYRQREFLHVHKLWRSDTAPGRLEIFGRADQFCGSQAMIRAKSRLALALCQSLQTLAGQLQEYRVAIEELFARHPDHEVFGSLPGVGPKLGPRLLSSVGAERKEYPQAQGLQCVAGTGPVSFQSGQMRVVKIRWHCDRFLRHTVDLWANTSRKTCTWAQAYYLAKREQGKSHSCALRCLGQRWLKILWKMWQTHTRYDPEYHARNQQRHGSWVLQFEPAKV

SEQ ID NO: 401743 - protein, 358 aa, unidentified
MKIIGCDLHARQQTIAMLDTDTGEFVEKTLEHDGEELRKFYSGLSHPVLVGIEATGSMQWFLEMMEELGIECRVGHPQKIRKAETRKQKHDRRDARLLLTLLAENRFPTIWMPSTEQRDLRTLLRHRHQWVRLRSRVQHTLQSMALNHGLRKGHALWNQEGQHALRALPLASYASERRAALLTLYPRLQESIEELDKEVCEEVQQHPQARRLLTHPGVGPITALATEVFLGDPMRFADGKALASYIGMIPSEHSSGRRQRLGAMSKQGNTLLRYLWCEAAMHAVERDPELKRFYRRKLVQKGLGKARVAAARKLGIRLWIMMRDQIDYEEFCRRGKARQESGSVRAGMPAINSGPAQQ

SEQ ID NO: 401744 - protein, 447 aa, unidentified
MGEPISAGKRRARLKVINPRSAGIDVGSRFHVVAVPVELDPNPVRKFSSFTKDLIALAEWLLAVGISTIAMESTGIYWVPLYEILSGKGIDVFLVNARHAKNVPGRKTDINDAQWLQQLHSYGLVRASFRPDQKITELRSYLRQRDQLVRYRSSHQQHIQKALMLMNLQLHHVVRDISGLTGRRIIDAILSGERDPERLASLRDRRCKESAATIAAALEGNYQDDHLFSLKIAVELFDTYSEKIRACELAAQSLMTELAGSDYQDPGSQPGDWKICGHGFAFNPTHLIQALSGHNLLRLPGLGPTTVLTLISECGLDMKRWPSAQHFVSWLGLSPQNRISGGKVLSSRTRQGTTRAGSAFWMAAVPLGRTNTALGAFQRRLAARAGKSKALIATARKLAILYYKTLRDGLVYQDPGAAAYQEESRDRQIRGLQRRAIALGFQLVASA

SEQ ID NO: 401745 - protein, 350 aa, unidentified
MIIIGVDFHPGLQQIASGDTDTGEFEEKRLAHREEAERFYRDLASRGAQVRVGMEASGYARWFERLLAELQIELWIGDASEIERKRARKQKTDREDAQHILQLMLKDDFPKIWVASWENRDLRQLLWHRHRLVQARTRIMNQLQAVALNEGLQCKKRLWRASGRQQLESFRLGPWASRRRRDLLELLDRLSPTIAELSQAIEQEAEKCPEAQRLMTHPGVGPLTALAFVLIIGQAERFQCGKQVASYLGLVPLEKSSGKRRRLGHITKQGSSIVRFLLVEAAQAAVRGDPQWRSKYLRLLMRRGRKTAKVAMARRLAIRLYWMWRERQDYQQSRSFGSHAGQPGNRDGVH

SEQ ID NO: 401746 - protein, 342 aa, unidentified
MEQYVGLDVSLEETAVCVLDKTGKVIWRGRCSSDPDAIARTVRDRAPFAVRIGLETGQLSTWLVHSLRRLDLPVVCLDARHAKAALSLQVNKTDDNDAHGLAQIVRTGWYREVAVKSMDSQAVRVLLMARAQLISQRQATANQIRGLLKTFGLRVGQAGGSRFAVRVRELVADHPVLVAIIEPLLTVWQTVREQVVELDRQVRMRVREDAAARRLMTAPGVGAVVALAYTAVIDDPARLAKSASVGAYLGLTPRRYRSGEVDCAGRISKCGDGLLRSYLFEAANVVLSRITKPSWLKTWGQALAQRIGARKAKVAVARKLAVVPHRMWRDNTEFRWEVKPAR

SEQ ID NO: 401747 - protein, 342 aa, unidentified
MQHVAIDLGGKESWICVRSETGEILEERPHRTASLPQYLRRRPPSRVVVESCSEAFHVADAALESQHQVRVVPATLVRSLGVGSRRTKTDQRDARILSEVSCRIDLPSVHVPTHQARERRSLCAVHEQLVASRTGLVNAVRGWSRQHGVCIPTGTMARFPDRARAAALHTSGGLPEFVGRILLVIEVMNAQIAAANDELQRLAKGDPICQRLMTVPGVGAMTALRFVAAIDDPTRFAHAHSVSAYLGLTPGEHSSSKHKQRTGITKAGPAPVRRVLVLAAWQFQRCRPLDPLVQWTKGVAERRGKFVATVALARKLSGILYAIWRDDSRYEPQHQPRRQREQ

SEQ ID NO: 401748 - protein, 401 aa, unidentified
MISVGIDVSKGKSTVCILKPYGEIVASPFEVMHTESELRKLAQMLQRLDGEVRVVMEATGIYHLPVLSALQDQELYVTLINPFEMKEYASRGLRRVKTDKKDSITIANYGIDNWYRLKNHQGSDDVYSELKLLGRQYCHYMELHVKALLELTHMLDYTMPGVKKEFHSWNESNGKDKLSDFVERYWHFDNITAMTKEEFIEDYVSWAAEKKYHQNRSKAAELYDLASDGISTLSANTPSTKMLVLEAVRVLREIDSTLLKIITRMKELAKTLPEYDTVRAMGGVGDVLAPKLIAEIGDIRRFHSGKALIAFAGIDAPPYESGQFVGTNRKISKRGSKVLRKIGYETMRVLKTHKAPEDDAVYRFILKKEAEGKSKRQAKIAGLNKFLRIYYARVSEVYKAL

SEQ ID NO: 401749 - protein, 346 aa, unidentified
MEYIGIDVHRNSSQICILTEDGEYLERRCSTSRDSLRKHLGERAPGRILIEASTDSEWVAQVLEEFGHEVIVADPNFAPMYATRSRRVKTDRRDARALCDACRLGAYRPAHRAPRERRQQRAELRVRETLVFTRSKYISLIRSILRREGYRVASGAVEKFLDRLSTMSLPDELREEVTPLITVMTVINEKIHEADQQLKAQVTGDPVATRLMTVPGVGPVTAATFIAVVDRVDRFPSARNARAYLGVVPSESSSGEKQHRGRITKTGDTRMRSLLVETAWCVLRSKKATAQPLREWAGRISKRRGKRIAAVALARKLAGVLFAMWRDGTDFAEPRPANSQEQQQAA

SEQ ID NO: 401750 - protein, 319 aa, unidentified
MQSKLTFGMDIGKNEVVVACHEGAFAILKMANAVAGLRRWLGSVPAGSRLGLEATGGYHEPVAELAYSLGFTVYILNPKDVHFYARALGARGKTDRLDAQIIAAYVAEHNARLHPFTPLSADEKLLRELARRRATLVNAKSMLQQSLRVLPGFEREGRELLRAMGSFADRLERKLAQIAARSSERATLVKRLQTIDGVGTLTSIRCATLFTRVPFHSSDAVVAFFGLDPRPNDSGQHRGRRRLSKRGPSEDRRLLYNAAMSAIRTPAWRPLYLHLRNRGLASTEAIIIIARRIVRIAFAMYQNHSNFNPRLVPRPYCPA

SEQ ID NO: 401751 - protein, 389 aa, unidentified
MIYVGIDVAKDKHDCFIMNSEGEVLFKPFVISNNRAGFDNLYEKICSAAESPDKIKVGLEATGHYSCNILGYLLDKGLPTYVINPLHTNLYRKSLSLRKTKTDKVDAHTIAAMLMSDVDLKSYSDTLYHNEELKSLTRYRFDKVKERAKLKTSVARLVNILFPELEELVPTLHIASVYALFREYPSARLISKVHLTKLTNLLSEASKGRYGKDKAQAIREAARASIGSHMPAKELELKHTVKLIQELDSEIDEIEIRIKEIMDEMDTPILTIPGISYRMGAMILAEIGDFERFSSPDKILAYAGLSPSTYQSGQLTSTHSHMEKRGSRYLRYALFNATKFVCNWAPDFTDYLEKKRKEGKHYNVAISHACKKLVRVIYHLQTTGEEYNP

SEQ ID NO: 401752 - protein, 434 aa, unidentified
MEEAGDEPLFCERAAGMDIGKKTVMVTVRVPSESRRGGRQQETREYGTTRRQLLEMTDWLRCWGVQRAGMEATSDYWKPVFFLLEQQGLECVLYPASQVKALPGRPKTDKLDSAWLAKVTERGALAGSFVPPEPIRRLRTHTRYRRRLVQARTAEKERCEKLLEDAHLKLSSVISDIHGVSGRAMLRAIINGERNPAALAELAQGRMRGKLSRLAEALDCSFFTPEHAFILSMMLRNIDHLTGQIGLLDVRIAALCEPWERQMAQLDAIPGFGVTTAQDLIAEIGVDMTVFPTAAHLCSWARVAPRVKESAGRRKGNSTTGHGNSYACGAIGEAAVNVGRTQSFLGAKYRRLCRRMPKKKAQGAIMRTQLVIAHALLSDPEADYRDLGTDYYEQRADIERHTRAHVHGLERLGYKVTIEPIDPDTGELIARTAS

SEQ ID NO: 401753 - protein, 325 aa, unidentified
MHSFHLGIDVAKAKLDCALRLASGKVRHKVVPNTPAGFKALDEWLAKEGVPALHACMEATGTYWEAVAEHLAARPETLVSVINPAQIKAFGLSQLVRTKTDKADAKLIAQFCAERAPAPWRPPTPAEKTLRALVLRLDALQTMHTQESNRLEVARDSVAEGIAKHLQWLDEEIARLISTIRDHIDNDPTLRDKHRLLDSIPGLGERTIAALLAFVADPTHFGNARQVAAFAGLDPRQHESGSSVRGKPRMSKVGHSFLRKALYMPAMVALYRTDWGKRFRERLAARGKPPMLIIGAMMRKLVHVSYGVLKSGQMFQPALHGACAG

SEQ ID NO: 401754 - protein, 526 aa, unidentified
MAAHAQSQQHPYDEGMYSSDNLKNVTLDNGTRVVTSPQTDIKRPVCAGIDVHKSILMAAVCVTDKETLKAVFYVRQFTSANSDIRRMAEWLTGYGVRDVCMESTGKYWIPVYDILEQNGLHPTLTHPKYVKQAKGHKTDFRDAIHIANLFRMDLVVASFIPPADIRDLRELCRYRLKLTYTRTSEKNRYQNSMTISKVRLDSVFTDPFGKSATDIMSYLVRTDPENVSDDKILGFVRKGCKASSEEILDSIHGYEFLGVQRDKLQIISIHLEDINKCIAMIDQKLEYFRLKYSKVIQHLTTMVGISVESALYILGEIGTDMSVWRDSASLSSWAGLSPANNASARKNKSTKIGKGGHYLKPLLVQCALAAIKSTKKHPYFYNKYISLKKRRGHKKAIIAIARKMLVSIYHMIREDKDFQPIDYDKVVNRKQSPKELNLQNIIEFLGERGVDTNTIRIVEKQCSQGTMDQKEAATSAAGKIEQKKKQPKPITEDTATEQKPAKRRGRPPKSRQTKAQPLDQPTDTTA

SEQ ID NO: 401755 - protein, 387 aa, unidentified
MACTITPEGKEIKTFGTITEEIFALAEWVKEKGCTHVAMESTGVYWKPIYNLLEIEDIEILVVNAQHIKMVPGRKTDVKDAEWIADLLRHGLLQGSYIPDRDQRELRELVRYRKSLVEERAREANRLQKVLEGCNIKLSSVATDVTGVSAKAMLKAIIDNAGDPVTIAKLAKGRMKNKQKELEKALVGLVGKHQKMLLAAQLKHIEFIDQQIAELDQEIKERMRPFDEELALLETIPGVARRTAEELGAEIGFDMSRFPSDAHISSWAGMSPGNNESAGKRKSGKTTKGNKSLRATLVNSARSAARTKDTYLSAQYRRIASRRGGNRAAVAVGHTILVMAYHILKKREPYKELGADYFDQRKKNMVVSSAVKRLEALGYKVTVETAA

SEQ ID NO: 401756 - protein, 427 aa, unidentified
MGLITATPMPPEQDEQPISYDWFVGIDWGSQKHQVCMLDGNRQVVGERVVDHDGASLAQLVTWLLTVSQGQPQRVSVGIEVPRGPIVEGLIERGFHVFAINPKQLDRFRDRHSVAGAKDDRRDACVLADSLRTDRPSFRRLRLDAPQLFMLRELSRAEETLLEEFRRTTNRLREQLHRFYPQMLQLSAAADEAWLWDLIELVPTPAHATAVTAEQVHQVLTAHRMRRVTADEVLVCLQAQALPAAPGVREAAQVHCAFLLPCLRVLAAQLRSCAQQVEALLNTLAAEPGEAGGPSDVAIVQSLPGVGRKITAWLFAEAAQPVAERDYQVLRTQGGVAPVTKQSGKRRQVVMRRGCNPRLRHALYHMARVAAQRDPHFSRVYEALRAKGQRHGQALRNVGDRLLRILMAMLRDGACYDIARCRREPVV

SEQ ID NO: 401757 - protein, 406 aa, unidentified
MNIHDSPHIQVAVDIGSREHYVAIGLSEGGILDEFSMTHTPAGFEYFFSRIECQERLYSLPVEVAMEGYNGWARPLDSQVQKHGYQLYNVNNLKLARFKEIFPAPAKSDSIDAHKMLELFQLQDHLPLAKGVLQAVLPVPDANRRLKRLTRRRRQLINEKVALQNRIQPDLQATCQTLLAMTGSIDNLWFLHFLTCRDDLTKLMRLQTKSLLAIQGVGRNYLNLILDWQKQAEFSNEIEEVGPMIQEDARRLLALMASIKTMDAKIDSQIQKSAYAQHIDSIPGFGLVCSAELAGEIGTLDRFPKQSSFSIYIGMAPLDNQSGGYQGTKSPKHVNTRARKAMMTAVCRHMAYVPESRAYYDKKRSEGKTHNKAVRALGRHISRVIWSMLHHDRDYIELASINEKAA

SEQ ID NO: 401758 - protein, 348 aa, unidentified
MESLAGLDVGVKKSALCVVSRDATSVRTLSRHRTVTSPSAIGEWLLSQGVSRVGLEAGAQSSWLAHELGKRGLEVTVMETRRQRAFGAYSKVKTDERDARLIGEALATGLYTKVHVRSVWSQEVRALLGARLQLKRQVQQARQFVRGQLRATGVELGRASGKKWLVAAETAVAERGGILGLALTAILSSCRTLGEQVAVLDKEVRRLVRHDAACRRMMTAPGAGPLSSLALRASLDDAERFQRSAEVGPYLGLTPSRWQSGALDRRGSITKRGDGLVRAYLYEAAVSLLERQKRDCPLRRWGLDQQARLGKRRTRVAVARKLAVLMHKLWRSGETFDWNRGKEMPVTH

SEQ ID NO: 401759 - protein, 343 aa, unidentified
MNKNSVISIDLAKNVFQVCLINEHNKVVFNRKIRRNNLVQAVLKLDCKHIVMEACYSSNYWGRAFQQLGYSVNLIPPHQVKPFVVGNKNDHNDAIAIAEASKRPKATFVAVKTLEQQDIQSLDRIRDRLVKSRTAVANQLRGLLAEYGVTLEKKMVALRKEIPMILEDPDNQLTVNSREFINGLYQELIRHDERIQENETKAGQLLSQNDDYKRLQTIPGIGPIVGRGIISAVSDPKMFKNGRQMAAWIGVTPKQHASGDQSRMGAISKRGNHNLRRQLIHGARAVVRWCEGKEDALSLWLQNLLQKKPKSKVVVALANKLARIAWAVLSKGEDYNPLVIAKT

SEQ ID NO: 401760 - protein, 327 aa, unidentified
MKYLKVIGIDVSKEKLDISIYNGEEHVLDSIENTCKSIQNYLDQWEDKKENLHFVIEATGIYHLKLADLLYDNDFKVSVVNPLKIKKFGEMKMLRANTDITASRKIAEYGYSQKPKLYEKTTKNRRKLVKIMKTIDGLKKTKNDNRNRLESIKNDSIEYEDIEQQLENTINQIEDSIKELEAKARKLVKENYSKKRKQMLNIKGVGEVVSTAVLGYFGGFEDFDNAKQPVAYVGINPNPRESGTSVKGEGNISKKGVKYLRSKLYMAALSASKHNPSCKALKERMEKRGKHHDKIRIAVASKLLRQIFAVVKYDREWDPNYEKRFKS

SEQ ID NO: 401761 - protein, 352 aa, unidentified
MPKRTRVVIGGVDTHGRTHHAAVIDQQGRLLNDQEFAATSSGYRQLLGWLGRHGRLEAVGVEGTGSYGAGLTRYLLDQHVAVVEVDRPDRRTRRQRGKSDPIHAEAAARAVLAGTATAPAKRRDGIVEAIRALRAVRSGAIKARTAAINQLKGLLVSAPTLLREDLDQPSTAALVATCARLRPDEAALADPVHATKAALRVVACRIQQLDEEINQADQRLATLVGRAAPRLLELHAIGVDHAGQLLTTAGDNPERLRGEAAFAHLCGTAPIPASSGTTHRHRLHRGGDRDANRALHLAVVVRMRWCTRTRAYAERRTKEGMSKPEIMRCVKRYLAREVYHALVADYEALHAT

SEQ ID NO: 401762 - protein, 349 aa, unidentified
MIVIGIDPHKQTHTAVAVDGATGTVLGELTIKARTPGFERLVEWARALEDERLFAVEDGRHVSGHLERHLIARGERAVRVSPRMMGEARRSDRVAGKSDPVDATAVARAALRHPDLPQATLAGPERQIGLLVAHREMLINERTDRICKLRWLLHDIDPDLAPGLRSLDRFKTLDRLAEALQVLGPAVEVEICLELLTQCRQITARANELERRIGALVRTHAPALLQIPGCASLTAAKIVAEAAQVRRFPTEGHFARYAGTAPIPASSGARHRQRFNRRGNRQLNAAVHRIAVTQIRMHDPAKDYLAKKRAEGKTKTEAIRALKRHITRVVFKTMTSMSWPTDRLTAAAA

SEQ ID NO: 401763 - protein, 418 aa, unidentified
MKVVYPVCCGVDVHKSFFVATIIKSEGIKPSYEKKRFSTFNNSILQFKQWLIDNNCFDVCMESTGKYWVPVYNLLEDTIRVSVASPKWVKAVKGNKDDTKDSKWIGDLFRLGLVPGSYIPEKPIRVLREYTRYRAKLVSCKSSEKNRFQNSLTVCNIALDSVVSDMFGKSAASITDYLINTDKFDPEYCKSLLQRSLKKKSDAVIESIQGYQMDFAQKARIAMIQDHLGFIEKAIAKLDSRLDGLVEAYEPFIALLCSIPGVNRRSAITIISEIGVDMGQFINSKRLCCWAGLTPSNNESAGKKKSVRISRAGVYLKPALVQVAHAAVKSKASPYYANKYERISKRRGKKRAIIAIARMILTAVYFMFKSGEAWNPSDLFKVDMPVELNEKHKQKAIQRAYKLLVSEGVIKPTNSLIA

SEQ ID NO: 401764 - protein, 410 aa, unidentified
MEVLHPHCAGLDVHKESVVACVRHMADSKVTTVVKTFKTTTQELMGLSNWLSAEGATHIAMEATGVYWKPVWHILSDGEFELILANAAHVKNVPGRKTDVNDATWLADLMAHGLIRASFVPDEPTQQMRDLLRTRKQMVRERSSHIQRIQKTLEDANIKLDSVVTDILGLSGRRIIEALIAGQTMPQALASLAHRRIHASADELEAALRGRVTRHHRFLLKLHLDQIDALDAALARIDEEVSANVEPFRTAIEMLSTIPGISTLSAEVIVAEIGIDMSRFETAGHLISWAGLCPKNDESAGKRRSNRMKKGAPWLKTTLIQCAWAASRKKNSYLQAQYRRIRSRRGAKKAIGAVAASMLTAAYHMLKDGTLYQDLGAAHFDNRAKGKHVLRLVNRLQNLGFDVQITPIAA

SEQ ID NO: 401765 - protein, 361 aa, unidentified
MKKPTHHLIAEAPRKRGQVELTIGIDLGDVWSHYCTLNQQGEVVDRGRFRTTPKAIEKWFIDVPIARVAMEAGVHSIWISEQLQELGHEVIVANVRELRAISHSDRKSDRVDAEKLARYARLDPNVLRPIAHRTVEQQQALTLIRARALLVRLRTAAINAVRGLTKACGHRMPASATPCFAQRSLAAMPPGLGQALGPVLQQIAEMTVKIKQYDRQIQQLGQTEYPETQALLKVHGVGHLTALTFVLTLGSKERFERSRDVGCYLGLRPRRSQSGDHDPQLGITHAGNAYLRSLLIECSNHILRPHGKDSALRQWGLHLATRGGKQAKSKAVVAVARKLAVLLHRLWTTQEPYMPFYAVAA

SEQ ID NO: 401766 - protein, 400 aa, unidentified
MLSIGIDVSKGKSTVCGMKPGGEIVYTPFEVQHTREGMSELVSLLRGSGEEVRVVLESTGSYHCPVVAALLENGIFVSVVNSLRMKRFCSQSIRRVKTDQIDAMQIALYGLAYWQELQPTRLPENTYRELQLLARQYYQMTSMLIKAKVDFNALCDQVLPGMQELMSDHAGRHKLSDFVLRYRHTTHILEMGETRFRKDYCKWAEKKGYRNRERMAAHIFATAQNGIPVLPNAPSTQIVITEAIRVLHTVEASRDAILTQMQALAKTLPEYSLVREMPCIGDTLAPRLIAEIGDVRRFHSKRALIAYAGIDAPPYQSGKFRANNRHISKRGNRYLRKTGYEVMQSYVMHKPANDPIFTFIEKKRGEGKSGKLAMVAGLNKFLRVYYGKVTELYRSLSAIE

SEQ ID NO: 401767 - protein, 343 aa, unidentified
MNEISTIGLDLAKNVFQIHGVDASGAVVLRRQLRRGAVEKFFAQLPPCLVGMEACGSAHHWARVIGSYGHEVRLMPPRYVKPYLKRNKNDGRDAEAICEAVSRPTMRFVPVKSIAQQATLAVHGVRSLLVRQRTMAANALRAALSELGIVAPQGYKGLRELMTRLEEPSADIPEDMRGALLTLARHWQALDVDERVLERKIAKAARGDQDARRLMEAPSVGPMIASTVLAKVPDPKVFRSGRDFAAWIGLTGKDHGTGGKHRPGHISKQGDRLLRALLISGASAHLRQQKARGITDPWLRDLLARRPYKVAMVAFAAKTARIIWAMLVKGEHYRDRASVSAAA

SEQ ID NO: 401768 - protein, 372 aa, unidentified
MKQHTTRRKTVPATRTATELSACRTVAVDLAKRVFQVAAEDARGQVVHEARIGSREAFQTFLQRLPAGITVLMEVGPGAQAWARQVQASGNAVRLLPAQRVAEHRSGAKNDRNDAHAILRAGRDTSLHAVPVKSLTALAMQALHRVRQGCVRRRTALANQMRGLLLEHGVALAQGDAALTRGVDRVLQDATQPIPALLRELVADVHAEWRRLGERIDGLTARLEGAAREDAEARRLMTVRGIGPIIATALIAKQTEPQRFANARRFAAYFGTVPDQHSSGQKVRLGKMSKRGDAYLRSLMIQGAHAVLKQLKPESTQPDDRRLLRWRQRLGQKGAAVRLANRNLRIVWALLQTEQTYRRQPAAKAGTEEATE

SEQ ID NO: 401769 - protein, 349 aa, unidentified
MSQNLNSAVAVIGIDIGKNSFHVVGLDNRGAIVLRQKWSRGQIEARLANLPPCLIGMEACVGAHHLSRKLKALGHDARLMPAKYVRPYSKGQKNDFRDAEAIAEAVQRPTMKFVATKTAEQLDLQALHRVRERLVSQRTGIINQIRAFLLERGVAVRQGLRFLRAELPRTLATPPEVLSPRMVRVISDLAEDWRRLDERIDQLSSEIGVLARQDSGCERLMSVPGIGPIISSAMVAAIGTGDAFAKGRDFAAWLGLVPKQMSTGDRTILGKISKRGNRYLRVLFVQAAWVVLIKSMSWERHGLKHWIEAAKKRLHRNVLAIALANKLARIAWGVLAGSRTFEASKLQAA

SEQ ID NO: 401770 - protein, 342 aa, unidentified
MKEVNIVGLDLAKRVFQAHGARTDGSVVFRKKLSRGQVLAFFTALPACVVAMEACATAHYWAREIGKLGHEVRLLPPAYVKPFVKRQKNDAADAEAIVEAASRPSMRFVAPKTESQQARSMIFRTRDLFVRQRTQLINAVRAHLAEHGFIAPQGIANLAALTEIIEDSNSGLELIVVETTRLYLEQIDALSARIASLEKTLKSEAKRSESTARLMSMPGMGPVTAMAIEAFAPSMTAFRKGRDFAAWLGLVPKQHSSGGKQVLGRTSKMGQRDIRRLLIIGAMTVIRWACRKAPSENSWLARMLMRKPRMLVAIALANKMARSIWAMMTKNEDYRDSGLAAA

SEQ ID NO: 401771 - protein, 397 aa, unidentified
MYIVGIDIAKRKHEAAVIDGEGTVIIKPFSFTNNCSGYNRLLAMLTKAKLPLDEVSFAMEATGHYWLALFTRLQKEGFRVQVINPVQTNSIRSFYIRQAKTDPRDALLIAEVIRFGHFSESTLHPENIYELRELCRGRHAIVSMQADVKRKVVALLDQVFPEYETAFTNLFSDTSMAILQTCPTPKELSEMPLEELCHLIEVSSHKRFRMVKAQELQELARNSFGFAMAGDVFSTMIRLYAKHLVFLKQQVQEMDRKIAEIMDTLDTPITTITGIGPTLGAYILSEIGDISRFSSAAKLAAYAGIDPTMRQSGEYNGVRNRMSKRGSPYLRHAIWLAASSAVLHDPALKLYFQKKRDEGKPYMASVGHACRKMVSIIYAVMRDNKAYTPCIPNEISA

SEQ ID NO: 401772 - protein, 448 aa, unidentified
MKILALDLGKFNTMCCFFDSKTRKHSFLNAATDRQFLATLFKKNKVDLVVMEACGPSGWIYDLAQNAGHKTVVCSTNEDAWKWSNVKRKTDKDDAFKLARMASMDELKPVHMPSESHREFRSLVKYRKTLDQRINKMKCTIRAWFVNHGITIDTGEKAWCTGRTHINSFRKPLIDCEPNELWKGELDIELTQLDALTEQLNVVVKKLEAIGKQDARIQRIQTIPGVGPRTAEILVACLDDPHRFQNGRQVSAYFGLVPRQFQSGETDRNGRITKRGNPLARTILVECAWASLRYNSWAKTVYERICGKQKTRKKKAAIALARKLAVLAWAMLRDQTDWKPSHMLQVTKSFGKTTKAIQSVLDEMKPKENSDQRKKRKRREAREAKQANAPMERAKSTTDVKETTGKRTVKENRGRTQFEKRAGSKNSTQRKSVTPHKPRRAREPAAAV

SEQ ID NO: 401773 - protein, 323 aa, unidentified
MGKRNFQACLKDDSGILVEELSAPRSMLGAEKLLEALRNHDGNVKAVLEATGNHWIRLHDMLEENGVETILANPVKTRLIAEARIRTDRLDARVLADLLRGNLVAESYTPSLKERDWRSLVRHRASLVRMETEVKNRIHALLDKYWLEPEYSDLFGKRGLEWLRSLRLSDIDQLILESNLKLPESLEAQVDALNKEIARIAVDEDDIKLLMTMPGIDYYSAMLITAEIGDVHRFMNAKKLASWAGLVPSIHQSGNTVYMGKITKKGSKWLRWILIQAAQRASLSDPRLRNFYERVSKRRGHNKAVVAVAREDADYHLSYVDEE

SEQ ID NO: 401774 - protein, 355 aa, unidentified
MDRTKYIGMDVHQASISIAVRDASGKLVMESLIETKAATILEFLQGLKGTLWVTFEEGTSAAWLYDLLKPHVVKVIVCDPRKNALLKTGNKNDRVDARKLSHLLHAGLLTPVYHGESGVRTLRELARSYLTLTKDLTRVMNRLKALYRSWAIPCVGEKVYSPRHRSAWLEQLSEAGVRRRAEQLYQQLDILLQIRRDARRELLRESRKHPAHELLRQIPQLGPIRVALLIALVQTPHRFRTKRQLWAYCGLALQTRSSGEYRFTAGQLQHSNKLPALRGLNSNHNHDLKNVFKSAATHVSTSPDALGDFYRSLLAKGMKPAMARLTLARKMAAIVLTIWKKGERFDPGELKRQAA

SEQ ID NO: 401775 - protein, 452 aa, unidentified
MQNQDKPAAIVRAVAGIDAAITARHHIAVREFFDDGTEHLSRFTVDPTLAGLERLSARLAAVPAPVTAVVEPTSMTWLALALAVERAGGQMEMIGARHSSRLRGAIMGKNKSDVIDSEVLTHAGEIFDPPPLVLASPGQLALRRAVVRRAGAVIDGNRYWRRLLSLARWAFPDVWTAFAGSESTALAVLGRWPHLRSLASARAATLTAVVAEHTRDVADTPARAAAIKTAARGWAEFWDSHLDLDALAVDVTEHLTDLQESRARVDRFTAHSRQWWEHLYGDDPLILSLPGVGPATGPCIRAYFGDGSGFDSAKKAANYVGITPSNWSSGTMNQSRRAISKEGPAPLRLAFYQAGSVARTIDPQLAAFYHRLMTEHGHCHTQATIAVARKLAERTWKTLTTGQMYELRDLEGRPLTKRAAKELIASHYTVTPKQRSQSRSHTIEAKRARLTR

SEQ ID NO: 401776 - protein, 314 aa, unidentified
MEQVKTSTNVAGIDASKAKLDVAAYGLEGSAVFDNNEPGWRGLAAWLAERGVGRVGIEASGGYERGVSAFLRTAGLEVVTHQPAHIRAFARFKRIKAKNDRLDAAVIAQATAQTDAVRAACDPLLVELTDWLTAYEQAADLVAQLKTMIEHVVLPELLDQYQAQLKGLTTWKRALAKDLARRIRGHPELARRLALLISLPGVGPIVAASLVLRMPELGAMSRGQAASLLGVAPFDKDSGKTKGQRHIFGGRARVRRMVYLAAVIAKRIDPGFKAFAQRLAATGKKPKVILVAIMRKLAEAANAIIARGTPWVPA

SEQ ID NO: 401777 - protein, 346 aa, unidentified
MTIVEGTRPVTGGVDTHLDVHVAAALDDIGGLLGVESFEASAAGNDKLLCWLASFGSVVRVGVEGTGSYGAGLARFLRAAGVEVVEVDRPNRQARRRTGKSDPADALEAARAALSGRAQGAGKTRDGNVEAIRALVVAKRSMRSTKIKTLNQIRHLGFTASDELRERFRGVSRFHLGATAAALRPRAGSDPVTFATKTALAVLGRRVVALDEEKGRLDALIAELVAKTAPQLLELHGVGVDTAAALLVTAGDNPDRLRSEAAWAHLCGVAPIPASSGKVTRYRLNRGGDRQANSALWTIVITRMSSDPRTRDYVTRRLEEGRSKADVIRILKRYVAREVYRHLPRD

SEQ ID NO: 401778 - protein, 430 aa, unidentified
MTKLTPTPAGAVLVAIDMSKNRQEVLMERPEGGRRRRMTVMATKKDYDDFAEQLAAIGRPIVVGFEATGNYHRTLAHRLLTAGFELRLISSVALARTREALHNGWDKNDSKDAQVILHMLRIGATQRYVDPLAAGINDLQELSKTHETISKAKTQTWHRILTHYLPLYFPEIARFAGNSRSDWFFALIERFPTPASITALDAETFSAMAWPLVGRKVSKARLINDIYETACASVALPVAEDSAAITMFRMVIAQGRSLIQQRDEIERLAHARLAEHVDYQLLRKIPGIGPINALTILAEAGDLRRFNHHRQFLKFCGLDLATCQSGTFRGRTKLSKYGNARLRRTFWMAAQVAARQRDNSFRDKLGRYVAGHADDADRRRKAMTALTAKMARVAHAVIKTGTEYRPFLERSDARWKDPSLMCREGARATL

SEQ ID NO: 401779 - protein, 358 aa, unidentified
MTQITTIGLDLAKNVFQVHGVDANGQVLLRKTLRRSQMLAFFEQLRPCLIGIEACATAHYWARTLQSLGHEVRLISPTYVKPYVKRQKNDVADAAAICEAVSRPSMRFAPVKSVEQQSHLMLHSARELLITQRTALINALRAHFSELGIVAAEGARNVRNLLNLLEQQKESVTETTNIPKVAITALQPLAEMLLETDKQIAKLDREILALHRDNGTSNRLATIPGIGVLTATYMTASLAAFANQFSCGREFAAYLGLVPRQYSSGGKPRLGRISKMGNRHLRKLLVVGATAALYSIRKGTSQSALAVWARQLLEKKPFRLVAVALANKMARIAWAVIVHERDYQADIKPNRLIHTQTA

SEQ ID NO: 401780 - protein, 457 aa, unidentified
MAQDTQTGDRAARHKAPISEQPAAVSRDHRVSSHWCNSEETTLSVTHPAPPGRPTGGIDWATDDHAISIVAADGDQLERFASTHDAAGLRALVGRLLAAGVGEVGIERPDGPVVDALLQAGLTVIVIPPGQLKNLRSRYGSAGNKDDRFDAYVLADTVRTDRRRLRPLLADTHATTALRSVTRARKDLVGHRVAVANQLRAHLQVVFPGAVGLFADLDSQVSLRFLERFPSQDKADWLSPKRLTAWLGAEGYSGRTDPAVLHARLADAPRGAAGEGEHTAAHASVTLALVAVLRTLTVQIEGLAARIAEQLTLHPDQAIFTSLPRSGRVRAARLLAEIGDARGRFPTPESLACLAGVAPSTRQSGKLRAVTFRWGADKQLREALCDFAGDSRHANPWAADLYRRARARGHDHAHAVRILARAWAHIIWRCWQDNTPYDPTQHGALQALLNRDQQTAA

SEQ ID NO: 401781 - protein, 412 aa, unidentified
MDKHEVEFEQVVDKGCGLDVHRDTVVATVMGKGITTETRTFGTTTSSLNELGAWLESLGVTGGAMESTGVYWKPVLHVLRTYPLNLMVVNARHIKNVPGRKTDKADSQWICKLLMSGLLKGSFIPPENIQELRELHRYKKKLIGTIASEKNRIIRLLEDANVKLSSVVSDTSGVTASYLIKGLMEGRKDLEKLISECYHGKLSSTPEQIKEAITGRLTPNHIFLLRSMQKHITSLEGQIEEIDLEVGKHIKDFEEEIELLQTIPGVGKEGAIGIVAEIGVDMSVFPSEHHLASHSGMCPGNNESAGKKKSSRTRQGNKHLKATLTELAWGATRTKKSYFKAKYESMVARRGKKRALIAIGHKILCASYHIINNKEPFKEFGYEYLMERKKKNRAEYLKRELRELGFTVEKVA

SEQ ID NO: 401782 - protein, 324 aa, unidentified
MQENSSATCWVGIDVSKDWIDVAVLVEEQRVQQLRCERSVKELEQLAQRLLPYGPQGVVLEATGGLEGKVIAALVAAGLKVLRINPKRVRDFARAQGLLAKTDVLDAGMLALFGSRMQPALRAWPAPERQQMVAWLARQQQLTLQRATERTRLHQAETPKLKKSVQRVIDFFSKELDRLEKEMEAVVAKSEGWQQQEDVLRTAPGVGPKVSRGLLAYLPELGHANRHEIAALVGLAPFAQDSGHWRGKRRIHGGRGAVRTLLYLASWSAVRAAGPLKDLYVRLVAAGKAKQLALIAVARKLLVALNEMMRSNTPWRSRPQQISA

SEQ ID NO: 401783 - protein, 411 aa, unidentified
MKKKLTVTQIGLDVHRKFSLASGRDGRTQQIVWRERLEHADRDQLRARLSRWPQGVAVVLEGTFGWGWMSDELLAAGLDPHLSSSRKTASWRKERGQAKSNRIDADLLSELWDQKPTMIGGVMRRWWEVWLAPPEVRDQRELLRHRMSLVRMQTMVKNQVHALLHRHGIMHSFSDLFGANGRRWLSLLVCDEQRLRSTARQTLKDQLIFLDTLRRLIARATVQFRRELKRLPAGERLITLPGVSTVLAYTIVAEIGRIERFAKADHLVRYSLLAPEADDSGEEDQGKPIGRRIGHAGRATLQWAWIEAAHSAVRRDPRMRERFNRRTDQGTRDRGRGYITVANQLCRIGYSMWKHQRDYVQEAPARPGSGKPGSGKKVQSSNTPSGVLQQPVSSGNGPALAPYGPVRLVST

SEQ ID NO: 401784 - protein, 333 aa, unidentified
MYYLAFDVSKGKLDGVLTNFRTKNKYFQINNDYQSIIDWLNNVKLPKKMFCGCESTGGYHLLVLRVFVERGFAFKLINPLLVKQFTRTTIRKKKTDTTDSLIIAKLLAQGEGYQINSQELDLTAKTLERGLEKLIEERHKFSLMGQGLGFQKQNEDLISLNNKFKGIENKIGETIKEHVSSLKERYSKEPVIELLESIPGIGFKLAFTIWTEIGDVKKFDSYKKIVAFVGLDPRIRQSGHCLNNQGKLTKRGSPHLRRALFVAASVARRYDPELKLYYEKKRSEGKRYTVAICAVARKLVSRIYAVWERGTPYLKKEIPSLNILKAVTTMATA

SEQ ID NO: 401785 - protein, 462 aa, unidentified
MPERNDRESGESNRRQLQGLPVIRRNVAGVDLGSERHWVCAPTQDGNGREIASFRATTRELLRLAEWLKARQVESVAMESTGVYWIAPHEVLEAQGLQVLLVDTRQLARVPGRDKKTDPSDCEWIQRLHSCGLLRGSFRPEEAVCMLRTLVRDKANLVAESGDWLRRMQKSLDQMNVRVHRAVSDIDGVTGMAILRAIAAGERDAQKLAQLRDRRCNKTEQQIAEQLTGHWREDHLFSLQQALKMYDAVQERIAAYEQEILRQLEEMEEPGQRGQTAPQLNNANKTQAIKKRGQEAKRQALYRMSAVDITQIDAIGVETVEVVLSEYGPDLSRFPTEKEFVSHVTLAPRVPRSGGKPLKKKKRNSASTRVAAALRMAALSLRHSQTALGAYYRKLAQRLGGDVAVFATARKLATLIYRLLRWGQPYMDEGIEAYEKRYRQQRVKSLTAKAKDLGYELTAVNA

SEQ ID NO: 401786 - protein, 343 aa, unidentified
MEYGAIDLHTKESEIRIVTAAGEVVLHRRVATTRAALSGVFGGRVRLRILLESGTESEWVAQHLEELGHEVVVADPNYALMYGQRSRRIKTDRRDVIALAEANRLGIYRRAHRVSSPQRIVRRQLQVRDQLIRMRTQIINLLRGQLRSEGLRIRSGRAESFVTRYRAVAVSATLRTVLEPLVQTLTALEPLIAAADAWAHETARQDTVARRLMTAPGVGPITALTFQSALDTVTRFGGPGAVTAYLGLVPQEDTSAERQRRGPITKAGPGRIRAVLVQASWATWRSPRSSATLHAWVRRLADRRGKRVAIVALARRLARILFAMWRDGRDFQAARVSRAAAAA

SEQ ID NO: 401787 - protein, 375 aa, unidentified
MGNHSEAFVAFDTSKLRNAVAIADAGRMGEIRFLGEIESSGAATAKLVRKLAAKHRQLTFCYEAGPTGYGLYWQIKSLGHECIVVAPSLIPKRPGDRVKTNRRDALSLVKLLRAGELTAVWVPDQHHEAIRDLTRARGTAALDLRRKRQQMSAFLLRQGLHYPESRHSWTKAHMSWLASQKLAHAEQRLVFEEMMLAMRQAQERIERLEQAIRAAVPDWSLAAMVTALMAMRGIDLVSATALLGEIGDLSRFQTAPELMAYLGLVPSEASTGDTVKHGPITKAGNRRARRILVECAWSYQHPPRVGKEKQEKVAAAPRAVREIAWKAQCRLNRRYRALIRRGKLKTVAVTAVARELAGFTWAIGREVTTADAAAR

SEQ ID NO: 401788 - protein, 458 aa, unidentified
MGRSKSTGKVRRAMAMVHPNAAAIDVGATMHVAAVKADRTPEPVRSFGTFTSDLHRLVDWFAECGVDTVVMESTSVYWIPIFELLDARGFAVFLVNARDAKHVPGRKTDVSDAEWLQRLHSYGLLRASFRPKGQIVELRAYLRQRERLLEYGASHIQHMQKALTEMNVQLHHVVADITGATGLRIIRAILAGERDPAVLARLRDSRCHATVETVEKALTGTYRAEHLFALEQALALYDTYQEKASACDTRIEAVLKELSIRRGREAGPLPSPRHRKRRQPNGMDFDVRAALYALLGKDLTQINGLGPYLALRLIAECGDDLSAWPSAKHFTSWLCLAPSNKISGGKVLSSRTRRSGSRAAALLRLAAATVGRTDTALGAFYRRLSARIGKAKAVTATARKIAVLFYNAVRHGMEYVDPGASFYETRYRARVIDNPHRRAKVFGFALQPIEPTPAIPVS

SEQ ID NO: 401789 - protein, 423 aa, unidentified
MNYLNDGQYTAFIGIDWADIKHDICLQAADSNHREFDCIPHQVDDIEQWALALHQRFGGPIAIALELSKGPIVYALQKYDFLVLFPVNPSTLAKYREAFTPSRAKDDPTDAELALDLLLCHPDRFQPLQPQSVEMRALATLVEQRRELVNDRVRITNRLRSALKQYYPQLLEWFERIDTPLFCDFITRWPTLDQVKRARKSTLERFFRQHSMRFPQVLEKRYQAIKAATPLTRDVAVVAPHRLQALVLAAQLRVTLQAIRRYDDEIAELALTHPDYALFSALPGAGPSLAPRLLVAFGEQRQRFTCAADMQKYSGVAPVTERSGRKHWVHWRWQCPTFLRQTFVEWAAQTINKSFWAGAYYRQQKAKGCSHQAAVRALAFKWIRILYRCWQARTPYDELTYLEALRRRGSPLLDQFGAVGENA

SEQ ID NO: 401790 - protein, 347 aa, unidentified
MNFYTLPHKHYCGVDLHSRTMYLCIVSAQGVVLLHRSLPCDRDRFLLAIAPFREDLVVAVECVYSWYWLADLCAKEGISFVLGHALYMRLIHGAKAKSDRIDSEKTAVLLRGGLMPRAYAYPADMRATRDLMRRRLLFVRQRGSLLAHIQITHHQYNVEAPGKRITYRSNREGLGEAFEDPSVRNSIAADLTLADHYEVVIGELELAVLRQARIHDPNAFALLTSIPGIGKVLALSILYEIHDITRFPSVRDFASYSRLVKCEKRSAGKSLGSGGDKIGNAYLKWAFSEAAVLFVAKSEQGRTVLKRLERKYGKPKALSVLAHKLGRAVFYMLARKQAFDPQRFVAS

SEQ ID NO: 401791 - protein, 348 aa, unidentified
MLAEELDFVIGVDTHKDVHALAIVSAPTGGVLHEAALPASAKGYVEALRLAGANAPGRRAFAIEGTGSYGAGLARFLADHGERVLEVSRLPRQGGRSRAKTDSLDAIRAARSVLGSEKIAQPRAGGSREELRALVVCREGALQAKRAGLCQLRDLLLCAPPALREELGSLSRARLLRRLSQLRPEGRRDTGAKGSLLALRLCARRIQALTREERELAQEIRALVARCAPELLAEPGVGPVSAAKILLSWSHRGRLRSEAAFARLGGAAPIPASSGKLVRYRLDPGGDRQLNRALHTIVLSRRKIHPPTIAYVERRTREGKTTREAIRCLKRYLNRHLFRVLERSAVAA

SEQ ID NO: 401792 - protein, 313 aa, unidentified
MSESVYVGIDVAKDTFCVATCPNVLTITLPNTPAGHRKLCQRLQSHPVSLIVLEATGGYERPLTTELLSASLPVVVANPKQVRDFAKGMGQKAKTDPIDAHVLAQFAQIVKPVPKTHATPQTAELSELVRRRRQLNDLRTQESNRLQMIHHPKVKKSIQKMIKTLDFQIDEIDRLIREYIDTDDDFKNKDRIIQSTPGVGPQTSAMLIANLPELGQLNRQEIAALVGVAPWVRSSGKYEGKASVWGGRKDVRSALYMAAFTACRCNPAIREFAQRLHQEGKAYKVVITACMRKLLVTLNVMVRNQTPWSPKIN

SEQ ID NO: 401793 - protein, 286 aa, unidentified
MGEKLRFLGMDVHAETIAVAIAEPDGEVRSLGTIANREESIRKFIRKLGPVEHLRACYEAGPTGFVLYWQLAQFGVDCAVVAPTLVPKKSGDRVKTDRRDALKLARSHRSGDLTAVWVPDEDSEALRDLVRAREAAKQDQLRARHRLTKFLLRTGRRPLLGVKAWTVRYVTWLQQIHYTQPAQEATFEDCLHEVQHMDERVKRLEQVIVEVMKVAPPLMQALIRGLQALRGVAHISAITIAAELGNISSRFENARKLMGYCGAIPAKIPVASANEKEALPRRVTRT

SEQ ID NO: 401794 - protein, 337 aa, unidentified
MICAAVERCAGIDVGKQFLAVCVLTGPLEGEARKQMRRFGTIVAELERLRDWLKQEEVTHAVMESTGSYWKPVFNVLEDTVKVYLANPQEVKVRKGHKTDDKDGWWLAHLLRHAMIHPSFIPPRAIRELRDLTRRRKKLIGAGTGEKNRVQKILEDANVKLGNVLSDVFGVSGQLMLDALLKGEAEPEEIAQFAQRRAKQKIPQIIAALEGHRMSDHHRKMIGYSLEHMRFIEDQIEKLDEDIVAKIKKAGLEREWQLVQSAPGLKETSAANVLAEIGGDMSQFPSARQISSWGGVCPGNNRSAGKSKSSHTTGGNPWLRAALTECAWAAAAKKGCF

SEQ ID NO: 401795 - protein, 377 aa, unidentified
MERLKFVGLDVHAETIAVAVAEQGGEVRSLGIIPNGEESIRKLVRKLGPVEQLRFCYEAGPTGYALYWQLTKMGAPCEVVAPTLVPVKSGDRVKTDRRDALKLARNYRAGELTPVWVPDAAHEALRDLVRAREAAKKDQLRARHRLNKFLLRHGRRPPMGVKPWTMKYLEWVKREVHFEQMAQQATLLDYQHEVEHTAARIVRLDGAIEEAVKLAPPQMRAVIEALQALRGIAQVSAVTVVAELGELSRFARARQLMGYAGIVASEDSSGERTRRGQITKTGNAHLRRVVVESAWAYRHRPAMGRTLRKRQEHLGEEIKEIAWKAQQRLYQRYRKLLAKGKNKGVVITALGRELLGFIWAIGIKVETTQKESLQRAA

SEQ ID NO: 401796 - protein, 413 aa, unidentified
MDVLHPRCCGLDVHKSSISACILVQVAGRVQKHQRRFSAMTQDLQELANWLRQFEVTQVAMESSGVYWKPVWNILEGQFTVVLANAQHIKNVPGRKTDQKDAEWIAQLLQHGLLRPSYVPCEIIRDLRDLTRMRVSLSQEASRISSRVQKVLEDANVKLASVATNTLGKSGRAMLEEIIAGQDDPEHLASLALGHLRAKTPQLRLALEGKIRPHHRFLLRRLLDQLRFVEHEIVLLEERLENIGREQPELAQAVARWDTIPGIDRVAGWTLLAEVGHTMAQFPTAEQLASWASLCPGNHESAGKRLGGTTRKGSPWLRRMACQCAWAAARTKNTYLSAQFRRVASRRGSKTAIIAVAHSLVIIGYYLQKNQRNYEDLGGDYFDRIDSDGLKRYFVRRLEKLGHKVTLVPIKAA

SEQ ID NO: 401797 - protein, 411 aa, unidentified
MEVVYRRCSGIDVHKESISVCVLLMEEERAKKQIRRFGTMTRDLLELSLWLQQLGVTHVAMESTGVYWKPVWNLLEGQFELLLVNAQHIKQVPGRKTDIGDCEWIADLLQHGLLRGSYVPKQEQRDLRDLTRYRVRLNEDKVRLANRIQKMLEDANIKLASVATDVLGASGRAMLQAIATGEDDPEKLAQMARKGLRKKLPQLRLALQGRIRDHHRFLLRQLLEELRFTEEEINELDQHIHQCMLPHHHAISLWTSMPGVRMTTAWSLVAEIGTNPEQFPQGSNLASWAGMCPGNNESAGRRKSGKTRRGNRWLRRALNQAAWAAARTKNTYLAARFHRLAAKRGSKRAIVAIGHKILVLAHYMLQHNTPYRELGAEYYQRLRTPSFSQSLVRRLQRLGFQVTLTPTQQVG

SEQ ID NO: 401798 - protein, 343 aa, unidentified
MKNTIIAVDLAKNVFEIAVSEEPGRVSEHHRVSRWGLLRFFVKRPPATVLLEACGSAHFWGRKIQAFGHQVVLLPPHLVKPYRRGNKHDRADAKALLEAHRNEEIHPVPIKSVAQHTLAALHRLRSGWLSTRTARINAVRGVLRELGIFVPKGAARVVPELSHLVEDDESEVPDALRPFLLEAGAEIRELETRMEGVERQLKALAKQLPEVERLLTVPGIGLLSATAIVGFIGDLRRFRSGRRFSSYLGLVPKESSSGEIRRLGRITKQGDTYIRMLLTHGARAVLWAAKSNKDPDRLRGWALQIERRRGHNKAAIALANKLARIAWAVCTRETEFQSFPVAA

SEQ ID NO: 401799 - protein, 462 aa, unidentified
MRGKAKRKAKAATALPPGLESINLNAAAIDIGSTEHYVAVPPGRSAEAVRTFGSYTAALHEMARWLKECGITTIALESTGSYWIAPYQILEANGFEVVLVNSRHVKNLPGRKTDVLDCQWLQKLHTHGLLSGSFRPEDKVCVLRSYLRHRENLVRAAGTHIQHMQKALTEMNLSLHHVLSDLTGLSALAIIRAILAGERDPWKLASMKDNRVKKSKEQIARCLEGDYRKEHLFALGQALELYEFYQAKIAQCDREIEGQLHKFQTRIDIAQHPLPEKPRKKTLRAQGDFELKNHLYAICGADLTRIDVAQHPLPEKPRKKTLRAQGDFELKNHLYAICGADLTRIDGMEVLSVQALLSEIGLDMTRWKSEKHFTSWLNLCPPSRISGGKALSRQPRKGHNRAADILRLCAQSALKSKSALGRLWPSLESTTRCGQGHQSRSAQAGPDRLPHAKIRPGVPRCR

SEQ ID NO: 401800 - protein, 356 aa, unidentified
MTSNKKYIGMDVHKESISIAVMNSTGKFVMECVIETKASMLLQFIAGLRGDVRVTFEEGTWAAWLYDLLKPHVSEVVVCNPRKNALLKNGSKSDRIDARKLAELLRGNQLKPVYHGEQGLRTLKELARSYLTISKDVTRVMNRLKALYRSWGIACAGTQVYAPRHRSEWLGRISEAGVRRRAEHCYQQLDVLRLLRQQVRRDLLLESKKHQAWRLLGLIPGIGPIRAALLIALIQTPHRFRTKRQLWTYSGLGLETHDSAQYRVVEGQLRSKKSVTLRGLNQDHNHDLKDIFKGAATRVSSSSSGPLHDFYEHLLAQGRKPTMARLTLARKIAAITLIVWKKEVHFDASYLTSQAA

SEQ ID NO: 401801 - protein, 354 aa, unidentified
MTEEDRRVIGGVDSHDDTHHAAALDDRGGLLATKMFDASAEGYRQLLAWLGSFGEIDRVGVESTGSYAAGLTRHLLAQDIVVLEVNQPHPHTRRRRGKTDAIDAELAARHALGLGAPVAPKETTGIVEAIRQLRVVRESAVKSRAAATIQLGGLIVTAPAGLREQLTGPRTLKGKAAICRKLRPDTSRLHAPTNAAKQALRSLAGRIALLDEEIADLDAQLEPLVAVAAPRTTQLLGVSTSHAGQLLVTAGQNIERIHSESAFAALCGASPIAIASGKHGRYRLNPGGDRQANRALHMIAVCRLRYCPKTRAYAERRTTEGKTKKDIIRCLKRYIAREIYTTLRQDLNTTPTPT

SEQ ID NO: 401802 - protein, 341 aa, unidentified
MSIVGAFDVHRRQLTFEYLDTSSGELRRGRVMPADRPHLRAWLARFAGQQDVQFALEGCTGWRYVVEELVAAGVIAHLAEPADTAALRGRKRHAKTDKTDTRHLRVHLMAGDLPECWIPPEHVLEARAVARLYKDLVDERGGWHQRVAATLFHPGVPAAVSVAKPDGRAAAEQAFLSPAGWQAVQAGLRQIDRLTAELEPLRQQLDMLSRRPPGCRALRAAHFGIGAVTSVAIWAELGDVRRFGSSDNVVRHTGLDITVRSSDGKGPPGHLSRQGPPLLRWALYEAAKCAARPAAPDYGYYTAARDDRGGGRATLSVARKLARRCYHTLRELGEDALAPAA

SEQ ID NO: 401803 - protein, 374 aa, unidentified
MNSIAGHIHQNSIIVGVDVHKYSHTAVAMDCFGQEKGRLDFSNDNLMEYVNWLATLGSRDNLIVALEDVNGYGVHLVEKLSLSGFPLRYVPAILTERDRRKSTSREKSDYLDAKRIGKVILTKYEETLPAKESIANREEISVATAMDLLLCERRDLVREKTVLKNQLHALLHQYYGDHYQDGFPKAFHKKALAFYTKDLTKTQSVSENKTLLAKSIIRRIGRLTLVEEQIKIITRDLEKAGGTSPQVKAIASSIHGCGMVTACAIVSEVVTIKRFRNKAKFAKYAGVAPTQRSSGSKNRLYTNPFGNRILNRAIHTIALSQIAIKGDQRGKVYYQKKVSEGKSKLWALRCLKRQLCSRIFQTLKNIRGEADCLE

SEQ ID NO: 401804 - protein, 447 aa, unidentified
MDTESATQYAAYIGIDWADKDHAYALRATEDKKVEQGKVEAKPEAIEEFVAQLRQRFGGKAIAVALEQSRGSLLFMLSKYDHLVLYPVHSSTLDSYRKACHPSGAKSDPDDAALILDLLQKHPEWLQPFAPDTVPTRTLQFLTEERRDAVNDKTRYLNQLTAALKTYFPQMLEWLDVDSKLMCEMLQRWPTLEQLQQQKPSVVEEFLREHRYPVVRVKPLQEAMEKAIPATTDQAVIEAKKFTVQRTIAQLEALRENIAELDRRIEQITRLHEDYRVFASLPCAGKVMVPRLIAAMGTQRDRFQTASELQCQTGIAPVKEASGQREWIHWRWACPKFLRQTFVEWAWLSTRKSQWAREFYDRQRAKDKSHHAAVRALAFKWQRIIFRCWKDRCPYDEARYLATREQRARTAKASTDGSPQLKSSQAGGVEITWKNVSGFSRPDSISC

SEQ ID NO: 401805 - protein, 415 aa, unidentified
MLRIVYPICCGIDVHKKFIVACIASTNDKGVTTYRSSRFSTFTKGLRELSEWLHSNSCKDVCMESTGKYWIPVFNILEATCQITLAHPKYVKAIRGKKTDKKDAKWIADLFKHDLVNGSFMPPLAIRQLRDLMRYRVKLTNFSSSEKNRTQNCLTVSNIQLANVVSDTFGKSSIAIIERILENPLDTNFDVIPLIHGSMRAKASDLQLAIDGMITPEQALKLTIIRQHYDNLELCKLNLEQVILALTDPFQKELNLVATVPGIKPFSAIAIISEIGVDMSVFPTAKHLCSWAGLTPQNNESAGKKKSVRISRAGVYIKPLLVQCANAVVTSEKHPEIRNRYLSMRRRRGHKRAIIAITRMMLTAIYQILKKSEPYNAELYKKADVLPLHREVTVEQAVFLLQRQGYTIFRENNSA

SEQ ID NO: 401806 - protein, 341 aa, unidentified
MEQATTIGLDIAKHVFQVHGADAAGHALLRKRIARPKLIGFLTTQAPCVVAMEACAGAHSWAREIGKLGHRVRLIPPGYVKPFVKRQKNDAADAEAICEAAQRPSMRFVPVKTEEQQANAILFRARDLLVRQRTQCINALRGHLLEYGYIFPQGSTHVATLIAHVEDPGSDLPESARVVLKLLIDTFTALEAQISQLDGEINRRSKADPTARRLMTIPGVGPIVSTAITALVPAAQNFPSGRAFAAWLGLTPMEKSTGGKRKLGAVSKRGERTIRRLLIIGASAVVQQASRRGASKGSWLAQMLARKPKMLVTVALANKMARIVWALLVKGGAYTAPVVAA

SEQ ID NO: 401807 - protein, 373 aa, unidentified
MPRYSTAFGMDVHLRSTTVCALDAETGETVTRRFRGNPWGEVAEWMSGFPGPSLAAYESGYLGFAPQRELSGLGVDCVVAAVSKVPRSAADFSSKNDRNDAARMAKAILSHDISPVWVPSPEIEGLRDLAGAHDAATARLAAAKQRLLAFLARRGYAYGGTTPAGNPRRYWTYDFLRWLDKVRPADDGGIRALAALRSEVEAASETRDDLLAEYRAAVAAGPLSAEVEALQSIKGCGFALAAAFASEVGDFSRFRSGRQVTSYFGLAPKQRSSADSVRLGGISGAGNALVRRLAVEGSWSYVQASHQPKLMPKGSGVPLEVRMHGRKGSERLLRRREEMLARGMPQAKANAATAAELVRWLWALGAMCREATE

SEQ ID NO: 401808 - protein, 371 aa, unidentified
MTHSLIKRQDEQGRNLIHNIDSLKTKTMKPDLQMKVDKHFRQCVGIDVAKDTFMACLSMLDIATDEGRSSKTVEFANNRHGFNQLVKWSRKEAVREAKLTFLMEVTGVYHEKLAHHLQKLGFQVYVVLSSRARKYAEYEGIKTKTDSMDAYALSRFGCAAHHLVPWTPPKPIYAALRMKTRFASHLNKVRTTIGNQLHALSNSFEKDAALERMYKSLIDKIDKELEDNDKAIEELIDTDAELKSRIEKVCSITSVGMKTAVTVIAETGAFEFITSQKQLVSYAGLDVVSSQSGPNDPRHHISKKGNVYIRTALYMPAINACMYNKRVSELYERVKEKNPNARMVAVTAGMRKLLIQIYTIWKKNELFDKQR

SEQ ID NO: 401809 - protein, 358 aa, unidentified
MTIVAHHHPFVIGVDTHARTHALAILACPTAEVVDQAQFPTTTAGLRRALAWVGRRTAGDLDVLWVIEGTGTYGARLAHAATETGYTVVEAPRMDSRNNRGLGKSDPLDAQRIAAAALPLDHLKLRMPRADDGVRAAIKVLLASRDHMSTERTATINALTALLRIVDLGIDARGPLNHSQITTAAAWRSRSEDLATATARGEATRLARRVIDLDHDLATATRRILELLRMSPASVLLEEPGIGPITAAVAFTAWSHPGRVRSEAAFASLAGTSPIPASSGNTQRHRINPGGDRRLNQALHMATVTRMRMDPRTRAYVERRSAEGRTPREIRRCLKRYLARNIYRKLNTAAANCTPSSA

SEQ ID NO: 401810 - protein, 422 aa, unidentified
MIPAVIARCAGIDVGRKFVDVCVMVGEADAVPTEQIRRFSVLNQDLEQLHLWLQENGCTHAVMESTGSYWRPIHNVLDQGPLEVLLANPQHVKNLRGHKTDKNDARWLAHLLRHGMIRPSFIPDRSTRELRDLTRRRKQLVSNAADERNRVHRVLQEANIQVGAVLSDLFGTSGLNILDALMDPDATPERIAELAVRQARKKIPLLKKALEGHCMTDHHRRLVRHSMEHLAFLEEDIAELDREIAEHVTGNAALRAATELAQTVPGIQQTAAAAIVAETGADMSQFPSAGKLASWLGTCPGNHITGGKRKSGQIRKGNPWARQALVECAWSATRKKDSAPQRYYEQRRPRLKHKPALVATAHLLTRILYETLSSGKPYEPSPPQQLTATKLQRLVRHHSRRLKNLNRWLERHKQRCAQTGEL

SEQ ID NO: 401811 - protein, 330 aa, unidentified
MTNATLKTAETDGPIFIGVDMAKESFVWNEHGLRATHSVANEASGFDCLVAALRDRPIGLIVVEATGGLERALAAHLVGQGLPVAVVNPRAAREFARSMGHLAKNDAIDARALAHYAQTLAAKADQSGVRFTVPEAQVDALQALVMRRAQLLNMRTAEKNRLTGAIRVLRTSIQAVIKTLDGQIAQMDRDIDDHLETYFKEQSKRLEAIKGIGPTTCATLLAFMPELGSVAGRRVAKLAGLAPLNVDSGKSRGTRHVWGGRSIVRCTLHMAMLSAVRYNPVLKAFYDRLIAAGKPKKVALVACSNKLMRIVNAMMRSGQPWNDQLHIQAA

SEQ ID NO: 401812 - protein, 403 aa, unidentified
MRFIGLDVHRDWCDVAIYEDGSVRSVGRIGTAPDQLQLFAQSLGPDDRVGLETTGNALSIARIIEPHVAGVLVADTRNVRAMTHAKVKNDRVDARMIAKLLAAGMLPGVWICDEQTRVLRRQIARRTQLVRGRTRARNQIHATLIRNLGGRGPARDILAKKGREWLQSLELPADERATILSCMREADFLARELAQVDREIARYAVGCPEIRRLMTIPGVDVTTAATLMATIGRIDRFASPRHLVGYLGLDPRSRQSGLGAVQHGHISKQGSATARHVLCEAAHATMRSPGPLRAFGQRVRARRNNKIATVAVARKLACLTWQLLTTEQDYIYERPALTFRKLRQLELAAGAPKRHNPRGSRAPATPDTPAQWKTERQDAQRVEDDYRAAVADWKPQRPPSPVT

SEQ ID NO: 401813 - protein, 357 aa, unidentified
MSPQINQLDFKGQLFFIGIDVHKQKWSVTILDDERELQRFSMNPNPEELARYLQRNYPGGRYKSAYEAGFSGFWIHRRLVELGIDNIVVHAADIPTRQREKNQKSDKIDSRKIARELRNGSLQGIWVPDPALQDLRSLCRLRFKLARDRSRTKNRIKHFLHIKGITIPDPSEIWHWTSAFDDWLESIAFENQTARDCLSGYVKEYKCLQKLIDDTLNKLRQYSQQAELRETIYDHLMSIPGIGFIIAITFYTELGDPRRFKRLDQMACFVGLVPSVSASGEKERVRGISDRHNRYLRYLLLEAAWVAVSKDPAMGLAYKQLCKRMSKQEAIIRIAKKLLNRLRYVWINRKPYVVAVC

SEQ ID NO: 401814 - protein, 471 aa, unidentified
MHSLKLFLNYNLRYLIMEKQAVTLPVINFHAAGIDVGSRSHVVAVDQNKENVRSFGVYTQDHQELILHLRQYGITTVAMESTGSYWQTLFNALQEAGLEVLLVGGSQTKNVQGRKTDVIDCLWIQKLHSLGLLSGSFLLSDILQEFRTYYYHRQHLIEQLATYTHKMQKSLRLMNIRLDVAIRDITGKSGMAIVEAILSGNRNPQYLASLVDVRMKKSQEEIAQSLHGSWRQELLFELQAALDFYKQYQKALLECDKVIEQALRRNAPAEPVSKPVEQALKATKKKSSKHTPAFDVADLAFQYLKTDLFAISGISHSTVLCLLTTLGKDIHKFASAKSFASWLRLVPNNKISGGRIISHRTPSGKSYVAAALRQAANSIGNQPNHELAPFFKRIAYKKGRVAAITATARKLAVIIWHMITKAEPYKKNQIKENNQKSRAAGLRQVQKRINALNLSQEELDRLFLKPSLSVS

SEQ ID NO: 401815 - protein, 423 aa, unidentified
MTSMTLDPPLTNLLSPAAELVAGVDTHKNTHHVAILDLVGRPVADREFRADGRGYTQVIRFLPGHGDGARVGVEGTGSYGAGLSRALNAAGLTVVEVARQDRQARRRRGKSDPLDAHQAAVAVLAGTDTAIPKSGDGAVESMRILLAERRSAAKARAQVMNQIHALLITAPELVRQAFRALSGQRLVNRLARTRPGSEASADPAVVARQTLRRFAVRHLTMQAEIDLIEQQLDFLVRQVNPALLSLSGVGPVTAATLLVAAGDNPERLGTRASFAALAGVAPIPASSGQRTRHRLSRGGNRHANAALHRIVLLRMRHREPRTMAYFERRRAEQLTDRDIMRCLKRHVANEIYAALLNPATDNPAGRELRARRQAIGIPISVLAASLGVPYQRLRRLEIGVRADPELEHRATIALDEISPPQTA

SEQ ID NO: 401816 - protein, 423 aa, unidentified
MEVLHRRVAGLDVHKETVVACVRLMVRRKPTRECRTFATTTEGLLALLAWLTESRCTQVAMEATGVYWTPVWKILSAGDFTLIVANAAHIKQVPGRKTDMNDAMWIADLLACGLIKASFVPEEDIQELRALMRTRKQLVREQTRHVQRLQKTLEEANIKLDSVISDIMGVSGRRMIDAMIAGERDPHRLAALAERNIKASPKALYDALYGRLREHHCFLLKLHLQQWDALDAAIRQIDRQVAGQIARMDEEAGDEASCFRELILRLSAIPGVSRLSATAILAEIGRDMSRFPTAGHLVAWAGLCPGQNESAGKRKSARLRHGAPWLKTMLVQCAWAAKRAKDSYYMAQFHRLRSRRGPQKAICAVAASILTAIYHMLKSGAPHRDLGADYFDRRSPEAKAKRLVTQLTKLGFDVKLQPLAVVA

SEQ ID NO: 401817 - protein, 474 aa, unidentified
MMKPAAKATPRVLPMLAHEMLYIGIDVGKQGHVAGFVSNTLLSRHKHFEACPTLRFDNSREGFRQLIDRIQSYVPLEQCYVLVEKTGHYHRALVQYLQELDVVVYMMHVRERPKRLLKTDKRDALGLANHLYNQLEKGIQLADKLQLVRRALPPTPAAAAMQSLLRHRAELVQETTQRKNKLTAICDELFPEFTTIFKDPNGTTALAIRKAFPTPHALATASLHNVQVLRPSRRPSIAQLVVLQQLAGQSIGCKDVDRQRGLILEQTQLIKELQLMQEHIATLDAEIQATITSSREGRIVMSVPGWGPIPAATLIAAIGHVGNFPTAATFKAFCGWAPRVSQSGTSYDQAALSRGGSRLIKSAIFLVVGHAIQLDCEWKRLYERLVPQKCAFDERTRTYKGKLKVYGRIAGQMLALIYALLKQDLEVVARTPRGEVPPEPILYDAAIHRAHRAGHYRSSKPRVQPGKIVQLPKQ

SEQ ID NO: 401818 - protein, 362 aa, unidentified
MRIIGCDLHARQQTLAMLDTTTGEVVSMTLKHEGNNVREFYSSLPRPVRVGIEATGSMQWFLNLMEELGIECLVGHPAQIRAAEPRKQKHDRRDADLILKLLTENRFPAIWLPSKELQDLRSLLRHRHQWVRMRTRIQNALQSIALANGLRRGTALWSRDGQSRIASLPLTPHTAYRRSELQAMYEKFAAEIEKLNQRVEEQAGKRPGARLLMTHPGVGPITALATEVFLGDPARFADSKALASYVGMIPREYSSGERQRLGGLSKQGNPLLRFLWGEAGAHAARRDPELQRFYRRKLVQKGFGKASVAVARKLGIRLWIMLRDQIEYNEFCRRGQKQQKSSEACAGMPETRYGAKSHRAID

SEQ ID NO: 401819 - protein, 402 aa, unidentified
MNCVGIDVSKGKSMIAVMRPFGEVVVSPFEVRHTASELSELARLLKNLDGETRVVMESTGNYHAPVAWLLHGAGFYVSVVNAMLVHDYGNNSLRRGKTDKKDAVKLANYGLDHWLTLPRYVPEEDTRLMLKTCYRQYQQYSKVQTMLKNNLISLLDTAFPDANRLFTSPPRADGSEKWVDFVATFWHCECVCGLSKKAFTAKYQKWCRKHGYNFSQDKALDIYASACGRFGVMPKTNTAKLLVEQAISQLQTTSAALAALKQEMQSLAASLPEYPVVMEMFGVGHTLGPQLIAEIGDVRRFHSKKALVAFAGIDAPPYQSGQIDVRSRSISKRGSASLRRTLFLVMGVLLQCAPMDEPVYQFMNKKRSEGKPYRVYMMASANKFLRIYYASVKAYLDSLEHD

SEQ ID NO: 401820 - protein, 363 aa, unidentified
MKIMTGIDLHSNNALCGLMDESGRRIVHKKLPCELPAILQMLEPYKGRIATVAIESTYNWYWLADGLQDHGYPVVLANPARMKPCDGLKHTDDVSDACFLTELLRLGILPAGHLYDRKHRPVRDLLRRRLLLVRQRTSLILSFKSLNERTLGQRVPLTRVKTMSAADARARFTEPADQLLGGQQIELMGQLQPAITKIEQHILGVAGEWSTYQRLQELPGIGKILGLTIALETGEAKRFAGAGNFASYCRCVKSLRQSNGKKKGENNRKCGNRYLAWAFVEAAHFACRYDERCRRFYDRKAKQTNPIIATKALACKLAKAAWHVMKDDVPFDADRVFGPGRKEAFGETGREPAKGSGRKSPQD

SEQ ID NO: 401821 - protein, 352 aa, unidentified
MNEITTVGVDLAKNLIVVSGASQSGRGMAFKQFSFRGFGEWASNLPPCTIGMEACGSAHYWARRLSGYGHTVRLMAAEHVKPFRKSQAAKNDRNDAEAILTAVRQSNMRFVAVKSADSQAMLAWHRVRQGFSTERTALINRARGLLAEFGVWLGQSPQALKQALSQLQTDERLPQRFRPLLLQMLEHLQTLEARIEQCELEIRAHAKQSEDAQRISALIGIGPITSSAVVATVGRGQDFKNGRQLAAWMGLVPKQKSSGGKERLGAISKRGDAYLRGLLTQGARSTLLTAQRRAPEKRSRLERWIIELAQRIGYHKTLIAIANKHARIIWAILASGEHYDPHAWQRYEGQTT

SEQ ID NO: 401822 - protein, 345 aa, unidentified
MKITTTGIDLAKTVLQVHGVDKHGKVGLRKQLKRKDVLSFFANLEPCLIGMEACGSAHYWARKLSELGHTVRLMAPQFVKPYVKTNKSDRNDAEAICEAVGRPNMRFVAVKTAPMQAVLALHRARQGFVKARTAQANQIRGLLAEFGIVIPKGIGHIAKRLPEILEDGENGLPGMMRELLQRLGENLKDMDRQVRELERQIVLWHRENEASRKLEAIAGIGALGASAMVATLGDAKSFKNARQVPAWLGMVPRHEGTGGNVKLGRISKRGDVYLRTLLIHGARAVITAVERKPDHADEWLKKLLARRNKNVAAVALAAKNARIAWALLAHDRSYQHDYVATRKAA

SEQ ID NO: 401823 - protein, 375 aa, unidentified
MGDHSEAFVGFDTSKLRNAVAIADAGRGGEVRFFGEIENTPAATAKLVRKLAAKYQRLTFCYEAGPTGYGLQRQIKELGFACLVVAPSLIPKRPGDRVKTNRRDALSLAKLLRADELTAVWVPDGAHEAMRDLTRARETAMLDLRTKRQHISAFLLRLGRPYGERKKTWTKAHVSWIASQKLEHPQQRLVLEEMMLAMRQAQERQQRLEQAIAAAVPEWSLAEVVTALRAMRGIDLISAATLLAEIGDLSRFRTPTELMAYLGLVPSEDSTGDVIKRGPITKAGNRRARRMLVECAWSYQHPPRVGSAKQPKVDAAPEAVREIAWKAQCRLYRRYRALIRRNKLKTVAIVAVARELSGFIWAVAREVTTARAALA

SEQ ID NO: 401824 - protein, 395 aa, unidentified
MVRIYVGIDVAKARHQVGVVDQSGSPIGKSFSIANSRDGFTILFEKLTALGSPQEIRIGMEATGPYGWALHYHLVARGYAVAVLNPLQTGAFAKTRIRKTKTDPIDALGIAQLIRYGKFSSAVIPNERALRLRELTRYRNAVVGLLTRFTNLLESRLYRTFPEFADHFSNLWLPTPLGLLRKHPLASEIAALPVSELAALLRHLSYGQTGIKTALALQRDARDTIGIPLAGDVFSLELRGIAGVIRTLRVHLKGLTSHISEILHEVPDVLTSIPGVGDLSAAVILGEIVDVRLFDRPEKLVAFAGLDASTFQTGQFNGNSGTLSKRGSTHLRFAVWQAAFASTRYCPELRAYYERKRAQGKHHKTALGAVCRKLLHLVWRLLIDNRPYESRTPLE

SEQ ID NO: 401825 - protein, 422 aa, unidentified
MLAPTQDNEQIIERIAALDIGKAELVCCVRVPDPKGSGKRLQEVVTYTTMTRSLLLLCDRLRELGVTRVIMEATSDYWKPPFYVLEAAGFEVWLVNAKDVKHLPGRPKSDPIDSVWLCKVAERQMLRPSFVPPEPIRILRDLTRYRIDLVAVRTAEKNRVEKLLEDAQIKLSVVASDIFGVSGRDMMNALVAGERDPKVLAQLARARMRAKISDLQEAFHGRFTDHHAFLLAKMLARIEAINADIKEVEERIEEQIAPFAEAVARLDAIPGIGLTAAQAIIAEVGLDMSRFPTAGHLASWAKFSPIISESAGKKKGKNATGKGNRYLARVLGEAAVSAAKTDTFLGERYRRIARRRGKQKAIVAVGRSILIIVWHLLSDPAVDFVDLGPDFYDTRGGTQRAIRNHVRRLEDLGYTVTLHPAA

SEQ ID NO: 401826 - protein, 426 aa, unidentified
MKNTQNEKISQIKITTLVVGVDVAKETHYARAFDYRGIELSKLLRFSNTAEGFQRLEEWMQNISQQHKKTDIIVGFEPTGHYWFNLGDYLKDQGHKLAIVNPFHVKRTKELDDNSPTKNDRKDPKTIARLVKDGCYREVYIPEDVYQELREAISERDRLVQRMSSISNQVTRWLDIHFPEFNTIFKDWRRKAALQILRNYPTPEKIIAAGAFKIEGTWRESMQRTAGLKRAQELVKTAEASIGRKTGLTAAEASLQNLLNEHDLYRQQYEQLEQMMLKLLQQVPNAEKLLEIKGVGLITAATFVGEVGDIRRFQDPRQIQKLAGFNLVENSSGKHKGKTRISRRGRRKLRHGLFMAMITILATNQDFRQLHKKNISRENNPLNKMQSIIALCGKLIRVFYALLRTGNNYSAEKMLGDIELGMKAAA

SEQ ID NO: 401827 - protein, 321 aa, unidentified
MTYVGIDVSKATFVVAYSSAKTGWTKTFKNTVKGVHEFIQTISATKHHCVLEATGNYSALLVYLLSEAGITVSLENPLKVKNFARAMLTVTKTDEIDARLIALYGERMQPAPYKLRSDSILILKQKRTVLRQLKKQLVATRNLRGSLEILPSFDPECKKTIEKTIAFLEKQIKAMEEKIASLAQGEYKKQMDLLTSIKGIGVTLAAALIVATGGFTYFDNAKQLTRYLGLSPTYQQSGTSVNVKGHINRNGDSSLRSQLYVAAFSSLRCNTQCKACFDRLRSNGKPGKVAVVAVANKLLRQAFAVVTQGKPYVDGFKSEKP

SEQ ID NO: 401828 - protein, 381 aa, unidentified
MKKHITVTKRNRQQSAETSQNRQASLPASLKWTVGVDLGDKDSHYCILDEAGEVIRRGKEATTKAGLRSLFAEMPRSRVALEVGTHSPWVSRLLDGIGHEMIVANPHKVKLITQSNRKNDRVDAEQLARLARVDPKLLSPIRHRAESAQADLAVIKARAVLVKTRTMLIIAARGLAKSMGERLRPCDADQVRAAMVDALPQELRTALEPVLKAVEEITGQMRECDRQIEQMEPRYPEVVLLTQVYGVGLLIALTFILTLDDPERFAHSRDVGPYLGLTPKQRDSGERQMQLGISKAGDGLLRSLLVQGAHSILRQGAPESELQAWGRRRMEQGGKRGKKRTVVAVARKLAVLLHRLWVSGEVYDPQYHRKGRERAGAQAAA

SEQ ID NO: 401829 - protein, 347 aa, unidentified
MSNTHVATIGIDLGKNIFHVVGLDATGAIALRKKRSRNQLEQSLANISPCLIGMEACAGAHHLGRKLEKLGHKVRLLPAQYVKPYLKGHKNDFRDAEAIAEAVQRPTMRFVPLKSAEQLDLQALHRARSRLVTQRTAVINQIRGFLLERGLPVRQGAAALRLALPRLLSMLTDDLSPRIVRLIHDLAEDWRYLDWRVACITKEIDELADQDAHCRRLMSAPGVGPIISSAMVAAIGTCDAFAKGRDFAAWLGLVPKQISTGDRTILGRISRRGNRYLRTLFIQGARSVLLRRQSWPKHGFGAWLEAASKRLHSNVLVVALAAKLARMAWSMLAKGHDYDANFLGHAA

SEQ ID NO: 401830 - protein, 402 aa, unidentified
MNAVGIDVSKGKSMVAIMRPFGEIVSAPFEIKHTAGDIHSLVELINSVEGESRIVMEHTGRYYEVLAHQLSKANLFVSAINPKLIKDFDNDSLRKVKSDKADAVKIARYALDKWQNLKQYNVMDELRNQLKTMNRQFGFYMKHKTAMKNNLIGILDQTYPGVNTYFDSPARSDGSQKWVDFASTYWHVDCVRKMSLNAFIDHYQNWCKRKKYNFSQSKAEEIYGKAKELVPVLPKDAITKLIIKQAVYQLNSASTTVESLRTLMNETASKLPEYPVVMAMKGVGTSLGSQLMAEIGDVSRFTHKSAITAFAGVDPGVNESGSYEQKSVPTSKRGSSDLRKTLFQVMDVLIKTHPQDDPVYQFLDKKRAQGKPYYVYMTAGANKFLRIYYGRVKEYLSSLPES

SEQ ID NO: 401831 - protein, 349 aa, unidentified
MNALHYIGLDVHKKTISYCIKTADGQIIEEDRLPARREVLRQWAQTQQTPWHGAMEATIFSAWIYDTLKPFAAQLQMAHPARMKAISAAKKKSDRIDARTIADLLRCNLLPACYVLSPELRDLRRLLRYRNLMVQESVRMQNKIAGLLMESGAEFNKQKLHGKKYFAQLVKSLQEVPASVKDLLQMSRGAMEMFEAAQKRLVKCLLAEPKLEARIERLAGIDGVGPITALTWALEIADPHRFPSIDDAQSYCGLTSALHESAGKEQRGPISKQRNAWLQTALIEAAKLAPRWNPQLAAVHARELEGGNPNRATLAVARKLVAYLMAVDKSGKPFQLRLSLPTTAAAAAG

SEQ ID NO: 401832 - protein, 421 aa, unidentified
MFSESEDDEQIIERVAALDLGKAELVCCVRLPGKTGTRRVQEVSTHTTMTRSVTELANRLVDLRIERVVMEATSDYWKPVFYLLEAHGLQPWLVNARDVRHLPGRPKTDVLDAVWLCKVAERQMLRPSFVPPAEIRQLRDLTRYRMSLVATRGAEKNRVEKLLEDACIKLSVVASDIFGVSGRQMMAALVAGERDPGRLAEMARARMRAKIPQLREAFTGFFTDHHALLLAQMLSRIDGIEADIELLDERIEAHLVPFADAVERLDKIPGIGATAAAVIIAEIGVDMSRFPTAGHLCSWAKFCPGIKSSAGKSKGRGSTGHGNRYLARILGEAAVTAGRSDTFLGERYRRIAKRRGKKRAQVAVGRSILVIIWHLLADPDARFVDLGPDHYTRSINTETKKRNHIRQLQALGYTVTIEPAA

SEQ ID NO: 401833 - protein, 464 aa, unidentified
MTDKKLWRNRKERKEWARRLQSEDPGLEIVHPHAAGIDVGNGAHYVAVRPDRDPEPVRRFECFTADLHHLADWLQSCKVKTVAMQSTGVYWIPIYEILEERGFQVYLVNARHTKNLPGRKSDVQESQWLLKLHTYGLLNNSFQPPSEIRVLRTYWRQRAEHVHGAATCIQRMQKALTQMNVQLANVISDVSGLTGQAIIRAIVSGERDPRKLAELRDPRIHATHEEVAKSLEGNWRPELLFVLQQEVEMYDIYQRRIAECDQQLQKHLASFVDIIPSPTSQVEPKRKKAKPAKNAPRFELSSELQRITGVDLTRIDGIDIMVAQTLVSEIGLDMSRWKTEAHFASWLGLCPDNRVSGDKVLGRATRRVINRAATALRMAAVTLMRSRTYLGAQYRRLRTKLGAPKAITAMAHRLARLVYRMLKYGQGYVDKGAEYYEQRYRRQQIEFLTKRATKLGLQITVAHA

SEQ ID NO: 401834 - protein, 316 aa, unidentified
MTETLFVGIDVAKDSFEVASIPEGLKLSLPNDPKGRQRLLDLLQNQTVALIALEATGGYERHLVAELLEAAHKVVVANPRQVRDFARGIGKLAKTDRIDAAVLARFAEVVKPQPRQKPSENAVNLGELVVRRRQVANLLTAESNRLPLARHAPVRKSLQKVIATLERQIADLDKRIRENIESHDGLRRTDKIVQSFKGIGPGTSATLLSQLPELGKLNRQQIAALAGLAPWTAQSGPWIGQPRIWGGRMEVRNMLYMAALSAIRYNPVISKFYQRLQSHGKKSKVVITACMRKILVILNTLVQRDCLWTLETAKNS

SEQ ID NO: 401835 - protein, 351 aa, unidentified
MPRNTDTAVVRTIGIDTGKNTLHMVGLDERGAIVLREKVSRHRIAARLVNVSPCLIGIEAGMATHYVARELVGLGHEVKQVPPAYAKPFRQGHKNDFRDAHAVAEAVQRPSTRCVPIKTDGQLDLQALHRVRSRLIGDRTAVINQLRAFLLEHSIAVRQGHRFLRQQLPQILATRSDVLSPRMVRVAGDLVSDWDYLDERIERVTDEIESLAQTDVSCGQLMTAPGIGPIIASATVAAIGNGAAFAKGRDFAAWLGLVPKQMSTGDRTILGRITKRGNRYLRMLFIQGARAILLHPGSWAKHSFGPWLTAAARRLHHNVLTVALANKLARIALTVLVEGRNYEPRIAPAAA

SEQ ID NO: 401836 - protein, 334 aa, unidentified
MRGAPGNRRPYRDAFLADIQRTAGERGFVVIIEICGFNDWLVKLLGEYGCKNIVLVQPEKRSKRKTDRRDANALSETLWVNRERLLAGKRVQGLRCVEWPSEEEASDRQITALRRNLGQSRTRTINRIKHLLRKHNVEQECPTKGLDTIRGKKWLAQLTLNKIDRLEMDQLLAQWKLCDEQIEVVEKEIQQRQAQSPAAAIVATIPGAGAYASLALSSRVGSIERFARPGSLSNYWGITPGSRNSGEVKDRLGSITKQGSAMARFILGQLVMHVLRRDPWMKAWYGRIKRRRGAKIARVAVMRRLATILWHMLKYQQPYVIGGPPRKKLPREGE

SEQ ID NO: 401837 - protein, 313 aa, unidentified
MSKLVSKITLGIDVSKAELVICDWETEEISTRENQASVIKVWLKALYGPVRIAIEPTSHYHLEVVEQAHAMGIEVYLINPRQLSHYRIAVNVRNKTDPLDAWLLARYLAHESDSLRPFKPLCAKAQRLWALLKRRATVVRARTQLDQSFRECTLSIKALRREIRHLLARIDRHIQALVRALGWWTDYQRCLSIPGIGPLNAAALVTVFHRGAFAGSDAFVAFIGFDVRLRESGKYKGKRKLTKCGESEIRRLLFCAAQPARCYALFDQYYQQQLTKGLSKIAAKVILARKLARIAFTLLTNEQSFIKKEIAYS

SEQ ID NO: 401838 - protein, 426 aa, unidentified
MLGARRRVLKMKSLKQGIIQDKEVTNMRAVFGIDVSKASSEVAVFVNQKKIHAYTMPNDAVGFSRLLDDLNSVQKPEIIFEATGVYSRRLQAFLEDHNFAYTRLNPLEAKKQLDGLRVRKTDKIDAEKLAQSQFLLNRKPTHVSEEVYQNLRDLSRFYQNLTDDIVRAKNRLHKVLQVTFPELEGILSSPKGDQYWELVTAFPSSYFVLDLSTRELADIIRKSTSKRISDQRVAELTEKLISLAKQSYCAVKKDSPMLEQARYYAQELLRLSDCRQAALDEMKSLAEFLPEYDILLSIPGIAETTATSIIGELGDIRRFKTANQLNAFIGIDLRHYESGDYLAKEHITKRGNPYARKILFRCIYNIISASRTNPCHIADFYEKRKKQSQATSTKPHVIASMHRLIRTIHYLITHNKLYDYNIAKNR

SEQ ID NO: 401839 - protein, 347 aa, unidentified
MPEPTTLFVGLDVHKDSISVAHAAAGRPDPPHFVGAIGTRQADIDKLVRRLHSHAGHLVFAYEAGPCGYVLHRYLTQKGLDCQVVAPSLTPKRPGDKVKTDRRDALEIAHRLRAGDLTPVYVPRVEDEAIRDLCRARDAARVTLKAAKLRLKSFLLRLGLHYTGRADWNQAHRRYLARVVCPTPAQQIVFQESVRAVDEQVERLHRIEAELRAVAPPWRLAPVVDALQALRGVQWTVAITVVAELGDLTRFDNPRQLAAFVGLIPSEHSSGDQRRQGGITKTGNGRARRALIEAAWPIATPPRAPPRSRSASSRCRNRSRTSVGRPSCGSASVSAGSPPAASTPTSR

SEQ ID NO: 401840 - protein, 342 aa, unidentified
MKKEIESQRSYIGIDVSKLTIDVSIITQEGDHDYRQFSNSVSDFKRLEIWLNKKAYFCYKETLFCMEHTGLYTRELLSFLLQREANVWMESALHLKRSMGMTRGKNDKVDSYRIARYAMTNNDKAVLLKLSSSTLLKLKDLMANRERLSKNYQSLKIATQELARVDKSMGKELLKLNDSALKGIQKSKIKVEKRMLELINQDEELKKLFSLITSVKCVGDVLATELIVYTNGFTRMNNTRQLACYCGVAPFEHRSGTSIRGRVGTSNFANMKLKSTLHMAAVSATRYVPDIKQYYERKVGEGKHKMAVINAIRNKLIQRVMAIIKRGTPYEENYLKNNLILS

SEQ ID NO: 401841 - protein, 389 aa, unidentified
MGKTIRFVGLDQHAATIAVAVAESSRDGEVRSLGTIPNRPESIRKLVTKLGPPETLRFCYEAGPCGYGLYWQLVQLGAQCDVIAPTLIPTKTGDRVKTDRRDAEKLARCHRSGDLTAVWVPSAEHEALRDLVRAREAAKEDQLRARNRLGKFLLRQGHRRPDESVAWGTKHMAWLKTVKFEHRAQEMTFVDYLSEVEHAKERIARLECAILEAIAQAPASMRAVVAALEALRGVKTLTAVTVVAEIGQFSRFTAAPQLMGYSGLVPSEHSTGGPGKARRGSITKTGNAHVRRVLVEAAWAYRHRPNVAGDLAKRQKLASEQAKAVAWKAQHRLHARYWKLSAGGKPAPKVVAAIARELLGFMWAIAVEAERAHQKQGGARSQPLVSARS

SEQ ID NO: 401842 - protein, 360 aa, unidentified
MNGNSLSIKSIVVGMDIHKYSHTAVAMNILGKEVGHLKFDNEKLDSCLSWLKSLGKKKDLVIGLENINGYGFHLARKLDNKGFDLHYICPILTDRERKHSVHKEKTDYIDAKNVGRVILNKYDELLPATPVISEEQKNLRLIDIHLQERDSLIKQRTQIKNRFHNLLHQYYGDSYKKKFKNIFTNLALKYYEDDIKKFKSDLNFLGNAILRLIDQFNIVKDHVKKIDMILKDLGSRIKYILILKEKLFGCDCLTASKIMVEIEDINKFSNQDKLARYGGFAPVRVKSGNSGKLYTDKYGNRKLNKAIHTVALSQIGRYGPETYKSYYRKKISEGKSKLWAMRCLKRQIIKNIFNILKESI

SEQ ID NO: 401843 - protein, 357 aa, unidentified
MLAEHCDAAVGIDTHRDTHQAELALPTGFPVATCTISNDSTGFARLLAWITDHAPGPRVVVSIEGTRSYGVGLTRVLTAAGLFVIECEQPHRTVRRGTGKSDPVDAHLAVLAALRLDTGKLPVPRADGDREALRILLGARHDLTVTNTAQTNRLRALLLGGDDADRELARGSLTAGTLDWLSHRQEPRNPTREQTVRHAEIRRLATAVRENTRALKANAAQRQQIVDDLVPGLTERRGFGPVTAAQAVVSFSHTGRCRNDAAFAALAGTSPLQASSGRTVRHRLNRGGDRTLNSAIHTIALVRMRCCPTTRAYVTRRTAEGKTTREIRRCLKRYITREIYRALTAAPALTMTIAPAP

SEQ ID NO: 401844 - protein, 342 aa, unidentified
MGEVSTIGLDLAKHVFQVHGVDEQGNVTVRKPLRRGAVLKFFAELSPCTIGIEACSTAHYWARELTALGHSVRLMPPAYVKPYVKRGKNDAADAEAICEAVTRPTMRFVPAKSAEQQANAMVYKVRELLVRQRTQLINALRSHLAEMGIVAAKGLGKFDELVAIVHDQEDGRLPAPARQALQELAEQIAALDARIEPLQQEIVSQLRSNETVRRLTTIPGIGPLIAGALIAMVPDPAGFRSARHFATWLGFAPRQKSSGGKQRLGSISKQGNRYLRSLLILGAANVLRRRSASKSAWLMALRGRRPFRIVAVALAHKIARIAWALMVKGGSYRAANLAAAQG

SEQ ID NO: 401845 - protein, 409 aa, unidentified
MYDKTKYIYVGLDLHKEQHTAVIMDCFNEKLGEITFENKPSEFTKLITKCKKHCTDSKGIVFALENSYGYGRGLAAWLIERDYIVKDVTPALSYAYRKSVPQYKKNDSYDAQCVARVAINELNKLPDAMPEDMYWTLSQLVNRRANLKTHHIRLKNQLHEQVCVAYPSYKQFFQDIGRPTALYFWEHYPSPRLLRGKTVEELAEELIPVSHNQFSTRKCQIILDAVKADGDTTRDYQPERDEITRGLVKDVRNYVEQLEAVDKSIADFLPRFECTLNTIPGVSDTTVAKLLSEIGDIRRFPNADKLANFAGIAPVNFSSAGKGDDKPSKQGNRRLQGTIYFLAIQMIQLSSKGLPRNPAFYAYYQRQLARGKTKPQALILISRRLISIIYGMLKNKTEYVMPKVQDNWG

SEQ ID NO: 401846 - protein, 326 aa, unidentified
MATSAKQKVVGIDVSKDSLAICHLVEEKLQHLETENNPAGFQQLIKQCGTESLYVMEATGIYYLQLAYYLHEQGAPVVVVNPVIIKRYIQMHLGKGKSDKKDAQWIRRYGEQNQVTHWQPEEMIIVECRQMEQVIEQLIKQKTMVINSLEALELQPVKCQLAAKSLKQTLKTLEKQINQLEDKLLATLEKAFAKEIKLLSSIPGIGRKTAGTLLLFAGGFRDVSNYRQLIAKAGLSPREYTSGTSIRGKVRITKMGGSLIRSKLYVCSFSAKKSNAACKALYDRLVAKGKNGKLALIAVCNKLLKQAFAIVKSGIPYRPDFTTISA

SEQ ID NO: 401847 - protein, 418 aa, unidentified
MTATDTNASTLLVAIDISKHRHEVLIGVPGKKRRRRMTIMNTLEDFHRLSAALVGYDMPVRIGFEATGNYHRPLAHHLGQAGFDLKLVPSVGLARTREALHNSWDKNDPKDAQVILHMLEIGAVQFFHDPLVVGTADIQELSKTHEIVSRSKTELWHRILTHYLPLYFPEAERFHRSSRTDWFLAFLEKYPAPAMITAMSQDAFIADAWQVVGKKVSKERLLSDVYATAVDSVGLPVDPDSDAVRMFRLVLAEGRSLVRQRNEIEARAVELLSDLPDYRLLTTIPGIGPINAMTILAEAGDLRRFRHHRQFLKFCGMDLATVQSGMFRGQSRISKYGNARLRRTLWMAGQTAVLKRTNSFRDKFERYISKDRHNAHLRRKAYTAIAAKMARTVHAVVNHGEPYRPFFEGVSPGGRTSL

SEQ ID NO: 401848 - protein, 373 aa, unidentified
MRRNALNKAGELVGKNIWCGRVSIRDGLDNFIKVLVPHCQDFDHVAVVESTYNWYCLADAFEERGWLLRVADPSTVSQANLKSSDDRTDAQYLAERLRVGSLKHYLPLNYSSRVLRDLCRYRMAMVQDCASLKIKLINLYRNQLSKNVRVADLLERCQPHMQPNYRFNSDILEEFKDPNIRLRVAFEISRIAMLEEMIKECNAEIQKQCKDQELVKLCKTIPGCGPVLSAVICTEIGTMQRFKSAGDFVSYCRLCSTSKLSNGKSKGLGNAKNGNAYLSWAFTEVAQYASRNPVIREILQRLLRKYGGLRVKAIRTLAAKIARVTFYVFKNKQPFNAAKCFGIELTKSIKKKSAHKSLREDAAVVLPNVAGQA

SEQ ID NO: 401849 - protein, 349 aa, unidentified
MGIIGGLDVHRSQITYDWIDTDTGQRQRGQLAPANREHLRVWLEQFAGRPAAFALEGCTGWRYVVEELKRAGIEAHLAEPADTSAARGPKRRAKTDRADARHLRELLATGRLPESWIPPAHVLEVRTLVRCYKALLDEHTAWLQRVHATLFHHGVPAERNLLAPDRRERLERGSGLSPAARQLVTVALRTLDQLDAELDLLRAELTRFAHLQPGCRALDQLYGIGPVTAVAIWAELGDVGRFSSSRHAVRHTGLDVTVYSSDGKRTPGHLARQGPPVLRWALFEAAKCAARASSPDHAYYTQVKERLGGNRATLAVARKLTRRCYHTLGALGEQAYAPPSDTPDLGQVA

SEQ ID NO: 401850 - protein, 383 aa, unidentified
MAKDSTARFVGLDVHAETISVAVAEPGRDGEVRSLGRIPNRPEAIRKLVKRLGEPASLRACYEAGPCGYVLYWQLTQFGVACEVVAPTLIPVKAGDRVKTDRKDAEKLARCYRAGELTAVWVPDEAHEALRDLVRGREAAQRDLTRARQRVLKLLLRRGRQQPEGMKNWTAGHWDWVGRQQFEYVALQRVYADYVHEAEHQRDRLKQLDDAIDEAVAAAPAATRAVIAALQSLRGVAQTTAVTVVTEVGRFSRFEKARELMGYSGAVPSERSSGGPGGTSRGSITKTGNAHMRRVLLESAWHYRHLPAVSKALRARQRGQEERVKDIAWKAQVRLSARYRRLVGRGKAPQKVATAIARELLGFMWDIGRRVEQLNETNQVEAA

SEQ ID NO: 401851 - protein, 366 aa, unidentified
MGKSSTVFVGMDVHKESIELATADEGEARHYARIGGEAAAVDRVVRKLRSVHRELVFVYEAGPCGFWIYRRLRAQGLACMVVSPSMTPRRAGDRVKTDRRDCLMLARLARAGELQPIYVPDAKDEAMRDLVRTREDAVCMQRQARQRLQALLLRNEIRYVGKTAWSAAHRRWIAGLKLPDPAQQIAFEEYVTALEEAGARLERLAQAIGTQLEHWRWRSLVGALQALRGISAIHAVRIVAELGDLTRFVSPRKLMGYLGMIPSEDSSGSRRRQGSITKAGNSSARRALVEAAWAYAHPARVSWVIARRQTGLAKSTTDLAWRAQLRLCARFRRLAARGLNRNKIVVAIARELSGFVWAIGQSVKPL

SEQ ID NO: 401852 - protein, 406 aa, unidentified
MRYVGIDIAKKDHQIAAVDEFGNVILKSFSAGNNESGFAKIAEKLEAARIESDECLVGMEATGHYWISLWAFLDANGYEVVVINPIQTDAFRKVDSLRKTKTDAIDSVLIAEYLRFANPESSKMANPDVEQLRELARFRSFLVEQATQLKNKAIRVLDQAFPEYGKLFSNTFGEASKALLKQCPTPEEVLATDIRTLTRILKENSGGNCGRAKAEAVKDAARSSIGAKFGARALSFEIKLLVKRLSFTQVQIEELEDEISELLHRSDGHWLTTIPGIGDSLAASIAGEIGDPDRFETPKKLIAYAGMDASKYQSGANQDTNGHMSKRGSSELRRALMLAADKVRIYDPYFGEYYDSMKARGKHHYVALSGVARKLAGVCLSLMREQRPYESEPPEHHLPGHLQRQA

SEQ ID NO: 401853 - protein, 408 aa, unidentified
MQVLYTRCAGLDVHKDTIVACVRCVSPPMHQEVRSFGTTTAQLLELADWLAEHDCTHVAMEATGVYWKPVWHVLEAEFELVLANAAHIRNVPGRKTDVNDAMWIADLLAHGLIRSSFVPPQAIQQLRDLTRTRKQFVREVSQHSLRIQKVLEDANLKLGSVLSDVLGKSGRAMLDAIVAGETDPARLAALAQGTARNKAAELRQALRGRITEHHRTMLRLHLQVVDALQRTLAELDAAVGKALAPIQRRARLLTTMPGISDLTASVVVAEIGVDMSRFPSAAHLISWAGLCPRSDESAGKRRSTRVRKSGTWIKTTLVTAAWAAVRVKTSYLRAQFLRIKARRGAKKAILAVAASMLTAAFHMLRDGTEYNDLGSEHFDRQDKSKTIRRLLKRLQDLGCDVPELAHTT

SEQ ID NO: 401854 - protein, 364 aa, unidentified
MKRKVYVGMDVHKETIQIAYLTSNSKEILKEQQIKHNEVQIKKFIKKLKTEWNEIYCCYEAGVTGYPLYRYLKSLGVNCILVAPGKIPRQSTDKIKTDKRDAIKLARLMRSGELESIHVPSEEDEAVRDYLRSRDSLRLDLGRNRQRLMKFLLRKDIKYSTTKYWTVSHYKWLNNLHFNNEILQETFNDYYSRVRVQEENLKSMDKKIQEIAESEPYREKVGILRCFRGVDYLTAMFLLCEVNDFKRFKTAGSFMSFLGLVPGEYSSGSKRKQTGITKTGSPRLRRILTEAAWQHRFPGTGSKIITARRSGQPALVVALAEKASLRLHKKFRNLQLRGKTPQVMITAVSRELSGFLWAAMNLVA

SEQ ID NO: 401855 - protein, 475 aa, unidentified
MNIKGIKKKNQVVTANIFEQQELLKKSEVIKENLTASTWRELETNGKFDKNKKLSFISDDMLILGCDVGSETHYVRAIDTRGRELSKSAYSFNNDYEGFQSAKEWAVKIAAEHDKSQIVLGLEPTGHYWFCLATWMIANGISVVQVNPYAVKQTKEVEDNSQLKDDRKDPKLIANLVKDGNFGMPYLPEKIYAELRRLSMFRDQLNEDRIRTINRMHREMKIYFPEYKEALGKVDGAFSLELLKEAPFPDELTALGEEGIRQIWHAAKLRGRGYSRAREILQYAKASVGIKDGSIASKAAVKWFVQKIMELDVELAVIENQINQKCQEIPHTGNVLEISGIGENTLSGILAEMGDISRFDDVKEIQKLSGLGLVACSSGKHKGETKISHRGRKRLRYWLFQAAKSAVAHAEEFKELHMYYTTRADNPLKKMQSLIVIACKLLRIIYTILNTGTKYAPKKMLMDIRRPENKEAIVA

SEQ ID NO: 401856 - protein, 350 aa, unidentified
MEIYTIGIDLGKTVFHMVGLNVRGEAGVRKKFSRTQLLRFTAKLRVELIGMEACRGAHFLGRALGEQGHEVRLIPAQYVKPYVKTNKSDYIDAEAIAEAVGRPTMRFVPIKTDDQLDLQSLHRVRERWVMRRTAVINQIRGLLFERGITLRKGRCHLETALPDILEDADSKLSSAVRLLLVQLKMELAQLAMRLEEADALIQKTAQESEVCRRLDAIPGIGPVTATALLAAIGNGGAFRKGREFAAWVGLVPREHSTGGKQKLLGISKRGNGYLRRLFVQGARAVLQFREKQSPGLRAWLAQLTSRTHYNVAGVALANKLARIAWAVLAKGEVYRPPLLVSSASADLACR

SEQ ID NO: 401857 - protein, 338 aa, unidentified
MATVTLLGIDIGKNTFHLHGQDARGHQVLRKKLNRSQLLPYLAQISTCKIAMESCGGSQWLARKIKEQGHHVQLIAPQHVKAYVTGNKNDFIDAEAICEAASRPRTRSVQVKTVEQQVLCTEHRLRKSLVSRRTAVINQVHGFLLEFGVIFPAGYAALDRVSGLMQSRELPIRLINAIERMLEDIRQLTGEIKRLDVEIKQSLVQSDAGQRLQSIPGIGPLIASALVADVGDASVFKSSRDFAASLGLVPRQYSTGGETVLLGISKRGDKYLRSLLVQGAHTVLYRVDHRTDALGRWAKNLLARKPLNKVACALANKMARIIWVLLTKGGTYNSQLLA

SEQ ID NO: 401858 - protein, 418 aa, unidentified
MKKHNNSGKKSEPVSKRAKTRGPVQRDTKEVLAELVGKLKEKLDTKKVAATSPGEEHERGELRPNLDRLTVGVDLGDQWSHYCILGLEGETLAEGQLRTTQEDIAEFFQALNGARVVFEVGAHSPWVQEVICGCGHEVLVANPRLMEGSKRRKRKNDRIDANKLARLGRVDPQSLHPMQHRSREVRQDLVVLRARDALVAARTELINATRGLVKSMGSRLPKCSSPSFAQKVEETVPVELRDALLPLVRMAAALSNCIQGYDEKIEKLGREKYEHTALLRQVKGVGPITSLAYVLTLENPERFVKSRDVGPYLGLVPKQEDSGESQPQLGISKAGDTMMRRLLVGSAHYILGPFGPDTDLRRYGLRLCERGGKNAKKRAAVAVARKLAVLLHCLWVSGEVYEPLRQDMSATIAPAVAA

SEQ ID NO: 401859 - protein, 344 aa, unidentified
MKYFSGLDVSLDETAICVVDEDGIVVTEGKAASEPDDLVRWLVATGLTITRVGLEAGPLSPWLHTELRAAGLPAICIETRRMKGATAAMAVKTDRNDARAIAHAMRVGWFTVVHVKTAESQELRLLLNNRRTLLEKRVAIDNEIRGTLKAFGLKLGPVTVASFEARVLELLASRSRLLGMVKPMLSARTALRQQCDVLHRMVLKTVRANAVCRRLLSVPGVGPIVALTYATGVDDPARFAHARDLGPHFGLTPRKYASGEIDRNGSITKAGDGAVREALVQAALTLLTRVQRWSVLKAWGMAIAKRRGLRRAIVAVARKLAIVMHRIWVDGTTFTWSRETAASA

SEQ ID NO: 401860 - protein, 364 aa, unidentified
MFHFTTLFIGMDVHKESFLLCYYDMMANQFKHSTKVGPNVSYIVNYVNELRRLYGQDAEVLCGYEAECLGFTLYHQLQAHGIPCIVMAPTTVMKEGSKRVKTDKKDAAQLAKALAFRSYRPVHIPTAEDEQVKEYIRMRTDHKVALKKIKQQLLAFCLRHDFRYTEGRNNWTQKHVRWLHSLNPKGLYAEILTEYLLTYEKLVDQIARYDARIEQLGQSDSYQEEVSQLSCFIGVKTLTALSIVTEIGDFNRFATAQHSASYLGLTPSENSSGDKERRGAITKAGNSHVRRLLIEAAQSLAKGTIGYKSKELKRRQSGNRVEVIAYADKANERLRRRYRTLVLGKNKKQNVAKVAIARELSGFI

SEQ ID NO: 401861 - protein, 387 aa, unidentified
METVADRAKPTAIRTDLRAIFVSLELSRSRWLITSLSPGNRDRMSKHSVQAGDIAGMLARFSELRHKTQARTGQSFPIVVIQEAGLDGFWIHRVLRKEEIESHVVDPASIATSRRRRRAKTDRIDGEALIRVLLAFKRGEPRVCMMVRAPTPAEEDRRRLCRERKVLTAERVQHVNRIKGLLFAQGVSEYEPLRRDRRDRLARLVTGDGRLLPNYLKAQIGRELDRLELLLEQIKAVEAERDSLLASTEANKSALPAMLLNLKGIGPEFAAILWSEGLCRHFDNRRQVAAYAGLAPTPWQSGSVDREQGISKAGNPRLRETMIQLAWLWRRHQPRSVLTLWFEERVRHNAGRLKKRTIVALARKLLVALWKYVSAGIVIEGAAIKTA

SEQ ID NO: 401862 - protein, 366 aa, unidentified
MKKVSTAAAKQSRNFSQQKLTIGLDLGDRSSHYCVVDGGGRILVESKVSTSPKAIEAVFGSMGRSRIAVETGMHSPWVSRLLSGLGQEVIVAHARKVRLIGESRRKDDRLDAQTLARLARIDPGLLCPVKHRSAKAQADLTVIRARAGLVRARTALVNTARGLAKSYGERLRGCNVRNMNPEKADALSPELRRALQPLLAALEALRTRIREYNEAIERLAQDNYPQVTLLKQVKGVGTLIALTFLLTLEDAHRFRKSRDVGCYLGLQPGRRNSGQSEPQMHISKEGDPYLRTLLVQGAQHILGPFGPDCDLRRWGLRLAERGGRNAKKRAIIATARKLAVLLHHLWVSGEVYEPQHNNQAAIAAAA

SEQ ID NO: 401863 - protein, 352 aa, unidentified
MEVTTIGLDLAKSIFRVHGVDTTGEVVVRRPLRRAQMLPFFARLPSCLVGMEACGTSHYWARELIKLGHEVRLMPPAYVKPYVKRGKTDAADAEAVCEAVRRPTMRFVPVKSPEQQAVLSMHRARDLLVKQRTQLVNMIRSLLAEFGLNIPKGLERALLMARRIVDGKAPDVPMEVAKIVSTLSQQALDIHVRLRQIDRDLLVWQRGNDVARRLMTIPGIGPVGATALAASVTDPRQFRSGRQFAAWLGLTPLQKSSGGKERLGRITKMGDKYLRKLLIVGMTSLVCRAKHNPETIEPRLANLLARKPVRVATVAMANKTARTIWAIMTRGETYQAGHQPALAHKNNVTRIS

SEQ ID NO: 401864 - protein, 347 aa, unidentified
MVVIGIDPHKRTHTAVAVDEVGRKLGQVTVASTPEGWLRLWAWAGGFGPDRRWAVEDGRGVAGRLVRTLIGHGAAVVWVPPKLMAQSRASARTRGKSDPIDALAIARAALREPDLPAAHLDEVAADLRLLTDRREQLVKWRTQTINQLRWHLHDLDPGLDPGAGRLNSARQLDRLTAGLEALPASVRRDLALELVGEIRRLREQIRRLDKQLGELVVPLAPTLLAIVGVNVVTAAKIIGEVAGISRFRSAAAFAMHAGAAPIPVWSSNRPQVRLNRGGNRQLNACLHRIVIAQLSHKPEARAWRERWTQRRPNATGKAALRALKRHLADVVYHALLTDHRRQLPATA

SEQ ID NO: 401865 - protein, 346 aa, unidentified
MKITTIGIDQAKEVFQVHGVEVRGKAVLRKQLKRKDMAKFFANLEPCLIGMEACGSAHHWARKLGEYGHTVKLMAPQFVKPYVKTNKNDVADAEAICETVSRPNMRFVPVKNVEQQAVLSAHRARQGFVKARTAQGNQIRGLLSEFGIVITKGIEAIAKRIPEILEDGENGLPGTMRRLLERLADNLKEMDRQEKELDVQIRAWHNENEASRKLAEIPGIGPITASALVASVGDAGEFKSSRQMAAWLGLVPRQSSTGGKQTLLGISKRGDTYLRTLLIHGARSVIRFAEKKAGPDSWLRKLMVRRSKNVAAVALANKNARIVWALLAKDRMFRPNYAPAAVAAGV

SEQ ID NO: 401866 - protein, 480 aa, unidentified
MKDQQLVGRPRKTGKRKRLSPALLERIEPDAAGIDCGASSHYVAVPSDRDPQPVRQFRTFTADLRRLADWLVKCGIKTVAMESTGVYWIPIYEILEERGLQVVLVNARHLRNVRGRKSDVTDCEWLRDLHSVGLLHPSFRPAAEIVELRAYVRHRHKLVEAAATAIQRMQKAMTQMNLQLHHVLSDLTGLTGLAIVRDILAGVRDPQALAAHRDRRCHASKGEIAAALTGNYRAEQLFVLRQNFEAYEFNLRQIAQCDAAIEALLATLAARCQPPASALPAARPRKKPSKNEPRLQLRSPLHRITGGADLSQIDGIGPYGALQLIAEIGTDMSRWATAKHFTSWLTLAPNNKISGGRLLSSKTQPSANRAAAILRRAAMSLSRSASALGAYYRRLAYRVGKAKAITATARKLALLVYRVLHGDITYHDPGAAAYQQHNRTRVVRNLRQRAQQLGFALMNIQTGEVLGQTPSKRVAPSPVS

SEQ ID NO: 401867 - protein, 424 aa, unidentified
MKVTYQSCCGVDVHKSFLVATIIKTTGGIEPSYQKRRFSTFNNSILEFKKWLLENECLYVCMESTGKYWIPVFNLLEDEINVTIANPKWVKAVKGNKDDTKDSKWIGDLFRLGLVRGSYIPCKKIRILREFTRYRYKLVSCRSSEKNRYQNALTVCNVALDSVVSDVFGKSSTSIIDYLLEQSGTSIDHEVIASKLLKRLKAKEDAVIESIEGYQMTDSQKYRMHLVRAHMDYITAAINDVDSEIESLIASDPDYENAVELLCTIPGVKYDSAITIISEIGIDMSQFCSSKRLCCWAGLTPGSNESAGKKKSVRITRAGVYLKPALVQCAHAAVKSDKSPYYKKKYESLVERRGKKRAIIAIARMILTAIFQMLTTGETWNPCDLYKIDMPEALLEKQKQKAIKQAQKLLIREGLLPPTEPIAS

SEQ ID NO: 401868 - protein, 343 aa, unidentified
MNVFIGLDVSLASTAICVLGPQGKVVEELEAASEPEALVRAMASLPYAVDAIGLEAGPLSQWLSKGIEEAGFDVVLMETRLVKAALKAMPIKTDRRDAQGIARLLQMGWYRPVHRKSVSSQEIRALLTARKSIQQVIINLELSMRGVMRNFGLKLGHVTRIRYEARVRELVEQNEVLSASTEALLRARAQLSGELAELDAKIADLAKQDDVCRLMMTMPGVGRIVALTVKSAIDDPTRFVRSKDVGPWVGLTPRRTQSGEMDIVGQITRAGDRALRTALYQAAMILMYRGSPNWLQAWALRVAHRRGSKRALIALARRIGVVLHRMWRDGTPFRHAQSCPATV

SEQ ID NO: 401869 - protein, 344 aa, unidentified
MDHFGGLDVSVKETSICIVDDTGRIVKEVKVASEPAALLKVLGNPTYRFKRIGLEAGPLSQWLFSALAEAELPVVCVETRHMQAVLKAQINKTDRNDARGIAQMMRVGLYRPVHVKTLRSQKLRMLLTHRKLLQSKAIAIENDLRGTLRNFGLKVGMVGKVRFEARIQELVENIPDLAVLVEPLLIVRRVLREQIVILHRRLLAIVRDDEVCRRLMTTPGVGPVVALTYRAAVDVPARFRKSKSVGAVFGLTCSRHQSGEIDWSGKISRCGDEMMRVMLYEAAQSMMHSKKWSWLKAWAMQIARRRGMKKAIVALARRLAVIMHRIWVDGTEFRWSREQAATAA

SEQ ID NO: 401870 - protein, 345 aa, unidentified
MKKMVAGMDLHSNNVVIGVMDMDGRRVASRKVECQLQEVVKFLAPFKKRLEQVAVESTYNWYWLVDGLRALKYPVLLANPAGMEQYSGIKHADDTNDAFFLAELLRLKILPTGHIYDAQLRPVRDLLRRRLMLVHQRTALMLSFKSLYTRTTGQELALGKLKELEIKEAQALYDHPANSLIAGMQIQHVENLTESIGKIEKVVLESARELPSYDKLTTLPGVGRILGMTITMEVGDIKRFAQAGHFASYCRAVAAQRTSNDRKKGDNNSKCGNRYLSWAFVEAANFARRYDPQCRRWYDRKAAKTSTVIATKALACKLAKAAWHLMAEGTHYDADRMFGKAPAKP

SEQ ID NO: 401871 - protein, 357 aa, unidentified
MQPTVAWLGLDAHAKFCMLAWMDDEGQRRQHWRFPTSEAQLIKHLKLVPAATKHLALEECGLGRWLAQVAAPHVSDAIVCDPRENHRISRHHHKCDEEDSYGLAHLHRLGALKKVWHSPSDERAVFKCTAQAYLDAVQRQTALKLQLKAHFRQWGVIPTGSTVYGRSGRAKYLAQIKQVGVRAQLQLLYEAMDSALEVERKARRLMAQLGAAFPEIARLRTVPGVGIIGAHLFVAYIQEPTRFNTPQQLLRYCRLGIRDRSSDGKPLGFQQLDRCGHGVLKAISYRAWLGAVKQKRGPVHEFYAASLARTGDGVHARLNTQRKILHTLLVLWQSGREFEPKRFLGTEAQPTAKAKCG

SEQ ID NO: 401872 - protein, 391 aa, unidentified
MVCVGIDVAKDKHDCCILDSDGTVRADCFTIPNNSDGFKRLLQTIQDCTQKSDKIKVGLEATGHYSYNILGFLLDNGLPTYVINPLHTNLYRKSLSLRKTKTDRVDARTIATMLLSDVDLKSYTDTAYHNEELKSLTRYRFEKVQERAKLKQSVSRLVTILFPELEQLVPTLHIASIYSLLGEYPGAKQVSEVHLTKLTNLLVTASKGRYGKDKAIQIRDAAKTSIGSVMPAKSLELKHTIKLIRELTSEIDEIEDSIQQIMDGLHPPLLSIPGMGIHSAAMILGEIGDFSNFESPDKILAYAGCSPSTYQSGKLTNCYAHMEKRGSRYLRYALYNATKYVCYWNPVFAKYLAKKRAEGKHYNVALSHAMKKLVRLIYALQKSGKAYLTAA

SEQ ID NO: 401873 - protein, 316 aa, unidentified
MKVGIDVSKLTFDASWEVEGKPIHKCFDYTEAGMDCLLELLPKEAHVVMEATGVYHSRLALKCYEAGLSTSVVNPVVIKRFGQMLFKRAKSDKADAQLIRQYAQAHEPNLWAPSSEAINGLKQALSWIDDLVIEKTMVTNREEAIRHNATPSDFVLREIKDFRKYLKARTKKSESHLRAMVKKHFPELYDCLRTIPSVGEKTTIEMIVVTEGFTKFESDKALAAYVGVSPTTYSSGTSVHGRGGISRASRGRTRQCLYLCSWTARRVNPACAAMYERMKKAGKPPKVIGVALAHKLLRQIFAVGMSGQNYRAERAY

SEQ ID NO: 401874 - protein, 341 aa, unidentified
MGEVSTIGLDLAKQVFHVHGADASGVPVFSRRISRAKLLPFFASHPKCTVAMETCGGSHYWARELERMGHEVRLIAPNYVKPYVKRQKNDAADAAAICEAAQRPTMRFVPVKSEEQQSSAAVFRARDLVVRQRTQTINALRGLLAEYGWIAPKGLFHVAAMMTRIEDPACELPPSARSVFLMMIDIIRDHDGRIRELDREIARRAREDADARRLMTIPGIGPITATALLALAPSAQTFRNGRDFAAWVGLTPLQRSTGGKQKLGEITKMGERTLRRLLIIGSAAVVLHAARRGAPRGSWLEQMMARKPRMLVTVALANKTARIVWAVLASGENYRAQVAAV

SEQ ID NO: 401875 - protein, 429 aa, unidentified
MSYRIAGIDVHKKMLAVVVSDVEVDGQFEFERRMFGSNPEQLNSLAAWLVEQEAEEVVMESTAQYWKPVWAVLERYWKPLREKREGARRRSGALHLAQAQSNRGRRGRKRDFADAERLLKRLVARELVLSFVPDVEQRLWRTVTRKKYQLRRNRVRLQNQLEALLEEAHIKLSSLVSDLLGASARRMLKALAEGETNPAAVAALADERLRATPEQLCDALGACKELNAVYRRLLQMALDECRLLDEQITKLDQEMAGLLSEHQDAVERLAEVPGLGVDSAQQILAEVGPTAATFPSGKCLSSWVGACPGDDESAGVNYSHRSPKGNRHMRRLLNQAANAAVKAKGSIFEIAYRRSVPRLGHQQAIGAIAHRQCRLIWLILHQGVRYEERGPAVTKQSRQNRTARMIRQLRRLGYRIESPNPQPRQAQGQ

SEQ ID NO: 401876 - protein, 338 aa, unidentified
MKTYAGIDLHSSNNYLGVINEQDKRLFSRRLPNCLDTIVTALKPFQKTLSGIAVESTYNWYWLVDGLQGAGFKMHLANPSAMQKYDGLKHTDDKWDSFWLAHLLRLGILPEGYIYPKEKRSIRDLLRRRLFFVQKRTSHIQSLQSMFTRHLGGKISSNETKKLDPEHVDQLFQDPYVALAVKNNIDTIRFLTTKIKDMERVILLKSKIHKSFQVLTSMPGIGKILGLTIMLEIGDIKRFDAAGNYASYCRCVKSAKLSNKKKKGEGNRKNGNKYLAWAYVEAAHLIIRFFPKANAFYQRKMSKTNGALATKALTNKLARANSYMLRDQVAFKKEKLFP

SEQ ID NO: 401877 - protein, 337 aa, unidentified
MSSLSYFVGLDYHQSFIQVCVLDREGNVLANLKSRNSSGHVALLVRGVVPESSRVFVALEACAGAANFAEELGGHTGWSVGLAHAGYVAKLKQSPDKTDFSDARLLADLERVGYLPRAWLPPESLRDLRRLVRYRQQLAAARRNVKLRITALLREERIVAEQRRWTKAWRHWLAGLEEMSPHMRWVMDRHLEDLQRLEREIRETETRLSAATCDDPIVQKLLEIKGVGLVTAVTLRAEIGRFDRFRTGKQLARFCGMTPRNASSGNRQADAGLIKAGNPELRRVIIEAAHRLGRYDARLSKLHARLRRRGKPGSVVAAAIANRWMRWLYHQMKTISV

SEQ ID NO: 401878 - protein, 342 aa, unidentified
MSGDYDGRQYVGIDLHRRRSVIVRTTEQGEQLGWVRIDNDPVALGLELAKAGPDPEVVLEATYGWYWAVDALQTAGAHVHLAHPLGVKGFAYRRVKNDVRDAADLADLLRMHRLPEAYIATPHERELRELVRHRAKLVALRSGLKAQVHATLAKQGQLPAASDVFGRAGPAWLRSAPLELVYRQRIDSLLELIDAYDGEIETFRTMIANRFTGHRGYRAIQQISGIGPTFAAVFVAEIGDVTRFSRPEKLCCWAGLTPRHRESDTTVHRGPITKQGSKLVRWAAIEACQHTRAGTKLSADRSRIIAARGRNVGIVAAARRLLTLVFYGLRDGEIRALAARAG

SEQ ID NO: 401879 - protein, 322 aa, unidentified
MYKSKEFIGIDVSKDTFDVWSLSFGHLCLDNTRKGFRKLKKQLKENSWCVMEATGSYHQLLARYLYDSKVIVSVVNPMVIKRFIQMKLQHNKTDKSDAKMIALYAQQQPLKVWEPDPQYIEQCKILNTNIALYFKQSTALKNKLHSLTSKGVKGFLLQSLKRQVKQLQKEIVMLESHVESLIKEHESEMLTNISSISGIGKKTAMMLISNTYAFKSFDNYKQVTAFFGLSPIERTSGSSIRGRSRISKKGNPLVRNHLFLCSFTACEYNPQCRALYERIVAKGKSKKLALIAVSNKLLKQAFAVAKSGIPYDPNYRSRLTIQ

SEQ ID NO: 401880 - protein, 350 aa, unidentified
MLRGTPSCSIISVAVLDAEGKLILQSILATHAAAILDFVHGVRGSLQVTFEEGTQSAWLYDLLVRHVAKVVVCNPRKNALLKAGNKSDQIDARKLAELLRAGLLSPVYHGENSYRILQELVRSYTTLTEDTTRIMARLKALYRSHAVVCGGKKPYGKRHRQEWLQQVRQPGLASRAQRLYDQLDAVQTLRRAAKHEMLAESQKSGAYRLLASIPYLGPVRASILMARAQVPNRFRSKRQFWAYCGLALETRSSAEYHVVQGQVQRSRKPVFIRGLNLNHNHDLKNVFKGAATAASIHDGPLRQFYDRLLAKGMKPELARVTLARKIAAMALILWKKGESFDPKYLMLPAA

SEQ ID NO: 401881 - protein, 318 aa, unidentified
MPVPCTQESYRCFLGFDVAKDSITVYDSRSGQTHQVANRPAALKRFVRSYGADTFAVCEPTGGYELALLDALRQAGIAAHRADTLRVKGFIRSLGKIAKTDAIDAAALARYGAERWRQLPRWVAEDRALETLRALVRRRQDLLAMRVAETNRAKAPQAARIAASLRQVLALLERQIKLIEQQIQAAFDASPTLQRTAQVLQTIPGIGRLSATLLCALMPELGKLSAKQAAALAGLAPHPNDSGTLAGYRRMRGGRPELRRILFMPAMAVIRSNSDLAQTYKALLARGKKPRVAIGAIMRKIIVIANARVRDQLQYQQS

SEQ ID NO: 401882 - protein, 437 aa, unidentified
MNSQPQSLSPDEPSFGAFVAIDWADQKHVWSLQAADSDQREHGEIQHTPEAIEAWVGGLFSRFPAQPIALAVEQSRGALVFMLSKYEYLHIYPIHPRAAAQFRAALYPSGAKDDPVDANLLLDLLVHHRGHLRRLSPDTEQTRLVQQLVEARRKLVNEKTRQGNRLTSKLKLYFPQILTWFDELDSALVGALLKRWPTLEALQKAHQATLRSFFTKHNCRRAELIEQRLEQIRQAIPAIRDAAVIQSAVAMVSVLVPLIATLRQGIAAIDRQIEQAAAAHPDFAIFDSFPGAGPVLAPRLLAAFGSQRDRYQSAAEIQQFSGIAPVLVRSGKTAWVHYRWACPKFLRQTFHEWAAHSIGFCDWARAYYEQQRNRGAGHHAAVRALAFKWIRIAFRCWKDRVLYDDSATSRALAARVAAGHRRPSGTRRLKNFHQENS

SEQ ID NO: 401883 - protein, 347 aa, unidentified
MKYYVGLDVSLKETSICVVDGSRRVVKEGRVVSEPETIGVWLLGLGLDFELVGLEAGSLAPALYDGLREQGLPVVCLDARHLKNATTAMPVKTDRIDAMNIALALQAGWYRTVHVKSRDTHKLRALLRSRAMLVKTRTTLDNHLRGILKAFGLKVGRISVGRFEDRVRELISDIAVLEETAEAILRVRSEVAARLADLHRQVLAVAKSDPVCRRLMSVPGVGPVTALAYRTAVEDPSRFTKASLLGAHFGLTPRKYASGETDRNGRITRCGDRMVRSLLCEAATVLLCRVRSWNWLRRWGMQVAQRRGMRRAQIAVARRLAVILHRLWTDGTEFQTSRAGIASATAA

SEQ ID NO: 401884 - protein, 337 aa, unidentified
MKYSGIDLHSNNSVVVVSDEADRVVYRARLPNELGKVLEALEAYREELAGVVVESTYNWYWLVDGLQAAGYRVHLANTGAMKPYEGLKHSGDDTDALQLARLLRLGILKTGYIYPAAERAVRDLARRRMQLVRHRTMHVLAVENVQARQTGARMTGERIKRLSVQDVGLLGLPENVALGVQANVALIGVLNEEIARLEKRLAECLRPRTEYGLLGTVPGIGRILAPVIVLETGAIERFASVGNYASYARCVDSVRLSNGKKKGEGNVRNGNKYLAWAFIEAANMARRWCPEARRFHERKRAKTNAIVATKALAHKLARACYHVLKNGQPFDMKRCFG

SEQ ID NO: 401885 - protein, 387 aa, unidentified
MLGTEIKAKFLPRDYDIFAGLDVDKKHIDATFTDHAHLLESIKMPYDADHLMSYCRRHFRGQRIGFAYEAGCTGFGLYDRLTTAGYTCLVVTPSMVPTAPGQRVKTNRLDSQKLSTTLRGGELRSIYVPSAPYRALRQLVQLRDTFVRQAMQSQQRIKSLLLLEGIAFPESRGHWTVSAWAALRNLSCAAPVRFKLDRLLSMATFAEEQVRQTLREIRRFCKSDPDLARTLELLCTAPGIGGITATHLMARIGDGSFIDNVRQLPAFLGLVPSEDSTGDDVNRGRITHMGDRRLRAKVNQAAWVASRKDPELQEFYQRIYQRHPQAVAAKKAVTAVAAKLCRRIACMLKNQTPYVVQKASGTTEKEKTATLQGTSRPFAETSARPVA

SEQ ID NO: 401886 - protein, 355 aa, unidentified
MTQSTTDPNAVIIGVDTHKDTHAAVAINGLGARLGDRIIPTTQAGYQQLLEWAKTFGVFAAFGVEGTGSYGKGLSQFLRRQGLKVVEVSRPCRRGQQRLQGKDDLLDAEDAARQVLAGQATATPKSSEGGVEMIRILKAARDTAVKAQTQVIVALKVIIVTADAALRAQLESLSTPQLVKACAQLEVGTLDTPMATMRYALAAMAKRWTQLHDEIETHTQHLTTLAQAAAPELVQAFGIGTDTAAEMLITFGDNAERVHSEAAFAKMCGVCPIPASSGKTQRHRLNRGGNRQANAALFRVVIVRMRWHQPTQDYVARRIAQGLSKREIIRCLKRYVAREIYHIIRKSTPLPKCLT

SEQ ID NO: 401887 - protein, 348 aa, unidentified
MEKLYHIGIDLHKKNMQVAVLNNEGEVLDMRKLSNNDKEVLQEYFSGFPKETPVAVESTTGWEWLSDLLEEEELEVKLANPHKVKLIAEATIKTDKIDAETLAQLERTNFLPLSYLAPKEIRERRELLRHRIVLVRLRTSLKSRIHSILSKKGIIAEGITDLFGKRGREFLKEIKIADVYREEIDTYLYLIDKLDRHIEIKEGQIRKIVRGEELAKILMTICGISYFSALLILLEIGDINRFSSAKKLCSYTGLAPTTSQSDDTVYHGHLKKDSNKYIKWALLEAVEHIIKKDPGLRYKYEKILRTKGKNKARVAIAQKLCISIYYMLKNKQPYKPREIKRRLFQVSP

SEQ ID NO: 401888 - protein, 318 aa, unidentified
MNENTSPYVGIDIGKARLDVAIGNSGEEWAADNDTTGIHKTVARLAQLRSSLIVIESTGGLEVPLMLELSKAGLPFALVHPGRVRDFARSLGLLAKTDKLDARLLAHFAEAIRPPVTCLPSEAEQRLNALVVRRKQLLDILVAEKNHLLSTPLSQRCSVEEHLAWLEDKLAQLNQEIDDQIKHNPEFRQKADVLRSAKGVGPVLSAKLLSGLPELGKLNRKEIAALVGVAPFNDDSGRRKGKRRIKGGRADVRAVLYMATVAAVRFNPVIKHFYDHLLSQGKLRKVALVACMRKLLTILNAMVRDMRPFVHPIVPVNS

SEQ ID NO: 401889 - protein, 371 aa, unidentified
MTEIRRLVTGGVDAHADSHHAVALDEQGRLLGDAVFATTARGYRELLAWLEGFGQVRLVGVESTGAYAAGLVRFLSVRAVAVVEVNQPHAHTRRRRGKSDPVDAEAAARKALAGEATVVPKLSSGIVESIRQLRVAREGAVKARTAALNQLSVLLVTAPGELRQQLAARKTNRGKVSLCLRLRPDPARVHEPLQAAKLALRSVAERARELDGQISLLDKHLAPLVAAAAPRTTSLLGISTQHGGQLLVSAGENIERLSSEGAFARLCGASPIPASSGRTTRHRLNRGGDRKANRALYLIAVSRLRNCARTRAYAERRIAEGLSKKEIIRCLKRYIAREVFKAVVGKSARAAAATPRRRAAAPKQLEVSHSY

SEQ ID NO: 401890 - protein, 442 aa, unidentified
MSELVVLDPRAAFVDVGSEKMHVSIGGGPPRVFGAVTSQLEALRDFLVEGQVRSVAMEATGVYWLPLYGVLEAAGLDVRMVDGRQTRHLPGRKSDMQDCQWGSTLHAHGLLRAGFVPPAHIRRLQDYLRLRGEHVAAAAGHVQHMQKALERMNIKLHDVISSLTGVSGLAVVRAILAGERDPAALLGLCDVRIRKVKAERVVESLRGDWADEHLFALGQAVQSWEHYQAQITDCDQRIAEVLVRMPGGDGPAAGAEKPAKPRTRPGVNAPQIDNLRELLQHMCDGKDATTLPAHSEYTVLQLVAEVGTDLTRWPTEKHFASWLCLAPGSAQSGKRRTTVKRRRNRAGQIFCVMARALARSKYIALGGYYRRMAARRGGLVANKALAHKLAILFWRVMVKGMDYVEQGLAHYEAQVLQTRQRLLRSLAKQFGQQLVPIQGNPP

SEQ ID NO: 401891 - protein, 341 aa, unidentified
MYSIGLDVSKATISIHVPLNSLDLEIENNLKSLKSFYAKLKKLYKKELDKLVFVYEPTGSYSAILTKFCSTKNIKAFIINPKQSSNFAKALGHRSKSDRIDALMLSHAIAIAREDEIKVPIVNATAEAIKELMSYYMFTLKQRVAINNHHEALKAKDGNIYALKDLLKRHKEMKDKEAEILEKIKNIIEKDESMSQAYSNIKTIPGIGEIAGIVLIHLFIRYPNANQKQITSLTGLDPVVKDSGTSVKSKPKISKSGSRLYRGVLFMATMVSIKYNNEMREFYDRLKENGKHSTVAQIAVMRKLMVIAHSLYKNNTTYNAKIYQKACGTKLEKDTNIELVA

SEQ ID NO: 401892 - protein, 482 aa, unidentified
MKKRNIYQNRSQELFRLFEQAGNNSKIMCVPIDYAKKDHAVMFCNGYGNILRKPFNVKNTPEGVNYLIDETMRSCRHRNINREHVFFGGEDVNSYAQNFDSTLRDKGWLVANVNAHDAKKQRENLQASTDRLDLMGIATMLLNCRANCSPAQTGVYRNLRTIVRHRKKLVKMKTEVRNRIHTVVDQLFPGFLNEKNSGITPFSPSSLYLMGDRFSVHQIRRRRRSVLINKLKQNGTRDPQETATKLQNYATQVLTPPDEYTTTLQVSLSSHVKHLRCLLEGREQLEGEIAVLLGQTPGAFLTSIRGIGIVLAAGFTAEIGDPHAQKPCTNLVSYAGIVPRVKQSGGIEGQLRVGRVSRRNNHLLKDCVAQSAFHIGRHGPEDLLKDYKRREVNGQHADFGMARRFIRMAMCMMRTSQIYLPPHMRKSDLSIKERAGYYLSLWPYLRSKWRKVGAIDAAFTLNRPLGHWRQMVQELYGIKLKL

SEQ ID NO: 401893 - protein, 508 aa, unidentified
MPLYEHGPGLPLINDEAYALSHIRINNGSHPGLPRPPRPKRRQVAMARNNKGKKHKKPVRSLKAIQPDAAGIDLGSREHWVAGPPLQDNTPNVERFGTTTPELLRLADWLKEQKVKTVAMESTGVYWIPLFEILDSRGFEVILANARQVSHVPGRKTDMLDCQWLQLLHACGLLRGSFRPSDDICRLRSLFRERNTMIDQRSDWIRRIQKSLDQMNICVHHAVSDITGVTGMAIIRAIVDGERDPRTLAQMRDRRCKKSEDQIADELTGNWRPEHLFNLRQALKMYDQFCQIVTEYDAEIFAYIKTLQPGVDDDQCAPPPASKSKARNIAKKGQEPMRQALYQLTGFDLTTIDGIGVDTAAVVISELGLDFSAFPDEGHFVSYLRLAPNLSISAGKKVPSKLKGTTTSRVATALRMAALALRNSKTALGAFSRRISSRKGASVAVFATARKLAQIIYRLVCHGQAYIDIGAKAYEAQFNNRRLKYYTKALKDMGYKVKPLATAQANAA

SEQ ID NO: 401894 - protein, 344 aa, unidentified
MPHYVGLDVSQKTTVICIVDEQGRQRWRGACVTEPGAIAARVFRHAGVADVKVGVETGSMTPWLVHGLRSAGIDVECLDARRVKAALQMRLNKTDENDAEGLAQIMRTGWYRPVHVKSFDAHRARSLLAARAQLVGMRTQLSNMIRGVLKTFGLLPGGGRGLRFDRAVEALLEGAPEISLIVRPLLATWRQLREQITTFDKAVQQRVRADPICHLLMTVPGIGALSSLMYVSTVEEPGRFARSRAVGAHLGLTPRRYQSGETDRSGHISRCGDSLARTFMYEAAVVILHRVKRSLHLKDWALAIEQRSGPGKARVALARKLSVILHSVWRSGEPFRWASSTIAA

SEQ ID NO: 401895 - protein, 412 aa, unidentified
MEVVYPCCCGLDVHKKSITACVLWAEVKGKSRKEKKRFGTFTHDLLQLADWLGQCGVTHVAMESTGVYWKPVWNILAEQFEVLLVNAQHIKAVPGRKTDQKDSEWIADLLQHGLLRGSFVPPQPTRELRDLTRYRVSLVQEINRIANRIQKVLEDANIKLASVATDALGASGRAILEAMLAGEEDAARLAELSKGLLRNKIPELKLALEGRMTEHHRFLLRQLFEHLRFTEAKRSEIEQEIDRRMRPFEDKVTRLCTIPGVDRVTAWGMLAEMGMNMNQFPSSGHLASWACLCPGSFESAGKRLSGKMRKGNVSLRRCLSQAAWAISMMKNNYLSALYRRIAARRGAKRAVMAVAHALLEIAYHMLKRKEVYRELGADHFDRIDVNRIRRSLVRRLERLGHKVTLEPLAQTA

SEQ ID NO: 401896 - protein, 360 aa, unidentified
MQTKQRNKLNFKGQNIYIGIDVHKKSWSVTILSENSVLKKFSQTPNPKLLYDFLARNYPEGNYNSVYEAGFCGFWIHDELIKLGINNIVVTPGDVPAIAKEKLHKTDAVDSNRLARALRSGELNGIYVPTKEELENRSLLRVRYALVRDLTREKNRIKGFLHFYGIQFPEQFNRHNTHWSQRFMMWLKSLDFNTQSAKIALNFHIQKAEHIRSLLLQETRAIRMLSRTDKYKKQIEYLTSVPGIGEFVGMTLLTEICDIKRFRNSDQLASFIGLIPMCHSSGEHEHVGDITVRKHSILRCYIVESAWKAIRNDPAMTLAYENHLKKMHPCKAIVKIARKLINRIFFVLKHEQKYVACIVK

SEQ ID NO: 401897 - protein, 334 aa, unidentified
MLYAAIDIHKHAFQAAVLDPEGGEVVEARFSADRESLARWAEEWQGRVAAVAIEATTGWRWVWRELSARGFDVRLAEPVQARALLGRRRSAKTDRLDARWLARLLAKEMLPESWIPPEEIQRLRDRTRLRKTLAEDQRRWGQRLHAFLLHEGWPCAKSRLLTPEGMRWVAALRLDAHARLQVDSLLAIIAALEVQLDTVDAELRRFARGDARCQALQSIYGIGPILACHLLAEIGEACRFRRAKQITRLAGLDPVVDESGETRRRGHLAKAGSPQLRWALVEAAVHANRPNAPDLELYQAVRDRRDTTVARLSVARKIGKRAYHVLRELELAAA

SEQ ID NO: 401898 - protein, 376 aa, unidentified
MSNVRFIGLDVHAETIAVAVAEPDGEVRSLGVIPNRPESIRKLVKKLGPAEGLRVCYEAGPTGYVLYWELTGLGVRCEVVAPTLVPVKAGDRVKTDRRDALKLARSYRAGDLTAVWVPDAAHEALRDLVRAREAAKKDQLRARHRLGKFLLRQGRRPATKINAWTQKHLTWVKTVHFEHAAQEVTLLDYLNEVEHVADRLERLERGIDDAVNAAPERMRAVIEALQALRGIAQVSAVTIVAEVGQLSRFAEPRQLMGYSGAVASEDTSGERTRRGGITKTGNAHLRRIVIEAAWAYQHRPSIGAALRKRQMAVSPEVKDIAWKAQHRLNDRYRHLTAKGKCRQEVVTAVSRELLGFIWAIGVKIETQGRRQPSAAA

SEQ ID NO: 401899 - protein, 329 aa, unidentified
MKEFLIVGVDISKSTLDICFKPMNLFLKIQNDVKGFKQWSTKLKKIGYTNASVLVIMEHTGQYTYRFETFLRKNSIAYCKISALQIKRSMGVTRGKSDKVDAERIAEYGWLRRDILTADQPLNETTRRLRSLLGLRAKLVKDRSGYISRLKEMKASGSCTASSFEAQVQQQLIRTLTSAIDKTEREIKLLINTNEPIRKTCELLRSIKGIGWIIAAYMIGCTENFLKFSNARKFNCYAGLAPFKSESGSSIRGQSRVSHLANKEAKTLLNLGASCAIRCDRELKKYYQKRVAEGKRKMSCLNIIRSKLVARMFAVIKRQTPYQPLPVAA

SEQ ID NO: 401900 - protein, 376 aa, unidentified
MDNILTYVAMDTHKKQHNVAFILPGSAEIIEMVVANTAREIRRMVKKIKKLSPGQVHFCYEAGVCGFTLKRRIEGLGCLCAVIAPSLIPRKPGERIKTDRRDAVKLLGLFKAGMLTEVYPPNEEQEAARDLTRLRETAMINRKRIRQQLLTLLTRYGYIYTDGEHWTLRHLLWLRNLQFDQPLLCDIFDNYFTELQHCNQRLESIDKQVEQLAQTEPYKEVVGLLRCFHGIDTLTAISVITEIFEFGRFTSARKLMSYLGLTPSESSSGDKHKRGPICKTGNKRVRRLLNESSWHYRHTFVVGKALKGRRAGQPQWAIDIADRAGRRLRQRNQRLKNNGKMPCKATIAVARELAGFIWAMVNEYEMRKKYETKKAV

SEQ ID NO: 401901 - protein, 353 aa, unidentified
MLYLAVDHHKSHLLVRVLDDTGNCIQQRRVWTRPPEVDRFLCWLAGESADQGGFIAMIEECGFTLWLERKLQEHGCRQVVKIQPLRKQPQKTDRRDATAIGELLWANRERILRGERLLQVRQVESPSEQDRCARLVINERQFLKKSRNKLIYRIKDVLRRFNVQHDCPTKGLFTKAGRRWLEQVQLPAADRRMIDRALVNMDLHEQQLREVEVEIARQVEVHAAAQVIHTIPGAAAVTSLAIGSRIGSIDRFPRPASLSNFFGLAPGINDTGESTGRLGSITKRGNSTVRFLLGQLVYHVTRKDEELRRWYRKIRKRRGPKTALVAAMRRIACIIWHMFKTGETYASVRGLVT

SEQ ID NO: 401902 - protein, 369 aa, unidentified
MSLKLENKDNPLSFLPQFWTVHWAFGARFKDARSTVDCSFITQLCMSKCKEFFGIDISKDVFDVVDFQENHHQFKNDHSGFKEFGKLLDENSHCVMEATGCYYQQLATWLYSRSINVSVVNPLSVKRFIQMRLRTSKTDKLDAQMIRRYGEAEQPKLWNPPSKLIIEATELHKFIELLVRQRAALKNKLHSLKSMGITRSPVVTSVRRQIRNLGNEITDLELKLESVIKEYQPDLLTRLCSIPGIGKRTAIFLIVLTHGFEKFETSRQLISYFGLNPIIRESGSSVRGKSRISKTGNTHVRSLLFMCAFTACKHNKSCSEIYQRITAKGKCKKLALIAVANKLLKQSLAIAKSGLYYDENYRSVYVNLG

SEQ ID NO: 401903 - protein, 344 aa, unidentified
MEGYAGQQFVGIDLHRRRSVIVRTTERGDPLETVRISNDVDSLSKVMARAGVCPEVVVEATYGWYWAADALADLGAVVHLAHPLGVKAFSYRRVKNDVRDATDLADLLRMGRLPQAWIAPPATRELRELVRHRAKLVAIRSGCKCEIHAVLAKCGIPVLMSDLFADPGLALLERLEAPAPYLARIGSLRRLIDDLDVEIDLFARLIRGRLAADPGYRAVQTIPGIGPVLAAVFVAEIGDVHRFPGPAQLTSWAGLTPKHHESDTHVHRGRITKQGSRLVRWAAIESVQALGPSTGAGRLKTPGRGPAWSQHRQDRRRPPAARVRVLRPAGRASPRPGPPSRAAA

SEQ ID NO: 401904 - protein, 338 aa, unidentified
MALYCGIDLHSRDSWIAIMDDKLKVVHEVKLSNDLEALVDALEPYREDLGGVAVESTFNWYWLVDGLMEKGYRLHLANTSAVKQYEGRKHTDDRHDARWLAEMLALQILPEGYIYPKNERPARDLLRRRSFLVKKRTAFLLAMRGAFECRSGSRTSSNEVKQWTSEEVEAFWDDPTIALGITCLLEPMKALDEQIRKVEKEILRHAKLRDEFAPLLTVWGIGKVLALTVMYEVGEISRFKKVGNFASYCRLVKTARLSAGKRKGSGNRRNGNPYLSWAFSEAAHYANRYHPEARKYVQRKTSKTNGIVAIRALAHKLARASYYVMKDHVEFDPEKVFG

SEQ ID NO: 401905 - protein, 342 aa, unidentified
MQVTTIGLDIAKNVFQVHGIDAKEKVVMRKQLRRSQVIAFFSALPPCLIGMEACATAHYWARELRKLDHEVRLMPAKDVKAYLKRNKNDAADAEAICEAVRRPTMRFVQIKSAEQQGQLMQHRTRDVLIRQRTQIINALRAHLAELGIVAAQGDAGVNELRAIVADDRDERLPIDARASVIVLAAQLEALQTLIGSIEKRIKMQHRSNETSQRVETIPGIGVLGASAIVATVADPTIFRSGRDFAAWIGLVPRQDSTGGKQKLGPISKQGDRYLRRILIVGAIAVLRRAQENPGKYPWLTQLLARRPFKVVAVALANKMARTAWALMAYGGTYRAPELAEAA

SEQ ID NO: 401906 - protein, 350 aa, unidentified
MMIIGCDLHTRYQQIAMLDTDTGELVERRLEHENGEARAFYGALVGAVRVGIEATGHTHWFEAMLAELGHELWIGDAAKIRAAVVRKQKTDARDAAHLLELLCSERFPKIWRPSGAERDLRQLVWHRQKLVWMRAAVKNQMHALAMGEGVCRKKKLFTAKGRKELEGLALGPWASYRRQELLRMFDELQASVARLDQAVEQAANSQALAARLMTHPGVGPVTSLAFVLIIGPVNRFQHSKQVVSYLGLNPQEHSSGGKQRLGSISKQGNPMMRSLLVEAGHTAARFDPQLRRVYQRLKFRRGAAVAKVAVARKLAVRMYWMLRSTADYAQLVRMQGSPWGTLVKNSPSLS

SEQ ID NO: 401907 - protein, 381 aa, unidentified
MRQVCGLDVHKDSVFACILNEKGVVLQEKFGVLTPELEHFAAKLQEHGVSEVCMESTSIYWMPVWRVLEPYVMDLKLVNPYFIKQLPGKKSDVKDAEWIATCLLKDLIRSSYVPADIIQRLRQYDRRISDLNAECVRKLGKLDAALQRCNIRISNYVATTDGKSYREVVRLISEGIRDPVELTKVIHGRTVNRVGRDVIQASLTGVISEMDIDVIRQLREEVDLAQRHKDECQSKMDAICQQCFPDQLKNLQTIPGVKGRSATAIIAEVGTDISSFQDAAHLVSWCGLKPRNEESAGKIKARSITHGNKYLRKTLIECSWAAAKTQGCFFNAFSYHQVVVRRKNKMKVQVAIARKILVAVWHVMHDNVAYRDYTPDIVPAA

SEQ ID NO: 401908 - protein, 392 aa, unidentified
MMISVGIDVSKDKHDCFIFSSEGEVLADVFTIPNTMDGFHSLLQQIWKCSNSQDKIKVGLEATGHYSYNLLGFLLDNGLATYVLNPLRANLYRKSLSLRKTKTDRVDARTIASMLLSDAGLKPYTVTAYHNEELKSLTRYRFDKVKERAKLKSSIARLVCILFPELEKLVPSLHIASVYALLEEFPGAKQVAAAHLTRLKALLETASKGRYKRDMALEIREVARNSIASPLPAKSLELQHTIRLIRELDNEIAEIEEQIQSIMDELHSPITTIPGLGFRMAAMILAEVGDFTRFDSPDKLLAYAGMSPSTYQSGQLKNCYPHMEKRGSRYLRYALYNATKYVCHWDPTFADYLAKKRAEGKHYNIAISHAAKKLVRLIFAMEKSRQPYCSAA

SEQ ID NO: 401909 - protein, 414 aa, unidentified
MKRQENKACGADIHKRFLMACILSRDGSKVLNRFDMTVEGVLCFASWLKDNNCKKVAVESTGNYWHLVYQVLDDEFEFILGNAFKTRRHSGAKTDKRDAEWLAELCLNNQIEPSMILPKEDRELRALTRARKGYVDFRSKLKARTIQELEACTIKLASELSDVFGKSGRHVLQGLVDGRSADVIVESIPSKKVKKNKEKIKQAIIAGLSPISIFLIKSHIQMIDEVDKKLVQLDAQISRLLKARKRDVEIAMSIPGIGFVSAAAILSEIGDYRNFASGKKLAAFSGLDPSVYESAGKRYNGKITKMGSKYLRRMIIECAHALSRTKAKTQLKRFFLRIMARRGKNIATVALARKMLVVLHHLLINQEMYKDDGLAKPKNVKVSFSEESNYPSLDEMIEVLVGAGYFVKKDSQGG

SEQ ID NO: 401910 - protein, 314 aa, unidentified
MNYLGEIANDPGAISKLCDRHRRPGKPLAFCYEAGPCGYGVHRQLTSLGHRCDVVAPSLIPTKAGDRVKTNRRDATMLARLHRAGELTPVWVPDADHEAMRDLIRLRSVVRHIVTRARQHLQGFLLRHGRKHGRGTAWRMAYRRWLSTLAFEHPAQQIAFQDYVAVTDAEGRLKRVEEQIFGLLPDWNLCPVVDALQAMRGIALINAVVLVTEVGDFTRFSNPRQLMAYFGLVPGERSSGETVRRGAITKTGNTHVRRALVEGAWAYRMKARIGRHKVDRIEALPKVVRDIGWKAQVRLCARYRRLSCISFYLI

SEQ ID NO: 401911 - protein, 330 aa, unidentified
MEIVLAGIDVSARELAVAWECGKGATSTGVFSNDPAGHRKLIRALARRGGSARVCLDATGIYHLELAIALAGHDRIEVMVANPRATRDFSRAQLRRSKTDATDAASLLEFLRCMPFEAWTPPAPAILDLQALSRRISALLVSRAQEKNRLHVEDQLAHRTEAIRDSIERHIEAITAEIDTLTEAAVEVLSLLPLLKRRFELLVSVKGIARASAIAILAELAVLPEDMTARQWVAHGGLDPRHYESGTSVRANSRISKVGNRHLRAALFLPAMVAARSEPHVKAFYQKLIERGKKPMQALVAVMRKLLHAIHGMFRTDSIFDGTKFLAERS

SEQ ID NO: 401912 - protein, 349 aa, unidentified
MTMLTEPVDIVVGVDTHKHTHTAAVVNAATGALLEDTTQATDPDGYAALVAVADRHPGSRVWAVEGTGGYGAGLVRHLRERGEAVVELDRPDRPARRHGAKSDPLDAVRAAREALARPHLGEPRAGGERAALSVLLAARRSAVEASTTAQRQLHALVVAAPEALRGRFRGSTTAAMVGTAARLRLDSRWDLETRSTAAALRSLARRVRDLRAEAAAHERAIRSVVASWRPDLLDQAGVGPIVAAVVLCAWSHPGRVRSEAAFATLAGVAPVAASSGLTVRHRLNRCGDRQLNRALHTVVLSRLLYDPATRAYAERRRSEGRTDREIKRCLKRYIARSLFRLLEAGSPTA

SEQ ID NO: 401913 - protein, 355 aa, unidentified
MSSEKYIGLDVHQATISVAVIDSQGKVVMESILETKASTILEFFAGLRGSLFVTFEEGTWAAWLYDLLKPHVTEVLVCNPRKLAVLKQGNKSDKIDARKLAERLRLHDLKPVYHGQTGTRMLRELARSYLTVVKDLSRVMNRLKALYRSWAIPCAGRDVYYKRHRSQWLEKIPEAGTRRRAEQLYQQPDLLRNLRQQARRELLAESRKHTITAKLRQIPSLGPIRSALAVALIQTPHRFRSKRQLWTYSGLGLETRDSGEYQYVHGQVRRRKKQATIRGLNKDYNHDLKGLFKGAATRASVKPGPLKDFYERSLAKGIKPTMVRLTLARKIAAITLTLWKKGEDFDINKLNSQAA

SEQ ID NO: 401914 - protein, 391 aa, unidentified
MTYFIGLDIAKHKHDCFIMNEYGEVIRDSFTFTNDAIGFNSLLSVLKTLDPVQEKRIGLEATGHYGINLKIFLEENDYSFMEINPILIARFCKATTLRRTKTDKIDARLIALFLSACNYKPYPLKSYHVRNLKSLCRMRESLVKERSLQLVKITNVLDLIFPEFKPFFKGNLKSSTAMYLLENYGVPSKIVRMNIDSYNKMSSALRRTISYAKFLELKQLAKDTVGNEDAILSYELKLYLELFKELDSKIDEVESKILEEYGNMNCHIHTLPGIGMISAAGIFSEVGNFDKFNNADQLLAFAGLDPSRCQSGESDYKGHMVKHGSSYLRQYLMNCAEMQLIHNPKMYEYYLKKKNEGKAHRVALSHVARRLVRIIFSLEKNDTDFDMNKMR

SEQ ID NO: 401915 - protein, 400 aa, unidentified
MRAVFGIDVSKASSEVVILVNGEKVHGYTMSNDAIGFSRLLGDLKTVHKQEIIFEATGVYSRRLQAFLDEHSYAYTRLNPLEAKKQLDSLRVRKTDQIDAEKLAQSQFVLNRKPTYVQEEVYQNLRDLSRFYQNLTEDIVRAKNRLHKVLQVTFPELENILSTPTGEQYWNLVITFPCKYFVLKLSKDELSKSIRLSTSKRISDKRVAYLAEKLTALANQSYCAVKKTSPIMEEVRYYAKELLRLSEQRQAVLDEMVELAQPLPEYDILLSIPGIAETTATSIIGELGDIRRFQSANQINAFIGIDLRHYESGNFIAKEHITKRGNPYARKILFKCIHNIASASHTNPCHIADFYEKRKRQSQTTSTKPHTIASIHRLIRTMYYLIIHNKLYDYASTQNR

SEQ ID NO: 401916 - protein, 348 aa, unidentified
MATYCGVDFHARQQKVAYFESVTGEIQLKELKHQGDEVRQFYEQLPKPVIVGLEATGSSLWFEKLLGQLGHEVWVGHATEIRRRARSRQKNDWRDAELCLDLMVKNEFPRIYRLSEESLEILRRLRYRHRLVKMRTISRNGLHAIALSAGLSLKAKLLSKSGRSKLEVLELSPVCNEQRREWLDLIDQLNHRIARLESEIERIGGADPRVQLLRTHPGLGPLTALALVHTLEPVTRFSTSRNVTAFVGLEPREESSDEKVRWRGISKAGSRLLRFLLIEAAGTAIKYDEELRRFYFRLLHRRDWRKAKVAVARKLLVRAWIMLRDQIDYAEFLKRGVAVGSVRKGHRL

SEQ ID NO: 401917 - protein, 290 aa, unidentified
MSDKTIVGIDVAKNTLEVFIDTTGQLLHLENSASGVHELQKALSGLTVAGVVMEATSRYHCTAELMLSASGLPVAVINPRQIKNFARAMGRVAKSDPIDARIICEYGRRMTPQFRPIKSEQQQDLAILLMRRRQLVQNRVMETNRLKELCGVYIEQGIMRHIKWLDAEIDILDAEIKLRLRQDDTLAMKRKLLDKVKGIGPITQATLLIQLPELGSLTRRQVSALVGVCPYDRDSGQLRGKRAIWGGRSGLRATLFMAMLSAVRFNPKSGLFTLDYLQGESPKRWLLLLV

SEQ ID NO: 401918 - protein, 456 aa, unidentified
MKIPQSTIRLLTGRLVKILLNKEVSIMKFNTQNAKIEAITENTLVLGIDIGSEIHYARAFDYRGIEYSKKPFKFSNTEAGFATFKEWILDLKERHEKDKVVPGMEPTGHYWFNLGKFLQDNEMKPVLVNPHHVKKSKELDDNNPTKNDRKDPKVIAGLVREGRYMIPYLPEGVYADLRTASNIRFQLQAELTRIQNRISRWFSIYFPEYKTVYGKPDAKSGMMILKVAPLPEDILTLGIDGVNQIWRDAKMRAVGKARAKTLMEAAEHSVGSKEGAVSARMEIRMLLEDYESRNVRLQEVMALIEELVKQIPMAEKLLEIKGVGIKTVSGFLAEVGDISRFHTPKELQKLAGLALVENSSGKHKGETTISRRGRKRLRYLLFEVAMSLVSKNAEFKELHIYYTTRRINPLKKMQSLMAVAAKALRIFYAILTKGVAYDPKKMINDIKRPKIYLQAA

SEQ ID NO: 401919 - protein, 256 aa, unidentified
MQSTPVFVGVDVSKARLDAAATGSDETWSVSNTASGIAQLLKRLQELGPALVVMEATGGFEVPAAAALAAVEIPVVIVNPRQVRDFARSTGQLAKTDTIDAQMLALFGERIRPPVRALPTEEARALDAIVGRRRQIIDMITAEKNRLGFALPAVEKGIKKHVRWLERQLEGVDSDLDGLIRASPVWRAKSDLLRDVPGVGPNLARTLIAELPELGRLSNKEIAALVGVAPLARDSGIFRGKRMIWGGAPRSGLRST

SEQ ID NO: 401920 - protein, 316 aa, unidentified
MNETIVEKFVGIDVSKSTLDVCIEPPGQTLHVAYDEAGISQTVERLKEINPTLIVIEATGGLEVRIATELAGKGLQVAVINPRQARDFAKATGQLAKTDQVDAAVLAAFAKAIRPQARSLKDADTRALDDMVSRRRQLIGIRVQETLRLGTAASKPLQKSLKQHIAWLDKRITEVDNSLSKQLRESDVWRAKDDLLRGIPGVGAVTTLTMLAKCPELGTLNRREIAALTGVAPLANDSGKHCGKRFVWGGRADVRAVLYMATVSAIRCNDTIKTFAERLKKAGKPPKVVIVACMRKLLTIMNSMLKNNAPWNPRNA

SEQ ID NO: 401921 - protein, 409 aa, unidentified
MLFVGDDWAEAHHDIEIVDEDGRRLARRRLPEGVDGLAGLHALVADHLAEDAEPEQVIVGIETDRGPWVQALIAAGYTVSAVNPLQVARYRERHGAAGAKSDPGDAHVLAELVRLDRAHHRPIAGDSALAEHVKVLARTHQSMIWSRQRQTNTLRSMLREFYPAALVAFGEELAGRDALAVLTIAPSPEAGRRLSQAKITAALRRAGRRRNLPATAERIQTALRAPQLDAHPGVLGAYTAAVSSLVAVISELVRQTEVLRGEVETGFGRHPDAEIYLSQPGLGAVLGARVLAEFGDDPIRYADPRARKNYSGMAPITRASGTKRIVLARHARNRRLADALYQQAFTALNASPGARAYYDAQRARGATHHQALRALANRLVGILHGCLRHHRHYDEAIAWPRTAEQPLAA

SEQ ID NO: 401922 - protein, 434 aa, unidentified
MVENDNEFVAWIGIDWADKKHAWAMRVRGETRIQAGEMDHTPEAIETFFAGMAVRFPGGRIAVALEQSRGALIFMLNKYEHLVLFPIHPNTLDHYRKSFYPSGSKSDPGDAALILEVLYKHPERLHRFPPDTVETRTLQFLVEARRDAVDDRTRYVNRLIAQLKLFYPQLLNWFDRVDSIVVGEFLLKWSTLEHLQKARPKTVARFLKDHRVGEPRIAEIQAEIEKAVPAIRDQAVLDAGQLIVRRLVGQLAALREAIAEHEDRIHQLTQAHPSYPIFAPLPGAGEAMLPRLIAAFGTDRSRYANASEIQRYSGIAPVTEASGKQKWVHWRWACPKFLRQTFQEWAWFTTRKSEWARVHYDAQRGRGKSHQAAVPSLAFKWLRVIFRCWKDGSAYDEARYLKGLKKGPGTVAPVQIHLKNVAGFTKLAGLTYLT

SEQ ID NO: 401923 - protein, 346 aa, unidentified
MKYYAGMDVSLEETAIRIVDETGAIVKEMRAASEPEALADALSAAGLPPLERVGFEACSLTAWLHDGLRAAGWPALCIETRQANAAMKTMPNKTDRNDARALARIMRTGWFRQVHVKSRQSRLWRSLLVARRTVLNEMRSIENVVRAVLREAGLKLGRPARAHFEERVHELAGDDDAVMAIASPLLAVLRTMRAQLEALTRQVLAIVRNEATCRRLMTVPGVGPITALAFRATVDDPDRFAKSRAVGAHLGLTPARYQSGETDIQGKISRCGDELARTALYEAAHTLLVRGTKWSSLRAWGMEVARRRGMARARVAGARKLGVILHRMWRDDADFRFGKAPTAAAA

SEQ ID NO: 401924 - protein, 420 aa, unidentified
MFKIFRKKCCGLDVHKTWIFACIGTTDAHNRTEYQQARFSSFSKGLTELAEWLAKNSCTEVCMESSGRYWIPVFNVLEKTCLVTLAHPKYTKPQRGNKTDRKDAKWICDLFMCDMIKPSFIPGPEIRQLRDLLRYRKKLTNFTTGEKNRALNCLTVSNLKLDDVFSDVFGKSSSSIINYMLAHPNQSFDVQPFIDKHCKTPVPEIQAAVDGAISPAQAIKLRQCLDHIEELDAHKERLDAEVQGLAKPFTPVLELIKTIPGLNNPLTAITILAEIGPDMSVFPSAKHLVSWAGCCPRNDRSGQKTKSTRISRAGTYLKPLLVQVSNALLRSKDHPEFGNRYRRIKANRGHKKAIIAVCKMLLTAIWNVLSKVEAYDPTGYLEQSQSEKQKVLTLKQARDLLISRGYHIKDPVSTGTPSYQ

SEQ ID NO: 401925 - protein, 336 aa, unidentified
MKNSLTIGIDVSKLTLDWAVFNGQKIIFRFHGENTQSGIKAFLSKLKKEKISAEEALYCLEYTGLYINPSLYYLHEKRLKVWVETPLQIKRSMGFTRGKNDSVDAERIAIYAFKNQEKARLWSPPRLVIVKLKALSRLRSKLIQNLNAITVPLAEAEKYLDHATFQSMNMLSKKSRLALKKDIEAIDQEIKKTMKEDDLLNHLNNIITSVVGVGIQTSVAILVSTNEFKSINDARKFTCYAGVVPFEYQSGKSLNFKPTVSQYANKEVKKLLHMAALSSIAMNSEFKDYFDRKVKNGKSKMLVINAIRNKIIHRIFACVKENRIYEKNLEVYLANP

SEQ ID NO: 401926 - protein, 394 aa, unidentified
MKLIGIDIGKNKHFFCIMDKDSGEIVSQPASFSNDKEGFDFLLQKIKSYPKNSVLIGMEDTGHYHFALLKYLLDLQYTVALINPKTTDFNRKMQGGITKNDKLDTINICDVLDTPERKKQYRITKVNNFDLYEQKQLTRQHHNLKEELNVYKNRLQKSIDIVFPEFNSLFKSKYGTVYINILKTFGSAENIANTDIRTIRKCFEIDGRGNRISLTLERLKERARSSIGISSIAEVIQIKHLSAQIDLIEEQLSEIDKKIEEFSIQNNSPILSIPGISHFSGTSILAELGDISNYSKPSQIIKFAGVAPLHYESSQFNAQHTAITKKGSKYLRKTLYQIILPVIRHNPVFNKYYQLKISQGKGHRCAQGHCVRKLLRIIYHLLKTNQQFDPQLLR

SEQ ID NO: 401927 - protein, 345 aa, unidentified
MPIVGGLDIHRKQLTFDYLDTVTGEVKRGQIAPADRVHLRAWLARFAGRDDVAFAMEGCTGWRYVAEELAAAGIAAHVGEPADTAAARGRKRHAKTDRTDSRHIRTLLAEGRLPECWVPPAQILEYRALLETYHDLRRERTAWVQRIHAVFFHQGAPALGEGTLRTEQGLAALQTAAAAHLSPAGQLQVATALDMIAAVEARLQPLRHQLLAAARHLAGAKVLAARLYGVGPVTALALTCWLAGEGRFSSSRKAVRFAGLDITVWSSDRKGPPGRLSRQGPPVLRWAVYEAGKTHARASAPDHGYYAAVKDRKNGKRAALSEARKIVRQACHILTELGDDALAAA

SEQ ID NO: 401928 - protein, 370 aa, unidentified
MEKKILYVGMDVHKKSIDVAITDKRTNGKVRSYGKIDGTLEALDKLVGKLKSSGADLHFVYEAGPCGYPIYRHLTSKGHSCSVVAPSLIPRRSGDRIKTDRRDAVNLVRLFRAGELTSIYVPTVEDEAMRDLLRCRVDIRQIERKTRQRLLAFLLRHGLYYPGKKNWTKGHMNWLADLKLTHRAQQIVLQEYIDAANECTRRIQRITEQIQGLVPQWSRAPLVRAYQALRGVSLIVATTVVSEIGDMNRFKNPKQLMAYLGLVPSEHSSGNRIRRGSITKTGNSHVRRVLIEAAWTYNLRARKTKLILKRQQGLDDRICEISWKAQLRLCNKYRRLFARGKSKQAITTAIARELSAFIWAIDKQVQKLTA

SEQ ID NO: 401929 - protein, 377 aa, unidentified
MNRVRFVGLDVHAETIAVAVAEQDGEVRSLGIIPNREDSVRKLVRKLGPVEQLRFCYEAGPTGYALYWQLTRMGAKCKVVAPTLVPVKAGDRVKTDRRDALKLARNYRAGELTPVWVPDAAHEALRDLVRAREAAKKDQLRARHRLNKFLLRHGRRPPGEVKVWTMTYLEWVKREVHFEQMAQEATLLDYLHEVEHAAARITRLDGAIEEAVKLAPPQMRAVIEALQALRGIAHVSAVTVVAELGELSRLAGAKQLMGYGGIVASEDFSGERTRRGSITKTGNAHLRRVVVEAAWAYRHRPAVGGTLRQRQEHVSEEVKEIAWKAQQRLHQRYRKLLAKGKNKGVVVTAVGRELLGFIWAIGTKVETAQKESLQRVA

SEQ ID NO: 401930 - protein, 430 aa, unidentified
MHNKNYISVGIDVGSAFSFMTILAPDETVILKPFKITHNNKDSLERAVSEIKKAEELYSLESRIFLESTGIYHFPLFCYLVDCGFNASIINPIITHSTKNGNIRKVKNDKIDSKGIAKLGLSKDIPVSQFPAKLVLELRSLTRKYYDLTDERSAHINKLKGDLHTVFPQYLDVFCDVTGKTSTMILRQYGTPDKILRGHKKTMIEKISKASRKGLAKASERYEELCAAANAAKTFGCQIDSIYFNIFLTLDLVEKLDSALDSILNRIRQLITFNKNEKFIQQIKLLNTIPGVGFLTAVTIMCEIGDFSAFRNPKQLFAYFGLDPEVNESGKFVGTQLHMSKRGSRIARRAIFAVALASIRTKRNGEGINPYLRKYYELKSGQKPKMVAIGAVMHKVCNIVFAVLRDEKAFELRSPEEHCKQYQRPALAAA

SEQ ID NO: 401931 - protein, 343 aa, unidentified
MKTITTIGFDIAKSVFQVHGVDAAGEVVIRRQLKRRYVLAFFQKLPSCLVGIEACASSHYWSRELQALGHTVRLMPPAYVKPYVKRQKNDMADAEAICEAVTRANMRFVPTKSPEQQSCLMLHRTRHLFIRQQTAVINSIRAHLAEFGIIAPVGRKGVTELLHVVADPSDKRVPEVARACLAALGAQLLSLKQQILEFDRMIMTWHRSSQTSKRLHYIPGVGPMLATALVASVADPRTFRSGRNFSAWIGLVPKQHSSGGKDRLGSISKQGDRYLRSLFVAGALAVIRYAKVHGTKHRPWLTALLGRRPTKVAAIALANKIARMAWAMMAKGERYRQPIALAA

SEQ ID NO: 401932 - protein, 336 aa, unidentified
MDHFAGLDVSVKETSICIVDDAGKIVREVKVASEPEALLAVLKNPLEAGPLSQWLFSALAEAGLPVICVETRHMQAVLKAQINKTDRNDARGIAQMMRAGLYRPVHVKTIRSQKLRMLLTHRKLLQSKAIAIENDLRGTLRNFGLKVGMVGKVKFEARIRELVENLPDLAVLVEPMLIVRRVLREQIVILHRRLLAIVRDDEVCRRLMTTPGVGPVVALTFRATVDVPARFRKSKAVGAVFGLTCAKYQSGEVDRNGRISRCGDEMMRVMLYEAAQSMLRSKKWSWLKAWAMQIARRRGMKKAIVALARRLAVIMHRIWVDGTEFRWTREQAAAAA

SEQ ID NO: 401933 - protein, 305 aa, unidentified
MHASFDEVILSNSKFTNNAAGLKKLLLWSKKLMNTDCEVVFLMEATGVYHERAALFLFESKNKVAVLLPNKVKAFAGTLKVKTVNDKECAKIIALFGLEKNVDPWSPPQEVFNQIRQLTRERDQLLLERTMKKNQLHAEKVAWPNSGSIKRIEQQLKIMNKQIKEIETEIKDLINANPCLKEKMKKLCSIKGVGMITAAIVVAETNGFNLIRNKSQLVSYAGLDVIEKQSGTSVRGKTRISKRGNKYLRKCLYFPAFTSINHYEPSKNLYTRIISKTGLKMKGAVAVQRKILVLIYVLWKKDPVL

SEQ ID NO: 401934 - protein, 350 aa, unidentified
MLIIGCDYHPSFQQIAFVDTETGEFQEQRLSHREEAERFYRDLAAQGMKGRVGMEASGHARWFERLLAELKVELWRGDAAKIQAKRVRKKKTDREDGRHILQLMLKDDFPQIWVPSWDNRDLRQLLWHRHRMVQMRTRIMNQLQAVALNEGLRCKKRLWGERGRQQLESIGLAPWASRRRRDLLELLDRLTPTIAELTKQIEQEVEKYPAAQRLMTHPGVGALTALAYVLIIGEPERFECGKQIAAYLGLVPEEDSSGERRRLGHISKQGSGLMRFLLVEAAQVTVGSDAEWRSKFFHLALRRGRKIAKVAMARRLAVRMYWMWRQQWDYEQLKKFGPHAGQPGTAHGVK

SEQ ID NO: 401935 - protein, 408 aa, unidentified
MAVSGLPFILDRGCGLDVHKDTVVATIKGSDFDTETKTFLTFTDDLYNLVEWLQAHSITQVAMESTGVYWRPVYAVLEDYFHILLVNARHIKNVPGQKTDKKDSEWITKLLLSGLLKGSFIPPQHIRELRELFRHRRKLIAMRTAEKNRLQNILESANIKLRSVVSDVFGVSAMEMVRAMAKGQLDPLLLASMAKGSLVKKHAELLKALTGKITDHHRFMLNLILQSIDHINLQIAQSEAQMEQYARIMHKELELLESIPGVSSRVALGIVSEIGTDMAQFATHQNLSSWAGVCPGNNESAGKKYSSKITRGNKYLKTTLVEAAWVASRSKANPLLAVKHHQIAARRGQKKATIAIAHKILIAAYHVLRDNEAYQLHPQDKKILENRRLKRIDRLQKQLSTLKNTSYK

SEQ ID NO: 401936 - protein, 465 aa, unidentified
MSMIERTAKTQDVRQQTVRSMKGLDVIHPGAAGLDLHKEVIVVCAPMTAGETQYPVRKFGTYTSALLELATWLKQHGVTTVAMEATGVFWLPVIGILRSKGLEVLLVNAREVRSVKGRPKTDKLDCEWIRRLHACGLLRGSFIPDAETEMLKSLWRHRLNMEEEDARAIQRMQKAFQIMNIRLDIAVTDIVGETGIRIIEAILAGERDPRKLAKLRDPRVAKSEREIADALTGNFKDEQLFIIRENLAHHRFLLERSRETDARMGAQMETMKKKSNAADLPAATKPDRSRHGETLSRERLYELLGVDLTQIEGVGVLTVSSFLVNAGRDMSPWMTENHFASWLGLSPNVKQSAGKTRSGATRKTASALAHSFRMAVMTIGRLDSWLGAYYRRLKGRIGAPKAITATARKLAIIFYRAVKAGGTVKRLTAEAYEQANRDRILKALRQRAAHFGFDLTMKSNLPVEA

SEQ ID NO: 401937 - protein, 400 aa, unidentified
MLSIGIDVSKGKSTVCGMKPGGEIVYAPFEVQHTREGMSELVLLLHNSGEEVRAVLESTGSYHCPVVAALLENGIFVSVVNSLRMKRFCSQSIRKVKTDRIDAMQIALYGLAYWQELQPTKLPEDTYRELQLLARQYYQMTSLLIKAKVDFNAICDQVLPGMQELMSDHAGRHKLSDFVLQYRHTTHILEMGETRFRKDYCKWAEKKGYRNCERMAVLIFATAQNGIPVLPNAPSTQIVITEAIRVLHTVEASRDAILTQMQALAKTLPEYSLVREMPCIGDTLAPRLIAEIGDVRRFHSKRALIAYAGIDAPPYQSGKFCANNRHISKRGNRYLRKTGYEVMQSYVMHKPANDPIFTFIEKKRGEGKSGKLAMVAGLNKFLRVYYGKVTELYRSLPAIE

SEQ ID NO: 401938 - protein, 347 aa, unidentified
MDNMKYIGMDVHKEAISVAVLNSSGKLVMECTIETKASTILDFLKGLRGSLHVTFEEGTWAAWLYDLIKPHVTELVVCNPRRNALLKEGSKSDRIDARKLAELLRSNMVRSVYHGEHGVRTLRELARSYLTISTDLIRVMTRVKAIYRSWGIACRGKQVYAERYRAEWLGKIQEAGVRRRAGFYYQQFAALRALRQEVRRELLAEAQKHDAWKLLREIPFIGPIRAALLIALMQTPHRFRTKRQLWTYSGFGIETHSSAEQRFVQGELQRAKKPASIHELKNVFKSAATVAAAKAGPFKEFYDALVAKGIRPEMARLTLARKMAAITLIVWKKGVRFDAQHLKPQTA

SEQ ID NO: 401939 - protein, 374 aa, unidentified
MKERGLRSSCPFRARMLGVLTLLRRRRPLVSEVYAGRQFVGMDLHRRRSVLVRMSETGEHLETVRILNDRDVLAEVMSRAGESPEVVLEATYGWYWAVDALAELGATVHLAHPLGVRAFSYRRVKNDQRDAFDLADLLRMGRLPHAWIAPPATRELRELVRHRAKLVAMRSQCKAHVHAVLAKGGIWVPMTDLFGVEGNLLLDKVTMPAPYRERIASLRRFIEGFDAEIDLFTGLVQRRLSHDAGYIAVQQIPGIGPVLAAVFVAEIGDVHRFAGPAQLTCWAGLTPSHHESDTTVRRGRITKQGSRLVRWAAIESVKILPDTSRIGAVREQVAHRRGNRNIGAVAAARRQLELVFYALRDHHVRALHRSPHAA

SEQ ID NO: 401940 - protein, 358 aa, unidentified
MAVIEGVCRIVGGVDTHKDLHVAAIVDEQDRIIGTRSFATTRQGYRQMLAWMRSFGELQRIGIESTGSYGAGLLRFMQQAKVTVLEVTTPDKQDRRRRGKNDDLDAQNAAHAAFAGQRTVTPRSRDGMIESLRVLKACRKTAVSARRIALQMIHNTIVCAPDGLRDQLRSLTRMQLIRTLASWRPDLTAYRDLDSAYRIGLKSLARRYLELHDEIADLDAMIAAIVDELAPNLVARNSIGHTGAAQLLLTAGDNPERLRSEASFASLCGVSPVPASSGRTVRHRLNRGGDRAANSALHIIAIGRLRTDQRTKDYVARRLAEGHSKLDAIRALKRYLAREVFTLITQRRKEINATRIAA

SEQ ID NO: 401941 - protein, 442 aa, unidentified
MRKNLTKRFVGLDVHKRQITACFVDGEGRKLETRTFELTRAKLMHFAKHVLRPTDQVALEATTNCWAVARVLQDHVTRVVVSNPLVTKAIAQAKVKTDKVDAHVLAQLLRCDFLPEVWHPDTATQQLRELTGRRAALVQQRTALRNRIHSALAMRLIEAPESLFDSAGQDWLAKLLPTLDAQGQLLITSDLRLLLAVQQEIDTLGQQLAKQGWQDQRVRLLMTLPGVDVTVAESVLAALGDIERFPTPEQAAAYLGLVPSTRQSADKCYHGPITKRGNNQARWMLVQAAQHVGRHPGPLGHFFRRLKQRKNHNVAVVATARKLVMIAWHMLRKNEPYRYAISRTTETKLTKLRVQATGQSRKKCPAKRTKRTVKLPGGSRVIKSLDRVYASEGLPARQPLTAGEERAIAATQSVQFVADLAHDHVVPRQQKTPRVAKQLSTD

SEQ ID NO: 401942 - protein, 344 aa, unidentified
MNLTRFGVDLAKQVFQVHGVDRHEQVQVKRALSRRQMRSYFAKQAPCLIGMEACAGAHYWARELCRLGHTVKLIPPQFVKPYVKSQKNDANDAEAICEAVGRPNMRFVAVKSAAQQDVQALHRIRSELVRQRTAKANQIRGLLSEYGIVVATGIGTLRRAIPEIQEDAENGLSGLFRRVLGGLRQDLETFDTRIAELDAEIAQVAVADATAQRLQSIPGIGPMAATALVAAVGDARQFARGRDLAASLGLTPGQHSSGGKERLLGITKRGDCYLRTLLVHGARAVLRVAGRKDDPRSRWVMNVATRRHKNVAAVALANKMARIVWALLVRGGTYDSQHGLTATA

SEQ ID NO: 401943 - protein, 416 aa, unidentified
MYYVGIDWADENHQVFITDDSAQRLGAFSIENSRSGVEELFERIRYFVKDQKQALFALETSKGLLIDSILDAGYTVYPINPKSVDRYRDRYKVSGHKNDDFDAMVLANILRTDRHNYRPILPDSPITRELKILTRECCSLIRLKTLLSNQLTSCLKDYYPVALKLFCKLDQPITLLFLKNFPTYQQAKQVSLPQWGKFLSKHHYRVGVKKKAHEIYLKLQEPQFNVEPFVDNAKARYTLALVEQLQLLLSQIKSFENKIEQLLKQHTDSEIFLSLPGAGITLAARMVSEFGDNRERYKKVSSVQAEAGTAPITESSGNWKFVHFRSACRKSFRNTMHQFAFCSIKESPWAKQRYQQYVASGKKHTQSIRCLANAWLEIIFPMWKNYMPYSEQRHLLKYVKEQKPVNYSRNLNYLSV

SEQ ID NO: 401944 - protein, 607 aa, unidentified
MSTIASLDRIGVGIDTARYGHRVSFLRPDRKPAAKPLTVMENRAGYQALQDRLNQLHEQHPTAYFHVRIDAAGQYAVNLELFLRGLKLPMTISVGEPKRNKDYQKAHFPKRTTDDTESQAMARFAVIELPNATPAPSTPMILLREVAGRLQSKVKQTTQAINRLHNLLARVFPELATLTEDMSAGWVLKLLDKYPTAERIAQAQIASLEKIPYLSVEQAHAVHQAAKQSVASLRGELAEALVRDLVNQLRLCQKAEQHLHQLLLEAFADLPASPHVQVLTITGIGEATAAALVAKIVDINRFATPNHLVSYFGVFPEESSSGVDKHGKPLPPGTLIMSPKGNDLVRFYLWNAARTAIQHNPAIRALYRRLRAKGKRGDVAFGHCMRKLLHLVYAVWKTDRPFDKEHFPWEGSSDTQPSATTPPSADAGTTPSANEKAVGHKRDLPAEEVVTTADSTLEPASPAVKPASQSAAPRPKVDFACVREHVTMEQVLQHLGYFASLRGRGRQRRGPCPVHSQPTAPERTFSVHLGKNAFQCFHAECAVKGNVLDLWAAIHRLPLYEAALDLAETFQVPRNREEEPVKGTSSPRTATAKTSAPAAATATDGAK

SEQ ID NO: 401945 - protein, 399 aa, unidentified
MQVVYERCCGLDVHKKTVVACILIALASGEVQRHIRTFSTMTVGLLALSDWLESMSINVIAMESTGVYWRPVFNLLEEGRTVILVNAQHMKAIPGRKTDIKDSEWLADLLRHGLLKASFIPPAPIRELRDLTRYRKTLVQERADEVNRLHKVLETANVKLTAVATDVLGKSGRAMLDALVKGTTDPEILAELARGRLRQKLPQLQEALDGRVEAHHRLLLKHILAHVAFLEQTLEQLQQDIEERLPPFEDAMTLLMSIPAIAELAAATILGEIGDDMSRFPSAKHLASWAGVSPGNKQSGGKRLNGKTTKGNNTLRAILTEVVWVLSHMKDNYLSAQYHRLARRLGKKKAAMAVAHSLLVIIYHILSTKKPSSLSGKRTMLLIVKGYWVSVLLRSIIRM

SEQ ID NO: 401946 - protein, 352 aa, unidentified
MRRPKHPETTDEELFVGIDLHKHRWHVTIRTFDVEVFSGSIPGTWEALHRVLARYAGHQMQAVYEAGYFGFRLHDRLVDHGIPCIVTPPSLVPQEYGNRVKTDRRDSRKLAHLLAKGLLKQVWVPSEEERYHRQVIRRRRQLVRDRVRTQSRIKAELSFYGIHLEEPRGRWTQLYFETLRSIRFGNRWMQESFNRLLEQYEFLSAQIDKQTQLLRELSETVRYRERVEILQSIPGIGMISAMEVLLELQDVSRFRRAEQLAAYVGLTPSQYSSADKVRMGRITGIGKNTLRSLLVEASWTLIRKDQAMREKYDRIKVRSGGKRAIVAIAHTLLLRMRRMLLDKQAYALQLAA

SEQ ID NO: 401947 - protein, 331 aa, unidentified
MDHCAIDLGGRKSQVCVRSPDGQLLFEGPYDTHSLPEFLRLLPRSRVIVETTAEAFRVADAAKEAGHEVRVVPATLVRSLGVGARKTKTDKRDARALSEVSCRIDLPSVHIPSARSREWKAICGMHDALTTARTKLINNLRGWLRGRGLRIGKGKAETFAERMMKFEQLPDYVTSQVEALAALTRKIRESDKRIETLAKDELCQRLMTVPGIGPSSAVRFVAAIDEISRFESAHKVESYLGLVPGESSSSERQQRLSITKAGPSSVRWVLGQAAWSLQVRCHDPAARPLQLWAAEIARKRGRRIATIALSRKLAGILYALWRDGTRYEQRR

SEQ ID NO: 401948 - protein, 367 aa, unidentified
MSDSTVSVVPFASFVGVDLHKCTVTLRAVDPRGQPIAALTCDTKCVERIHNWLVALPRPAHLAVEAVGFVEWFIDRFRGCVDKMDIADATELANRRGKRRKTDRNDALDVAVRLARGECPLGWIADEPVMQLRKLGRHWRSLSRTLSRAKHCMKSMLLAANLRGPKFDGANAQKWLLAHGHLLKEVQREAFGNFLDIVLLIERQREVLRRRIIFANRGECFAALTAILKSVPGIDEIWACIIAAEVGDFARFPNADALEFWAGMTADLKESAGRTQSGKITKAGSPTLRWALCKAALTLCRSDGKQEAIRQRLIRRIGKKANVAMGRRLLRILFAMVRDGTVYQGQEPSGHERAANNVRLAKKRKAA

SEQ ID NO: 401949 - protein, 424 aa, unidentified
MTVIIGDDWAEGHHDIEVMAPDGRVLARFRVEENAAGLGTALSRLGELGIDGDDVVEVGIERDNGVWVTALRGSGFRVYAVNPLQSARCRSRYSLAGAKNDARDAHVLADMVRTDRAQLRLVADDTDTVEGLKVLARTHKTLIWERTRHLNRLRYNLIQYFPAAVDAFTDLSAPESIELLTKAPTPATATRLTLTQIRAALTHAKRRMIDTRASEIRATLREPGHLGQPAELAAAHASATVAILAVIAVLNTQIANLAEKVTSAFHTHPQARIYTSQPGMGPILGARALAEFGDAPVRYRTAKARRNFAGTSPVTQQSGKRTVVSRRYVHNDRLLDTLTRQAFTAIRVSPGARSYYDRQRQRGVAHEAALRHVANRLVGILHGCLATDTLYDETIAWKELADNTSRKDRPDCLLTSLSHGMSFR

SEQ ID NO: 401950 - protein, 369 aa, unidentified
MKKDTLYVGLDTDKKHIDVAVADALPSREVRFWGQTANTPASVDRLIKKLGHGVRELVVCYEAGPCGYGLYRQLVGKRGVRCLVVAPSMTPRRPGDRVKTNRRDALKLAKLLRAEELTAVWVPDAAHEALRDLVRARSTAVSVLTRCRQHISSFLLRQGIRYVGKPWTQKYRAWLAALDFEQAAHRLLLVELLVALDQAQARRDRLTDHIRELVPGWSLAWLVEAVQALRGYDLINAVIVVSELGDPRRFASPRQLMGFVGLNVSEASSGDTVRRGHLTKTGNKRARKALVEAAWTYSRPSAASKPQAARLPAQVQQIADKARHRLSRRYRHLLARGKLKQVAIAAVARETLGFIWAIAHAAAPTHQQN

SEQ ID NO: 401951 - protein, 461 aa, unidentified
MSKKKPGGRQKGSAQKKVDWKALEIVHPDAAGIDVGGSEHWVAVRPDRDAEPVRRFGPFTADLHEMARWLVEKGVRSVAMQSTGVYWMPVFEILEQHGLEVYLVNAQHTKNVPGRKSDVEECQWLLKLHAFGLLHNSFQPTDEIRIARTLWLQRGNLVAEASSAIQRMQKVLTEMNVQLSNVLSDIRGVSGMKIIGAILKGERDPQTLASLARPEVKATPRDIAKSLEGNWREELLFVLRQQVELYRIYQEKIADCDLQLRKHLESFGSKVDLQKQPIGPKPKGKKGGRNTPQFDLRTELYRITGIDWAQINGIDVLTAQTVIAEAGADLSAFPSEKQFASWLGLCPTNEQSGGKILSRRTRKVVNRATVAFRNAASTLLRSQSYLGAQYRRLRTRLGAPKAVTAMARKLACPFYRLVKHGQQYVDKGTEYYESRYREQQIRSLAKRAQKLGLQLVIPKTA

SEQ ID NO: 401952 - protein, 419 aa, unidentified
MESSRSKVCGIDVHKRFLVATILERNGPKKTEKFLNNLEHLLKLRAWIITEHCQAVAFESTGEYWVSLYDVLQGYVEIIVANSYHIKWIPGKKTDIIDSEWIAELALNDLISPSRILPKDMRDTRALTRLREKLVNERTDHKNRAHKVLDSACIRLSAYFTDLFGKSGLKILKCILSGVPPEEIARKLPKRLQARSDAILDAIRTQLSAHQLIQLQTSVTMIELLTGKIKELERTILNDLQKDRRKLQILMSIPGIGFVGATTILAEIGDVKDFSSPDKLTKWAGITPRVYQSADKLHTGSITKQGSKHLRWILVEVAHSGIRTKNTALRIFFDRIFNRSGYKKAIVALARKILKLIWHLLTNDELYEEKNTLLAKSCRLPIAIETGSFSVSAAIELLVKAGFQVIDGDDHPDKRVLGT

SEQ ID NO: 401953 - protein, 331 aa, unidentified
MDGEKRFVGIDIAKAALDVFIGSGEAAFSVTNDEVGIRELLRHLAPGDFVILEATGGLEMPAASALAAAGISVAIVNPRQVRDFARAAGRLAKTDRLDAEVLARFGEAVRPEARPLADEQAQALEALVTRRRQLVEMLTAEKNRRARAPKILHRSIDEHIRWLEKRLAGFDDELAELIRDTPLWRERDELLRSVPGVGKVLSSTLLAQLPELGMLNRKQIAALAGLAPFNRDSGSMRGSRCIWGGRAQVRRVLYMATVAGVRSNPTIRTFYLRLRAGGKHAKPALTACMRKFLVILNAMLRNKTNWQASALDSSNILLSPLLGAISQHGCC

SEQ ID NO: 401954 - protein, 448 aa, unidentified
MDVLQVDIEDYEEVVARVAAIDVAKATGMVCTRVPRENTPGKRVTRVWQVSATTNAILGLADHLVGAGIERVVVESTSDYWRPFFYLLEARGLRVWLVNACDVKNVPGRPKTDKLDAIWLAKLNERGMLRPSFVPPLEIRHLRDYTRLRLDLTTERSRHVQRLEKLLEDALIKVSSVATDIMGVSGRAMIEALIAGQRDPLVLADLAKGRLRVKHAALVQALTGQFSDHHGELARILLDQIDALTAQIDHLTTRIDQMIAAIPAAQGVDTDGTTGPHAGTGPDAGVLPAIARLDEIPGIGARAAQIIIAEIGLDMSVFPTPGHLASWAKLCPRANQSGAKNRSGKTGKGNPYLKGVLGEVAAAAAKTNTFLGQRYRRLVKRRGKLKALVAVARSILVIIWHLLSDPTSRFHDLGPDFYDNRLGPERTKRNHIRQLEALGYKVTLEAAA

SEQ ID NO: 401955 - protein, 465 aa, unidentified
MRTDKKLWRNRKARKELARRLQSENPGLEVVHAHAAGIDVGNSAHYVAVRPDRDPQPVRRFECFTADLHRLANWLQSCGVKTVALQSTGVYWIPLYDILEERGFEVYLVNARNTKNLPGRKSDVQESQWLLKLHTYGLLNNSFQPPSKIRILRTYWRQRLQHITGAATCVQRMQKALTQMNIQLANVISDLSGVTGQLIVRAIVGGERDPRKLAELSHPRIQASRGEIAKSLEGNWRQELIFVLQQEIEMYDTYQRRVTECDQQLQKHMAALADTVPPPAKEELPPKKKGKQNKNNPHFHLAAELQRITGVDLTRIDGVDVMVAQTLVSEVGLDMSRWKTEAHFASWLGLCPDNRISGDKVLARGTRHVLNRAATALRLGASTLLRSQTYLGAQYRRLRSRLGAPKAITAMAHRLARLAYRMLKYGQQYVDKGAEYYEQRNRQQQIEFVRRKAAQLGLQVTPAHA

SEQ ID NO: 401956 - protein, 344 aa, unidentified
MDYFAGLDVSVKETSVCIVDDTGKIIREVKVASEPAALLAVLKKPAYHFKRIGLEAGPLSQWLFSALAEAGLPVICVETRHMRAALKAQINKTDRNDARGIAQMMRVGLYRPVHVKTLRSQKLRMLLTHRQLLQSKAIAIENDLRGTLRNFGLKVGMVGKVKFEARIRELVEHLPDLAVLVEPMLIVRRVLREQIVILYRRLLAIVRDDEVCQRLMTTPGIGPVVSLTYRATVDVPARFHKSKSVGAVFGLTCAKYQSGEVDWDGRISRCGDEMMRTMLYEAAQAMMRSKKWSWLKAWAMQIARRRGMKKAIVALARRLAVILHRIWVDGTEFRWTREQAAAAA

SEQ ID NO: 401957 - protein, 323 aa, unidentified
MTTFVGIDISKSTFDVYFEHEGASNYLKLKQTKKDYQLLFELIGEEATCVMEATGNYHLHLAHHLQQAGCKVIVENPLKIKRFSQMSLQRTKTDKADAKLIYDYGVTILAHSALRLWQADKTEIGHLKQYDTVRQQLIKQRTALSNSEEAMQGLTGLNKDVTHVLRDILTAVEKAIKQLDKGMLKLVQRHHAESFDLVTSVPGIGPKTATMMICLTDGFQKFSADNMKQFISYIGMSPRTFESGTSVQGKAHISKVGNSRLRSMLYMCSWTAKKRNQQCAALYERLHEKGKPEKVIKVAIAHKLIRQIFGVIKHGQAFSNEFA

SEQ ID NO: 401958 - protein, 312 aa, unidentified
MTASQDVFIGIDISKDRLDVHVRPLGVGFSVSNEAAGHAALIARLRPLRSKRIVLEATGGYERALWLALSEAGLVAAVVNPRQVREFARAAGRLAKSDRLDAAVIAHFAETFAPRPGKPDPVADRLGEHVLYRRSLQEEIVALEHQRRRLETPALRERAGRRHAALRAEVKEIEREMRAIVDGDPGKKALFACLTALKGVGLVLACTLIANMRELGSLTRHQAAALIGVAPLNHDSGVRRGYRAIAGGRRRVRNVLYVATLSAVRSNPVIREFYRRLSAGGKPAKVALVACMRKMLVMLNGRVRDHLATATA

SEQ ID NO: 401959 - protein, 407 aa, unidentified
MRLFVGDDWAEDHHDVEVMNEQGKVLARRRLPEGVAGIAQLHELTGRYLPEDAADAEVLIGIETDRGPWVAALVAAGYAVFPVNPLQASRYRERHGVSGAKSDQGDAHMLADMVRTDSHQLRPAAGDTPEAEAIKVVARTHKTLIWERTRHIQRLRHQLREYFPAALDAFDDLAAPDALELLAKAPDPARAARLTRAQISAALKRARRHHIADKTTAVLAALRGEQLGQPPTLTAAYAATVRALISVIITLNEQISSLEEQVKDHFGRHPDAEIYLSQPGMGAILGARVLAEFGDDPHRYTSAKARKNYAATSPVTRASGKRKVVAARFVHNDRLIDALMSQAFSAMKAPPGARAFYDDLRNHGIEHNDALRRLANRLVGILHGCLKTRTLYDEATAWSHRDKSLAA

SEQ ID NO: 401960 - protein, 350 aa, unidentified
MERYIGLDVSSTSCTFAVVGATGKRLKSAVVETNGKALVEFLKLVPGTRHLCFEEGTQSEWLYEVLAPHVDRVVVVRVGESRGQKSDRDDAFALAEALRLGGTGTPIYKSAGPYGRLRDLARVYAKLVGDSVRTKNRLKTLFRARGIATAGKEVYRTENHEAWLKKLPARSQTAAQLSFAEHDALAEVRAEAEKALVAEARKHAITKTLATCPGLGAIRVAQLVPIVVSPERFRTKRQFWSYCGLGIVTRSSSDWEQGPDKSWTRTRQPMTRGLNRNHNHTLKYIFKGAASSIVMQGAGPLYADYERLLAAGTKPNLAKLTIARKIAATVLAMWKKKESYDPTKKRSTKS

SEQ ID NO: 401961 - protein, 441 aa, unidentified
MKKHTYRAKNINGICIEKLVEELNGVKVVVAVDVAKHDYVVGIAGSDGEIVEHVKFTHPEQTRAFMDLLEALRQRGDTEVVLEPTGTYGDALVEQLFERGFAVFAMSPKRCHDAAEVFDGVPSLHDAKATMILARLHVQGLSKSWPRMDEARRAMRAAVARREIYASPLEAHRGRLEALLSRYWPEFGQQLDLSDCKTGLALLVEYPGPEAVAHAPEGAARRMKQYSQGRLTGEKIAKVLATARDSLGVPMCEEERKLLGALAEEMLELWNEVDHIEDEIARMAEAYPASRALSQTVGMVTSAILVAMLGPASAYRSADAYVKAMGLNLKEHSSGSSKRPGTGLHITKRGPGVVRKYLFMATLRLIQRDPVCRAWYERRRAYQRGEKLKAVVALMRKLTRALWHVGHGERFEATKLFDTRHLKKRRTAKADMGRIAKVAAC

SEQ ID NO: 401962 - protein, 307 aa, unidentified
MFVGIDVSKDRLDVHLRPSAESFAVARDGPGLEQLVARLVAAGPELVVLEATGGFEITVAAAVAAGGLPLAVVNPAQIRAFARAIGRLAKTDRLDAELIARFAEQLRPEPRPVLDPQARILAELVARRRQIVEMIGMESNRRRQARSAKVLRGIERTLAALQAALADLDQEIDRQVRGSPAWRAAEDLLTSVPGIGKITARTLIAELPELGRLDRRRIAALVGVAPVNRDSGAWRGHRAIAGGRSAVRHTLYMAALSATSWNPAIRALYLRLRRRGRPAKAALVAAMRKLLTILNAIMRDRRPWQSA

SEQ ID NO: 401963 - protein, 412 aa, unidentified
MEAVVERCAGIDIGKATLKATVRVQGGARRKTRREVRTFQTTTPDLLALRDWLADEQVTLVGMESTGVFWKPIYYVLEDAVECWLLNAQHLKKVPGRKTDVTDSEWIAELVAHGLVRPSFVPPPPIRRLRDLTRYRSALTQERTREVQRLHGLLEDAGIKLSVFVSDITGTSARRMLAALVGGERDPQVLAGFAQGRMRPKILDLQRALTGNFTDHHARLCTKMLAHIDELTATVAELTGEIDAEITPLQQARERLTSIPGVSNRVAEVIIAETGANMTRFTTPQQLASWAAVCPGNNESAGRQFSGRTRKGNRWLRGALGEAAAAAGKSKNTYLSARYRRIAARRGAKRAQVAVGHDILVAAWHILDRNVDYRDLGADYFDRHVADRQRKITRLAQQLQALGYRVTLEVAA

SEQ ID NO: 401964 - protein, 449 aa, unidentified
MAKTKKRKYRKLERSLPVMRPNAGGIDIGATEIFVAVPADRDMETVRSFPSFTQDLHALADWLQQCRVDTVAMESTGVYWIPLFQILEARGIEVHLVNAQHVHHVPGRKSDVLDCQWLQYLHSVGLLRASFRPDQAVCEIRSLMRHRESLVQMACVHVQHMQKSLDQMNLQIHHVISDITGVTGLAIVDAIVAGNTNPEELAKLRDYRIKASVETVTKSLVGDYRGEHIFTLKQSLNAYRYYQQLLTDCDREVQQRIESFETKDGGSGSTGDVGDSNTSTGTFDLRAHFERIFGVDLTAIPGFDVLRVQTIFSELGADLSDFPTPASFASWLNLCPKDGTSAGRKIRGPKIKTKNRVTQVFRMAGQSLHNNKSFLGDLYRGQRARFGAIKAVKNAGHKLSRIFYHVVTTRQPYDETVFAKLEARHQQRRFRKLQSLAKQMGYSLVATPA

SEQ ID NO: 401965 - protein, 404 aa, unidentified
MNNVAGVDVSKGKSMVSVLRLFGEVVTKPFSVGHTGSELKELANYLKSLDGETRVVMEHTGRYYEPVARFLHEEGIFVSAVNPKLIKDYGNNSLRKVKTDKADARKIARYGLDNWVELRQHTPMDTIRMQLKTLNRQQGLYYKTKTMMKNNPIALLDQTYPGVNALFDSPVREDGSQKWVDFATAFWHVDCVRNMSLTAFTERYRKWCKRHGYNFSQSRAIDVHTKAQDLIAMLPKDALTKTMVQQAIDALNAVSASLERLKTEMRTLAAQLPEYPIVMAMRGVGDSLGPQLMAEIGDVTRFTHRNAITAFAGVDLGADQSGTHEAKSARASKSGPPELRKALFLVMDCLLKTMPQDDPVYRFMDKKRAEGKPYLVYMTAGANKFLRIYYGRVKEYLASLENSD

SEQ ID NO: 401966 - protein, 402 aa, unidentified
MTESPTRFIGLDIHKQYFVAVGVNQQREVVFGPRRASVYQLEDWVLRHLTKEDAIVLEMTTNAYLFYDILLPYVHSVLVVHPPHVALVTKASVKTDKKAALALAQLHAVGMLEGVWIPPHAVRDLRALLAQREKMVRLSTMAKNRLHSLLHRNHLVVPGKAFSPEQREWWHDLNLSETEQVMVSSDLDTLEFAQKQIGKIEECLKQKSAEDPRIPLLIQLPGVAMLTAITILAAIGEIERFPNAKQLVGYAGLGTRVHDSGMKHSAGRITKAGRKDLRRAMVNAANHAVLHHVHWKRELQRLEPRLGRSKAVVAIARKLLVAVWHVLHEEVADRFADPHAVAVSFLGHAYRLGVRKHLKGKSALVFTREQLDRIEIGQELEVVRWGSNHYKLPPSQPLSQKE

SEQ ID NO: 401967 - protein, 361 aa, unidentified
MNTITRVGIDLAKYLIQVHAVDGAGKVVTNRAVKREKFLLWCADLPAGCLIAMEACSGAHHWSRKLIERGFDARIIPGSSVAPYRIQGRSGKNDANDAAAICEAASRPHMNFVPPKTLAQQGMLCVHRLREGLKEERTSCINRIRGLLAEFGVILPQSPEVLRRHLSDIVEDASNDIAGVARLVLQRAQEHWRELDGHIKWCDQRIADHQKNDEQVQRAAELMGVGSITASAVVATVGDFRQFRNGAQFAAWLGLTPKQHSSGGKTSLGSITKRGSVYLRTLLIQGAKAIALTRQYDNPIFLWAQKLRERAGWQKAVVALANKNARILWTVMTREKRYDAHHVSNIPLPALVTAPALVSAM

SEQ ID NO: 401968 - protein, 413 aa, unidentified
MDAIVERCAGLDVHLDTVVACVSYGKLDIKPKKEVKTFSTTTKGLLELLDFINQKECTHVAMESTGIYWKPVWNILESGAFELIVANAKKIKNVPGRKTDVKDAEWIASLLRGGLIEKSFVPPERIRDLRDLTRLRKELLGEVNRNKNRIHKVLQDANIKISSVLSDVFGETGKSILNQIIGNQCITEEFIYSLYEGRGKSKLKSTLMEMYEALNGKIRGHHVILLGMHNSNIVFLEKQINELEKEIDILLQKERDSLELLETIPGISKISASSIIAEIGTSMDVFKTEKHISSWAGLCPKNNESAGKKKRSGIKSGNNWLRSMLCECAWSATKKKDSRFKNKYWSMVPRMGRKKALIAIANMMLRLIYHLLKTKSTYKELEIQYFIDKDKRREDRIIKELKSKGYLVEKDSL

SEQ ID NO: 401969 - protein, 417 aa, unidentified
MSTDVRFFGGVDWASETHQVCLVAADGKIIGERAFAHGGAGLAEMCDWLVTTSGEEPPTVAVAIEVPHGPVVEILLERRFQVDAVNPKQLDRFRDRFTVAGAKDDRRDAYVLADALRTDRHCFRRLTVEDPVVIELREWSRMVEDLQQERNRLANRVREQLWRYYPQALELGDDLAADWFLDLWALAPTPAKAARLRESRVTSLLKAHRIRRIEAAEVLRILRQKPLVVASGTVEAATAHITAVAARLKLVNQQIKQAHRRLDELSDKLAEGREEDAPGQKSKQRDVTILRSLPGVGRIVLATLLGEAAEPLRKRDYHALRTLSGVAPVTRRSGKRCVVLMRQACHLRLRTAVYHWARVAIQHDVRSRARYAELRKRGHSHGRALRSVADRLLAVACAMLKSQTIFDPEHAVEAVAT

SEQ ID NO: 401970 - protein, 409 aa, unidentified
MEVVHARCAGLDVHPASVVACVRVADGRRVERPLKSFGTTTQERLRLVAWLESHGCTHVAMESSGGYWKPVWHVLEGHFELVLANARHIRNMPGRKSDVNDVTWIADLLAHGLIRGSLVPPTEVRELRDLTRTHKQLTRERAQHVQRIQKVLEDANVKLTGVVSDVLGQSGRAILEAMVAGERDPERLLERTSGRLKASHAVLEEALRGNVTDHHRFMLRLPLGQIDALQAAIAALEQRAKELLRPFRDVVERLTSMPGMSVTSAHVIVAEIGLDMSRFPTAGHLRSWAGLCPRLDMSAGKRLSNRTHRGCPWLKTLLVQSAWAAMRHREGYFHAQFLRLKSRRGPKKAILAVAASMFSAVYYMLRDQADYRDLGGDYFHRRDRTRLARNLVKRLRELGVEVHITPVAA

SEQ ID NO: 401971 - protein, 402 aa, unidentified
MYTVGIDISKGKSMIAVMRPGGEEVLRPFEVHHTSHDLTLLCDKLKSLGGETRVVMEATGSYHLPIAWLLDHEGFYVSVVNPVLIHGYGNNSIRRGKTDRKDALKIAGYGLQYWNELPRYMPQDPARQLLKTCYRQYQEYSKISSVFKNSLISLMDLYFPGVNDLFTSPVRPDGSQKWIDFVAAFRHCDCVRGLSERAFITRYQRWCAKHGYQFSPDKAKKIHAFALNCVAVSPNSESVRVLVDTAVSQLRTNLISLAVVRARMQALASSLPEYPVVMSMFGAGPSLGPQLMAEIGDVRRFHSKKALVAFAGIDAPPCQSGQVNFLSRSIFKRGSPALRRTLFLVMNVINMCSPAEDPVYQYMAKKRSEGKKYQVYMMASANKFLRRYFASVNAYLDTLGST

SEQ ID NO: 401972 - protein, 344 aa, unidentified
MSNLDTCGIEISAQQLLVRLRRQGDLEPLRNFTNTPEGRERVLGYLRGGGRVVRVCMESSGLYGLDLALALSAAPGIEVMVANPRAVRHFANALMKRSKSDPLDAGVLEEFAARMPFQAWKRPSARALGLHALARRLHELVEIQTAEKSRQHAAGLSESIPAAVRRDLARSLRAQERAMERLTRQARQLIAQDPELTERFELLDSAPGIGETSAVQLLGELAMLAPDLEARQWVAYAGLDPRQYTSGTSVHKKPRISKAGNAHLRHALFMPALVAVQHDPYLGGFYQHLLAKGKLKMQALVAVMRKLLHALHAMFKNHQRYDGSKLFRLSSISSQEVLCAPVGA

SEQ ID NO: 401973 - protein, 355 aa, unidentified
MSSEKYIGLDVHQATISVAVMDSEGKVVMESILETKASTLLEFFGGLRGSLFVTFEEGTWAAWLYDLLKPHVTEVLVCNPRKIPLLKHGNKSDKIDARKLAERLRLHDLKPVYHGETGICMLRELARSYLTVVKDLSRVMNRLKALYRSWAICCAGRDVYYTRHRSQWLEKIPEAGTRRRAEQLYQQLDLLQHLRQQARRELLAESRKHAITAKLRQIPSLGPIRSALAVALIQTPHRFRSKRQLWTYSGLGLETRDSGEYHFVKGQPRKRKKQATIRGLNKDYNHDLKGLFKGAATRASVKPGPFQEFYQRSLAKGIKPTMVRLTLARKIAAITLTLWKKGEDFDINKLNSQAA

SEQ ID NO: 401974 - protein, 426 aa, unidentified
MSERDYSKQVARRQRIGSTTLVVGVDIGCASNAVGFMSKEGKVLGSYPNMPNSREGFEQFVKMTEGLKAKHGLNDVLIGLEPTGHYWRKFAYFAKAKGCEVRFVRTTALKHHRELDESSSAKSDKQDALTLTNITREGKYIDTVIEDGSRRQLRTLVKVREKIQKRNVSAKNSLHAALDDYFPELKEIFWSMHARGLWALLQRCPFPVDIVTLKVSVLKELIGRASRRRVEASRKAMAVYQAAKESIGLRQIGSADRYRLKMCLEEVKRTEFMIKDIEREIKRMLQEIPDAQYLLSIPGIGPISAAVFLGELGNPSYFQRAKQVVKYAGYDPQESDSGYRVSRKFISKKGRWLLRKHLFFMSMRVVVLSRYFQEYYQRKLQTKNRFGQLPRKKEVLCAVAIKLIKVIFALLRDKRSFEDTVTCYVE

SEQ ID NO: 401975 - protein, 354 aa, unidentified
MKRTTKYVALDVHQATTLASVREDSGRVIARSILPTDGPALTEFFRGMRGTIHVAFEEGTQAQWLHELLAPRVDRVVVCDLRGEQGPGNKGDQVDADALSERLRRGSLRAVYHGSAPHAILKELTRSYENVVEDATRVMLRLKALFRARGIRTPGARVYHPATQAQWLAQLPDRGARLRAAALYAELDVLRALRPTAKAAMVAEARRDPAWAVLQTIPFFGPVRVARLLATMQTPWRFRTKRHLWGYAGLAVVTRSSADYVLVDGQPIRRRRAPLTRGLNRNHNRVLKDVFKGAASAATAQPGPLQDWYQGRLAQGMREELARVTLARKLAALTLRLWKTGERFDPTKLTTPAR

SEQ ID NO: 401976 - protein, 340 aa, unidentified
MQKPRHIGIDLHRNQFTCCVRLENGRNYLTEWKLEDLPRFVKKLRPDDEIAVEVTGNTRLFYEAVAPSVARVVAVDPNQFKVISHSVKKTDPNDARNLALYLEKDLLPEVRMKDKTQAQLASLTQTRDTLVKLRTALKNKVNNILSAHGINLEKEALSSEKKLNEVVAMRFDPMVKIELEVIIEEIRSLNQRVAKLEKTIADEGSKLEGHKNLTSIKGIGPLTGSILLSVIGDIHDFADEGKLAAYFGIVPRVSNSNETERSGRITKRGSKLGRTALVQSALIAQRYSPYLKRYYEQVKARRGTGKAIIALARKLLGIIYRTLKNKWVFEDFPNFVLAEA

SEQ ID NO: 401977 - protein, 392 aa, unidentified
MLQSNDLSRSFTVLNQDSTLIVVIEMSQSSWLVAGMVPGVERQPLKKLKPDEDQLMKLMNRWRYEALRAGHAIERMVVAYEAGRDGFWLARWLRERGVEAYVIHPSSIAVSREHRRAKTDRLDTELLMRAFLGWLRGERRHCSMAAIPTIEEEDAKRPNREHEKLVGDRTRIVNRMKSTLSRFGIRGFKPTLRKADEKLGELRTGEGTLLPENTRAELRRDMTRLRVVREQLKEIEQQRLRKLEAAAPAKKGPHAMVHLIARVIGIGIETADMLVNEILSRHLRDSKAVARYAGLTGSPDESGKRRREKGLARAGNARVRRGMIQLAWRFLRFQKDSVLTQWFRARAADGRSGTRKTMIVALARKLLIALWRMATTGEIPEGVILRPLRPAA

SEQ ID NO: 401978 - protein, 329 aa, unidentified
MKQCLIVGVDVSKDTLDIFCKPSGQHVQIQNKLNGFKDLLRFLKPQISADTEVLIVMEHTGFYSYRFERFLQSKAMSYCKLPALEIKRSIGMVRGKNDKIDAERIATYGWLRREILQADQYPAEALVRLRAMLSTRLKLVRDKSGWQSRLKELLAGEVFEQRDSVITMHRQVIQQLSKQIEKIEQLIREVINADEALKQTYRLLVSIKGVGLVIATAMIAYTENFKRFSNARKFNCYAGLAPFKHESGRSIKKKTKVSHLANKSIKALLSMGASTAIQHDAELKTYYQRRLAEGKEEGQCLNIIKAKLVARIFAVVKRQTPYQPILIAA

SEQ ID NO: 401979 - protein, 324 aa, unidentified
MNKNTKFCGIDISKDVFDVVDSSEKHHQFKNDPSGFKKFGKLLNKNAHCVMEATGSYYQGLATWLFSQSIDVSVVNPLSVKRFIQMRLKTSKTDKMDALMIRLYGESEEPKLWTPPSKLIIEATELHKLIELLVRQRAGLKNRLHALESKGITKSLVLTTVRRQIRNLGNEIADLELNLESVIKEYEPDLLTRLCSIPGIGKRTAIYLIVITHGFEKFESSRQLIAFFGLDPIIRESGSSIRGKSRISKTGDNQVRKLLFMCAFTACEHNKACREIYQRLTAKGKSKKLALIAVANKLLKQSLAIAKSGLYYDENYRSVNVNLG

SEQ ID NO: 401980 - protein, 353 aa, unidentified
MLSSNVKYIGLDVHKEAIAVAVLNGAGKLVAESIVETKASTLLDFLHGLHVTLEEGTWAAWLYDLLKPHVREVVVCNPRRNALLKEGSKSDKVDARKLAELLRSGMLRAVYHGENGLRALRELARTYQVVSKDLKRVMNRLKALYRSWGIPCTGTRVYSQRHREQWLKKIGEAGVRRRAELFYQQLDALQALRHTVRGELLAESRKHQAVKILRQIPSIGPLRAAQLVAVMQTPHRFRSKRQLWTYSGLAVETHDSSQYRFVDGQLQRSKKPQQVRGLNQNHNHAMKEIFKSAALSATRRAGPFQDFYEGLLAKGMKPELACLTLARKIAATTLTLWKKGECFDARYVKPQAA

SEQ ID NO: 401981 - protein, 347 aa, unidentified
MGKSITDLSSVTTVGLDLAKHVFQVHAIGAFGRVIVAKALRRKDVLFFFAQLPKCLVGMEACGSAHHWARELIKLGHDARMMPPAYVKPYVRRQKNDAADAAGICEAVTRPSMRFVGVRTLENQAALMHHKAREMLVTQRTQLITALRGHLAEIGVIAAQGPKNARELAGVVMAEGNETIPACVRAALAPLVRQLHVLDQEIACSDRTIAAMARGDERARRLMTIPGLGPVTASAMAASVQDVSAFSGPRAFAAFLGLTPKQNSSGGKERLGRISKMGNRYLRTLLVVGAHAVLYHRKPHDDALRSWAKKLMQGKPFKLVAVALANKMARIAFAIMRGRTSYCAVSA

SEQ ID NO: 401982 - protein, 307 aa, unidentified
MILALRCIGIDVSKHRLDIFDDAIGAAESIANAPQPITEQVARWRCGNVFVVFEATGIYDHELAAQLRQAGIRFARINPARARDFARASGRLAKTDAIDAHMLANFARAMLPPEEPAPEPARNALALLAKRRDQLVQMRAQEKNRRSEAKDHAMIEDIGRLIDFLDGEIAMIEARITALIEAEEPIAEDARLIRSIPGVGPVACMQLIAQMPELGRIGPKQVAALAGLAPRNVDSGTYRGKRTIGGGRKRVRDALYMAALNAIRRSSSFRAFYQRLRTAGKPAKLALIAVARKLLTVLNAMLRDRKP

SEQ ID NO: 401983 - protein, 336 aa, unidentified
MWHIGLDVHQMQSTICILDKNGKRIRRQTIRGRWDILIAELRKIKKPFAICFEASTGYGYLFEQLSKIAKRVLVAHPGQLRLIFRSKRKNDRVDAEKLAKLLYLDAVPTVYVPSVDIRSWRSTIEHRQQLIRERTRTKNAIRALLRTHGIASPRRLWSKSNLKWLSALTFPTSLYALQRDMLLERYHSLAPLIERTEAALEKIANAHPGVNLLMTIPGVGIRTAEAVVAYIDKPERFTKNKAIGRYFGVIPCQDASAGANRLGHITRDGPSTVRKVIAEAAWQGIRRSSHIRAYFERIQQKKKERRKIALVATAHYLLRVMLAMLQTGETWRYTAA

SEQ ID NO: 401984 - protein, 413 aa, unidentified
MAEEVEWFVGIDWASQSHQVCLVDAHGACLGERAVAHGGAGIEELCDWLIARTGATPEVIGVAIEMTRGPIVEALLERGFCVYGINPKQLDRFTVAGAKDDRRDAHVLGDSLRTDRHAFRRLSNDEPVIVKLREWSRMADDLQQERARLASRMREQLWRYYPQMLELADDLAADWFLDLWNQAPTPAKAVRLRATTIERFVKAHRLRRWQAPEVLRILKQKPLSVAPGVVEAASDHIRTLTARIRLVNQQLKSAHCKLDELCAHLIPSEENEPGQQCEQRDVVILRSMPGLGRIILAVLLAEVWQPLRRRDYHALRTLSGVAPVTRRSGKTCVVVRRYSRNKRLENALYHWARLATQHAALSRGRYAALRRRGHSHGRALRTVADRLLSVACTLLAQQTLFDPTSEVRDAAGA

SEQ ID NO: 401985 - protein, 332 aa, unidentified
MYYVGIDLHKEQLVVSVEDDTGPVGRPRRIACRDEQEIRRQMETLRPFCAVIEASSSYRWLYDLLRPLGDVVLAHPLKLRAIVTARAKTDKLDAALLARLLRAQLIPKAHIPGAGYQTLRDLTRTRARLSRAATVAKNQLHSLLGGRNLHSPQRSLVSKSARRWLREMDLGFVGNLQRDELLGRLDHYAEELKRLDGWLDSMADTFPEVSCLTDLHGVGLYTALLIVGEIAETERFDNPRQVGAYAGLTARVNQSGGHCYYGHISRQGSSWLRWALVQAAMKLIRRDEALNRFYQRIRKRSSRHIARVAVARKLAGICWIRLRRWHRTNAAA

SEQ ID NO: 401986 - protein, 380 aa, unidentified
MTTSRAVLRSKDTTPSSALYMSFDLGDRQWHLSFGDGRSGVSRYTVAAGDTAAVADRIVKAAARFKTRPRALVHSVYEAGRDGWWFHRWLCELGVDNIVVDPASIEVNRRARRAKTDRLDADKLLAMLIRHHAGERVWGVLREPSRQAEDARREHRELERLTHERVAHSNRISALLVLHNLRPGVVIGGREWPRWWNTHRDQVPELLRAELERECERLKLVKDQVRSIEAAHRRDIAQGKQPLVEQLARLSAIGPKSAWALVKEVFGWREFSNRRELASSLGLVPTPHASGTIEREQGISKAGNRRVRSLLVELAWNWLRLQPDSELTQWFDRRFGSSGGRQRRVGIVALARRLAIALWRYLKDGEIPAGARLKLSASRV

SEQ ID NO: 401987 - protein, 339 aa, unidentified
MQISIVGLDIAKQVFQVHGADAQGRPVAQVRLRRAQVLDYFRELPPCIVGMEACATAHHWARELIALGHEVKLMPPAYVKPYVKRNKTDAADAEAIAEAVTRPTMRFVAVKSADQQSMLMLHRVRELLVRQRTMLATALRAHLAEFGIVAAQGIHRVEKLAAEVRNPAVPPLAQEMLSLLVDELASIWRRLDIIEQRLVALHRTNPVSRSLASIPGVGPITAMAIASTVPDPSMFRSGREFAAWLGLTPKSHSSGGKDKLGRISKRGDRYIRHLLYVGAGNAIRFSKARAATGEAWIRGLQERRPPKVVIIALANKMARIAWALMMRGESFRSPAGASA

SEQ ID NO: 401988 - protein, 387 aa, unidentified
MIYIGIDIAKQNHVASAMSADGEIIFKPFGFTNDNCGFQKLLDNLSSLDKEEMLIGMESTAHYAENLTCFLFSRGFNICIINPIQTAALRKTNIRKTKNDNVDTYLIIKALITNKYRLFTQRDLQSLKLKNLCRFRQKLMKARTKVKIQLVTYVDQLFPELQYFFKSGIHIKSCYALLKECSNPDRIANMHLTRLTNLLYKTSKGHFNKQSAIALKELARNSVGTKNDTLSLQITQSIIQIELFTEQLDEVENTINDIMDSMDSVIKTIPGIGNLNGGMIIGEIGDIHRFESPCKLLAYAGLDPSVYQSGKFNASHTQMSKRGSKLLRYALINAAWQLTLNNKTFKDYYDLKISQGRGHYNALGHVAHKLVRVIHKIMIDNIEFNLA

SEQ ID NO: 401989 - protein, 341 aa, unidentified
MKNLFIGVDFSKEKVDVAIIFADGLTETAARMFNEFKTTVSGYKQLVKWVEQNSYGIDSSLWLFCGENTGDYSKGLCNFIYGKGYDMWLENAKSIKDASGLRRLKSDRADASMIAEYAMRNYDRAIMYEPLSESLAQLRELFLYRQMVIRHRCSFQVRRGEKKLTMEKSPVKTMISQSGRHIVSELNKEVEKIDKRIAELIKSDEELTEVFTIVTSVPGIGTQNAVCLMVYTDNFRRFNYDSRKIACYYGIAPFGKDSGTSVHSDPRVHYMANRQIKSMLTQAALAAVNFNPVIARYYMRLVERGKKKQVALNNVKNKLVHLVTAMARNRQLYTPEYKISA

SEQ ID NO: 401990 - protein, 371 aa, unidentified
MRVVHERCAGLDVHKSSVVACALLPEGKQSRTFGTMTGQLEQLAEWLRGLDIQAVAMESSGVYWKPVFNILETVGFELLVVNARHIKAVPGRKTDVKDAEWIADLLRHGLLKPSFIPNREERELRELTRYRRTLIEERAHEVQRLQKVLEGANIKLEDVISDVVGLNGRRFLSALIAGDYDPEAVAATAFLEQRIAALDQEVKQRSRPFEAAIAHLDQIPGVGSRAAQEILAEIGTDMTRFPTHRHLASWAKVCPGNNESAGKRRSGFAGKGNRWLRSILVECAWCASRKKDSYFKTQYHRLAARRGKRRALLAVGHSLLTVIYYLLRDGVLYQDLGSNYFDQRDRSQIARQAIRRLERLGYQVALTEGAA

SEQ ID NO: 401991 - protein, 329 aa, unidentified
MNYCGIDTGCKTLDVVIRKKGKSLKCHSFTNTHEGHSKLLSYLRKHKVGRIGLEATGYYHLDIAIELDDATEVEVMIINPRASKNFARALMTKHKNDAVDADVLAKFVERMDFIPWSSPDHEVFALRSCGRRLISLTKEKTKAKNQLHAFSMTKRTPKFIIDDIKLTIEQLEKQIDNLTRNALLIIKQSATLTSRYQWVTSLKGVADKTAIKLLGELGVLELDMSGKQWVSHAGLFPREFQSGTSVNKKTRIGKVGNRYIREALYMGALSATRHDPNIRAFYLHLINDNGLTKLQAVCAVMRKMILAIHAMFKYQKPFNGQCFYALGKV

SEQ ID NO: 401992 - protein, 350 aa, unidentified
MIIIGCDYHPGFQQIAFVDSDTGEFQERRLSHREEAEKFYRDLAVRGARVRVGMEASGQGRWFERLLAELQIELWIGNAAEIRAKRVRKKKTDREDARHILQLLVEDRFPQIWVPSWENRDVRQLLWHRHRLVQMRTRIMNQLQAVALNEGLRCKKRLWRERGRQQLEIFQLAPWASRRRRDLLELLDRLNPTIAELSQALEQEVEKYPAAQRLMTHPGVGALTALAFVLIIGEPERFRCGKQIAAYLGLVPEEDSSGESRRLGHISKQGSGLMRFFLVEAAQVTARSDAEWRRKYFHLAQRRGRKIAKVAMARRLAVRLYWMWRKQWDYQQLKKFGPHAGQLGSGVGVQ

SEQ ID NO: 401993 - protein, 342 aa, unidentified
MTAIGIDTHKATLAACAVDELGRPVAEATFANDPAGHLAFIAWARSIAPEVTIGVEGSSSFGAPLARSAQSAGLAVREVPPHLSRVERLRTRRPGKSDPGDALAIAWVTAREKNLPPIRLPDRTTELRLLLEAREDLVAESTRARNRLHAHLLTLTPGYGGTVTNLVAVRHRLAVGRLLRGVGGVQAELARGLLLRLARLEREVKALTSRIEMLVAGHPLLGLAGAGPITVARLIAEVGDVRRFRSADALAALAGVAPIPASSGQVQRMRLNRGGNRQLNRAFYFIAVIQSRFYPPAKAYVTRRMEVDGKSWREAIRALKRMLVRPVFRLLVEGAALQLEAA

SEQ ID NO: 401994 - protein, 356 aa, unidentified
MSYDVKYIGMDVHKEAIVIAVLNEGGKVVMESVIETKASSILQFLHGLRGELHVTWEEGTWAAWLYDLLQPQVQHIVVCNPRRNALLKEGSKSDKVDARKLAELLRSGMLRAVYHGENGLRTLRELGRSYQTIGKDLTRVMNRLKAVYRGWGIPCAGTRVYAPRYREEWLSKLPQAGVRRRAELLYQQLDGLQALRREVRPEFLAESRKHKAAKLLRQIPCIGPIRAARLIGLMQTPHRFRSKRQLWTYSGLGIETHDSAQYRYVGGQVQRSKKPQQIRGLNRNHNHEMKEIFKSTATRASCGTGPFHDFYAALLAKGMEPEMARLTLARKIAAITLTLWKKGERFDAEKLKTQAA

SEQ ID NO: 401995 - protein, 405 aa, unidentified
MFVGIDWASTEHAVCVLDQTGKTVRAFGIPHSAAGFDDLVARLRRLGAPAGLPVAIERPDGRLVDRLLEAGHPVVPVRSNAIKAWREGEVVSGAKSDTGDAKVIAEYLRLRHHQLRTLTPFSDATRALRAVVRARGELVRQRVAAINQLTATLDAFWPGAKAVFPDVEREIALAFLERYPTPESAAGLGEQRMAAFLTRHRYCGRTPAAELLARLRAAPAGVAGGAEATARRDAVLAFVGVLRALNQAIRDLDRSVIARLGEHPDSKVFASLPRSGQINAAQMLACWGDCRDAYDGPEAIAALAGIVPVTRQSGKHAAVSFRWACNKRFRNAMTTFAHNSRLASPWAAKLYADAIARGHDHPHATRILARAWVRVIWRCWIDQVPYDPVKHRAAQRLAEEAAAAA

SEQ ID NO: 401996 - protein, 342 aa, unidentified
MRRSIGVDLHKNSFRVCYYKSETGHEFKTYGVRRAGIEAFKKTLRKSDEVAVESTGNTGYFVREIEGKVKRVRVINPRQFKVITMSVKKTDDEDALKIAKYLKKDLIPEVRMPNKKQQQMRSLVGTRDKLVKLRTGLKNKIHNILNANGIVSRKEMFSGEKGLVIVKRLGLEDSYQFEIELIVEQIRHLNESVKKIDREIKERSEKLDGHKSLKSIKGISDTGAAIFLSAIGNVNDFRDEKALFSYFGIIPRVSVSNETSHYGRITKRGNKIARTALVQSTLIAIRYSPYLREFYDKIKNKRGSGKAIIATSRKMLGVIYKTLKNNWVFEDFTQFKLVRQAF

SEQ ID NO: 401997 - protein, 357 aa, unidentified
MTLLRAGWRSISPNSAPPLSRLRETATRKLVAGLSARYRRLTFCYEAGPTGYGLQWLIESLGHTCIVVAPSLIPKKAGERVKTNRRDAVGLARLLRAGELTAVWVPDGRHEAMRELTRARGAARGDLTRKRQQVSSMLLRLGRYYPGIKTWNARHRSWLANLRLDHPEQRFALEEMLQAERQAGERIGRLEQAIREALADWSLAPIVPALMAMRGLDLVAAVTVLAEIGDLSRFENPRQLMAYLGLVPSERSTGESVKRGSITKAGNGRARRVLVEAAWAYRHPPRVGYEKQALVSAAPRPAREIAWKAQVRLCKRFRALSRKGKTSTVVATAIARELAAFIWAIAREVGKTPARAA

SEQ ID NO: 401998 - protein, 345 aa, unidentified
MNKISVVGLDLAKNVFQVHGIDTDDEVVVRKQLRRSEIRKYFARLEPCLIGMEACGGAHFWSRELTRLGHTVRMMAPAFVKPYLKSNKNDRNDAEAICEAVQRPSMRFVQPKLPEQQAVLHLHHGRQLLVRQRVALSNHMRGVLSEYGIVVPQGVKVLSRHLPEILEDAENALPMLARHLLAELKAEHDQLIERTDRIEKQLKAWHANNAVSQRLASIPGIGVLTATALAATVGEGQDFKNGRQLAAYLGLVPRQSSSGGKDRLLGISKRGDSYLRSLLIHGARAVIHHIRRRLKAGKPGGNPWVEQLLQRCHVNEAAVALANKMARTSWVLLARKETYCPAYPV

SEQ ID NO: 401999 - protein, 400 aa, unidentified
MKTTDRTAAAIGLDVHRRFSTVTARNAEGKIGWRQRLEHEDRDDLRKHLETWPRGIPVILESSFGWEWMCEELEQAGLKPQLASSRKVAAWRNARGMAKSNRTDADLLSELGRQTDRWWQVWLPPREVRDRREWMRYRMSLVRLQTGLKNRVHAILHRHGILHDFADLFGAQGRRMLTRLAHDAKNPRLRESGRATLKGYLQLLDHLRRQIAAVTRTIYRQLRATPQAKRLQGLPGVGPILAHTILAEVGDFGRFRSAKHLASYSLLAPRAFDSGEETDETPKGRHVGHMGRRTLKWAWIEAGHGAVRRGGRFREVFDRYTDGGKRNRNRGYILVGHELCRTAYAISKKETEYCDDPPPRPGSSKKGAASRKRDRRRRARSQNSRPGTGQPDVTMVAVAM

SEQ ID NO: 402000 - protein, 351 aa, unidentified
MIIIGVDYHPSDQYIAFADTETGECGERRLNHGDGEAERFYRDLQQRAVSVRVGMEATGYSRWFERLLAELGIEVWIGDAAKIKTKRVRKQKTDRNDAQLLLGLLIENNFPRVWVASPENRDLRQLLWHRHRLVQMRTRILNQLQALAMNEGNRRKKKLWSAQGRAQLEKLPLATWASRRRQDLLELLDRMTPAIAALTAAVEQEAKKRPEVLRLMTHPGVGPITALAFVLIIGTPERFPCGKQIGSYIGLIPAEDSSAGRQRLGHISKQGNALLRYLLGEAAQAAVRCDADWRRRYVHLAMRREKSIAKVAMARRIAVRLYWMWRNGWEYGQSVAFGSHAGQLVTGHGAH

SEQ ID NO: 402001 - protein, 357 aa, unidentified
MALIAFPNPGEATVKDITTVGVDLAKNVIQVHGVDRRGKTVLKKQLRRSRFVEFFANVPACLIGMEACSSAHHWARELEKLGHQVRLMAPQFVKPYVKTNKNDAADAEAICEAVSRPTMRFVPIKNAEQQAVLALHRARAGFVKARTAQANQIRGLLGEYGIILPQGIAHITKRLPAILEDGESELPGAFRQLLIRLGAHLKELDRQVGELEGQIETWHRADAASRRLAQIPGIGALTASALVATVGDARSFHNARQLAAWLGLVPRQHSSGGKALLLGISKRGDAYLRTLLIHGARSVVRVAERQAGDLPAWLQQLITRRHKNVAAVALANKNARTVWALLVHGRDYQATYAGAAV

SEQ ID NO: 402002 - protein, 401 aa, unidentified
MTAQQHPAVFIGLDVGKAEHHAVALTAAGKKVYDKALPNDETRLRGILDELARAHGPALLVVDQPATIGALPVAVAQACDGVEVAYLPGLAMRRIADLHPGSAKTDAKDAAIIAEAARTMPHTLRSIRVDEEQIAELAMLAGFDDDLAAQITATSNRLRGLLTQIHPALERVLGPRITHPAVADLLGRYPTPAQLRTAGPGHVRARLRKHAPRLAASLTEQIFQALDEQSVVVAGTQAAATVVPILAEQLAGLASQVKAAVEAHPLHPVLISMPGVGIRTAARILTEVVGKDFVDAGHLASYAGIAPVTRRSGTSIRGEHVARGGNKRLKRALFLSAFASLSHPPSRAYYDRKRAQGKRHNQALIALARRRTDVLYAMLRDGTLYQDPTAPPAPSSVALAA

SEQ ID NO: 402003 - protein, 320 aa, unidentified
MSKKKSKGFIGIDVSKNLLEVAAHESDYQFRCANKAQAFGELIVELIALRPALIVLEATGGLEIPVVAALHAAGLPVVVVNPRQVCDFAKALGQLAKTDRLDARVLAHFAAAIKPPLRPIKSADELELDALVGRRGQLVEMLTAEKNRRGSAATDTVRDEIKEHIDWLEDRIAELDQQLKAQLKNSTLWQGRDDILQSVPGIGPVVSYSLIADLPELGRLNRQKISKLVGVAPLNNDSGQQRGTRHIYGGRTRVRSMLYMAALTATRFNPVIKEFYERLLANKKLFKVAITACMRKLLCIINVMVRDSTLWKIKNDPVSA

SEQ ID NO: 402004 - protein, 336 aa, unidentified
MIHVGVDLHKRFCYMTALDARGRLITAGQVPNQQAALRTYFGQFRGPVQVAVEACSFWPAFRRAVGKRAEVRMVHPQRVKAIAAAKLKNDRIDSATLAHLLRCDLIPEAWMADERTRELRQQVRMRATLVRQRTRLKNQVHAILHQQGLCYEGSDVFGRGGRRWLQQVSLPAAGGAAVQVYLKLIDEFSAHIQAQEQQVKKQWEKDARVIWLQTLPGIGWYSAILLVAEIGDIQRFADKRALSNYAGLVPWLRESADKRRRGSITRVGSPWLRWIMVEAAQTALRKYPEVQRWAKLLLRKKHKNTVVVAIARKLLVAVWAMLHNGVAYDEKHFAVC

SEQ ID NO: 402005 - protein, 324 aa, unidentified
MGNTYSEKIYVGIDISKDFFDAALPVKATWHHLKLCNNKTGFRQFLQALQAFDAVVCVMEASGPYYLELAGFLHQAGIEVSVVNPLVVRRFCQMRLSRAKTDKKDAVMIAAYGQAEKPKLWEPEAGHVLALKQLQTVAEGLQRSHHRHSRQLESLRAGGKVNHQAEKSLQRMIRQAKEELDKVEAQLDKLIAEHHCQQFEQLKSIPGLGRKSSMLLLLITGGFSKFVHYKQLISYVGLSPRIYQSGSSVKGKARICKMGMSQVRKVLYVCSWSAIKCNKACRELYERLLARGKAKRLALVAVANKLLKQAFAVVTKGEFYFEKS

SEQ ID NO: 402006 - protein, 343 aa, unidentified
MSVSMIGLDTAKSAFQIHGVNETGKVEIKRKLRRSELIAFFEKQESCTVVMEACGAAHHWARMLTGLGHTVKLIAAEAVKPFVKKGKKNDAADAAAICEAAARPDIKFVPIKTVEQQGILALHTARALLTKQQTMLANAIRGLATEFGHVVAKGLHNLEPLVALVGADDAMPEQARQAIADLFKRFGELATGIQSCEAKIVKHARNDATARRLATIPGIGPITASLIAATVVDISQFKSARQFAAWLGLVPRQNSTGGKTRLGQITKAGNKEIRKLLVLGATSMLGHAEGWHSALGAWLRDILQRRPARLATVALANKMARIAWVVMTRNEVYRPAGGVAAKA

SEQ ID NO: 402007 - protein, 347 aa, unidentified
MGLVIGLDAHAKTCVYKVKDDGGTVVGEGTIPSTPVDLSALAETYPGATVVVEASTVTEWIYDCLTDRGVRVFVCHPENMRRGGRKSDARDAGRLADAFRVGALTPAYVPPREVRALRQLARRVVFLSKESTRFKNRVHAILKRRGVRLLDDETEDDVRSIFALKHRDRLLAVGDPEIPLLVDLIDAVAEKRRASDVRLEAIAASDPDVANLATIPGFGALAAVTMYAEVGDVRRFPNAESLCAYFGLVPTESQSGETRVRGHITRRGPPNVRWLLNQASWQHVRLCPRSSVGKDYKRLARRLGKKRAITAVARRLVKVCYWILRERRPFTLNGFDQVRASTAPCAT

SEQ ID NO: 402008 - protein, 397 aa, unidentified
MAAAVHVVGGVDPHADTIHVAVLTAVGKSVDDAEFTTTTGGYARAVAFLTSWGIVDVVGVEGAAGYGAGVTRALAAAGITVVEVDRPTRSARRRAGKSDRLDAYHAARAVIAERTSPVKDPAIDGLRALHLARNSAVKARTAAINQAKAILVMAPEAVRVRFRGLTTTKLMAALLRVRGCCADPGVADTLAALRILAQRHRDLSGQIAALTARIDPLATTANPALRAAFGVGADTAAQLLITAGHNPDRLTSEPSFAALCGVAPVPASSGKTRRYRLSRGGDRGANHALHRIALVRMSHHQPTIDYVRRQIDRGRSKKEILRMLKRAISREIYRHLTNPAPVPTWTDLRPTRQAHNLTLTAAAQHFGVWPTVISRIERGLQRNDELAEQYRTWLAAA

SEQ ID NO: 402009 - protein, 400 aa, unidentified
MKQSNANQSTGVERPVAQRVNTASDVYAAYIGLDVHKASLSVAVAETGRQAPEFRGEIPNEPQAIDTLIRQLSERFAGQPLLFSYEAGPCGYGVYHQVQASGHDCEVVAPTLIPRRSGDRIKTDRRDAQMLARLSRSGELTPVWVPTPEQEAMRDLTRAREDMKAIELKARQRLNAFLLRHGKVYGGKSKWVPAHFRWLETVRFATPVQQIVLQEYIEAVREAQRRVVGLEAQMRVALPSWSLAPVVEALMAMRGVGLITAMTVLAELGDISRFDSPRQLMAYLGLVPSEHSSGGSRRQGGITKTGNGHVRRVLVEAAWNYRFPARKTRIIEQRAEQVSPTVQAIAWAAQKRLCGRYRRLAATGKVKQQVTTAIAREMTGFLWAIACEAMNKPHASRATA

SEQ ID NO: 402010 - protein, 415 aa, unidentified
MQEEAYAIYVGVDWASEAHQVAIVDAACDLRIQERVPHTGADLNQLAEELGHRAGGEPGRVAVAIEVPRGPVVETLLERGLHVYALNPKPLDRFRDRYSMAGAKDDRRDARVLAEALRTDRPAFRRLQIDEPAVIRLRELARLDAELQQERTRLANRLREQLQRFYPQLLAFCPAADEPWLWTLLDLAPTPAAGRRVSPAQLGRVLRTHRIRRLTADALHAQLQTPALRVAPGTAEAASEYLALLLPRLRLVHAQHRACEQRLDRVLAELAEPAPGQPTEHRDVTILRSLPGVGRGVAATMLAEATPLLATRDSHGLRTQMGLAPVTRQSGKHVEVSMRYACNQRLRYAAYHWGRTSVQCDPHSRAHYAQLRQRGHAHARALRGVVDRLLRVLVVMLETRTPYDPARRRPLEQTA

SEQ ID NO: 402011 - protein, 313 aa, unidentified
MNIIGIDVGARRCHVATEQDVASLTTEQTLQLLATTPPATIVLELTGAYGRLIAEHAYQAGHTVLIANDTDERAVRHLLRSQRKTDRIDARYLRHLAALAPALPGPHPHLTPYEELRPLIQVRTLAHTWRYLVELRAAIKTRNRVPLSEPLPLIEPIDQLIEQYAQRTIDAVPPTIMTLLQSIPGVTPALAALLYATLGDASRFRSRDGAVSYAGVAPRHAPQSSTITGRKRRYRHAKLLATHLHMYALKVARNPHRHGRIGATYQRVRQRTDGPRALHAVKRHLVRITVGVLRSRTPHNPNHTSRAAGHGHA

SEQ ID NO: 402012 - protein, 308 aa, unidentified
MDAQGQKLAARRCPEGVAGLSVLHALIAQHAQDPQEVLIGIETDHGLWVAALVAAGYRVYALNPKAVARYRERHHVGGGKSDAGDAKVLADLVRTDAHNHRVVAGDSEHVAAVKVLARAQQSLIWSRNRESNRLRNALREFYPAALEAFENLHERDALAVLGRAPDPVTAAGLTLAQLRAALRSGGRRRNLEVTAAKIAPALRAEQLQAPAAVTAAYRTVVTAQVGVLAALNTQLEQLEAQLHQSFEQHPDADIILSLPGLGDILGARVLGEFGDDPQRFADVKSRRNYAGTSPLTIASGKKRAVLAS

SEQ ID NO: 402013 - protein, 356 aa, unidentified
MAIAIGIDVHKKTSTFFAYGEDGEPLEEFNKRFKRVASNRDGYTEVLVWLGNTDCDFLMENSTKTHDVYWILQGLGYKNLYVAHSVDLKRITKSSKKTDQFDAEKLATYMRVKQQNIDQFRTCYICTPEDMRIRRLCRIAKQELFDMGRIRRRIRSHLLLTGREWIGGLNTKWECEALMNEDDPGLRHLGRQLNECRLRRDAAEEAVVEAIKGNEKMFPIYEKLKEIPNFGDITAAYLAAVIVDIDRFENPKKLAAYLGIVPRMRDSGETENHCGLTRSGDPAARWLLIQATFRLVNSSAPDSQLKAFFAEKNGGSIEERKEADTSGLLKRPALVATANKLIHIIFALLTHPDRHW

SEQ ID NO: 402014 - protein, 367 aa, unidentified
MGWMAPLRHRGAKMLVGRRPPANREPSLSEVTTVGLDLAKHVFQVHGVDAEGATVVRRQLRRGQVLGFFSRLPRCLVGLEACATAHYWARELQALGHEVRLMPAQYVKAYVKRNKNDAADAQAICEAVLRPTMRFVPPKTAEQQAALLLHRGRERLVGQRTMLVNALRAHLAEFGVVAPQGLRNVGQLIAIVRDAGDARLPGLARQVLEVLALQIEQIEGAVAALEKQLMAWHKANPVSQRLATIPGIGPIIATAIAATVVEPSGFRSGREFAAWLGLVPRQNSTGGKTRLGGISKRGNHYLRRLLINGASANLLRSKATNADPWVIGLRRRRPSLVVAVALANKTARIAWAVMQRQEDYRRMVAAA

SEQ ID NO: 402015 - protein, 367 aa, unidentified
MKKGSTAAKQRVRNISGQTLTIGLDLGDRNSWYCVLDEAGRIQLEQRVRTNAKALQEVFGAMPRNRIALEIGTHSPWVSRLLSELGHEVIVANARKVRLIGESRKKDDRLDAQTLARLARIDPELLYPVKHRSAQAQADLMMIRGRAGLVRARTGLVNTARGLAKSYGERLRGCNARHLNPEKAEGLSPELQAALEPLLNAIESLSERIVEYNERIEKLAQQDYPQVALLKQGKGVGTLIALTYLLTLEDPHRFQKSRDVGCYLGLQPGRRNSGRSEPQLHISKEGDPYLRTLLVQGAQHILGPFGIDCDLRRWGLRLAERGGKSGKKRAIVATARKLAVLLHHLWVSGEAYEPLHNRNRGAVAAAA

SEQ ID NO: 402016 - protein, 368 aa, unidentified
MGRKSSKLFAGMDVHKDSIDIAVAEEAGEVRHHGRIGGEANALVRAVRKLESLGRPLVFVYEAGPCGFGIYRMLKARGHECWVVSPSNTPRRVRDRIKTDRRDSLKLAGLARAGELTPIYVPDALDEAMRDLVRAREDAVVVQRQSRQRLAALLLRNDIRYAGKSAWTEGHRRWIARLRLPTVAQRIAFEEYVQAVAESTERVQRFTRAIEQELVHWRWQPVVAALQACRGIQLIHAVRIVAELGDLARFERPRQLMAYLGLIPSEDSTGERRRQGSITKAGNRSARRALVEAAWAYQHRPAVSPVIARRQTGLPKTVTQLAWQGQLRLCGRFRRLQARGLNRNKIAVAIARELAGFVWAIGQQVKPA

SEQ ID NO: 402017 - protein, 432 aa, unidentified
MRPNAGGIDLGATEIFVGVPADRDSDSVRSFPTFTEDLHQLADWLQRCRVDTVAMESTGVYWIPLFQILQARGIEVHLVNAQHVHHVPGRKSDVLDCQWLQYLHSVGLLRASFRPEQAVCEIRSLMRHRENLVEMSCVHVLHMHKSLDQMNLQIHHVISDITGVTGLAIVDAIVAGKTNPKELAKLRDHRIKASIETVTKSLVGDYRPEHIFTLKQSLTAYRYYQQFIADCDHEIQQRIEAFDSKDQGPTAPADATSTETSKESGFNLHSHLERIFGVDLTLMPGFECLRIQTILSELGADLSKFPTDDRFCSWLNLCPKDGSSAGRRIRAPRIKTKNRVAQTFRLAAQSLHNNQSYLGDYYRSQRARYGAPKAIKNTAHKLARIFYRLVTTRQPYDETVFAKLEMHNQKRRLHKLQSLAKQMGYSLVEAHA

SEQ ID NO: 402018 - protein, 308 aa, unidentified
MTSINYIAVDIAKDSFEVFSEFFKGSYLYTSESLKILVKQIRSVPSPLVVCEATGGYERELMFTLFKQKIPVARVNPFRVRAFAKSDGIKAKTDPIDASVLLRFSKEKHIKPTPPPSPKQQALSELMDRRSQLSGNLASEKNRLKMCTKRIQRSIEKMIRFTGKEIKLIEKQIKEIIKDDEIMCSQRKIMLQVKGVGETTVWSVLAYLSEITSLGRNQLVALAGVAPYNRDSGKWKGKRRIEGGRAKLRKCLYMAATSAAVHNPHIKAYVDGLRARGKPYKCAIVAAMRKLLVYMQSLLKSSQKELVS

SEQ ID NO: 402019 - protein, 346 aa, unidentified
MKQITTIGLDLAKQVFQVHAAAADGSPIFNRKLRRAEVLRFFEKTPACLVGMEACGSAHYWAREISALGHDVRLIPPVYVKPFVKRGKTDAADAEAISEAVTRKTMRFVPAKSTDQQAAAVVLKTRALLVNQRTQVINALRAHLSEFGIIAAVGTTKVAGLISIVRDETDLRLPKAARHALMEVASQIEALKAQIDKLEKVIVATVKRDDDARRLVTIPGVGAITAASVRALVPDPGGFKSGRHFAAWLGLTPKPHSSGGKERLGRISKMGNPALRSLLVVGATAVLRHARGNPNASKWITTLLARRPYRIVAVALANKMARIVWALLVRGGTYQDKGTRNQIVAA

SEQ ID NO: 402020 - protein, 347 aa, unidentified
MSITMIGLDTAKSVFQVHGVNETGKVEIKRKLRRSELIPFFEKQEVCTVVIEACGAAHHWARILRGLGHEVKLIAPEAVRPFVKKGKKNDPADAAALCTAASLPDMMFVPIKNIEQQGILAVHSARSLLVKQQTMLANAMRGLATEFGLTVPKGIGRLDELLKLVEADKTFPEKARQVFMGLFVQCRALAESIGALEAAIVAHARQDETARRLQTIPGVGPITASLIATTVGDISLFKSARHFAAWLGLVPRQYSTGGKTRLGRITKAGNREIRRLLVIGATSMVYRAPQWNSALGAWTRKLLERRPVRLVTVALANKMARMAWALMTRKEVYRAKGRVAAATEAAV

SEQ ID NO: 402021 - protein, 340 aa, unidentified
MIIGCDFHPRFQQIAFVDQETGEYGERRLSHPGEAEQFYRSLAGRQVRLGMEATGNFRWFRRLLDELGQEFLLGDATEIHASSPRNQKTDKRDARHILRLLVEARFPAVWQPSEENEELRQLLLHRCRLVRMRTRIQNQLDSMAKNEGMLSSRVWSPKRRQEIEGLVLPGWYGERRKDLLSLLEELNKRIDPLDKAVRAAAEENAEARLLMTHPGVGPIVSLAYVLAMGNWQRFPRSRELASYLGLIPVEESSGQSRRLGHISKQGNSMVRWLLVEAAVHAQRKDPSWHRQYLRLSLTKHHGVAKVAIARKLAVRLYWMLRSGNDYQQVMERGSHAGQSV

SEQ ID NO: 402022 - protein, 326 aa, unidentified
MSRIQEKKTITTAASPFIVIGIDVSKDQLDAYVSPAGNHHSFKNNAGGVAELVNFCRDHDADLVVLEATGRYHRMAHETLHDAGVKTAVANPARSRSFARSVGRLAKTDRIDAQILAEYGERVRPPASTPPSKLQAKIAEITVARRQIVDEITILKQQQTQALDELVIAQIEARISLCQRHRKDLEQLLAELIEEDDGLKRRHEILTSIPGIGLTTSATLISELNELGGANAKQIASLSGVAPMNRDSGSFRGKRKIGGGRKPVRDVMYMAAVVAIRWNKDMAAFYQRLKKAGKPFKVAITAVMRKLLILANTLLSENRLWSETQP

SEQ ID NO: 402023 - protein, 350 aa, unidentified
MSNVPVFVGLDYHQDSIQVCVLNQKGDVLLNRSAANDAAELGRLVRPLGVVQRVGIEACCGAADLGQELVETLGWNVSLGHPAYIAKIKSSPDKSDYSDGRLIADLTRVGYLPRVWLAPANIRELRQLVNHRQRLVDHGRAIKLQIGAILREQRVKIEPDRGSRWSRAWTASVQDNGRLSKHARWIVNDLLDDLKYTAGKITKAERQLREATEGDKVIEKLMKQSGIGEVTAWVLRAYIGDFTRFKTAKQLARYCGMSPCNASSGKKTADAGLIDGCNKLLRLTIVQAAHRLIRTVERWSKLADSMRSRGKPACVIVGAVGNRWLRNLHHTMKEATIEPTIEKGGATIMN

SEQ ID NO: 402024 - protein, 332 aa, unidentified
MDNFYFIGVDVSKKKLDFCVLFEGKVLREEQVSNHQQAVARLIGELKNDLEMDNEQFLICAEHTGQYTFPLVCACKSVECKLWLENPSQIKYSSGMQRGKNDKVDAKRIAIYASRFGDKVKYYDRPTEEIERLKQLERERALYVTDLAKYKGQMYDQKDFMPAALYRKKTKRMKGLIQELQAAIDAITAEMETIIGSTELLARQMELLMSIDGVGKVVALNVIIETEAFSRFDNPRKFCCHAGVAPFSYTSGSSQHSKNKVSHRANKNIKKLLHMAAVSVTHRKEGELKAYYMRKVEEGKNKMSVINALRAKIVARMFAVIKRNEVYTPIYS

SEQ ID NO: 402025 - protein, 389 aa, unidentified
MESPLPQPDDLSKSLTCLEQDSTIIAVIEMSQSSWLVAGIVPGIERHPLKKLNANEGELLRLLERWRLEAAKAGRTIKRIAVAYEAGRDGFWLARWLRARAIEAYIIHPTSVAVSREHRRAKTDRLDTGLLKRVFLGWLRGEPDHCQMAAIPTLAEEDAKRPNREREQLVRERTRLVNRMKSCLVRLGIRNFRPTLRKAAERLAMLRTPEGTPLPPNTLLELRRDMARMRFVMEQIKELEEERVRRLEQAPQEKSNAMVRLLARVLGMGIETADMLVHEILARELRDRRAVARYAGLTGAPDESGSRRREKGLAKAGNARVRRGLIQLAWRLLIFQKDSALVQWYRTRIETGGGKRKTMIVALARKLLIALWRLVTTGEVPAGFVLRAA

SEQ ID NO: 402026 - protein, 329 aa, unidentified
MPMYQLGIDVSKNTLDLCLLREGIKGRIKTRKLKNTADAAKVVTEWLKKQSCELGEVHIIMEATGVYHEPLAYGLHFAGARISLANPHRTREFARGMNILTKNDKVDAWMLACYGSLKEPEAWTPPPESVRYLRALLRRRDALVADSTREKNRLEKSVFTDSPDAVRASIEHMLQELNNEIEHLDVLIQEHIETHPELNQDFRLLTSIKSVGYLLGLNMLAILKSHSFESAEQAAAFLGVVPVERRSGTSVKGKPKLSKIGPPEIRTKLYLAALCGLRFNPVMKQMYTKLWICPYISRHLLSLNPLQARCCHERCNSDPHPTPEIRSRG

SEQ ID NO: 402027 - protein, 438 aa, unidentified
MTNDSIRYVGLDVHKRLVEACFVDHAGKIVWRESFALNRRTLGLFAAKLLRPGDHVALEATTNCWAVADALRPHVARVLVSNPMATKAIAQAKVKTDKVDAHVLAQLLRCDFLPEVWQPDEATRRLRELTGRRATLIGQRTMMRNRIHSVLAMRLIDEPKGLFKPEGLEWLAEVELDDQARMLIDSDLRQLAFLQTEIDAVDAELARRGHASDAVKLLMTLPGVDVTTAEAMAAAWGDVGRFPDGDHAASYLGLVPSTKQSAEHCYHGPITKRGNSQARWMLIEAAQHLDTHPGPLGHFFRRLAKKKNRNVAVVAAARKLAVIGWHMLTTNEPYRYAIPRSTETKLSKLRVKATGQRRRGGSPKGTKCVAKLPGGGRTIRSLAEVCQSEGLPEVHPLSRGERRTVKRADAEAFVAQIATAQIVPRRSRRRPTPEAIHD

SEQ ID NO: 402028 - protein, 339 aa, unidentified
MELYAGLDLHSRNTYIGIMDKTFNRVFKKRVPNHLELILQTLDPFRDQIKGFVVESTYNWYWLVDGLMDAGYSSAHLANPSAIKQYEGLKYSDDQHDAFFLAQLLILGILPQGYIYPKKDRPVRDLVRKRMFLVRHKTAHILSLQSLLQRCCARKVRANDMRHLTVKELEMWLEEEHLILSAQANLDSINFLKQKIKQLEKAIIQKVKLNKAFKYLLTVPGIGNILAMTIMLEVGDINRFSKVGNFTSYCRCVPSRRLSDGKSKGYGNRKNGNRYLSWAFTEAAQLGRRHNERFRRYYNRKVAQANTSLATKALGNKLARICYYIMRDQVPFREELFCH

SEQ ID NO: 402029 - protein, 311 aa, unidentified
MSAYVGIDVSKATLAVAIRPGGPTFSVANTPEGHGELLHVLKNFEIERIVLEATGGYERDVMHTLAEAGYAVARVAPHRSRAFATALGKYAKTDPIDAETLARMAQSLELEPEAVPSTEELELRELVHRREQLVQWRDDERRRAHQARSPWVRRSLQSSITQTEAEIRRCTMEIQRLLQRVNAVACRRLLAIPGIGPVTAASLLAYLRELGHLKGRQIAALVGLAPFNADSGTASGKRRIRGGRPRIRRILYMATLGVIRAQPDFKARYQALRQKGKCAKVAIVACMRVLLVRINAMMRDQTEWNMTPVTR

SEQ ID NO: 402030 - protein, 420 aa, unidentified
MTTEKDSTILSVVHPVCCGLDIHKKKISACLLRAGVAKDESSLIREFGTFTDDIEQLRDWLAAYDCPIVAMESTGVYWRPVHNILEGNVEVVLVNARHIKNVPGRKTDIKDSSWLAGLLQHGLVRGSFIPDKEIRHWRDLARIRRKNTEMMGDCKRRVHKLFECANIKIDSVVSDLFSLTGRNLMDRLISGSSNVSLEDVERCTRGSLRSKVPELYRSIRGFFEDHHRFLLISMLHILKTLEQENEKISTRMKELMQSHQDLLDRLDEVPGINELSAQFVLSELGPDLVTFLSAAALVSWAGLCPGNNESAGKRKSGRSPVRKHHFKTIMIEIAWAAVKKKGSYYRDKYWRLRYRLGPKKAIVAIAHRIAKALYAIIKHGEHYKELGEEYLAQRSNVNKLAKIRKEARAFGYDLVEIAAK

SEQ ID NO: 402031 - protein, 421 aa, unidentified
MIETRNFYAGVDWASQKHDVWLTDGSGERLGLRNFVHGGEGLKQLCDWLIETSNAAPADIHVAIEVPHGPVVETLLERGFHVYAINPKQLDRFRDRFTMAGAKDDSRDAETMASSLRTDMRAFRKLGLADAVIIELREWSRMTEDLTAEKTRLANRLREQLWRYYPQMIELAGDVSAGWVLDLWQAVPTPAKAARVREKTVAKILKKHRIRRVDAPAALAILRKEALTVAPGTTEAATAHIRALAERLALVNRQLKDAHRQLDRINGELCAPVAASDGETQPGQVQEQRDAAILDSLPGIGRINLATLLAEATDALQRRDYHALRCLCGAAPVTKRSGKSRIVVRRLACHPRLANSLYHWARVAIQNDRRSRAKYDALRSRGHSHARALRSVGDRLLKVACSMLKNGTLYDPTLAPAKTAC

SEQ ID NO: 402032 - protein, 421 aa, unidentified
MRLRTGKVAGTPDQETKEYNTMEKKKRYIRLCGIDVAKHKHVLCVIDSDGNKIVRSRSFTNDKEGYQRLLQSLKNVGQSRTILVGMEATAHYWYSLHDFLVRAGYQVAVLNPIQTAQQAKKGIRKRKTDKLDAFHIAVLLKNGEYKAALVPGELGMTCRQLTRLRHRLVEQTSSLKQLIWSRLHPVWPEYEDLFKDPFCATGRKLLHTAPTPRDVLSMGRKELSELIRKASRGKYAQAQAKKVWQAAANSAGMHRSLEGARIGIRTLLKQIEAVRPIREKLEEDICQLAIRLPTYIFSLPGINPVSAVSLFGETDPIKNFGTPAQLVAFAGLDLGVFQTGQYEAPHRHISKRGSPFLRHTLWNIAFQAVYQEGEIRDYWLRKMADGLKHKAAVTAASIKLCQITWRILTDKRDYLPEGRPN

SEQ ID NO: 402033 - protein, 343 aa, unidentified
MKLMRIGVDLAKNVFQIHGVDSHEKPVWRQRLTRERWLQTMFEKIEPGCEIGMESCGGAHHWARQLEARGFRVKLIAPQFVKPYVKSNKNDANDAEAICEAMSRPSMRFVAIKTVEQQDIQATHRIRSGLIEQRTAKANQIRGLVSEYGLVAPKELLSLRRVIPCWLEDAENGLTLRFRHLLDGLWGDLRALDERVKELDSEISVIAANEPRAQVLQQLRGVGPMIATALVVAIGDARQFANGRQFAASLGLTPRQLSSGGKDRLLGISKRGDTYLRTLMVHGARSALRTAQSKEDRLSQWAVRLAERSHVNVAAIALANKTARMAWAMLRNGTEYQPERAAA

SEQ ID NO: 402034 - protein, 358 aa, unidentified
MFTKSLKVTDFTGQHIYVGLDVHLKSWMVSIYSDEFELKSFSQAPDALKLSNYLKHHYPNATFHLAYEAGFCGFWIHRAFKEQGIECIVIHAGDVPSSDKELKRKTDGVDSRKIARGLKNNELNSIFVPDEQQEADRMLIRNRGRVVKDLTSIKNRIKAFLKIYGISIPENFTTGNWTNSFTEWLHQLSFIEPSSKLSFQNYLQQAGFLIAQRKQIDQQIHTLATGPYYADKVKLLTTIPAVGILTAMTFLTEIGAINRFKNIDHLCSYCGLAPDCHNSGQTERIMGITRRGNAILKTILIECSWMAIRKDPALLLYYKQLLPRMNGNKAIVKVARKLLNRIAYVMRHQQPYVIGLVA

SEQ ID NO: 402035 - protein, 352 aa, unidentified
MGIDVHKDTHTAVGLNPFGEKVFEMKIGNEVLDFISLVEKTKDESEKLNLAPSFGLEDVHSWGERLSSFLSEEGLPVVSVAPVLVDHNRSKMTHPEKSDSLDVQAVAKVMIQRIDTLPTYTLTEEAQKAKQIRELSLEREWLVKERARLKNQLHILLHRIHNSSYRTKFKDPFSKKALRYWMRSVPKNTDAILEQRAKRAIRRLLNLREEIQEIEEELESLMTNSGQTLSTASGCGTVIAAEIIGEIGDVGRFHSPAALAKYAGCSPREHSSGKTIRWRKTRSGNRRLNRSFHRMALSQISRSGNDATRTYFKKKISEGKTKAQALVCLRRQLVNVVWMMLKHKTEYRWPVC

SEQ ID NO: 402036 - protein, 413 aa, unidentified
MLHVGIDWAVESHTVALLTRPGEVLEPLVIANTLKGFLALLEAIRRHIGKDKPALTHKDVLFIEDRNQRLVDFLLAQGFTGYLMEPNRMPGYRLRYRSSGNKTDPDDAFIMADVLCRDRDQLPTINPMNATVQTLKTLLLDREGFVRDQTRLTNRLTACLRQYYPEALELFSDVAGKTALEFLAVYPDFAAAHRLSRKQVQQFLTEHHCHRLKRLERIVELLAQEPIAIPAAVIETKRRLALHIIQQLQAVQATVAEYDEEIKRIGAENEEVQRFKGLPGAGPQIAGGLYTLFGDDRTRFGSAMAVQSFVGTAPRTIQSGKMRVVCFRFGCPGFHRTQAQQLALGALRVSAWAKQYYRGKRAEGKRHQHALRCLANLLMKIAFAIWRDRTTYDENRHLAQIMRHQLRQKSSMA

SEQ ID NO: 402037 - protein, 393 aa, unidentified
MNLSSIRTNILHLKHDCCILDSDGTIRADCITIPNNMDGFKQLLQTIRDCTKKSDKIKVGLEATGHYSYNILGFLLDNGLPTYVINPLHTNLYRKSLSLRKTKTDRVDARTIATMLLSDVDLKSYTDTAYHNEELKSLTRYRFDKVRERAKLKQSVSRLVTILFPELEKLVPSLHIASVYALLSEYPGAKQISEIHLTKLTNLLATASKGRYGKDKAIQIRDAARTSIGSVMPAKFLELKHTIKLIRELTSEIDEIEVSIQKIMDELNPPILSIPGVGIQSAAMILAEIGDFSNFESPDKILAYAGCSPSTYQSGKLTNCYAHMEKRGSRYLRYALYNATKYVCHWNPVFAEYLAKKRAEGKHYNVALSHATKKLVRLIYALQKSGKAYLVAA

SEQ ID NO: 402038 - protein, 353 aa, unidentified
MMIIGCDFHPSFQQIAYVEQETGEYEERRLSHRGEAEAFYRSLAGRSVRIGMEATGNDRWFHKLMSELGHELLVGDASAIHASAPREQRTDKRDARHIFKLLVENRFPSIWQPPVGNEEQRQLLLHRCRLVRMRTRIKNQLDSIAKNEGLTGSRVWKAKRRQQIEALPLTGWYAERRKDLLELLDEMDKRIEPLDKAVKLAAEQNAEARLLMTHPGVGPVVSLAYVLILGDWRRFPRGKQVGSYLGLIPSEASSGKHQQRMGHITKQGNTLLRWMLVEAAVKAQSKDPSWHRQYVRLSMNKHHGVAKVAIAHKLAVRLYWMLRSGQNYTKIVERGSHAGQSELAGGCGLGPIN

SEQ ID NO: 402039 - protein, 343 aa, unidentified
MKLIRIGVDLAKDVFQVHGVDRHEKAVWRRKLRRNEWLKVLVATAEPGCQIGMEACGGAHHWARKLQGLGFRVKLIAPQFVKPYVKGDKNDANDAEAICEAMSRPSMRFVTVKSAEQQDIQAVHRIRVGLVEQRTAKANQIRGLAAEYGLVAPKELGQLRTALPCWLEDGQNGLSDRFRRLLSGVWEDLRALDERVGELDREITVIAKSDPLAKRLQQLRGVGPVIATALVGALGNGEQFARGRQMAAALGLTPRQHSSGGKERLLGISKRGDAYLRTLLIHGARSVIRTAKGKEDRLSRWVIALAARSHPNVAAAALANKTARMAWAMMRKGTDYQPDLVTD

SEQ ID NO: 402040 - protein, 340 aa, unidentified
MIVGAFDLHRGQITFEYMDMETGDVRRGRIAPADRAHLREWLMRFDGREAAFAVEGCTGWRYVVEELVRAGVVPHLAEPADSAALRGRKKRAKTDRSDSTMLREALVEGRLPESWIPPTQVLEVRAKLRLYKDLSDERVGWIQRIHATLFHMGVPAVRAGLWSPEGQATLECADLSPATRQAVRVGLDVIEGLTVQLDPLRGELVGFARRHPACRALHGALYGVGPFTSVAIWAEMGDCRRFSSSDQAVRHTGLDVTVWSSDKRRSAGRLSRQGPPVLRWALYEAAKNASRASSPDHAYYQQTRERLGAKRATISVARKLARRAFHILTNLGDQALAEAA

SEQ ID NO: 402041 - protein, 358 aa, unidentified
MNRNTGMNAGQIIGTMNGLQVIGLDIAKQIFQLHTVDMGTGEIFNVQIKRAKVLEYFVNRKSCLIAIEACGGAHHWARELTALGHSVHLLHAKIVRPFVSGNKTDATDARAIWLAVQQPGVKFVGIKTAAQQATLTLHRQRELLMKMRTMQTNALRGLLYEFGATFAKGRKALFKDVERELEGLAGQLPQMVSDSLREQIARIKAMGEDIQAIEKRLSLQLKADSHMQRIAQIPGVGLLSATAAIATMGQASAFKSGREFCAWLGLVPKQTGSGGKVRLGSISKRGDTYLRTLLIHGARSVLTHAKDPGPWLEQIKARRPANVVIVAQAAKMARAIWAVTAKEQDYQQGFKSVRPIAA

SEQ ID NO: 402042 - protein, 452 aa, unidentified
MPRARKTKVQRVQPVINPHAAGADIGAREIYAAIPVELDEHPVRRFDTFTEDLQKLVAWLKERGITTLAMEATSVYWIPLAELLEAAGIEVCLVNPRHVKNVPGRKTDVVDCQWLQYLHAVGLLRAAFRPPAHVRAVRALWRHRDALVRHSAWHIQHMHKALDQMNLQIHHVIADITGKSGTAIIESILDGRRDPASLAELGDKRLRASKVTLRAALTGDYREEHLFCLRQAYAGYQFVVQQITEVDTQLEAKLAALAAAPQPATTQSTTKPRPSASNRGQPAYDAGKLIARTLGVDLTTIPGINVITAQTLWAELGSDLSAFKSGKHFASWLSLCPDNRVSGGKVLSTHTKPSANRAARALRLAAQGLHHAKNELGDFYRRMRAKLGGAAALVATAHKLARIIYAVITSHQPYKPELHAQAEQRRLARSLKQLRSKAKMLGFELTSIQQTA

SEQ ID NO: 402043 - protein, 370 aa, unidentified
MSVRRILAKTIDTDLEYEAIGIDLAKNCVSAALITTEGEVVGIDRLDYSELEKSAQVLSPTTFVMEPCTEMNYLVQKLEAWGHRCLVIGGKNVQNYVENHYSGQKTDLNDAQALAFLAQDKQLRTIKAKDIEQQKYASLTTLREQYIKQYRQTIVSLKGICQAWGLNISKGISGKAQLKDLIENHAAFPEELRESLVDMVTHAQTTQKVLNKITKTLEVLAKNDKVCQLIQTIPGLGTICSCRLRATIGDIKRFKNPKDFPAYYGLVPRSIATGHNEKKGKITHRGDRTMRSLMVQGAGSVINMATKGKLKSKQLTKWILKKQKENMPWGKLVCAVAAKLLRIVRAVLISSKPYNPKIAGVAKCSLPKGS

SEQ ID NO: 402044 - protein, 431 aa, unidentified
MNYNQNHKIAQITPKTLVIGIDIAKHHHVARAQDFRGMELGSTCFFDNTQEGFRTFIKWINQIKETSGMDSVITGMEPTGHYWLNLAHILKEEQIKFVTVNPLHVKHSKELDDNSPTKNDVKDAKVIAQLVKDGRYAEPTIPQGVFAELRVAKKLRDLLTVDLQIVQGQMHNWIDRFFPEFFTVFKSWEGKAALHLLKLEALPHELSEYTDEELLDYLRQAVKRSIGIKKICALKEAANRSIGIRQGSMMARMELRTLIQKYELIQAKFEELDQTLDTLLQDIPGVDQMLDITGIGRDTVAGFFAEVGDLSEYNHPRQITKLAGLSLKENTSGKHKGRTRITKRGRKKLRALLFRASMILVAKNKAFKALHHYYTTRPDNPLKKMQSLIALCNKLIRILFSIGKKQFVFQEEKMLKDIPHMHAFIQEPMAA

SEQ ID NO: 402045 - protein, 354 aa, unidentified
MKFYTKTHQHYCGIDLHTKNLYVCILDHEGEVLIHKNIKANPKALMTLIKPFLDGLVIGVECMFSWYWVADFCEDNKIAFVLGHALYMKAIHGGKAKNDKIDSLKIATLLRGGMFPEAYVYPRTMRATRDLMRRRMHMMRFRAELLAHIQNTNSQYNLPEIGKNLRYAFNREGIAERFAHPSTQKSVELDLNLIGLFDQQLSKVEWHIKKHATACDYQSLMLLKSVPGIGHILSLVILYEIHDIKRFPRVQDFISYCRLVKCRKESAGKSYGTTGAKIGNAYLKWAFSEAAVLFLRKNPEGQAWVEKMANKHNKAKALSILAQKLARAVYFMLSRNTPFNKAQFFNLQGNGQVG

SEQ ID NO: 402046 - protein, 412 aa, unidentified
MWRDPLGTEASVPSGTRPWFLMVLEEVPMAIVGGLDLHRKQITFDVLDTVSGEVRRGRISPADRQLFRGWLAGWAGQHVELAVEGCTGWRFVIEECQAAGVVAHLAEPAEVAGLRGRRRHAKTDRIDSRHLRDLLLQGRLPECWIPPQLVLETRAKVRLYKDLADQRTGWQQRMHATLYHLGAPAQRDLLAGDRDRLTRIEGLSPAARQAITVALAMIEALDAQIGPLRAELIGFARRQPGCRAIAAEYGIGALTSVVIWSEMGDARRFAHSRDAVRHAGLDITVYSSDGKRSPGRLSRQGSPLLRWALYEAARCSARTASPDHDYYRQVADRLGGQRAALSVARKLARRCHHRLRALGDHALPTVLTGPGGLSGQPAHRSASCPPTLMRHGAAGSGEGTAANPLGWTASKD

SEQ ID NO: 402047 - protein, 313 aa, unidentified
MKQSFVGIDVSKNMLDVHVLPEGVSYSFAYEPQKVKALIRKLKQLKPALIVMEATGGYEISLAVQLSAAKLNMAVVNPRQVRDYARAIGKLAKTDKVDAYVIARFAQDVKPEAREQLTLKELQLKELVMRRQQLIDMRTAEKNRLTRAYTPQVLQEMQEHISDLNSRIKAIDEQLHNDIKGNPSWNQKLEIIASVPGIGDNTAHSILFCLPELGKLNRRQIAALVGVAPMNRDSGMMRGKRSIVGGRAVVRKVLHMPTLSAVTRWNKRLKTFYCHLRDQGKKHSVALTACMRKLVIMLNVMVKNNKVYDPKYC

SEQ ID NO: 402048 - protein, 350 aa, unidentified
MTTPRMALPKLTIGLDLGDRYTQLCALDARGQIRATERLRTTPAALERPIAAVPRCRIVLEVGTHSPWVSRLLQRLGHEVLVANARQLRLIYGSDRKSDRVDAETLARLGRLDPALLKPIHHRGPEGQAALAQLRARDALVRTRTLLINHVRGAVKAWGARLPASSAPAFATTAAGGVPLELRRALGPLLELIATLTHEIRGMERQLERLAQEQYPETARLRQPSGVGLLTALCYVLTLEDPGRFHQSRAVGPYLGLCPRRDQSGGRDAQLRITKRGEAMLRRLLVSGAQYILGPFGPDTDLRRWGLRLAARGGKNAQKRAVVAVARQLATLLHRLWVSGAAYQPLRAAA

SEQ ID NO: 402049 - protein, 338 aa, unidentified
MFYVGLDIHVKYTTVCVLDNDGKVFKRCTTRNNEQLIETLTKLRGQFSVCFEASTGYGRYFELLSKHAARVVVAHAGHLRLIFRSKQKNDRNDAEKLAYLLFIDQVPPVHVPSADVRAWREMITFRRKTVEKRTRAKNGIRGQLRSLGIHAPSKPGLWTQCGMTWLKQLDLDNLLQSVKRNMLIAEIEHLSELIAEIEKALDRQAANSAAVTVLRSIPGIGPRTSEAVTAFMDDPRRFANSKRVGAYFGLVPSQDQSGSKNRLGHITREGSPTVRHLLTEAVWQATRRSPTVKAFFERIHRGEKDRRKIAIVATAHYLIRVMWSMLKSGELWRESVEA

SEQ ID NO: 402050 - protein, 397 aa, unidentified
MYYIGIDIAKFKHYASIIDQTGKTLTKPISFQNHTEGGNKLLDWIHQYVDTPTDVLIGMEATGHYWLALYSFLLEKGFSVIVLNPLQTNAWRKGTEIRKRKTDSIDATLIADVIRFGRFTETPLANETMLALKQLSRFRSSLVHSVSDLKRKAIVVLDQTFPEYHTVFSDIFGKTSAEVLMEYTTPSDFEHVSVDQLTEMMEKASRKKIGENKAKHLLQIASQSFGVTFCKDAFSFQLKMLLEQIKFIEEQIKHCEQQMGEYLVELNTPITTIPGIGSILGATILSEIGDIHRFDKPAKLVAYAGIDASISQSGQYEASKSSMSKRGSSHLRRALFQAAISGYRSDPVLKAFYEKKRAQGKHYYVCIGAVARKLCYIIYAVLKNNKPYEIPHHTPER

SEQ ID NO: 402051 - protein, 347 aa, unidentified
MLHAGLDLSRRRIDFCLLSESGEQIDQLAAAPDVDALRSLARRIDERYGEPVCGVVESMTGARLVHDTLEQEGWDVEIADAQRVKGLAPLACKTDKIDSQVLAVLSQRDLVPAIWLPDPRIREERELARFRLHLVKHKSALKNRVHSSLINFGKPCPVTDLFGVEGRKLLARLHVPQPWRANITASVELIDYLEGQIAEINRRLRDGHAEHPYIPLLLSAPGIGWVLAFTIAAEIGQIERFPSPEKLAGYTGLCPRVNQSGDKDRRGPLTKHGPTYLRWALLEATMHALKHPAYAERYQRNKRRLGKQRGAKVAQIDIARRLTHAIWHMLTRNQQFAPRGAAGRLAA

SEQ ID NO: 402052 - protein, 420 aa, unidentified
MPNIEIGVDSMVKENFIYVGIDLHKETHTAVMIDCYNQKLGEITFPNRPADFPKLVTKVKKCNTDGKEVVYGLENAYGYGRALVVWLIDKGYLVKDVNTAISHRQAKHRGAMYRKSDSDDAEAIALATLNMLDKLPDACPNDAYWSLGQLVHRRDNIMKQRTRLVNQLHEQLCIAYPSYKQFFNDISRPTALYFWEHYPSRKYLKGKSVEDLRTELVPVSHNKCSTKTCEKILDAVASDKVKNNAYQDARDMVTLSIVSDLQHYDSQLAEVDKMLEQMYKMLGCTLTTIPGVNVITAVKILAEIGDIKRFSNANKLAQFAGIAPLHLSSSGKGKDVATKQGNRRLQATIYFLAIQMVQVSSKETPRNPVVRACYEKRKAEGKTSQQALICISRRLISIIYGMLKHGTEYRMPVVESAGEK

SEQ ID NO: 402053 - protein, 366 aa, unidentified
MNYIFVGCDSHDKTLVNKIALNREAAERKGFAATRAGRRRMVEYLKERSRKAGGAKVVVAYEASGNGFILCDELKVAEFECHVLAPTKIERSMKQRRNKNDDRDADRLLEILRGHYLAGNKIPSVWIPDLQTRDDREPVRGRQDLSQKQTTVKTQIQMLVKRHGIEKPDGMGSSWSRPYRRWLKALAEDAHQGWGKQKALGSLLRQLEFLESEIEQLDEAMAELAETPRWKPIVQAMRKEKGVGLMTALKYGTDIADFSRFRRGRQVGAYYGLVPSSHESGENGDRKGHITREGSPWGRQVLCQSAWSRVRHDEHEREVYRRLAVKNPKKKKIALVACMRRLAVRLWHVGLQAQLQMNARKPGGNE

SEQ ID NO: 402054 - protein, 344 aa, unidentified
MEYFVGLDVSLRSCALCIVDTKGNVLLERELGCEVDDIAECLSEFEFPIERVGLEAGTMSQHLYFGLQAAGFDVVCMEARHVNAALSAMRNKTDKNDARGIAHVLRTGWFSPVHMKSREAHGLRALLSTRKALLKKTMDLANETRGLLKIFGIRLPKSVSHGSFDGIVRPIIEMDDVLAHALVPLLDARVALYQQYLELDRRVKRAASHDEVCLRLMTVPGVGPIAALTFKAAVDDPTRFKKSRTVGAHFGLTPRRFQSGEHDNPGRISKAGDRDVRAALYAAGNALLMRSMVQSQIKSWGMRLMRTKGRRRAVVAVARKLAVLLHRMWIDGTEFRQDQVGGTA

SEQ ID NO: 402055 - protein, 370 aa, unidentified
MKKNSKNSKSPTRSTKTKLRKTDPVTIGMDLGDKTSRYCVLNAAGEVQLEGSCATTKAGMAQVFGAMPHCRMAIEVGAHSPWVSRTLKRLGHEVIVANARQVKLISQSSRKNDKLDAQMLARLARVDPALLRPIRHRSEEAQKDLMTIRIRAALVESRTGLVNAARGLAKSTGERLAACDADQMEVEKLEQLPADLRETLKLLVEEVESLTEKIKECDRKIEQIARDRYPETKLLRQVSGVGPLIALTYILTIEDKQRFPKSRDVGCYVGLRPKQNESGERQPELRITKEGDVYLRKLLVQGAHCIMAKRAPDTDLKRWGTKLAGRGGKNARKRAIVAVARKLAILLHRLWATGEVYEPLRNSQARAKAA

SEQ ID NO: 402056 - protein, 362 aa, unidentified
MRIIGCDLHARQQTLAMLDTTTGEVVEVTLKHEGDNVREFYSSLPRPVRVGIEATGSMQWFVNLMEELGIECLVGHPATIRAAEPRKQKNDRRDAELILKLLVENRFPTIWMPTKELLDLRALLRHRHQWVRMRTRIQNALQSIALANGLRRGPALWSHDGQSRIAALPLAPHTAYRRSELQAMYEKFQAEIEKLNQRVEEQVSKRPGARLLMSHPGVGPITALATEVFLGDPARFADSKALASYVGMIPREYSSGGRQRLGGLSKQGNPLLRFLWGEAGAHAARKDPELQRFYRRKLGQKGLGKASVAVARKLGIRLWIMLRDQIEYHEFCRRGQKQQKSSDACAGMPETRYGAKSHRPID

SEQ ID NO: 402057 - protein, 410 aa, unidentified
MERMWDRVAGLDVHRDWVVGCVRVVVRKERTVAKQKFKTTSKGLAELAVWLIEANVNLVVMEATGVYWKPVYYALEGSGPELWLVNAHHVKNVPGRKTDLADAEWLADVAAHGMVRPSLVPPPPIRELRELTRYRKTQADERGREVQRLEKLLQDAGIKLTSVASEVWSKSSLNMLEALIAGERDPKVLAEMAQSTMRPKIPALTEALAGHFGAHHAVVARRIIDHVVFLDRAISELSTAIAERAAPSAAAVELLCTIPGVKSNTAQVFIAETGGDMSRFPTAGHLAAWAGVAPANHESAGKHRAAGSRQGSRWLRRALVESAWAASRTKNSYLGAQYRRLARRRGPNKAIIAVAHSIIVAAWNMLNNGTPYEDLGADWFDKHSDADAETRRLVHRLEALGHSVNLIPAA

SEQ ID NO: 402058 - protein, 350 aa, unidentified
MSQNLNSAVAVIGIDIGKNSFHVVGLDDRGAIVLRQKWSRGQIEARLANMPACLIGMEACVGAHHLSRKLKALGHDARLMPAKYVRPYSKGQKNDFRDAEAIAEAVQRPTMKFVATKTADQLDLQALHRVRERLVSQRTGIINQIRAFLLERGIAVRQGQRFLRAELPRILAAPPEVLSARMVRVISDLAEDWRRLDQRIDYLSSEIAVLARQDAGCERLMSVPGIGPIISSAMVAAIGTGDAFAKGRDFAAWLGLVPKQISTGDRTILGKISKRGNRYLRVLFVQAAWAVLIKPMSWERHGLKHWIEAARKRLHRNVLAIALANKLARIAWGVLAGSGRTFEASKLQAA

SEQ ID NO: 402059 - protein, 311 aa, unidentified
MSQEKYIGMDVHQATISVAVMDARGKLIMECLLETKAATILEFIQGLRGTLALTFEEGTSAAWLHDLLKPHVSRLVVCDPRKNALLKDGNKSDRVDARKLAELLRTHQVKPVYHGKHGTRALKELGRSYLTITKDVTRVMNRIKSVYRSWAIPCAGTSVYTPRHRAEWLAKLVEPGVRIRAEHLYQQLDSLQPVRLEARHELLLESRKHAAVKLLRQIPSIGPIRAALLVALLQTPHRFRTKRQLWAYSGFAVEIHDSGEYRWVRGKLQRNRERITVRGLNDNHNKDVKSLCSKVLPYLPAHAPAPCRIFM

SEQ ID NO: 402060 - protein, 419 aa, unidentified
MSFKILKFNCCGLDVHKTWIYACIGITDSNNRTEYKQARFSSFTKGLNELCDWLAKYNCKDVCMESTGKYWIPVFNILEQHNLWVTLSHPKYTKPMKGNKTDRKDAKWICDLYMCGMVKPSFIPPADIRELRDLVRYRFKLTCMITGEKNRAQNCLTVSNLKLDDVFSDVFGKSSRSITEQILKHPGETFDVTPFVDGRCKTPIEKIQAAVDGAISKEQAVKLRQCLDHIDELNKHISEVEQEILRLSDKYEIALNLIRTVPGFNKNPLTAIQVLSEIGGDMSVFPTAKHLVSWAGCCPRNDQSNQKIKSTRISRAGSYFKPVLVQVANALIKSKKHLEFTNRYKRIKARRGHKKAIIAICRMILTAIWHILSDLKPYTPEGFLESRPVKEEKVLSISQALNLLKQRGYIIKEEPLSVS

SEQ ID NO: 402061 - protein, 449 aa, unidentified
MSDKSRRLGLPVVHEFAAGIDIGSRFHVVAVAPELTSEAVQTFQVYTCELHQMAQWLLELGITTVAMESTGVYWVPVYEILEERGLEVVLVNPRESRTVPGRKTDVNDAQWLQRLHACGLLQASFRPGREIAALRAYLRLRERHLDYAAAHIQHMQKALTFMNMQLQNVVSDITGATGMKIIRAIVAGEPDPVKLAKLRDVRCQASEETLEASLRGNNQPEHVFALAQALALYDFYQERIHECDIEIERSLAALNQDKPMPEAPLPKTRQTRQPNAIAFDVRASLYQLIGSDLTQIHGIGPYLALRLVSECGTDLSRWPSAKHFTSWLRLSPGSKKSGGKVLSAHTGKTTNRVTAHLRRAAVAVGRTNTALGAFYRRLAARVGKAKAVTATARKIAVLFYNAVRYGMAYRDPGAEHYEQQYRQRVVKNLHRKAAEFGFTLQPVDKDYVS

SEQ ID NO: 402062 - protein, 429 aa, unidentified
MKIIYPRVCGIDVHKKFIVAVICISESVEPIYLKKRFSTFHNDLIRFRDWLIQNDCQNVCMESTGKYYIPVYNVLESHISNIVVANPKWVCAVKGEKDDDKDAKWIADLFKFGIVRSSFIPQKDFRILRELTRYKYKLVNMRSSEKNRYQNALTSGNCKLDMVFTDVFGKSASNIIDLILSDNPYTDEDILSKVHKNCKASPDMILNSINGTDLTPVQKSRIELVNDHIKQLSSNIQRLDKLIDLMIEPYEDYISFLCQIPGVSRNSAIIILSEIGVDMNQFTSSRRITSWAGLTPSSNQSAGKKKSVRISRAGVYLKPCLVEVAHAAVKDKNHSYYANKFNKISKRRGKKRAYIAIARKILVAAYHMLLTGEIWNPADLAEVETPVEQRIKYVKNNLKSDIKQLLDIGLTVEELTLMIQQNANTMTAQ

SEQ ID NO: 402063 - protein, 316 aa, unidentified
MENPQPFVGIDVSSQRLDVDTVPVSQPFSEPNNEDGIASLTAHLKALNPQIVLLEASGGYEIPVAYALYEAGLPVVITNPKAVRYFAKAIGRLAKTDKLDAQVLALYAQMVHPPVQPLRDQEQLELANLMTRRRQLQGMIVMEENRRRTCTPKVRGNIDLSLAHLRRLLKDLDREIHDSIRRTPLWHENSKILQSFTGVGPKVSASLIANMPELGLLPANKASALAGLAPMNRDSGQYRGQRKIQGGRPAVRRALYMAALVASRYNPVIREFYQRLRLAGKPPKVALTACMRKLLVILNAMLKNRTYWNPQLPLAA

SEQ ID NO: 402064 - protein, 360 aa, unidentified
MNLSFDDSGCVSPHTRKVKTMNENAVSTDAVVGIDVAKQKVDLYAVNNGKGKSKVFDNTHAGHKDTQNWLRERGFVPAQTHVCMEATGPYSESLATALVSGGWKVSVVNPARIKGFAQGELVRNKTDRADAALLARFCAAMKPSLWEPPPTAFRQLRGWVDRLQALKDMRQQEMNRIEALEASEQPDVLAHVNTHVIWLDNEIAKLARDIDDHIDRHPELKADAELIASIPGVGKTTVAKVLAYAGDVRRFDSAKALAAFIGLSPRQRQSGTSVRGRTMMSRAGHKALRHALYMPGLVARRHNKALKIFGDRLSAAGLAPKAVIGAVMRKLAHFIYGVIKSGKPFDLKKAMPTLDFQDGN

SEQ ID NO: 402065 - protein, 348 aa, unidentified
MRFYNQPHRFYAGVDLHARSMFTHILDERGQTVFERDLPAGPDAFLDAVAPFRDGLVVGCECMFAWYWLADLCEDQAIPFVLGHALAMKAIHGGKTKTDKIDARKLAGLLRGGLFPMAYVYPRAKRQTRDLLRRRSFFVRQRAQLIAHIVNTNSQFNRPPLPKKLTYAANRTADLADRFDDPSTRLSVTADLNLIAAYDGQIAELERHLIKHAKVDDPVTFGLLRTVPGIGPILGLILLYEIDQVRRFPEAGNLLSYSRLVRCPHASAGKVKGSGGQKIGNAHLKWAFSEAACLMVRSSAPVKAWLARQEKKKGKKKALAVLEAKIGRAVYHLWRKQVPFDGQRFLAS

SEQ ID NO: 402066 - protein, 388 aa, unidentified
MLQSNDLSRSFTTLNQDNTLIVVIEMSLSSWLVAGIVPGVERQPLKKLEPDEDQLLKLMNRWRHEALQAGHAIERVVVAYEAGRDGFWLARWLRERGVEAYVMHSSSIAVSREHRRAKTDRLDTELLMRAFLGWLRGERRHCSMAAIPTIEEEDAKRPNREHEKLVGDRTRIVNRMKSTLSRFGIRGFKPTLRKADEKLGELRTAEGTLLPENTRAELRRDMTRLRIVREQLKEIEQQRLRKLEAAAPAKKDPHAMVGLIARVTGIGIETADMLVNEILSRHLRDSKAVARYAGLTGSPDESGKRRREKGLARAGNARVRRGMIQLAWRFLRFQKDSVLAQWFRARAADGRSGTRKTMIVALARKLLIALWRMTTTGEIPEGVILRVA

SEQ ID NO: 402067 - protein, 351 aa, unidentified
MNLHAIGIDLGKTVFHLVGLSHAGEVVVRKKFSRTQLLRFTANVQVDLIGMEACAGSHFLGKALREQGHEVRLMPAQYVKPFVKTNKNDFIDAEAIAEAVSRPSMRFVPIKTDEQLDMQSLHRVRERWIMRRTAVVNQIRGLLLERGITVRTGRCHLDAALPNILEDGSTPLSGTLRCLLVELKRELEQLAGHIEQAEALIQRAAQQSEACQRLDAIPGIGPLTATALIAAIGNGEAFRKGRDLAAWMGLVPREHSTGGKQKLLGISKRGNGYLRKLFVQGARAVLQFREMQSPGLRKWLEELSARTHYNVVGVALANKLARIAWAVLARGEAYRPPVLADSLTGLQMEPV

SEQ ID NO: 402068 - protein, 330 aa, unidentified
MNKDTNYFGIDISKDVFDVMDQKGIHYQFTNTQKGFKDFLKTLSKKSHCVMEATGYYHYQLAYFLVDNSIKTSVENPLSVKRFIQMKLSKIKTDKSDAKMICEYAQSVTLKLWKGESKDQQECLQLIRMLSVYSKQGTMLKNKIHGESTLGNTNTLVVKSIKRSLKSIKKEVDLLENKLQEIVKESHQDLLTLLESISGLGRKTSLMLIVLTDGFNRFESASALCSYAGLTPTIRQSGSSIKGRPRISKMGNPKLRNLLFMCSFTACKHNKACKAIYDRIVAKGKSKKLALIAVCNKLLKQAFAVAKSGLPYDENYRSTLGKINEVLLVF

SEQ ID NO: 402069 - protein, 376 aa, unidentified
MSQSTTLYVGLDVHKESITVSYALGGSRDEPTYLGPIGTRQCDVDKVVRRLQSKAKELVFVYEAGPCGYWLYRYLAKKGLACQVVAPSLIPKKPGDRIKNDRRDSLQLARSARSGDLTPVYVPEVEDEAIRDLSRAREDVVKDLKAAKFRLKSFLLRQDIRYSGKANWDAAHLRYLAAVVCPTAAQQIVFQEYLTAVCEHMERLNRLEDQLAEQVKAWRLYPVIEALQALRGVQWTVAVTVVAEVGDLTRFDHPRELMAYLGLVPSEHSSGEKRHQGSITKTGNGHARWALVEGAWGYRYPAKVSPSIRKRVEKVPKSIQDIAWKAQVRLCRRYRQLTSRGKHSNVAVTAIARELAGFMWAIAREVKAMATLQAAA

SEQ ID NO: 402070 - protein, 346 aa, unidentified
MKKIFIGIDFSQEKFDATVIKAEGVEERAEREHGVFDNNVGGFRRLLKWVKSVAEEQDTSLWLFCGENTGGYSKALCNHLYGSGYDMWLENALIIKRSSALQRTKSDKADSGIIAEYAMRNYDQMRLYKPLGKNLERLREVFLYRHNLVKLKASMTTRKGEKKLTQEKSDISRFMAMSSKHLIGEFNKKIAECDMRIEKIISEDEELRRNFEIITSVPGVGTQNAVCLMVYTDNFGRFGYDSRKIACYYGVAPFGRQSGTSVNTPPHVSPFANKLIKALLTQAALASVNFCPQMGIYYHRLVERGKKKPVAINNVKNKLLHVITAMVRKGEMYNPDHDYYAAHKAA

SEQ ID NO: 402071 - protein, 345 aa, unidentified
MELRTIGIDLGKTVFHLVGLNLRGEVVVRKKFSRTQLLRFTANVHVKLVGMEACGGAHFLGRALREQGHAVRLIPAQYVKPYVKTNKSDYIDAEAIAEAVARPTMRFVPIKTDDQLDLQSLHRVRERWVMRRTAVINQIRGLLLERGITLRKGRCHVGAALPGILEDADAKLSGALRMLLAQLKLELDHLDMRIDEADAVIKKTAQENEACQRLVAIPGIGPVTATALIAAIGNGGAFRKGREFAAWMGVVPREHSTGGKQKLLGISKRGNSYLRRLFVQGARAVLQQRTKQSSGLSRWLAQLTSRTHRNVAGVALANKLARMAWAVLAKNEPYRPPVLADVAAA

SEQ ID NO: 402072 - protein, 340 aa, unidentified
MLNSLLFRTIAWVRKPVSTRKENRDMKKFISVGIDVAKDKLDMAVRPSNTWDTIPYDEDGINNIIKVLCKLKPDIITVEATGGLENRLTIALFEASLPVAVVNPRQIRDFAKATGRLAKTDHIDADIIAHFGEAIKPEIRPIKDAQRRELADLLTRRRQLIDMRKAEQQRLSSVVSSVKKNIQSHIKWLNMRIDDIDQDISDLMANNTKFKQKNKIVTSVPGVGPVMSATLEAFLPELGTIGRKQIAALVGVAPFNRDSGRFSGKRIVWGGRANLRSVLYMSTLTAIRCNPVIKKFYNRLIEAGKATKVAITACMRKLLTILNAMVKNKTSWQENIPVSA

SEQ ID NO: 402073 - protein, 289 aa, unidentified
MQTGQTAQTYALFVGVDIAATTAAVATQRPGAKASQSFIIDQTPEGYTSLLHTLQRTGHAPCQVLVVMEATGSYWISLATRLVHEGFGVSVINPAQAHHFAKALLKRAKTDVIDAQTLAQLAMALQPEPWTPPPQIYYALQQRLAQRDDLLNLRQQVRNQLHALVQHPEVIPEVRARMDRLLATFEAQLTEVEREIAAALTQDSAWAAAATRLQSIKGVGWVTAAWTLVTTLNLTSCDTVDSLTAYAGLAPMPRQSGSSVWHRPSIGHTGNGRLRTAFYMATLSAAQPD

SEQ ID NO: 402074 - protein, 358 aa, unidentified
MQSNKKSFKGQKIFVGIDVHAKTWAVETLTESGFTKRHAQEASAKVLFDFLSKNFPDGEYHAVYESGFSGFSTYYQLKEYGIHCVVVHAADVPSTQYEQVMKTDKIDAGKLARALRKGDIKPIYIRERENLDDRAVVRLRKTIQKQLSGYKTRVKHLLHTNGVKLPARFDKPGTHWSRAFMNWLKDEVVLLSSTRLSLDLLVNQVESIRKNLLEATRGMRILAATDKYKANYELLLSIPGIGFNVAMCLLTEIYDFKRFGNENCFAHYLGLVPTCHDTGDKHSTGGKTFRGNKLLGPMIIEACWVAIHKDYGLSQAYCSYKQKMKPQLAIVKVARKMSNIIFSVIKNGKKYEPYKWEE

SEQ ID NO: 402075 - protein, 399 aa, unidentified
MERPIISCDVSKGSSHIRGFIGLSNPVGDPFVVRHIKSELKQIKELANSLEKQTHQKVAFVFEYTGVYHESILAYVLSIGLDAYPISPLESAKVRKSNIRPVKTDSKDCTNIAETFYKREEKHLNKKYVLDQNSVKALSRHRRSLMNELRAVKCTYRRYLDLVWPCLDVYYSKVDGTIIKTIVSKYHHPNVLKRRTSQQIAEILENNGHCSFKRGLTIADKLKDYALDSVSGVSEESEYVNCLAETLNRIIELENKIEETENKMDGLLQKGQLYGLIKSIPGVGEKLSMVISSEIGDYTRFKTAKQLVAYIGLDPHIDQSGDDNGEHRSITRKGNSILRSALYVAVNCMIGQYDNQITKFYYQKKSSGLPHKVAAVATCRKLACTIFGMFTSGVCFETK

SEQ ID NO: 402076 - protein, 343 aa, unidentified
MQIVSVGIDLGKTTFHLVALGVAGKMLVRKKFTQRQLLTYTANMQTSLIGLEACSGAHFLGRALRKQGHDVRLMAAQFVKPFVKSNKNDFVDAEAIAEAVERKNMRFVPIKTDDQLDLQAIHRVRDRLISRRTAVINQVRAFLLERGLVFAKTPAKLRAALPDILKNADLDLTPQMRSLIDLLWKEWKAVEDQIEGLSLELERISAADPGCTRIRQIPGIEPIVATAIVAAIGNGAAFRKGRDFAAWLGVVPRQYSTGGKARLLGISKRGNVYLRKILIHGARAAVLRIKRDRAPIGAWLDALDTRAPKNVVVVAMANKLARIAWAVLSSGEDNRPMGNTVAA

SEQ ID NO: 402077 - protein, 333 aa, unidentified
MNKITLIGIDTAKQVFHLVGVDAHGHYVWRKRLSRRQLLSALAQVECCDVVLEACGASHHWARCIKALGHTVRLIAPQHVKPYRRGQKNDYRDAEAIIAAALSPGMRFVGVKRVEQQTEQALHRVRSRLMSQRNAAANELRGLLGEYGVVFRRGLKPLREGARRFAETEEAHALGLVELVNDVLEEIGVLQGRMDHYERLIEQRVQADETSRRLREELSGVGKLGASALRVKVADVRDFGGGRHFAAYIGLAPGHSGTGGQVHIGHLKRGHDRYLRQLLIHGARSALRHLGDKQDAQSRWLRGLLERRGFNIACVALAHKNARQAWAIMARAQ

SEQ ID NO: 402078 - protein, 421 aa, unidentified
MDKERRWLVGIDWASQEHVVSLYDDAGKKIGQRKFSHGGTGLTDMIAWLLKASGGKPGDIHVGIETPHGPIVEALLERGFNVYSINPKQLDRFRDRFTVSGANDDSRDADVLADSLRTDMRAFRKLSIAEPIVVELREWSRIDEELKVERGRLTNRFRHQLWRYYPQMLELADDVGATWFLDLFEAVPTPEKAANVREKTIARILKNHRIRRFDAVHVLSELRKPALAVAPGTIEAATARIRGLIERIRMINNQLRDAGQQLDRLCKKLSEPVADKDEEPSPGQKTEQRDAAILDSLPGVARTILATLLAEASDTLQRRDYHALRALCGSAPVTRRSGKSRVVLRRFACNQRLRNATYNWAQNAVRWDAISRAKYDALRAKGHGHARALRSVVDRLLNVACAMLNSGTLFDPEFASKRTTG

SEQ ID NO: 402079 - protein, 457 aa, unidentified
MLRVDHGRWEQTVADLRHLALTVSHPRSRERFLALHEIAQGSCATAVAERTGRRAQTVMGWLHAYNEHGPGALTYQRTGGRPPCILPLPALKQSASLSVDGSPQPPRVREPVEKQGAPSTGSKRNPNSRQGRTASPHSQGRVMEQPATTPSFVGIDVSKDRLDVHLRPAGQAFTIARDSKALEQLVTDLRALAPALIVVEATGGFELTVAAALAGAGLPLAVVNPRQIRDFARATGRLAKTDALDAQVIALFAERIRPEPRPLADADSQTLAELVTRRRQVIEMIGMESNRLHQARDLRVQRTIKATLKTLEAQLARLDREINDTVKGSPAWRAADDLLTSVPGVGTITSFTLIADLPELGQLDRRRIAALVGVAPINRDSGQMRGRRTIAGGRTDVRNALYMAALSAIRWNPVISEHYQSLVERGRPKKVALVACMRRLLGILNAIIRTKTPWQCA

SEQ ID NO: 402080 - protein, 351 aa, unidentified
MNGVDEADLVVGVDTHLDTHTAAICDARGRVVSQLQIPATTAGYGQLLAWARSAAGGRPVAWAVEGTRHYGLGLARHLAAQGEHVFEIDCSRHIGKRRAGKSDPIDAVRAARELLARPVPAQMRAGGDREALRLLMIDRDNAVQSCKTARTALAAVLVTAPADLREQIRPLPRERRAQACAALTCPDGADRQTRVLHQALARLGQRIAALAEVAAGLEAQITEIVEDMAPGLVTAEYGLGYLSAAQILLSWSHAGRIRSEQAFAMLSGTAPVPVSSGRTDRHRLNRLGDRQLNRAIHTIAVTRMRCHQPTQAYVQRRRAEGKTDREIRRCIKRYLARHLYRVLNHGSLSNA

SEQ ID NO: 402081 - protein, 361 aa, unidentified
MKKPAQHLIAEVPRRQAKVEITIGIDLGDVWSHYCTLNQDGEVVDCGRFRTTPKAIEKWFTDVAPARVAMEAGTHSIWISAQLQELGHEVIVANVRELRAISHSDRKSDQVDAEKLARYARLDPNILRPIAHRTVEQQQALTLIRARALLVRLRTAAVNAVRGLTKSCGYRMPASATTCFAQRSLAVMPPGLAQALGPVLQQIAEMTVKIKQYDRQIQQLGQTDYPETQALLKVHGVGHLTALAFVLTLGSKERFGRSRDVGCYLGLRPRRSQSGDHDPQLGITHAGNAYLRSLLIECSNHILRPHGRDSALRQWGLRLAARGGKQARSKAVVAVARKLAVLLHHLWSTQATYMPFYEQAA

SEQ ID NO: 402082 - protein, 430 aa, unidentified
MTKPQLTPTQGILVAIDIGKTRNEVLIEIPGQARRRRLTVLNTRADYDRLIDLLSGLGQPVTCAFEATGNYHRPLAWRLLQAGFTVRLISSLALARTREALHNGWDKNDPKDAQVALHMLRIGASQHYHDPLAAGLNDIQEVSKTHEAISQAKTEVLHRILTHHLPLYFPEIGRFRHNSRSDWFFAFLDRFPTPGSITALSKEAFIAAAWGVVGRKVAKERLLGDIYETARASIGLPIPIDAPAVRLFRLVIAEARSLIEQRNALEAMAIELLHESPDYKLLCRIPGVGPITALTILAEAGDLRRFGHHRQFLKFCGLDLATHQSGAFRGQTKLSKYGNARLRRALWLAGQVAIRQKENSFRDKFERYIARDRHNADLRRKALTAITAKMARVVHAIIKSGADYRPFVEGPVPGGRTSLSMGREGATATL

SEQ ID NO: 402083 - protein, 405 aa, unidentified
MARPEEVDVWVGLDVGKEEHFAEVLDDVGERLFARSIANDEAALEALLDRAAENGTAGLVIDQPGSIAQLALAVSRRRGVPVAYVPGLVMRRAADLYPGEAKTDRRDAYVIADTARTKRKQVQWLDATSDELLERLKVLNGFDIDLAADQTRLTNRLRDALTSISPALERALGSRLAHAGVRDLLAKYPTPSALRAAGRARITRALKARSPRLATKVADDVVAALDAQSVTVPAEATIGRVVAELAVELDRLFARRDALAGEVEEVFLAHPFGELLSSMPGVGPRTGSRILAEIGDGSRFENGDKLASYAGLAPVTRQSGKSVNGEYKSRRGNHRLKNAMFLAAFASLRAPESKAFYDRKRAEGKRHNAAIICLARRRCNVILAMLRASRAYNPNHAATDLVDAA

SEQ ID NO: 402084 - protein, 370 aa, unidentified
MGTADRLSLGLGDRLATKIAVPAEMIARTVERSTEAAFTLIWATGADMKKNVEIFVGIDISKAWLDVAVHEQEAAFRTSNDDAGIASLVKRLKKVKPTLIVLEPTGGFEKLVMAELRHARLPAVVVNAKRVRDFARATGRLAKTDELDAKVLAHFAAAVRPPVRDLHSEEEEQLTALLTRRKQVLNMLTMEKNRLLTVRTKMRSEIEAHIHWLSKSLKALDKKIEDFVESSSIWKEKDALLQSVPGVGPVTSATMLGMLPELGQLNRQEIAALVGVAPVNKDSGKKQGRRRVYGGRADVRSVLYMAALAAKKFNPVIRKFYERLIQQGKEKKVALTACMRKLLVILNAMMHSNQPWRTQYASSLILLSLP

SEQ ID NO: 402085 - protein, 363 aa, unidentified
MIVIGTDAHKRSHALAAVDAGTGVVVSELEIKANEDGHRRMLRWARRLADERVWAIEDCRGLTARLEQALLGAGERVARVPPKLMGVSRRGEREPGKSDQIDARAIARAVLREGIDRFPTAFLDERALEIRLLCDHREDLVAERTRIINRLRWHLVDLCPELEASIPSRHLDRPRTLERIARRLRALERSARVRVARELVSRVRELTRRIDELERELAALVRIHRPALLGETGCGPLTAAILIGHTAGAQRFPTDGHFARLAGVAPIPVSSGRRHRHRLHRGGDRQLNKALHIIAITRARLDPETRTYLERKHDEGKTTAEALRCLKRHLARRFHRLLALPPDTRPPRDRISGAAPNTMPCLT

SEQ ID NO: 402086 - protein, 416 aa, unidentified
MTQSALYVGIDVARDSLCAAFLNEEARTVRPPATYDNDPEGWTALRAAIVAAAVLVGHEVRVVCGMESTSNMHKGVERALRSESRRTLEVHVLNPMTVKHFARALLTSAKTDRLDSHLIALFLLRMQPRPTAQMPELFEEFKEATRTRRRLVEERTREKNRLHKLLRQHFPGSRKALGPNLSRRLLIVLARYPSPHALLECALEDLADIRYGRARRVGLEFAGQLHAVAAQAPRLELPRVSQMLIQTTAARVMELTDQLAKFDAAIGDMLGEVWPDQVLTSIPGIGPTSAAAILAEVADIGRFKSKTEFVGYCGLYPVVWESGEAKRRYRMTHKGNRMLKMTLLVASASARQYNPAISIYYERLRARDKSKKAAGGAIARKMAEIVFTLLARNEPWSEEKATRGIEKAEAMLSRVA

SEQ ID NO: 402087 - protein, 416 aa, unidentified
MPNTLIVGIDVSSLSLVVRFMDQDGCGPFKSFTISNDLEGADKLTADVIAYASKIDASQIKIGMESTSNYAWHLHLYLASSPELIPFNPLFYVLNPSIVKGFKKTYTHLPKTDDIDSFVIADCIRFGRVKSTPLPDFRYAALQRLTRFRYHLIQNITKEKNRTMNLIYLKFSSYVTDNPFSNTFGKASTSLIEKFTPDEIAQMPVEDIVSFICEEGNNRLKDPVEIAKKLKTLAGRAYRLNPKMSDSVDITLTMSLENVRFLEMQLKKLDKEISQQLDAFSQTLSTIPGIGPVISAGIIAEVGDAKRFTGEAALAKFSGLVWNKYQSGNFDAEDTSLAKCGNFYLRYYLVEAANLLRMHVDEYNAFYQKKYKEVSKHQHKRALVLTARKFVRLVFALLNKGQVYQPGGGMPNNKCK

SEQ ID NO: 402088 - protein, 351 aa, unidentified
MIIVGVDYHPSVQQVAFLDTETGETGERRLNHSDGEAERFYRDLQRRQVKVLVGIEATGHARWFERLLAELKFELWIGDPARIKAARVRKQKTDRQDAQLLLRLLVEDRFPRIWVPSPENRDLRQLIWHRHRLVQMRTRAMNQIQAAAMNEGVRRKKTLWSKTGRRQLEALPLARWATRRRQDLLELVDRLNTTIDELTAAAEQEARKRPEVLRLMTHPGVGPITALAFVLVLGSPDRFGCGHQIGSYLGLIPCEDSSADRQRLGHITKQGSSLLRFLLVEAAQAAVRWHPDWRRRFVHLAMRRDRRIAKVAMARKLAVSLYWMWRKGFDYPQTLQFGSHAGEPGYVHGVK

SEQ ID NO: 402089 - protein, 421 aa, unidentified
MKNTAAWKRKQVPEGYLIIGVDPHKKKHAAVAITQDFTIRDRFKFDNTREGLEFLLRRVRAEMVKSDCRGVMFAIETGGHYWRNVAYYLDEKGIPFRFINQYTLKRRREGKDLNRRKNDYRDSEVAAQLLCTGEFVESTIPQGVYAELRTAHNAYRRLVKERTRIINLVKGLLDGLFPEFTQVFKDPCGLTALSMLSTCSIPGVIARMTEDEFVATIEAKHWGWLMRKKLMALHYAARSSIGIAAGAKSLSSEISFLVEKIELIRGHICSIERTLVRLVDETEEGKYLLSIRGLNYIAVAGLLAELGCFKSYRSAKQMIKMAGSNPTESESAGKKKSRTPMSKQGRPVLRYCAWTSVIPMLRFNSDFRAWAKQRRERPAHANPLGGREIVGAALNRLLRLSFALVKNRTYYRSPQLVQVTG

SEQ ID NO: 402090 - protein, 371 aa, unidentified
MTSIVQIGMDVHKNNFTVCCFDIESEQVKYTVTLEPDYRQIIKYIQNVRKRYPEGTEFECGYEAGCLGYFLYNDLTSHGVKCTILAPTTMSEHDNKIIKTDKRDAANIAKCLAYHTYKKVYVLDDEDNSVKEYIRMRDDHSKEWKRIKQQILALCLRNGSVYRDGDHWTLKHITWLNHLTFKNAVLQETFEEYLSTFNYLKDKLERLDKRIEEFSQKEKYIEKVKRLSCLLGIKEHTALSLVVEVGDYNRFPKAKSFSAFLGLVPGEHTSDKNRNILSITKAGNTHLRRLLVEAAQCYPKGKIGYKSAALKKRQQGNPPKVIAYADKANERLRRKAYHLILGEKKKRNIAVVAIARELACFVWGMMTDHVD

SEQ ID NO: 402091 - protein, 439 aa, unidentified
MNFTQNEKISQVSEETLVIGIDIASETHYARAFDWRGIELWPENTSIIRKSHAKIALDFKNDEEGFEKFSTWTLKLMNTHKKTNVIVGIEPTGHYWFNLAEFLKKAGMKLVLVNPFHVKCSKELDDNIQTKTDQKDPKTIAGLVKEGRYLEPYIPESIYAELRELSNYRNRLLKDMNSVKNQIHKWLDTFFPEFKKVFRDLTVKSSIAVLKQAPLPCDVRNLGVEGINNIWRELQLRAAGIKRATSLCAAAEHTVGVTEGIDSARMTIAMIIENYERIKSNMETIEARMTSICYQIPAVEKLEKIKGVGIITIACFLAEVGDMSRFESPKQIQKLAGLALKECSSGKNKGRTIISKRGRPLLRKLLFQVAISLVANSSEFAELHHYYITREVNPLKKKQSIIAISCKFIRVLFAILKNNVEYDPDKMMNDIKRYSLKTA

SEQ ID NO: 402092 - protein, 374 aa, unidentified
MDTIYIGVDFHARQQTICYLKTETGELVTCELKHQDKQKVRAFYAEFRGQVIVGLEASGYSPWFERLLEELGCVVWLGHATEIRRRARWRQKNDRRDAELILDLMLHDEFPRLHRPAVQSREVLRMLRYRQKLIKIRTMSKNSLQALALQAGLARGSGLFTKDGKQQLSTAEMSPVMHWQREHWLQLLQPLNQQLLETMSWFKAQSKGDICITRLRTHPGIGLLTSLCIVHTLQPVSRFRNQRKVAAYAGFDPVERSSAERKCFLGISKAGSRVLRYLLVEAAHTAIRKDEDLKRFYKRLAERRGRPKAKVAAARKLLIRAYIMLRDEIDYAEFRRRAVAARLARRGQRPNMPEVLIGQPASAECQEPAHYSEK

SEQ ID NO: 402093 - protein, 346 aa, unidentified
MKKIFIGIDFSKEKFDATVIKAEGVEERAARQHEQFDNKVSGFRRLLKWVRSVVDEHDTALWLFCGENTGGYSKPLCNFLYGSGYDMWLENALSIKRSYALQRVKSDKADSGIIAEYAMRNYDQMRLYEPLSKNLERLREVFLYRHYLVRHKASLMVRKGEKQLTQEKSDISRFMVMSSKHLISEFGKKIAECDKRIQQIIAEDEELQRNFEVITSIPGVGMQNAVCLMVYTDNFKRFDNDSRKIACYYGVAPFGRQSGTSVNTPAHVSPFANKLIKSLLTQAARASVNFCPQMAIYYNRMVEAGKKKPVAINNVKNKLLHVIMAMVRKGEKYNPDYDYHAAIEAA

SEQ ID NO: 402094 - protein, 355 aa, unidentified
MDNLRYIGLDVHRDTISAAVLNREGQLIMQSVVPTRAPAILDLLDGIRGTLHVTFEEGIHSAWLYDLLQRRVARVLVCDPRKTSLLKSGNKGDLIDARKLAELLRNDALSPVYHGELSSLEVQRRTRSYTMLTEDTTRIMSRVKAVLRGLAIPYHGKSIYRPDRRESYLAQLPTEGLRQRVELLYQELDAVHRLRLRAKREMLAECRKHPAMKWLQSVPFLGKVRTAVLIGRVQTPHRFRTKRQFWSYCGFALETHDSAQYHVLHGQVERKPRFVQVRGLNWNHNHDLKDVFKSAATMAAVREGVFRDYYCGLLAKGIRPEMARLTLARKIAAITLKIWKEGGTFNAEQVKPQAA

SEQ ID NO: 402095 - protein, 375 aa, unidentified
MKEKVRFLGMDVHAETIAVAIAEPDGEVRSLGTIANRAESIRKLVKKLGPVDQLKACYEAGPTGYVLYWQLVKLGVECEVIAPTLAPIKAGDRVKTDRRDAERLARSYRSGDLTAVWVPNEGSEALRDLVRAREAAKQDQLRARHRLSKFLLRSGQRPAMGVKAWTQPYMAWVRQLRFTQIAQEFTRLDYLHEVEHMGERIKRLEQAIAEAVKLASPELREVIKGLQALRGVAQISAVTIAAELGNMSRFEGARQLMGYSGAVPSEDSSGQRTRRGSITKTGNAHLRRIAIEAAWSYRLRPGVGPALRKRQEGLPDEIKEIAWKAQHRLHRRYLSLVAAGKDQRKIITAVGRELLGFIWAIGVRAEAAVRQPIAA

SEQ ID NO: 402096 - protein, 428 aa, unidentified
MIFAGLDLHKKEVEAVVLDQDGRILHRSRFPATRAALETFATTHLSPDATVAVEATTNTWPVAAILQPLVHKVVVSNPLRTKAIASAKIKTDKVDALVLAQLLRTGWLPEVWIPGEETRLMRQRSTERAMLSADRTRIKNRIHSVLHQRLIEAPAGDLFSRKNLAWLKDLALDPFGRDCLDRHLRQLERVERELEALTAQIAVHAHRTPAVQLLMTLPGVDFTVAETILAALGDLSRFETPDKAASYLGLVPSTRQSGEHCYHGPITKQGARHARWLLVQAAQHAALHPGPLGAFFRRIAKRKNRNVAVVAVAHKLVVLAWHMLKNNEPYRYAQPRTVEAKLSRLRIQATGRKRKGGIAKGQPRPPQYGGGRTKAIPGLDDLCAREGLPPLSKAKPGERTMLARQGLAAYAAAVRVPKRVPRGAKSEA

SEQ ID NO: 402097 - protein, 519 aa, unidentified
MAVRQPKTRSPRTPSRQTRVPPDPAQAKAKKAQAQANAAARAAATAEVRRAGRHAEQIRQEAEECAKLASLPVKHEHAAGIDVGDASHWVCVESTPDGSDTVREFPAHTPGLRQLVAWLQFCAVTTVALEASGVYGHVLFLTLLEAGFQTVVTAPQFARQIKGRPKTDRRDCQWIQRLHKHGLLPGVFQPDEATHTLRDYVRQRANHVRLSGQHIQRMQKALELMNLKLTKVLGDVTGVTGLKIIRAIVKGQRDPQVLAQLRDRRCKHSEQEIAEALDGRYRPEHVLELKLCLTMWEQYQKVIAQLDQAIAQQLRKMRAKSDLPPLEPKPRVRGRKPHDPGFDVRTALYYLTGVDLTAIEGIDEIHALTLVSELGTDFSKWPTVKHFSSWLGLCPNWKKTGGKVKSSKTRKGKNRAATALRLAAWSLMRSHSYLGAYLRRQRARLGAPKAITATAHKLARILYNLLRYGVAYMKQEEAAYAEQVRQRQEKQLQRRAKELGYVLTKLEPAAEGPADTPSA

SEQ ID NO: 402098 - protein, 342 aa, unidentified
MSHFIAERTTVERTLFVGLDYHQNCVQVCIMDHTGQVLANGTCGNDAAEIVERVTRFGDRVEAAIEACTGAAALADELTAVGWSVSQAHAAYVARLKQSPDKTDWQDARLLADLMRVGYLPRVWTAPPMIRELRRLVRYRQSLVKERRAIKLRIRSVLRELRLRATVEAWTKAWLNWLRNMAPLPEQARWIVEQQLRRLSVLDEDVRQVECRLEQLTAVDCVVQMLREQKGIGLVTAVTLRAEIGRADRFRSGKQLARFCGLSPQNASSGTRQADAGLIKAGNNELRAVLIEAAHRLRNFDERWRLFAQRLRTEGKANNVITAAIANRWIRGLYHPWKLLAA

SEQ ID NO: 402099 - protein, 343 aa, unidentified
MSQIKRIGIDTSKAVFTLHGVDQTGQPVLRTNLRRAQMIPFFKNLPPTEIAMEACASSHHWARLLAALGHTVRLLPPQYVKPFVKRGKNDRNDAEAICEAAGRPSMRFVPVKSTAQQAEGMVLKVRETLVCQRTQLVNALRGHAAEFGVIAAKGIRQIPPLLEAIAAETAIPSDAREMLALFGQEIEHLDSRLKAIEVKLIAMHKANPISRLLATIPGIGPIIALTLAIEVDPAAFKSGRHLAAWLGLAPKEHSTAGKQRMGGISRAGNERLRQLLVTGATAVIKVATRPGNKLATDWLLKLLQRRPRKLAAVALANKMARTAWAMMTSGEAYRHPPVAAVSA

SEQ ID NO: 402100 - protein, 340 aa, unidentified
MKITTFGLDLAKNVFQLHWVEPQTGEVKRRALKRDQMIKFFAQRSASVVAMEACGSAHYWARKLIELGHEARLIAPQFVRPFVRSNKTDAADAQAIWEAAQRPERRFVAVKSVHQQAVLMLHRVREQRVKMRTMQINQLRGLLYEFGVILPAGRHKAMTQVAQALARLEDTLPAMALEALREQCASIEALSAQIEEIERKLAAWRKEDEAAKRLMQVPGVGLLTATAAVATVGDAKVFSSGREFAAFLGLVPRQSGTGGRVKLLGISKRGDGYLRRLLIHGARAVITHAKARDPWVEALLVRRPLNAVVVALANKMARTIWALLAHGRHYEPRGQALGCA

SEQ ID NO: 402101 - protein, 376 aa, unidentified
MGTPSAQTLDDVGVRKMFQELEEVPMTMVGGLDVHRQQITFDYVDDDGLVHWGQIRPATRKTLRGWLAEHCPDGDGEFALEGCTGWRYVSEELAAAGLGVHLGDPAEIAVLRGPKKRAKTDRADAKLLRTLLLEGRFPESWIPPAHVAEIRSLGRLYYTLMDERRAWQQRIHAQLFHQGCPPIKALLSASGRDALARAPLSAAGRQYVDTALRRIDELSAEIEPLRTQLVNFARRQQGCQALQRHYGIGWLCAAIIWAEIGDTRRFTSSDQLVRFAGLDITVYSSDSKRSPGHLSRQGSPELRWAAFEAAKCAARRGSPDYAYYHRQAAKHDGHNGKNPTLAVERKILRRCYHTLRDLGDAALALPDTRPQQEVAA

SEQ ID NO: 402102 - protein, 343 aa, unidentified
MIKISTIGLDLAKNVFQLHGIDASGAVMLRRQLRRAAVEKFFAQLPPCLVGMEACGSAHHWARVIGRYGHEVRLMPPAYVKPYVKRNKNDGRDAEAICEAVSRPSMRFVPVKSVGQQAALAVHSTRGLLVRQRTMAANALRAALTELGIVAAKGLEGLRELMAVLEKPSAEIPEIMRSALLMLAKHWQALDAAERVLEQQIAKAARCDREARQLMAVPGVGPIIASTILAKVPDAKVFRSGRDFAAWIGLTGRDRSTGGKHRPGHISKQGDRTLRVLLISGASAHLRQQKRRGVSDPWLRELLGRRPYKVATVAFAAKTARIIWAMLVKGEPYRNRASAPAAA

SEQ ID NO: 402103 - protein, 422 aa, unidentified
MKVVHSICCGLDVHAKTVVACLIKGGEKERRTFSTMTDDLVRLKEWLIAAECPRVGIESTGVYWRPVFNILEDRVEVLLLNARDVKGRRGRKTDMLDSEWIAEMVQYGLVEGSFIPPANIRELRELTRYRESLVRHRTSLANRIQKLIESGNIKLGQVASDVFGASGRAMLRALADGQSDAHGLASLARGSLKKKETELARALQGQLTEAQRWVLKALLNQYEQTEIEIAEVQERLSAEVADNADPFAPDAVALLQTVPGIGEKVAMVIIAEIGLDMTRFPTAGHLASWAGLCPGNHESAGKRSSGRTTKGNPYLRTSLVQAAWAATRTRNTYLAAQYRRLVKRMGAKKALVAVAHTMLTMVYYILKRREPFRELGGDYFERRNVDDQRKSLVRKLESLGFSVTIAPLLPDPTIAQASPSEA

SEQ ID NO: 402104 - protein, 373 aa, unidentified
MKRILKIGMDVHSTNYTLCAMEPTIGAEDRIYGEIQVAPDYKEVLRFIDSLKKKLGPDNEYSIECGYEAGCLGYILYHQLTDAGVKCVILAPTTMLTQQGKRVKTDKRDAHLIAQCLCYGGYHTVYIPTGEDDAVKEYLRMRDDHKLALKKLKQQINAFVLRHGYQYTGTKWTVKHVTWLHKLELDPMYRETLDEYMASYEAQEAKIGRYDKRIEEIAAEERYQENAKKLGCFLGIRTHTAMSLIVETGDFNRFAKGNTYAAFLGLAPGEHSSSTNVNRLGISKAGNTHLRCLLIEAAKGICKGAIGHKSKELRSRQNGQSVEIIAYADKANTRLRSKYYKMIRHGKKKNVAVASVARELACFVWGMMTENIA

SEQ ID NO: 402105 - protein, 403 aa, unidentified
MNLSVAGYESVEIFVGLDVGKGEHHAVALDRHGTRLFDKALPNDERRMRALIGELKAHGRVLLVVDQPATIGALPIAVAKAEGVLVGYLPGLAMRRIADLHPGEAKTDARDALIIAETARTMPHTLRSIQIADEQIAELTMLCGFDDDLAGQIVQVSNRIRGLLTQIHPALERVIGPRLDHPAILDLLEHYPSPTAMAAAGEKRLGNRLIKRAPRKGRVWAAEITAALREQTVVVIGTSAAGTVLPRLAEQLAGLRRQRDEIAAEVEQLVAAHPLHPVLTSMPGVGVRTAARLLTEITGKEFLTAGHLAAYAGLAPVTRRSGSSIRGEHPSRRGNKVLKRAMFLSAFAALRDPDSRQYYDRKIAQGKRHNQALIALARRRSDVLYAMLRDGTLYEPRVQQMAA

SEQ ID NO: 402106 - protein, 379 aa, unidentified
MAAIWAGIDAGKTHHHCVAINESGHRLLSRRVANDEPELLELLTDVLALGDEVTWGIDLADGGAALAITVLFNHDQQVHYISGRAIHRASESYRGEGKTDAKDAAVIADQVRIRRDLNPLRTGDETVTDLKILTGRRIDLVADRTRIVNRLRAQLPGIFPGLERVLDLTNKGPLTLLTGYQTPAAIRRLGAKRLETWLRNRKVLRADQLAEAAVEAAERQHTSLPGEKLTAQMVHTLAKEVMALNEQVAELGKLIEARFRDHRHFEVITSMPGLGIILGAEFLAATGGDMAVFGTPDRLAAFGGVAPVPRDSGKISGNLRRPQRYNRRLQRVLYTSALISIRRSEASRRFYDRKRAEGKRHTQAVLALARRRVNVLIPL

SEQ ID NO: 402107 - protein, 399 aa, unidentified
MLNTLSLQLRVGVDVGSRCHSVAVGLSDDSVVEEFEILHNAEGFREFFARVEACGRRHAVPVSVAMEGYNGHVRPLDSLVRARGWRLFNVNNLKLARFKEIFPAAAKSDSIDTRKILELFQLRDHLPMAREVLQEVMATPEENDALKRLSRRRRRLVNERGRVVNAMQADLQAVCPGLLEITRDAGNMWFLNFLTCRKGLIKVARVRRASLLKVAGIGVHFADAIQAWQDRAYFAADAGLVGDMIQQDATRILELKRQVKALEEQIADIAESSSIARRLASIPGFGAVCSAELAGEIGTVERFRNEASLALYLGMATLDNSSGKFRGSKPPRHVNVRAKAAMMFAIDHHRKLVPQSQRYFEKKRAEGKKHNQAIRALGRHLCRVIFKMLTQNRPYRIDP

SEQ ID NO: 402108 - protein, 342 aa, unidentified
MPDSVTGGVDTHLDVHVAAALDHIGGLLGVESFPADAAGYRCLLAWLASFGTVRVVGVEGTGSYGAGLTRHLLSQGVEVVEVDRPNRQERRRAGKSDPADAIEAARAAASGRAKGKAKTRDGNVEAIRVLRVAKCSARKDRTRALNQLRSLVSTAPDELRAQLRGVTIFRLVHRVAGLRPAGRTDVVNATKIAMRTLARRVLELDAEIAELDALIAPLVAETAPELLARPGVGPDSAGALLVAAGDNPERLRSERSFAHLCGVSPLDASSGKQQRHRLNRGGDRQANAALWRIVMSRLSFDPASQLYLERRTKEGLSKLEAMRCLKRYVAREVFYLLPAQGA

SEQ ID NO: 402109 - protein, 342 aa, unidentified
MKHFIGCDVHTRNQVVAWVEEETGEIRTRRLDHEGCEVRKFYEKFEPGTVVGIEATFPAHWFERLMGELGHELWVGDAAKIRAREVRRQKTDERDAELLLDLLRTERFPRIWIPSLEERDLRQLLVHRMKLVRMRTQVKNQLWALGTSQGICRQGKLWTVKGRAELEKLALLPWAARRRKELLEALDRAVEAAGRARPEVELLRTHPGVGMVVGLAFALTLGPVERFATSRCLVSYLGLNPREASSGGRQRLGAISKQGNSMVRWLLVEAAQTAARFDPQLGRVYQRLKKKRVSAVAKVAVARRLAVRLFWMLRTRNNYAQLARTSGSPSSAVVPPPAEPKV

SEQ ID NO: 402110 - protein, 359 aa, unidentified
MNATTVAVDLAKSVFEVAVADQNWKVIDRARLSRPQFERWFHNRAVGLVVMEACGSAHFWARQLQGLGIEVKLLPPKYVRAYVKRNKTDAADAAALLEAARCADIVPVRVKSVEQQALQSLHRVRSAWMATRTSRINGLRGFCREFGITIAVGSRLGIEQISRVLVDSSTAVPVMLRDTLKLLIDEIRLLEARIAQLERELTAAAKASAACERLLSVPGVGLLTATAMVAATGGSVSHFKNARHFSSWFGLTPKEHSSGSTRHLGRISKRGDRYLRMLLTHSARSVLRAATVALRCGRPLDPLRQWGLNVQSRSNHNKATCALANKLARICFATLRDQEPYEKTKMLKKLERQAYPTPA

SEQ ID NO: 402111 - protein, 454 aa, unidentified
MKKQEQKSAALLEPKIKRFSQGLPVNNPYACGIDVGDTMHDVAIGKDEGHEVRKYAAFTEDLQNLVAWLKDEGITSVAMESTGIYWLNLYLMLEEAGIETFLVNAKHVKNVTGRKRDDTDAIWLQKLHSCGLLQKCFQPEASIRTLRTYVRQRKKLVALSSDSVRRMQKALELMNIKLHTVISDILGKTGMAMVAAILNGERNADELLKLKDARIKASEEDIRKSLQGIWSEEYLFTLKQAYNGYGFYQAQIKECEEKIKEQLLAQAAKVQAGDISNLEIERKKKLKKNEFAFNAQVLMKAVVGVDLCKIESMSEISVVELISEIGLDMKQWQGHKRFGAWLNLAPNTKQTGGKIISSKMQKKKNQAGLTLRMAASNMSKSKSPMGDYARKMRARIGKKGAVVAAAHKLSRIIYTMIKDQVEYAPVTLLENQQKLTQQRIKYLEKQLLQLRNAS

SEQ ID NO: 402112 - protein, 356 aa, unidentified
MSFREREEVPMTIVGGFDVHRQQITFDYVDSDTGVVRSGQIRPATRDVLRRWLGEHCPDGGGEIAVEGCTGWRFVVEELSGAGVVAHLADPAETAGLRGPKKRAKTDRADARLLRTLLWEGRLPDSWIPSPQVVEIRTLGRLYCALMEERRGWQQRVHAQLFHQGAPKIGGLLTEAGREALASAELSPAGRQYVDTAMRRIDALSEEIDPLRRQLVNFARRQPGCVALQARHYGVGWLCAVIIWAEIGDVRRFRRADQVVRFAGLDITVYSSDGKRSPGHLSRQGSPELRWAAFEAARCAARPGSPDYTYYHKVADVLDGKRPVLAVERKLLRRCYHTLRDLGDAAMVVVPERRAA

SEQ ID NO: 402113 - protein, 297 aa, unidentified
MEKNNYIGIDIAKESMEVMVYEGKEHWAYTNDEKGLAKLLAKMKRLSPCLIVLEATGGYEITVAAELQSHGFPVAVVNPKYIRDFAKSTGILAKTDILDAQVIARYAATVKPAPRVLPSEETRKLGVIIMRRRQITTMLTAENNRFQTADPAVKARIKLHIKWLEQELDDINKELKQKVQDNPDWKEKDAILQSVPGVGPNLSITLLADFPELGNLNRKQIAALGGVAPFNRDSGKMRGKRTIWGGRDSVRTATYMAAFSAIRCNALFKSFYKRLITAGERKKKLQETLVNDENWLK

SEQ ID NO: 402114 - protein, 395 aa, unidentified
MRRPVSGRDAERSQVIDVLKAQIKRRPARKKVSTVGTQQRRNISQQKLTIGLDLGDRNSWYCVLDEAGQIQLEQRVRTSAKTLGEVFGAMPRCRITLEIGTHSPWISRLLGELGHEVIVANARKVRLIGESRKRDDRLDAQTLARLARIDPQLLCPVKHRSAQAQADLMMIRARAGLVRARTGLVNAARGLAKSYGERLRGCKVRNMNPEKAEGLSPELQRALEPLLSAIEELNERICEYNDRIGALAQQSYPQVALLKQIKGVGTLIAPTFLLTLEDPHRFGKSRDVGRYLGLQPGHRNSGQSESQRPISKEGDPYLRTLLVQGAQHILGPFGVDCDLRRWGLKLAERGGRKGKKRAIVATARKLAVLLHHLWVSGEVYEPLHNSRQTTVAAAA

SEQ ID NO: 402115 - protein, 342 aa, unidentified
MKRVLYVGLDYHQNSVQVCVMSAEGKMLLNRPCRNDVRAIWEAVEEFDSDEIRAALEACCGSADLAEEISQRRGWSVCLAHPGYVSRMKHTPDKTDWSDARLLADLVRVGYIPRVWLAPEAVRELRRVVHYRQTLVDARRNVKLRIGGLLREQRIASPQKISRWTLGWLEWLATSAPLSPEGRWVMDRYLEEFEDAKRKVAVCEKHLEKIVADDRLVGRLMEQKGIGLITACVMRAEIGQFDRFRNGKQLSHFVGLSPRNASSGERQADAGLIKGCNRMLRAVMVEAAHRLMRYEKKWSDLAGRLRSRGKPVPVVVAAVGNRWLRWLWHQMHEQPQPVSQAA

SEQ ID NO: 402116 - protein, 347 aa, unidentified
MARKRILSTLDTSIAYEAVGLDLAKTDVALAAFDSDHKEPYFIDRIPYDKLYELLANMAPTLVAMEPCSGAHQIAEQIQALGHEVMMISGRHVQAWVKDHCNGQKTDLNDAFAILNLAYDRWLTPIRGKTREECRLLALQASYRQLKGQRTKTMVHVKATLHAWGFPIRTGSFNQKALRELIDANREAFGGEMAETLHLMIDRVRGLDHDIATVLKLLTEATKRDPRASLLRSIPGFGVLTTSRWCAVMGDIARFDSPKQTMAFIGLVPNNRITGHHTETSSGREARGQGRMSKRGDKMLRSLCILGAASLCMLVRKDRLPDCPFVASIKGRLASPRPWFKVLVHRS

SEQ ID NO: 402117 - protein, 459 aa, unidentified
MYTIGLDLAVQASHKAVVTDEQGDFITPVLTLRTRPRELDQLLTRARNGRQDTALRVVMEPTGMAWFPIAVYLARHNVTVYLVNSQEVADLRRYYKRHAKSDRIDARVLARLPLVNPEQLHRLHLPSAKALACQRSCKQLDRVSTHIIAIQNRVQAIDRFAWPGLEEQVFADPFAPAARWMRAHWYDPCRVLEAGAAKIREQWQASGEAADSAGAWCEALVDLAAEVMALYGDENQYLNFAQLQAEVCREQEWLTTLEQQHQTLRKKTVRPLYRQIHPSRHLETLKGVGQDSAAVYASFVGEAERFSSTRVFRGWSGMVPDSALSADSEAKGLHITQAGPDLVKKFAYLDAEIARRWDPQIAAIYYDQMINKGKHHKQAVCACATHLLDRVLVVLREDKAYELRDVDGTKVSVKQAQAIIAERYTVSPEARRRTTKRHRQERVERQAERNNKGKVAEAW

SEQ ID NO: 402118 - protein, 326 aa, unidentified
MLVWAKLIIQGMTKMDNKKVYVGIDVGKEWLDFAVAGINKITRFGNHDEGLRKIVEKIDLLEPKLVAVEASGGYESAFVNMLMVNKKKVAVVNPTRVRALAHARGLLAKTDEIDARNIATYAEMIKPEPKQPREDIDIHIRALVTRREQLVDVRSAEGNRLGTCHESVKADIREHLDWLERQIGIIDDEIKELAKSSEKWTNQIELLKSMPGIGFITAVTMTANMPELGELNRQKISALAGLAPYNRDSGKKRGKRRIFGGRQSVRRVMYMAALSAIKHNPVIKKFYEKLIGKGKPFKVAITACMRKMLTIMNVMVKNQTLWRCPV

SEQ ID NO: 402119 - protein, 419 aa, unidentified
MLQDNVEIAAFVGLDWADEKHAITLQEAGSDKRHRSTLEHTPEALQSWIQSLRDRFGGRPVAIAVEQKRGALIYALMHVDFLHLYPVNPVTVAKMREAFYPSGAKDDPRDADLLLDILMSHRRHLRVWTPDDALTRSIQLLTEDRRHVVDERTALTNQLTAALKTYFPQALDWFADLHTARACAFLQRWPSLQQLKQATPSSIRKFYRAQGYRGDDKLQQLLANIKKAQPLTQDSAVLLSCSMKVDILVKQIPLLTDAIESYDRKIAALFDQHDDSTLFGSFPGAGPALAPRLLAAFGANRDRFQFASEMQELSGIAPVTEKSGDGIWIHWRLACSKFLRQTFHEFAGCSITQSDWARACYDELRKRGKSHHAALRALAFKWIRIMFRCWKDRKPYDETLYCKSLKTRRSPLADALPTT

SEQ ID NO: 402120 - protein, 409 aa, unidentified
MHETQPEVGSGDVVVIGVDPHKASVTLEARDTREILRASGTFPTTTPGYRAMIQVARQWPRRIWAVEGARGVGRALVARLLAGGERVVDVPAKLSARSRVFDTGQGRKTDAHDAHAIVMVALRDHQLCEVVIDEDLEVLRLLVDRRDELAAARTQALNRAHRLFAELVPGGAPTKKSVTQYQGLLAGIRPRDGAGRVRRRMLAEELTEARRLEVRVKEITAEIKAAVLARGSHLMDLPGIGPAGAGRILADVGNVARFPSRHHFASWTGTAPIDASSGAHQRHRLSRAGNRRLNHVLHIAATVQMRHHDTAGRIYYDRKRAAGKRPLEAMRCLKRRLSDVVYRQLVTDALGVQMTKIEAGPGGHSGATLQSSAAGLPPHTGTSDQPLPGPATTTLARPVPVRQALIAAP

SEQ ID NO: 402121 - protein, 373 aa, unidentified
MGAPPEVGMSFARVDGEGSTETEVRALMKVLIGVDPHKVSLAVAALDEATGELLERGGFPQNHAGLKALERWARRFSERRWAVENAGGLGRYLAVRLAGSGESVVDVPPKLSARVRVLSSGNARKNDGLDALATALAASRNDRLAAVDPEDSSEVLRLLSERREDLVTERTRALNRLHGLLRDLVPGGVAGTLSAERAARILRSIRPQRSSSRIRRRLASEVLRDVRTLDRKIADLNGRIEAEVQASSTTLTEIFGIGPILAAKIIGTVGSVARFPTKAHFASYCGTAPVEASSGEVVRHRLSLAGNRHLNYALHMVAVCQARSDARGGAYYRKKIYEGKSRKEALRCLKRRISDAVFASLMADSQLLSHSVA

SEQ ID NO: 402122 - protein, 408 aa, unidentified
MQVLYTRCAGLDVHKDTIVACVRCVSPPMHQEVRSFGTTTAQLLELADWLAEHDCTHVAMEATGVYWKPVWHVLEAEFELVLANAAHIRNVPGRKTDVNDAMWIADLLAHGLIRSSFVPPQAIQQLRDLTRTRKQLVREVSQHSLRIQKVLEDANLKLGSVLSDVLGKSGRAMLDAIVAGQSDPAHLAALAQGTARSKSAELREALRGRITEHHRTMLRLHLQVIDALQRTLAELDAAVGKALAPIRQRARLLATMPGVSDLTASVVVAEIGVDMSRFPSAGHLISWAGLCPRSDESAGKRRSTRVRKSGTWIKTALVTAAWAAVRVKTSYLRAQFLRIKARRGAKKAILAVAASMLTAAYHMLRDGTEYNDLGSDHFDRQDRSKTIRRLMKRLQDLGCDVPVLVHTG

SEQ ID NO: 402123 - protein, 330 aa, unidentified
MDKTSYIGIDIARNKFDAVIYKKTGKPRHKVFANNLEGFTQLLQWVNTPAKNLHIGMEATNTYWEDLAYFLKDQGSCVSVINPKCLKKYGESQNMRCKTDKTDAAIIARYTAKEQPEAWKPQRHEERTLLLQMRQLEHMKQCEQKERVRISMMKDAASREVAKRIADYIQTEIVQLEKQIAALIHADKKLNKSAQLLKTVPGIGARTLPWLVAYLGDGSRFKNGKAAATYAGLTPIKHDSGDTVAGKTKISKIGHSEIRKAMYMPAMIYGCGRMKDGVFRAFTQRLRVNGKCSMEIITALMRKMLCIAQAVLKSGQPFNPELHEKSFNNA

SEQ ID NO: 402124 - protein, 465 aa, unidentified
MSEDTEVIAVGKAKPQVIEDDEHQRVFERVAAVDVAKASGMVCVRGPGADGRRRASRVWEVTAVMGAVTGLGRELARDGIEMVTLEATSDYWRIWYYVLEMCGLAVQLVDPSQARAIKGRPKTDKLDAMWLARLTEWGMLRPCFVPPAPIRVLRDYARARTDLVHERTRCWQRLEKLLEDALVKLSSVASKLTTVSARDMIAAMIAGERDPAVLAGLARTRMKARHADLVAALDGMFDSHHGDLAQLELDQIAFLDQRISWAEDKITAVLAGIPAAWGIDADGSTGPDAGTGPDAAVLPAVRRLAEIHGVTVLTAAQIIAEIGLDMARFPTAAHLVSWTGLCPIDSQSGRRHGKRKGHGNTYLRGYLGQAATGAASTDTFLGERYRRIARRRGKARAQVAVARSILIIIWHLLADPTARYTDLGPDYAATRTSRDKKIRNHLRGLRALDLTDQEILTILTAHQAA

SEQ ID NO: 402125 - protein, 413 aa, unidentified
MLFIGDDWAEDHHDIEIVDGQGRRLARRRLPEGLDGVSRLHALIASVMPAEWKDLAPADAAARVKIGIETDRGPWVVSLVAAGYEVFAINPMSTARYRQRHGTSGAKSDPGDAHVLAEIVRLDRAHHRPVAADSTASEAMKLIARSHQTMIWDRTRHVLRLRSALREYFPAALDAFDDLDAVDALALLEMAPDPETAARLSKARIGAALRQANRRNVEARAAEIRAVLQAPALRQPAPVQKAFAAVTASEVRVIVALNTEIDALGEVVAEHFGRHPDAKIYASQPGLGVVLGARILAEFGDDRDRYTSAKARKNYAGTSPITRASGIKKTVLARHARNDRLGDAVHQWAFGALRGSPGARAYYDAMRARNIGHHAALRQLANRLVGVLHGCLKTRTVYNEDRAWAHHENTAAA

SEQ ID NO: 402126 - protein, 346 aa, unidentified
MNITTIGIDLAKNVFQVHGVDERAKAGLKKQLKRAQVLPFFANLPPCLIGMEACGSAHYWARKLNELGHTVKLMAPQFVKPYVKTNKNDAADAEAICEAVSRPSMRFVPIKTGDQQAVLSLHRARAGFVKARTAQANQIRGLLAEYGIVIPVGIDNIVKRLPDILEDGENNLPGVFRQLLQRLGEHLKELDRQVDELNEQIQLWHRENAASRKLADIPGIGPITASALVASIGDAKDFESGRQLAAWLGLVPRQHSTGGKQTLLGISKRGDCYLRTLLIHGARAVIRVSERNVEQADSWLTRIVDRRNKNIATVALANKNARIVWALLSHNREYQSDYVPVVATGA

SEQ ID NO: 402127 - protein, 356 aa, unidentified
MNVYYKQHAYYCGIDLHARSMYVCILDGAGTIVYHKNMPSRPEHFLKAIAPFRGDLVVGVECIFCWYWLADLCGREGINFVLGHALYMRAIHGVKTKNDRIDSLKIARLIRGGNFPVAYVYPPRMRASRDLMRRRIHFVRKRAELLGHIQNTAVQYNLPALGSLSRPHQRRDKDIVGHFPDPVVRGIVETDLRMIDQYDPMIRELDQQILTLAKEHDPQSLYLLQSIPGVGEILSLTMLYEIHDISRFPTRGEFCSYARLVKGQKSSAGKSYGTSGARMGNAHLRWAFSQAALLYLRGNKATQKYYNRLISRHGKAKALTIVAKRLGVAVYYMLKRNEPFNEPKFLNHAVVTSPKA

SEQ ID NO: 402128 - protein, 457 aa, unidentified
MSRTRKTKRSARIDRPEGIPILNPNAAGLDIGANEIYAAVPADRDEQPVRCFGTFTQELNGLSAWLHQCRIDTVAMEATGVYWIPTYQILEASGLEVCLVNPRYFQNVPGRRTDVSDCQWLQRLHSAGLLRGSFRPAPQVCVLRSLTRHRDNLIQLASTHILHMQKALDQMNVQLHHVLSDITGLSGLAIIDAILSGERDPQLLAKLRDGRVKASEETIVAALTGDYRTEHLFTLKQSLTAYRHYQKLMAACDRQVEQQLKRFDAQVDEAAKPLAPPKVRRRKLFSNEPNFDLRSHLYRIFGVDLTAVPGISVLTAHTILSEVGPDISKFRSASAFASWLGLCPHNDISGGRILSAKTRRVKNRAALAFRMAANALFRSQSPLGDYFRRMRAKLGAASAITAAAHKLARIVFHMLNTREAYNEAILNQHEHRFRARAEARLRAQAKLLGYSVIGATA

SEQ ID NO: 402129 - protein, 413 aa, unidentified
MEVLFPRCAGLDVHKDVVVACARVAVDGRVTQEVRSFATTTTALCALSTWLEEQRCTHVVMEATGVYWKPVWHVLEGAFELVLANAQHVRNVPGRKSDVNDATWLSDLLAHGLVRGSFVPPTPIQEIRDLSRTRKQLAREVVQHTNRIEKVLEDTNIKIASVISDVLGKSGRAILDALVAGETNPEKLLALCSGRLKASRKVLVEALRGRVTDHHRFLLKLHLGQVDLLQQAMRDLEARMGGALEPFRRDIENLTTMPGIGANAAHVIAGEVGLDMSRFPTHGNLISWAGFCPRLDESAGKHRSTRIRKGAPWLKTTLVSAAWAAVKVKGTYLQAQFQRLRARHGAKKAIIAVAASMLTAAYYILRDGVPYKDLGPEHFTRRNKDHAAKRLKKRLEDLGFTVEVRPAEAGVSI

SEQ ID NO: 402130 - protein, 371 aa, unidentified
MQAEYDGRQIVGIDLHRRRTVIVRMTEAGDQLGCVRIDNDPLTLAAEIAKAGEYPEVVLEATYGWYWAVDVLQDAGARVHLAHPLGVKGFTYRRVKNDQRDAADLADLLRMNRLPEAYVAPPAVRELRELVRHRAKLVALRSGLKAGVHAVLAKQGVLIAVSDLFGVGGRQLLDAAGLDGPYRARVHAYMRLIDAFGFEIDTVSKQLRARLCHHPGYLEIQRIPGVGPVLAAVFVAEIGEAARFRDAAHLVSWAGLTPKHRESDTTVRRGPITKQGSGLIRWAAIEAAQKIPASAGWLVSSRARIAERRGRNIATVATARKLLTLVYYGLRDGHIRALAPGPGHGVSRLNVTGCEIVRRSDPRRPAAWSPL

SEQ ID NO: 402131 - protein, 459 aa, unidentified
MGRKQARAGAWEGLKVVHPNAAGLDIGSEEIWAAVSPERTAEPVRKFGTFTPDLQALADWLISCGVDTVAMEATGVYWIPVYEVLEACGLRVYVVNARHLKNVPGRKSDIQDCQWIQGLHSVGLLRGSFRPEGEIVALRAYLRHRAGLIEHRAAHIQHMQKALQQMNVQLTQVISDITGVTGLAIIRAIVAGVRDPQQLAALRQPTCKKSEQEIAKALTGNYRREHVFALQQALALYDFYTEQLLACDVEIERQFANLRPVSDDLPPLPPSNKPDSNSKNAPSYDARSYLYRLTGVDLVAIAGLNESTVQVIISEVGIDLSAFPSEKHFCSWLGLAPHNDISGGKRLRSRTLKTDNRAGQAFRMAAQSVAKSPDSAFGVFYRRMKVRFGAKQAIVATAHKIARAFYHVLKHRTPFHDLGGEEYERRARERERKNLQKRAAKLGLALVEANSTPALAGSF

SEQ ID NO: 402132 - protein, 357 aa, unidentified
MEQSKGISFKGQNIYVGIDVHLKSWSVTILSETSVLKQMSQGADPDALYRFLTSHYPEAEYYSVYEAGFCGFWIHDRLTELGIHNIVVNPADVPTMSSEKLRKTDAVDSKKLAVSLRAKQLKGIYTPDSEALEIRSLIRLKNSITKDMTRQKNRIKSQLRYLGVEIPVEYLEHHSNWSKRFLNWLKQVGMRTPSGRQTLDILIMQFEALRKQKAEMTRKLRALSHTERFEETLELLMTVPGIGQTTGLALMAEIVDITRFDNAEQLAAYVGMIPMCHSSGEHEGVGDITLRKHAILRSNIIEAAWVAIRKDEAMQLCYLNNCKRMVPSKAIVKVARKLVNRIYFVLKRHQPYVNAMA

SEQ ID NO: 402133 - protein, 375 aa, unidentified
MSDADPDPWTRRKGTVMIVIGIDPHMKTHTAVALEAATGVRSGERTVTCDEEGHGELLVWARGLGDEHVFAIEDCRHVSGRLERYLLPRGEVVVRVPPKLMAGARASARTYGKSDPIDAECVARAALREPDLPRASLSGAEHEVRLLIDYRDDLVGERARIQKRLRWNCHDLEIALELPPRVLDRYVWLDRLESLLAALPGTTRQRIALQQVRRCRDLTTEIRALEREIRDHMRVLAPELMEIPGCSAISAANLIGQTAGASRFRSEAAFAMHVGTAPLPVSSGKSERYRLNRTGNRKLNSVIHVIAVTQARMHPPAIAFIERKRAEGMSNREALRCLKRHIGRVLYKTMVRAEKARVVSVVRIDFPPSPTAVAV

SEQ ID NO: 402134 - protein, 356 aa, unidentified
MSTLETVHSGHVVIGVDTHKHIHVAAVLDTIGGILATLTVPTDTGGFKQLLSWADSFGKVLAFGIEGTGSYGATLTSFLRRHGHKVVEAGRPDRRQRRMNGKSDTLDAENAARSVLAGFATVIPKTADSSVEMIRQLKIAHDSAVTDRSAAMISMKAMLVHADDTLRRETNRMTPIKLARHLAALRPRNLETPSDSLRHALRSLARRWQHLDSEAKELRASIEALVLRTAPQLLEQFGIGVDTAAEILIVAGDNPERIHSEAAFAKLAGISPVPTGSGMTSGRHRINHGGHRQLNAAIYRTVIVRMRFHEPTIAYVARRTAEGKSKRDIIRCLKRYVIREVYHLIKVNPRTGEIAS

SEQ ID NO: 402135 - protein, 433 aa, unidentified
MKHKMKQKQNQRITRITEKTLVVGVDIAKRLHVARAVDFRGIELGKDCVFSNDAKGLGSLVTWMKELEQSHSKTDLILGIEPTGHYWFPLAAYLQNEGIKLVLVNPHHVNKSKELEDNTQIKSDYKDAKVIANLVRNGNYTEPKLPTKEYADLRISMNTREQIMGSLTQVRSRIANWFDRYFTGYSKVFKSWDGKASLMTMREFPTPEEIVSKGARDILACWKKEVKRGVGIKRAEQLCAAAEVSIGLKEGLVAARVQLRMLLEEFDLYMKQEEQIMNDVLEILGKIPGTAEMLSIPGVGVVTIAGFLAEIGDINSYDHGQQIIRLAGLNLVENSSGDRKGKTGISKRGRSRLRALLFRCILPLVAKNEEFKVLHKHYTTRPRNPLKKKQSLIALCGRLIRILHTLGTKQKSYNAAEVLRPIHQTSIQQQSAA

SEQ ID NO: 402136 - protein, 411 aa, unidentified
MEVVYECCCGLDVHAKTVVACLVTKGRKEIRTFATMTDELLQLGDWLSSVGCTHVAIESTGVYWKPVFNILEGLLTVILVNARHIKAVPGRKTDVRDCEWLADLLRHGLLKASFIPPREIREVRELIRYRQTLVTEHTAVANRIQKLIESANIKLGQVASEVLGLSGRLMLRALAAGEQDATTLAELAQGKLKSKKSELRRALAGHLTQVQRWVLAELLTRVEELEAALTRVEARIGEEVTACPDPFVPEAVELLESIPGVGVRTAQTIVAEIGVDMGRFPSAKHLASWAGVCPGNHESAGKRQSGQPTKGNQSVRTILVEAAWAATRAKGTFLQAKYQRLVKRMPKQKALGAVAHRLLVISYHLLSRRVRYAELGSAPRDQQQVVRRRRRLVEQLTTLGVKVTIEEAAAL

SEQ ID NO: 402137 - protein, 347 aa, unidentified
MFVGIDVHKDTHTAVGISPYGEKLFEITVGNYKEDFEKLNLKVKEHGDVLSPYIGLEDVRGYGERLAGYLYGKYPVYHVPSILVDKARQNATHPEKSDSLDALGVAKVMIQSIDTLLPYTISQESEKAKQLKEISIDREDLVLEQTRLKNQVHTLLYRIYNTEYADKFKDPFSLKALRYWRNAKPKCDQFLLKTMKRKVRRLLDIHVEVSELEKDMQTLLNDNYTIQSASGCGVVLASTIVGEIGDIQRFKSPASLAKYAGCSPRECSSGKKTRHVKTRSGNRRLNCAFHRMALSQISRMGNDKARAYFKRKVSEGKSKSQALVCLRRQMVNIVWNMLKYKTVYRIA

SEQ ID NO: 402138 - protein, 428 aa, unidentified
MLRHKIRLRLYEISREIRGSEEHLIVGIDVAKQKHNAFLGTATGKTLLKRLVFENNREGFEKLLMHVESISASNGHKRVTFGLEPTADYHKPLAEFLINREHNLVLVSGVAVKRNRELLDGRWDKNDMKDSANVADLISQGKCLFYEYPTHVLRDLRSLLSLKRKFKKIEHGFRVRIRNHLLAQYFPELDRYYGHRESENLAIVQWCLSPSKIAKMKYEDFFRLVTTRDRGLIQHQRLKAIWDSAHSSVGCSAGTATEFEAGILVDTLKQVRETIGNINEKVIEICVLFPEYKYLLSIPGFGPDVSAIVLAAIGDPFRFESGNQVLKAAGWDLSANRSGRRSDSVTPVISKRGKADLRYALYQAALIASTRNKHFTSWFIEKLKGREKEKGIKTKMRVKLAAKLLIIAWTLMKKKEPFNPELLKVKKN

SEQ ID NO: 402139 - protein, 350 aa, unidentified
MRNAGFAMEQFVGLDVSLAETSLCVVDSHGATLWQGKCGSSPEAIAATVRARAPKVARIGFESGPLSSWHWHELKKLGLPVICLDARHAKAALSLQLNKSDRNDALGLAQIVRTGWYREVAVKSLDSQLIRSLITTRAQLVRMRVDLGNQIRGVLKPFGLVAGKGSGQPFVDRVRTLVAGGPLEDVAEALLSAWQAVGRQITVLSRRLILMARRDTAVRRLMTAPGVGTITALTFVSIIDDPGRFAKSRNVAAYLGLTPRRYQSGEVDRSGRISKCGDALMRAYLFEAAGIVLNRVSRWSALKAWGTRLIKKIGSKKATVAVARKLAVILHRMWRDTSTFRWASKEGRAA

SEQ ID NO: 402140 - protein, 358 aa, unidentified
MRIIGVDLHARQQTIAMLDPETGELVEKTLKHEGETVREFYSALPHPVLVGIEATGSMHWFLELLEELGIERQVGHPAEIRAAEPRKQKHDRRDAALLLKLQVENRFPSIWVPSTELRDLRALLRHRHQWVRMRTRVQNTLQAIALSHGLRRGQSLWSQAGQQAIASLPLAPHAAHRRTELQALNCKLGKQIDELGERVMDQALQRPGAKLLMTHPGVGPITALATDVFLGDPARFDDGKAVASYVGMIPSEYSSGGRQRLGGLSKQGNPLLRFLWCEAGIHAVRRDPELKRFYRRKLQQKGLGKTRVAVARKLGIRLWIMLRDQIDYQEFCRRGQMRQKSGGARAGMPEGVHSPARS

SEQ ID NO: 402141 - protein, 330 aa, unidentified
MERQYIGVDLHKQFFQACAVNGTGDRLWEMRFPRTDGGMTLFHARCHPMTSIAVEATGPTWAFVDALAPTGAAVCVVDPRKTRLKAGFAAKTDRLDARRLSDALRRESVVSIYVPPPAIRELREICRGRHQVIRLRTRLAQMIRALLLRSGVPDVPVRRVFSRRGLDWLETVTLPPDAAASLSRLRHVLVAIQTEAAAVDATVTARATADPIASALDAMVGIGPVLGLTIRAEIGDVTRFRRGAELASYAGLVPRVDASADRYWSGRITREGSPWLRWALVEAARHAIRRPDAIGRWARQLAIRKGVYKARVALARRLCHDIVRQWPRTA

SEQ ID NO: 402142 - protein, 402 aa, unidentified
MNAVGIDVSKGKSMVAIMRPFGEIVSTPFEIKHTTSDINSLVELINSVEGESRIVMEHTGRYYEVLAHQLSEANLFVSTINPKLIKDFDNDSLRKVKSDKADAVKIARYVLDKWQNLKQYNVMDELRNQLKTMNRQFGFYMKHKTAMKNNLIGILDQTYPGVNTYFDSPARNDGSQKWVDFASTYWHVDCVRKMSLNAFIDHYQNWCKRKKYNFSQSKAEEIYGKAKELVPVLPKDALTKLIIKQAVDQLNSASTTVESLRTLMNETASKLPEYPVVMAMKGVGTSLGPQLMAEIGDVSRFTHKSAITAFAGVDPGVNESGTYERKSVPTSKRGSSDLRKTLFQVMDVLFKTHPQDDPVYQFLDKKRAQNKPYYVYMTAGANKFLRIYYGRVKEYLSSLPES

SEQ ID NO: 402143 - protein, 402 aa, unidentified
MTAGQLWAGVDVGKEHHWVVVVDHTGTVVLSRKLVNDEQQIRELVVDVEALGGQVSWTVDLTTVYATLLLTVLADAGKSVRYLSGRSVWQASVTYRGGEAKTDAKDARVIADQSRMRGSDLPVLHPGDDLISELRMLTGHRADLVADRTRTINRLRQQLVAVCPALERAAQLSCDRGWVVLLTRYQRPKAIRQSGITRLTRILADAGIRNAATIAAAAVAAAKTQTVRLPGEQVAAGLVAQLAQGVIALDERIKTTDADIEERFRRHRLAEVITSLPGMGFRLGAEFLAAVGDPALIGSADQLAAWAGLAPVPRDSGKRTGRLHTPHRYNRRLRRVMYMSALTAIRCDPHSRAYYRRKRDQGKRPIPATICLARRRTNVLYALIRDNRTWQPDSPPITTAAA

SEQ ID NO: 402144 - protein, 354 aa, unidentified
MKRTTKYVGLDVHQATTVAAVREESGRVITRSIIPTDAAALVEFFRGMRGTIHVAFEESTQAQWLHDLLVPVVHQVIVCDRRGRSADGNKADQTDADELSDLLRQGSLRAVYHGSPQRATLKELARAYQNLVEDSTRVMLRLKALFRARGIRTPGRKVYAAKQRATWLAQLGERGVRFRATALFAELEVLQTLRPTAKAAMLAEAKRDPAWAILRTIPFLGPVRVALLLATLQTPWRFRTKRHLWAYAGLAVVTRTTAEYEMYGGRPRRRRREPMTRGLNQNHNRVVKDVLKGAATAAATRAGPLQEWYQGLLTRGLREELARVTLARKLAALTLRLWKTGQHYDPAKLSIQAR

SEQ ID NO: 402145 - protein, 357 aa, unidentified
MLFKDEEINFVNQAFYIGLDIHKKNWAVTIRSNNMELNNFSMDPSPETLFAFMHKNYPGGMYFSAYEAGFCGFWIHHTLEKYGFKNLVLNASDIPTTNKEKTQKTDRVDSRKIARELEKRNLNGIYIPSKRLQQLRSLCRLRDKAVRHQTRLKNRIKGHLYIYGIKIPSHHEMPHWSGKFIQWLHSLTFEYTPANDYLLFCLEELQQQRLRIAQITKKLKCNISQYGFEKTIKLLTSVPGIGTVLAITFFCEVMDINRFKKFDQLKSFVGLIPSVENSGETIKEHGLTMRRNRMLRYLIIEAAWVAIRNDPALLFSYKNLTQRMKNQDAIIRIAKKLLNRIYSVWKNEKYYSPALVR

SEQ ID NO: 402146 - protein, 345 aa, unidentified
MQPMYYIGLDVHKRTISYCVKDGSGVIHAEGTLPATRLDLDRWMKTLPQPWTAAMEATVFTGWIYDHLQPHAAAVKVAHPLMLRAIAAAKKKNDRIDAKKICDCLRCDFLPECYMASTAVRERRRTLRYRNLLVRQMVQMKNKTGMLLMESGVSYNKQRLHKAGYFRELLATNPDIPEGLRSLLRLCRETVVRLSKTESALVRSLEQDSLLMDRVERLMTIPAVGPITALTWALEVGDVQRFSSIKKAISYCGLCGAEKSSGNTTQRTPLSKQRNKHLQTTLIEAAKMAPRYSPSLALLYDREKQKGHANRATLAVARKLVAYLMAIDRGQRNFQVMETSNCIAA

SEQ ID NO: 402147 - protein, 313 aa, unidentified
MAFLHQQPQLCLGFDIAKDTITAADGITTRVIDNQRRAIRTFLKSHKQADLVVCEPTGGHESLLLEECLRAGIACHRADTLKVKSFIRSYGTHGKSDAIDAAMLRAYGRERWEKLTLWQAPDPDETRLRALVRRRQELIAIKIAEKNRAKAPGGRELAASFEAVIKVVERQIQAIDAAIRELIAGSSALKHRAAICTAMDSLGPIVTAKLLAILPELGTMTRRKAAALAGLAPHPNDSGQKQGYRKIRGGRPEIRSMLYMPALHAAAGRGEFATFYKRLITNGKKPMVAIAAVMRKIVVTLNARLRDATIPQS

SEQ ID NO: 402148 - protein, 344 aa, unidentified
MQIAVLGIDLGKNSCSVVGLDSTGAVIKRRRMRPENLVAFTETLPACIVAMEACCGAHHLGRTMSSQGHQVRLMSPEYVRPYVKAQKNDDRDAEAIAEAATRPTMRFVELKSESQLDVQTLHRARDRLVGERTALINQLRAVLLERGVTIPQGRRKLEQHLDAMMASDDDHSLSPRVRRLIDDMRAEWLELDRRIAAFDDEFAAYARSDADARRLATIPGIGVLNATALLAAIGDGQTFARGRDLAAWLGLVPRQVTTGGKPRLVGITKRGNKYLRKLLIHGARAALPSLATSATPLGGWLRALMQRVHKNAAVVALANKLARIVWVVLRRGEEFNAAAVTATA

SEQ ID NO: 402149 - protein, 482 aa, unidentified
MKKKNIYVNQSQELLTLFEEAGNGAKVMCVPIDYAKKDHVVMFCNGYGHIFRKPFSIKNSPEGIEYLTEQVTRSCSHRRIDPKHVFFGGEDVGSYAENFVHTLRSGGWIVAGVNAHDAKKQRANIQASTDRLDLMGIASMLLNRRGNCSPAQSGIYRNLRTVVRHRKKLVVMSTEVKNRMHTVVDRLFPGFLDEKKGGICPFSQSSLYLMENRFSPHQIRRRKRQTLIETLHRYGTAKPESAAAKLQEYAARVLNTPDEYIRTLQLSLTQHVKHFRCLRDSINQLEHETAVWLSQTQGAFLTTIRGIGIVLAAGVSAEIGNPHEQYPLNNLVSYSGIIPRVKQTGGPEGKTYTGKVAKRCNRILKDYVVQAANHIGLHGPEDLMADYKRREAAEQHADFGIGRRYLRMGMCLMRTSQIYMPQRLRNTEVKPEERAGYYLTTWPALREKWNKAGALEAAFKKDRPLGRWRNMVQELYEIRLKL

SEQ ID NO: 402150 - protein, 348 aa, unidentified
MIIIGVDFHPEFQQIASVDTDTGEFQEKRLAHPAEAEKFYRALVGQKVRVGMEASGHARWFERLVAELQFELRIGDAAEIRTKRVRKQKTDRQDAQLILRLLLEDRFPQIWVPSWENRDLRQLLWHRHRMVQGRTRIMNQLQAVALNEGLRCKKKLWREHGRQQLESFRLAPWATRRRRDLLDLLDRLTPTIAELSHAIEQEVEKCPAAQRLRTHPGVGSLTALAFVLIIGEVNRFRCGKQVASYLGLVPLEESSGNRRRLGHITKQGSSMMRFLLVEAAQVTVRSLPEWRSKYLHLVLRRGRKIAKVAIARRLGVHLFWMMRKEWNYQQLKKFGSHAGEPGNRHGVQ

SEQ ID NO: 402151 - protein, 399 aa, unidentified
MLAVGIDISKSKSVAAILNQDGSMHTSPFEFHHTQPELDAFIKYILNSNQSATILMENTGHYHYPVLKAFREAGLPVCMVNAYQIKKFGDMDLRKAKTDKKDAVRIARYALEKSYSLVPYTSMEQKYEDLKFLARQYNQRMLTLKTNKVFLLNLLDETMPGITNILPLTTRTPETSLSVLFINRFKSYDRIKKMGKSRFLDAFEKIARKSRNRQTKTYGLAIYEAALHNITTRGENEYTLAAQDQCLELVCESQKAADSIILKMQTLAETLPEYAALRSMAGVGDRLGPLILAEIGDIRRFHSGKALNAYAGNDAPPYQSGTFESHNRHISKRGNAALRKYCFEVMQALKLTRPQNDPVYLFLLKKEQEGKPYNVAKMAGVNKFLRIYYARAMETLKQQ

SEQ ID NO: 402152 - protein, 350 aa, unidentified
MNWKYFIGIDVSKATLDVCILEGKSKILNLEIENKPKALSAFWKSLTKQIPGISAENTLYCMEHTGIYNEHLLSFLHSKGTNICLEHPAHLRLCVGLTRGKNDQVDAERIAAYAYREREVVKLWEPSRTIIKTLKHLTSLRNRLVRTKKALSIPVKEIKMFDKDGGKMIESICKGTLNSIAQDLESVERHILDIIKLDPTLKRLFQISTSVSGIGTVTAVEIIIATNEFKNITTAKKFACYSGIVPFEHNSGTSIRGRARGSHKANKRVKTLLHMAAMASLISGDMKRYYLRKTSEGKNKMSVVNAVRNKLIQRLFSCIKGDRLYRPMDDRVVIRMGVEEPMCQDALSIP

SEQ ID NO: 402153 - protein, 300 aa, unidentified
MNTMTLLGIDIGKHSFHLYGQDAKGHQVLRKKTNRGQLLSTLAQLPACTVVMESCGGAHWLARQIRALGHEVKLIAPQYVKPFVKGNKNDFIDAEAICEAASRPAMRFCSIKTAEQQTLSALHRVRDSLIGHRTVATNQIHGFLLEFGISLPIGVAALHRVPALLDDPQHPVPLRLKDLVMRLHHQIQQLNDEIKDIESGLKQQLKEDDTGGRLQSIPGIGPITASALLADVGDASNYRSGRDFAASLGLVPKQYSTWKDGVTGDQQARRQANTSIAGTGCTIDHAAYRQTRGCTRDLGP

SEQ ID NO: 402154 - protein, 316 aa, unidentified
MQTPSVYVGIDVSKTRLDVAVRPSGGLSHVTYDAAGITTVVTQLSQKQPIRIVVEATGGLERPLVRALVAAALPVIVVNPRQVRDFAKATGQLAKTDALDAQVLARFAEVIHPSLRALPDPQTQELAALLARRRQVLAMQRAEQNRLDRAPVRVQNRIEVHLHWLGDELARRDEELDDQIQQSPMWRAREDLLQSVPGIGPVMCRTVLAELPELGLLNRKQIAALVGVAPFNRDSGRLRGHRTIWGGRAPVRTALYMATLVATRWNPVIRPFYQRLRDAGKAPKVALVAAMRKLLTILNAMLHHGTPWRPVVLSEA

SEQ ID NO: 402155 - protein, 353 aa, unidentified
MQIVSALDIHRRQITFKTLDLGSGEVRRGRLSPATRETLREWLEPFAGCEAEFALEGTTGWRFVVEEIERAGHRAHLADPAETAAKRGRKRRAKTDQADCDLQLRLLLAGELPESWIPPSHMLELRTRVRMRKTLIDQRTAWQQRLQAQLFHQGVAAGLKPRTRAGREALAKLELSPAGRELVLLALRMLDVLDAELTPLDRQLRSFARRQPGCRALSERLYGVGPVCATAILAELGDCRRFSNSDDAVRHSGLDVTVHQSDQKRAPGHLSHEGPEVLRWALFEAAQSAARLSSPDHAYFCRVRERIDSTRACLSVARKLCRRAYHILRELGEEALAPLELDSEPEEAIKTAA

SEQ ID NO: 402156 - protein, 421 aa, unidentified
MSYRIAGIDVHKRMLAVVVSNVEIESEFEFERRMFGSNPEQLRALAAWLLEQEVEEVVMESTAQYWKPVWEALERYWRPICEKREGARPKSGALHLAQAESNRGRRGRKRDFADAERLVKRLVARELTLSFVPDSEQRLWRTVTRKKYQLRRDRIRLQNQLESLLEEAHIKLSSLVSDLLGLSARRMLKALAEGETHPAALAALADERLRATPEQLCDALGACTELDAVYRRLLKMALEECRLIDEQINQLDKEMASLLRKHQDAVQRLAEVPGLGVDSAQQIIAEVGPIAATFPSEKCLSSWVGACPGDDESAGVNYSHRSPKGNRHMRRLLNQAANAAARTKGSIFEIVYRRSVPRLGHNQAIGVIAHRLCRLIWLILHQGVRYEERGPAVTKRSKQLRTWKMIRQLRSLGYRIEPPNP

SEQ ID NO: 402157 - protein, 378 aa, unidentified
MKRILKIGMDVHTTNYTLCAMEPIIGEDDRVFATIKVTPDYKNILMFIENLKLKLGLNDEYDIQCGYEAGCLGYSLYNQLTAAGIKCVILAPTTMLTPQGVRIKTDMRDAYMIAQCLSYGGYHAVYIPTEDDDSVKEYLRMRNDHKLALKKIKQQINAFCIRHGFCYDGTKWTLSHLKWLKKLEITNGLHRETLDEYMASYEEQEAKIERYDKRIGEIAEQTRYHDKVKKLGCFLGIKTHTALSLIVETGDFERFAKGNQYASYLGLAPGENSSSDNIHRLGITKAGNSHLRQLLIEASGGICKGAVGHKSKELRARQNGNTAEVIAYADKANTRLRSRYYKFIRHGKKRNVAVAAIARELACFVWGMMTDNIEMKVA

SEQ ID NO: 402158 - protein, 323 aa, unidentified
MTLVVGIDIAKRTFDLAILQPNGKHRTKSKLSNDQAGFAVFEDWLQRHAEPGAWIVMEATGIYHEALAEHFHALGYRIAVLNPAQIARYAQSQLQRSKTDKLDAKLIATYGQRHLDHLRAWQPEPLSLRQLRALTRHLEDLQALRQMELNRLDVSRENVKDSIQAIVQRLNEQIEWTLKQIKQHIDDDPDLRGKRDLLVSIDGIADKTAALILAELGEIERFTHSRAVTAFAGLDPRLQESGAFYGRTRISRTGSARLRSALYLPAVVAMTYNPAIKAQVERLRARGKKGKQTVCAAMRKLLSIAYGVLKSGKPFDPALAIAH

SEQ ID NO: 402159 - protein, 397 aa, unidentified
MYIVGIDIAKRKHEAAVIDGDGAVIIKPFSFTNNCSGYNRLLAMLAKAKLPLDEVSFAMEATGHYWLALFTRLQKEGFRVQVINPVQTNSIRSFYIRQAKTDPRDALLIAEVIRFGHFSESTLHPENIYELRELCRGRHAIVSMQADVKRKVVALLDQVFPEYETAFTNLFGDTSMAILQTCPTPKELSEMPLEELCHLIEVPSHKRFRMAKARELQELARNSFGFAMAGDVFSTMIRLYAKHLVFLKQQVQEMDRKIAEIMDTLDTPITTITGIGPTLGAYILSEIGDISRFSSAAKLAAYAGIDPTMRQSGEYNGVRNRMSKRGSPYLRHAIWLAASSAVLHDPALKFYFQKKRDEGKPYMASVGHACRKMVSIIYAVMRDNKAYTPYIPNEISA

SEQ ID NO: 402160 - protein, 454 aa, unidentified
MEKTTPPTPVFDETRRNVAGIDLAWRAENYVCGPRREDGEYDIEAFGTVTSELHRMLRWLKDRKVESVAMESTSVYWIPLTDLLEANGIEVVLVDAREVRMVPGRKSDVKDCQWLQKLHSCGLLRGAFRPPEAVAAVRSILREKENVTAMRTQALQQMQKSLDQMNIRVHHAVSDIDGQTGTSIVKAIVEGERNPAKLAKFRDARCKKSEKEIAAYLTGTWRDEHLFNLSQAFKTMQFLDERLAEYDLKASEIFTSLASTSGNSEPPPPPSNRKLTKKERNNPEGKAKLCQFMNFDMTSIAGIEYNTAMIIASELGTKIGSFPTERHFASYIGLAPSLGKSAGKKVRQKRRKNTSRVGIALRMAASTLHKSHTELGAYFRSVARRTDKKTAIKATARRMAHMIYRGIRYGKIHIDRGAEAYELRLRDKTLKTINKLIKSYNINSSEISAALTNI

SEQ ID NO: 402161 - protein, 482 aa, unidentified
MKSKPREKTNKTTNHPTQCHWHEMNRKQRRQMMREMQSEDVSLEVVHPDAAGIDIGNEFHYVAVPPSRDGQPVRRFGCTTAELKAMADWLKQCGIRTIAMQSTGVYWIAVFDILEQAGLEVYLVNARDTKNLPGRKSDVQESQWLMKLHTYGLLRNSFRPVQEIRTMRTYWRQRNDLVQSAGRHIQRMQKALTQMNIQLANVLSDVSGMTGQTIIQAILAGERDPHKLAEFRDPRVKASEEQIAQSLEGNWQPDLLFVLKQEQEGYEFCQKQMAECDRQLAQYLQQREDRSQGAPLPEEKRKGRLKKKRGNAPQFDLREGLFRLTGTDLTRIDSIDVMTATTIVSEAGYDMSKWETEHHFVSWLRLCPDNRISGAKVIGKGRLPTNNPISIALKMAASSLRLSDTYLGAQFRRLRTRLGVPVAIKAMAAKLARLVYRMLRYGMKYVDKGADFYQLQHRQLKVKQLKWKAASLGYQVIPIPAA

SEQ ID NO: 402162 - protein, 356 aa, unidentified
MIIVGLDLHVRNSFLSAMDLETGELFDQRRIPNTREAIRGYFGQFAEQEVKVTLEATTNTYPMVSLLRQMPKVQVVVVHPRKMRIIAESLCKTDKVDSEVLVELGRGPYRLPTSYIPEAAVHELRCELRTRARLVAMRTELKNRVHGLLSGEGFFEHPPELFGKRGRAWLAEVELRELARGRLERFLRLLDQFEAELLEISQVLRERYAKAPLWSEDVELLTSMPGIGMLTALTILGELGDWRRFDHGGSVVNYAGLVPSLDESNQKSHYGHLTKQGPRFLRWILAEAAQVARRKVPRYGRLYDRVARKKGAGKATMAVARTMLEHAWLMLKRREKFHYEVTEKMVLGGEPVDCMA

SEQ ID NO: 402163 - protein, 345 aa, unidentified
MLYVGIDVHKKNLQVCVVDKHDNRLSNCRVANQPESVKEHFRRIEASAGVALEATHNWGMLYDLLGEMGFDVHICHSKQAKLISLASQKNDKVDAYKLATLLRAGLLPEAYVPDVKSRELRNVVRARASLKAQSTVIKNQIHAILRTNWITSPWTDTFGKSGRKFLEGLEIAESYKDVIGCKLSVLDEIERQIAVISDKIVNSAHLDARAMLLTTIPGFAEFRAVMVLAEVVDISRFNRAEKLVSYAGLNPREHSSGESVRRGRISKEGSSWLRWILVEAALQAIKEEGKIRDLYWRVCEKKGHNKAIVAAARELAVSVFWMLTRMEPYRPTGKRPSIVVTSEVG

SEQ ID NO: 402164 - protein, 340 aa, unidentified
MVYGAIDLHSRFRQIRIGTADGAVVRERRVVTSRSPLRNAFAAVGAVRIRVEASTESEWVAQVLEAAGYEVIVADPNSASMDGTRHRRIKTDTRDVAALSDACRLGVFRRAHRVAAAQRTLRQELAVRRQLVRRRTGLIAHLRARLRQDGFRLGSGSRTTVHERVARLERPASLRGSLTPLLETFAALTPIIATTTRRLTTTANADPVAVRLHTVPGVGPLVALTDRATVDVVTRFPSAGHVSSALGLVPREDSSGERRQRGHITKVGPSEARTMLIQAAWSCWRSRTARTTPLRQWADRLAARRGARIAVVALARRLSRILYAVWRDDTVFRVTPARAA

SEQ ID NO: 402165 - protein, 478 aa, unidentified
MIKSVGIDFHQGKHVARCLDERAQLCDGFSFQTTPEGLSTLEERIFRNGSNPVIVFEPAGLTWFILAICLRARHPDCRLVRAKGQKVAALRRYLRGSSKSDRLDALTLAKMSFIDPEQLDEVYLPPAKIHALQRLARQRKRLESEIAARKTRIGSIVESYVPGVRKVFSDPWSSQARAFLRCRLNPVAVAHNGEKALHSFLARARRRNKADKEESRRVYLTCQSAAVLYQLSSCAGAVDDDFFSVLQEEIARELRLMELEEAESEAIAKHMEELYRELHPSDNLRSIPGVGQITAPVFLATVGDPARFHNQSAFVNWTGVVPRTRQSSDVEAKGLRMTKAGPAIMKWALFQAGDIGRRFDPQLASLYYREMVHHGKNHKQAMGAVMSHLAARVLAVLQENRAYELRDIQGNPLSRGEARRLILSNYQVPEEIRRERRRRNPVKRGYSKLRGITAPRTNEAAIVPQPVNTTAIPQNQSN

SEQ ID NO: 402166 - protein, 317 aa, unidentified
MTASDIFVGIDISKNRLDVAVTPGEQTFNCPNNEAGIQKLVRRLQKLHPQIILLEATGGYEFLLVAALREAELPACFINPKLVRNFARSAGIAAKTDRLDAKVLALFASRMQPQTRPLPNAQQQELKHLMTRRRQLLDIIQMEKNRLDPTPLPRIALSIQHTIKSLEEQLAALNREIDDFFQQHPLWVELEQTLTSVLGIGHLSAILLIAYLPELGRLNRKEIAALAGVAPFNRDSGQWRGQRRIEGGRSRLRQALYMATLVATRHNPVIQVYYQRLLAKGKAKKVALIACMRKLLTILNAMVKKHQPWCQTAPITP

SEQ ID NO: 402167 - protein, 452 aa, unidentified
MEREEKRLEQFRRLRKEIRGCQDYLVVGIDISKDLHNAVIRTVSGKMHRRLTFHNTREGFENLLLAVDAVKVQHGPTEVVFGMEPTANYHKPLGEFLINRDQQVVLVSPEAANKNRSLLDGRWNKHDGKDCANVADLICQGKFLYYEYPSAELGDLRNLLSLNRKLKKFEQGLRLRIRNHLVAQYFPEMDQYCHWGASEGLALVQWCLDPALMASLSDEELCQRLGSLGRTIAQRKRLSALKEQAASSIGCRFSRSVEFEGQNLVKLLKEVRQRMESTREQIEEVCQKFKEYSCLLSIPGFGPTLSAMVLGAIGNPWRFQNGAQVLKMVGLDLSASSSGKSQGSPIVSKKGKAEIRYALYQAAMVASTRDKHFVRYFTDQLRGREKETGIKTKKRVKLAAKMVMIAWTLMKKQERFDPGYLVAGDQRIAAAGNAKIQNGGIPKLQPNAARAL

SEQ ID NO: 402168 - protein, 342 aa, unidentified
MSYFAGLDVSMEETSVCVVDERGSLVREARVASDPLAIATWLGRLDLTLERVGLEAGPMSPWLYTGLRERGVPAVCIETRRMRGATLLMAVKTDRVDARAIAHAIRVGWYTAVHVKSAASQELRLLLRNRKTLLEHRVALDNEIRGTLKAFGIKLGRVSEGRFAARVRTLMEERRRELLVMVEPMLAVRETLRRSYAVLHRQLLAVVRTNPVCRRFMTVPGVGAVVALSVMTGIDDPRRFSRVRKVGAHFGLTPRKYASGEVDRNGAISKCGDELVREALFQAAHTLLTRVQRWSALKAWGMRLAKRRGLRRATVAVARKLAAVLQRMWLANEDFRWAAQAA

SEQ ID NO: 402169 - protein, 347 aa, unidentified
MRFYNKNHDFYCGIDLHSTKMYLCILTKDGEKVLHRNMKVSPQAFLKAIAPFRENLVVAAECIFSWYWLADLCEDEGITFVLGHALYMKAIHGGKAKNDRIDAFKIASILRGGTLPQAYVYPRAMRSTRDLLRRRSHMVAIRGDFLAHAQMSHYQHALEKPTARLAYKANRIGVADAFQDDSAKRSVEIDLSMAGYLDHEIRSLELELKRKAKVHQPESFTLLKTIPGIGDILAMTILYEIHTIDRFERVQDFASYSRLVKCAKESNGKRMGTSGSKIGNAHLKWAYSEAAVLFLRCNERGKKYLARLERKHGKGKALSILAHKLGRASYFMLKRKKPFNMEKFMAA

SEQ ID NO: 402170 - protein, 338 aa, unidentified
MHITTLGIDVAKTVFQLHGVDARGRLVLSRRVKRTQVVEAVASLPSCVIGMEACGSAHHWGRTFEQLGHTVKLMSPKYVKPYVKTNKNDARDAEAICEAVSRPTMRFVSIKTVEQADLQALHRTRSLLVKHRTAVINQIRGLLAEYGLVIAQSPEKVQPALVRFLDDAESGLTAFARETFFELYEQLRDLASRIERVTHRVDCVYRAHPVCRKLAAVPGIGPLTATALLATVGRPQVFHNGRHLAAWLGLVPRQYSSGGKERLGGLSKRGSRYVRTLLIHGARAVVQRAERRVDTQGRWLWALKRRKGTNVAAVALANKNARVIWALLAHDDVYRPPA

SEQ ID NO: 402171 - protein, 347 aa, unidentified
MSFIGVDLHQNSFTVCRREGDGGEAFETFTLSAADLARFCLTLSADDELAIEATGNSAWFRDTVLPCVGRVVVVNPAQFKVIRKSVKKTDRNDAAALALFLAKDMLPETRAKTQDENELASLAHTRDLLVKQRSRLLHKIHALHVRKGIKLKKESLGSKRGLAAIDMDLFSAAEVVEIEVLREQALSLTASLARLDREIETIASGFAGYEGLTSIKGVGPRSAAVLLSAIGNVRDFESADKLAAYFGMVLRVSQSNETDHRGRITKRGNKLARTTLVQCSLIAMHYSPYLKRFHERIRQRRGTGKAIVATARKLLTIIYDTLKNGWVFSDFTQFSRTDQLIPAGQSS

SEQ ID NO: 402172 - protein, 607 aa, unidentified
MSTIASLDRIGVGIDTARYGHRVSFLRPDRKPAAKPLTVMENRAGYQALQDRLNQLHEQYPNANFHVRIDAAGQYAVNLELFLRSLKLPMTISVGEPKRNKDYQKAHFPKRTTDDTESQAMARFAVVELPNATPAPSTPMILLREVAGRLQSKVKQTTQAINRLHNLLARVFPELATLTEDMSAGWVLKLLDKYPTAERIAQAQIASLEKIPYLSVEQAHAVHQAAKQSVASLRGELAEALVRDHVNQLRLCQKAEQHLHQLLLEAFADLPASPHLQVLTITGIGEATAAALVAKIVDINRFATPNHLVSYFGVFPEESSSGVDKRGRPLPPGTLIMSPKGNDLVRFYLWNAARNAIQHNPAIRALYRRLRAKGKRGDVAFGHCMRKLLHLVYAVWKTDRPFDKEHFPWEGSSDTQPSTTTPLSAEADTTPSANEKAVGHKRDLPAEEVVTTADSTLEPASPAVKPASQSAAPRPKVDFACVREHVTMEQVLQHLGYFASLRGRGQQRRGPCPVHSQPTAPERTFSVHLGKNAFQCFHAECAVKGNVLDLWAAIHRLPLYEAALDLAETFQVPRNREEEPVKGTSSPRTATAKTSAPAAATATDGAK

SEQ ID NO: 402173 - protein, 353 aa, unidentified
MKCDKYMGMDVHQATTVVDVLDADGKPVLETIVATEAAAIIRLLQSLSGSLHVTFEETTQAAWLYEVIRHFVAEVVVCDPRRNKLLGEGSKADKPDARKLAELLRAGMLRSVYHGHEATRKLKELVRAYETLSVDTERTMVRIKAIYRGRGIRTPGRGVYQLKQREQWLEQLSEPGVRQRASFLYEELEQLRPLRRRAKQAMLAESRNHRAVTLLRSIPQLGPIRSAMIVATVDTPHRFRTKRQFWSYSGLAVVTHMSSEYEIKAGRVVRRRKPVATRGLNRNCNRRLKELFIGASAGGGQTEPYRTYLEGLKQNGMRAEMARLTLARKIATLALTVWKKGESFDPKKLNWTT

SEQ ID NO: 402174 - protein, 333 aa, unidentified
MTATAWLGVDVAKDTFEACLLLEKRSAHGTFANTPAGFAKLDHWLKKRWVGRVHACLEATGRYSEALAEHLHAAGHTVSVINPARLKAFGQATLVRTKTDQTDGWLLAEFCRRQQPEPWTPPDPARRALRALVRRRESLLDVRQQEANRLSDGEEDPLVVASLQAVVAVLDEQLAQVAQAMTKHLAAQAELQQQVALVDSIPGIGPTTAAALLSEIDCSAYPSARQLVAQAGLNPRQRQSGTSVHGKPRLSKQGASQLRHILYFPAIVAMRHNPVVHTFAERLAERDKAKMVIVCACMRKLLHLVYGVLKSGRPFDPDYSAQPAQPVQRRQPA

SEQ ID NO: 402175 - protein, 371 aa, unidentified
MQLPSPVRLLGIDLGITSDHTAVVIDDAGSICARRRARSTVASLAALEAAALDGAALGTQLVVVIEPTGPAWLPVAVFYGRRGQTVLRVTSAKAADLRRFLARHAKSNRIDAETLARLPLVAPTGLTAVEFGSPARASLDRRVRAVARLTAEIGRRKTRIRALAHQLVPTIGAALSDDGLNQTDLAVLERYADPRALLAAGPARLTRLITTTSRGQLGQAKAQALRTAAAEAVALWEGDSAIAIGDLAAEVASEVRLVRAAETERTRHEHARDAALACVDPAGLAASLPGLGPVGTTQLVATMGRPGRFPNGSAFKAFTGLTPRANETGQTDRKHQPMTKAGPRALRSQLVQSANTARKLDPSSPRSTTPR

SEQ ID NO: 402176 - protein, 417 aa, unidentified
MPEYAALVAIDWADQQHAVCLSEPNTGEREQTIVKHTPAALQEWALGLRQRFGGQPLAVCLEQSRGPLIYALLQYDFFVLYPINPATLAKYRQAFSTGRGKDDPTDADYLLDLLEHHRNRLRPWHPDDEKTRTLRLLVEQRRRLINDRTRISNRLTALLKGYFPQVLDWFEDIRTTLVCDFLARWPQLSLLQRARPATINQFLRSHHSTSKATNARRLAEIKSALPLTNDAAVITSSVLNVKVLVAQMKTVIAAIAEYDRHLEALCQTHEDYHLFAALPGAGPVHAARLTAALGSDRSRWQSADELVRFSGIAPVIERSGKQFRIRWRYFCPKFFRQTFHEFAAQSIQDSFWARAYYSMQRAKGKDHHAAVRALAFKWIRIIWKCWQTRTPYNEVIYLESLRKKGSSLLKFAADYQQ

SEQ ID NO: 402177 - protein, 457 aa, unidentified
MCPGGWPRYEAQWEECAVERQYRDRQMSRRLEITAGKIKMHETQSWFAGVDWASQKHDVWLADSSGKRLGKRTFEHSGEGLAQMCDWLIATSGGKPEDIHLAIEVPHGAVVETLLDRGFKVYAINPRQLDRFRDRFSPAGAKDDSRDAETLSSSLRTDRRAFHEVSLASPAIIELRECSRMADDLSADKIRHANRLREQLQRYYPQMLQFGSDLAEEWFLSLWEAAPTPAKAARLRQGTVEKLLKRHRIRRIGAAEVLAILKQQALVVAPGVTEAAVAHIRALIESIRLFTRQLKEAHRQLDELCSLLAEPADGESGQTGPEPEQTLVAILQSLPGAGRVVLAVLLAEAFETLQRADYAILRMLCGVAPVTRRSGKSRAVTRRLACNPRLRNAIHYLADAARRCDEKSKAKYLALRARGCSHARALRTIGDRLLYVACTMLKNRTLFDPGFESQKSA

SEQ ID NO: 402178 - protein, 351 aa, unidentified
MKTQTKSASKLWIGIDFHKKTWRVHFRSDTFSGNPFSMEPDPDALHKKVETEFSGYEVEIVYECGCFGYWAHRKFVSYNWISIVVNPCDIPRISKQKFTKTDSIDARNLSKLLKAGLLRSVTVPDVEREQLRSLFRRRVHTVMYTRSIKVRLKAHLLYYGIKIPAEMDNAAWSKNFREWVRKIEWKYETGKQMMLSNIKQVKYLHYETNEISNQLRKYCREKHKKVYNLLRSVPGVGPLTAICFISEVGDINRFKNFKQLACLVGMMPTTYQSSETNRTQGLTPRALRIMRSYLVEASWQAVRIDPILREYYKKHTGKKPNDIIVKVARKLLSRMYGILRTETEYQIGLVK

SEQ ID NO: 402179 - protein, 392 aa, unidentified
MFFIGIDIAKRSHQAAVTDVSGNIIIKPFNFKNSSLGFNQFLSVLESNSVPKDDCVIGLESTGHYWYPLYFFLVEQKFNVKVFNPIQTAAFREITIRKVKNDNLDSIMIADFTRFGRYSETHIPSENMLALKNLSRFRLSVSDICGTLKKRTIVLLDQVFPEYDTVFCDIFGTTSKLLLEKFSTPEEFSEISTTKLANFIHKVSRGRLGREKAELIKAAANNSIGISYAVDTFSFQIKQLIEQIEFMENQLSEIDAEMAKLLALSEYSVITTISGIGPTLGSIIVSEIGDIERFETSSKLVAYAGLDASVKQSGEFNSSQNKISKRGSPYLRRALWMAAFMSLQCDPALYDYYSRLRARGKSHRLATTAVARKLCIIVWAIMKSKQPYSPNI

SEQ ID NO: 402180 - protein, 325 aa, unidentified
MRHDSTSKTDVAAPVAGIDVGKHRLHLAFADGGGVEEHANDAAGHRALIEALRRRGALRVGMESTASYSAKVAEALREAGFIVNVFQPRQVKAFAQFKLKRAKSDKIDAPLIAQCTALSEPQATPAPRLADLCEHLTVVEQIADDVRREKTRLEHANNPAIRAIHREEIKRLTLRRREALRALVGMVRQHVDLAEKMALIRSIDGIGELGALTLVLRMPELGSLSREEAAALLGVAPFTRESGQFKGERHIAGGRARARRTLFAAAQAACGRWNKSLVELYQRLIAKGLHHRAAVIACTRKLVIYANAVLKRGKPWTKNPEPRPA

SEQ ID NO: 402181 - protein, 417 aa, unidentified
MPSPLFVGIDVGSEANSVCCLTRDDEKRPVSRFTVTNNRPGILEFRDRIAQLVRKHHVEEILFGLEHTGCYSTHAAMYIQRHLDFGVRRKNVYLFNPSLIKEFKKSHYLDSPKNDRVDAWFIAAKLRSGHLPHPFTWSEPLMALQRLTRARYHLMQDLTRESNFLMTNLFLKFSDYTITGPFRRNKLSATSLAVMEEFESTEELAEMSVERLIDFLVKHGKNRFDDPEAVARALQKAARSSYRLPQSMADSVNLAMASSIRVIRTIQEQLKALRKGIEDHLATIPQTLDSVPGIGPILASGILAELDVHQFKSHKEAAKYAGLAWTVHQSGKFTANRTRLIHSGNRYLKYYMVEAANSVRVHDPVFAEYYAKKKAEPKEFAEGRALALTARKLMRVVFYLLKTNRLYAPQGGIRQSV

SEQ ID NO: 402182 - protein, 346 aa, unidentified
MEHYVGLDISLKLTAICIVDRTGKIQREGVVPSDPEAIAAFIEAHSLDVARVGLEAGATSTWLWTELNKLGLPVICIDARHAKAALKMQINKSDRNDAVGIARIMQCGWYKEVRVKDLDSHAVKALLVSRALLVKIKRDLENQIRGLLKNLGLVIGRAKMNVFAARAAELIQDRPELTAAVVPLLKTREVIERQIADLDRKVLRLARNNTQVRRFMTVPGVGPITALCYLATIDDPTRFKKSRSVGAYAGLTTRRYRSGEIDWTGRISKCGDAMLRTYLYEAANVLLTRIAKWSALKSWGMRIAKRSSLRKAKVAVARKLAVILHRMWVDGTEFNWSSKEVAAHAA

SEQ ID NO: 402183 - protein, 393 aa, unidentified
MLKIVYPICCGMDVHKSFVVACIASTNEQGVTTYKSKRFSTFTGDLRRCAAWLSENNCKDVCMESTGKYWIPIYNILERTCNIVLAHPKYVKAIRGKKTDKRDAKWIADIFKHDLVAGSFIPPADIRQLRDLFRYRWKLTNFATGEKNRAQNCLTVSNFKLDDVFSDVFGKAASAITARILKNPSEKITDVSGFRTKRMKATDEEILAAVDGEMCAEQAEKLRIIRSHMDSLELCKLNLESLILSTAEKYLPQLNLVMTAPGIQSFAAIGIISEIGVDMSVFPTSKHLCSWAGLTPQNNESAGKKKTTRISRAGAYIKPLLVQCALCAIRAKQFPEVRNCYLALKKRRGHKKAIIAIPRILLTAIYNILKKKEPYLERSVQAGHVFRERLSGR

SEQ ID NO: 402184 - protein, 394 aa, unidentified
MIYVGIDVASKKHDYAIMNDLGEIASTGSIDNSLKGFKKLQDAMRNAQEFFQDQNIRIGLESTGHYSINILHHLAKNDYKVMLINPLLTNMDRKSSSLRKTKTDKIDALSICMFLDRNKFDFKPYTLKSYHTEELKSLSRERLAIKKQLRIELNKLHALISITFPEYYKVFKNIQLKVSYRVLKTYGIPSVIATTRIDGLTNTLHKGSRGHYGYEQAVNLKTLAQETIGQDSRVYAFQIKALVERIEFLNTQIKSFEAEIKDIVDNHFTYLLSVPGIGYTTAGIILGEIGNILRFSNANKLLAYAGLDPSVYQSGDYDAPRRKISKRGSATLRWAIHIVSSRIIHCDQTFIDYYNKKMSKEGKSYLTTLGHVTKKVTRVLYSIIKHQKEFIPQT

SEQ ID NO: 402185 - protein, 463 aa, unidentified
MQERGEKSSQQNSEGEVEGLPVIRPHVAGIDLGSNEHWVCAPQVDGSGREVEKFGATTPELERMVEWLKQRRVESVAMESTGVYWIAPHEILERHGLEVVLVNTRELARVPGRKKTDRVDCKWIQRLHSCGLLTGSFRPAEQICILRTLVRDKGNLVAEAGDWVRRMQKSLDQMNVRVHRAVSDLDGATGMAILRAIVKGERDARQLAKLRDRRCQKSEEEIAEQLSGHWREDHLFSLQQALRMYDAVQERIADYEREILRKLAEMERDECRGQRPPTSNHPQKAKAIRKRGEEPLRQALYRMSGVDLTAIDAIGVGTVEVVLSEYGADLSRFATEKQFVSHITLAPRQAVSGGKPVKKKKRGSASTRVAAALRMAALSLRHSQTALGAYYRQIARRIGGDVAVFATARKLATLIYRLLKWGQPYVDEGAQAYEKRYQEQRLKRLTAMARDLGYQLTPKAAQA

SEQ ID NO: 402186 - protein, 343 aa, unidentified
MGYFAGLDVSLEETAVCVVDGTGRIVREARVASEPEALVAFFGACGLAMERIGLEACSLTAWLHAGLTEAGLPALCIEARQAKAAMGAMPNKTDRNDARGLAQIMRTGWYRAVHVKSPSCRSWRALLTARRLVLNKRRDVENGIRALLREVGLRVGTPSRRDFPARVRELVADDPVLAALAESLLSVIEGMTREAERLTKRVLDEVRREPTCRRLMSCPGVGPLTALAFRATIDRPDRFRKSRDVGAHLGLTPRRYQSGETDVQGRISRCGDELARTALYEAAHALLIRSAKWSSLRAWGMNIAKRRGMARARVAVARKLAVTLHRMWADGSEFRWGKQAARA

SEQ ID NO: 402187 - protein, 361 aa, unidentified
MFIERTSVGLDVHARSVVAAAIDGVTGEVFRARLTPGNDEVINWVRGLPGPSAVAYEAGPTGFGLSRAFTAEGIRCEIVAPSKIQRPSGDRVKTDARDAMHLAKLLRLDEIVSVTVPSIEQEAARDLVRAREDVRGDLMRARHRVSKLLLRQGIVYYGGHAWTGTHLVWLRKQHFDVPGLQLAFDAEHEAVLQAEARRDRLDTAIVAMAADSEFTPVVHRLGCLRGVATLTAFGLAVEVGDWERLTGASIGAYLGLVPTESSSGQSRSQGSITKTGNTHARRLLVEAAWHHRKPYRTPGVTMAARWELAPAAARARGHAGNQRLHQRWLHFTERKKRPVVANVAIARELAGWCWSLAVMND

SEQ ID NO: 402188 - protein, 386 aa, unidentified
MQKLNDLSRSLAPLEPDGTLIAVIEMSQSSWLVAGIVPGVERQPLKKLAADEIALLKLLHRWREEAEKAGHRIERTAVAFEAGRDGFWLARWLRTRSIEAHVIHASSVAVSREHRRAKTDRLDTELLKRAFLGWLRGERDHCKMVAIPTTKDEDAKRPNRERESLVGEQTRIVNRMKATLIRLGIRGFNPKLKKAAGRLEDLRTPEDEPIPPNTMAELRRDMDRRRLVSDQIRQIEEARLDRLKQAPDDGPHAMLRLLARVIGVGIETADMLVQEVLARNMRDRRAIARYAGLTGSPDESGTKHREKGLARSGNARVRRGMIQLAWRFLIFQKNSTLAQWFRARTENARGTRKLMIVALARKLLIALWRLVREGVVPDGVVLRPTQ

SEQ ID NO: 402189 - protein, 431 aa, unidentified
MHMAAVRADRAPEPVRSFGTFTVDLHRLVDWFTECGVETVVMESTSVYWIPIFELLDARGFTVFLVNARDAKHVPGRKTDVSDAQWLQRLHSFGLLRASFRPKGQIAELRAYVRQRERLLEYAASHIQHMQKALTEMNLQLHHVVADITGATGLRIIRAILAGERDPNVLAGLRHYSCHASAETIAKALTGSYRAEHLFALEQALALYDAYHEKASACDARIEAVLKELSIHRGHDHGSAPRAARLRNRTDKANALAFDVREALFALLGKDITAIDGLGPYLSLKLIAECGDDLSPWPSAKHFTSWLGLAPSNKVSGGKMLSSRTRRSGGRAAALLRLAAGSVGRTDTALGAFYRRLSSRIGKAKAVTATARKIAVLFYNAVRYGMDYVDPGASSYETRYRMRVVNNLHRRAKAFGFVLQPLEPEVGAAVS

SEQ ID NO: 402190 - protein, 347 aa, unidentified
MSITRIGLDTAKSVFQLHGLDETGKAKLKSKLQRSQMVPFFEQLERCTIYLEACGAGHYWARVLIGLGHDVKLIAPEAVRPFVKKGKKNDPADAAALCEAGARPDIKFVPVKTVEQQAILAVHSVRTLLVKQQTMLSNAMRGLAAEFGLIVPKGIDKLVELMALIGADESVPKQARQAARELFDQREAVGERIETLEAEIVAHARQDEAARRLATIPGVGPITASLIAATVADFGVFKRARDFAAWLGLVPRQHSSAGKTRLGKITKSGNREIRKSLVMGALSMTFRAPQWKSAAGVWTCHLLESRPVRLVSVALANKIARIAWALMTRGEVYHAKGRLVAAAEPAA

SEQ ID NO: 402191 - protein, 485 aa, unidentified
MKQTKSSPCARAILAHGGQLSRKERRELARQVQSEQVTLQIVHSNAAGIDVGKNTHYVAVPPDRDAESVRYFDSCTDGLQQMVAWLKKCGITSVALQSTGVYWIALYDLLQEADFEVYLVNARYTKSLPGRKSDVQESQWLMKLHTYGLLPNSFRPPQEIRWLRSYWRQRQNQVRSAASCIHRMDKVLTEMNVRLSSAVTDLSGATGLAIIQAIVDGERDPHELAAYRDPRVKATQEEIARQLHGNWQADLLFRLKQELQGYRFYQTLIAECDQELAQLLRAFPDRSAGVALPEETRKNRRKKKRGNSPQFDLRQLLYLMSGVDLARIDGIDVITAMTVVAEAGYDMSPWPTADHFVSWLRLAPDNRISGDKIIGKGRTPTQNRLSQALKMAASSLKASKTYLGAQFRRLRARRGPAIAVKAMAAKLARLVYNMLRHGMEYVDRGTEFYEQQQRERRLHALTKNAAQLGFQLVPTELSLAGTGTI

SEQ ID NO: 402192 - protein, 298 aa, unidentified
MDHFAGLDVSVKETSACIVDDTGRIVREVKVASEPEALLAVLTNPAYHFKRIGLEAGPLSQWLFSALAEAGLPVICVETRHMRAVLKAQVNKTDRNDARGMAQMMRAGLYRPVHVKTLRSQKLRMLLTHRKLMQSKAIAVENDLRATLRNFGLKVGVVGTMKFETRIKELVENLPDLAVLVEPLLIVRRVLREQIGILHRRLLAIVRDDEVCRRLMTVPGVGPVVALTYRATVDVPARFRNSKAVGAVFGLTPTRYQSGESDRAGRISRCGDEMMRIMLYEAAQSMLVVSTKWSWLKA

SEQ ID NO: 402193 - protein, 358 aa, unidentified
MSLETIIAIDLGKFKSVVCVMDAATRQHRFETIATTPAAVHELLARQATKDPSRTVLIIEACDAAGWVHDLAVAVGVPVKVANCCHEAWKWKKVKRKTDKDDALKLAKMMLLDQLPTVHMPDARHRQRRRLIQHRRSLVGRRTQCKNAIRSIFSQQGLTEHLPRGSKAWTKPGIAQLREHAKELSDCTIDELWRGRLHVELEVLEAVSRQVRLVEQKLDQLLEEDASAKLLTSVPGVGPRLAETVAVCLDDPHRFASGAEVSSYAGMVPKQMESGSMKRIGRITRRGPSLLRGMLIEVAWMVYRHNAWAKAFVEKVSRGMKQRKKIAIVALARRLLVKLWAMLRTNTPWRDPGAVCVT

SEQ ID NO: 402194 - protein, 395 aa, unidentified
MFYGLDVHKEFIQVCALNEDGKTRRDFRVGGTAAAIEEFARRLDRSDPVVLEATFHSWAIVQILRRYVDRVVVADPAQLKAIANARIKTDKVDAHILAQLLRLDFLPEVELPNQGTWALRQLMAHRRQLRRQSVATKNTIHGVLNRSLQRYPGKFLFTEKGFRWLAELELPAAERMVLDHQTGLLREVQAHLQALDRALREQAELYPEASLLVTIPGVDVVVAMGFLAAIGSIERFPSPQKLAAYFGLVPKIRQSGSTTYYGHITKAGSRNARWLAIEAAHTIARSSSPLAASYHRVRRRKGHQIAVTALARKLVVVVWHILTTQQPYRYAAPERTRIKLRKLQKHERAPRGRAPRNLDEVYAEAGLALAPPTPGEKRAAKRSRTALTRMRNETS

SEQ ID NO: 402195 - protein, 399 aa, unidentified
MNPVVGLDVSKGESQLQAFLDKGKSFSIKHDLNGLGKDAANGNPPSVVLESTGHYHTPVIQFLEEQQYVYIIVNPLISHRAKSSSLRKVKTDAVDAYHLCELFYKEELEPYKKRGIQLLNLRNLTRQQESIAEISAKTKLQLHSLMDQVFPEYRGVFGSLYSKVSLLTLLEFPTSEAVLKMSERELADRIGALCKSRSDLWAMEKAQKLRDAALRNPFKKNLYESHIFNLEVLVTIVLQYQEHLSKIATEIDALANEIEEYHILQSIPGIGEKIAGTIISEVGEIDRFNDAKKLVAFAGVDPSVYSSGKFTASVNRITKRGSNRLRHALYMAIQSGIRDSRKKKTTDDIMARNKRLREFYDKKREEGKPFRVAVIACVNKLLHWIYALLKNKTTFQDIA

SEQ ID NO: 402196 - protein, 326 aa, unidentified
MSYFLGFDVSKRKLDYSLVNGQGIEQINGTVVNEEIAIATLLLTVGGNCPSESITCVAEATGTYHHPIAETSYALGIGCRIYNPILTKQHIKASVRGKKTDKTDALVVARLGLRGEGNLYLPEPYKTTKYQARGAQKLSMIGSSFALHHRHLSSLLEDELSVAAAEAMIGIQTAITTARRQFYQDLTASAKGPIFDLLQTIPGVGPYISASLVGEIQDMHRFHSAKALTAFAGLDPKIRQSGHTLNSTGRLTKRGSSYLRRSIFIAASVAKRCDPNLKALYDKKRAEGKTYTVATCVVARKLLAIVRAVWLSGKDYDPSFYKNSLT

SEQ ID NO: 402197 - protein, 354 aa, unidentified
MPRKSNRLETVATIGIDIGKNTFHLIGLDKMGAIVLRQKLSRSQVNARLANMSPCLIGMEACVGAHHLSRQLKALGHDARLMPARYVRPYSKGQKNDFRDAEAIAEAVLRPTMKFVAIKTVEQLDLQGLHRVRERLVCQRTSVINQIRAFLLERGIAVRQGLRALRSEMPIILATPDKLSPRMIHMIEDLCTDWRHLDGRIETVSDEIQTLSEQDDGAKRLMTVPGIGPIISTATVAAIGSGDVFSKGRDFGAWLGLVPRQMSTGGRTVLGPISKRGNRYLRMLFVQAARAVLLRPQSWEKHGLKSWIEAAARRLNRFKLAIALANKIARIAWGVLHGGRNFEVKPTRPASQAA

SEQ ID NO: 402198 - protein, 320 aa, unidentified
MKFILGIDVAKAKLDVALQLVDGKIRSKVVDNTPQGFAVLSTWLNKYGVIDLHVCMEATGIYWEAVAEFLADAGHTVSIVNPAQIKAFGAAELVRTKTDRVDARLIARFCVAQRPEPWQAPSQAIRELRALVARRDALNAMRTQESNRLLVAREAVRAGIETHLAYLEKAIAEIDAALRQKIDNDPGLKEQRALLNSIPGLGDKTIAVLLSYYGGAPRFDKAREAVAFAGLDPRQYESGSSVRGKPRLSKVGHAPLRRALYMPAMVATTRTVWGRAFRDRLAAAGKPPMLILGAMMRKLIHVAFGVLKSGKPFNPTLHIS

SEQ ID NO: 402199 - protein, 410 aa, unidentified
MLEVKVERCAGIDVAKKFVMVCVSIGLAHQKPKEEVRRFGTTVGELERLKAWLLETGCTEAVMESTGSYWKPVFNILEGSLKVILANPVQVKALRGKKTDPKDCRWLAGLLRHGLVEGSFIPPRDIRDLRDLTRRRRTLLEEGTAEKNRVQKVLEDANVKIGNVLTDVFGMSGQAMLEALLENQMNAEQMANLAQGRLKPKIPDIIDTLEGHRMSDHHRLLVRQGLKHMRFIEEMISELEVQIYEKLKPYHKQVELACTVPGVGPAAAASILAETGMDMSEQGPFPDCHHLASWSAICPGNNESGGKRKSGHTRKGNRWLRAALAQTGWAGAKKKNSDFQSRYQRVKLRRGSKRAATAVSHAQVIALYWVLRTGKPYEEHVIDSQQNRRESQIQHHLRRLTQLGYEIQNA

SEQ ID NO: 402200 - protein, 413 aa, unidentified
METLYRSVCGLDVHKKTVVACVRRLGERDRVWKEVRTFATMTHNLRALVAWLEQERVTHVAMESTGILWKPIYNLLEEHFTVLVVNARHLKQVPGRKTDVKDCEWIAHLLQCGLLRGSYVPARVYRELRDLTRHRTKLVQQHTQTVNRLHAVLQDANIKLSSVASNIVGVSGRDMIDALQQGEEDPTQLAELARGRLRAKIPQLRVALEGLVRDHHRFLLKVVLDQLDYLSTAIDQLSQRIEEISPTSFRDAVCLVSTVDGIQQRTAENILAEIGIDMTQFPSAKHLSSWAGMCPGNNESAGKRKSGKTPKGHRWLRGALGEAAVAATRTKDTYFAAQFRRIAGRRGKKRAVVAVGHAQLTTIYHMLSTNTAYTDLGPHHFDTLEPLRLTRHHVRRLQALGYTVTLTPVQEAA

SEQ ID NO: 402201 - protein, 331 aa, unidentified
METKETIGIDVSKATLDVHIHSNKCKGTFENSKKGFSLLVKWAYGNSPVPTKNILFIFEHTGLYSEKLSEHLSKEGIPYTVVSGLEIKRSLGIVRGKDDRIDAAKIALYAYRLRDEITLSKAPSKRIRALKKLLSLRERLVRQRAGYKASLKEQKKVLAEKDFGLLFKVQKKMVAELTKQIDTIDGEMDSVIKSDTELDRIFGLLLSIKCIGKQAAMFLLVHTDGFTKFDNARQFAAYCGIAPYPYQSGTSIKGRSRVSPMANKGIKSLLNMCALSSIRHNSEIKRYYDQRIAAGKNKMSTVNIVRNKLVSRAFAVVNRGTPYVNVYKHAS

SEQ ID NO: 402202 - protein, 357 aa, unidentified
MEEKNTKLDFSGQDIYVGLDTGMKSWKVTILTGKLEHKTFTQPPKPEVLVSYLHRHFPGAKYQCVYEAGYFGFWIHDALRQQGVNCIVTHPADVPTKNKERRNRNDKVDARKLARNLRNGELTALYVPPRKALEDRSLVRTRMQMVKKRTRCKNQIKALLISYGYTTPDELVRSDWSKRFIQWLEELSFQWESGRQTLDSLLEELKHLQGSIAELTQHIRQLAQQEPYRKQVELLTSIPGISTLTAMVFLTEVVDINRFRNLDHLASYVGLVPGEDSSGDMERTTGISRRRNPYLRNILIESSWMAVRKDPALLMTFSKLSKRMPKNRAIVRIARKLLSRIRYVLKNQEAYEICVVS

SEQ ID NO: 402203 - protein, 334 aa, unidentified
MEKITTVGVDLAKVVFTVHGVDAAGRTVLRKTVRREKLMELITSLPPCLIGMEACAGAHEWARRFIPHGHRVGIMMARFVKAYRKSSKNDRNDAEAICEAVGRPNMRFVPVKSAEQQAILALHRVREGFIEERTATINRIRGLLGEFGVVLPQRAEQVRRGAVVAAEALPVLAREAVADLRAHLRYLDARINHYERQLLALTKTQQAAQRLQGIPGVGPLTASAITASIASGHEFANARQFAAWLGLVPRQYSTGGKAKLGRITKRGDAYLRTLLMLGARAVLQSAAQKTDRLSRWAMALRLRRGHHRAIIAVAAKNARIIWALLARNQDFAIA

SEQ ID NO: 402204 - protein, 379 aa, unidentified
MKKRIIFIGLDVHKETIAVGIAEHGKEPSAYGIVANNPQTIFKLMRKLGPFQRLRVCYEAGPCGYVIYRQLSKLGIECVVVAPSMIPKKPGDRVKTDRRDATNLARLLRSNDLTPIWVPDEEHEALRDLSRAVEAAQGDLMRARHRVRKLLLRQGISKPEGMSSWTQRHRDWLHAVKLPRDNQRVVLREMLLTIEQARERRQRLEAELEHSVEFSPLADIILAWQCLRGIKVISATRLAAELGDIRRFTNPCQLMGYVGLVPSESSSGSREKRGSVTKTGNAHVRHVMVQAAWHSRHPPSLSRELRRRQRGQSERVKAIAWKAQDRLHRRFRRLVGRGKPRQKAVVAVAREMLGFIWAIAQETPVQEHNQQPDSISRAA

SEQ ID NO: 402205 - protein, 409 aa, unidentified
MVVVMNQDSGFDIWCGLDVGKQAHHACALDAAGKRVFDKPLPQDQKRLEELFDKLQSHGRVLVVVDQPNTIGALPIAVARSMGIQVAYLPGLAMRRAADLYPGNAKTDARDAYVIADTARTMLHTLRRVDAGEETLAELKVLVGFDEDLAAEATRLSNRIRGLLTQIHPALERVVGPRLGTKQGLAVVEQLGGPQGMAAASKSKLLRVITKAYPRNAQDFADAITQALTEQTVTVAGTAAAEQVLPKLAASLRATLDQRAELAVQVEKVVDAHPLAEVLTSMPGVGVRTAARILLDVGDASQFPTAGHLAAYAGLAPVTRRSGTSIRGEFPARSGNKHLKRALFLSAFAALKDPTSRDYYDRKRAQGKKHNAALICLSRRRCDVLFAMIKNREPYRAPAPTPSPMPLVA

SEQ ID NO: 402206 - protein, 345 aa, unidentified
MKKKLRYVGLDVHVDSITVALAEEGDEPRSLGAIPNTSESVRKLIVRLGPCEQLRVCYEAGLCGFVLYWQLQEMGVHCSVIAPSLIPQRSGERVKTDRLDALRLVRCFRAGELVAILIPTKEQEGLRDLLRALQSVKRDQIRHMHQLAKFLIRQGRRRPPGVGLLNAKYLAWARAQQFEQAAQREVLNHYVLEFEHSTRRLQELKNALDDVSEQLPKPTAPLVAALQALRGVAKLLALSLVSELGSLSRFRTPRQLMSYAGVVSREHSSGNRIRRGAITKAGNAHLRRMIVEAAWHYRHQLGLRHALGKRQAGFSEDGKGTAWKGSCALRVATGDWSPAANLNLK

SEQ ID NO: 402207 - protein, 314 aa, unidentified
MQDILTCAMGLDVHRDVIVACLARGELGTEPEIEIRSFSTLIPEMRKLRDWVLEVECRHVAMESTGIYWQPIYEMLEPCFDGQINILVVNARHMKNVPGRKTDMRDAQWIATLLRAGLLNGSFIPDKTFRELRHLTRYRKSIVHDITAQKNRIDKFLQSSGFRFTAFLSDAFGASGRNIIRHLMEYGDISREALDKCLKTQTRKRIDEILVALNGSLSEHQRSFLRMIFEHLESLERHRHTVEDAISEEIVKHEAALSLLCSIPGIDVTAAASIIAEIGTDMSAFPDSQHICSWAGLSPGNNESRRKTQERPYQ

SEQ ID NO: 402208 - protein, 342 aa, unidentified
MNEYDGRQFVGIDLHRRRSVIVRQSESGEQLSAVRIINDPVALGLEIERAGPNPEVVLEATYGWYWAVDTLQAAGARVHLAHPLGVKGFRYRRVKNDVRDAADLADLLRMNRLPEAWIAPPATRELRELVRYRAKIVAVRSGLKAQVHAVLAKAGVLIPVSDLFGVGGPHRLANVPLGAADVQRVISLRELIDALDAHETRFSIMVADKLGGHAGYQAIQQLPGVGPILGAVFVAEIGDVHRFADPAHLCSWAGLTPRHHESDTVVRRGHITKQGSKLVRWAAVEAIQRHPATSKITLDRTRIQSRRGKNNAKIAAARKLLTLVYYRLRGGHIRALAPRRAA

SEQ ID NO: 402209 - protein, 407 aa, unidentified
METVHSVCCGLDVHQASVTACLRRVVAGTISNEKRQFSTTVQGLLELSGWLVESSCPIAAMESTGVYWKPVFHILSAVIEVWVVNARDVKQRRGKKTDPKDAQWIAELLAHGLLEPSFVPPPHISALRDLVRMRTALVQTRTQVKSRVLAVLEDTNVKLASVVSDPFGVSGRKMMDALARGNRDPKALSQMAKGVLRRKIPQLELALEGTFTEHHALLVGLNLQLMDHTNSQIAKLDERIDELMGPLQKEAERVESIPGIHHTAARTILSEIGTDMSRFGSASRLASWAGICPGDNESAGKRKSGKIRKGNRYLKRVLAECAWAAGKTDTFLGRTFRRLQVRIGGKKAAVAIGHKILVIVFHLLNEGTMYDDGRYNRPNPKQEKRQLQRALSTLQQLGYQVQLSAVV

SEQ ID NO: 402210 - protein, 339 aa, unidentified
MNRQYAAVDLHLARSLVVREDKAGKELAVERIDNSPMALAQSLADAGPNPEVAIEATYGWYWAVDVLEELGATVHLVNPSGLGQSWEGRRVKNDYRDCRELIDRMRLNKLPEAWIAPPELRELRELVRYRAKLVNIRTGLKAQVKAVLAKHCLQPPVNELWGVAGPRWLDAQELPDAYLIRIESLRDLVAVVDREVTMLERTIHTRLRNDRGYGAVQRLDGVGRVLGAVFCAEIGDAGRFSGPDALCSWAGLTPRHRESDGKAHRGRATKQGSRLVRWAAVEAISKMRGGPKLKTDYHRIADRRGKHVARVAVARKLLTLVYYGLRDGEIRCLAPAGAA

SEQ ID NO: 402211 - protein, 377 aa, unidentified
MNELTTFVGLDVHKKTISVAVAYDRGEPFSRGVIRNEPAEVAKLVEKLGASNTVYAYEAGPCGYALYRQLHELGARCVVAAPSKMERAPGDRVKTDRRDALKLARQLQVGSLPTVWVPEPEDEALRDLTRARQTAQQDLQRLRNRLTKLVLRLGLQPPSGVQAWTVPYRAWLKDLKMPHPYQQIVFEDALHAIAEAEARVDRLRKHVEAAAQSAPRAPLVQALMAMRGIGVITATTLVGELGDISRFDDPRHLMGYSGLTPIEDSTGERVHRGHITHTGNAHLRHVLGEMAWNHPRPLKVGKKLQRQRKGQPQEIVQVAERADTRLHRRYHRLVRKGKAPQEAATAIAREALGFIWAIARLAAGLPVPAPRPRPAAA

SEQ ID NO: 402212 - protein, 399 aa, unidentified
MKGSMPMQSVLAIDVAKGKSMVSLISSCGEVLIEPYEINHSINDFTNLLNKINKQKLDNVSVIMESTGIYHRPVERFFIKNNFKVFVINALYSKMYKRNLRKTKTDKLDCISLSELFFNTDFREYIKPDDIYLNMNALSRQYHALDELCVNLKNRYKNLVYLCFPEYELIFKKKTIYSDLALSFIEKYPHADIISNTRIDTLQNFFKKYGFRHWKKKPATIKEYAINSYPSVSKDDEITSSLSQLARLINTYQKEIETIKYKIIFLGKKTKYFESINSIFGIGEFTASLIIAEIGDINRFKNIKELTAYCGLDPSIKQSGKSINIKGPISKSGNKYLRKILFVSILNILSVTRVCHIENDIETYYRKKRNEGKHHYVATIACTTKLLRQIFVLCKQLDK

SEQ ID NO: 402213 - protein, 338 aa, unidentified
MELYAGIDLHSNNNVLVVLDESDRVIYQKRLPNVLADIVAALGSCQGMVKGVAVESTYNWCWLVDGLQEAGYAVHLVNTAAVKQYDGLKYSGDFSDTRHLAHLLRLGILPKGYIYPREERAVRDLLRKRSQLVRTRTTQILSIQNLLARNLAMQAGSNLIKRWQDTDIDALDLLSEQKMALKSNLALMQCLDEQIALLEEAILAKGKLKPEYKSLRTVSGVGEVLSLTIALETGELTRFAGPGNFASYARTVNSRRESNGKKKGEGNTKCGNKFLAWAFVEAAHFAVRYDPVIARFYQKKCAKSLSVVAIKAVAHKLARACFHVMKNGEAFDVKRAFG

SEQ ID NO: 402214 - protein, 415 aa, unidentified
MKGTEDTRKIDRYIALDIHKEYVLAGGQTAGQEWVLPPRRISMTKFREWATANLHEGDAVVIETTTNVWDIYDIVAPLVTRTAVAHAGAVRQIAEARVKTDKEDVKRLIRLLIADIVPEVWVPPLEVRELRGVISYRNRLVKMGTMVRNRLQSLLHRHNIILPKGKLLDASWWQEQKMSTLEKMQIQQELRMLEGLDRHKREVDMELGRQCLREPWGKQAVRLLQLPGFGVVMTMIVLSAIGDIQRFESAKQLVGYAGLGAGVHDSGKEHIEKRITKSGRKELRWALVEVAWQAIRISPYWKEQYETYLRRMRRPNQAIVVIARKLLVAVWHVLTKEETDVHASEEDLAYKMLVLSWDLDESVRMGLTYKQFAKYALMKLGVETDITRFVRKNVPRRIAPREEVLARMQELGLSI

SEQ ID NO: 402215 - protein, 445 aa, unidentified
MSDSLPSVNSELEYAAFAAIDWADQKNFWRLRPADSQKEEHGELENTPEAVEVWAASLYQRFGGRPIAICLEQSRGALVYMLIKYPHLVLFPVHPTTAARYRETFCTSGAKDDPSDTASLLDLLMRHRERLRPLEPDTTETRLLQFLVEERRTLVDEKTRQNNRLIDCLKRYFPQLLSWFDDVSSPLVEALLERWPNLPALQRAHPGTLRKFFHEQNCRGQEKIEARIAAIYQAVPATRDAAVCEGARIMARGLVAVIATLRNNIAEIDRRIAEVVATHPETSLFDSLPGAGKALVPRLLVAFGTRRERFASAEEIQRYSGIAPVTKASGNSRQVSFRRACPKFLRQTFHEFALHSIGQSVWAKAYYLHLRNDEKKGHHAAVRSLAYKWIRIVYRCWKDGKPYDEQRYLQSLRRRGSLLGAVCAVATPAGWQSVAGFQKLSQNSA

SEQ ID NO: 402216 - protein, 381 aa, unidentified
MSKSSTLFVGLDVHKDSIDIAVADAPRDGEIRHIGSIGGDLAALDKALRKLVSRGHPLHIVYEAGPCGFVIWRHLTAQGLHCEVVAPSSIARPSGDRIKTDRRDAMLLAKLARSGDLSVVRVPDGVDEAVRDLVRAREDAVREQRNGRHRLKALLLRNGIPYTGKTSWTAAHLRWLSKVKLAYAAQQIAFQEYLHSITEAGARIARLEQALRNALPDWGLMPIVQALQAMRGMQLIAAMTLVAELQDFLRFESPRQLMAYLGLVPTEHSSGPKRRQGAITKAGNSAARRMLVEVAWHYRYDARVSPVIAVRQDGLPTAVTDIAWKAQLRLSNKFKRLSARRVMKTKVVVAVARELAGFVWAIGREVQLSGWKGVNTTPAAH

SEQ ID NO: 402217 - protein, 338 aa, unidentified
MELKRIAIDTSKHVFTVHAIDEKERAVLRRDLRRRQVEGFFAALPPTEVVLEACGGSHHWGRRLSALGHRVKLIAPQYVKPFVKRGKNDRIDAEAISEAAARPTMRFVPVKSAERQAQASVLSVRELLVKQRTQLINALRGQAAEFGIIAAKGAGNAAALAARIASNGELPIVVKEMLARLGQEIARLNQTIAALDSQLAALHRASPVSRRLCEVPGVGQITALTATLTVDPDQFKSGRHLAAWVGLTPKERSTGGKRRLGAISKQGNERLRQLLVLGAMAVIKVAKPGHRYATPWLLRLLERRPRRVAAVALANKTARILWAMMTSGESYRHPPVAA

SEQ ID NO: 402218 - protein, 342 aa, unidentified
MKDTIIGVDLAKRVFQVHGASISGEVKFRKKLTREQFRLFIAQQPACIVVFEACGSANYWAREVEKMGHEPRLIAPQYVRPFVKRQKNDANDAEAIVIAARQPEMRFVLPKTAEQQAKSVLFRNRERLVRQRTELVSALRSALYEYGYVFPIGLAHLKRMDALVQGPDCDLPSLIITECQELLSQIAETTEKITAKTKRLKALADETDTARRLQTMPGVGPLTALAVEAFAPQMGQFRCGRDFAAWLGLVPRQHSSGGKERLGRISKAGQTDIRRLLIIGAMTRILAHARYKGPAESWLGRMLVKKPKMLVGIALANKMARQLWAMLTRNEDYRDPAMAAAM

SEQ ID NO: 402219 - protein, 351 aa, unidentified
MRYIGVDVGKRRCQACVMDGEGAVLDKFPFDNTGEGIRRLLEQIGGENCKAVLESTGNLWLRIYEALEGHGVEVKLANPYTTKAISSARIKTDRLSARILAHLLRADLIVECYVAPPETRRVNALLRQRASLVRMRTMVKNRVHSLLDRYGYRPRWRDAFGVQGMRWLKGLEMEPVDRCILDTHLRHVECLNAEIGFLDSWIASQAIESEDAKLLMTMTGIDHYGAMLIACETGDIRRFPSPKHFVSWIGLCPSLHQSGSSTHMGRMKKDSNRRVRWMLVQAARSASRTDPRMRALYRRVASRRGDAKAVIRVANKMTTIIWQMLTKRQPYHQVKEELYRSKLKRMARIAG

SEQ ID NO: 402220 - protein, 333 aa, unidentified
MKNYRTYIGIDVAKLTLDYCIVKEDPQLEQGQILNTQKSVDKFLKTLKKTGCQMNETLFVFENTGIYSSLLALVLSENSLDYAQVPALEIKRSLGITRGKSDKVDAKEIAHYAKRNTDKIALSTLPELSLQQLKIVFAEREKTVAAIKTFERTKENEMFLTKEVFNSVKAINNQTVKHLKKQLVMLDEKIRTLIREDENLYGQQQLLKSIPGIGDITSVYILMATKGFTAFTSGRKFACYSGVAPFEHSSGTSIKGKTRVSHLADKKMKTLLHMASLTAIKYDPELKDYYNRKKAEGKHTMLVLNNIKCKMVYRIFAVIQRKSNFVNLHKFAA

SEQ ID NO: 402221 - protein, 466 aa, unidentified
MNKKRPTGKQKRSVPKRVDWKALEVVHPDAAGIDVGGNEHWVAISPDRDPEPVRRFGCFTADLHEMGRWLVEKGVRSVAMQSTGVYWMPVFEILEQQGLEVYLVNAQHTKNVPGRKSPGRKSDVQECQWLLKLHAFGLLNNSFQPTDEIRIARTLWRQRGNLVAEASTTIQRMQKALTEMNVQLGNVLSDLSGMSGMAIIGAILQGERDPWKLAALVAPEVKATPEDIAKSLEGNWREELLFVLRQHVELYRIYQEKITDCDLQLRKHLESLGAKVDLEAHPIGPRPKGKKNSRNAPGFDLRAELYRITGIDWSQINGIDVLTAQTVIAEAGADLSAFPSEKQFASWLGLCPTNEQSGGRILNRRTRKVVNRATVAFRSAAVTLLRSQSYLGAQYRRLRTRLGAPKAITAMARKLACLFYRLIKHGQQYVDKGTEYYESRYREQQIRSLAKRAQKLGLQLVIPKTA

SEQ ID NO: 402222 - protein, 343 aa, unidentified
MFVMIGIDPHKATHTAVAVDDDENVVGEFTLEASNNQVERLTGWSDRFTKREWAVESANGLGYLIGRQLVAAGETVFDVPPVLASRVRLMGSGKSQKNDPNDARSIAIAALRSDRLRVVEPDDHVTVLRLLVKRHRDMARLRNKHCSRLHALLLELEAGGIEGKISVSNASELLDRIGVTDEASRYRILVAGEVVADIARLDATLGSSKKRIAAAVTASGTSLTDIVGIGPIGAATIIGYTKDITRFPTRGHYATYNATAPIEVSSAANTKHRLNLRGNRILNHAIHIAAVTQLRHDTNGRIYYQKKIAEGKTPKEAIRALKRRISDAVYRRLVADRARQRSA

SEQ ID NO: 402223 - protein, 327 aa, unidentified
MSKKRNKVCGIDVHKRFLVASILDNEGNCETKRFEQDLDELISLKNWILDSGCESVAMESTAEYWRPAYGILNPEINITIGNAYHMKGIPGKKTDVLDSQWIAELELNNLITPSRVFTGDLYELRTLTRARNKMVNNSTVFKNKILHQLDVCSIRLCTVLKDVFGKSGYALLKGIVERKTQDEIIKALPAKTRKIAPVFFEQIPEYIPDSAIFLIDSMLKIYDNLQVEIKRIEERIKFYLKDKENELRILMSVPGIGIVIGSNLLAEIGDIHDFPTADKLAKWAGLTPSVYQSANTNYTGSSRNMVPIIFDGLLLKLHTLRLEDQGN

SEQ ID NO: 402224 - protein, 410 aa, unidentified
MDVVFDRVAGLDVGKKIVVVCVRTPGPGGKRVSETRTFRTMTRSLGLMADWLAECGVQLAAMESTATYWKPVFYCLEEQVETWLLNAAHMKAVPGRKSDVRDAEWIAQLLEHGLVRPSFVPPPPIRQLRNLTRYRVQLQGDRTRDAGRLEKLLEDASIKLSAVASNIVGASSRAMLGALVAGERDGAVMADLARSKLRRKIPELAEALTGRFDDHHALLVGQLLARIAATEQALVDLDAHLADLMIPWAHELELLQTIPGVGVHVAQAFIAETGGDMSRFPSPAHLAAWVGVAPAMHESAGRRQPAGTRHGNKFLTAMLVEAAQSASRTKDTYLAAQFARLTSRRGHNRAAVAVAHSILVSAYWMLVRDEAYRDLGPGWLDQHARTEAHTRHLIAQLEHLGHTVVLDPVA

SEQ ID NO: 402225 - protein, 405 aa, unidentified
MRVVGLDVSRTVAETACLEDGCVRAGGRVTLERAALAQYANSLRPTDHVVLEATGNTAAIVAALHSHVARVVIANPLQVRLIAEARVKTDKIDAAVLAQLYASGFLPEVWIADDRTQALRRQVARRAQIVRQRTRLKNEIHSVLATHLIPRCTATDLFGKKGRRWLAEQPLPLDERIAVEQRLRELDRLGEDLAVIDRALGEAVLADAQLKRLLTITGVNTTVAIGLLAAIGDIGRFPSARKLVSYFGLNPRVRQSGLQPAQHGHISKIGRSHARAMLVEAAWAAAKAPGPLRSFFLRIRARRGMQIAAVATARKLATIVWYVLTDQEDYTWARPSLVAMKERALQLQAGLPARRGQRGIAADYSVKTLRDRERAVVENAERAYTRFVGRWKPQGPKRRAAASTG

SEQ ID NO: 402226 - protein, 358 aa, unidentified
MAKISLAGLQQFVVGFEDETFHVGIDVHKRSYHIALHRCDGRALSLVSPASPQAIIELLTGLNIRVGAVAYESGPTGFSLARMLFAAGFPVIVAAPSKIPRSVTPGAKCDRLDCLKLANYAAKGMLKSIAIPTQQEEARRTLLRRRHMLVDDVRRCKQRIKGLLLFLGVDEPKELEHWQIGVDAVLLALPIDSAAHMTLQSYLRELTFNQEELRRIEHQLKSLTKTEELANTMTCLQSIPGVGPVVATTFAMELFRPERFKRPEEVASYLGLAPVVRQSGNKSSSGRLVPAGQTRLRSLLIEAAWMWRSRDSYAENLYRRLLGKTGIAQKAIAVVARRLAIILWRLYVEQRPYRIVIS

SEQ ID NO: 402227 - protein, 388 aa, unidentified
MQTVADRPEAPTAIRTDLGAIFVSLELSRSTWLITSLSPGGGEKMSKQVVRGGDVAELLERFARLREKARARTGKVFPFVVIQEAGLDGFWIDRALQNEGIESHVVDPASIATSRRRRRAKTDGIDGEALVRALLAYKRGEPRVCAMVKAPTPEEEDRRRLCRERKVLIGERVQHVNRVKGLLFSQGISGYEPLRRDRRERLATLQTGDGRLLPDHLKAQVCRELDRLELLLEQIKAVEAERDVLLAAQQVAAPAPAAMLLDIKGIGPEFAAILWSEGLFRHFDNRRQVASYAGLAPTPWQSGSVDREQGVSKTGNPRLRTTLIQLAWLWLRHQPQSALTLWFEERVRRNGGRLKKTTIVALARKLLVALWKYVTAGVVIEGAVMKRT

SEQ ID NO: 402228 - protein, 387 aa, unidentified
MAQVNDLSRSLTAFDPISTLVVVVEMSKASWLVSGAVPGVERQPLKKLEPDAPALLRLIERWRNEAVRAGRPISRIALAYEAGRDGFWLARWLIARGIDAHVIHSASVAVSRERKRAKTDRLDAAMLMRVFLGWLRGERGHCGMVAIPTMEEEDARRPSRERESLVNERSRITNRMKSALARLGVRGFKPHLRKAPERLAGLRTAEGTGLPTNIIEEFRRDMARLALVREQIGSIEKTRAERLERAPDTGPHAMVRLLARVIGIGIETADMLVREILSRKLRDRRAVARYAGLTGSPDESGLNRREKGLAKAGNARVRRGVIQLAWRFLMFQKDSALARWYRTRTEGPSGARKTTMIVALARKLLIALWRLVTTGEVPDGVELRPAA

SEQ ID NO: 402229 - protein, 342 aa, unidentified
MQVTTYGLDLAKSVMQLHWVNMETGEIHRKQLKRRALLEFFANRQPGIVAMEACGSAHYWARELRKLGHEVRLIAAQFVRPFVKTNKNDAADAAAIWEAVQRPDMRFVAVKSEEQQSILSLHRIREQLIKMRTMQVNQIRGLLYEFGADLPQGRQRGLKEVPDALADLEKSISPMLLDTVHQQLKRLEGMDKDIADIEKRLMLWKKDQVAVTRLMAIPGVGLLTATAIIATVGDMKSFRSGREFAAFLGLVPRQSGTGGKVRLLGISKRGDVYLRTLLTHGARVVVNFQIKNRNPWIDKLLSRRPHNVAVVALANKMARMIWALLAKGRSYDPQYQGVVAAA

SEQ ID NO: 402230 - protein, 416 aa, unidentified
MSLALPEALVFTGIDWASAEHAVCVLDAAGKIAAQFTIEHSAEGIALLVRRLARYGDPADLPVAIERPSGRLVDLLLEAGHPVVPVSPNAIKTWREGEVLSGAKSDAGDAAVIAEYLRLRYHRLAPAAPYCDETRALRTAVRTRDDLVEMRVAATNQLAALLDAHWPGAKAVFADVESPISLEFLTRYPTPAAARHLGEKRMAAFLVKHGYSGRRPAAQLLARLRDAPPGTTGDALTEALRDAVLAVVTVLRALNAAVKDLDRSVAAHLGEHPDGAIFTSLPRSGQINAAQMLAEWGDCRQAYAGPGSVAALAGVSPVTRQSGKHRGVGFRWACNKRFRRAITTFADNSRHASPWAAQIYADARAAGKDHPHAIRILARAWIRVIWPCWVNGVPYDPARHGAAAALAGRTPSQSAA

SEQ ID NO: 402231 - protein, 379 aa, unidentified
MSASSTASASEQSLYAALELSKNSWLLAIQFPGRDNPSLHPIKGGDADGLMAKLDAARERLAKVSGQAPKVILCYEAGYDGFWLARFLEQRGVDCLVMDPASLQVDRRARRAKTDRIDVEKLLHTLIAWCRGERHVCSMVVKPSGEEEDLRRSHRERDRLVRERTAHINRIKGLLFGQGIRGINVKRHYKALAPADLVTGDGRPLPERLGREIAREIQRLALVQEQLREIERERDLAPTPCQATERKRQQLLRLNGIGTAIAPILSREVYYRQFANRRQVASFIGLAPSPYDSGESRHSQGISKAGNSLVRAVMIQTAWMWLKHQPQSALSQWFHQRTEGQSKRMRCVMIVALARKLAIALWRYLEHGLIPQGATLSAK

SEQ ID NO: 402232 - protein, 369 aa, unidentified
MEKDTTYVGLDDSKRKIVAGILRPGDAQPELREIANDPRQIRRLFERLTREGPVAACYEAGVSGYDLYRQISALGVACAVMAPALTPRRPGQRIKTDRRDAAKLVRLFRAGELTAIHVPAEAEEAVRDLVRCRDDIRRDVLRWRHRVLKLLARHGRAYLAGKNWSQAHWRWVREQRFDLPPLQRAFEATLFALEQALARQAELDKEIEALAATAPYREPVGGLRCFRGIDTLSAMILLAEVVDFQRFRRPRELMAYLGLVPSEYSSGETQRRGALTKAGNSHARRVLVEAAWHYRHRPTIGRALASRSQGQPDEIVSHAWRAQQRLHRRYRHLVGHGKRTPVAVAAIARELVGFIWAALTRHESRRQAA

SEQ ID NO: 402233 - protein, 471 aa, unidentified
MSTTPPSSEQRRGVRIVSKTKVPLPPQLKRVNLDAAGIDIGAEEHWAAVPPGRDTEGQDVRRFGAFTGELCALADWLKQCGIQAVAMESTGVYWIPLYELLVERGFEVRLVDARQAKNVPGRKTDVLDCQWLQELHTYGLLRGAFRPVDQVCILRSYLRQRSMLVAYASHHIQHMQKALEQMNVKLSHVVSDITGLTGMGIIKAILSGERDPVKLAKLRDPRCKSSEATVARALEGHYREEHLFALRQAVELVEFYQQQMTACDRQIEACLQQFEEKSSETPVTTRRRKRRRGGIAFDACSYLYRMTGVDLTRIDSIEANTALTVISEIGLDMSRWPTEKHFGSWLGLAPGSKVSGGKRLSGRTKPSANRAAAALRLAAQSLNQSQSALGAYFRRLKARLGAPKALTAAAYKLARIVYRMLKYGAGYVDQGEAAYEERYRDRLLRNLKRRAAELGFQLTAVELNSGQAALT

SEQ ID NO: 402234 - protein, 447 aa, unidentified
MRIVYQRCCGMDVHKDSITACVLLIDEEGEFRTESRRFGTMTRSLKEMSGWLASLGVEAIAMEATGVYWKPVWNILEAEKKFALLLVNAQHVKRVPGRKTDQKDSEWIGELLQHGLLRASFVPPVEIRQLRDLTRMRARIRQTLASFANRIQKVLEDANLKLGSVASDVLGVSGRHMLKALMAGEQDPQKLANLAQGHLRKKIEPLQLALQGHFTDHHRLQLKLLLEFVEFGEQQLSHLDSEIQLLLSKVQGEPGLPGPAEGTVAEAEASPPQVTSPLQTAVELWDSIPGIDQLAATTLVAEIGANMDQFPSAHDLASWAGLCPGNDESAGKRRSGKTRKGSVWLRRALCQAAWSASRTKNTYLAAQYHRLIVRKGKKRTIVAVAHSMLIIAYYLLKRRCTYQDLGPDYFNLLNEEAITQRLVKKLTGLGYHVTLQPARTQAVSQAA

SEQ ID NO: 402235 - protein, 454 aa, unidentified
MKKELTISMEVIHPHAAGIDIGSKSHWVAVDQDPKHVREFGVYTKDHVRLIEYLHSYQITTIAMESTGSYWQPLFNALQSAGFEVFLVKGDSTKNVSGRKTDMLDCMWIQKLHSLGLLSASFISSDYLQTLRTYFSHREYLVDQTTRYINKMEKALRLMNIRLDVALRDTMGKSGRAIINAILDGERDPQYLASLADWRVKKPKEEIADSLQGEWRENLLFELQSCLKFYDSYVAEIKVCDQRIESLLVQYAPKDDQTFQLSHQPGLKPEKKQKNKFSPSFNVRQLAFAHLKTDLFQIPGVSYNTVLSILCNLGNDIHRFKSAKQFACWLRLVPDNKISGGKIISSRTPKSKSTLATCLRQAANSIGNQKEHPLTPFFKRIAYRKGRGAAITATARKLAIIIWNMIVKSQSYRGYDYDLINQKRKSAQIKNIRSRLAKLNLSDDELKTLFPITS

SEQ ID NO: 402236 - protein, 320 aa, unidentified
MNQENSFIGIDVAKARLDIAIRPTGRQWQADHTEKGMQELVEQITELHPTLVVLEASGGLEVPMVAALAVANLPVVVVNPRQVRDFARATGKLAKTDALDAHALAHFAEAVRPAYRSLPDPETQSLNALVARRNQVMSMLVAEKNRLRTSRPPVIQRIQVHIAWLEQELDEIDRELKEMLHNSPVWREKENLLRTVPGVGPQLAVSILAYLPELETLNRKRIAALVGVAPFNRDSGTLRGKRAVWGGRSRIRASLYMAALVASRHNPVISAFYHRLLAAGKAKKVALTACMRKLLVILNAMLKNHSSWQSLNPQLPGSCS

SEQ ID NO: 402237 - protein, 417 aa, unidentified
MQSARNTLPEEPANGVTAGIDWACDDHAVSVVDARGREISRCTIEHSAAGLTELAAVLRRAGAGEAAIERPDGPVIDALLSAGVTVVVISPNQVKNLRGRYGSAGNKDDRFDAFVLAGTLRTDRARLRRLTPDSPATVSLRRACRARKDLVSHRVAVANQLRAHLRNAFPGAAGLFAEIDSPVSLAFLARFDTQDRADWLTPARLGKWLASIGYSGRTDPAVLHARLAAAPRGITGPEADAQAPITRALRAVLVTITEQIKALSARIASQLAAHADSHVFTSLPRAGTIRAARLLAEIGDCRARFPTPEALACLAGAAPSTRQSGKMRAVSFRWACDKQLRDAVTDFAGDSRRASPWAADLYNRARARGHDHPHAVRILARAWLFVIWHCWQDNTAYDPARHRALQTLLTQDQQEEA

SEQ ID NO: 402238 - protein, 387 aa, unidentified
MQPAHIQDFTLDDQTLTASLELASKNWKMALQDGMHRSPSEHKAEQEGAADRLEEAIGLIETTRREWGLPPSCRVVIVYEAGQDGFWISRALQKRGYEVVIVDPASIPVERQARRAKTDRLDAIRLLCCLRGWLRGERDRLHAVRVPELEAEEMRHLMRDRGLLQKEVGQHRDRIRKLLRTVGCWVRVGPPFAGQLERGEVVCHDGAALPPCLRQRLMRECERLDLVTRQLKELEAALPEQLPEATARSVATLQRLRGVGQIGAHRLVLELFWRRFDNARQVGSCVGLVPQPYDSGQSRVDQGISKQGNRRVRALLIEMAWMWLRYQPDSALTHWFARRTTTGAGDPSAGKRGKRVAIVAVARKLVIALWRYLKDGVIPDGAELKYG

SEQ ID NO: 402239 - protein, 320 aa, unidentified
MSSAKRDARIGRDGPHLQVPSTEDGADALPAFCQRHGATLCVMEATGGYERPAFARLWARNVPTAVATPRAVRRFAEGMGVLEKTDRIDAGVIAWYAETKRIQPTQPASPDQRRLAALVTHVRQLTEQKVVLQNQARLVDDADVLASFSLVLGTVRAQVKAVAAKVAALIEADPLWAKLDAAFRTVKGVANRTVARLMAELPEIGTLSNKAIAKLAGVAPLANQSGTHDGARHIRGGREGPRSILFIAAGIAARHEPDFRDFDQRLTQKGKPRMVVRMALAHKLLTRLNAKAREARANLANTARNLEQADHERNDAAQPA

SEQ ID NO: 402240 - protein, 430 aa, unidentified
MKYNTQNAKIASITEETLILGIDVGSETHYVRAFDWRNYEFSDKPLAFSNDEAGFLTFIAWVEDIKGKSGKTAVIPGMEPTGHYWFNLGKFLQDSGMRPVHVNPHHVKKSKEMDDNNPEKNDRKDPKTIAALVNEGRFSCPYIPTGVYAEIRSLSNLRFQTQEEITRIRNRIARWISIYFPEYKDVYGKLEAVSGLMVLKEAPLPMRIKELGAEGINQIWRNARLRGAGMKRAKTLLSAAEHSVGSQEAPETASLEIRNLLEDYEKYGRRMEELMAKIEEKIKEVPYVDKLLEIKGIGLKTVCGFISEVGDLSRFDDPKQLQKLAGYAIVKNSSGKHAGESHISYRGRKRLRYVLYEAAISVIGKNGEFREIHRYYQTRDKNPLKKMQSVVVVACKVLRVFYAILTKGVEYDGEKMLRDIRRPGMSAQAA

SEQ ID NO: 402241 - protein, 394 aa, unidentified
MDSLLVGIDVSKESFSVAGIDSEGNESFSGSYSMDSSGFGEFLKTITSHCEDLSKVIIGMESTGCYHINLYSFLTSQQIHTMVINPLLIANYAKLSLRKTKTDKKDARTIAKFLLDHRQEVCQLSVSQDLQDLRDLSRERESLCHLMSATKVEIKRVIRTTFPELESMGDLYTRTMIRFLQEYPSARLVRAAKSKAIAKALKRPSVGNKLTLTAEEIVKAAQSSVATVSPAKEIILRGKIATLLHLQERLAEVSKLLTELCQSTKLEDLEILRSIKGVGPNTAAPLLAEMGEVKNYSSHKKIIAYAGMDPSVHESGKYVGMSKLSKRGNRHLRRAIYLMTASVVSQNVFFKAYFLKRKREGLAPQKALFATAHKLIRVIFAMLSQRTHFKVKEA

SEQ ID NO: 402242 - protein, 436 aa, unidentified
MNTPNVPSTPLTATPAPLVFAAYVGLDWGDEQHAVSLAAAESDQIERRTLEQTPEALVAWATELRQRFPGGKIAVCLEQARGPLIYGLQCYEHLVLYPINPKSLARLREALHPSHTKDDPLDADLALELVRKHREHFRPWQPDTVQTRQLALLTESRRGFVDQHTAGTNALQTHLKSIFPQALELIGLDLGSPLATDFLKKWPTLQHVQKVKPAVLRKFYYGHNSRSEELIQQRLELVQKAQPLTGDEALLAAHGLAIQSLAAQLAVLHQTITQYDRQIAAVFASHPDAPIFQSLPGAGAALAPRLLAALGTDRSRYPTALAVNCASGIAPVTEKSGKTQYWVHLRWSCPKFQRQSWHEFAGCSIKLCAWARCCYDQLRKRMGHHEALRKLAYKWQRIVWRMWQERQAYDESRYVNSLQRHGLKTYAELVPATNCE

SEQ ID NO: 402243 - protein, 408 aa, unidentified
MFMISVGIDVSKGKSTVSIMKPGGEILVTPFEMLHNIESIVALTDRIKTYDEEVRVVLEATGHYHFPVVILLVEKGVFVSCINSLRMKKYCSQSLRRAKTDKIDSLKIASYGLTYWEELTPTMPASSIYAELKTLSRQYYQLTSLVVKAKVNLSNLLDQVMPDVQTLFPKSVSNRKINDFVQRYWHFGNIQKMSKTRFVSDYCKWAQKQGYRLNERKANDIYALSQNSIPVLPNTLSTKISVLETVRILHELEKSRDTILTQMKELAKTLPEFSVVLNIKGIGETLASKLIAEIGDIHRFHNRNALIAYAGIDAPPYQSGAFTATKRRISKRGNKYLRKAGYETMQSLIKHKPEDDAVYQFIQKKRSEGKACNVAMIAGFNKFLRIYYARVSEVYREIDKQLIFGSNV

SEQ ID NO: 402244 - protein, 359 aa, unidentified
MPTMPEAEVFVTLGIDTHKHTHLVVALDQLGRWLGQLEIPTTTAGFAELYAWATELGTIDTVGIEGTGAYGAGLCRWLRERGVVVVEVDRPDRKLRRNVGKSDPIDAEAAARKVLSGEATVAPKSGTGHVEMIRVLRVARRSAVVSRSQVTNQLQALTVTAPTVLREQLEGRTTRKRVAIAAKFRPGDEPDTVTAATRYAMKKLALRFRMLDAEIKDLDRQLTRLVTQTAPKLVALRGVGIHTTATLLVTAGDNPERLRSEGAFARLTGTAPIPASSGQTNRFRLSRGGDRQANSALHLIAVNRLVSDPRSRACVEKRTGGTKANLDVIRRLKRYTAREIYPLLVEALTDAHNTVPRAA

SEQ ID NO: 402245 - protein, 285 aa, unidentified
MQAVTTIGLDIAKSVFQVHGTDAKGQVIIRRQLRRRYVLAFFQKLAPCLVGIEACAGSHHWSRELQALGHRVRLMPPAYVRPYVKRQKNDAADAEAICEAVTRANMRFVATKTPEQQSCLMLHRTRHLFIRQQTAVTNAIRAHLAEFGIVAPVGRHGVEQLLNIVADCGDERLPGVARRCVAALGAELKMLKAQILEFDRQIMAWHRSNATSKRLDDIPGIGPALATALVASVADPKVFRSGRDFSAWIGLVPKQRSSGGRTSSAVSASGAIAICVVCSRQVRWR

SEQ ID NO: 402246 - protein, 348 aa, unidentified
MSKGNQYVGLDVSLKQTSICVIDDADKIVWRGQVDTTPEAIVSAVTQHAPHAVRIGLESGQLSNWLFHGLKQAGLPVICVDARHAKAALSLKVNKTDANDALGLAQIMRVGWYREVTVKGLDCQAVRALLVARAQIVSQITTLKNCVRGILKTFGRVLPKGLRSQFPARVRAAIEGHPALGAIIEPTLQVLEAARAQLLVYDRAVIQRARSDDTARQLMSAPGVGTVVALAYMTGVEDPARFKRSSSVAAYFGMTPRRYQSGEVDHAGRISKCGDGMVRGLLFEAAKVLLGRSSRPNALKTWGEALGKRIGLKKATMAVARKLAVILHRMWTTGATFQWNAGTTSSVA

SEQ ID NO: 402247 - protein, 358 aa, unidentified
MTLKHTQPDFTGQHIYVGIDVGKKKWIVCIVTQFSEHKVFTQAPQVSILAKYLHRTFSGATYHCVYEAGYCGFWIQKQLQEHHIDCMVVHPADVPTKHREKAFKTDRIDARKLARALRNGDLEAIYVPSRQAQEDRSLVRLRYMTVKDQTRCKNQIKALLSYYGIDLPQEIVGSHWSKNFLKYLDSIRMERATGDAVLKTQLAKLLSLRQFLVSITKQIRALAQDNRYCQSVAYLISAPGISTLTAMILLTELVDIHRFKTLDDLAAYCGLVPGEHSSGEDEIITGITSRRNPFLRRILIESAWVAARKDPALIMAFNTLAKRMPKNCAIVRIARKLLNRIRFILLHQQPYQSSVMAA

SEQ ID NO: 402248 - protein, 354 aa, unidentified
MSQTFKTAIAVVGIDIGKNSFHVVGLDTRGAIVLRQKCSRGQVEVRLANMPPCLIGMEACVGAHHLSRKLKELGHDARLMPARYVRPYSKGQKNDFRDAEAIAEAVQRPTMKFVATKTADQLDLQALHRVRERLVSQRTGIINQIRAFLLERGVAVRQGLRFLRAELPRILAAPPNVLSPRMVRVIEDLAGDWRRLDERIESLSGEIEAVARQDAGCERLMSVPGIGPIISSAMVAAIGTGDMFSKGRDFAAWLGLVPKQISTGDRTILGKISKRGNRYLRVLFVQAAWVVLIKPKSWERHGLKPWIEAAKKRLHRNVLAIALANKLARIAWSVLARGRAFEVRKVDEAAAQPA

SEQ ID NO: 402249 - protein, 440 aa, unidentified
MAMRKQEDLVFPNAAAIDVGASSHWAAAPPHSTDAPVREVGAMTDDLNGLADWLLACGVDVVALESTGVYWIPVYEVLEQRGLKVWLVDARQVKYVPGRKSDVQDCQWLQKLMSYGLLRPAFRPDADVCVIRAVARQREVLLTSQASWVQRMQKALVQMNIQLTEVISDVMGQTGQAIIRDIVAGQREPKLLAKHRHLRIKASEQDIVRALTGNWREEHLFVLKQALAMYDDIAGHLRECDAKLQSLLAERSAASVDLGKAPRAGSKARAEFDVRQQLANWAGADLTRINGLGLDSVMKILSEIGTDLGRFANVKHFCSWLGLCPATKISGGKVLSARTKRSANRVRQALKMAAMSLSHSDSALGAFYRRLCSRMDKPRANTATAHKLARMVYFMLTRGEAFVDQGQQRYEAQQRERSIAALKRRAAALGFQINPVGAAA

SEQ ID NO: 402250 - protein, 408 aa, unidentified
MEVVVVVGAGLDVHKTKIVACCIDGRSSPPTVVTCTFGTFRDEIERMRDWLIKRECTHVAMESTGVYWMPVYEVLEGALEIILGNPRHMANVPGRKTDVSDAHWIAKLLRHGLIQPNFVPPRPIRDLRQASRYRRKLMQTRTACLLRVEKLLQCATIKLSSVASDIFGVSGRLMLAGLAGGVTDPRELSELAKGKLRGKRGELMRAFRGSFSKEDASLLRVELKVIADLEAQIERLETLIDQKLGPFEDVIALLDTVPGVNRTLAIDLVAEIGTDMTAWKTDRQFAAWSGTCPGNRESAGVRKKAKAREGNPYVKTILIQAAVSASQTIGSHLSFRFKRLAARRGPRRAFVAVAREIAVAVYHMISKKVPYTPPRNADPEVIRQQRSRHLMRELTKLGYEVNCKPLNT

SEQ ID NO: 402251 - protein, 448 aa, unidentified
MYIIINVCVYNNHQNSVFWWLSNIFHCFVDYLFYMILKETICNDPQVCRIVDLPVYYELETNNGNRDYRIQIGGHYMNYNTVYVGMDVHKESFTLCSCKYEDEKASHYQRTPASYKNVLRYLAFLRTIYGEDTRFVCGYEAGCLGYSLYHQLENFNVECVILAPTTMLEQRSKRRIKTDKRDAEIIARSLAQHNYSPVHIPTETDNQTKEFIRMRDDHKAELKKIKQQILSFCLRQGYQYDGSGNWTAKHVKWLRSLKPAGLYKEILDEYLLTYTILTDKLNRLDQRIEELASKEEYKESVSKLTCFLGIKTHTALSVIVEVGDFQRFVSARKFAGYLGLVPGQHSSGDDRNGLGITKAGNTHVRRLLVESAQSYTRGKIGYKSRVLRSRQAGNSPQVINYADRANERLRRRYYKMVLKDGKKYNIAKTAIARELACFIWGMMTDNIY

SEQ ID NO: 402252 - protein, 414 aa, unidentified
MSHPLLVGVDPHRRTNTVCMMDREGEEACDRFTVQNNHPGTAAFVREVAQRAVEGDFDAIHIATEATGWYWWHFFQTLDQDPLLNQWPLTLYPFNPRLTASYKKTFVDLDHEDAIDAFVVADRLRIGRDLPAPFHYEDLYLPVRMLTRYRFHLVHQLAREKAYCLAVLYFKYSEYSRNDKKPFSHLFGATSRAVIQEFASIEDVVALPFEELVEFIDCKGKRRFPDPADNARKLLRVAHDSYPLPQAMHQPINLILSLSLRHITTLEGLKKRIDTAIAEGMQSIHHSLDTIPGFGPVFSGGIVTEIGDIARFDYNQAKVAKYAGLKWRKTQSAEFQAEETRLTRTGNRYLRYYLCEAANQVRRRAPEYAAYYDRKFHEVRKHQHKRAIVLTARKLVRLVVRLLTTNEPYRHRRL

SEQ ID NO: 402253 - protein, 305 aa, unidentified
MKTHIGIDVSKKTLQIDQPGQPSKKIENTPKAIAAWLKDQPRETHLILEATGGYERPLLEAARQREQPHTLVNPRAARDFARSLGLLAKTDKIDARALRLYGEKLEPTATPPPDAGQETLREWTGLREDLAEQLQALKNREEHHRNPAAKKHLRAAMHALEKRLAKIDAEIETYLQEQAPELNNRIQTLCLVPGVSNRTAITLVAHLKGLGRYNDRAIAKEAGLAPLNHDSGQMRGQRHIYGGNPVVRKVLYMAALVASQHNDWLKAKYEKLIKTKAPKVALIAIARKLLVWLNQLLKPALQSPT

SEQ ID NO: 402254 - protein, 412 aa, unidentified
MSYKIAGIDVHKKVLMVVVMEASTPEGKPERRRFGTLASELRRLSSWLREQGVEEVVMESTAQYWRSVWLELEPYLRLQLAQAFSNRAPRGRKHDFKDAERLVRRLIANELILSFVPDGEQRTWRNLTRMKTQLTRDRVRLQNQMECLLEEMRIKLSLVVSDLLGASGLRILRALAQGETDPKQLALLGDDRLKCSEEQLVDALTGTPQPMHRQMLTLQLERLQLIDGQIAKLNGLIAQAMKPHQDAVIRLAQVPGLGVDSAQQVIAEVGVKASTFPSAAQFTSWVGTCPGKDESTEENHSSRSAKGNKYLRRVLNQAAHAAVKKNGSYFQAVFRRLLPRLGYKSAIWAIAHRLCRVVWKILHDGVRFIEQGTESDPRVRKHRAQVLTRALRKLGYDVVINPINPCTAETGM

SEQ ID NO: 402255 - protein, 425 aa, unidentified
MLAVGIDWSEEFHLVALGRPGEGVFEVRRVEHSPKAVDALVERIAALEPEPAEVRVVLESRHGLLVERLLDAGYVVVPVNPDLVARRRGPAKKKDDAEDARIACLLALDRFERLRPLIPHGELAGELRAIARDDERAARDERRLLNRLRQDLLATFPAALQIAGADPGAPTFLRLLERWPTAQALAQAPRAELISFARNCRHGWPERFADKVEAALAGDHFQPRAYLVRAKADTIRLSAQQLLAIGQQRRAWERRMGQLLLGAPRHGRSRQPREDERGQSFPGGEVYLSFPGLGDRLAARVAGEIGDHPEQFESPNALQCYAGKAPVTRRSGKSEFVISCRLAYNRHLGDAVQQWAFCSLRSSPWAREFYDSKRAAGKGHHAALRALGNRWLEILWHCLQRGLLYDEAVHAANRNRALQPLAQAA

SEQ ID NO: 402256 - protein, 344 aa, unidentified
MDHFAGLDVSVKETSICIVDEAGKIVREVKVASEPEALLAVLKNPAYHFKRIGLEAGPLSQWLFSALAEAGLPVICVETRHMQAVLKAQINKTDRNDARGIAQMMRAGLYRPVHVKTIRSQKLRMLLTHRKLLQSKAIAIENDLRGTLRNFGLKVGMVGKVKFEARIRELVENLPDLAVLVEPMLIVRRVLREQIVILHRRLLAIVRDDEVCRRLMTTPGVGPVVALTFRATVDVPARFRKSKAVGAVFGLTCAKYQSGEVDRNGRISRCGDEMMRVMLYEAAQSMLRSKKWSWLKAWAMQIARRRGMKKAIVALARRLAVIMHRIWVDGTEFRWTREQAAAAA

SEQ ID NO: 402257 - protein, 350 aa, unidentified
MSIRNQPRDAAVFGIDIGKTVFHVVGLDAAYAPIQKATFRRETLLQFFERASPVLIGMEACPGSQWLARKLQAMGHSVRIVPAQFVKPFVKSNKNDIIDAEAIAEAVTRPTMRFVEIRTPEQIDLQALHRVRDRMIAHRTRLISQMRAFCLEYGIAIHQGAGKFKGEMPRVLADESNELSPSMRRILTEVYGEMMELEQRIAAMNREIEAIAARSDTARRLMTVPGIGPLASTALLAAAGSGRQFSKARDLAAWLGLVPREHSTGGKTKLLGISKRGNKYLRRMIVHGARSCVTHLDRSRDRLGPWLDGLESRMHKNKVTVALAAKIARIVWVILTKPGATYERRIPAFG

SEQ ID NO: 402258 - protein, 350 aa, unidentified
MDATMIGIDLAKDVFEVAMANDRWRVIKRERLTRPRFERLLKEHPAAHLIMEACGSAHYWARTAQQLGHQVTLLPSQYVRPYVRRQKTDRTDAEAMVEAVRSGGIPPVAVKTVAQQDVLALHRMRAQWMTTRTARLNAMRGLLLEHGIAIARGAHTLLRQVAARLANEDDPLPPHLRIVLDLTVDEVRDLEDRIDAVDRELAAVAADDRVVQRLMRIPGIGLLTATAMVATVGHIHAFPRARRFASWLGLTPREHSSGGRRHLGAITKRGDVYLRCLLTHGARAVLRMAHRGARAPSPLPRLHDWALAVERRCGHNKATIAIANKLARIIWVVWTREVEFMMAPPVVCAA

SEQ ID NO: 402259 - protein, 344 aa, unidentified
MEEYIGLDVSLKETAVSIRRDGMRIWRGKCASDPKLIADVIRKRAPAAERVVFETGPLSVWFYHALCAEGLPAICIDARHAKAALDMAANKTDANDADGLAHLAEVGFYREVRVKGFDSMLTRTLVVARTKLVRITTELSNQIRGLMKTFGLVVPPGKGSKFEEHVRELVIDRDGLAAIVLPLLESWRSIRLHATELGRQLVTGTRQNQACQLLMSIPGIGAITATAFTTAIEDPSNFRHSRSVGAWLGLTTRRYQSGEVDYNGHISGRGDSHLRSLLYEAATVILTRSSAESSLRTWGLQLRERVGFKRAAVALARKLAVTMHAMLKSGELFDRTAGAPARAA

SEQ ID NO: 402260 - protein, 330 aa, unidentified
MTYIGIDVSKDTFTVAYSSDKNSKTKTFKNTVKGIHEFIQTISKEDTHCVLEATGNYSALLVYLFSKAGITTSLENPLKIKNFARVMLSITKTDDIDARLIAMYGEKMNPSPYKLKDESILVLKQKRTVLRQLKKQLVATRNLKGSMEVLPFVDSTCKRTIERTIEFLEKQIRNMEENITSLANQEYKKQMDLLTSIKGIGVTLAAALIIATGGFTYFDNAKQFTRYLGLSPTYQQSGMSVNVKGHINRNGDSTLRSQIYVAAFASLRCNSECKECYDRLRSNGKPGKVAVIAVANKLVRQAFAVVTKEKEYVDGFISEKPQKLQKHISA

SEQ ID NO: 402261 - protein, 391 aa, unidentified
MIFVGIDVAKDKHDCFILNSEGTVLADVFTIANNRIGFETLLSRIQSCSQGESKIKVGLEATGHYSYNLLGFLLDSGLATYVINPLHTNLYRKSLSLRRTKTDRIDARTIAMMLMSDVDLKSYSNTAYHNEELKSLTRYRFDKVKERAKLKSSVARLVNILFPELEKLVSSLHIAVVYALLSNYPGASYIANANTEELAETLCTASKGRYTKSKTAEIQVAAGVSIGSQMPAKSMELKHTIALIRELDKEISEVESAIDKITSQMDSPIFTIPGIGRHMGAMILAEVGDFSNFASADKLLAYAGLSPSTYQSGQLQNCYAHMEKRGSRYLRYALFNAAKYVCLWCPTFSAYLEKKRSEGKHYNVAISHAAKKLVRLIFAMQRSGKAFLADY

SEQ ID NO: 402262 - protein, 325 aa, unidentified
MQGKEASEQETLNCTVGIDVSKTWLDAHALPSSASLRVANGAEGIRQLKRWLLRHKPKLVAVEATGKWHRELCRSLQASGIAVAVTDPYRVRMFAKAQGNFAKTDRLDAKVLAQFAAVMAPACRAATPQALEAMKELVTARASAVAEKTALKNQCAAAEGCFLKRQLTRRIVQLEVHIKALERECLRQIKADQGLAERYVILTSIPSFGAVVAMTLIACLAELGSLSNKQIGMLAGLAPVADDSGERQGARVIWGGRPAVRRILYLAALSAAQRSQDMKAFYRRLIGKGKPPKVALVAVARKLVLLANTLIAQSRPWQPTAPQHA

SEQ ID NO: 402263 - protein, 396 aa, unidentified
MEVVAESVAGIDVHQKEITVTVLIGSAESAKPKKVHARFQTVTFDLKACGTWLKQQAVKQVLMESTGQYWRPVWQILEPFGFNMILCNPRIIKNIPGKKTDQKDSEWLSELARYGLVSASYVPPRQIQELRESTRLSKSITQQMTRLKNQVHDILQRSNIKLTTYISDIFSGSGRRILALLENGEVINLASIEQAGTGKRGYRLKATPKQILASLDGALSYNDRFLMAMNMNLLASYQRELINLESRIYEQLEAFSELYHRLQAIPGVGEGTAQIIIAEIGSDVSPFPDAHHLASWAGLCPGSYESAGKKHGAHTLHGNKYLKTAMITAAMAAKTTKQTGLRDFYWRLCSRMGKQKANVALAHKLLRIIYVMIQTGATYQEYKKSQRTEDTLTPKI

SEQ ID NO: 402264 - protein, 279 aa, unidentified
MKYYAGLDVSVKETSVCVVDEKGKICRERKVVSHPDDLVSFLSDPQWHFERVGLEAGPLSQWLYEGLAKAGFPAICIETRHTKAFLKAQPNKTDRNDARGIAQMMRVHLFKPVHVKTLTSQKRRALLTARALLQGKAIAIENDIRGLLRNFGLKVGMVGAVKFEDRIRELIEGVPDLAEIVKPLLAARRKLREEFERLDHKVREEARIDPVCQRLMTVPGVGPIVSLAYAATIDIPARFRSSRAVGAVLGLTPILNQSGESNRIGHVSRCGDGMLRTLL

SEQ ID NO: 402265 - protein, 344 aa, unidentified
MKNTTIAIDLAKSVFEIGISDRPGHVARSHRLSRSEFGPFMANQPPATIVMEACSSSHYWGRTFQGLGHEVKLLPPASVRPYVQRSKSDRADVKGMLEASRNGDIRPVPVKTEDQQQLTSLHRVRSGWMATRTMRINAARGLLREFGIVFPAGAAALPGHVAAVVEDADATLPMPLREALHQMVLEIRELETRVKAVEKQLEALAAQTPVVERLRTIPGVGLLTSTALVGFVGGVDRFPSGRHFACYLGLTPREHSSGLKRRLGGISKRGDTYLRMLLIHGARAVLVGAKSKSGPDRFRTWAIDLQRRRGHNKAAVAVANKLARMVWGVWKSGKPFESRPQANA

SEQ ID NO: 402266 - protein, 363 aa, unidentified
MTIVEATRTVVGGIDTHSRVHVAAALDEVGGLLGSESFAADPPGYAALLSWFESFGTITKVGVEGTGSYGAGVCRFLMKAGVEVVEVDRQNRQARRNAGKSDPLDAVEAARAAQSGKASGRAKSRDGWVEALRVLLVAKRSARSARVKALTQMRAVTYSSPDELRTKLEGLSISVFVSTCQGLRASRTQDRVLAATKASLSSLAHRVADLEAEIDELDERITPLVRSNAPKLLAIGGVGIDTAASLLVAAGDNPERLRSEAAWAHLCGVSPLEASSGKVTRHRLNRGGDRQANCALWHIVITRLASDPDTQAYMERRVKEVAPNVRSSGFSSATSPARSIALRLAAKPSDRDLAHHDHCRPAD

SEQ ID NO: 402267 - protein, 366 aa, unidentified
MLKISTLPRSGSRSFKGCQLTIGVDLGDRWSRYCVLNEVGDIVLERKLTTTPEAIKQVFGRMPRSRIALETGAHSPWVSRLLTALGHEVIVAHARNVRLIAESRRKDDRMDARTLARLARVDPQLLSPVQHRSAQAQIHLTQIRARAELVRARTALVNSARGLVKSYGERLAKCGTQQVGQEIAKGLSPELREALEPLLREVESLNAQIKEYDRRIEKMARETYPEVELLKQVKGVGNLIALTYVLTLDDPHRFRKSREAGCFVGLQPGRRNSGQSEPQMHISKEGDRYLRTLLVQGAHYILGPFGEDSDLRRWGLKLAQRGGKNAKKRAVVAVARKLAVLLHRLWLGGEVYEPRRNSQPAVSAVA

SEQ ID NO: 402268 - protein, 356 aa, unidentified
MAVYVGIDVHKKYCHAALMDESGRIQREFRFDNTLQGVSGLVNLARSIDSQVKAVVEPSANYWIKIYDRLEDEGVQVKLSNPSRTKAIAEARVKMDKIDARTLAYLLRGDLVAESYVPTKKNRERRSLIRHRASLMRMRTEIKNRIHAILDKHDLSYEYTDLFGKEGLEWLRNLNLPSIDQQILQSNLQILETLNSEIRSADIQIAKDAVNEEQAKLLMTMPGVDYYAAMILLSEIGDVKRFASPEKLASWVGLAPQVHQSGETQWTGHITRKGSKRARWILTQCAQSARQHDPKMREYYARIERKHGSSKAIIAVAHKMLSIMHVILTRNEPYHGQNRQLTEQKHKRLDRIANMA

SEQ ID NO: 402269 - protein, 324 aa, unidentified
MTHKPVVVGIDIAKEKIDVAIRLGAEASFASSPEGRRQLLAWLKEHAVGKAVMEASGGYEKSWAKLLRGAGVAVAIVDPKRVRHFAKSAGQLAKNDPIDARMIAWFGEAFSERLGKPDDAEREELDQLVTARLGITRLKDQIDSWGEHEQPKVVQKAYRALLEAVARQQAKLEAVIADKIEQTERFAKSDAIIQSVPGLADVSAAGLIAFLPELGLVDRQAASALLGVAPFDNDSGKRHGQRHITGGRKKLRCLLFTPLVGAVTRHNPVLKAHYQRLKARGKPHKVAVIACMRKLIGILNTMLARGEKWDATKHAISRRAASAA

SEQ ID NO: 402270 - protein, 412 aa, unidentified
MRRVIGIDLHRTFGEVVIWDEGVLRRVGRVEMTRTALEGFGKTLEATDEVVIEATGNSMAVARVLAPFAARVVIANPLQVKAIAHAHVKTDKVDAGTLASLHAAGFLPEIWTPDAATERLRRLVARRHQIVRHRTRLKNEVHAILHAHLVPKCPHADLFNRRGRAWLTRQPLPDDERAAIERNTRELDRTAEDLAEIDREISLAVMDDAAVRRLLTITGVNLAVAAGLMAAIGDIARFKSPQKLVSYFGLNPRVRQSGLGAAHHGRISKVGRSHARAMLVEAAWAAAKAPGPLHAFFVRIRAKRGHQVAAVALARKLAVVCWHLLTKQQDYLWARPALVAKKTRDLELKAGFPQKKGNRRGPTYAYNVKALRDQERKLAEQAERSYERFVAGWKQRPSQHGARERLNPARQE

SEQ ID NO: 402271 - protein, 343 aa, unidentified
MYYIGLDVHKRTISYCVKDAAGHVHQEGKIGSTRRELDAWIKTLPQPRTIAMEATIFTGWIYDQLLPHAETVKVAHPLMLRAIAAAKKKNDKIDAGKIADCLRCDFLPECHMTSTEIRDRRRTLRYRNLVLKQMVQMKNRVSGLLMETGVSYNKQRLHKLSYFTELISGNEEVNESIRPLLKLSRETIVRSQRLDYALVSSLERDPLLAERLKRLRTIPGVGPITALTWALEIGDVWRFQSIKQAISYCGLCSAERSSADKLVRMPISKQRNKHIQQVLVEAAKLAPRYNHELALVYEREQQRGNKNRATLAVARKMVAYMLAVERRKQDFVLTGKRSGTAAA

SEQ ID NO: 402272 - protein, 412 aa, unidentified
MLFVGDDWAEDHHDVEIVRDDGRRLVTKRLPEGLDGITRLHGLIAGCMPQEWAELEPGEAAALVKVGIETDRGPWVAALVAAGYEVFAINPKSSAHYRELHTSSGAKSDRGDAHVLAEIVRLDRAHHRPVAADSANGESVKLVARAHQSMVWERTRHVLRLRSALREFFPAALAAYGDLDEPDTLQLLTIAPDPEVAARLSTAKISAVLARANRRNVAARAQQMQTVLRAPALRQPGPVQAAFAAIAASEVRMITALNTEIAVLGQVVADHFGRHRDADIYLSQPGLGVILASRVLGEFGDDPDRYADAKARRNYAGTSPITKASGTKKVVLARYARNTRIADATHQWAFGSLRGSPGARAYYDELKARKVGHRAALRQLSNRWVGILHGCLKTQTLYDEKTAWGHRNTTAA

SEQ ID NO: 402273 - protein, 343 aa, unidentified
MKITRVGVDLAKNVYQLHGVDRRGKPVWKRRLRRGQWLQALLDKTDSGCEIGMEACTGAHHWARELQSRGYIVRLIAPQFVKPYVKSNKNDANDAEAICEAMSRPNMRFVTVKSIEQQDIQATHRVRSEIKDQRNAKANQVRGLVAEYGLVAPTTLLALRRAIPCWLEDADNGLTDYFRSLLHGLWGDLVALDDRMTELDKQIKTLADSNEVTQRLQQLRGVGPLVATALVATVGTGEQYKKGKQMAAALGLTPRQCSSGDKQRLLGISKRGDVYLRTMLIHGARAVVSQAKHREDRLSQWVTSISKRSHPNVAAVALANKTARMAWAMLRNDANYDPDFAIG

SEQ ID NO: 402274 - protein, 393 aa, unidentified
MGKSQSDEQEPASFSRVAIETGAGETSVKHQSKTKTTKSGNQLPMEGCMIGLDVSDEYTHAAVLDGNGELVEETRVRTREVDVRRWLSRWRASVVALETGTHARWMERVGRQCGHEMVVADARRLRLIYAGTNKTDKLDAIKLARLARADRELLYEVKHREEEEHADLAVIAAREMLVEMRTAAINLVRGMVKSAGKRVGSCSSHKFSEQATEVIPDYLRNALAPMLEHIDELSERIREYDERIEHLAQTKYPETAVLRQISGVGSLAALTFRLTIGRGERFEHSRDVGCYVGLRPKRDQSGEQDPGLGISKAGNPRLRKTLVHCAHYILGRFGPDTDLRRWGLKLAEGGRNAKKRAIVAVARKLAVLMHRLLVSQRDYEPLRQAQRQAGVAA

SEQ ID NO: 402275 - protein, 363 aa, unidentified
MGTITMGVDLAKQMFSIAELDGGGRVRQRRNLKRDAFATWLVQLPPGTVVAMEACSGAHHWARRCIAHGLVPRLMAAQFVKPFRKSQRNKNDRNDAEAIATAARQGNMRFVAVKTVDQQARLAWHRVREGYKAEGLAISNRLRGLLAEFGVVVARSDHALRRALGDEAVRQQLPAMLHRLLDDLQQHWQEVRERIAACDAGIAAHAKADVRSQRAQQILGVGPLTADALVATVGDGRDFKHGRQMSAWLGLTPTQHSSGGKQRLGEISCRGDGYLRTLLIQGARSSLQRAKAIAPEKATAEQVWIRDLAQRLPFGKVLVAIANKHARQLWAMLARGEDYNPEAWLRHPMVQRPANKNRLAVAA

SEQ ID NO: 402276 - protein, 400 aa, unidentified
MKGPIVSIDVSNGNSHFQCFTQRGTKMGKVHRISHTVEGFNFLKSKIEELEKKTNEEVVAVYEATGVYTKPLERFLEKNEIKQYSISPLQSAKQRKTEIHNKKTDKKDPESIAEVYYIKELREDEKEADLYHELRTANRVYEDCLVHLRKYKVTFQSHLSIVFPGYMKLFQDGYSQISLQLLEMYPHPDRLKNKQPEKVAKKLNKQTDHSFEVCLKTAEKAIAFANKTYPGCDKEDAWVAVLVDDIHHLQDTMEEAEAKLDKIIELAKATPYYSIILSIDGIGPNLASRIIAEFGDISKFKTRGAMVAYVGNDPNRAESGDIEGYHLSISKKGNKRLRCILYLAVTCSIRSRKENPINAFYQKKRQQSTPLKSKAAKVACITKLIRTIHGMCKTGTVFTS

SEQ ID NO: 402277 - protein, 433 aa, unidentified
MKKEADIVVGIDCGLDKHQYQISTKEGTVLSKGVLENRKKKAKALIKKLESIAPKDKILVGMEATNTYHICMQNYFTGNGYKTIVINPLKTSIYKQIDDYGNKTDAIDANGICQFLMDGKHKNIKQMNQKYLKLRELCRCRQKIQGDMTRAAIRLQSRLVIINPEFRQYFSKNLCESAVYLLEKYATPEELAAVDVEQLQEDLDKIANGLGKKNSAEKIVALAKETFGIMEDRDGYLRYIQHHLEVYKFLRKKVHDIKAEIRKEAKEDYCKKEIETINSIPGIGIETSAGILSELGDIKNFEKISSIVRFAGMIALKKESSTIVGKSRMSKQGSRYLRCYLHHAAMGAKLHSATFAAVYANRNLKVKDMDPSIKKIVKAKLRSCLARRILETIAMCLMKDRSFDDKIAFESIELDDFVRETIGVQFQRQLAAL

SEQ ID NO: 402278 - protein, 359 aa, unidentified
MQRKEISFNGQSIYIGIDVHKATWSVTVLTEHSNLSKTFSQEASARKLFDFLKKNFPDGNYLAVYEAGFSGYSTFYELKSFGIDCIIVNPADVPTKDSERKTKTDAVDSAKLARCLKNGDLTPNYIPKKEYLDDKDVVRIRGMFQKQLGGYKSRVKHLLYRNGVEYPERFERLGTHWSKAFIKWLREDVSLLSDGRMSLDLLLDQVESLRRSVLAATRAMRSLGQTDRHKENLEHLMTIPGIGEVTAMTLLTELCEVGRFSNERQFTKYIGFVPNVHSSGEHEGVGEMTRRGNTRLRTMLIESAWKSIAKDVTLAAAFGRYRQRMTPNEAIVRIARTLSHIAFAVVKNNTVYDPGRHLE

SEQ ID NO: 402279 - protein, 367 aa, unidentified
MLYLGIDQHKSQLTVSLRGEDGLVILKRQVSTQWEKVRAFFADLAEKARSEGGFLAILEVCGMNPWLLEMLREHGCRETVVIQPTAHSKQKTDRRDAGVLSHVLWVHRRQFWEGKHPLGLRRVEPPTAQEADDRQLTALRARLTKKRTAVLNGLHKILRKHNLEQECPTKKFQTQKVRRWLAEMDLPAVDRLEVNLLLPQWELLDTQLEVVEAKIAERAAGDERVKLLESVPGVGHYSAVAIASRIGNIQRFKRADSLANYFGLTPGCRNSGEATQRLGSITKQGSKMVRYLLNQAVIKVLRFDAAMRAWFKRIKKRRGSKIARVAVMRRLATILWHMLKRNEKYRYDGPIKKHQEFEAFEGTSEAA

SEQ ID NO: 402280 - protein, 348 aa, unidentified
MTVTIVETRAITGGVDTHADVHVVAALDAIGGLLGVQEFPATPAGYGQLLGWLGGFGTVCLVGIEGTGSYGAGLARHIAAAGVRVVEVDRADRQDRRRQGKSDPLDAVSAARAALSGRARGMPKGRDGQVEAIRALMVAKRTARAQRTQTINQARSLILTGPDDIRTRFTRHGPAELVAELAALRPRPGSMVRYHTLLSLRELGRRAGFLGGQLGHLDELIVPLVTARAPGLLALHGVGPDTAAMLLVTAGDHPERLRSESAWAHLCAAAPIPASSGKLTRHRLNPGGDRQANHALYRIVITRMSSHPATRAYVDRRSKEGLSKKEIIRCLKRYVARQVYPHLRPPAG

SEQ ID NO: 402281 - protein, 408 aa, unidentified
MTIVGIDVSKGKSMVAAMKPGGELVAAPYEVRHSDIELSRLALNVLCMKPDTRVVMEATGRYHEPVAALLHSEGIFVSILNPLLIKQSGAGSLRKVKSDPKDALKIAKYGLDNWSTLREYTPMEAIRQQLKLCARQCDLYNKSIVMLTNNLISLSDKTFPGVNELFSSPEKADGHLKWVDFYRTFWHCDCINRMSPDTFGERYKKWCKRKGYHFSADAADALYAASCGLYTTLPRDNNARLLVTVAADQLIALRENQSKLEAEMLNFCKQLPEYETVMAMYGVGKSTGPHLMAELGDVRRFLHRSSIVAFAGVDPGVVGSGKMQLSSVATSKRGSPQLRKALFQVVSTYVKCKPENEAVYQFYTKKRDEGKPFFVCTTAAANKFLRIYYARVKECLNAAESATQVEEG

SEQ ID NO: 402282 - protein, 418 aa, unidentified
MQTELSQFTAIIGIDWADKKHDVCIQAATSGQRQIYQVPHKVDKLDEWARSLYRQYGGPIAVALELSKGPIVSALQKYDFFVIFPIDPTTLANHRKTFTLSGAKDDPTDAEYALDLLLKHTEHFKALNPQSVEMRTLMTLVEHRRRLMSDRVRITNRLRSALKQYYPQALEWFDRIDTPLFCDFIKRWPSLVQARRARKSTLEKFFREHHMNRKALLERRLTAIKSAMPLTEDEAIITPYRLQAMTLVAQLEVALVSIRRYDDEIAALALQHPDYGLFDGLPGAGPSLAPRLLVAFGEQRERYGTAAELQKYAGIAPVTERSGQSTWIHWRWQCPTFLRQTFVEWAAQTINKSYWAGLYYYQQRAKGCSHQAAVRALAFKWIRILYRCWITRTPYDEAKYLKTLQQRGSTLLKMAEAA

SEQ ID NO: 402283 - protein, 350 aa, unidentified
MVIVGVDAHKSTHTLVIVDEVGRKLGERTVAATSEGHLDALEWAHRWPERKFALEDCRHVTRRLESDLLSAGQAVVRVPTRLMAGERRGGRERGKSDPIDALAVARAALREPDLPVAQLDGESRELRLLVDHREDLVRERTRIQSRLRWHLHELFPGFVIPPKALRRLHVLDDLDRRLAGVDGTVAAIAVELVARTRELTIRANQLEAEIRLIVRRLAPTLLALPGCGVLSAAKIVGETAGAARFRSNAAFARWNGTAPIPVSSGKTDRQRLNRGGNRQVNAALHRIGVTQWRGVGTIGRAYVERRMAGGDSKTEALRMLRRRLSDEVFRRLLVDEAFFAAQTDTAAEAA

SEQ ID NO: 402284 - protein, 387 aa, unidentified
MQKPHDNSKASPAAFMQDNTLIAVIELSLSNWLVAGLIPGVSREPLKKLEPNPEDLLKLLHGWRDEAIKAGRPITRIAVAYETGRDSFWLARWLRERGIDAHVIHATSVTVSREHRRAKTDRLDTAMLKRGFLGWLRGERGHCTVAIVPTMEEEDAKRPHREREGLVHEQTRAVNRMKSALIQFGVRNFNPKLRKASVKLETVRTPEGKSLPPNTIAALRRDMERLKIIKEQIKAIEQARLQQFEQKPEALANRMVYLLVRIYGLGLETADLLAHELLSRTLRDRKAVARYAGLTGSPDESGSKRREKGLSRSGNARVRKIMIQLAWRMVKFQPDSALVQWFKQRTENAKGSRKPMIVALARKLIIALWRYANDGVIPEGFRLHSAA

SEQ ID NO: 402285 - protein, 342 aa, unidentified
MRIRKVTPSCDRGKSAICLTYDHYVAIDWSLQNMAIGHMSRHDDHPRVFERPTELKELKEYLGSLKGRTILTLEESGTAHWLYLELLDCVERIVVCDPFHNRLLCHGPKTDKIDAGKLCELLRAGLLKEVYHSDNGLYELRTLVSAYQNVVCAGVRTLNQKKALTLGHRDRGKSALFIGGILQENIDLYRRSKQTYERRFDDVARRKGLVCFQREINGIGTIGAVKIVATVVDARRFPSAGKYLSYCGLVKHEKFSGGRCYGRRKGRYSRVLKSVYKTAAMVALQGASPIREYYDHLLSQGVTEHNARNAVARYIARISYGMLKSGTHYEPYRWRGRIQEAM

SEQ ID NO: 402286 - protein, 464 aa, unidentified
MTVRIIGIDLAVDAAHKAIVLDQASNEFASRPMTFRTNPADMDRMLRIARKGAPADVPVVAVLEASALSWFTVGVYLSRQGVTVYRVSGQQVSDLRRVYSRHAKSDRIDARVAAQLYLTHPENMYSLHLPSGRHLALQQTCRELGRLTDEIGSRKTRLKAVDKYAWLGLPESLGSFSPAARWVRENWYNPWAVIEAGPDMIIRAWVGKTGCEPAEATWAQALFVRAQLMCALYGSAEQLDYQWLQDNMRREEERLARAEAEAKGLRQKFLRPVYCQLYPQRHLESIRGIGQDSAAIYVAFIGDIRRFPSLRQFRSWSGLIPASSQTGLTQTSGLHITQAGPNLIKRTAYINADVARQWDPQIAAIYHRQMMAYGKHHTQAVCACATHLLDRVYLVLKQDRPYELRDIEGAPISRHQARQLCQEKFHVPDEVRSRNNRRTHQHRVEQQAEHRYQRYERKRRSVTS

SEQ ID NO: 402287 - protein, 329 aa, unidentified
MKEFLIAGVDISKSTLDICFKPMNVFLKVQNDAKGFKEWSQALRKSGNPNDNVLVVMEHTGQYSYRFETFLRKNNIAYCKIAALQIKRSLGMIRGKSDKVDAERIAEYGWLRRDILTADHPINETTRRLRSLLGLRTKLVRDRSGYISRLKEMKSAGTCTACSFEGKIQQQLIDKLTVAICQTEAEIKSLINANENIRKTCELLRSIKGIGWIIAAYMIGCTENFLKFGNARKFNCYAGLAPFKHESGTSIKGRSRVSHLANKEAKALLNLGASCAIRCDGELKKYYQKRVAEGKRRMSCLNIIRSKLVARMFAVIRRQTPYQPLSIAA

SEQ ID NO: 402288 - protein, 415 aa, unidentified
MDVIHSRVAGIDVHKKVVWVAVRLPGERPGERTVTVKRFKTFWRPLRQMAAWLAELGVSDAAMESAGVYWWPVYHALTGAGIQVCVCNAAHMRNVPGRKTDLADCQWIAELHEHGLLRPSFIPDAQVAALRQRTRYRKKLIEQRTSEGQRLAKVLEDAGIKIDSLIAGERDPGRLASLAKGVLRRKTDELQMACDGRFTAGHAQMCRLHLDAYDHLTGQIAELDALVAEAAAPFAALIARLVTIPGVGQRTAEVIIAETGGDMTRFATAARLAAWAGLAPGDNESAGKRKKAPARKGDRHLRTAMVEAAWATRRTATRPGARFRRLARKFGKGNEKKAAVAVAHTLMCIAWAVMRYDAGYTDAGADYYERRDQRNREHLVRYHQNALARLGLQVIVTQPGDGTPPPPDNPGQAAA

SEQ ID NO: 402289 - protein, 414 aa, unidentified
MFAVGVDVSNGRSTVAVLQSKSIVTLKPFEVSHTPEALGKLVEKLNSLGGETRVIMEHTGRYYEPIAMFLNSSGFFVSALNPILLNRYQENPSLHNVKTDKADAVKIAKFGLDNWDQLRQYEPMDTIRYQLKTMHRQFQLASKSEVAFNNNLIALLEQTYPGIRKLLSSPARPDGSQKWVDYVGTFWHADCVRKLSLKAFTERYQKFCERHKYYFSEEKTAELYRHAQNVVTLVPKSDVTKMMVKEAVSQLNAISRTVETYRAEMNRLASQLPEYETVMGMYGAGPSTGPQLMAEIGDIRRFPKKNSIIAYAGIDPRKNDSGDVTRKSNKSSKRGSPYLRKTLFVIMDVLIRLKPADDPIYQFIDKKRSEGKPYYVYMTAGGTKFLRHYYGKVRDCLKEKGLWDQSVNDSQDSE

SEQ ID NO: 402290 - protein, 443 aa, unidentified
MTVRKRELTVMFPNAAGIDVGSASHYVAVPSDRCEEPVREFASFTEELIALADWLASCGIDTVVLESTGVYWIALYELLESRGFVVYLVHAKHVKNVPGKKSDVLDCQWLQQLMSFGLLTRAFRPDDKVCALRAVVRQRDTLIDAQASETQRMQKALTQMNVQLANVITDIMGTSGQAIIRAIVAGERDAQKLARLRNYRVHASEEQIAKSLHGNWREEHLFCLAQSLKLFDTCQELIAESDAKIETMLARMQKHTTHLAPNKNKGRNKNAPNFDARTALYAWAGVDLTRIGGIDVSTALKILAELGTDFSKFKSAKHFASWLGLCPGTRITGGKRISGVTKRIANRVTQALKLAAQGLQRSRCALGAYYRTKAARLGAGKAITATAHKLARLVYAIITKGEEFVQRSQDHYEEQVRARTVRYLQKKAASLGFTLQPNAPVCA

SEQ ID NO: 402291 - protein, 379 aa, unidentified
MIATTRPEMSVSEPTLYVAFELGKKEWKLAMTSGFGIAPWLRSVASGDWRGVERALAHGRARLGLPAAAPVVSCYEAGRDGFWIHRALQQRGIRNRVVDSASIEVNRRARRAKTDRLDALKLVMMLVRVCCGEQRVWSEVRVPSVAAEAARQVSRERTALTQEQTRLTNQLKGWLATWGATLPRRRPSGWWTTVSDWAGAPLPVEVQARVARAEARRAVLEGQIAELDAQQRAAVTTAAPASALRQLVQLKGVATTSASVLLDEGLVWRAFQNRRQIGGLLGFAPTPYESGESAREQGISRAGNNRLQAISIQLAWNWVRWQPHSALTVWYREQFGKGKRARRIGIVAVARKLVIALWRYVTTGVVPAGAILKGARPVA

SEQ ID NO: 402292 - protein, 483 aa, unidentified
MTSKEAEQKLEILRPDAAGIDCGAQEHYVAVPVDRVSAGQPTVRCFSAFTEGLDAAVDWLKECRVTTVAMESTGVYWIPLHQKLEAAGIEVYLVNARHVRCVPGRKTDVKDSQWLRQLHRFGLLNASFRPEDITCRLRSLHRHRDNLVCSSASEIQHMQKALQQMNLHLHHVVSDITGLTGLRIIDAILSGQRDPQELAKLRDKRVSKSTPQQMQAALVGDYRAEHLFVLSQSLQAYRFHQARIEECDRQIEPLLEKLAQQVEAASAQLKPLKGAQQEETLPVPRNEPKTGTSASSPLNKAKRKHKPIANEPKIELAGLLERICGIDLTQVVGLNVLSVLLIVSEIGIDMSKWRSAKAFCSWLGLCPGNKISGGKVLDSRTRQVVNRVADALRLAAQSAGRTETCLGIFYRRKQAHLGAPKATTATARKLACLIYHLLKYKEPYQKLDPAIYQLRLQKSALFRLQNQATTLGYKLVPTAPVPV

SEQ ID NO: 402293 - protein, 405 aa, unidentified
MDIVFGIDVSSRESSICMLMDDTRKEFKISNDSFGFKELLKNLAVFSKHPQIIFEATGVYSRRLQKFLEDYGYDYVILNPLKAKKEMDQGLRHNKTDKTDAYNLARIQLQNRHKANKQEAEDYHRLRALSRSYEELTSDIVSAKNRLHRILQLTFPEIETVVSTPKNRNYWELVKLFPHCQTVREIEAEDIINKIKDFKGYGIKRAQKIAQGLKELANKAYPVAELDSPETSDVIYYAQRLIQLDQDRDERLKQMVDISKKLPNRDLEILTSIPGFAQTTAVRVLAELGDIRRFDNPNKIDAFIGIDPGRYQSGQMDSRLGITKHGNAIARKILYRAVGQIDNASKTNPCHIADYYENKKSSQSKGFKKIAIASVHKLIRTIYALIKNDQLYSYEVAKQNQRRKS

SEQ ID NO: 402294 - protein, 338 aa, unidentified
MKLYGGIDLHSNNSVIHLVDKSGSNVLKKRLSNNLPMILALLEPYSDAIEGLVVESTYNWYWLVDGLMEAGYKVHLANTAAIQQYSGLKYGDDDSDANWLANMLRLNILPEGYIYPKEARMVRDLLRKRLQLVQQRTLNLISIQGLYTRHLNKRLNSSKIKQLTPQTIAQDFCDPNVQLAVSGNLAVQQCLSQQIKSIEKSLKQQLKLKNEFIQLTSIDGIGLILALTIMLETGSIARFEKVGNYASYCRCVSGARYSNGKKKGTTNAKNGNKYLAWAFVEAANFAIRHNETIKKFYQRKLAKTHMMVAKKAVAHKLARACFYVLRDHVEFDAKKAFG

SEQ ID NO: 402295 - protein, 428 aa, unidentified
MSERDYNRQAARRQRVSKSTLIVGVDVGKAFNALGFMNKDGKVLGGCAKLYNNREGFEQFVKMIEGLKARHRLRDVLVGMEPTGHYWRKLAYFAKEHGYEVRFVRTTALKHHRELDESSSAKSDRRDALTIANITREGKYIDTVIEDGVLRQLRTLSKARERLLRYSVSAKNSLHAALDDYFPELHEIFRSMGARSLWVILDQCPFPGDVVLMKVSTLQESIARSSRKKAGSAGKAKALYEAAQKSIGVKQIGTADRYRLRMCLEEVKRTVLTLKDMDRQLKCMIKDIPSASYLMSIPGIGPLSAAVFLGELGDPAHFHNARQIVKYAGYDPQESDSGSRVGRKFISKKGRWLLRKYLFFMSMRVVVLTKYFQEYYHRKLETKNRVGQQPRRKEIICAVAIKLIKVIFALLRDKRNFEDMASAAVAIG

SEQ ID NO: 402296 - protein, 376 aa, unidentified
MNEKLRFLGLDVHAETIAVAVAEPNGEVRSLGMIANREDSIRKFIRKLDSPEHLRACYEAGPTGFVLYWQLTQLGVKCDVVAPSLVPKKPGDRVKTDRRDALKLARSHRSDDLTAVWVPDEGSEALRDLVRAREAAKQDQLRAKHRLTKFLLRTGQRPPLGVKAWTEKYVEWVQQVRYTHPAQEATLLDCLNEVQHMEERVKRLEQSIVEVIQLAPAPMQEVVRSLQALRGIAHISAVTIVVELGNITSRFESARDLMGYSGACPSEDSTGKRIRRGGITKSGNAHLRRIVVESAWSYRHRPAIGARLRRRQEGLPAEITEIAWKAQNRLHKRYMTLMARGKEQRKTMTAIARELLGFIWAIGIKAEAACKQQMAA

SEQ ID NO: 402297 - protein, 377 aa, unidentified
MKKNNIAAGNVAATPVAVTGSTSEGRLTIGLDLGDRRSRYCVLDQNGVVIREDSVATTKDGLRRIPGAAAASRIIIEVGAQSPWISRYLKELGWEVIVANARKVAMISKSTRKNDRTDAQTLARLGRMDPELLSPIRHRGEQAQRDLAVIRIRAEMVEQRTAMINCARGTAKAMGERLPACESDNFGVDTLAGGKFSEALEQTLKPLLTMIDHLSGQIAVYDKQIDGMAKQYPQVALLTQLYGVGNLIALTYLLTIEDPGRFRASRDVGPYLGLVPKQRDSGDSQPQMNITKEGDRYMRKLLVQAAQCMLKKGAPETDLKRWAEGHFRPGDKKGKKKTVVGLARRIAVLMHKLWANGEVYDPNYQQKQKQKARTKAA

SEQ ID NO: 402298 - protein, 417 aa, unidentified
MRVVGLDIHRNFAEAALIEDARATRLGRIDLVRERVIAFAKKLGKATEVVIEATGNTMAVAKLMTPHVKRVVIANPLQVRAIAHAKVKTDKIDALVLAKLHAAGFLPEVWQPDEATEKLRRQAARRARIVQARTRTKNRIHSVLHANLILPFKGDLFSRKGRAWLASQPLEEDERSTIDSWLAELDRLADDLANADAMLANVGLADERIRRLMTITGIHLAIAGSLVAEIGEVSRFSSAENLVSYFGLNPCVRQSGDSRAYHGRISKQGRSLARGLLVEAAWAAAKVPGPLRAFFLRVKARRGQQIAAVATARKIAVLIWHLLTKREDYAFGRPALHQAKLRKMEIKAGMPSKRGSNKPGRARDYYIKSLRDTERAFTAQAESAYARFVAAWTERPNGKPKAEKRPGCAGAANEERQ

SEQ ID NO: 402299 - protein, 353 aa, unidentified
MRKIAYLAMDVHANHSVLGEMDFHGNFRGNQSFPTSEQNIIKALSAITAKEKYLTLEESNLAYWAAQVSSPYVTEVIPCDPKENALIYKSSIKKDKIDTRKLCRLLRLGELKRVYHPENDDRAIFKASALHYIDLRDQQIALKQKIKAMYRHWGIIDVAGEAVYSVEKRHEYLSQVKQVPIRNQLNRLYAVMDETESMQHKALKTMIALGRNYPEIKTFKKIPGIGDISAHVFDAFIQTPDRFAKRSKLWRYCRMGVTDRSSDGKPLGYRRLDRSGISEIKALIYQAWMSAMKGDNEVKQFYSNSLKRTHSRVHARLNTQRKIIAVMYGIWKKGEAYNPQLFLGSNDIVALYN

SEQ ID NO: 402300 - protein, 371 aa, unidentified
MKETITSYIGLDIHKDFTAIALAKAGRSKPEFIRQTPSNPAALIKAIGRICKPDNGLVVYEAGPCGYGWARYLRKQGWNIEVIAPSRITRQAGEKRLKTDKRDAMLLARESRAGNLTGIVVPDERDEAIRELSRARQDFCAVRAAVQKQIKAMLLRHGRHYPGPNRGWTEAYERHLSTVRFDHPAQEVTFTEYRQAYKDAHERVQRTVQQLREQCEGWRMNPVVKAVMCLKGFDFIAAVTFVAEIGDMSRFAHPKALMSYLGLVPSEYSSGNSRRQGSITRAGNKHARRVLIEAAWNNRHKAKIGRDLQIRQQGQPKAIRDISWKAQQRLSKRYRNLAMGRGVVQNKICVAIARELSGFIWAVAREVKLKP

SEQ ID NO: 402301 - protein, 375 aa, unidentified
MSKIRFLGLDVPADTIAVAMAEPHGEVRRLGVIPNRLESVRRMVRKLGPASPLRACYEAGPTGYVLYWQLTALGVPCEVVAPTLVPVKAGDRVKTDRRDAERLARSYRAGDLTPVWVPDAAHEALRDLVRAREDAKQDQLRARHRLSKFLLRHGQRPPETVKKSWSQRYMAWIQSEVHFDPPALEATLRDYVHEVTHAAERIQRLERAIEEAMAQAPPAMQAVVGALQALRGVAQITAVSIVSELGSLSRFPNPRQLMGYSGLVSSEHSSGNRIQRGGITKTGNAHLRRVIIEAAWAYRHRPWIGGSLRKRQQGLDQVITDIAWKAQCRLHHRYKKLAARGKSNPQIVTAVGRELLGFVWAIAVQTECNHQPKAA

SEQ ID NO: 402302 - protein, 418 aa, unidentified
MAKKLDTTFIRVVHPVCCGLDVHKKKISACLITVDEHGQEQYDIEEFGTFTNDLLNMKKWLTDNGCPIIAMESTGVYWRPVHNVLEGFMEVILVNARHIKNVPGRKTDISDSKWLAGLLRHGLLRGSFIPPKEVRQWRELTRLRRTYTESLADYKRRIHKLFETANIKIDSVVSDLFGVTGRNLISLLCDESELSLENIRANAKRGLKSKSKELLSSVQGFFEDHHRFQLIGMMEVIASFEEKVSEITARLDALTAGHQDLLDRLDEIPGIDKKSAQSIVSEIGVTLDEFICMSALASWAGLCPGNNESAGKRKSGRTSVRSHPFKTILIEVAWAAVKKKGSYYRAKYFKLKARRGPKKAIVAIAHRISKAIYNIIKHGDTFRDLGEDYLTAQTKQRAIKNIKQRAKQLGYELVPCMN

SEQ ID NO: 402303 - protein, 358 aa, unidentified
MTFTDHTRLLKSLRLPYSSEQLLNYARKHFPDRRLAFVYEAGPTGFGLYDDLRASGHPCLVVAPSMVPTAPGQRVKTNRLDSRRLSEGLRGGQLRSIHVPSPTYRQLRHLVQLRDTHVRQLTATKCRIKALLLYEGISFPEAPAGGQWSARVLRQLEALPCAEAVRFKVNHLIGTLHFHFLSAAAVQKQIRRFCQNDPELRQVVGLLTSLPGVGWIVAAHLIARLGDWREITSVRQIAAFLGLVSSEHSTGDQENRGAITRSGDSRLRNKLIQSAWTTIGKDPELRAFYRRIYQRHPKKLAARKAIVAVARKLTTRIYAVLKQQRPFVLRPDSSSAPLTPEETAGSRGRLDAAQNEQK

SEQ ID NO: 402304 - protein, 321 aa, unidentified
MSHFYLGIDVAKAKLDCALRLHSGKFRAKVIPNSLDGFATLLTWLAAQKAQSPHVCMEATGIYWEDVAQHLATAGFTVSVVNPAQIKAYGASRLTRSKTDTVDAKLIADFCAERQPPAWQPRSEAEVTLRALVLRLDALQTMRTQENNRLLVAREAVREDIQQHLNWLDTAIQQLIDAINDHIDRHPDLKQQRELLDSIPGIGERTSAIILAFYADTSRFANSRQAAAFAGLDPRQYESGSSLKGKPRLSKIGHAFLRKALYMPAMVTLYKTAWGKQFRGRLAGAGKPNKLIIGAMMRKLIHVAFGVLKSAKPFDSAIHLA

SEQ ID NO: 402305 - protein, 340 aa, unidentified
MEVYAGIDLHANNNCLGVVDAHGKRIYRKKLPNDPELILGALGSLSSEVEGVVVESTFNWYWLVDLLMDAGYKVHLANPAAIQRYSGLKYSDDAHDAYWLAELLRLGILPTGYIYPKEHRAVRDLLRKRSHLVRLRTSLILSLQGIVARNRGKKIKAGDIKILSEDRVSIHFEGNEDLALAGQVSKEAIDDLTRKIVKIEAFTERKMALRADYRHLHTVPGVGRVLGLTIALETGEISRFAKVGNYSSYCRKVPSRWMSNDKYKGKGNTKNGNKYLSWAFSEAAELGRRFYPEVQTYYNRKLQKTNRMAAHTALAHKLARASYYIMRDEVPFDMDRLFGS

SEQ ID NO: 402306 - protein, 363 aa, unidentified
MHSIINTELSSHEETRFEFNRSTGAIKLGIDVHQDFYVVVEQVEGGNPKPPQRFDKQAFLHWASKLKQRGAEVHAVYEACGFGFSLQRNLTALGIKCHVVCPQKLDERNKRVKTDGLDAKALCLKLDRFVQGNRDALALVRVPTEEEERSRAIHRQREQLVGARKRLEAQGRSLMVNHGVDPVQNWWKPRTFATLPVPHWMRELLLNSQPILLALQEKIAVLTLQLQNAAAPNQARGLGKMTSVVIDREIGDWHRFNNRRQIASYTGLCPGEYSSGNTRLQSCVTKHGNPRLRAALVELAWRLVRFQPNYKPIVKWRQILAKGALATGAARKKAIVAVARQLAVDLWRIKTGRLRAQELGLIN

SEQ ID NO: 402307 - protein, 348 aa, unidentified
MRTYKTPHAYYCGIDLHARSLYVHVLDAGGTTRLERDLPASPAAVLDALAPYREGLVVGCECMFAWYWLADLCERESIPFVLGHALAMKAIHGGKAKNDRLDAATLAGLLKGGFFPLAYVYPRDKRETRDLLRRRSFFVRQRAQLIAHVQNTNSQYNLPPFDKKLTYKGNRTAAIADRFEHPSTKLSIAADLALIENYDTQIAALESHLVKSARVDDPTTFGFLRTIPGIGPIPGLVMLYEIDTIRRFAEVGNFLSYARLVACTHESAGKVKGVGGRKIGNAHLKWAFSEAASLMLRSFPAAKSWMQRQSKKRGAKKAHAILEAKIGRTVYHLWRKQVAFDGKKFPAS

SEQ ID NO: 402308 - protein, 353 aa, unidentified
MNYTGIDYHKRYSVACTLDGQGRLLKQARIDHNAPEAFTAYFGALDGPSEAVIEACWNWATLYDLLEDTPGVAKVVLSNPAKNRIIADAQIKNDRVDAKALATLLRGNFVSTVHVPGKEVRQKKNTVRQRLWLARVRTMVRNRIHTVLDRHPRVERPAVKDPFSNQGKAWMKRVELPAPDRQLLDEDLEMHELLERHIRALEERIEADNSAHADALRLRTLPGVGKVLGPVIALEIDGIARFKTADKFCAYAGLVPTTHASGGKTSHGRMLPFCNRWLKWAFIEAAWVAIGCSDYFGSFYKRHRARGKGANEAITITARRLAKIAWKMLTEQRDYSKVPITTKTLSPAALITD

SEQ ID NO: 402309 - protein, 388 aa, unidentified
MQTAADHPEAPTAIRHDLGAIFISLELSRSTWLITSLSPGGGEKMSKHSVRGGNVAGLLERFAQLQEKARARTGRTFPIIVIQEAGLDGFWIHRVLQNEGIESHVVDPASVATSRRRRRAKTDRIDGEALLRTLLAYKRGEPRVCAMVKAPTPEEEDRRRLCRERKVLTNERVQHVNRIKGLLFGQGVSGYEPLRRNRRQQLNELRTGDGRPLPKHLKTQISRELDRLELLLEQIKAVETERDALLAAQKVALPGPAAMLLDFNGIGPEFTAVLWSEGLFRHFDNRRQVASYAGLAPTPWQSGSVDHEQGVSKAGNPRLRTTLIQLAWLWLRHQPQSALALWFKERVARNGGRHKKTTVVALARKLLVALWKYVTAGVVIEGAVMKTA

SEQ ID NO: 402310 - protein, 409 aa, unidentified
MQVVHERCAGLDVHKRTVVGCVLTPGAREVRTFGTVTRQLREMVDWLVELRVSHVAMESTGIYWQPVFNLLEGHGIELLVVNARHVKALPGRKTDVKDAEWLADLLRHGLLRASFVPDRQQRELRELVRYRKLLVQEHSRMVTRIQKVLEGANIKLSSVASNVVGKSGKAMLEQLAAGNEDVDAMAELAMSNLRTRRGELREALMGSMGDHQRFMLQSELRLVEQMQAEIERVNQRLEERMRPFEAQIALLDQIPGIGKTSAQIILAEIGVDMSRFASAGHLASWARVCPGLDQSGGKRRPASTGAGNPWLRSTLIEVALAAVKAGRRQPNFFSARYHRLAARRGPKRAAMALAHSLLVAIYSMLRHGAYFVDLGPTHYDQRRRDLIARRSVQRLEELGYKVTIEEALA

SEQ ID NO: 402311 - protein, 349 aa, unidentified
MTEQRISYAGERVYVGVDVHKETYTVTCVCHTQIVKTATVPAEPASLAASLLRWFPGATLTSAYEAGFSAFVLHRALTQVGITNIVVNPASIAVAANDKVKTDRRDSKRLAIDLADGRLRGIYVPTEAEELARLLPRTRAQIVEHRATIARQIKAKLHQFGLIAPSSRRLISNRYLREIATWPLPPELGVSLTLLAEQWRFATRQLIEMRRLLRDQAKAQEETEKVYRSVPGIGAVVARTLATELGDMTRFANERALFSYTGLTPSEYSSGSSVRRGHISRQGSSRVRHLLVETAWRALPRDEVLQEIFDRIAATRGKKRAIVAIARRLTGRIRACFRQGTTYAVGTYA

SEQ ID NO: 402312 - protein, 490 aa, unidentified
MNDLQGNRVIGLDLGVTSAHSAVVLDVTGQILARRRVVSTVDSLAELEQAALRGAPAQTRLTVVIEPTGPMWLPIAVYFGRRGHTVVRVSSAKAADLRRFLSRHAKSNGIDAETLARLPMVAPAGLHPVELSGAQRASLDRRVRTVARLTREIGQRKVRIRALAQTLMPTIGDALGDGLNRTDLAVLERYADPRTLLAAGRARLLRLVGTESRGKLGDDKVQALRTAAQQALQLWGEDPAIALSDLVEEIATEIRLLRLAETERTHHEAARDAALADVDPAGLATSLPGFGPVGATQLLAAMGRPGRFRNAAAFKSFTGLAPKASETGNTDRKSQPMSKAGNSALRTQLIQSANTARQLDPQLAAIYYTQMTERGAPHLKALCVVAARLAERAWLTLAKAEPYVIRDLQGRPISPQQARELIAEQFTVPADVRRRRRSTKPAGRAPQQCSRHAKSRHTAGHEAALPTPTITEPNPAVNPTQHTPLTPTPA

SEQ ID NO: 402313 - protein, 312 aa, unidentified
MYHMKEELVYVGVDIAKAYLDAAIGNEKRRFANDALGHRQLINWTKQMPASVQVICEPSGGYERALVRALVAAQLKISLVPANRVRQFARAAGILAKTDRMDAKVLCAFGEAMQPGTISASQLEQEHVREVESQRRHLTHLLVMEQNRAARMSDLWVCKLNRRLITQIKKQIEQVDLLIQQQIKASRELSSKAEKLTAISGVGARTAALLLAQMPELGQLNRREVAALVGVAPFNRDSGRMRGKRAIYGGRRSVRHGLYMAALVAARHNPILRAFYLRLRAAGKPAKVALTATMRKLLIVLNSSLKPDLTYA

SEQ ID NO: 402314 - protein, 429 aa, unidentified
MNYTQNEKIEQVTDSTMVVGVDIGSQIHYARAFDNRGRELTKRIFSFHNDLEGFNSFNLWAETLKTENKKTAVLIGCEPTGHYWFAFAKYVNDHQKRLVMVNPFSVKKIKELDDNSPKKTDSKDPKTIAKLVVDGRYSIPYMPEGIYAEIRDLVYSRDRIMKQHNISANRIQRWLAIYFPEYLGLYTRFDAISGLAVLEKAPLPKDVIALGVNGIRKIWHDKKMRGRGVTEDRAKTLVEAAHNSVGLDGGIGTKSELYMLLEEHRLWTSQLEAVNKVLEEMILKVPHVEKLLAIKGVGSITIAGFIAEVGDIRRFDSPKQIQKYAGLELVENSSGKHKGRTRISKRGRRKLRKILYQVMVPLLARNKEFRGIYDYYVTRVKNPLKRRQAMVAVSCKLIRVFYAVLTKGVEYDRFKMMSDIHPKSDIIAA

SEQ ID NO: 402315 - protein, 404 aa, unidentified
MKGPIVSIDVSKGKSDYQAFKDLNVKYTGSRSIKHNKEGFDEIVNLVREMEKKLETEVCVVYEATGVYHRVLKKVLEDNNIKQFIINPLLSAKTRKNDSLRSPKTDKLDPKSIAKTYYSHILHNSHKQETIYHELRELSRYYEDILVHIRKDKVAFRAQLDIVFPGYDTLYDDLYGPVALAIIEKYPHPEMLQKKKINTVSKVIQNKTCHRQAVSDTMADKAIEYSKTIYSGCDKDDIEVLILQRFIKKLNEDMAEAERTIGEMIKLAQELPDFNIIKSIPGIGDNLAARIIAELGDMTRFKKKNELVAFAGLDPRISESGQNDGDHMHITKKGNKRLRCLLYLAVTCSIRLKRDDNSIKDFYIKKKQQSNPMCSKAAKTACASKLVRIIYSMCKTGELYQYNK

SEQ ID NO: 402316 - protein, 452 aa, unidentified
MKHKRAGRGGAVPSLECIEPNAAGIDVGAREIYVAVPANRDPKPVRCFSTFTQDLQALAAWLLACRIRTVAMESTGVYWIPLFQILEAAGIEVCLVNSRHVKHVPGRKSDVLDCQWLQYLHSVGLLRASFRPEDVICQIRSLLRHRDGLVEMAAQHVQHMQKALSQMNLQLHHVLSDLTGQSGLAMLDAILAGERDPRVLAELRDGRVKASAETIVQALVGDYRREHLFTLHQSLQAYRYYHQLLAACDQEIEAYLRELDSKIDVEQNPLAPEPKPHRPRKNEFRFDLRSELYRILGVDLTAVPGLNALSVHTLLGEIGRDVSRFPSAAAFASWLGLCPQADKSGGKVLSAKTRRTKNRLNRSLRLAAQALHRSHSYLGDYYRRMRSRLGAPKAITATAHKLARIVFHLLRTGEAYNESIFAAEEQRCRVRTEHRLRRHARQLGYDLVPLPA

SEQ ID NO: 402317 - protein, 451 aa, unidentified
MSKDKEKKKTKKAIQGLPVLQPYAAGADIGDTKHDIAIYDGKGGHIVKTFNTFTADVEEAVNWLKDEGITTVAMESTGVYYLTFYLMLEEAGIEPYLVNARHVKNVTGRKKDDTDAIWIQRLHSCGLLQNCFQPDNDFRTLRTYVRQRKGLITRSSDEVRRMQKALELMNVKIHIVISDILGKTGMQIIKAIISGNYDPVELSKLRDPRIKATEQEIIKSLEGLWKEEYLFMLEQAYNTYCFYQQQIGECDNKIHEQLLKQIGKANQGDITVEQPINKKKGKPKKNQFAFPVSPLLIKLTGVNLCQIPGISEVSALEFISETGIDITRWKSSKHFAAWLNLVPNTKITGGKIISSRMMKKKNKAGQTLRMGASSLYSNKTPLGDYHRRMSAKYGGKGASLATGHKIARIIFKMLEKKEEFSFQMLVESQKKYRETRIKQLEKQLAKLKKVA

SEQ ID NO: 402318 - protein, 412 aa, unidentified
MTVTNQFAAHVGLDWADKKHDVCVQFKNGERVFDVIEHTAEALDAWLTELHQKVKGRIAIALELKKGPVVYALQKYPFITVFPVHALSLARYRQAFSPSGAKDDPQDAELALELMLRYPQKIKAIEPDNADIRLLQQLVEQRRQLVEDKRRFVNRIINTLKQYYPQPLEWFSHRGSLLLCELIIRWPSLQQLKRARRDTIRNFLNAKGGRAMALTEQRVASIDNAIPLTTDPSVIEANALMAAALATQIKVVSEIIKTYDERIETLFDTLPDAGLFKSLPGMGPCMGPRMLAALGDNRDRFNSAEEIQNYAGIAPVTERSGQKSWVHWRWQCAKFVRQTFVEWAAKTVNSSYWARLYYQGLREKGKSHQSAIRALAFKWIRIIYRCWKARTCYDEAKYLLALEARHSPLLKP

SEQ ID NO: 402319 - protein, 366 aa, unidentified
MKKISTVHAFGSEIFKGQKLTIGVDLGDRWSFYCVKDEAGQVILEQKLPTTQEAMKQIFGKIPRSLMALETGTHSPWVSRLLTQLGHEVIVAHAQKVQLITKSSRKDDRHDAQTLARLARIDPELLGPVRHRSAQAQIHLTVIRARAELVSARTALVNAARGLVKSYGERLPKCGTQQVSRELAAELSTELRDVLEPLLKEIESLNEGIKEYDERMEKIAKEVFPEVSLLKQVKGVGTQIALTYVLTIEDPHRFAKSREVGCFLGLRPGRRNSGQSEPQKGISKEGDRYLRTMMVQGAHYILGPFGEDSDLRRWGLKLAERGGKNAKKRAIVAVARKLAVLLHRLWVSGEVYEPLRNSQKAMRAVA

SEQ ID NO: 402320 - protein, 337 aa, unidentified
MKYFAGLDVSLEETTVCVVDEEGRIVREARVPSEPEALVAFFRSLGLAVERVGLEACSLAAWLHEGLTAAGLPAVCLETRRAEAAMGAMPNKTDRNDARGIAQIVRTGWFRAVHVKSPACRSWRALLAARRLVLNKMRDLENGVRALLREAGLELGRPARKELAARVRELVGADAVLSASVEPLLAIVATMAHELAQLTRRVLAIVRDEPVCRRLMGVPGVGPLTALAFRATIDRPERFRRSRDVGAHLGLTPKRYQSGETDVQGGISRCGDELARTALYEAAHSLLVRSRRWSSLRAWGMQVARRRGMARARVAVARKLAGACWTTWQTAERLSRA

SEQ ID NO: 402321 - protein, 378 aa, unidentified
MNRIIKIGMDVHTTNYTLCIFEPSFEHDGTVHCITQVKPEIKNIIHVIQTFKKKYENEELNIVCGYEAGCLGYSLYHELKEKGIECVILAPTTMKTEKGGRKLKNDYRDAKMIAECLAYGGYSAVHVPTELDNSVKEFIRMRDDIKENLKSIKQQIIAFLTRNGKQFKGKSYWTRKHIDWINTVSFSEPLLQDTLKEYMIEYNHLCDRVETLDRQIEEISLKEEYVEKVQQLQCLIGIKTHTALSLIVETSDFNRFKKGNMYSAYLGLIPGDDSSGGHEKKLGITKAGNSHLRKLLVEAAQGYTRGRVGFKSKDLKSRQEKCSSEVVAYADRANERLRRKYYRMTLRGKKYNVAKTAIARELACFVWGIMTDHIDLCS

SEQ ID NO: 402322 - protein, 357 aa, unidentified
MKIVGCDLHARQQSIAMMDSETGEFVEKTLLHKGSAVRDFYAALEGPVVVGIEATGSMQWFLELLEELGIECRVGHPAKIRAAETRKQKHDRRDARLVLDLLLRDRFPEIWMPSTEQRDLRTLLRDRHQWVKMRSRLQHTLQAIALNHGLRQGSRLWSQAGQTALQALPLPAYSSQRRAELLSLYIQLQKRIQKLDQEVEAQVQQRAQARRLLTHPGVGPVTALASEVFLGDPTRFANGNKVGSYIGMIPCEHTSGKRQRLGKMTKQGNALLRYLWTEAAMHAVGKDPELKRFYRRKLIRKGMGKARIAAARKLGIRLWIMMRDQIDYQEFCRRGKLRQSGEAHAGMPDFNSGPALQ

SEQ ID NO: 402323 - protein, 348 aa, unidentified
MNLKRIGLDTSKAVFTLHGVGQDEKAVLRRDMRRAEMEAFFAKLPPTHVALEACGGSHHWGRRLAAMGHTVQLIPPQYVKPFVRRGKNDRNDAEAISEAAARPDMPSVPVKSAEQQAQAIVLSARELLVRQRTQLVNAVRGHAAEFGIVAAKTISQLPGLLEAVAAAETVPATAKEMLAFLGAQVAQLDSQIAELERRMKQQHKANPVSQLLAEVPGIGPVGALSLALTIDPGRFASGRHFAAWLGLVPKEHSTGGRQRLGGISRAGNERLRQLLVLGAMAVIRFAKPGSKSASAWLLALLERKPRKLAAVALANKMARVVWAMMATGEAYRGSKKAATPAAGAAAAA

SEQ ID NO: 402324 - protein, 312 aa, unidentified
MAKIICGVDVSSKTLDARIGQDGPSQSFDRTPEGIRALAAFCKSHDVEFVAMEATGGYEKLPFSLLSLAGVPCAILNPRSVRRFAEAMGTFEKSDGIDTGVIAHFAEVKRIVPQTPASATQQELEALVTRLRQVTDLRTSQTNQRRLVTVAGVLKDIDELVALLNRQIRVLEAKIAQSIDADPLWKALDAAFRSIKGVADRTVARLMADLPEIGTISGKKAAKLVGLAPLANDSGKVRGKRSIFGGRANVRSILFVVAELVRRHEPDFRKFHQTLTAAGKPKKAIRVALARKLLVRLNAKARDARKELGLAV

SEQ ID NO: 402325 - protein, 367 aa, unidentified
MKNTSTVAAKQSKNFREQKLTIGLDLGDRSSWYCVLDEAGDVLLEQKLGTTPKAMKEVFGGMPRSRIALETGMHSPWVSRVLSELGHEVIVAHARNVRLIGESRRKDDRFDARTLARLARIDPQLLSPVQHRSAQAQAHLMVIRARAGLVRVRTSLINTARGLTKSYGERLRGCSPRNLNAETARQLSPELQAALGPLLGAIESLSQRIYEYNQQIAKIAKESYPQVARLEQVKGVGTLMALTYILTLEDAQRFRKSRDVGCYVGLQPGRRNSGQSEPQLHISKEGDPYLRTLLVQGAHHILGPFGADSDLRRWGLKLAERGGKNGKKRAVVATARKLAVLLHRLWVSGEAYEPLRNSRQVLLPAAA

SEQ ID NO: 402326 - protein, 426 aa, unidentified
MKITHSAKKINLNQVVDVSVDVHKETLNYFFVIDDREYYDEGQNRTARIEAKLRKYLEIAKSKGRKNLRIICEPTGQYQNSLQRTARRLGCFTCLVNAESVAKFRVVESNDSSKTDSKDPRVIQTLGRLGKVIKHRLLGEDYLMLRKLGKIVEELERECTRARCKLDRLLVELFCDYSFKKDFLYSNSGLALVELYGCNPYRIVEEGYKAFCRAMKKAAPRVKRDSLERLWGDAQSSALNEMPAGYVAVLEDRFYQLMEDYLKQLERKEDVEEQMIEILERLRAEDPLIPPPTPGVISARNLARLLGETGPLSDFGHWRKLMRYFGLNIRMRQSGSYYGQNKISKKGRPLGRKVLSQIVLPLVRQNSLYGDFYHRKREVDKMVGNKAMVVVARQFLRKFYGWYKSGQDFDRDRFFKTEAECLKLAA

SEQ ID NO: 402327 - protein, 356 aa, unidentified
MSSNIKYIGLDVHKEAISIAVLNDVGKWVMESIIETKAATLLQFLQGLQGELHVTLEEGGWAAWLYDVLKPHVHEIVVCNPRRNALLKEGSKSDQVDARKLAELLRAGMLRPVYHGEHGLRTLRELARSYQTISKDLRRVMNRLKALYRGWGIPCAGTQVYAPRYREQWLNKIRQAGVRRRAELFYQHLDGLQALRRQVRGEFLAESRKHKAVKVLRQIPCIGPIRAALLLALMQTPHRFRSKRQLWTYSGLGVETHDSAQHRYVNGRLQRSKKPPQVRGLNQNHNHEMKEIFKSTATNASRCAGPFHDFYADLLAKGMKPEMARLTLARKIAAITLTLWKKGARFDAQRLKTQAA

SEQ ID NO: 402328 - protein, 330 aa, unidentified
MKKWDFTLGVDVSKLTLDVHCTELNIHIRIANGSDGFKLLQKWCSDNRIDLGKSIVAMEYTGGYEYKLMQFCETKKIQYSRIAGLAIKNSLGIVRGKNDKVDAKRIAQYADEKHKSLVPAHPINPIILRLRQLLSFRKRLVRESAGYKASLKERKEMYKVKSNDMLLRMMNKKIKGNDLLVKKLEAEMDAMIQTDQKILTNYKIITSIRGIGKVNALMTIAYTENFTSFRNARAYAVYVGVVPFDHSSGTSMHGKRKVSQLANKELKQELNQAARVAIEWNAELKAYAEKKRKEKPYKVVLNNVKFKLIMRMFSLVQRGEFYVDNYKKAA

SEQ ID NO: 402329 - protein, 460 aa, unidentified
MSHGSGVSRGDRNRNARLSRLRAAVPTGNAIVGIDLADRKQMLVVTDHDSRVLARRTFRCKAWDLGAALDWAADRATRAGFAGVTVACEPTGHRWMVLAQLAAERSMSFVCVQPAASSWARKSEDLTTDKTDDKDAVLIARLTAQLRCYLPEPVDEANTTWTRLRHLGTRREELIEQHVAAVQTIRDLLECVWPAALETAKHPFRSTTFVAALTVVVGQGRGRDGGELDRTRRLGLARFERAVRAEVSRRGGVRPCLRIVRRVFAALTDTAGVVAHRPAVFERLEWTLTDWDDARGKRADIEARMVSVLHELGLTTLVTSIDGLSPVGAAAILAQTGDLTRFTSARAVVKHAGLAPRERKSGTFTGRARVTGAGRPQLRAAAWRAVWGCLQTNRVYAARYRHLTGRETNRLTATQAQTAVAAAILRQLYAVVVHQQVWDPVVATHGTTTWKGESTSTAAA

SEQ ID NO: 402330 - protein, 380 aa, unidentified
MDQTTRTAESTREGSKLYMALELGWGNWKLAFTTEAGEKPRLRSLMARDRDTLEEEIAHAKQRFGLPSTAPVVSCYEAGRDGFWLHRYLTSLGVANQVVDSSSIEVDRRARHAKSDGMDAQKLLDQLVEFDLGRKKRGWRVVRVPSPQEEDARQLHRELEALKQERTRHTNRMRGLLASQGIDLKVGPQFREELQQARLWDGSPVAPGLRSRLERELARLEQLGEQISELEKQRRDLLKNSQEASIKQVRQLLLLKALGHNSAWVFVSEFFAWRQFRNGREVGSLSGLAPTPYQSGKSNHEQGIGRAGNGRIRSMAIEIAWVWLRCQPRSQLSLWFKERFGAGGRRSRRIGIVALARRLLVALWRYLETGVIPDGATLKA

SEQ ID NO: 402331 - protein, 345 aa, unidentified
MEIRTIGIDLGKTVFHFVAVNARGQVVVRRKGSRTQLLRFTANLPQCLIGMEACGGAHFLGRALREQGHDVRLMPAQYVKPYVKTNKNDYIDAEACSEAVTRPTMRFVPIKTDDQLDLQSLHRVRERWVVRRTAVINQMRGMLLERGITIRKGRHYIEESLPGILEDADNKLSGALRVLLTQLRMEMQYLHGQIEETDKLIARICGELEQCKRLVAIPGIGPITATATVAAIGNGAAFKKGRGFSAWLGVVPGEHSTGGKQKLTGTSRRGNKYLRKLFVQGAHTVLLQKTKQSSGLSTWLVNLTSRKRKQVATVALANKMARMAWAVLFKGEAYRPPTAPQVIAA

SEQ ID NO: 402332 - protein, 352 aa, unidentified
MQHFIGCDVHTRNQVVAWIEEETGEIRKRRLEHAGEEVRKFYAQFPRGTVVGIEATFPAYWFERLMGELGHELWVGDAARIRASEVRYQKTDLRDAGDLLDLLRTGRFPRIWVPSLEERDLRQLLVHRMKQVRARTQVKNQLHALAISQGVCRGRKLWSAKGRAELEKLALLPWAARRRKELLESLDRLDEQVRELDRAVEEAGRTRPEVALLRTHPGVGMVVGLAFVLSVGPVERFPNSRKLVSYWGLNPRESSSGGRQRLGSISKQGNTMMRWLLVEAAQTAARLDPQLRRTYQRLRKQKTSGVAKVAVARRLAVRLFWMLRTRHNYTQLVHMSGSPSSAVVPPQGGPTV

SEQ ID NO: 402333 - protein, 419 aa, unidentified
MSFKILKNNCCGLDVHKTWIFACIGITDSNKRTEYKQARFSSFTKGLQELCDWLVKYNCNDVCMESTGKYWIPVFNILEKNNIWVTLSHPKYTKPQKGNKTDRKDAKWICDLYMCGMVNASFIPPADIRELRDLVRYRFKLTCMITSEKNRAHNCLTVSNLKLDDVFSDIFGKSSRSITEQILQHPGETFDVTPFVDGRCKTPIEEIQAAVDGAISAEQAIKLRQCLNHIDELEVHKAEIEREIFRLSDKYEEILALIRTVPGFDKNPLTAIQVLSEIGGDMSVFPTAKNLVSWAGCCPRNDQSNRKIKSTRISRAGSYFKPVLVQVANALIKSKKHPEFTTRYRRIKARRGHKKAIIAICRMILTAIWHILTDLKPYTPEGFLESRPVNESKILTTSQALNLLKQRGYIIKDEAIPVS

SEQ ID NO: 402334 - protein, 460 aa, unidentified
MGAKARLSRKSGRAVREAAKLDTLEQINLNAAGLDIGAEEIYVCVPEGRDAETSVRVFGTYTAHLCALADWLERCEVDTVAMESTGVYWIPVFEILEARGFEVYLVNARQIKNVSGRKSDVLDCQWIQQLHTYGLLRGSFRPEAEMCALRAYLRHRDNLIRYRSAHIQHMQKALQQMNVQLTQAVSDITGVTGMHIIRAIVAGERDPQVLAQHRNPRCVKSKQDIAQALTGNYRTEHVFALKQALELYDFYTQQIVACDAEIERQYSAIKPQVDVEATPLPPVTKSRSKSAPTFDARTQLYRVSGVDLTQVDGIDEALAQEIISEIGVEMDPWPTVKHFASWLRLAPRNDVSGGKVLRSTTGKTGSRASQAFRLAAQAVHHSDSALGAFYRRMKSKYGAAQATAATAHKIARIVYHMLKYKEEYVDSGAAYYEERCRERAIKNLERKATRLGMKVVPIIA

SEQ ID NO: 402335 - protein, 327 aa, unidentified
MYVCILSQDGEIVLHRNMPAGPEPFLKAIAPYREDIVVCVECIFTWYWLADLCAREGISFVLGHALYMKAIHGGKAKNDKIDAQKIAVLLRGGMLPQAYVYPAAMRATRDLLRRRMHLMRKRAELLTHVQQTNSQYNLPEIGKKIAYKANRDGVAERFPDPAVQKSIEVDLALIGHYDDLLRDLELAIVTMAKQHDANTLYLLQTVPGIGKILSLVLLYEIHDVARFPRVQDFVSYCRLVKCAKESAGKRYGTSGAKIGNAYLKWAFSEAAVLFLRNHPAGQKYLARLEKKHGKGKALTILAHKLARAVYYMLKRTTAFDTEKFLQS

SEQ ID NO: 402336 - protein, 326 aa, unidentified
MEHELHYIGIDTAKEKLDVDVLRPDGRHRTKKFANTTKGHDELVSWLKGHKIDHAHICIEATGTYMEPVAECLYDAGYIVSVINPALGKAFAQSEGLRNKTDTVDARMLAEFCRQKRPAAWEAPHPLERALRALVVRHQALTDMHTQELNRTETAREVQRPRIDAHLLWLEAELKRLEKQIKDLTDDDPDMKHRRKLLESIPGIGEKTSAVLLAYIGLKDRFAHARQFAAFAGLTPRRYESGSSVRGASRMSKAGHVSLRRALYMPAMVATSKTEWGRAFRDRLAANGKKGKVILGAMMRKLAQVAYGVLKSGVPFDASRHNPVAA

SEQ ID NO: 402337 - protein, 310 aa, unidentified
MAMIVQNYVGCDISKARLDFFDEASGRYQRIANQAEAIEAYVAGLCAGRDFVVMEATGVHDRLLRHALGKAGIAFSRHNPAHTHHYAKSATQRAKTDRLDARMLSSYGRRYQPAAEAAPCEKGERLQSLARHRDHLVEIRARLKRYLSEAFDEDVITETESLIADFDTRIDALESRIAKAIREAEDTALDYTLMVSVPGVSTITALSLLAHMPELGRRSPKSIAALAGLAPLDNESGKAKRKSKISGGRPRVRRALYMAALGAIRANDRFRTFYTALAARSGSKKLAIVAVARKLLVTLNAIIRDKTAFA

SEQ ID NO: 402338 - protein, 356 aa, unidentified
MISRGVLHIPRIIVGVDTHKDEHVAVVIDKLGARIGQRNLPTTNTGYVGLEHWASGLGEIEVFGVEGTGSYGAGLARFLRGQGHSVIEVNRPDRSTRRRLGKSDPTDAEMAARAVLAGVARDQPKSGVDEVEMIRMLKSTKDSAMKGRTQAINQMKALIVTAPVELRAVLSGLTASQLVARCTGLRNGQLETPTTAAKYALRSLARRYSQLAKEIEGLNKELARLIVAFAPMLMEELGVGPDTAAALLVTAGSNPERVKSEAAFAALCGVSPIPASSGKTNRHRLNRGGDRQANAALYRVVLVRLRYDVRTRTYLQRRTEEGKTKTEVIRCLKRYVAREVFGILHDIGMRHTVQNA

SEQ ID NO: 402339 - protein, 390 aa, unidentified
MPDDAPRPAQAAIRTDLGAIFVSLELLRRAWLITSLSPGGGEKMSKHSVPASGVSELLRRFAELRRKAAARTGRDFPIIVIQEAGLDGFWIHRVLQSEGIESHVVDAASILTSRRRRRAKTDRIDGETLVRTLMAFKRGEPRVCSMARAPTPQEEDRRRVCRERRTLVGERVTHVNRIKGLLFAQGVFGYEPLRKGRRERLEDLRTGDGRPLPVHLKAQIIRELDRLEVLLEQLKAVEAERDALLKPATEEAASPAAMLARLKGIGPETAAVLWSEGLFRQFDNRRQVAAYAGLAPTPWQSGSIDHEQGVSKAGNPRLRTTMVELAWLWLKNQPTSALNLWFHERVRLGGRMRKTIIVALARKLLIALWRYTTAGVVIEGAVMKVAPATI

SEQ ID NO: 402340 - protein, 420 aa, unidentified
MSEMFDWYVGIDWASEVHQVCLVDDRGVVRGERAVRHSGEELAGLAAWLIETTGAAPERIGIGIELPHGPVVESLMERGFAVHAINPKQLDRFRDRFSVSGAKDDRRDARVLGDSLRTDTRCFRRLRRDEPRMIELRERLRMTEECKHERVRLTNRMREQLWRYYPQILDLSDDLSAAWLLDLWALAPTPAKARRVRESTIAKLLRKHRIRRLDAAEVVRRLRRPALTVASGTVEAASAHVGALRDRLRLVNRQISAAERRVDQILTELAASPEEPEAVPGQPPQQSDVTILRSLPGVGRIVCATLLVEAGEPLKAGDHQALRALAGVAPVTRRSGKSCIVLMRQACCQRLRDAVYHWSRVAVQCDATCKVRYQALRKAGHSHGRALRTVGDRLLETACAMLRGRGLYDPQRAGRTRQAA

SEQ ID NO: 402341 - protein, 488 aa, unidentified
MARQVVHDDDVALAQFGHQHLGHVGFEPIAVDGAIEHHGRDHTGHAQARDQRGGLAMAMRVPHPQAFALGAPTMATGHVGGGPRLIDEHEAFRCQIELAVEPVLALPQDVGAVLLDRVPGLYGMARPFSPASYMVPVLEEERSGPMSIVILGVDLGKNACSVVGVDAAGAVVVRRSMRRQTLVDYVAKLPVCVVAMEACCGAHYLGRLFAAHGHEIRLMSPEYVRPYVKAQKNDDRDAEGIAEAASRPTMRFVELKTQEQLDIQTLHRVRSRLVAERRSLTNQLRAILLERGTIFPVGRRKLELGIDALLADEDTTLSPRLRQLVAELRAEWRELDTRVEALNGEFVELARNDAAARRLTSIPGVGVLNATALIAAVGDASSFAKARDLGAWLGLVPRQHTTGGKPRLLGISKRGNTYLRTLLIHGARAALPSLARSETPLGRWLTGMIERGVHRNAIVVALANKLARIAWAALRKDATFERGYPVAA

SEQ ID NO: 402342 - protein, 288 aa, unidentified
MAIAEGGRGGEVRYLGEFPATEAATRKLVAKLTTKYRHLTFCYEAGPTGYGLYRLITSLDHECQVVAPSLTPKKPGDHVKTNRRDGVSLARLARAGELTAVWVPDERHEAMRDLSRSRQAAKKDLQGKRQQISSLMLRLGRYYPGKKTWGPAHMKWLMSQKLEYREQRMVLEELLQGIRQEGERVERLEQAIREAVPEWSLAEVVTALQAMRGIDLIAAVVILAEIGDLSRFQNPRELMGYLGLVPSESSTGDKVKRGGITKAGNSRARRILVEAARSYRYPSPLHDA

SEQ ID NO: 402343 - protein, 354 aa, unidentified
MNDLKYVAFDVHKSNIVVAVLNLEGKLISEAIIETQASPIRDFLRGLSGSVHLTFEEGSHSQWLFDLARPLVSHILVCDPRQNHFLKSGNKSDKIDASKLALLLRAGLLKEVYHGQAINQTLKQLVHNYDSLTSDTTRLMNRVKALFRSRAIACLGRDVYYKRNRTQWLDKLTDRGLRLRAESLYQQLDLVRCLRRDAKKAMLREASKEKAFKLLSTIPGLGPVRVSQLLASIGSPFRFQTTRQLWSYCGLGVVTRSSADYELTNGEVRRRQKAGQTRGLNRNYNHRLKMVFKSAAIEAMKEESIRKIYESQVKKGIRPEMARLSIARKLVAVSLAIWKKEEEFDPKKMTKLVA

SEQ ID NO: 402344 - protein, 391 aa, unidentified
MTFTRADAGRAAARSICPFVRKEPSAAMTTVAHTYPFIIGVDTHARTHTYAVLAANGEHLATETFPNTHAGRSRAIAWAARHTGGDLGTLWIIEGAGSYGALLAGTVARAGYGVAEAPRVTAYAPARRGTGKSDPLDAAAIAAAALPLEEAHLRTPRQDEGVRAALRILVAAREQMTVERTAKVNALIALLRSVDLGIDARKPLSDTKITEVSHWRARDEALAAATARAEAVRLAKRITVLDSELKDNQTRTTELIEASPAAPLLKETGIGPVTAAVVYTAWSHLGRVRSEAAFAALAGVSPIPASSGNTVRHRLNRGGDRRLNCALHMATIVRTVHDPNTRAYAERRKAEGKTPREIRRCLKRYLARHLYRTLNALHALHAPDSAVPTAA

SEQ ID NO: 402345 - protein, 283 aa, unidentified
MLNTTTFVGLDVHARSIKAVALDAMTGEVRSATFAYDAAAVAEWVGSLDPAAKCVYESGVTGFDLQKRLSSMGIDCVVGAVSKMIKPPADRKRKNDRNDAEFLARMLSVGNVVEVWVPDDGCEAARDLVRALDDAREDLKRCKQRLSKFLMRHGYAFSETTPTGRRKGNWTAAHWAWIRSIEFPEKADDDVLAYYIDATRQAMEDKKRLEKLVEAEASKPRWKKRVDSLRCLKGVDAMTAADIVFEAGEFSRFKNARSFAAWLGLTPSEHSSGESVCLWQAKC

SEQ ID NO: 402346 - protein, 319 aa, unidentified
MNSQLGIDIAKRKFDVALLNDGKYKTRVFDNTQAGFGQLMEWLEKHGAINTHACVEATGDYGTELATFLHDHAVTVSVVNPAQIKGFAQSELSRTKTDKADAKLIARFCQAHVPTAWQPPPASVRQLQALARRLDALNEMQRMEANRLDTAHALVVPSIQEVMAQLEQHIKIIRETIKQHIDSHPDLRSKRELLESIPGIGETTVTQILTFLVGAQFSHAKQVAAFLGLNPQQHDSGTSVRRKVRLSKTGDARLRVAFYMPAIVAMRYNPIIRAFSQRLLAAGKPKMLVVGAAMRKLAHMVYGVLKSGKPFDPALALIK

SEQ ID NO: 402347 - protein, 339 aa, unidentified
MITIGIDPHKGSHTATAVDEREAVVGELRVIADRHQRTRLLEWAAAFEPRRWAVEGATGMGALLAQQLVGAGEHVVDVPPKLSARVRLMDTGRIDKTDPNDARSAAVVALRNGSLNVVGADTEHRVILRLLADRYHQLSAQRTRTVCRLHAVLCALIEGGTGRSLTAARATKALASVTNRDPITLERVATCRQFVDEIELIDQALADTRARTVAAVTASKTTVDDVYGVGPIGAAIIVGHSGDVRRFPTAGHYARHNGTAPIEASSGPKSRHRLNPRGHRQINHALYTAALTQIAHDTPGRVYYERKLGEGKTKKEAMRALKRRISDAVYRQLLSDTRD

SEQ ID NO: 402348 - protein, 337 aa, unidentified
MKTQSRVGVDLHQRFCYLTAVDASGRKYKQGQVGNRPEALRSWLREIPGPRQVVVEASGFWPAFARAVEGEADRLVMVHPQRVKAIASARLKNDRVDSETLAHLSRADLLPEAWMANQRTQQLRQLTRLRITLGRQRATAKNQLQAVLHAEGFQRPVTDVFGKCGRAWLAGLALSPAGRMVVDTWLKVVDHLDGLIGEQTRELERMAKDDVRARWLQTVPGIGAYSAMVILAEVGEIERFPSKRALASYAGLTPAVRESAGRKKRGSIGHHGSARLRWIMVQVAQVAARHSPAAKAWVQRLKQKKPAQVAMIALARKLLTAVWALLRHGVRFEVRSA

SEQ ID NO: 402349 - protein, 409 aa, unidentified
MEIIHRICCGLDVHKKLVTACLIVDGKKEIRTFGTMTEDLLAMLDWLLKAGCQSVAMESTGSYWKPIYNLLEAAGFDEILVVNAQHIKAVPGRKTDVADAEWIADLFRHGLVRGSFIPDRPQRELRELVGYRRSLIEEQSREVNRLQKVLEGANIKLSSVATDVTGKSGRAIIQAIINGNTNAEEMSGLAKGRLRSKMDLLEKSLNGLIGPHQRMMLEAQLRHIDFLEQQIERLSKEIEVRMRPFDEAIARLDEITGIGRISAEQILCVIGLDMNRFPTDKHLASWVALCPGNNESAGKRKSGKTRHGNRLLKTTLIQAVRSIAHTKGNYLSAMYHRLARRIGSKKAAVAVAHALLIIIYHMLKDGTRYRDLGANYYDKLNEQAVVKRAVKRLEALGYKVTVEQASSAA

SEQ ID NO: 402350 - protein, 351 aa, unidentified
MSHKTAATVAHTIGIDAGKNTLHLIGLDDKGAIVLREKVVRDRITARLANVPRCLIGIEAGMATHYVARELSALGHDVKQVPPAYAKPFRQGHKNDFRDAHAIAEAVQRPYTRCVPVKTDDQLDLQALHRVRSRLVGQRTAVINQIRGFLLEHGIAVRQGLRFLRQQLPDILAKRSDVLSPRMIRIMEDLSGDWRRLDERIQHVTDEIEVLAHGSESCRQLMTVPGVGPIIASAMVAAIGNGTAFAKGRDFAAWLGLVPRQISTGDRTILGRITKRGNRYLRTLFMQGARVILLRPANWAKHSFGRWLTAAAQRLHHNVLATALANKLARITWTVLAQARSYDARVEPGVA

SEQ ID NO: 402351 - protein, 408 aa, unidentified
MRSSFSLSGGIRRLDMPKTYVQNNGEKGMDTMDERKKLDAGSEVKGIYYGVDLHKDQLTYHCVMRLADGANAHTRGVVSTDRISEDFIPMLDKTSCYVIVEAACSAFFFSGLIEGHCTRVITINPIAFKELYATGKKTDKIDAKKLANRLQYFIESGDKDDDFPIVTVPDGEAQKVRKLVSSYEFLVKQITKLKNHIKAIFRAKIIDFPEDTLESGLECILDHPRLDEADRIMLKTFKTMYETTLAEKETIKKAILGIGARRFSKEIGILSSYTGVSVMGAVVFMSDIVSIDRFKSYRHMTSYLASVGKVDASGNSTRNGGLNKRGRRTSYRFILQGLEHIVQGNKHLQSFKERHKSKKGNKIRGALVRKTFVTMFYMLKNEEEYRFVKKSLHDKKLREIEKILAKAA

SEQ ID NO: 402352 - protein, 400 aa, unidentified
MNRKKRYIRFCGIDVAKNKHVLCIIDRDGQTILRSQSFMNNKDGYQRLLQSLKNVGQSRTILVGMEATAHYWYSLHDFLVRAGYQVAVLNPIQTAQQAKKGIRKRKTDKIDAFHIAMLLKNGEYRAALVPGELAMTCRQLTRLRCRLVEQTACLKQLIWSRLHPVWPEYEELFKDPFCATGRKLLYTAPTPSDVLNMDRKELSELIRKASRGKYGQFQAKKVWYAAANSAGMHRSLDGARIGIRTLLRQIEAVKPIREKLEEDICQLAIQLPTYIFSLPGINPVSAVSLFGETDPIKNFRTPAQLVAFAGLDLSVFQTGQYDAPRRHISKRGSPFLRHTLWNMAFQAVYREGEIRDYWLRKSADGLKHKAAITAVSIKLCQITWRILTDKRDYLPEGRPN

SEQ ID NO: 402353 - protein, 321 aa, unidentified
MTYVGIDVSKATFVVAYSSAKTGKTKTFKNTVKGVHEFIRTISAAEHHCVLEATGNYSALLVYLLSEARITVSLENPLKIKNFARAMLSVTKTDEIDARLIALYGERMQPAPYKLRNDSILILKQKRTVLRQLKKQLVATRNLKGSLEVLPSFDPECKKTIEKTIAFLEKQIKAMEEKITSLAQGEYKKQMDLLTSIKGIGVTLAAALIVATGGFTYFDNAKQLTRYLGLSPTYQQSGTSVNVKGHINRNGDSNLRSQLYVAAFSSLRCNTECKACFDRLRSNGKPGKVAVVAVANKLVRQAFAVVTQGKPYVDGFKSEKP

SEQ ID NO: 402354 - protein, 370 aa, unidentified
MGEYSQAFVAFDTSKAKHAVAIAESGRRGEVRFLGDVASSPARVERLIRKLAERYDKLHFCYEAGPTGYGLYRQIRELGHECMVVAPSLIPRKPGERIKTNRRDAVSLARLLRAGELTAVWVPDATHEAVRDLVRARAAAAQDLRRKRQQLLSFLLRHGRLYDGRQHWTLVHRRWLARQSFAHPAQQIVFQDAIEAIEEAFRRLRGLEEQLVAIVPSWSMAPVVAAYQAMRGASFLVAVTVAAEIGDLRRFDNPQQLMAFLGLVPRERSTGDTVRRSGLTLAGNRHARRVLIEAAWSYRYPARVSDTLRPRLDGLPKPVRDIAWKAQVRLCARYRRLSGSGKKLPVVIAAIAREIAAFLWAIAGQIALTA

SEQ ID NO: 402355 - protein, 391 aa, unidentified
MFLLGIDIAKLNHVASCIDSSTNEIVFSNFKFKNDFKGFSALLNKIKSFDAKNLIIGLESTSHYGENLINFLFIHDFKVALINPLQTSHLRKANIRDAKNDNLDSLNIAKSLVFTKLNFVSKKNIECFSLKKLTRFRSNLIKQRSKAKIQLTSLLDLLFPELQYLFKSKIHSKAIYSLLKKYPSAEEIAALKDDEISNLLYASSKGHFKKEKSIELKSLAKTTVGIKDTSISLHLIQLIELIELYTKQIKDIEIKITDIVNNLDTTLLSVPGISVIACAIILGETNNFENFSSSKKLLAFAGLDPKIRQSDNFNASSCRMSKKGSPYLRYALIFTAWNIVRHSEKFNKYYSLKRSQGKSHYNALGHVAHKLVRILFTLIKKNISYQEEKLE

SEQ ID NO: 402356 - protein, 360 aa, unidentified
MFVERTSVGLDVHARSVAAAAIDGVTGEVFKARLCPAPTEIIAWVGGLPGPCAAVYESGPTGFGLARAFSAAGIRCEVAAASKLQRPAGDRVKTDARDALHLARLLRLDEVTPVRVPSAEEESARDLVRAREAARADLMRARHRLSKLLLRHGIVYSGGKAWTQLHDTWLLRQAFALAGTQAAFEDAYEAVVLVAGRRDRLDQKIAAMAADSQFTPVVHRLACLRGISTLTAFSLAVEIGDWDRFTGAGIGAYLGLVPSEHSSGASRSQGAITKTGNAHVRRLLVEAAWHHRKPYRPTAVLRRRWQQAPPAAVARAQQGNHRLHQRWVTFNDRRRRPVVANVAVARELAGWCWSLAMIPD

SEQ ID NO: 402357 - protein, 466 aa, unidentified
MKKAKELGKTKRSGVPMALQAIRPMVAGVDVGSRENWVCGPARPDGEPNVQVFGTTTEDLKALVDWLAKQGTESVAMESTSVYWIPLFEILEARGIEAVLVNAHQLHNVPGRKTDFHDCQWIQLLHSCGLLRGSFRPGPAVVAMRAIHRQLANLVEERTRCVQWMQKALDQMNVQVHRAVTDLTGTTGMAIVRAIVAGERDPVRLSALRHERCQKSAEDIARYLTGTWRDEHLFNLASALQLFDAIETLIATHESRLLEAMAALQPDDRKDAPVPTHPNPLKERAIKGRGDQQVRTALWRFAGYDLMRIDGIGTGTAKIVFTEVGTDISAFPAEGHFLSWLRLCPRCPISGGKPLKKRRNSMGANRIAGALRMAASSLQRTKTALGAAYRRIARHKGAAVAVFAIARKLAQLIYRMMRYGQDYIDIGEAAYDSQFELRRLAGLKEAAKSMGFSLTRDPALASPASG

SEQ ID NO: 402358 - protein, 411 aa, unidentified
MQHDTTTSTGGVDWATDTNEQCVIAADGAVLLRANTTHDAAGIRRLVSAFLEHGVDRVAIERPDGPVVEALIAAGVEVVVVTPRQVKNLRDRYGAAGNKDDRFDAYVLADVLRTDSHRLVCLTPDSAQTLALRSAVRARTDLVEARVAICNQLRAHLRTVFPAAVGLFADLDSAVSLAFLSRFPNVDKAAWLSHKRLGSWLAKHGYSGRTPTQTLLDRLDAGPEGLTGQVAAAAAHTTLAYVKTLQALRTQISALETQIREQLAGHPDAAIFTSLPRSGQVRAAKLLVEIGDARGRFPTDASLAALAGAAPSTRQSGRHHVVSFRWACDHKLRDAVTDFAADSRHASPWAAAIYDRHRAAGKTHQHATRILARAWLRIIWRCWQDHTAYDPTRHGGNQPFLPPSQELPAVA

SEQ ID NO: 402359 - protein, 457 aa, unidentified
MSHDRQSKGTRQARSLPVRHACAAGIDIGAKFHVVAVPPHLSAEPVRTYQSFTTDLHRLADWVVAVGITTVAMESTGVYWIPLFEILEDRGLEVLLVNARHVKRVPGRKTDVTDAQWLQELHQHGLLRGSFRPANELVALRAYLRHRERLLEYAAGHIQHMQKALMQMNVQLHHVVSDITGATGMAIIRAIVAGQHDPGQLATYRNVRCHASGETVEAALTGHYRREHVFALRQALELYDSYQTKVEECDKAIEATLAVLPHAEHEPSQPLPPARHKTRQMNEPKFQTREALFHLLGMDLTQLHGFGPHTALKLIGECGTDMSRWPTVKHFTSWLTLAPGNKISGGRLLSTKTRRSASRSAKVLRLAAVNVGKTSTALGAFYRRLAARVGKAKAVTATARKLAILFYNALRYGMTYCDPGVAYYEERYRQRVLKGLKKRAKDLGYELTASGATPGVS

SEQ ID NO: 402360 - protein, 335 aa, unidentified
MQIYGIDLAKEKFDVSFFDLTSKKVSNQPSHKVVTNNLKGIGKFFKGLPSDAVLVAEHTGVYGDTLLKCCMDSNVKIAFVGGYVIHRYRTTPDRAKTDVLDCALLRDFGERYPDKLKYKTFPEEALYELRQLARHREMLVEQRKQLITADKSEDCRPIRSLAVKRSMDRIKEMLDTEIAETEKEMLKVINGHDSIHHNYELVKSVKGVGLVTAVELLVKTENFTKITTARQYAAYAGTAPYEKSSGKMDKGAHISKIGNRRSKTLLYICAESARLHNKEIKLYYERRTLIDKKPRHYVLNAIANKLLRIIFTLVEKGEYYDANFIRQDPRVVKYN

SEQ ID NO: 402361 - protein, 449 aa, unidentified
MKTTKAQRHGLPVIHDRAAGIDIGSRFHVVAVPADITEEAVQTFNAFTADLERMAAWLVDLGITTVAMESTGVYWIPVYEILESHGLQVVLANARDARAVPGRKTDVNDAQWIQRLHACGLLRASFHPDREIAALRSYLRLRERHLDYAAAHIQHMQKALTHMNLQLHHVVTDITGATGMRIIRAIVAGERDALILARMRDTRCKSSLEIIRSALVGNYQPEHVFALAQALAMYDAYQMQLELCDQQIARSLHQLAQQKPLPGEPLPKARHPTRQPNALNFDVRTLLYQLVGVDLTQIHGIGPYLALRLVAECGTDLSRWRTAQHFTSWLTLAPGCRISGGKVLSAHTRKTKNRVTAHLRLAAVTIGKTNTALGAFYRRLSARIGKAKAVTATARKIAILFYNAMRFGMAYEDPGADHYEQKYRERVVKGLHRRAAEFGFTLQAVEGVS

SEQ ID NO: 402362 - protein, 430 aa, unidentified
MKSNTQNAKIKAITETTLVLGIDVGSETHYARAFDYRGIEYSKKPFKFSNDEAGFVTFKAWILDIKEKHGKDKVVPGMEPTGHYWFNLGKFLQDNEMKPVLVNPHHVKKSKELDDNNPTKNDRKDPKVIAGLVREGRYMIPYLPEGVYADLRTASNMRFQLQAELTRIQNRISRWFNIYFPEYKTVYGQPDAKSGMLILKVAPLPEDIMTLGIDGVNQIWRDAKVRAVGKARAKTLIEAAEHSVGSKEGEISARMEIRMLLEDYESRNTRLQEVVALIEELVKKIPMAEKLLEIKGVGIKTVSGFLAEVGDISRFNNPKELQKLAGLALVENSSGKHKGETTISRRGRKRLRYLLFEVAMSLVSKNPEFRELHSYYTTRKLNPLKKMQSLMAVAAKLLRVFFAMLTKGVDYDPKKLVSDIKRPAVYLQVA

SEQ ID NO: 402363 - protein, 339 aa, unidentified
MGLYAGIDLHSNNNYLAVIDEQDKRLYQKRLPNQPKVILAELAPFHEQLSGIVVESTFNWYWLVDTLMDNGCTTHLANPAAIQKYKGLKYSNDSHDAFWLAHLLRLGILPEGYIYPKEDRPMRDLLRKRGHLVHIRTSLINSLQGIISRNCGCRLSGNKIKQVKENHISPLLAGQEDLELSGEVSKNAIDYLSGQIRKIENVVLEKVRLRKPFLGLQTIPGLGKILSMTVMLETGTIERFPEVGKFSSYCRKVPSEWQSNDIKKGKGNSKNGNKYLAWAFSEAAEFARRYDQTAKTFYNRKAGRTNRMIAHSALAHKLARAAYYIMRDGVEFDHRKLFA

SEQ ID NO: 402364 - protein, 509 aa, unidentified
MSDRKAPSPKVRVLQQPLQPTPTPTHVHTPQSPKPNHADPLRRIARMAEQARQDAEQCAKLVSLPIQHAHAAGIDVGDATHWVCVDATADGGDTVREFPAHTPGLRQLVDWLRQCGVTTVALEATGVYGHVLFLTLLEAGLHVVTTAPTFTRQIKGRPKTDKRDCQWIQRLHKHGLLPSIFQPDEATQTLRDYVRQRANLVRLSGQHIQRMQKALELMNLKLTKVLGDITGVTGLKIIRAILAGERDPRQLAKLRDRRCKHTLDEIATALDGRYRPEHVLELRCCFAMWEKYQPVIGEVDLALAAQLRGMRRQTELPPLPPKPRVRGKKPHDPRFDVRTALYYATGVDLTALEGIDEIHALTLVGELGSDFSKWPTVKHFTSWLGLCPNWKKTGGKVQSSRTRRGKNRAAHALRLAAWSLMRSKSYLGAYLRRQRSRLGTPKAITATAHKLARILYNLMRHGVAYMKQEEAAYAEQVRERLQKQLERRAKELGFELRKIEQAQTPAAAQ

SEQ ID NO: 402365 - protein, 345 aa, unidentified
MPIVGGLDIHRKQITFDYLDTVTGEVKRGQIAPADREHVRAWLARFAGQDDAAFAVEGCCGWRYVAEELAAAGIAAHLGEPADTAALRGRKRHAKTDKTDARHLRALLAEGRLPECWIPTPHILEYRALLETYHDLRTEHTAWVQRIHAVFFHQGGPPLGEGVLRTEPGLEALQSAAAAHLSPAGQQQVATAVDMLAATEAQLGPLRHQLRQAAAHLVGAKVLAARLYGVGPVTGLALTCWLGGKDRFSSSRKAVRFTGLDITVHSSDRKGPPGRLSRQGPPVLRWAVYEAGKTHARASAPDHAYYAAVADRKNTKRAALSEARKIVRQACHILTELGDDALTAA

SEQ ID NO: 402366 - protein, 357 aa, unidentified
MAQGSTLFIGLDVHKESIAVAYVAEEREAEVVFLGTSGTRQSDIDKLIRKLQAQGQPLHLVSEAGPCGYWLYRYLSKQDLKCWVVAPSQIPKKAGDRVKTDRRDAVQLARLLRSGDLTPVYVPAVEDEAIRDLVRAREDALKDLKAAKVRLKAFLLRQDIRSEGRATWGPAHLRWLAEVVCPTPAQQIVFQEYVRAVSEHTERLQRLEAELATLVQGWRWLPVVEAIQALRGVQFITAVTLIAELGDLTRFENPRQLMSYLGLTPSEHSSGERRRQGGITKTGNSHARRALVEGAWAYRYPAKVSRHLQLRLEKVPKVIQDISWKAQVRLCKRYRRLVARGKNVNQVVVAIARELIA

SEQ ID NO: 402367 - protein, 334 aa, unidentified
MYQHYIAVDWAQSNMAVAHLTGGSNRASVRDVPTSLEDLKDYLKSLRGTKILTIEETTTSHWLYVELHSLVDKIVICDPYKNKLLSLGAKNDKADAIKLVTLLKTDSLKPVFHSLDELVNLRKLVSSYEDLIKRGVRLKNQKSAIFRSVGLSSQDDMPSANEIEHFVLRRINSAIDAYECDRKSYEEEFEKLFKRYTMLRWLRQIPGIGVIGSVKIAAAVVDGARFPDDRKFHTYCGLAMHALESGGKDYGRRKPRYRRDLKAVFKTAALAAITHENEFTEYYRYLIQEKRYPDHQARHAVARKIATAVYGVMKNKQKYNPDQIGALRHLRKRS

SEQ ID NO: 402368 - protein, 367 aa, unidentified
MKKVSTVAAKQTKNFAEQKLTIGLDLGDRSSWYCVLDEAGDVLLEQKLGTTPKAMKEVFGKMPRSRIALETGMHSPWVSRGLSELGHEVIVAHARNVRLIGESRRKDDRFDARTLARLARIDPQLLAPVQHRSAEAQAHLMVIRARAGLVRARTSLINTARGLTKSYGERLRGCSPRNMNAETARQLSPELQAALEPLLAAIESLSQRIYEYNQQIAKIARESYPQVVRLEQVKGVGTLIALTYLLTLEDAQRFRKSRDVGCYVGLQPGRRNSGQSEPQLHISKEGDPYLRTLLVQGAHHILGPFGADSDLRRWGLKLAERGGKNGKKRAVIATARKLAVLLHRLWVSGEAYEPLRNSRRGMLPAAA

SEQ ID NO: 402369 - protein, 362 aa, unidentified
MEFFSGLDVGMDETAICVVDDKGKVVLETAVVTDPDAIKGALKPYLGRLRRVGHEAGSLSPWLHGELLKLGLPAVCLETQHVRAALKAQRNKTDKADALGIAHLMRTGWFRKAHIKSEACYRLRLLLTHRRNLKRKCLDLENAIRHSLKAFGVRISGTGRGGFAQAVREAVAADALVSELIDAMLNARAALWKEYCRLHDLVVKLVASHELCRRFMQIPGVGPVAALSFMTAIDDPSRFKRSRDVAAYFGLTSRRWQSGSSIDVQGRISKAGDGDVRRALYEAASALLTRFKRKDKVKTWGLAIAKRTSHRKATVAVARKLAVIMHAMWVDGTFYCGDPDALKADVSARAAAKERRLLGAHA

SEQ ID NO: 402370 - protein, 331 aa, unidentified
MNTLMMPAAAARFNHVIAFDVAKASLSLHILPSGETLSLQNDGAAIRRLLKREEKRNRKQGLGRMLVICEATGGYEDAVLKAACELGLDCHRAHGSGVRAYAKFRGRHAKSDPIDAALIAEYGRDKLDLELYQPPRPEEAALRALMGRRAELKDMIQAETCRIEHASLKAVRVSLESHLAALKEQLALIEKEIRTLTRRDEAFSHNSRLMQTLAGIGAVASQTILAFLPELGHVPTPTAVALAGLAPYDRDSGKERGKRRICGGRGQIRVCLYMAALAAIRSHAHFREFAQRLTRKGKPFKVAVTAVMRKLIVILSAMIRNDQPWKHAQTA

SEQ ID NO: 402371 - protein, 314 aa, unidentified
MTDGPCHVGCDVSLDALDLCTLNSGQAVAARVANSPSAIAGLVRELAARPGVLVILEASGGYEAALLEALWQAEVPVARVDPRRVHRFAEAQGEKAKTDRVDARVLAEFGARMTPEPTLDPGQGTRHLKALLTRRRSLAERRKAEACQLKQARFADLRAMAQEEIARLKALIAALDQRIAQLVTAQPALAERAARLRSVPGIGPVTAAACLASLTELGQLGRAQVASLTGVAPFARESGTWCGTRRCKGGRKELRDTLWMAATSAALHTSSRFATFYRSLRTAGKPHKLAITAVIRKLVVTLNAIVRDNTTFAH

SEQ ID NO: 402372 - protein, 309 aa, unidentified
MIADQIVAGIDVSKQRLDVHVVPSGRALSTANSGPGLARLIGQLRALGVQRIGLEASGGYERHAAGELSRAGFAVHVVPPARVRALARALGRPAKTDPIDAAMIARYLLLTPGQHIHQADAARERLDELARLRRQLVAERNKLVSRLDIASDPLVRRMLGRMHTTIAANIARLDAEIASHIRASPLKARHDILIAVPGVGPVLAATLLCDLPELGQASPKQLASLVGVAPHARQSGKTTRPGRCSGGRASVRNVLYMATLSALKARAPALRPFYDRLRANGKPFKLAINAAMRKFITILNAIVKQSTVA

SEQ ID NO: 402373 - protein, 317 aa, unidentified
MPYASRFVGIDISKSFLDVCLLPDQKRARFANTSEGTAAFIAFLAPLEGIERLILEPTGGYERLVVTALQAAALPVAKVNASQVRQFARACGQLSKTDTIDAFVLADYGRRMQTRILPQRSSQQTELEELVQRYRQLAHMIVQEKNRREKLNHNAQGRTKDWIEQTLRFLLEQRQAVVDDMTECLKTDPELGRKAEVLMSLKGIGLRTACFLLAGLPELGLLDKAQIAKLVGVAPLNRDSGAMRGKRMIAGGRRPVRDALYVAALPAIRFDPAIKAFYTGLRNRGKPGKVAVVAVIRKMLIILNARMREHSAAVRDG

SEQ ID NO: 402374 - protein, 353 aa, unidentified
MVIIGCDFHPGFEQIAMVETTTGEITELRLAHKEEAQQFYADLRGQEVLVGVEACGYTQWFEQMLEQMGHRYLIGDAAAIRASYVRRQKTDRRDAGHLLRLLVEGRFPALWVPTGADRDVRQLIVHRHKRVEMRTRVKNQLHALALNQGLRLRWKLWTRAGMEQLKALQLQPYGTARRADLLRQLEEMDGEIARLDETVRKEAEARPAAVRLMSHPGVGPVTALAFVLTIGDVERFKKSRQVASYLGLIPTERSSGGKQRLGHISKQGNPLLRFLLVEAGHSAVRKDAELSRCYRRLQHRHSTGVAKLALRLYWMLRRQTDYAQLPAVRMQASPCHSVVESKTVRLSGQPASL

SEQ ID NO: 402375 - protein, 425 aa, unidentified
MNDDVMIAVDPHKASNTAAVLDPVTKTVIEAARFANTFDGYAQLTAFAARWSQRRWAVEGCYGAGRSLAQRLAADGEAVLDVPAKLAARVRVYSRGHGRKTDKDDAVSVGLAALDGTGVFPVTPDDATVSLRLLCDRREELTAQRTQAVCRLHRLLAELTPGGMRRELSADKAQALLARIRPADDVAAVRVRIARDHLADIRALDARIKYLGGQIAGLVDASRTGLTGLFGVGPVIAGRILAEVGEVARFATKDAFASYNGTAPIDASSGEQVRHRLSRAGNRRINHALHMMAVVQIRYPDTPGRRYYERKRREGKTPKEALRCLKRRLSDLVYHQLLADRHGTIGTCGSPTTQRPTRSTSTSPASRSHQAAPPCRPPRRPAPADSSRWTGKTAASSASRSSTPAPASTPTSSTKPKTTAKTAAT

SEQ ID NO: 402376 - protein, 351 aa, unidentified
MINEKINQKDTKINDYVDTLESYEHYIAIDWSKRTMAIARLTRIMKKPKVIEVRSDVYDLKAYLRNLRGKKILTIEETTSSQWLYVELQGYADKILICDPYRNRLLSEGSKNDKIDAIKLCLLLKNGLLKEVYHSLEYQYRLRQQVSDYEDLVKSGVRLKNQLSAIYRANGDEKIKDVVTKRIIIRIEQNIELYEQQKEEYERIFGQEYRKDKDINRLRSVNGIGSIRAVMIVATVVDARRFENNGKYLSYCGLIKHEKLSGGRSYGKRSPRYCRRLKCVYKSAAQTVINSKDNSLKQYYNYLIDKGVSEDRCRNALARKIARVTYGILKTKTNYKPFIWRENKAKEISIK

SEQ ID NO: 402377 - protein, 353 aa, unidentified
MITIGVDAHKRVHVALALNDAGQELDQWRGTNNFAGWQSIAQWGASLGSPRQWGIEGAWGYGRNLAQHLVASGETVYEVNPRWTAIGRRGARKPGKTDRLDARAVALLVRQEASTLPRVHPEDDTAILDLLTSEREATVAEATRLRNQIHALLMQTDPDYRTYLPGMKSRAALDVLETYDSPVDKPLQVQRAAAVRRLAARLRLALLQAEELAEQIKDLAARRFSPLTRVCGINLITAGTLAGILGPGRRFASDAQLAAYAGVAPLEASSAGLVRHRLNRGGNRRLNAVFYRIVLTQAHHSPQARTYIERRLSEGKSRREAHRALRRFVARAVWRLWQECQPAETTNAVQKAA

SEQ ID NO: 402378 - protein, 451 aa, unidentified
MSPRKSDATLSLAHPDAAGIDIGSASHFVAVPHDRDDQPVREFKSFTADLYRLAQWLKDCGVTAVAMESTGVYWIPLYELLDSQGFTVYLVNARHVKNVSGRKSDVLDCQWLQQLMSYGLLAGAFRPSDEICVLREFSRQREMLLASQVRHVQHMQKALAQMNIQLTQVLSDVVGVTGQAIIRAIVGGERDPHALARLKKRQVKASEDDIAAALQGNWRHEHLFALRQALALYDTYQQLLNDCDQHIQAELHKLHRHDGDPGKSQRRWPKKAMAFDLRTHLFAMCGVDLTRINGIDEMTAFTVLAEVGPDMNRFPSAKHFASWLGLCPGTRISGGKVLNGATKRSPNRAAQALRLAAMALRHSQSALGAYYRRLCARLDKRRAITAAAHKLARLIYTLLTKGSEYVDQGELYYEERHRQRVLHHLTKRAETMGYSLVPITASGETNEVSMT

SEQ ID NO: 402379 - protein, 465 aa, unidentified
MQNSNQRKSRPGSPRPIEGLPIVRHKVAGIDLGSERHWVCAPMIEGSGREVADFGATTPELIRMAQWLKARKVESVAMESTGVYWIAPHEVLEAEGLEVLLVDTRQLARVPGRNKKSDPLDCEWIQRLHSCGLLMGSFRPKEAVCMLRTLVRDKGNLVAEACDWLRRMQKSLDQMNVRVHRAVSDIDGATGMAILRAIVAGERDARKLAKLRDRRCHKSEEEIAEQLSGHWREDHLFSLRQGLKMYDGIQERITDYEKEILRKLGEMEREEYRKQAVPPLNNPQKAKLIRKRGEEPMRQALYRMSGVDLTGIDAIGVETVQLVLSEYGPDLSRFATEKQFVSHVTLAPHKPTSGGKPVKKQKKRGGASSRVAAGLRMAALSLRHSETALGAYYRHIARRKAGDVAVFATARKLATLIYRLLRWGQPYVDEGAAAYEKRHQQARIKSLTAAAKDLGYQLTPTPNLV

SEQ ID NO: 402380 - protein, 340 aa, unidentified
MKLLYTGIDFHKRTSTICFLKNDGTKEIKTISSDNLVAELVNRKNLLVAIEASCGVNHVVDQLKSHQIDVKIINPNKFRGIGIGGKKTDIKDAEALAECLKVNFIPTVHHKSIGSRRLKSLLRIREQYVQNRVRITNGIRGTLREYGLKMPAGTESFWEQVYEKIELIDYIPLKDQLRDLANEAKRLKRKEQEVEKTIKTLLDGDVVANNIMSIPGVGLLTAAAFIAVADDLSRFKNAKAFASYIGLVPREFSSGDKQRMGSITKAGQEILRRYFIHGARTVLRYSNDTSKEPIRVWGNKLKQKIGANKATVALAHKLARICFRVAIEERLYVKKYNNKK

SEQ ID NO: 402381 - protein, 377 aa, unidentified
MTQFPQSPCNEPSIHAALELSKNNWLLAIQAPDRDNPSLHPLKGGNAEGLMAKLDAASDRVAKVMGERPKVTLCYEAGYDGFWLARFLEERGIGCLVMEPASLQVNRRARRVKTDRIDVESILHTLIAWCRGEHQVCSMVVIPSVEEEDLRRSHRERDRLIRERTAHINRIKGLLFGQGIRGINVKAHYKSLTPAMLVTADGRPLGQRLGREITREIARLDQLQVQIVEIEGERDKAPTPCVETERKRHDLMRLKGLGPTLSATLSREVYYRRFANRRQVASYIGIAPSPYDSGDGRRSQGISKAGNRLARVAMVEAAWLWLRHQPDSALTQWFHQRTAGQSKRVRCIMIVALARKLAIALWRYLETGLIPEGAVVK

SEQ ID NO: 402382 - protein, 398 aa, unidentified
MTESSDYESVQVFIGVDVGKDTHHAVAVNRSGKRLFDKALPNDENKLRSLISDLKQHGQILLVVDQPATIGALPVAVARSEGVLVGYLPGLAMRRIADLHAGEAKTDARDAAIIAEAARTLPHALRTLKLADEQIAELSMLCGFDDDLAAQTTQVSNRIRGLLTQIHPALERVLGPRLDHPAVLELLQRYPSPDKLASLGEKKLATQLCKLAPRLGKRLAADITRALTEQTVVVPGTNAAVVVLPRLALQLITLRKQRDEVALEVEQRVLAHPLYPVLTSMPGVGVRTAARLLTEVACRAFASAAHLAAYAGLAPVTRRSGSSIRGEHPSRRGNKTLKRALFLSAFAALRDPISRAYYTRKMSQGKRHNQALIALARRRCDVLFAMMRDGTFYTPAAS

SEQ ID NO: 402383 - protein, 404 aa, unidentified
MLFVGVDWAEAHHDVCVLDNEGRVLGRRRVNDTLEGVRDLHALLAICADDEPDIVVGIEKDRGLIVTALVASGYEVYAINPMAAARYRDRHHVSGAKSDPGDAKMLADLVRTDRHNHRPVAGDTPLAEALKVLARAHQNAVWSRQRHVNELRSSLRDYFPGALEAFGTDLAHHDALAVLGVAPTPALARALSKAKLMSALKRGGRQRRLEVRALELQEILRREQLAQPALLEHAYGLTTSATVSIIVATNATIDELESGLSQHFEQHPDAKIIRSLPGMGMVLGARVLGEFGDDPNRYADSKSRRNYAGTSPVTRTSGTRKVVLARRGRNRRLASALDQWAFSSLLQSPGARHYYDELRAREKSHRKALRQLANRWVGILHICLERGALYDESLAWPHFTEQAA

SEQ ID NO: 402384 - protein, 400 aa, unidentified
MRAVFGIDVSKTSSEVAILVNGEKVHGYTILNDAIGFNRLLGDLKTVHNPEIIFEATGVYSRRLQAFLEEYSYAYTRLNPLEAKKQLDSLRVRKTDKIDAEKLAKSQLVHNRKPTYVQEEVYQHLRDLSRFYQNMTEDLVRTKNRLHKVLQVTFPELETLLSTPTGEQYWNLVMAFPCKEFVLSLSQSDLCEIIRQSTSKRISEKRIAYLTDKLIKLAKQSFCAVKNTSPMLEEVRYYAQELLRLSERRQVVLNDMVALAQPLPEYDILRSIPGIAETTATSIIGELGDIRRFQSSNQINAFIGIDLRHYESGNFLAKEHITKRGNPYARKILFKCIHNITSASHTNRCHIADFYEKRKRQSTIASTKPHTIASIHRLIRTMYYLITHNKLYDYSLTQNR

SEQ ID NO: 402385 - protein, 345 aa, unidentified
MEAYAGIDLHSSSNFTAVIDETDRKIYGKQLPNRLDAVLSALSPFKENLKGVVVESTYNWYWLLDGLQEHGYRAHLANPSAIKQYEGLKHTDDRWDSFWLAHMLRLNILPEGYIYPKKDRPVRDLLRRRLLFVRHRTAHILSLQSMITRNLGTKMSCRAIKGFSGEDAESLFDSPYLVLAAKNSISTIGFLTERIKKIEREAKMTLDFKKEFKCLLTIPGIGLILGLTIMLEVGDIRRFAKVGDYSSYCRCVRSERLSSGKKKGENNKRNGNRYLAWAYVEAANFAIRFCPDAQRFYQRKMAKSNRIVAIKALSNKLARASYYIMRDQVSYDGNKLFKQSARVQQ

SEQ ID NO: 402386 - protein, 345 aa, unidentified
MKITTVGIDLAKNVFQVHAVDERGTVVLRKQLRRDQMTAFFANLPPCVIGMEACGSAHHWARTLKSLGHDARLMSPQFVKPYVKSNKNDVADAEAICEAVARPNMRFVPVKSIEQQAVLSLHRVRQGFVKARTAQANQIRSLLGEFGLIMPAGISHIAKRVPRLLDDASNALPGSFSQLITRLTEHLKDLDALVDEFEAQIKAWHRSSELSMKLEKIPGIGPLGASALVASIADANSFANGRQLSAWLGLVPRQHSSGGKPALLGISKRGDVYLRTLLIHGARSAILAAQRKAVNANVWLTGLLARRHPNIAAVALANKNVRTVWALLAHGREFRPDYVAQALAA

SEQ ID NO: 402387 - protein, 427 aa, unidentified
MRDHSEAFIGIDTSKLRNAIAIAEGGRGGEVRYFGEIDSADAATRKLVSKLAVKYRSLTFCYEAGPTGYGLYRLIRSLGHECMVAAPSLIPKKPGVRVKTNRRDAVELAKLSRAGELTAVWVPDERHEAMRDLSRARQAAKKHLTSKRQQISSLMLRLGRHYPGKKTWGTAHMNWLTQQKLEHREQRIALEELLEGMRQEAERVERLEQAIREAVAEWSLAEIATALQAMRGIDLVAAVTVLAEIGDLSRFQSPRELMGYLGLVPSESSTADKVKRGGITKAGNGRARRILVEAAWGYRHPPRVSREKQPKVAAAPRRVARDCLESPNTIVRALPITHPQGQAPQHRRHGDCPRAIGLHLGDQSRGHGSRRRARNPQRPDRPQRDAVLATVKAWPGDGRRSRRCTATASLDGGCARRPGSSAGRDMG

SEQ ID NO: 402388 - protein, 477 aa, unidentified
MSQVKRKQGCELRNSKAGIPLVSNGGSGELDVINLHAAGIDIGATEEWVACPPKDGRPNVRKFGTDTPSLFELADWLLSEGVTTVAMESTGVYWIPIFEVLEARKFKVILTDSRMLGRVPGRKTDMLDCQWLQQLHTHGLLRGSFRPKDATLAFRSLLRTLRTLKAQQDDWIRRMQKALDQMNVRVHRAVSDITGVTGMRIVRAIVAGTRNPATLAAMRDRRCRKSEAQIERELTGNWREEHLFNLNLSLASYDHFEQQIKKTVDRILFELDTIRKKREAAGLNMTPPDMVKQHPNPAKACSMESHGQEPLRVALAATFGVDLTAIEGVGAETAASILGEIGPEILEPFPDIKAFVSYLRFAPNLAISGGKPIKGKKKMRQGSPVVHRLLRTAAASVRQSKSALGGYYRKTAFRKGAGTAVYATARKIAQHIYRALAHGIPYVTIGIEEEDRKILDRQRCNIERQAAKFGLKLVPAA

SEQ ID NO: 402389 - protein, 340 aa, unidentified
MFVKLSSIKEHRFWINKGNLMRNAVGLDISKLTFDATAIVGTTEHSAKFDNNAKGIVRFKDWLGGLICPDLHVCMEATGNYYEAVADSLAEDYKVYVINPLKISKYAESRFARTKTDKQDAKLIAEYCRSVEEYELVRRNKPTEAQYRLSRLTAAYAQIKSECAAMKNRHQVAKDEEAAKAYAEIIKAMNEQLEVLKAKIKEQTEKPDCKEGVKRLETIPAIGRMTAAVLFQYLTSSAFETSNKFAAFAGLSPQQKESGTSVRGKGKLTKFGNRKLRAVLFMPAMVAYRMRAFPDFIKRLEAKKKPKKVIIAALMRKLAVIAYHVNKKGEDYDPSRYKSA

SEQ ID NO: 402390 - protein, 393 aa, unidentified
MNYNTQNAKIASITEKTLIIGIDVGSETHYARAFSWRNYEYSKKPFAFSNDEAGFSSFKDWMDDIAEKHGMKVVIPGMEPTGHYWLNLGAYLQEQGMKPVHVNPHHVKKSKELDDNNPNKNDRKDPKTIAGLVNEGRFSYPYIPTGIYAEIRNLSNLRIQTQEELTRIKNRIARWFSIYFPEIKDVYKNPDAVSGMMVIKKAPLPCDIKELGVDGVNQVWRDAKLKGAGLKRARTLVSAAEHSIGSTEAPGSARIEIRNLLNDYEVYKNRMDDLMREIEAKLSEIPYIDKLMEINGIGLKTVSCFIAEVGDIRRFDNPKQLQKLAGYAIVADSSGSLGSDPLTIFQSLGCQSAIPVKIMEHNSYDIGDSSNCHHPHNAFHIPVMAHALFIAEI

SEQ ID NO: 402391 - protein, 328 aa, unidentified
MNAGNSVRSCVGIDVSQARLDVHFWPAGVELSLANTSGGVAELVERCRSAAVQLVVLEATGRYERPAAVALMDAGFEVAVVNPRQPRDFAKASGQLAKTDRIDARILARFGAVIGPRASERPTDNQQILDELVGRRRQLVGMLVQERLRLEQAAHRSVWKQIKHSIATLEKHLAAIEREILSLVDRDDDWRARFELLKTVPGIGDATAAVLVAELPELGRLNRGQIAKLVGVAPLNRDSGKYRGERHIFGGRASVRKSLYMATLSARSWNPTIKAFAERLKAQGKPFKVVMTACMRKLLTILNSMLRMNQPWKTPCPESHLEIIPQNT

SEQ ID NO: 402392 - protein, 315 aa, unidentified
MTNRTKSKSIVNVGVDVGKQYLDVCIHEKQTHWQDENSSQGIKRILKRLAHYRVQRLVMEATGRYEFNLAEAAHNKGLPVCIVKPLSVRRYAGAIEQLAKTDKIDAAVIAQFAAVIKPIVTPQKSKNLIAIRNLIARRRQLMGLRTQELNRMTIMGKKIEASCRRVIKALDSEVVRMEKQLASHVKDQAEWTEKKRILESEPGVGNTLIYTLLADLPELGSLNKKQVASLTGVAPINRDSGKLRGKRRIHGGRASVRTVLYMATLCATQHNPVIRAFYNRLVEQGKHKKVAITACMRKFITMLNAMVRDNCEWAY

SEQ ID NO: 402393 - protein, 487 aa, unidentified
MAKPKRSTFERLYSEQMNRQQRRDLARRLAGNDPGLSIVHSNAGGIDVGNESHFVAVPPDRDSNPVQEFGCWTADLKRMAAWLKACRIDTVAMQATGVYSIPLYDVLTAQGIRVVLVNAQHTKNVPGRKSDVQECQWLMKLHTYGLLRDSFRLEEKMEGVRTIWRLRDRHVKDAGRAVQHMQKALTKMNIQLANVISDITGVSGQAIISAILKGERDPWKLADLKHEMVRASRDEMARSLEGNWRADLLFELQQAMDSYHFAHRQMQDCDRKLEGFLASLPTRTLDRPNQAGIPAEGAALEEKKRRKKRKTRRNEPIIDLKAELKRICGVDLTSIDGIDVITAQTILSEVGTDMSGFPTENHFASWLGLTPSKDISGGRVIGTGKRKVQNRVAMAFRMAATTLLNSKTYLGSRYRHLRKQLPSHAAAIKAMARYLAVLVYRLLTRGEAWVDRGAAKYEQRRSEWELASLNSKARAKGFKLVPMTPAG

SEQ ID NO: 402394 - protein, 420 aa, unidentified
MQAFQRRALAQQAVAVVGVDAGKFKHAMVVRVKGQPDSKPIVFPVTRPGFEQAVRSVLDLVDGAGGPILVGIEFAGMYGFTFAHYLRTLDPRFQIVSVLPAHTKRWKEVTHRQPLKTDAKDAVGITDLAAQGHFVSFPFLATGYAELRYLLSARERVSTLRRALITRLHTSLDVVFPEFPSLFSSPVTKTARALLHDFPGPDALLQASKRDVLRVLRRASRNHLSLEAYEQILEVARHSLALPSAQGAMKDEIPLLIDRYALYEAQLTALEEAMARQLDVLGSARALLTIPNVAPVSAAVFLGSIGDPKAYDSSRQVLALAGLTLVERSSGIHLGKQRISKRGRPILRKHAHLFAVRSIQRGGLFRREYEALLARNGGRAMPALTAIARKGLRLFYAVARSEEPWHPALHSGALDGDGAS

SEQ ID NO: 402395 - protein, 333 aa, unidentified
MNYIGLDIHKKNTQACVKNDEGKVLMNVRFPSNSKDMNEFLDKIDPLGAASIVMEATGFCMYIYDIIEARGYDVKVAHPLKVKALTAGRAKTDKNDAEMLAELLRLNAIPESYIPPKELRELRELTRFRHSLVRSSASIKNQVHAILAMRGVKTPPPLRSHFSKKHVKWLRSLEIVQLDDFLDIMALIDTKTAKADEDIERICHDDEDVQRLKTIPGIGDVTATSFVAEIGDIHRFDSPEKLASYAGLTPIVRQSGEKTWAGPISKRGNATLRYLLIEAAYSHVNSSKESKLTRFFERKSQAKGRKKAIVATSRKMLEVVYYMLKRGEAYHAH

SEQ ID NO: 402396 - protein, 391 aa, unidentified
MFLLGIDIAKLNHVASCIDSSTNEVVFSNFKFKNDFKGFSSLLDKIRTFNAENLIIGMESTSHYGENLINFLFKQHFKVALINPLQTSHLRKANIRDAKNDNLDSLNIARALSFAKLNFISKKNIDCFSLKKLTRFRSNLIKQRSKTKIQLTSLLDLLFPELQYLFKSKIHSRAIYSLLKKYPSAEEIAALKDDEISNLLYASSKGHFKKEKSIELKSLAKTSVGIKDTSISLHVVQLIELIELYDKQIKDIVSKISDTVDKMDTKLLSVPGINIIACAIILGETNNFENFSSSKKLLAFAGLDPKIRQSGNFYASSCRMSKKGSPYLRYALVFTAWNIVRHSEKFNRYYCLKRSQGKSHYNALGHVAHKLVRVIFTLIKKDIIYQEENLR

SEQ ID NO: 402397 - protein, 425 aa, unidentified
MRSIALDVHRDFCEIAIKEAGEVRSAGRIKTNREQLELFAHSLGADDRVALEATGPAAAIARILEPHVARVVVANTRRVRAIAEAKVKTDRVDAQTLCELLDAGFLPATWSPDEQTRALRGLLGRRERLVRSRTRAKNAVHAALGRELKGRPPMSDLFGSQGRAWLGQFGLPGHERRIVESCLREIDFLSQEIAALESELARLALDSAAIKRLMTVPGVSLVSAATFVAVVADIRRFPSPKKLVGYVGLDPKVRQSGEQAARHGRISKQGSAPARHMLCEAAWIAVRTPGPLRAFYERLRARRGAQIALVATGRKLCVLFWHLLTREEDYAFGRPSLSRHKLRRLELKAGDPPRRGQRSGSAASKREQRHERELSEQVEQAYRRLVADWEQKPRKSGAGATPGRASSSHLTGQAARQGKAPDPAL

SEQ ID NO: 402398 - protein, 349 aa, unidentified
MHYIGMDSHITTLSFAVVNESGRLVLAQELPTSARGLVEFVRHVPKPRQIYMEEGTLAAWALETCVRCGEKLVITDPKQNRWIGSCRQKGDRIDALKLAQLARGGYVKEIHHPVGQRRRFRELMTAYHDTVRSQTRVKNKIKAKFRQNGIPCTGQTVYSSCHRAEWQARLPQDPALSIILDGLWRELEQLEETEKRLLAATRDEARQYPEIRCFERIPGIGFIHAATISAILETPHRFANKRKVWLYAGLGIAERSSGGKVYSQKLSRDYNRLLKYSVKQAVEAAIRGKDNPFRRKYLEMTLQQGVMAHRAKLTVARSMLAMVCAMWKNGEQYDPERATRVTHKEDVAS

SEQ ID NO: 402399 - protein, 259 aa, unidentified
METTTPTTEVTYVGLDIAKDRLDYTVDGIRCDHVPNTPRGHEKLLGVLAKLRGVRVICEATGGYERAVVAALLLAKHEVCVTNPGRVRAFAHAEGLLAKTDRLDALLLRRFGEKVQPRLHAPMDQAAITLRELLDYRRQVSEQLVAVRNRLELAGPVLRARLDGQVTFLEKELTATDQLIQDHIDHDDTLSRKAARLRELKGAGPVLAATMLAYLPELGEIESPQLSALVGVAPFARDSGRSHQARHVRGGRGLVRRVL

SEQ ID NO: 402400 - protein, 352 aa, unidentified
MRVYIGVDFHARQQTVSYLTTEDGEIHQCKLDHQKDDIAEFYRQFEGEVVVGMEASGYIEWFEEMLLKIGHQVWVGDSAEIRLRARRRQKNDKRDSLLILELMVKGEFPKVHRQTTESRQVLKQLRYRHRLVKIRTIAKNNVQALALSGGLLAKRQYTSKWRQELRRLEREPMLGEQAKQLLKIIEEVTLEIKRVEQWLRKQAEADPRVMLLQTHPGVGLLTSLVLVHTLWPVERFRNGRKVTAYLGMDPVEDSSADRVRIGSISKQGSRLARYLVIEAASTAAKSDKGLKSFYRRLMSRQGKPKAKVAVGRKLLVRCFIMLRDQIDYDEFLRRGVEVRSSRLATGPLCLNP

SEQ ID NO: 402401 - protein, 344 aa, unidentified
MTNIQPKETAQEAKPDLFAGIDVGAEELIMVIRKNGKPFDPQKFANTPADRDRLVKKLVKLPGIIVCLEATGIYHFDLSLALHDAGVLLMVVNPKASHNFAKVLMKNSKTDAVDANTLAEYAARMDFVAWTRPSDETIALRSFARRINTLTGQKAAAKNHLHALTATSETPKAVLKDAKLAITQLEKRIDRLTAEALALIGKHPELERILALLIGIKGIGNTSAIALMGELLLLPPDLSHREWVKFAGLDPRAFDSGKSVHKKTRISKAGNRHIRSALYMPALSAKQHDPHVKAYFQHLVANGKKPLQAVCAIMRKLLHAIHGMLKHNEPFDNTRFYAIPASAE

SEQ ID NO: 402402 - protein, 461 aa, unidentified
MKIRLGVDVACRAAHQVSCADEHGVMLWVGHRFRTDPDELEALWRKLPPDAAEVMVVMEPTRNAWVALAAWFRRHGATVVMIPPEQSADLRAYYAKHAKTDRLDSKTLARLPLLHPEGLHREDTLGPGEMLKRAVKVRSGLVHRRTTSMARLDALLEILGPAWVAAIGSDMSLTALRFLARYGDPRTVKRLGPARLAEFFRRSSRGAWHHERADAVIEAAETTLRLWGADGLDFDALAADIAVEARLALAVSEEIKELDKRIAHAYERVDPDGIVRSAPGVGRIGAPQIAGRLGEATRFANLPAVRSFAGLVPRQDSSGIAARAGGPTKAGDACLREALFIAADHARKIDPTLAARYHRLITEGGKHHNSAVCTVAAVLLTRIAACLRAGRPYQLRDTDGTLITEQRGRQIVTDRYTIPAAVRASRRHLTSTTRTSRRNERAQKGVARRSEAPPVPEPACT

SEQ ID NO: 402403 - protein, 346 aa, unidentified
MSELKEFIIGVDVSKKTLEIAILEKATQKVVGTKSFSNAPKGFSEMILYVASKTKRCISTVVLESTGVYHENFVDYCHEAGWAVSVVLPTKIKNFTKVENIKTKNDKVDAKIIARYGCMFPLKLWSPMTGNYHELRTLSRHILALKKERSRAMTRLSAYKSTKRTPKSIIESEQEHILCLGDMIEHEEAELKKLAYADHDFKRKIQKLATIKGISELVAIQIVCEVNGFEMFANTRQVTSFAGFDVVERQSGDYAGRTHISKKGNRYIRRLLYMPAMTAATHGTGKFVDLYQRIAERNTGTSKLKGLVAVERKLLIIIYTIWKKNENYDPDYVHASAKITSGIAET

SEQ ID NO: 402404 - protein, 397 aa, unidentified
MSMFFVGIDVSKDYSSAQGLDREGKKVFYLEFGMNGEGFSQFLKVLKTHCEDLSGVTVGMESTGCYHINLFAFLCSEGMVCVVINPLLISNFARLSLRKTKTDKKDALTIAQFLLAHRGEFFRVSYSQSRQDLKDLARERESLAVMIAGLKNDVRRLLQMTFPELEHRCKLFTETMLRFLVKFPSARAIRAAKPREISKALIHAEGKRKRVFISAEEIIKLAKASVASESVAKELILSEKIETLLYLEEKKTRITEALVEACRSRRVDELDIITSVDGISAITGSTFLAELGDIEMFKSYKHVIAFAGLDPSIHQSGQYEGISRLSKRGNRHLRRVIFLMTLCAVRSQNIFREYFLKRKGEGLPAKKAILATAHKLLRVLFAMLTSKSYFRKEVVEV

SEQ ID NO: 402405 - protein, 344 aa, unidentified
MEVAIGVDPSKSSLAVAAVDPLGRVLGTGEFSNDPRGHRALQGWVGERGPDRVIGIECSLSYGATLSRVLLRSGEDVREVPTTLTHRQRRRRASQGKSDLVDSVAIARIVASGEVLPSAHRLQVLADLRALVEYRDQLVRARTQVANRTHADLVNVLPGYERQVPNLRAKVHRTTARSLLRGDRSVRGELVRKRLGELSRLEGEIAAMDRRIRATVQKTGTSLTSIPGVGPFIAAKILGEVGDPSRIRSKPAFAVLSGTAPLSASSGQVQRHRLNRGGNRQLNWALHYIALVQCRITPEAQAYMARKREAGKSHKEAMRCLKRQLSNVVYRHLVADARRAELAA

SEQ ID NO: 402406 - protein, 404 aa, unidentified
MGTRNVYEKVAAGGMDVHHKFSQVTMRNEQGKVVRRERLDHPDRKAMRERLSQWPKDVPFVMEASFGWGWVADLMKELGLNPVLSNCLKVEQMRKARGDVKNNKKDADLLSLLPSELTEWWKVWMAPPEVRDMREWMRYRSGLVHISTQTQNRIHAIFHRHGVFHEFSDLFGTKGRAFLTGLCKDGRTADVQLPAGALASLRGEVRLLDHVRKQLAEVAKNLRGQLHSDDLAKRLDGIPGIGLILSHTLIAEIGKIERFVNHRHLASYCLLAPRDNDTGENDPGRPPKGRRIGKCGNRTLKWALLEAAHGAVRSGGKWRKIFDRYTQGGKKDRNRGYIKVARELVKVVDVVWRKGVAYTATPPTRPKASKRSRAKEFFGSTRSGTGQPSPAMTAAQLQGLQVSV

SEQ ID NO: 402407 - protein, 349 aa, unidentified
MTTMADPRASVIGGVDTHLDVHVAAALDGLGAELGVRSFPTTPAGYARLIGWLSSFGEVARVGVEGTGSYGTGLTRHLQAAGIPVVEVDRPNRQNRRRRGKSDPVDAIAAARAALSGDAHGAAKTRNGAVEAIRVLRVARSSARHDRSQALNQLRSLVSTAPDELRQQLRDMTGLQLIATTAALRPGTRTDVLSATKTAMRELGRRAQYLVDQIGRLDAQLAPLVAATAPKMVARYGVGTDTAGALLVAAGDNPGRLLNEAAFAHLCGASPVEASSGKVTRHRLNRGGARQANHALWRIVMTRMVSDPDTRAYVERRTKEGKSKREIIRCLKRYVARELFPLLPHETLS

SEQ ID NO: 402408 - protein, 366 aa, unidentified
MHHSTTLAEVTMTYRSSRPGPGGRRHALRIPRRTLGMDLGDRRSDLCLLDEAGRVMARDRVRTTRRELESALTEVGPCRVIMEVGTHSPWISRLAHELGNEVIVANPRKVQLIAKGTRKNDRKDAMLLARLGRADTELLSPIQHRGEVAQWLLLAVRQRAGLVRGRSALINQVRGLVKSLGERVRGCSPGGFPRRARQDLSADMVAYLQPTLRCIEMLTSTIREFDRSIEDPDGALAPVVQRLRQITGVGPVLALTFVLTIDDPERFKKSRDVGPFLGLVPRQAQSGGVDKELRITKAGNTYLRALLVNAAQHIIHRGPETRLQQFGRRLAERGGRAANMRAIIAVARRLAITMHRIWVTGEDYRP

SEQ ID NO: 402409 - protein, 387 aa, unidentified
MARKRILSTLNTSIAYEAVGLDLAKTDVALAAFDSDHKEPYFIDRIPYDKLYELLANMAPTLVAMEPCSGAHQIAEQIQALGHEVMMISGRHVQAWVKDHCNGQKTDLNDAFAILNLAYDRWLTPIRGKTREECRLLALQASYRQLKGQRTKTMVHVKATLHAWGFPIRTGSFNQKALRELIDANREAFGGEMAETLHLMIDRVRGLDHDIATVLKLLTEATKRDPRASLLRSIPGFGVLTTSRWCAVMGDIARFDSPKQTMAFIGLVPNNRITGHHTETSSGREARGQGRMSKRGDKMLRSLCILGAASLCMLVRKDRLPDCPFVASIKGRLASPRPWFKVLVYVAAKLVRIATALLKYGETFSFEKAGISKAVLKQWELEQAKAA

SEQ ID NO: 402410 - protein, 387 aa, unidentified
MIFIGIDIAKNTHFASAVNSDGEVLVKPFSFENSKKGFDLFISKFNNFDLDNCLVGLESTGHYGDNLICFLFSKGFKIGIINPIQTNSLRSSNIRKTKNDKIDTFLIAKCLQLGNFSLMQEKDVSIIKLRTLCRFRFDIIQSQTRLKTQLTTCLDLLFPELDNFFKGNLHLKTSYALLEKYSSPKEISNARIDTLTKLLTTNSKGHYSYDEAVKLKSIAKNSIGIDNPAISIQVKCLINQLALLKEQINSIDKNIKEIMDNINSNILTIPGISYTLGAIIIGEIGDIHRFSNPTKLLAYAGLDPSVRQSGNFNAKTTRISKRGSKHLRYAIQRASSLIIWNNDVFYEYYTTKRSKGKSHNNAVGHVCNKLVRVIFKLLTENIPFNLS

SEQ ID NO: 402411 - protein, 362 aa, unidentified
MKSTTVAVDLAKSVFQLAVADASWKVVETHRLTRSQFERWFHNRDVSLVVMESCGSAHHWARHLSGLGIEVKLLPAKYVRAYVKRNKTDAADAAALLEALRASDIAPVRIKSVEQQALQGLHRTRSLWMATRTSRLNALRGFCREFGLVIPQGSRTGVEAMARALADPRSAIPELIRGSMKLLIEEIRLLEQRIAQLEQELSAQVKHSPACQELLSVPGIGLLTATAMVAATSGEVGHYRDARHFASWFGLTPKEYSSGSTRRLGRISKRGDRYLRMLLTHGARAVLRSALMARQAGHQVDGLKEWALRVQGRTNHNKAACALANKIARICYAVLKHHEPYGSQTRREENKKTNRTAYAVAG

SEQ ID NO: 402412 - protein, 378 aa, unidentified
MHPDVFAAAALRGNDALHAQVEWVQDRQQTAGLERWARKHLRTTDVVVLEASGNSFEVVGRLAECGILALVLESVQAGKLRDNYCNDDRHSAVKLARVYLSGLAKEVWTPDKKTREHREIFFAHRNAVTDTTRARNRIRSFLNEHCIRLPAKVALTRETTLAMMKAAKKWSVLQQTLLEQCFLQLQQAEQRRKSFEKLMIQELLANPQWAQLWRLMGVRHRVAFALMAMIGDIRRFATAKKLVGYIGLAPGKVQSGNDHNGQKRGIGGFGRRDLRALLLQSAQNALNQKASPLHKWGWRLTIRKHRNLAAAAVARKLTVAIWHLLMGHFSTLAEISEHLHTKLLRLATTLGKETLQTMGFESRDAFVLAHAKIIQLTP

SEQ ID NO: 402413 - protein, 402 aa, unidentified
MNAVGIDVSKGKSMVAIMRPFGEIVSTPFEIKHTTSDIRSLVELINSVEGESRIVMEHTGRYYEVLAHQLSEANLFVSAINPKLIKDFDNDSLRKVKSDKADAVKIARYALDKWQNLKQYNVMDELRNQLKTMNRQFGFYMKHKTAMKNNLIGILDQTYPGVNTYFDSPARSDGSQKWVDFASTYWHVDCVRKMSLNAFIDHYQNWCKRKKYNFSQSKAEEIYGKAKELVPVLPKDSVTKLIIKQAVDQLNSASTTVESLRTLMNETASKLPEYPVVMAMKGVGASLGPQLMAEIGDVSRFTHKSAITAFAGVDPGVNESGSYEQKSVPTSKRGSSDLRKTLFQVMDVLIKTHPQDDPVYQFLDKKRAQGKPYYVYMTAGANKFLRIYYGRVKEYLSSLPES

SEQ ID NO: 402414 - protein, 388 aa, unidentified
MQTVADRPEAPTAIRTDLGAIFVSLELSRSTWLITSLSPGGGEKMSKQVVRGGDVAELLERFARLREKARARTGKVFPFVVIQEAGLDGFWIDRALQNEGIESHVVDPASIATSRRRRRAKTDGIDGEALVRALLAYKRGEPRVCAMVKAPTPEEEDRRRLCRERKVLIGERVQHVNRVKGLLFSQGISGYEPLRRDRRERLATLQTGDGRLLPDHLKAQVCRELERLELLLEQIKAVEAERDVLLAAQQVAAPAPAAMLLDIKGIGPEFAAILWSEGLFRHFDNRRQVASYAGLAPTPWQSGSVDREQGVSKAGNPRLRTTLIQLAWLWLRHQPQSALTLWFEERVRRNGGRLKKTTIVALARKLLVALWKYVTAGVVIEGAVMKRT

SEQ ID NO: 402415 - protein, 339 aa, unidentified
MKSTTIAVDLAKSVFQIAVSQHPGKVSESHRLSRSQFLRFFAQRQPALVVLEACGTAHHWARELGALGHQVRLLPPHEVRSYVHRSKTDRADAAALLEAHRNERIHSVPVKSLSQQALASLHRLRSAWMADRIARLNLVRGLLRELGLTIPVGARHVVVQTLAQLETLPEPLRPALRAACAEIGEFEARIAAVEKQLRALSKHTPVVERLQSIPGVGLLTATALVALVGDIERFPTSRHFASYLGLTPREHSSGLRRRLGAISKAGDAYLRTLLVHGARSALLAARRLEHPDRLRRWALRLHGLRGHNRAAIALANKLARIVWAVWRHDTRFESRPVSA

SEQ ID NO: 402416 - protein, 448 aa, unidentified
MKTSFVLGIDPGKSFFAASLLDSTGEKVWKTRQFDMSREGLESLLSAVPPEGDLTIGVEASGRIDDNLMSSLGQWTSAWREKRSIKLIRINPGQSARFGGPKPRRTQTDGCDSEHVAEFARVYAQRLEAFNYDPKAQSMSRLISERQRLVENLTATKNQIHDQLLVCFPEFTQVFKDPFAKLAQAVLREVPTARCAARRRALSLARVKTGKGPSLGVERAKRLVSLAERSIASAGESHDASALVFLLDQLDLLQKRLASIMQTLTDYVEQAKGIPGEAGVSPEHQIELLDSIPGIGVIAASTLVLATRGIARFYSGKALSAQWASCPERTQTGTSLDKTRLTARGDHKRRAMLYLTTQIACVSDPAFAFHKWRMIQKGLCPQQAVCAVMNRMARLSWALVTNNRTYDVNRMLDQIKIHHANLWKTFVRLHQNEKKLWKKVDPRHIKIA

SEQ ID NO: 402417 - protein, 448 aa, unidentified
MSKSNTKNEQVKRISQLVVINPTAAGIDVSDNEMMVAYPINSEQLEVRVFGCFTRDLYSIVQTLKSNGITTVAMESTGVYWVALFLLLQEYGFEVYLVNAKHVKNVTGRKDDESDAEWIQKLHSCGLLNASFQPDNMTRTLRSMVRHRKNLVQTSSTYLNRMQKALELMNIKLHTVISDIDGKTGVLIIESILTGERNPEVLADLRDKRIKASREEIIKSLEGYYTTEHLFELKQCYQLYCTHREMIDECDKEIEKQLGVQIASRDEGVMPDIPKIKRKASGKNKVSFNLTSYLKLILGVDVTEVVGISELSALTILAEVGKDMSKWKTEHHFTSWLGLTPNTKISGGKVISSKLKKKKHHAGQAFRIAANSLYKSQSPLGDHYRMLKAKVGAPKAVVATARKLAIIFYKMIADQQAFNPKALEDYQQKYKQKKINQLKRKLELLEAA

SEQ ID NO: 402418 - protein, 420 aa, unidentified
MEYAPVRLPDAPPGGVTAGIGWASADHAVCVVGVAGVVMARFAVPHTAPGLAALVRGLARAGVGEPAIERSDGPLVGALLAAGVTVVVITPRQVKNLRSRYGPAGNKDDRFDAFVLAGVLRTGRARLRPLIPDSPATVTLRQACRARQDLVRHRVAAGNQLRARLLAAFPGPVGLFCELHSAISLAFLGRFGGQDRADWLSQKRLAAWLKAAGYSGRTSLAGRYRRLRAAPRGATGEHRAASAQVTRALAAVLATLNTQIKHLEAQIAAQLASHADGHIFTSLPRSGTIRAARLLTEIGDCRAKFPGPQALICLAGAAPSTRQSGKHKAVTFRWAVRNQLRDAVCDFADGSRHASPWAAHLYNDAIARGKDHPLAVRILARAWLYVIWECWHNGTACNPARHRALQRLLAAQDAAAQPAA

SEQ ID NO: 402419 - protein, 352 aa, unidentified
MTADPDPDGEVIVGIDTHAEVHVAAAIDGLGRMLGTLSIDTTARGYRELVRWARRHGRFARAGVEGCGAYGAGLVRHLAAEGVEVIEVDRPNRQRRRRRGKSDPVDAEAAARAVLSGEATTSPKDSSGVVEAIRILHLTRRSAVKAKTQAGNQMKDVILTAPEDLRTELRGLTTRQRVKRCATWRPGPVTDPRSAAGRSLFDLACRWLTLDAEIKGLDANLRRLLEPLVPSLLAEHGVGTEVAAKLVLAYGEHPKRVATEASFAALCGTSPVEASSGKHQRHRLNRGGNRHANNALHTVVLHRSRRCPETRAYIERRRAEGKTDREIWRCLKRALARRFHHHLVHDLSHSLT

SEQ ID NO: 402420 - protein, 307 aa, unidentified
MYPFYLGIDLHLKRTYLVLMNHEGEVIDKRRLKNTEIETYISRNVPKETYAVMEATRNWPFFYDLLEKHVDRVELAHAKGVRMIAAAAVKTDQIDASVLAHLARLNFLPIAYAAPQEIRDLRQHLRYREWLIDERRRAKNRIHAVLAGYNLASPVTDLFGRAGREWLQEVAEKKLRPTSRKVVLETLTMIDQLDTQIKELAKDIPLPEDLKPKAEILMSMPGIGKLLSAVILAEIGDISQFNSPKALCNWAGLTPRVHKSDEVVRHGRISKQGSRYLRTAMVCAAMTACRISPRWYRVYENLARRIG

SEQ ID NO: 402421 - protein, 401 aa, unidentified
MVDPMIRVGVDVGCKTHQVGIAGPDGTVLEKFSIPHTQDGFREFFERIEHHRQKLGLPVAVAMEGYNGHARPLDKMIMEKGYKLYNVNNLKLARFREIFPGPAKTDSLDVRKILELFHLKGHLPVAKDVLQEVPGVPKENEKLKRLTRRRKQLVHEKVRVMKRMQADLQAVCPELLGLSRRVDNLWFLRFLSSRDDLEELARLTPEEVRKIPGIGVKYAELVRKWQRGAKFSPEVEYVGPMIVADAQRILGLLSEIAGLEEAIEELCEESELARRLRSIPGFGVISAAELAGEIGTLERFGSEASLALYLGMCPLDKQSGQTHGTRSPRQVNRRAKAAMMVAVAHHIWEVPESRAYYEKKRAEGKRHNQAVRSMARHLVRVMWSMIKHGRDYEVREASCLC

SEQ ID NO: 402422 - protein, 342 aa, unidentified
MNYYAGIDVSLEWSSVCVVDGAGKIVGEAKVASEPEALIDWFGKLGLSLTRIGLEAGPLSQWLYAAMRRAGLAVELLETRHVRTALKTMPVKTDRNDARGIAQLMRLGWFRPVHCKSMEAQETRALLTARKLVQAKLHDINMSLRGILRGFGLKVGPTTPAGFEARIRELVHGHPSLQTIAQALLTVRTALRRELDGFERQLHAAARNDVRARLLMSVPGVGIVVSLTYSSAIDDAGRFQSSKNVGAYFGITPTRYQSGETDVSGHISRIGDAGVRAALYEAAHVILTKPVKGCTALKSWAMRIAARGGMKKAKVALARKLAVIMHRMLVDGTFFIDAAKAA

SEQ ID NO: 402423 - protein, 435 aa, unidentified
MKPLPVLDPRAAGIDVGSEKLHVSIAGDTPKVYGTMTGELHALCDWLKCEGVRSVALEATGVYWLCVYEVLQAAGIKVLVVNGKHVKSLPGRKTDMSDCQWIATLHAHGLLRSGFVPPAEIRRLQDYLRLRQDHITMAASHVQHMQKALERMNVKLHDVISSVTGVSGLAVVRAMLAGERNPEALLALCDVQIQKKKADRMREALRGNWREEHLFALAQALRGWEFYQELIAQCDQAIAGVLRELAGPEDIPPSPSRAKPGGQNSPQIENLHQMLLRLCGGKNVTELPAMTDYMLLQALGEVGTDLTQWATDKHFTAWMGLAPGSHQSGKRRGHQSRQRNRAGRLFCLMARSLGRTVDNAFGGFYRRLRARRGGLLANQALARKLAALFWRVMVHGIEYVEKGLKNYHAQVALTEQRLLRKLARKHNLNLVPSTA

SEQ ID NO: 402424 - protein, 391 aa, unidentified
MGEDNRVVIGMDPHKRSVTIEVMISDERVVGGRRFGTDVEGFAAMLAYVAAWPDRVWAVEGCEGIGRHVAQRLIAKGEPVVDVPAKLSARVRVFATGQGRKTDDTDAHSIALVGVRMSGLRAVVDDEQLELLRLLVDRRRRIGEEHTRMVCQLHQLLLELMPGGAKRDLSAAQARKLLAGVRPRDLVGKTRKRHAMELVVDLERVYQRKKAANKELVELIKTTGTGLIDLHGIGPSGAARMLVEVGDITRFPDRGHFASWTGTAPIDASSGDRVRHRLSRGGNRQINMVLHIMATVQLRNPTAGRAYYDRKVAAGKSSNEAMRCLKRRLSDIVYRTMLNDLVADKATGPGGHRGASLQSSAAGSHPHADSSDKPLPGPAKTKPKTPLRRAS

SEQ ID NO: 402425 - protein, 345 aa, unidentified
MNKQVCAPQATVFCGIDVSAASLAVALIAADGSLARREFSNNASGHGALLVWLKKRNSPVRVSLEATGIYSLDLALALDAEACIELMVLNPKLVNRFQQTVCRSKTDAADAMVLAEYSQRMPFCRWQRPAASHLALRTLSRYIGSLVVEQAGLKNRLRSAESTTTTPRAVRVDLKRSLAAIERRVERLRAEALKLVESEVELRERYQLLTTVPGIGAVSALTMLSELILLAPAMTVRQWVASSGLDPVHRQSGTSLNKPSRISRAGNRRLRAALYMSALSASRYDRHLAAFYQALRARHKTGLQALMAVARKMLHAIYGIFKSGAPYDGRRLFPNIQTEVESIAG

SEQ ID NO: 402426 - protein, 346 aa, unidentified
MKQITTIGLDLAKQVFQVHAAAADGSPIFNRKLRRAEVLRFFEKTPACLVGLEACGGAHYWAREITALGHDVRLIPPVYVKPFVKRGKTDAADAEAISEAVTRKTMRFVPVKSADQQAAAIVLKTRALLVNQRTQVINALRGHLSEFGIIADAGTTKVAGLISIVRDETDLRLPKAARLALMEVVSQIEALKAQIEKLEKVIVATVKRDDDARRLVTIPGVGAITAASVRALVPDPGGFKSGRHFAAWLGLTPKPHSSGGKERLGRISKMGNPALRSLLVVGATAVLRHARGNPNASKWLTALLARRPYRIVAVALANKTARIIWALLVKGGRYQENGARNQMATA

SEQ ID NO: 402427 - protein, 429 aa, unidentified
MNSTRNKKIEQVKETTMIVGIDIGSEKHYFRAFNWRGIELTRKPVAFSNSMEGFNSFYNTIVELIQKSELEEALVGIEPTGHYWFDLGQFMGEKNIKFVMVNPHHVHKSKELDDNSPSKNDRKDPRVIAGLVRDGRYFYSYMPTGVYAELRNASNRRFVLVEEQTRAKNRLQKWIAVYFPEYKGIYTRIDAKGGLLVLKQAPTPEEIVRLGVEGIIKIWKDAKLRGNGHKKAMLILNAAMKSIGLKAGLTEARMEIQDLIEDYELQTKRLERVNDLIKELCRKIRYADKLLEIKGIGITTIAGFIAEVGDITRFDSAKELQKLAGLELVADSSGKHNGKTKISKRGRKRLRYLLFEAAISVVGKNEEFKEIHRYYTTREKNPLKKMQSLIAVACKLIRVFHVILTKGISYDASKMLKDIQHPGEPLKAA

SEQ ID NO: 402428 - protein, 415 aa, unidentified
MNNTISDIDTDLTAVSEVEGNAVQAEAQPAQNESDETYAQAVQEKLALARSRANCRYIGIDLHSNNIWLSVIVNEQRPSGPVGKVIFSRSIGTQRVDGTLPEDLIKPVIERFCKDQPHIACVEATYNWYWLADLFERNGWNLVLADPSTVSEAKTKAADDRKDAEYLADRLRYNALRYAVIMPKQLREIRDLVRTRGTAVEQRAREKIIVINKLTNLIGRKITGKELRELIKEHAEFGTEAPMLLNWGLTEEVRTILDYHLTMATNIDQGIQKLEEHINAVGRNLRYTRELQKMPGCGPVISSILASEIGSIRRFATAANFVSYCRLASTSKLSNGKSKGLGNAKNGNAYLSWAFTELATLMVRYSEAAKRHFEKLMRKYGQLRVKAIRVLAAKLARSVYQCLSKNEPFDVLRCF

SEQ ID NO: 402429 - protein, 407 aa, unidentified
MEVVYRCCCGIDVHKKVIVACLVNGGKQELREFGTTTSEIKTLANWLTESGCEMIAMESTGVFWKPLYNLFELMDLDAMIVNAAHMKALPGRKTDVKDAEWIADLLRHGLLKASYIPNREQRELREITRYRKSLTEERCREVNRLQKILEGANIKLDSVVKDITGKSARKLLQRIIDDDIPDSDEVSKLVHGRMRPKLEQIVASIEGITTPLQRKLLAQIIDHIDDLNRRIGELDKLVQEYMAEYEAAIEAIDEIPGIARRSAEVILAEIGLDMGRFPSAAHLCSWAGVCPGNYQSAGRRKHGKTTKGNKALKTILTQCAKSAKTVKSSYFFAQYQRISARRGKNRATLAVAHSMLIAIYHILKNKTAFHDLGSDYYDSFNRDRKINSYLKRLKALGWEPDAIPSSA

SEQ ID NO: 402430 - protein, 412 aa, unidentified
MLKIIYPICCGIDVHKRFLVACIATTNNQGVTTYKSSRFSTYTNDLRRISAWLTSNSCTQVCMESTGKYWIPVYNILEPTCKITLAHPKYVKAIRGKKTDKKDAKWIADLFKHDLVAGSFMPSLLIRQLRDLMRYRFKLTNFKSSEKNRIQNCLTVSNIQLANVVSDTFGKSSMNIIDYLLENPDDKDFDFIPLLHGSMMHKADNIRLALDGIITPEQRQKMNIILKHYDELEKCKSNLESLILSLAEPFAKELSLVLTVPGIKNLFSAIGIISEIGVDMSVFPTAKHLCSWAGVTPQNDESAGKKHSVRISRAGVYIKPLLVQCANAVVKSDKHPEIKGRYLSIKKRRGHKRAIIAVARMLLTAIYHILKNGEPYNPVLYKRVEVMPRTRRITVEQAVILAQRHGYSVITV

SEQ ID NO: 402431 - protein, 312 aa, unidentified
MEQQFVGIDVSKAWLDTEAIPQSQSMRYGNDAAGIVALVEAMQAATPALIVVEATGGYETAVASALSAAGLPVVVVNPKQVRDFAKAMGILAKNDRIDARVLALFGQRIRPQLRPLPGAEQRELAELLDRRSQLVLMRAQERARLATALPVAKASLVEHIHWLDERLRQLDIELTARLRTSAAWKVKVDLLKGVPGIGKVTIFTLLARLPELGQLNRGTIAALAGVAPFDDDSGKRRGQRFIRGGRAEVRNVLYMATLSASQHNAVIKAFFARLTAAGKPFKVAITACMRKLLTILNAMLKNNESWHCPVTT

SEQ ID NO: 402432 - protein, 342 aa, unidentified
MGEVSIIGVDLAKNVFQLHGAASDGSVVFRKKLSRPQFARFMADHPACEVAMEACPSAHYWARELTGHGHRVRLVAPHYVKPFLKRQKNDAADAEAIAEAATRPTMRFVEPKTEEQQARAVAFRAREQIVKQRTEAINALRAYLYEFGHVAPEGIGYLPKLAQVVADLGSDLPDLARDICRMAVEQVELLTARLAAVTAKIAAASRAAAMPKQLQTMPGIGPIGALAIETFAPPMNQFGRGRDFAAWLGLVPRQHSSGGKQRLGKTSKMGQRDIRRLLVTGAMSVIRWALRRGAPHNPWLERLLERKPPMVAAFALANKMARGIWAMLTRGEDYRDPVTASA

SEQ ID NO: 402433 - protein, 320 aa, unidentified
MNSEQFIGIDVSKSHLDVAVYPSGEQHRWDNDDSGIEELIKFVKSVPAALIVLESTGGYESLAASMLSASALPVVVVNPRQVRSFARATGKLAKTDQIDAHSIAHFASAVRPEQRQLKDKHIQLLAALNTRRRQIISMLVAEKNRLHTAPKANQKNIGQHIKWLEKNLDQIDKDTQKQIRNSPIWRENDDILRSYKGIGPISSTILLSDLPELGKLDGKKIAALAGLAPFNCDSGQYRGRRRIWGGRSHVRKTLYMATISAKRFNPQIKAFYDRLTDAGKPHKVAMTACMRKMLITLNAMLKNKTYWSQKYKTLDLQHGC

SEQ ID NO: 402434 - protein, 355 aa, unidentified
MNDAKYIGMDVHQATISVAVRDSRGNLVMEAILETKAETILQFIRGLRGSLYVAFEEGTWAAWLHDLLQPHVARVLASDPRKNALLKAGNKSDRIDARKLSELLYLNKLSPVYHGEQGIRTLKELARSYITITRDLTRVMSRLKAIYRGWGIPCAGQQVYAPRYRAEWLAKISEVGVRRRAELYYQQFDALAALRQGARRELLAEARKHPAMRLLRQIPAIGPIRAALLIALIQTPNRFRTKRQLWAYCGLALRTYTSGEYRFVGGQLKRSKKVLAVRGLNINHNHDLKNIFKGAATWAAATSGPFQNFYKACLARGMKPSMALLTLARKIAAITLLVWKKGARFDAEHLKQQAA

SEQ ID NO: 402435 - protein, 318 aa, unidentified
MKSEIVHIGVDVSKEKLDVYNPITGEVSELPNDAAGFREVRAMARRGKAVVCCEPTGGCELDMVLFLQRFGVPVAYCDGYRVRHYALSTGEFSKNDRVDARMIARFADCTPVRTLAKKDLAHLELRRRWKLYQTLVDIHVVLAQKASSEQVAEMRSMLRAESAKMERKAAKALRSCVELAKGDERMSYLLGRFVEIDGVAEKTAIAVIVGVPEIGSIGDAALSKLVGLVPMDNQSGANAHAKKIRGGRKDVRRALYLATLPAVQHNHILAAYYKEVKKRIPSKRAAKWAFVPVMRKLIHLMNRLARDPEFRLQKKQSA

SEQ ID NO: 402436 - protein, 433 aa, unidentified
MESRPEPKSKPEPESSSIVAWIGLDWADQEHHVCVQAVGSTQVEHQVVAQRPEALQDWVRQLRARFAQGRIAIALEQSRGALIYALMSYDFLLLYPVPGKTLADYRKAFFGSGAKGDPSDAELVLELLRCHRERLRVWAPDDVPTRHLGLLNEQRRKLVDDRTALTNRLGSLLKESFPQALDWAGELGRPAACEFLAKWPSLAAVQQARPATLRHFYRRHFRPKPEELERRLAEIGQAQALTSDPAVLESHALIVPLLAAQLQALLSSLGLVEAAIAKSFSQHPDYALWEILPGAGDALAPRLLVAFGSDRKRYQNAGELQMFSGIAPVTVSSGKSRWVHWRWACPKFLRQTFHEFAAQSIPRSIWARAYYCQQLARGKHHHAAVRALAFKWIRILYRCWQNHTPYNEQQYLQALARRGSPLLAYFQTPEVTA

SEQ ID NO: 402437 - protein, 394 aa, unidentified
MIYAGVDIAKTDHVIGAVDERGAEMCRPMPFKNTEAGLERAVAWLEGLAGSPSDVVVGMEATGHYWMACYSFLVARGYSVAVINPMQVKAVRKLKKLDKVKNDRIDAWLIAETLRIGQYDETRLATDEVASLRSLSRYLQSLRGMAAELKTQCVCLMDAHFPEYAGIFSDMFGAGSRAVLSKSPLPFELARRRADSLARDIAEASRRGGKSAGYAARIKAAAGSSIGVRLGQEAASFQVKSLIRQIEFADSECAKVEARVRALLDEVEPLVLTIPGVSYATGAQIVSEIGDVSRFRNAPALVSYAGLNSSVSQSGQFDSGGGPITKHGSPYLRRALWLAANRARQYDPGLRAFYDKKRAEGKPHRVAVTAVARKLCHIVFAVMRDQVPYDPGRE

SEQ ID NO: 402438 - protein, 339 aa, unidentified
MGLYTAFDLHSNNAYLGIIDETGKRIFKKKLPNEMEMIKATLLVFKDDIEGIVVESTYNWYWLVDMLMEEGYQVHLANPAKIQQYSGLKYSDDKHDAFWLADMLRLKILPEGYIYPKESRPIRDLLRKRSHLVKLRTSLIISLQNIITRNIGSNLKANDIKALTTDRVQPLLEYNDDLALAGKVSKNAIDALTQQIKAIEKNIEGRIHLTSPYDHLLTIPGVGAIIGATIMLETGPISRFPKVGNYVSYCRKVATGRFSNNKRKGSGNRKNGNHYLACVYSEASDYAKRYDEAARKFFNRKLRSTNAPIAHNALANKLARAAYYIMRDGVDFMSEKAFA

SEQ ID NO: 402439 - protein, 343 aa, unidentified
MKNTIVHHEGAAPLEVAVNKIKLSGSVIKIGLDVHARLYVAVAQYDQLLPKPARRLAPWEFVPWVRQLLRAGHVVYVVYEACGFGFNLYRELKALGVHCYVIAPRQLDEQSTGVKTDPRDAATLCQRLSRYVEGNTRELAVIRVPTEAEEQARHVSRQREQLVRHRQKLEAQGRSLLISHSLPAPAYWWKNQTWTRLSKLLPEWICLRLEVHRPALLTLEQQISALSAELEGAAPAGVPAGVGKLTTVVMTREICSWERFTNRRAISSYTGLCPGEHTSGSKRVPGSVTKHGNPRLRAALVECACPESFRGSSPTIRRSRKGWPFCPKEREPPERNAKKRSSP

SEQ ID NO: 402440 - protein, 349 aa, unidentified
MVVLGADLHKRTHTVVAVDEHGRRLAERTVTATRERHLELRRWAAQWPERRWALEDGRHLSRRLEADLLRAGEHVVRVPPKLMAGTRRSAREPGKSDPIDALSVARAALREPDLPTATLDGVEREVRLLVDRREDLVGERTREVQRLRWFLVELEVPEPAPAALDRVVVQTRLAAELASRPELVARLAREILARVVELSHTIRRFEREIEARIRPLAPHLLALVGCGPLTAAKLVGETASVSRFRSKEAFARHNGTAPVPVWSGNTVRHRLSRGGNRQLNVAIHRIAITQVRLGGLAKGYVDHRRAAGDTKTEALRALRRRLSDEVFRRLRLDEEAHVKVAATLTTAAA

SEQ ID NO: 402441 - protein, 321 aa, unidentified
MAMSVTPFEAGVDTAKDELVIQSAPDTKPFAIPNNPKAIRAWLKTLPSGSALAIEATSTYHMEMAEQAHAAGFTVYVVDGLRLSKYRESIALRAKTDAHDAALLARYLSKERSSLKAWTPPPAGHRKIQVLLRRRAKLVEIRGMLRMSWSGDKLFASELKRMEKAIKKAEMSLEKGLREVIKEAGLQDQLSRVQQLPGVGFLTAVGLVMSFMRGDFANSDAFVAYLGMDVTVAQSGKWSGKGRLSKRGDAEVRRLLYNASMSGSRTKTWKQFYAHHLGRGMKTTQAFVILARRLARLAFGLMRHQADWKPEVYTGGAKPVS

SEQ ID NO: 402442 - protein, 343 aa, unidentified
MTVITGVDPHKATHTAVAVSDGEEELDRKKVRANGAQVDQLVSWAQPFETRTWAIESADGLGYLLAQQLVAAGETVLDVPATLASRARLLSSGRSNKNDPNDALSVAVAALRFRGLRRVQAVGQPEVLRLLAKRNTDIGNHRTRLVCRMHALLSELAAGGIAKEINASDVDRFLEALAPTNPVEQLRYDLVLELLDDIRRLDDQLKASHKRIRHAVKASGTSLVELFGVGPIIAAMLIGYTGDVRRFRNRDHYAAYNGTAPVEFSSGGRVVHRLSERGNRKLNHAIHMAAICQLRQPHSEGRAYFERRVADGKTNKEAIRSLKRHISNAVYSSLVTDARRAVG

SEQ ID NO: 402443 - protein, 353 aa, unidentified
MKQYIGCDAHARYSVFVRVDETGRIGPPVRVEHGGRDLRDYLKGLEKETPVAVEASGGWYWFMDELEAAGLDARLVNPLEAKRRIRGPKKTDKLDARGLAILLRNGTLPEVWVPPAELRDLRGLMRGRLAMRSHTTVLKNRIHAALKRYGTLEGEAVRDLFTNKQRVKLAIAIGRLPEETRGMTRHEWELVDEVERHIGEIEARIRACIGCIGWVRLLKSLPGVGEILGATIHLEIGDVSRFPTAAHLASYAGLVPTVHASGGKSYSGPTSKQANHYLRWAFVEAADAILMHRRRFEGHHALKLYDRVKAGKCHGKAAVAVARHLAESSWWILRKREKYRQPHAAVESSSQNG

SEQ ID NO: 402444 - protein, 398 aa, unidentified
MKPVIGIDVAKGKSVVQCFLKRNRPVGRAETILHTPKGFERLRILLADLEQQAGVKPKIILEPTGHYHRVLVQYLQREAFEVILVNPLQAQRARRTGLRKVKTDESDAWHLGDLYYQEEDWLAHPIQKQAFTDLQFLTRQHEFVTSLYVQARLNMRALIDQVIPGYEQVFTDMFSKTSLNLLEACLSPEGIQEQRDNWYEAIKEATQASRSDAWMNKKVELMRTVCQMNPVTTIGFGLRQSLLAMLKVLRELQEQLVQFERVIYEVSQTIPQVQLLESIPGVGTKLATAIVAEIGDASQFNHPKQVVAMAGLDPSVFSSGKFTASENKITKRGSKRLRRAAYLAVICGLRKGLNPRLRGYYDKKKSEGKPHKVAVIACANKVLHHVYAMLKKGQPFAS

SEQ ID NO: 402445 - protein, 349 aa, unidentified
MISIGMDVHVRNSYLHAVDQDGTTHWRGRCANRLGDLAEVLAQFEGESVQVSLESTTNSRAIHRLLHRVAEACGVDLSAQVLDARKLRIIAESVTKNDRFDAAVLADLTRVDLRLPSCYLPDDEEFALREHLRARHDLITMRTRIKNRVHAVLHRRGILTPSKMALFSRCGQAFLSALDLDDAGREIVDRYLATIAQLDAAITESSKSLRVLMCRPRWCKPAALLMTMPGIGLITALTILAELGDLNRFRNRSAVANYAGLVPVLRSSNNTHHSGHITKRGSKHLRGVLVEAAWIATPRVYRYQAMFERIASRRGRKIAIVAMARRMLEDAWTMLKKDDAFRMTPSVAG

SEQ ID NO: 402446 - protein, 327 aa, unidentified
MVEYILGIDVSKDTLDVVLRDQDRSQHQVFSNNAVGYARLTRWLIAHKAGAVHACLEATGQYGDGVAEYLYHAGHAVSVVNPLRIKRYGESKLHRNKTDKADAALIAEFCAKETPPLWKPLPDSLKQLRQMVRRLDDLQCAYQQERNRLTSGVTNTWVVADLQAHLQELRQRIQAMKTAIQQFIAADPELKHQAYLLDTIPGIGELTAARLLAEIGEITSFEDAPQLAAYAGLNPKGARSGSSVRKKTRISKEGRAFIRYILYMPAIVARKHNPIIRDFCSRLAQRNLPEMAIVAAAMRKLLHLAYGVLKNDTPYNPNILKEKVFSP

SEQ ID NO: 402447 - protein, 270 aa, unidentified
MNRDETWTRSVYLCFDTHRETIHGTAIDKNGEVMRSENFRNTKEALHEFMKEFPTWNTVIAIEACNFWRGCYKILKEMGYTIKLANPVTCHKIAHEKKTDKVDSKILADLELKNYEINSYLELYRTIQKEEQTIKNKIDKIAKAKEETALLETIPGIGYFGAALIYAEIGDVHRFPTVKHLHAYAGVAPGIYQSGTKTRMPSRKSVNYWLKWIVIQCRLTLKNTKASKLRSYYFKVKNKKGWKTARKATARRLLTVIWYVLHNKNPYRES

SEQ ID NO: 402448 - protein, 449 aa, unidentified
MNQHQLDQKRSWITGKFIVGIDPAKDKHQAAIIDSNGSAVGKSFSFNHNAWGFHEQLWFKLKRYLGPEFMHPDQLIFAVEAAIDFWQPLVDYLHRQGYSVVIVSPLTTKNSRALPGHDFTKTDPKDARLVAESAFRGHYHHYVDHPDQIKAMKTLSLTYNKLRKDLSRNQQRLRSIVNRVFPEFLSIVPLDTDTAHFLLSNYLHPHDFLNLDVSGTVVSMLKVSNQQHGMETLSDLQQAAPTSIGVPRDTLEIISDRLTVNSWLTLITMLKQQLKIISGQLIELAKQTPWFDSLVSIKGISDVSASLFIAEVKDLNIYRHYKQIQKLAGLNLRLNDSGKTRGRYKINKIGNRRLRWIIYLMTRETVKYIPEVRIKYLKRQIKRYNYTKNLIACSSQLLQLIMALIKDNRLYEYCPENQSLVWELEYHYDKIKKDRNRKKKPPIAVPMIV

SEQ ID NO: 402449 - protein, 412 aa, unidentified
MQTLIERGCGLDVHQATVVACLLMVRKDGRIQKQIRTFGTTTRELVGLREWLLSEGCTHVAMESTGVYWKPIYTILEGALEIVVANAQHIKKVPGRKTDVKDAEWIADLLCHGLLRSSFVPPKPIRELRDLMRYRRKLVESQAAERNRLLKVLETANIKLANVATDVFGMSGRLMLRALIAGKATPQEMAELAKGLLRKKIPELELALEGKLEEHHRFLIELQLQRLEAAEKDLAALEQRIRQKLEPYAAQLALLDEIPGVDWTLAAVIIAELGVDMSVFGSVSQLASWAGVCPGNNESAGKRKSSRIPSGNVYLKRGLVEAANAAARAKGTYLRDKFFRLKARRGYKRAVVAIAHKILVSIYHMLSQQVSYNDLGDLYLDKLNQNHLTRNLVHRLERLGYAVTLTLQQKAA

SEQ ID NO: 402450 - protein, 346 aa, unidentified
MKYIGLDVHSSHINCAVIDEQGNLIHHDCFNTSLENLINLSENLKHPLSLVYEEGELADWLFQGLRSSFEEIVVADPIENRMIYGGDQKSDPIDPLKLATLLRGGFINPVHHTWDHHRSQFKQLVFAYHDMAKQVTRTKNKIKAYFRKQGMIIKTDSVYHPDKRALFINESRHPEIIEKYYQFLDLFQNEKNRFERTLKKEARRYPIIGRFLKIPGAGIVTTTTFFTIVDDPHRFDHKQQLWSYAHLGKSVHQSGNYEVTRRQRKGNRLLKYVIKIAAGDAVRQKTNEFTKAYIHMVNIQHKEPKLAYRIIARKLLTIMWTIWKNNQSYKPREKDTLNKDMAYDLS

SEQ ID NO: 402451 - protein, 355 aa, unidentified
MIVIGVDPHKQTHTAAAVNATLGELRGERTVKARGQGHEQLLAWARSLGRERLWALEDCRHVSVSLERFLLASGERVVRVPPKLMAGARRQGRERGKSDAIDALAVARAALREPELPVGRLAGPEREIRLLTDHRDDLVQERTRIPQRLRWHLHELYPELELPAGCLERRIWLERIGRRLARAPQTRQVVIARELVGRCRELTRRAEELHGEIAALVRTQAPALLELPGCGVLTAAKLLGETAGAARFADDAKLAMHAGAAPLPASSGARQRHRLNRSGNRQLNCALHRMAITQGRWHPPAKEYLARKEREGHSRKEALRCLKRHLACVVYRTLRAAEEEKMTSTNRPALVPALT

SEQ ID NO: 402452 - protein, 371 aa, unidentified
MHKSSTTLYIGLDVHKESIAVAYAADERDAEVISLGTIGTRQCDIDKLLRQLTSKSPHLAFAYEAGPCGYALYRYLTKKGLTCWVVAPSLIPKKAGDRVKTDRRDAIALARLMRSGDLTPVYVPEVQDEAIRDLTRAREDAIHDLKAAKYRLKAFLLRQDIRYEGKANWGPAHLRWLAEVVCPTPAQQIVFQEYVRAVSEHHDRLQRLDTELKDQAQAWRLYPVVEAIQALRGVQFTVAVTTLAELGDLTRFDNPRQLMSYLGLTPSEYSSGAQRRQGGITKAGNTHARRALIEGAWSYRYGAKVSRHLQLRLEKLPKPIQDTAWKAQVRLCKRYRQLTAKGKHPNQVVVAIAREMAAFLWAIARQVPLAA

SEQ ID NO: 402453 - protein, 275 aa, unidentified
MTNETREPVYVGIDVSKDSLEVALADKAASVRFVNDEQGVKALLEHLAGHNVAVVLLEATGGLEKRCAHALYLAGMTVVVANPRQAHEFAKSMGYLAKTDGIDARILSHFARTLHGSERFDKLLFKMATPQQEQLQALVTRRSQLVQMRVAESNRLNLAHALSAKSIQAVIKLLDKQIKTLDEDIGNRLKQHFAQKLKLLEGFKGIGEGTKAVLMAALPELGRLNRREISKLVGVAPLNHDSGKMRGKRSVWGGRADVRSALYMAALSEIGRAHV

SEQ ID NO: 402454 - protein, 392 aa, unidentified
MIYAGVDIAKMDHVIGAVDETGAEVARPMAFKNTEAGFERCIAWLESVAESEDDVFVGMEATGHYWMACFAYLVAVGYRVCVVNPMQVHAMRRLKGLCGVKNDRIDSALIAETLRQGDYDQTRLATDEVQALKRLTRYHQGLKQELATVKTQAICVLDAYFPEYAGLFSDMFGTASLKVLAECPTPSEASRKRTSSIARLLSEGSHGRLGAERAAEIKSAAKSSVGIRLGEDAASFQIKTMVTQVEFLNRTIAKVEREVASLLEKVEPNITTVPGISTTTGAQIVAEIGDVKRFKGAASIVKYAGLNSGVDESGMFSAEGVPITKHGSPYLRRSLWLAANRARQYDPRLKAFYDKKRREGKPHRVAVTAVARKLCHVVYAVMRDGEPYDPSK

SEQ ID NO: 402455 - protein, 366 aa, unidentified
MKKDSIRIKKRKGDWEGKKLTIGMDLGDRTSRYCVLGEGGEVLLEASVATTQKGLSEAFGVLPPCRMAIETGQHSPWVSRHLSGLGHEVIVAHAQSVRLIGESTRKDDRLDAKTLARLARIDPALLSPVRHRSAEAQAHLTRIRARAVLVGARTALVNAIRGLTKAYGERLRKCHPEQIRKELAAELSSELRTALEPLFQEVQSLTERIQHYDHEIEKIAKQHYPEVAQLQQVNGVGTLIALTYVLTVDDPHRFGRSRDLGCYIGLRPGRRNSGNSQPQLHISKQGNRYLRTMMVQGAHYILGPFGKDSDLRRWGLKLAQRGGRNAKKRAVVAVARKLAVLLHKLWVSGEVYEPLRTHRDEKRAAA

SEQ ID NO: 402456 - protein, 402 aa, unidentified
MFSAGDQITELPKPDNMKGMSKREDRQKKEAPPFERIQIESAPKIKDRRPIKGAIKKEEPMNYLGVDCHKRKSFLTAMDSGGAVMGRWSIRNDGKELDRIFDKLGNNFKAVLEASSTWPVMYDLLDERVNEVILAHPLKVKAIAEAKIKNDKIDSEVLAHLLRADLIPEAYAPSKETRYKKCYLRYRSSLVQMQTMVKNRVHAVLMRNHVSIEEQDAISDLFGTKGREYLAGVQLGGSDNEMLMGYLDLLDFLANKIKLADKRIKEIIKEDELIRLLLTMPGIGPVFAPLIRYEVDRIDRFRNCGKFLCYCALVPGLFSSADISRTTGIIKQGNKYLKWAFLEAVTPATRTSVPLRAFYGRIYNKHGHHAARVATARKLAKIAYHILKDRKPFKEELIKEQN

SEQ ID NO: 402457 - protein, 359 aa, unidentified
MSVRRILAKTIDTDLEYEAIGIDLAKNCVSAALLTTDGEVVCIDRLDYSELEKSAQALSPTTFAMEPCTEMNYLVQKLEAWGHRCLVIGGKNVQNYVENHYSGQKTDLNDAQALAFLAQDTQLRTIKAKDIEQQKYASLTTLREQYIKQYRQTIVSLKGICQAWGLNISKGISGKAQLKDLIENHVDMVTHAQTTQKVLNKITKTLEVLAKNDKVCQLIQTIPGLGTICSCRLRATIGDIKRFKNPKDFPAYYGLVPRSIATGHNEKKGKITHRGDRTMRSLMVQGAGCVIRLATCGKLKSKQLTKWILKKQKEKMPWGKLVCAVAAKLLRIVRAILISSKPYNPKIAGVAKCSLSKGS

SEQ ID NO: 402458 - protein, 420 aa, unidentified
MSFKIFRKNCCGLDVHKTWIYACIGITDTNGRTDYKQTRFSSFSKGLKELSDWLAKYHCTEVCMESTGKYWIPVFNVLEKAYVSVILSHPKYTKPQKGNKTDRKDAKWICDLFMCDMVKPSFIPPADIRHLRDLVRYRFKLICMITGEKNRAQNCLTVSNLKLDDVFSDVFGKSSRSITEYILEHPGDLFDVTPFVDRRCKTPIEEIQAAVDGAISPEQAVKLRQCLNHIDELEKHLEEIEQEILRLSDKYQAALDLIRTVPGFDKNPMTAIQVLSEIGGDMSVFPSAKHLVSWAGCCPRNDQSNKKIKSTRISRAGSYFKPVLVQVANGLLRSKKHPEITDRYKRIKARRGHKKAIIAICRMLLTAIWHILSDLKPYTAEGFRESRPVNESKVLTTSQALNLLKQRGYIIKDDLTPAMN

SEQ ID NO: 402459 - protein, 319 aa, unidentified
MNTIPKASIGNNERHAGIDVGKSMLDVYIYETDLHWQAENTSEGIKALVRRLKRYKLTRVLVEATGGYERAIAEACSDADLPILVITPLRIRQFAKAEGILAKTDKIDARLIALFGVKMQPEVRALPSRKTRLFKDLVSRKRQLKEARTQELNRLQKAQPHVQPSHRRLLKFLDKEIDWVNVHLKKEIARIEQWQHTYELLVSAPGIGDGVAFTLIAELPELGRLSHRKIAALCGLAPFNKDSGQMKGKRRIRGGRAPIRTVLYMAMMSAIQHNPVMRDMFQRLVANGKHKKVALTACMRKMVTILNAMVRDDQEWSMA

SEQ ID NO: 402460 - protein, 322 aa, unidentified
MIFVGIDISKLSFDVAVLIDGKYQSRQFENKQSGFLKLSQWIKSFKKTAYFCLEATGIYGLALAKHLYQTNQKVIVANPLQTHAFAKMEMARNKTDKADAMSIARYCQYLFNRGGIVKSLFIPRSAAFERVQFLVTRLDQLSKMKSQENNRSGVSLDKAAARSIGSMLTFIDKQIVVIKKEITMIIKQDEQLTVQLKLLVSINGIGDKTAWALLAYIGDISLFENSKQISSYAGLNPSIDQSGTSLNRSSLSKTGSTRLRKSLYMPAMVAVRYNPLMLAFYNKLLTKGKPKKVALIAVMRKLLVLAFGVLKSGKPFDVNYQH

SEQ ID NO: 402461 - protein, 313 aa, unidentified
MSPTNLSILYLGLDIAKSSLQLDLAGKPHTLTNDAKGHDQLLGLLKDHPTAHLICEATGGYEQPVLRALQAAGKPVSIVEAGRVRHFAKAKGLRAKTDPIDAALLSDYGRTFQPAATPAPTDQQTRLAALTARRRQLIDSRLVESNRAEHYQDKDCLRQSQQLLRLLEKQINACDTAIAKLVAEDASLKAKADRLDAIPGVGPLTAATVLAELPELGKLSHQAAAALAGVAPYNSDSGTAHGVRHIAGGRRPVRCALYMAALSAIRHDAILKAFYTRLRDAGKKPKVALVACMRKLVILMNRLLKNDKFQLAN

SEQ ID NO: 402462 - protein, 316 aa, unidentified
MVLGIDIGKAKFSACALIAGRSNVRDFANTPAGFRKLQQWLQKFEQLEIQACMESTNRYWEALANFLHVRGYGVSVVNPYRTAAYWKSEHLRAKTDRIDAAMIARFCQSQCPPAWTPPSPFERQLRDLVREVECLKAERRRFKTRMEHGPGYALKRILATLDKEVRGLERHITALLGSQPQFAHHYRNLQTVPGIGKVTAYIMLAEIGSKVHHLNAEELVSYAGMAPRIFESGSSIRKSRGTNKIGNSRVKRAFYMPALAATRKPGEWKARKQRLIDRGKPKKVAIGAIMRKLFIVTCGVLKSGRPYNPALSPAHA

SEQ ID NO: 402463 - protein, 408 aa, unidentified
MEIIYPRCCGLDVHKRSVAACVRRLEADGRLDQETRTFGTMTRDLLEMADWLAAAGVTHVAMEATGVYWKPIYNLLEERFTLLLVNARHVKHVPGRKTDVKDCQWLAQLLQAGLLQPSFIPARPQRQFRELTRLRSQLVAEKARVANRLQQVLEDANIKLASVATDILGASGRDMLRALISGETDATKMADLARRQLRSKIPQLRPALEGRVTEHHRFLLGQLLAHVEHLEGQIEALSRRIEELSGPFAPAREAMVSLPGIEQRVAENVLAEIGTDMSVFPSENHLSSWAGVCPGNNESAGKRKSGKTTKGNRWLRTALVQAAWAASRKKDSYFQAQYRRLAPRRGKKRAILAVAHSLLTVIYHMLKKGSTYRELGGDYFDKLNKNRLLPYFVRRIKDLGFQVTLEAA

SEQ ID NO: 402464 - protein, 330 aa, unidentified
MTYVGIDVSKDTFTVAYSSDKNSKTKTFKNTVKGIHEFIQTISKEDTHCVLEATGNYSALLVYLFSKAGITTSLENPLKIKNFARVMLSVTKTDDVDARLIAMYGEKMNPSPYKLKDESILVLKQKRTVLRQLKKQLVATRNLKGSMEVLPFVDSTCKRTIERTIEFLEKQIRNMEENITSLANQEYKKQMDLLTSIKGIGVTLAAALIIATGGFTYFDNAKQFTRYLGLSPTYQQSGTSVNVKGHINRNGDSTLRSQLYVAAFASLRCNSECKECYDRLRSNGKPGKVAVIAVANKLVRQAFAVVTKEKEYVDGFISEKPQKLQKHISA

SEQ ID NO: 402465 - protein, 360 aa, unidentified
MATMTWVGLDVHTRSIEAAALDARTGELTRRRFAGETGPVITWLGSLAAPISACYEAGPTGYGLYRAAHEAGVAIEVVAPSKTPRGRGDRVKTDRKDAELLVRLLSAGALTAISVPAPAFEAARDLSRAREQVRSDLLRARHRLSKLLLRYGRLWDPARSTWTVAHRRWLDAQRFDAEPTALAYHDGLGAVDALAARKAALDEQLSRLAEDPLFWPTVARLRCFRGLDTLGALIVHLEVHDWSRFRRPSELGAWLGLVPSLEQSGQSAQSGSITKTGSAYARRILVEAAKHAGRQPRISAELARRQEGQPAAVRAIAWRAQRRLYRLARHMQARGKPANVVAVAAARELAGFLWAAVLIE

SEQ ID NO: 402466 - protein, 390 aa, unidentified
MNEEKGKRIIGLDMHPDVFAAAALSADQSRKNADWVQDRMPTAGLEAWAKKQLRKEDVVVLEASGNSFAVATRLHAIGYTALVLESAQAGKIRDNFCNDDRHSAVKLAKVYRSGMAKVVWQPDAKTLEYREVFFAHRNAVKDATRCRNRIHSYLNEHCVRLKPGVRLTAASGEATAKAAKEWTILQFELLSQKFSQLREVESRRNQLERIMVRELVGAPHWARLWRLMGIRHRVAFALMAMIGDVHRFATAKKLVGYIGLAPRKDQSGNDKKGYDKGVGNFGRGDLRGLLIQSAHNALIQRDSPLHKWGWKLLMKKHRNEAAAAVARKLTVSIWHLLMGHFSPLLEATEHLHAKLLKLATVIGKDGLSSLGFANREAFVTAQIKSIQLST

SEQ ID NO: 402467 - protein, 371 aa, unidentified
MSNVAKYIGLDVHKATIAVAVAEGGPGGEVRFVGTVANDDDEVRKLVKRLATPGATLSFCYEAGPCGYGLQRLLIKLGQPCIVIAPSMMPRRPGDHVKTDRRDAMTLARLLRAGELTAIWVPDEAHEAVCDLIRARRSAQEDATAAKQTVRSFLLRHDRRFEGRSAWTKMYWRWLSEQRFDYPHQQLAFEELQKRVLEAQARVVRLESALGEAVASWHFAPLVRGLQALRGIKLVSAATLVAEVGDLTRFDNPKQLMAYVGLVPSEHSSGARTHRGRITRAGNAQARTTLVEAGWSYRLPAREERRYRERVADLPEEVQAIGWKAQMRLCQRFRRLSATGKPQPKVTTAIARELVGYAWDIARRMAPAMAN

SEQ ID NO: 402468 - protein, 350 aa, unidentified
MIIIGCDYHPSFQQIAFVDTETGELQERRLQHREEAEKFYRDLAAQGMKVRVGMEASGHARWFERLLAELQLELWIGDAAEISTKRVRKQKTDRQDAQLILKLMLKDDFPQIWVPSGENRDLRQLLWHRHRMVQARTRMMNQLQAVALNEGLRCKKKLWREAGREQLESFRLAPWASQRRHDLLELLDRMNRTIAKLTQAIDLEVEKCPEARRLKTHPGVGPLTALAFVLIIGRADRFQCGKQVACYLGLVPLEKSSGNQRRLGHITKQGNSLLRFLLVEAAQVTARSLPEWRSKYVHLTMRRGRKIAKVAMARKLAVRMYWMLRKGWDYGQLTKFGSHAGKPGPGDGVK

SEQ ID NO: 402469 - protein, 355 aa, unidentified
MDSTKYIGMDVHKESISIAVTNGAGKIVMECIVETKASMILQFIDGLRGDLQVTFEEGTSAAWLYDLLKPRVTKLVVCDPRKNRSMREGHQSDKIDARRLAELLRLDHLSPVYHGEHGLRTVKELVRSYLTTTKDLGRVMSRVKAIYRSWAIPCTGKQVYAPRHRAEWLAKINEPGVHRRAEFYYQQLDALRSLRQEVRRELLAESKKHKAWKLLCQIPSIGPIRAAILLGILQTPHRFRTKRQLWTYGGVGIETSSSADHHVVKGQLERKKKQVEIRGLNRNYNHDLKNVLKGAAVVAATKPGPFAEFYAELLARGMRPELARLTLARKIATIVLIVWKRGVCFDAQHLKPQTA

SEQ ID NO: 402470 - protein, 337 aa, unidentified
MRAYPHDQSKVLFVGIDVSQKTLAVAIDGQAVREFSNDQKGWNKLTSAVTKAKRDVRVVLEATGSYHFDAACHLANSPRVQVMIVNPRMAKAFHLAQGRRAKTDAVDATSLLEMARRMEFTPWKAPGEATFEIRQLSRYVDSLIQEATRLKNQLHAATITSRANEFVVADLRARLADVEGRTTRAENQLLAVVKADAEHQRRVAAMKSVPGVGTATAVRLLSEFLILDPEMTSKQITAYAGLDPRPRESGTSVRGARGISRLGNGRLRRLLYMPAVAVGRIKGPFKSLADRVAERSGKKMVGLVAVMRKLLVTAWAIFKSGQAWDVARAVRGEPMAA

SEQ ID NO: 402471 - protein, 411 aa, unidentified
MQTLVERGCGLDAHQATVVACLLVVLKNGTVRKNMRTFGTTTRELLSLRTWLLSEGCTHVAMESTGVYWKPVYAILEGGALEIVVANANHVKKVPGRKTDVKDAEWIADLLCHGLLRSSFVPPKPIRELRDLTRYRRKLVESQTAERNRLLKLLEIANIKLASVATDVFGVSGRLMLRALIEGKATTQEMANLAQRKLRKKIPELEPALEGKLEEHHRFLLRLQLDRLETAEKDLAVLEQRIQEKLRPYEGQVTLLDEIPGVDWTLAAVIIAELGVDMKVFENVAQLASWTGVSPGNNESAGKRKSGRIPKGNMYLKTALVEAATAAARTKGTYLRDKFYRLKARRGYKRAIVAVTHKILVAIYHMFSHRVCYNELGDLYLDKLNKHHLMRNLIHRLERLGYTVKLEPKAA

SEQ ID NO: 402472 - protein, 387 aa, unidentified
MTVQSQVSAFIPRHYEIFAGLDVDKHSIAVTFTDHTKLLKSLRLPYSSEHLLNYARKHFPDRRLAFVYEAGPTGFGLYDDLMADGHPCLVVAPSMVPTAPGQRVKTNRLDSKKLSEGLRGGQLRSIHVPSPTYRQLRHLVQLRDTHVRQLTATKCRIKALLLYEGIAFPEAPAGGQWSARVLRQLEALPGAEAVRFKLNHLIGTLHFHFLSAAAVQKQIRRFCQNDPELRQVIGLLTSLPGVGWIVAAHLTARLGDWREITNVRQIAAFLGLVSSEHSTGDQENRGAITRSGDSRLRNKLIQSAWTTIGKDPELRAFYRRIYQRHPKKVAARKAIVAVARKLTTRIYAVLKQQRPFVLRLDCSTAPLTAEETVRPRERLDAAQNEQP

SEQ ID NO: 402473 - protein, 488 aa, unidentified
MNVNHYIGFDVHKKSVSYCVKGADGRIFEEGKLRATHQVLRQWAQERREAWSGAMEATLFSGWIYDALKPFAAELEMGHPAMMKAIGASKKKNDKLDARKIADLVRCNLLPACYVAPPEIRELRQMLRYRNLVVAQAVRMKNKMSGLLMEAGAEYNKQRLHGKEYFTELLDTVAEVPESVKDLLRLSRGALEMFETTQRQLLVRLQKDPLLAKRVILLKSIRGVGEVTALTWALEVSDPQRFSSVARAVSYCGLTSALISSADKQQRAPISKQRNAHLQTVLIEAAKLAPRRNPQLAALHERELIWSDLSSPFGGLRSWFCVFFVVAERVMFPPEPPVAITTWPERRAAVKGAPVFGAAKRTLDGEHRSGTRYAFDGRRSGNMFPLVGFEPGFWTAGPMTAQELARRLITLIFAGRNRMAMIRRELPRTEFAGWVRRPFRTILVEGSPFRGPSAVIGAAVQSGITRLSCLGQFELRFGMYGDGPHETE

SEQ ID NO: 402474 - protein, 343 aa, unidentified
MTQYVGLDVADEETSVCVVDQEGAVLVEAKVASEPAAIAAFIRARAPQAVKVGFETGPLAAWHWHELKQLGLPVVCLDARHAKAALACQINKTDRNDAFGLAQLVRMGWYREVQVKSYSSHYVRAALRVRALLVRSRCDFENQVRGLLKIFGLRLGKTGRKGFAKRMAELLEKQPELEALVAALLKVRETIVEQIATLDAGLQRIAKGSATIRRLMTVPGIGPITALAFASAIDDPSRFRKASSVGAYFGLTPRRYQSGEIDRPGRVSKAGDGMVRRCLFEAALVLMTRVAGWSPLKAWGTRLSKRIGLRRAVVAVARKLAVILHCIWVDGTEFWWTRGEVTA

SEQ ID NO: 402475 - protein, 391 aa, unidentified
MIYSGIDVAKDKHDCFITNSDGEALFKAFTIPNNRDGFDELYQKITSVTDDLTKVKVGLEATGHYSYNILGYLLDKGLATFVINPLHTNLYRKSLSLRKTKTDKVDAHTIATMLMSDVNLKSYSHTSYHNEELKSLTRYRFDKVKERAKLKTSVSRLVTILFPELEKLVPTLHIASVYALLSEFPSASAVSGSHLTRLSNLLAVSSKGHYNKDTAILFREAARTSIGSHMPAKSLELKHTIKLIQELTDEIDEIESEIRNIMDRINSPILTIPGISYRMGAMIIAEIGDFSRFDSADKILAYAGMSPSTYQSGQLESSYSHMEKRGSRYLRYALYNATKYVCHWEPTFAAYLGKKRSEGKHYNVALSHATKKLVRVIYQLQKSGQSYIQAA

SEQ ID NO: 402476 - protein, 338 aa, unidentified
MQITTIGLDLAKSIFHVHGVDAHGCERIRRKLRRGELLKFFAKLPPCMVGMEACAGAHHWARQITALGHEVKLMPPAYVKPYVRRQKNDMADAAAICEAVSRPSMRYVPIKSASQQATLLAHRGRSLLIRQRTSLINAIRAHCLEFGLVAARGPANIAALIATIQDDRNPLLPQEARPALLILVEQLHFLNQRIAAMEKEATATRRLDDRVKRLMSIPGIGIITATAIAATVPDAKAFRSGREFAAWIGLVPRQHSSGGKERLGGHIKMGDSYLGRLLISGAQAVIAHSSRRKETAATWLGALIARKPRMVAAVALANKTARIAWVIMARGEHYRAIA

SEQ ID NO: 402477 - protein, 313 aa, unidentified
MYYIGIDVSKKALSVFDGQNDMEFVNQEGLKSLKRYLKKRYQTFDNLGIIFEATGVYSDHLKTFCADHRIKVFILNPKQSHNFARSLGKRSKTDKIDARTIYGYCKLIAKEKMQVPVINQEAKILSSYLTSYQFAQKQRVSLANHLDSIQDKDLSKLLKQELKRAQRLEDKLLSDMKTHIKDHPKLQKDFQRLLTISGVGEKLALTLLALFINYQGTNRAQITALVGLDPTKRESGTSVKGKAKISKNGNRHIRKMLYMPALSAIKNNQKIAIFYQRLIAHHKPKKVAVIAATRKLLLVAHAIYHNKTEYVAI

SEQ ID NO: 402478 - protein, 310 aa, unidentified
MEDVVVGVDVSKDRLDVHVLPSGEAFSAPRDSEGGAVLAERLSGLGAALVVMEATGGFETIVAAGLAAAGLPLAVINPRQIRAFAQALGKRAKTDPLDAEVIARFGQALQPEARPVPDEQARNLSELVARRRQLVEMMVAERNRRRRLVQPKLIKGVDRVLAALQQELTALERDIDQTIRGSPVWLEAEELLTSVPGVGDKTARTLLAEMPELGKLDRKQIAALAGLAPYNRDSGRFKGKRRIAGGRSPVRTALYMAATVAARHNPLLKAFSQRLRQAGKAPKQALIAVARKLLTILNAILRDRRPWQTA

SEQ ID NO: 402479 - protein, 356 aa, unidentified
MEPIHQYSSKDYDVFIGLDVDLKSYVVNVKDHELMNRLIRIPAQPESFGNYVQKNYNGRRVICAYEAGPTGFGLYDHLISRHIPCLLVSPLSIPKASNQRVKTNRIDAGKIAQHLKNGEVKPVRVPETDYRELRQFIRCREEYVGLIKRSKQRIKALLLSQSLTGEIKDTQNNWSNRYITQIQQLTCSPAVRQRLNLLLADLAYAREKNLYVLKELKNFCAAQEDIRRNMGYLRSIPGIGFIIATTVLANIGNPEYLTGPRELAAFVGLVPCESSTGDRVIKGSITHLGNAVLRSLLVEAAWITIRHDKRLFQFYHRIKNNHHDNAGAKKAIVAVARKLTMIIYRVLKDQREYVAY

SEQ ID NO: 402480 - protein, 341 aa, unidentified
MSYLGVDLHTNSFTVCRRTKQDKESIRTFQIARIADFRKTLRKRDLLAVEATGNTAWFVSQIRDRIRKVTVVNPFQFEVIRRSVKKTDKNDAKTLAFYLSKDMLPEARMKTKENAQLHSLATTRDKLVKQRTALINKIHNVLNSYGIKFKKESLGSEKGLKSIWAYEWDVIVKIELEVLIEQIRGFNKSIKILDKEMVEHGQKLKGHESLTSIKGIAGRSATVLLTIIGDVKDFADENKLAAYFGIVPRVSDSNETVRHGRITKHGSKLGRTTLVQCTLVAKRYSPYLRQYYERIKGHRGSGKAIIATARKFLGIIYNTLKNGWVFEDFPNFVLASSCVKK

SEQ ID NO: 402481 - protein, 428 aa, unidentified
MTKRTENLTLIHKDRTLIVGVDIAQNAHWARILDGKTSIETGTAFKFKNNIEGFVRLLDKANQAKERTGAEKIVIAMEPSGHYWKTLAAYLLASEVTVVLVNPFHVKKQKELDDNSPSKSDRKDALIIAMLAWQGRFSRCYIPEGVWAELRGYTVVRCQQKRKLNAARNNLAAILDEYFPEYYGVFKEPLGKASLHVLTHFPFPMDIARLTEAELAQELKKATQNRVGEKRATLLFSKARMSVGVKEGLAAARLRLSHCLSEISFYREQLAQTEAAMEDALGRTGIADILLSIRGIGVVTLASLLGEIGDPNRFENWRQVRKLSGYNLVENSSGKHKGKTGISKRGRPRLRSILYQASLHLVIHNPEFRALHEYFKTRRENPLKPKQSLTAISCKLLRVLFVLAKKRCPYDPEKVLGAYRQQQLKLAA

SEQ ID NO: 402482 - protein, 390 aa, unidentified
MERPMQKLNDLSRSLTALEPDGTLIAVIEMSLSSWLVAGIVPGVERQPLKKLAVDESTLLKLLYRWREEAEKAGRRIERIVVAFEAGRDGFWLARWLKACGIEAYVIHASSIAVSREHRRAKTDRLDTELLKRSFLGWLRGERDHCKMVAIPTIKDEDAKRPNRERDSLIRERSRIVNRMKAAFVRLGIRGFNPKLKRAAGRLDGLRTPEGEPIPPNTSAELRRDMERRRLVSDQIRQIEEARLERIEQAPSDGPHAMVRLLSRVIGVGIETADMLVHEVLSRNMRDRRAVARYAGLTGSPDESGRKRREKGLARSGNARVRRGMIQLAWRFLLHQKDSALTRWFRARTENARGTRKPMIVALARKLLIALWRLVREGVVPDGVVLRPAQ

SEQ ID NO: 402483 - protein, 431 aa, unidentified
MEVIHPRVAGIDVHKKIVWVAVRLPGERPGERTVTAKRFKTFWRSLRQMAAWLAELGVTDVAMESTGVYWWPVYHALAQAGIEVCVCNAAHMRNVPGRKRDIADCQWIAELHEHGLLRPSFIPTGAVAELRSRTRYRKKLIEQRTSEGQRLAKVLEDAGIKIDSVASRLLLKSGRAMIEALIAGERNPGRLADLALGRLRRKTEELQLACDGRFTAAHGQMCRLHLDAYDHLTAKIAELDELVAEAAAPFAALTARLETIPGIGRRTAEVIVAETGGDMARFATAARLAAWAGLAPGDNESAGKRKHAAARKGNRHLRVAMVESAWATARTRTRPGARFRRLGRRFGKGNEKKAAIAVAHTLICIAWAVLSRGQDYADAGEDYYEQRDRRDREHLIRHHQQALARLGCQVTLIPPGDGSPPPSATSKQPAA

SEQ ID NO: 402484 - protein, 343 aa, unidentified
MNEIITIGVDLAKSVFQVHGVDAEGGVVVRRQLRRGQVVPFFKKQRSCLVGMEACATSHHWAREIAALGHEVRLMAPRYVKPYVKRNKNDMADAEAICEAVTRPTMRFVEIKTREQQSVLMLHRTRQLFVRQRTALINALRAHLAEFGIVAGIGRNGLERLLKVIGDGDDDRVPPAARDCLLALRDQLEMVKHQILDADRRILAWHRSSEVSQRLDDIPGVGPLIATALVASVPDPHVFKSGRDLAAWIGLVPRQNSTGGKERLGHISKAGNRYLRMLLVVGALSVIRRAKQMGYTRRPWLAKLLERRSTKIAAIALANKIARTAWAMMAHGTCYKEPASQAV

SEQ ID NO: 402485 - protein, 354 aa, unidentified
MNNDKYVGLDVHQASTVAVVINAQGKCVMESIIETKGNTLVDFILGLRGTLHVTLEEGTQSAWLYDLLNPLVAELVVCDPRHNKLAAGGNKGDKIDANKLAHRLRLGELKPIYKGEAGLRQLKVLVASYENLVSDTTRVRNRIKAIYRSRGIGCGGREVYHRTRRAEYLAQLTDPGLRQRVERLYQQLDALTPLRREAQKAMLQESRKQGASHLLQQVPAIGPIRAAQLVATVATPHRFRTKRQFWPYCGLAVVTHSSADYRFVAGKVAKRAKPGQTRGLNRNHNHRLKAVFKGAATEALKREPFKSYYQRLLGQGIKPELARVSVARKLAAIVLKVWKSGEEFKAEEVNKQAA

SEQ ID NO: 402486 - protein, 350 aa, unidentified
MDATTIAVDLAKNVFEIAIANDHWRVVKRHRLTRARFDRFLRDEPAAHVVMEACGSAHYWARTAQRCGHRVTLLPSQYVRPYVRRHKTDRTDAEALLEAVRSGSIPPVAVKSVAQQEVLALHRVRQQWMTTRTARLNAMRGLLLEHGVAIPCGARTMLTQVGVLLGRDDGLLPARLREVLTLLRDEVRALEERTHAIDHDLAVLAAGDPVIQRLMRIPGVGLLTATALIGTVGHIHAFRRARRFASWLGLTPREWSSGGQRHLGGITKQGDVYLRCLLTHGARAVLLMAHRAAHAGRALTRLQQWALTVQRGRGHNKATIAVANKLARIIWVVWSRDVEFTATPAVAAAA

SEQ ID NO: 402487 - protein, 368 aa, unidentified
MFEHTFIGLDVHAVNVVGHALNPATGEVSAHTMPADPAIVLEWIRRFAPDVTAVYESGPTGFVLARYLRAAGINCVVAASSKLLRAPGDRVKTDRRDARVLAEMLAVGSVTEVRIPDPDEEALRDLSRLRSGTAKDLAHARQHVNAILLRHGIRYPKDTRWTKEHTRWLHRQSFEEPALQFTYEADLEQAELLAVHMARIDKHVAATAAACRYAPVIDALMCLRGIQMTTAFGLAVEIGDWTRFTGSSIGSYLGLVPSEDSSGQSRHQGPITKAGNTYARKLLIEAAWQHRRPYVRPGERLLRQFDVVAPATRIRAMEGNHRLHRKWEHFDERHKLSVKANTAIARELAGWCWSLAAPLQQGERMNAA

SEQ ID NO: 402488 - protein, 424 aa, unidentified
MKVTYQTCCGVDVHKSFLVATIVKTNGGIEPSYQKKRFSTFNNSILEFKQWLLDNDCHDVCMESTGKYWVPVFNLLEDEINVVIANPKWVKAVKGNKDDTKDSKWIGDLFRLGLVKGSYIPCKKVRILREYTRYRYKLVSCRSSEKNRYQNALTVCNVALDSVVSDIFGKSSTSIIDYLLEHSGISINHEEIASKLLRSLKSKEDAVIESIEGYQMTDAQKYRMRLVRAHMDYITAEINDVDKMIEKMISSNPDFENAVQFLCTIPGVKRDSAITIISEIGTDMSQFSSSKRLCCWAGLTPGSNESAGKKKSVRITRAGVYLKPALVQCAHAAVKSDKSPYYKKKYDSLVKRRGKKRAIIAIARMILTAIYQMLSTGELWNPSDLYKIDMPVALVEKQKAKAIKQAKKLLQREGLLPPDESLAS

SEQ ID NO: 402489 - protein, 344 aa, unidentified
MKKSNVIGIDLAKNVIQVCKIDKHGELVSNKAMSPSKLKELLAKSVPSIVAMEGCGSCHYWARLARAHGHDVRVISPKKVKAFLQGHKTDANDALAIAVAATQVGMIFSQIKEVEQQSLQTLEKSRKFLEKELTALSNHIRAYLYEYGITMNRGRKSLRETIVVVFDDLDTRLPQCLKSTLRLLWERYQQTATQFEEAEQHKAALVKQLEPCKRLMDLEGIGTVCASMLYANIGDGKEFKNGRQASVYIGLTPKQHSSGGKTYMRGIDKQGGNRELRAALYQGALSVISRLPSEPRTSKEAWLLELIKRVGVKRACIALANKSVRTAWALLATGKSYEPVLLKS

SEQ ID NO: 402490 - protein, 375 aa, unidentified
MGHHSEAFIGIDTAKLRNAVAVAEAGRKGEVRYLGEIDTSEAATRKLVAGLAAKYRKLTFCYEAGPTGYGLHRSIERLGHTCLVVAPSLIPKKAGDRVKTNRRDAEGLARLLRAGELTSVWVPDARHEAMRELTRARDAARQDLTRKRQQVSSLLLRLGLHYPGVRTWNARHRSWLANLRLEHREQRFALEEMLLAERQANDRIGRLEQAIREALADWSLAPIVPALMAMRGIDLVSAVTILAEIGDLSRFESPRQLMAYLGLVPSERSTGDSVRRGGITKAGNGRARRVLVEAAWSYRHPPRVGYEKQAQVAAAPRPAREIAWKAQVRLCKRFRTLSRKGKKSTVVATAIARELAAFIWAIAREVHGTKTARAA

SEQ ID NO: 402491 - protein, 369 aa, unidentified
MKKDSTLYVGLDVHKDSIVAAYASSEGGDPVHLGAIGTRQCDIDALVRKLQSKGARLVFVYEAGPCGYWLYRYLTGKGLACLVVAPSLIPRKPGDRVKTDKRDALTLARLARSGDLPPVYVPQVADEAIRDLARAREDALGDLNDARFRLKALLLRHDIRYTGRANWGDEHRRWLARFVFPTPAQQIVFQEYVRTVTERTELLGRLEAALLEQAKTWRMYPVVEALQALRGVQFTVAIITVAELGDLTRFEHPPELMKYLGLTPSEYTSANRRRLGGITKAGNGHARRALVEAAKAYRHRAKVSEQIQARQQHLPRAICDIAWRAQVRLCGRYRKMLARGKHPNTIAAAVARELIGFMWAIAKEQPVAA

SEQ ID NO: 402492 - protein, 334 aa, unidentified
MAKAVFEIGISDRPGHVSRRERLPRAQFLAFMAQQPAATVVMEACGSAHHWGRKIQSLGHRVVLLPPHHVRPYVRRNKTDRTDTKGILEASRNEDIRPVPVKTVDQQVLTSLHRLRSGWMTERTARLNALRGLLRELGVFIPMGVREVVPAVWSLIEDADSDLAEALRPIFAEACREIGEIEARIKQVERQLEATAEQLPAVEHLRTIPGIGLLIATALVAFLGDIRRFPSGRHLASYLGLTPREYSSGLKRHLGRISKRGDGYLRTLLIHGARSVLIHARKQQPDRLREWANKLAKTHVHNKAAVAVANKLARIVWAVWSHARPYGLTTTTAV

SEQ ID NO: 402493 - protein, 337 aa, unidentified
MMYSGIDLHSNNSVVAVIDDADRVVAQKRLPNDLAKIVGFLSRWKDELAGVVVESTYNWYWLIDGLQDAGFHVRLANTVAIKQYDGLKHSGDETDAQHLAHLLRLGILPTGTILPREHRAVRDLARKRMQLVRSCTTHVLAVENIMARQLGGRMTSNQIKRLTVDAIDKLPLAADVGLAVKANVAVIAALQAQIELLEKRLQERVKPQPEYGLLTSVPGIGQALATVIFLETGPIDRFAGVGNYASYARCVDSVHTSNRKKKGEGNVKNGNKYLAWACVEAANFARRFCAEAKRFHERKKAKTNNVVATKALAHKLARACYHILKEGRPFDATRCFA

SEQ ID NO: 402494 - protein, 412 aa, unidentified
MKRIRDRVTGLDVHRDTVVACCRVVDPDGEVEVTKQSFATTRRGLLELATFLSDASVETVAMEATGIYWRCVYYALEGMFNELWLCNAQHVKNVPGRKSDLSDAEWLADVAAHGMVRPSFVPPPEIRELRELTRYRRTQVDARAREIQRLEKALQDAGLKITSVASSVWSASSRKIIEALIAGERNPKVLAEMAKGRMRVKIPHLEEALSGHFGTHHAILCRQIIGHIDFFDQSIGSLTKEITTRLVPFESAVAIVTSIPGIARTTAEVIIVETGADMRRFGSPGQLCAWAGAAPASYESAGKRRPAGTRHGSPWLRRALVEAARAGAHTKGSYYSAQYVRIARRRGSNRACVAVANSMLFTIWHLLSNGQLYEDPGADYFNRRHDPAVEAKRLARRIEMLGYDVSVIEKAA

SEQ ID NO: 402495 - protein, 425 aa, unidentified
MNYKQNEKINQVKESTLVVGIDIGSTTQYARAFDWRGIELGKVFTFSNSREGFEAFKAWMQHLQDKYRKSDVIVGIEPTGHYWFDLGAYLEDEGILLVMVNPYAVKQTKELDDNSQSKNDRKDPKVIAKLVTEGRYSAPYTPDGVYADLRIMVTNRKRLIREMTQIKNRFARWFAIYFPEYTDVFGDYEAQSSMLLLKKVCTPEAIVELGAEKINQIWRDAKLRAVGMKRATTLCETAKRSIGLKKGSSAARYEMKLLLEDYEYKKAQLDAVMEEIEKLCRKIPESEQMLAIKGIGVITVAGFLAEVGDVRRFESPRQIQKLAGLSLRENSSGKHKGQTTISKRGRSNLRAVLFNAAIPLIATNPEFKSLHEHYTTRANNPLKKKQSVIAISCKLIRVFYAILANGVTYDAQKMLSDIHRQPQAA

SEQ ID NO: 402496 - protein, 313 aa, unidentified
MSNSSEIFAGIDISKSHLDLALRDVEKSWRFSNDPEGISKLTDLLLKHQPTLIVLEATGGYEQAAFRCLSARQLAVAIVNPRRVRAFARANGRLAKTDRIDAHNLAHFAQVVRPHPHPPSTEAQQCLVGLMARRRQLHRMITAEKNRLRNAQPVVQPQLQQHIDWLRQALKELDSQVEDLLRSDPELKVKADLLCSAPSVGMVTAASLIADCPELGTLDRKKIAALVGVAPMNKDSGRKSGRRRIMGGRAPLRAALYMSALSASRFNPAIRPFYARLVESGKVKKVALTACMRKLLTMLNAMMRDNKHWNPAL

SEQ ID NO: 402497 - protein, 438 aa, unidentified
MSNKVIFYLDELFISVGIDVGADFSWMSIALPNQQFVGKPYKILHNSIDSLTTAVSKIKEAEELYSLESRIFLESTGIYHYPLFCYLRDKGFNCSVINPIITKNSTNINIRKVHNDRFDSKKAALVGLKPDLKVSLMPSDLALNCRNLCREYYDLMDNRSAYVNKLQGELRMAFPQYLGIFSKVTINTSLTLLETYTSPSAFLKADKQEIIDIIKSTARFGLTYAQNKYNAIIQAATDANQFGYIIDSNIKRIRLYISFIRKYDEEINSILESLHELVDANEDSDFVKQIHLIETFKGAGFLSAVSIMGEIGDFSAFSKPKQLFAYFGLDPAVKQSGKFEGTKVQMSKRGSAIARRVIHTLTLQSISISRNREAKNPVLREYYLKKCDSKPKLVAMGAVSHKVCNMIFAILRDNKPFKIIAPQEHIKQYNSAKCDIAA

SEQ ID NO: 402498 - protein, 354 aa, unidentified
MSQFSSITAGLDLGDKYSYLCLLDTESGEAIEEARLCTTPEALQRRFSGCEPTRIAIETGTHSPWVSRLLERLGHQVLVANPRKLKLIYAEERKNDRLDAENLARLARLDPKLLAPLKHRGEASQAHLAIVRSRETLIEARAKLINHVRGAAKSFGARLPKCSSPTFHKKAGTHVPEPLRSALEPLLETIASMTAHIQEYDRELESVASELYPETKLLQQVHGIGTLTALTFVLTLEDPSRFGTGRAVGAYLGLVPGKDQSGERDPQKRISKRGNGLLRKLLVGSAHRILGPFGEDSDLRRHGLKIAERGGKNAKKRAVVAVARKLSVLLHRLWVTGEVYEPLYNAKRFEGQAA

SEQ ID NO: 402499 - protein, 355 aa, unidentified
MSQEKYIGMDVHQATISVAVMDVHGKQLMECLLETKADTILEFIQGLRGTLALTFEEGTSAAWLHDLLKPHVSRLVVCDPRKNALMRDGNQNDRVDARNLAELLRTNQVKAVYHGEHGTRALKELGRSYLTLTQDTTRVMNRIKSVYRSWAIACAGTSVYSRRHRAEWLAQLVEPGVRIRAEHLYQQLDSLEPVRQAARRELLRESRKHAAVKLLRQIPAIGPIRSALLVAILQTPHRFRTKRQLWAYSGFAVQTYDSGEYRFVRGKLHRNRERITVHGLNRNHNHDLKNLLKGAAISAIQRPGPLQDFYAALVEKGMRPSMARLTLARKIAAITLTLWKKGVSFDPKQLQRQAV

SEQ ID NO: 402500 - protein, 309 aa, unidentified
MKQSVVYIGIDVAKAHLDVAWAGTFRRLPNERSGHAALVRWIKQSTTPVQLICEASGGYEQALLESLEKSEVKVTLVQAVRVRQYARAAGILAKTDRIDAKVLAAFGSAMQPQPTSPLSAEQQRLRQYEAQRRQLSRILVAEENRLAQLSCTELRTLSRSLISKIKTQIKTLDRGISDLIAQDQTLCVKAQKLTAISGVGVRTAALLLAQMPELGQLNRRQAAALAGLAPFNHDSGSVRGKRAIFGARPALRSGLYMAALSAARFNPILSSFYQPLRTKGKPHKLALTAVMRKLLLALNQTLKPLPCST

SEQ ID NO: 402501 - protein, 421 aa, unidentified
MRELRAKRVRTVKEGTLIATVDIGVANNTGYCTTLDGRDTKSFKFDNTKEGFEKFWCMMIASKNRFGCDEVLVGYESTGPYAEPLVHYLANKQVKIVQVNPMHTKKMKEVNDNSPLKTDDKDPRVIADIIRLGRALSIVVPEGDAASLRRLNNARERHVGEQTAFLNQLQQLVFLIFPEFKTVLKNMKGKTAQHILKRYTTPERIGTLSKEALGEEMRKRSMGKFGIKDAESLIGLARETVGIKEGLAGIFMDIRHILMQLEAEVRFISEIEAEMGATLKRIPCSLRLLSIKGLGTVSVAGLIGEVGDFSKFSTQSEIMKLAGLDLYEISSGKRKGQRRISKRGRSLLRKILFYAAIQMIRKNGIMYDYYARLTGRGMERMRALIAVSRKLLRIIHAIVRDNRDYVGQYQAPERRVIQKAA

SEQ ID NO: 402502 - protein, 354 aa, unidentified
MSQTPNTAIAVIGIDIGKNSFHVVGHDTRGAIVLRQKWSRGQVEARLANIPPCLIGMEACVGAHHLSRKLASLGHDARLMPAKYVRPYSKGQKNDFNDAEAIAEAVQRPTMKFVATKTAEQLDLQALHRVRERLVSQRTGMINQIRAFMLERGIAVRQGIGFLRTELPTILATRTDALSQRMLRVIEELAGDWRRLDQRIDGLSGEIEDLARQDQACSRLMTVPGIGPIISSAMVAAIGTGDVFSKGRDFGAWLGLVPKQISTGDRTILGKISRRGNRYLRVLFVQAAWVVLVRIKNWERYGLKSWIEAAKRRLHHNVLAIALANKLARIAWAVLANGRAFELTRTDDAGVRPA

SEQ ID NO: 402503 - protein, 409 aa, unidentified
MVLFVGDDWAEDYHDVEVMDLTGRRLARARLGEGVAGIARLHAMIGEQLGDEVDETEVLVGIETDRGPWVAALVAAGYTVYAINPLSVARYRERHSVSGAKSDPADAHTLADMVRTDAHQLRPVAGDSAGAEAVKVVSRAHKSLIWERTRHTQRLRHALREYFPAALEAFEDLDAPDALELLAKAPDPASAARLTLGQIRAALKGARRRYVEDKAARIQAVLRAEHLGQAEVITAAYAATTRSAAAVLATLNEQVKVLEAQVEAHFGRHPDAEIILSQPGLGPILGARVLAEFGDDPDRYATAKNRKNYAGTSPITRASGKKKTVTARFVHNDRLIDALMAQAFAALNTSPGARAYYDRQRARGAEHNPALRQLANRLVGILHGCLKTRTLYHEATAWSHHAEKLATAA

SEQ ID NO: 402504 - protein, 342 aa, unidentified
MSYMTVGVDIAKNVMQMHWVEPETGEVFNRSIKRAAFLEHFANRAPCLIGMEGCGGSQHWARRLIEMGHQVKLVPAKFAKAFNIGNKNDAADARAIWMATQMPSKSVAVKSEAQQAVLALHRMRQQKLKFRTMQINSLRGLLTEYGEVMGKSRAALDKAIPHVLARLADRLPAMLIESLREQWNDLENLDRQIADIERRLLNWMKESNACKAIAEIPGVGLLTATAAVATMGDAKSFRSGREFAAWLGLVPAQTGTGGKVQLLGISKRGDTYLRTLLVHGARSVLHHTKEPSEWLKQISLRRPSNIVAVALANKMARTIWAILVHGREYERAYVSIKPHLTA

SEQ ID NO: 402505 - protein, 355 aa, unidentified
MEAQQKYSSNVQLYVGIDVHKKQWSVSIYSQELHHRTFSQPPVTGALKSYLDHHFPQAQVKCAYESGKFGYWIYRELTSFGYECLVVNPADIPTSGKDTAGKTDPRDSRKIAQSLRAGLLSSIHIPDDTTQGDRQLFRYRKKLWSDLGRVKNRIKDKFLFSGVVIPEEFDNPYWTKAFLNWLKEVALPSPKLRLTLDLLLEQYHFLYRHVLKVSVEVRKMQRLDRYRTNAKLLRSIPGIGPLTTVQLLTELQDVNRFASFKKFNSYIGFVPTTRSSGDQDKRGHLTFRKHKALRSELVECAWTTVRTDPVMLARFEELKKRLTAKRAIVVMARKLLSRIYFVLKNQKPYELGIAR

SEQ ID NO: 402506 - protein, 386 aa, unidentified
MPQLNDLSRSLVTLEQDATLIAVIEMGQSSWLVGGIVPGVERSPLKKLAVDESALLKLLNRWREEAEKAGHRIVRIAIAFEAGRDGFWLARWLRARDIEAHVIHASSVAVSREHRRAKTDRLDTELLKRAFLGWLRGERDHCKMVAIPTLAQEDAKRPNRERESLVGEQTRIVNRMKAALSRLGIRGFNPKLKKAVERLDGLRTPEGEPIPPNTLAELKHDMERRRLVRSQIRDIEGTRLERLEQAPGDGPHVMVRLLARVIGVGVETADMLVQEVLSRNLRDRRAVARYGGLTGSPDESGKKRREKGLARSGNARVRRGMIQLAWRFLMFQKDSALAHWFYARTKNAPQTRKTMIVALARKLLIALWRLVREGAIPEGVVLRPAL

SEQ ID NO: 402507 - protein, 344 aa, unidentified
MENYAGIDVSLELSSVCVVDAHGKILKEAKVASEPDAFVEFFEKLGFAVKRIGLEAGPLSQWLHARLKRAGFETVLLETRHVKAALSAMTVKTDRKDARGIAQLIRMGWFRPVHAKSIGAQEIRALLVARKQLLGRLIDVELSIRGILRGFGLKVGPVTRKNFEARIRELVAGQATLERIATSMLLARSALKAEYGRLHKAVLAIVRDDAVCRRLMTVPGVGPLVAITYKSAIDDPHRIVKSKAAGALFGLTPKKYQSGEKDVTGGITLAGDEIVRTALYEAANVLLSRITRFSKLKRWGMDVAKRRGSKRAKVALARKLAVILHRIWVDGTTYRWAEAGSIAA

SEQ ID NO: 402508 - protein, 409 aa, unidentified
MKEETFVPREYDVFAGLDVDKKSIAATFSSQQGFIRSLHMPYSVDYLLNHVRKHFGEQKVDFVYEAGPTGYGLYDGLVAQGFRYLIAAPSMIPRAPGQRVKTNRLDSRGLSESLRGGQLKSIHVPSPIYRELRHLTQLRDTVVREAAAHKQRIKALLLLEGIGFPPATVGRQWTLRVKAQLRKLRCSRTVRFKLDQLLDSLEFCEKQVVSSTKEIRRFCKEDAELFQSIEYLMSIPGIGWIVASQLLARIGDWREIDNVRQLGSFLGLVPTEHSTGDTVNRGSITRAGDGRLRSKMIQAAWSAIRQDGELREFYRSVCQRNPRGKGARIAIVAVARKLSTRIYAVLKNQRPYIVRKQVHSAPLTQEETSPQGTTRRCAEPGETTTPDGSRFETECPGPCALERAHCKEV

SEQ ID NO: 402509 - protein, 441 aa, unidentified
MKDLSMEVVNPNAAGIDIGSRSHFVAVGQKEEDVKEFGVYNEDLLSLVKWLSDHGVKTVAMESTGTYWQNLFTVLQGTGFEVILCNGKFTKNIKGKKSDVQDCQWIQKLHTLGLLSGSFLPDQATEQLRTYCRHRMNLIEQGADTIRKLQKYLRLLNFRLDIVVNDVTGLTGLSIINAICKGETNPEKLASLRNGNCKKSEEEIAKALQYNGRKDFLFALRHEYEMYVTLQSRIEECDVEINTLLKAQISSDENKKQHHIEKKVHKRVNKNNPKNIDINLLSYQYFEGTDLLSIEGLSHSTVLTIMSEVGNGIHKFDTAKQFASWLRLSPNNKISGGKVLSNRIPKGSNRLKIALRNAANVIGNLKDTALSNFFKRIAFRKGRVSAISATARKLAVIIWNMLVKKIPYKSENTYEFLDQKRKRKVMELNHYRLEVDRLQKE

SEQ ID NO: 402510 - protein, 330 aa, unidentified
MESWNVILGVDVSKLTLDICWAERNLHIKIDNCSAGFCVLKKWCKTQAIDLKKTIVVMEYTGGYEYRFIQFCESSSIFYCRIPGLEIKQSRGMTRGKSDQADAFRIGEYGEQKIKKLTPSKPLDCNILTLRQLLSFRKRLVCEKAGFESTVKERKHMYPIKKTDTVIHIAQAKIKADKKYITQVEQQIMEIIKANESMWLNYRIIRSIKGIGPVNAWMTIAYTENFTSFTDPRKYAVFVGVIPFEHTSGTSVKRRSRVSPLAHKGLKQELNQAAKAAIAHDQEIGAYAERKLKNKAYPLVLNNVKFKLILRMFSLVKRGEMYVENYQRAA

SEQ ID NO: 402511 - protein, 341 aa, unidentified
MYYVGLDIHAKHIAVCVLTETGQVYRRSQVRTIDEMMRILENLPDQFEVCYEASCGYGHYHDLLRPVAARVLVAHPGQLRLIYRSKDKNDRKDAERLAKLLYLGELPTVHVPTIDVRTWRELINCRSQVVAKRTRAKNAIRALLRSNGITGAKRTSLWTNKGIAWLRELSFPTSSQNLRRDLLLEEIESLTRQLKRIERELNERADQSPAVLRLRSIPGVGVRTAEAVAAFVDDPDRFRNAKAAGQYFGLVPKQDQSGDKNRLGHITREGPSIVRRLVAEAAWHACRRSPTVRAYFEQVQRDDPQRKKIALVATAHYLVRVMWAMLKRNTFWEEKAPALAG

SEQ ID NO: 402512 - protein, 416 aa, unidentified
MTDEPISTPIERYVAIDAHKHYLMVGGMNARQETVLPVRRVEMENYPKWAKANLRLGDAVVIEATTNTWSLYDVTLPNVSKVVVAHPLEVKQIANARVKTDKHDVNVLARLLVAELIPEVWVPPMEVRELRTLIAHRRRQVKMRTMTYNRLHSVVHRNNLVPPEGGFFADKNRSWWEALSLSAVEKLQVRQDLAMLDRLDSLIAEVDQELARLSTTSHWSEHCPYLVQLPGFGMINAMTVLSAIGDISRFPTSKDLVGYAGLGGCVHDSGQSHYTGPITKQGRKELRWALVEAAWVAVEHHPFWKQEFHKLTHRMKTNKAIVAIARRLLVVIWHVMTERVADRQADPEMVAFKLMKWSWSLNDLQRGGLTTRQFVRYQLMQLKLGEGLTGIQRAHRMSIASVEEILALKPELREVA

SEQ ID NO: 402513 - protein, 436 aa, unidentified
MKQIVIGVDPHKLSATIEVVDQHETVLGSGRFGTDKAGYAAMRGYVARWSRPTWAVEGSNGAGRSLAQRLVADGEHVVDVPAKLAARVRLLDTGHGRKTDAHDAHAVAAAAVRAKKLRVLSENPQLESLRMIVDRRDELTRARVQTVNRLQRLLAELIPGTSKKDITVLQAKAKLASVRPRDLLGKTRRRIAAEELADLVEVEKKIKTLTKDLKTLVQASGSSLTTLPGVGTIVAARVLAEVGDVTRFADRNKFASWTGTAPLEASSGEQVRHRLSRAGNRRMNHMLHIAATTQIRLDTAGRAYYRRKIAAGKTRMEAMRCLKRRISDAVFRQLLADARADVNRPVGAGPGGHCGASRESSAVDFHPHIDTSDQPLPGPAEPTLPGTKPHANPCAASAPRPSRRRAGAVKVERPTGRTTLTATSVGAHSAAPKPPS

SEQ ID NO: 402514 - protein, 361 aa, unidentified
MFTERTSVGLDVHARSVVAAAIDGVTGEVFRARLTPGNDEVIDWVRALPGPSAVVYEAGPTGFGLSRAFTTAGIRCEIAAPSKIQRPGGDRVKTDARDAMHLAKLLRLDEVVSVAVPSLQREAARDLVRAREDVRGDLMRARHRVSKLLLRQGIVYYGGSAWTGIHLLWLRAQHFDAPGLQIAFDAEHEAVLQAEARRDRLDKAIVAMAADSEFTPVVHRLGCLRGISTLTAFGLAVEVGDWDRLTGSSIGAYLGLVPTESSSGQSRSQGSITKTGNTHARRLLVEAAWHHRKPYRTPGATMTARWELATPAARARGHAGNQRLHQRWLHFSDRKKRPVVANVAIARELAGWCWSLAVMDD

SEQ ID NO: 402515 - protein, 359 aa, unidentified
MEYGAIDLHKKQSQIRILTEGGDVIEDRRIVTARERFTAVFGLRRPMRILVEASTESEWVARHLETLGHEVIVADPNYLPMYGDRSRRVKTDRRDVAALADACRRAVYRAAYRRSDQQRAVQAQLRVRQGLVNTRTRAISLARSLMRASGHHIRSGESASFLQRLAACEVPNDLTAILAPLRGVIEVVNDELASADTRFAALVENDPVIKRLTTLPGIGPLTASAFVAALDDVNRFRGAKAASQVTSYLGLVPREFSSGERQHRGHLVRSAQPQVQTLLVQAAWRVRRSTRSETAALRDWADRVSRRRGKNIATVALARRLARILFAMWRDEVDYQPRRIHANRQPQAATTEQPVARAV

SEQ ID NO: 402516 - protein, 354 aa, unidentified
MYPFYLGIDLHKTRSYVMLIDQDGTVINEQRIRNTDMAKYLAAHVPAETYAVLEATRNWPFLYDLLREHVARVELAHPKEVKAIASAAVKTDQIDAGVLAHLARLNYLPTAYAAPIPVRDLRQITRHREWLVRQRTQAKNRVHAVLASYNLIAPQTDLFGQAGRQFLNEAQANSLRPAAQRVIADNLALIDHLDQQINSLEAEIQLSEEQAQAVQLLKTIPGIGQLTATIMMAEIGDVQRFSSAKALCNWAGLTPRVRKSDAFVRHGRISKQGSPYLRAAMVRAAAVASRCSKRWYLLHERLVPRCGKKAAKVAVARHLLTVAYHMLSRQQPYQENYPHAGEPVNLQDALTSSV

SEQ ID NO: 402517 - protein, 398 aa, unidentified
MQDLARVLLGWAEHTSMHRGRTMRKYNLAYVAFDSAKAKHAVAIAEEGREGEVRYLGEIANSPEAVKKLATKLAQRYRQLHFCYEAGPTGYGLHRQLTELGHRCDVVAPTMIPKRSGDRVKTNRRDAVTLAKLLRAGELSPIWVPDTVHEAVRDLTRARETAMLDLRQKRQHLLSFLLRHGRDYPARKNWTKMHARWLAAQKFAHPAQQIVFQDQIEAINAAQIRLRDLEQNLCEIVPTWTMAPVVAAYQALRGVSLLVATIFATEVGDVRRFATPQQLMAFLGLVPSERTTGDTVRRGSITKTGNGRARRALIEGAWTYRHPARVSERLQKRIEGLPLAVRTIAWKAQVRLCARYRRLMSNGKNAAVAATAVARELAAFMWAIGHQVAPEGPSSRAE

SEQ ID NO: 402518 - protein, 401 aa, unidentified
MASVRENSQRIKRFRELKATLRTDRTRLLVGIDVAQAEHVVHLRHAHTRVVTPKLVIPNTTRGFAQLWARVQQAQQTTGGREVVVGLEPTGTYHQAVATFLEQQGADVVLISSSVAPWNRRTQDGTWDKTDRKDAANCADLLEQGKVLFYSQPTGPLADLRRLVKVLRRARAELASCKARWRTSLRPALAPMGAALPQRLWAELPGVLQAWERAAPGRPAVPKGRLPLGLATACADLGTQVTAVQARIAALEAACTPVAERLPAYALLRTIPGIGPTVGAILVAEIGDIAWYTAFSQLRKLAGLAIVRVQSGQFTGQHRISKGGRSLLRWACYQAAVGLVRTAAGQHRFAAAKAKRRGDRCGGFKAMVELAAKQLRVVWGVWRSGQPYDPRRAGGVRRPRR

SEQ ID NO: 402519 - protein, 385 aa, unidentified
MAPPRRPEIVIGLDVGKSSHWACVATRDGEVLASKPVANRENALDSPFAEFPGVLVVVDQVRNIGALALSRARAAGMPSAYLPGLAAHEVARLFGGDAKTDERDAMVIAKTALGIPDALLPVAHPDPAIAAARALAAQRDFLTCESTRSKNRLRSILLESCPEFESLVDLSDVSELRLMAALGGPWSVADAGRRRAAALARGARRGKVDALVGSVGSSTRPDAAAIAAEDRAVRFLARRIAENAAELQAATAEISALLERDETYRCLLTIPGIGPKTASELAISISIEDFPSHDRLASYCGLAPRNRQSGTSVSSVSASRQGNKRLKNLLIFSCNCLARTDGRWGEYYARCRDRGMPHGKALKAVARKRFKVIYAVMRDKVPYVA

SEQ ID NO: 402520 - protein, 354 aa, unidentified
MKRTTKYVGLDVHQATTVAAVREESGRIIARTILPTEGRAIVEFFRGMRGAIHVALEEGTQAQWLYDLLHPVVHRVLVCDRRGQVQRGNKGDQQDAAELAELLRRGGLRAVYHGSPERTALKELARTYLNLVEDATRVMLRLKALFRARGIKTPGRSVYRAEQQSEWLGKLSEVGVRFRAEALYAELAVLLRLRPKAKAAMLAEAKRDPAWAVLRTVPFLGPVRVALLVATMQTPWRFRTKRHLWAYAGLAVVTRTSSEYGIEHERPVRRRRAPLTRGLNRNHNRALKDVFKSAATAATARRGPLQDLYQGMLGRGMREELARVTLTRKLAALTLHLWKTGERYDPAKLTKAAR

SEQ ID NO: 402521 - protein, 391 aa, unidentified
MIYVGIDVAKDKHDCFITNSDGEVLFKVFTITNNLDGFNDLYQRIESVMEDITKVKVGLEATGHYSYNLLGYLIDKGLPTYVINPLHTNLYRKSLSLRQTKTDKVDARTIASMLMSDVNLKSYSDISYHNEELKSLTRYRFDKVKERAKLKSSVSRLVCILFPELEKLVPTLHMASVYTMLSEFPGAKQVASTHLTRLSNLLSEASKGRYDKETAITFRDAARNSIGSDMPAKSLELKHTIKLIQELTSEINEIENEIKIIMDEINSPILSIPGINYRMGAMIIAEIGDFNRFDSPDKILAYAGFSPSTYQSGQLEAAYSHMEKRGSRYLRYALYNAAKYVCHWDPTFAEYLAKKRSEGKHYNVALSHAVKKLVRVIYHLEKTNQQYIKAA

SEQ ID NO: 402522 - protein, 348 aa, unidentified
MNAGYAGQRQFVGVDLARRRSVITRMDTEGTVLECVQIDNSPAALVAEVGKAGPAAPVAVEATYGWYWAVEALQGAGFEVHLAHPKGNASMHNRRVKTDARDATELARLLRMGDLAESWIAPPVVRGRRELVRHRHKLVKSRASLKASVHAVLGKCGVLLPLNDIFGPVGLAALAAVELPQPYASRVASQCRLITAISTEVDLVETAIAAEFKDDPGYRNLLSINGIGPVFASVFVAEIGDVTRFPTPQALASWAGLTPRHYASDDKTRRGHITKQGSRLLRWAATEASQRIREPYLADKRRLITDRRGRTAANISKVAAGRRLLHVVYYTLRDGHARCLDQPSRQPA

SEQ ID NO: 402523 - protein, 401 aa, unidentified
MYYAGIDISKRSLSVSVLDDAGEMIRSPVSLPVNSKGLSRLADIFTRISKNKNEIQVGMEATGNLWENVYSFLEEKEYTQALINPHQSKKFHELARRKAKTDKVDSVVIAGLLRSGETIGSYVPEDDFQALRELVRLRHSLQKTKKNYQRRASSLLGVIFPEYAQLVKNPFREVSCMILAKYPTAIHMREAKSSDLVKISRKIQGNNYSGELASKLIKAAKESIYSGKAYRVRGMNLRILLEEIKSLKEKIERIDKEIDDILSSKEPPSPEGRLLEIPGVGPKTVAAFRGEVGDVNRFSSGTELIGFIGWHPKISESGEKKSRHPKMSKKGSPTLRAALYMASVSCIKHNRELRSLYLKKISQGKEAKQALVCVGKKLACIMYSMLKNGSSYDPQRVFVQT

SEQ ID NO: 402524 - protein, 400 aa, unidentified
MISVGIDVSKEESTVCILKPYGEIVSRPFEVCHVEKELSELATMLQRLDDEVRVIMEATGIYHLPVLSYLKEKGFFVAVINPFEMKEYRCQGLRRVKTDKQDAITISNYGIEHWYRLKDYEAEESVYAELKLLGRQYRHYMRMRVESVLELTHLLDYTMPGIKKLLKGWNETSGKDKLSDFAEEYWHYDNITRQSEEEFVDSYLEWAERKGYHRRQDKAIKIYALAKEGIPTVSSSTPSTKMLVQEAVRVLREVDNTLMTILTQMQTLAKSLPEYSVVRAMGGVGNVLAPKLIAEIGDVRRFHSGKALIAHAGIDAPPYQSGQFTGTERKIYKRGSSSLRKIGYEVMRCLKTHKAPEDASVYEFILKKEKEGKSKRAAKIAGLNKFLRIYYARVMEVYEQ

SEQ ID NO: 402525 - protein, 404 aa, unidentified
MSVVAALVSSSTVVVAVDVGKNCVALSVTDAGRHRLFGPLEFAMTRPALEQVARIGAVLPADSAIKVGVEAAGHYHLPMIAGSAWPAGWEVLELNPAHVGEQRRVAGRRRVKTDAIDLEAITDLILAGRGVPVTAREEVLSELTAWTAHRARRVRTRTATKNQLLGQLDRSFPGLTLALPDVLGTKVGRLVAAEFADPARLSAMGVTRFIRFAAHRELRVTRSVAERLVTAARDALPTRDADIARRVLTADLALFTDLDQQITQGEDELAELVPSSPFRTLTSVPGWGVIRTANYGAAVGDPTRWPGPSQLYRAAGLSPMQYESAGHRRDGGISREGSVELRRALIDLGIGLWHSDQSARAYAAGLKARGKHGGIIACALAHRANRIAYALTRDRACYDATRWA

SEQ ID NO: 402526 - protein, 387 aa, unidentified
MPQPNDLSRSLVALDQDSTIIVVVEMSQSSWLVAGMLPGIERQPRKKLEPSPERLLALLHRWRDEAIGAGKEITRIALAFEAGRDGFWLARWLRARGVEAHVIHPSSVAVSREHRRAKTDRLDTELLKRGFLGWLRGERGHCTMARIPTIAEEDAKRPNRERECLVRERTRIVNRMKGTLARLGIRNFKPTLRKAAERVATLHTPEGSALPPNVSAELQRDMARLEFVVSQIKEIEGARQKRLEQEPETEPHAMVRLLARVVGIGIETADMLVNEVLSRPMRDRKAVARYAGLTGSPDESGAKRREQGLAKAGNARVRRGMIQLAWRFLRFQQNSALARWYQARTADHRAATRKTMIVALARKLLIALWRFVTTGETLEGVVLRPAG

SEQ ID NO: 402527 - protein, 399 aa, unidentified
MRKSSPLELRVGVDVGCHSHNVAIGLSNGEILEEFSIKHEPEGFRQFFACIEKHEKKHSLPVSVAMEGYNGYARPLDTLVRARNYRLFNINNLKLARFKEIFPGAAKTDEIDARKALELFQLRDYLPVAKDVLQEVRATPKENEVLKRLSRRRRRLVNERVRVLNNFQADLQSVCPGLLEITGDAGNLWFLRFITSVDSLPKLARMREGTIRKLPGIGAKYTGIIITWQKQAHFSHEVEWVSDMILEDAWRILELHESIDSLDRRMAAVAIDSEIAQNLSTIPGFGSTTIAELAGEIGTVERFKDEQSLALYLGMTNLDNSSGKKKGSKPPKQVNERAKAAMMTAVDRHRKQVPQSQTYYRKKRAEGKKHNQAVRALGRHLCRVIFKMLKENRGYLLPQ

SEQ ID NO: 402528 - protein, 296 aa, unidentified
MDSEKYIGLDVHQATIVVAVMDSTGKLVMESILETEAATILQFFAGLRGTLSVTFEEGTWSAWLYDLLNPHVDKLVVCNPRKNALLKDGNKSDRIDARKLAELLRGNQLKPVYHGETGIRMLRELSRSYLTIVKDLSRVMNRLKAVYRSWAIPCAGRDVCYTRNREQWLAKIREAGVRRRAERLYEQLDMLQHLRQQARRELLAESRKHAITAKLRQIPYLGPIRSALVVALIQTPHRFRTKRQLWAYSGLALETRISAEYRLVEGQVRRSKKLLCIRGLNKDHNHDLKGLFKGVI

SEQ ID NO: 402529 - protein, 368 aa, unidentified
MMIILAIDLGKFNSMCCFYNTDTNEYRFQAAATTPHYLTSVFKNHKIDLVVMEACGPSGWISDLCQELGLKTLVCSTNDAAWLWKNVKRKTDKDDSLKLARMAMMGQLTPVHVPKHQVREHRSLIKYRKKLVGRINQIKNSIRGLFAGRGIEIDKGQRAWRTGRELIDSHRKPLAECSMEELWRGQLDLELTQLDSLAQQLADVERRLDLIAKDDERIQRVQTIPGVGRRTAEAIVTALDDVDRFDNARQVSAYIGLVPRQYQSGETDRNGRITKRGSRLLRTLLLECAWVSLQYNDWSRATYDRIHGGQQTRKKKAAIALARKIAVVAWSMLKHKTDWDPARQGFPAAATIEESPPEKTEIRAAGIA

SEQ ID NO: 402530 - protein, 374 aa, unidentified
MDSVTRSAGLIYLGMDTSKDKIAVGILRADTASPDVEMITNDEVSIRRLIKGFPKPKQLRACYEAGPLGFELHRLLASMGVACEVIAPSLIPTAPGDRVKTDRRDCRRLARLLRAGELVAIRVPTLAEEAVRDLCRARADLVDDRTRTRHRLSKFLLRHDRIWRGGEAWTGKHEQWMLGQRFDEAALTSTYGHYRAMLIARDAELAAIESDLAYWFDHGPFAEAVARLAAYRGVAHLGALTIASEVGDWRRFPTASAFMGFTGLVPSEYSSGSTVHRGHITKSGNAHLRTQLVESAWQYQHRPGIGITIARRHKDLPPATVARSWAAQQRLCARFRRLNARKTSRNTVVVAIARELAGFLWAEMTTDEPSLRKA

SEQ ID NO: 402531 - protein, 346 aa, unidentified
MKYYAGLDVAMKETFLCVVNEEGKRMFESKAPTDAQAIYEELAKSEFKLEKIGLETGSLSKFLTKGLQDLGLNAICIDARKMAAILAVTVNKTDKNDARGIADAMRCNHYKEVNLRNCEDSAIGIFLSSRSTLVESRGRFKNTVRGLLKTYGIRLGEVSHDNFSKTVRDVLVDVPLETKCGIEGMIMSYEVMNEEIKKMDKRLNEMCKKDKEVQRLMTIPGVGMVVAMTYRADMGDPTRFEKSESVGAYYGMTPRQYSSGETVKLGRISKCGSKEVRTLLTEAAIVMLTRSKTWSPLKIWGLKIMKKHGFKKAALAVGRKLAVIMHRMLVTGESFKFSNKTMKAAA

SEQ ID NO: 402532 - protein, 346 aa, unidentified
MSYSTTVGVDLAKNVIQISVVSSRGKELSNRSLTRKKFAEFLGKQKPSLVAFESCASAHYWARVAQRHGHEARIIPAKAVAPFRQGHKTDSNDALAVAEAARRPNIKEAPMKTVEQQGLQAIHRSRELLNQECTALSNHLRGLLMEFGIVIPKGFASLLKAVPEILEDGENELPDLYRPTLHRMYSRLLELREDIEAMTKEVDRLAKAHPICSRLMALEGIGPIGALLLYATMGSGSAFSGSREFAAYLGLAPKQYSSGGKTNIVGLSKKIGNSRLRSVLILGARAYTYKLKEPKSLKDKWLKANIERNGECRAAIALANKNVRTAWAMVTQGTEYQRRVQLEMAA

SEQ ID NO: 402533 - protein, 355 aa, unidentified
MNSEKYIGLDVHQATISVAVMDSQGKIIMESVLETKASTLLEFIAGLRGSLFVTFEEGTWAAWLYDLLKPHVTEVLVCNPRKIALVKQGNKSDKIDARKLANRLRLHDLKPVYHGETGVRMLRELARSYLTVVKDLSRVMNRLKALYRSWAIPCAGRDVYYKRHRSQWLEKIPEAGTRWRAEQLYQQLDMLQHLRQQARRELLAESRKHAITAKLRQIPSLGPIRSALAVALIQTPHRFRSKRQLWTYSGLGLETRDSGEYHYVNGQVRRRKKQATIRGLNKDYNHDLKGLFKGAATRASVQPGPLQEFYQRSLAKGIKPTMVRLTLARKIAAITLTLWKKGEDFDINKLNSQAA

SEQ ID NO: 402534 - protein, 435 aa, unidentified
MKSRAYRAVDVNRVATTGWLQERGETAVVAGLDVGKEYVFCTLRWGANDFDRPWRVRNPSEVAQLAALLGEVERGRRLIVALEPTGTYGDPLRQALERAQLTVHRVSPKQASDYAEVFDGVPSQHDGKDAAVVAELAAQGKCWPWPLARPTEQEQELAYHVDWLDGQRRSMMQWCGRVEALLSRHWPEATRIMPLGRATLLRCLTTYGGPGGLAAAAGPVDGPAAADMLARLQGWGRAYLSTEKAQALIDSARHTAGVPTGPWDDERLRRYACEILQSQQQMRASRQRMRNLAQGHAGIQAMGEVVGVPTACVLWVELGDPKMYHCAAAYRKAMGLNLAERSSGQWQGKLKISKRGSSRVRRWLYLAALRWLQREPVRSWYTQQKARRRGEGKPAVIGVMRKLSCALQNVSQGKPFDAGALFQSCVSEVSGQAER

SEQ ID NO: 402535 - protein, 482 aa, unidentified
MAAKKKDSKTGTDGKSAGMAAERGGDGAEVAEDRVQVVERAAAIDVAKGSGMVCTRVPGSRADRRRQKVWRVGATCGEVAALMDHLRCEGIQRLVLESTSDYWRIWYYLAEAAGLEVWLVNARDVRHLPGRGKSDRLDCVWHCKLNERGMLRRSFVPPEPVRDLRALTRTRSRLAQDQARHQARVEKILEDALLKISVVISDLFGASGRRFLDALIAGERSPKALAELGDTRLKATRRELEDALTGRFRDIHALEISTHLRLIDAINAEIARLDEAAGQQLAKVPRTAPACTACGLAGGGHAPGCGSEGTAPLSLAERLDEITGIGERNAQVIIAELGTDPSQFPTPGHAAAWARLTPRSRQSGETAKPGRTGKGNRYLRGGLGQAAMTAARTDTRLGAMYRRIARKRGKQKAIVAVSRVICEIAWILICDPAARFEELGPRYYSPRSPARQTRDKIREIERLNPGKKVILAPIGPGAGAAA

SEQ ID NO: 402536 - protein, 408 aa, unidentified
MRLFVGDDWAEDHHDVEVMDAAGRVLATARLPEGVAGMARLHELTGQCLGEDAEGAGVLIGIETDRGPWVAALVAAGYTVYAVNPLQASRYRERHGVSGAKSDRGDSHMLADMVRTDSHQLRPVAGDSADAGGVKVLARTHKTLIWERTRQVQRLRHQLREYFPAALAAFEDLDAPDALELLGKAPDPARAARLTRAQVSAALRRARRHHIADKTDAILAALRGEQLSQPPALTAAYAATARSLIAVITTLNEQVKTLQGQVEDHFGRHPDAEIYRSQPGMGAIVGARVLAEFGDDPHRYAGAKARKNYAATSPITRASGKKKLVAARYIHNDRLIDALMTQAFSALKASPGARAFYDDLRAHGIEHNDALRRLANRLVGILHGCLKTRTLYDEATAWSHRTKIEPAA

SEQ ID NO: 402537 - protein, 349 aa, unidentified
MSETTKHFVGVDLHKTILQICVLDAGGELVRERRFRGKSLEDGLAAVEWLAQWKDGGRFCVEALGMNRWFVNACSDAGLDVVVVDATKMGLRMLGKKTDRRDAYELARRLRLGDVDRNAATYFADEKEFAGRKLVRTRHAMTQLRQELVNQIRALLASYRVTAPPNQLYRKKALQNLRETSLPTEDLTLCLQASVSSLEALQASIDELSKRIEARTQDEKASAVLMELPSIGPLTATTLIVELGDLRRFRNAKAVASYAGLAPRVSNSADKSHHGGITKRGNRELRWILSQWAVRLLSFDSIAKEWAKPLLLRMHRNKVRLALARRLLIGVYVMLTRGDAFSLERCLAR

SEQ ID NO: 402538 - protein, 427 aa, unidentified
MAKVEHTSDARVLVGIDISKHRHEVLIAVPGKTRRRRLTITNSTEDFTRLIAILREYGLPVRIGFEATGNYHRVLMYHLGVAGFDLKLVSSVALARTREALHNSWDKNDPKDAQVILHMLQIGAVQIFQDPMVVGTNDIQELSKTHDAVSRSKTELWHRILTHYLPLYFPEADRFHRSSRTDWFLAFLEMFPSPHMISALTKEDFTKAAWEVVGRKVEKSLMLSDIYETAKVSAGLPVSPDSDAIRMFRLMLAEGRSLIRQRNTIEDRAVELLGERADYQLLRTIPGIGPINALTIVAETGDLRRFHHHRQFLKFCGMDLATVQSGMFRSRSKISKYGNARLRRTLWLAGQTAVLKKANSFRDKFERYIAQDRHNPDLRRKAYTAIAAKMARTIHAVIKSGEAYRPFFEGTSPGGRTPLCRAVEAGS

SEQ ID NO: 402539 - protein, 302 aa, unidentified
MASGWFHPIPEPPRCHRRLCARLSAEKQIIRIAVEPTGGYEKPLVKALRGAGLPVEMVHTSRFAAYRTLIGAKAKSDTSDARLLAAYAAAPEEVRGRKAEYVVLPQDAVREQLAELAARRDQLKHMIHAETCRLCTVRSQDIRDEIGTHLEGLRQAERKTHVAMMQLVRERTELRNAKRLLRSIKSIGDKTALASLALVPELGLISNKAASALIGVAPFVHRSGTMNAPAHIHGGRAAVRNAFYMAAVTASRHNPVLAPFYDRLIAAGKPPKVALVAVMRRLVVYANAVLRSGQSWKAAQTP

SEQ ID NO: 402540 - protein, 388 aa, unidentified
MRATAKGDWDVKTIGAERPDTTGVAVILGVDTHLDFHVAVAVDHLGRRLGELSVPTTAKGYEKLLCWAESFGPVGCAGIEGTSSYGAGLARHFKARGIEVLEVERPKHRRPSSRRNLQKKSDPSDAERAARAVLAGDASGVPKSGDGRVEMIRALRAARRSAIKSRTQAANQLQALRVTAPERLRRRLRGLSTKELVRVAARFRLGEDPVDVPSATKFALRSVARRYEVLSEEISELEAHLERLVAQAAPELVTLAGIGTDNAATLLIVAGDNPLRLKSEASFANLCGVAPIEASSGKVVRHRLNRGGNREANRALYMICLARMRRDSRTQEYVARRTAEGKSKREIIRCLKRYVAREVYRVLISCGTCSSPTGSQDGANISSGSSAA

SEQ ID NO: 402541 - protein, 351 aa, unidentified
MPRTSSVHAVTTIGMDMGKNTLHMIGLDSRGAIVLREKVSRGRITSRLANLPCCLIGIEAGLATHYVARELAALGHDVKQVPPTYAKPFRQGHKNDFRDAHSVAEAVQRPTTRFVPAKTDEQLDLQALHRVRSRLVSERTAVINQIRGFLLEHGIIVRQGLRFLRQALPDILAKRTDVLSPRMVRIVADLAGDWRQLDERIEPVTDEIETLAKSDDGCRRVMTVPGIGPIISSAMVAAIGNGAAFARGRDFSAWIGLVPKQMSTGDRTILGRITKRGNRYLRTLFVQAARVILLRPASWPKHSFGVWLARAAQRLHRNVLAAALANKLARIAWTVLAQGRGYEARITKPAV

SEQ ID NO: 402542 - protein, 412 aa, unidentified
MEVLYACCCGIDVHAKMLVACLLKAGKKEVRTFSTMTEDLLRLLDWLTQAGCTHVAIESTGVYWRPVFNILEGSLEVILTNARDAKGYKARKTDVIDAEWLADLLRHGLLKPSFIPPLPIRELRDLTRYRESLVREQTALANRIQKLIESANVKLGQVASDALGASGKVMLRALAAGETDAEQLSHLARGILKRKQPQLQQALEGRFTQAQRWILAELLDQYAQVEAALQRAEARIKQEVENSADPFVPEAVPLLDTIPGIGETVAQIIVAEIGVDMARFPTAHDLASWAGMCPGNNESAGKRKSGKTTKGSRYLRAALVQAAWAASHQKETYLAAQYKRLVKRMGKKKALVAVGHSILVIAYHVVQKRTPYQDLGGDYFARRNVDKQRKRLIRQLEGLGLKVTVEEVKEAA

SEQ ID NO: 402543 - protein, 344 aa, unidentified
MQITTIGLDLAKSIFQVHGVDATGQVVVRKSLRRSQMLPFFAKLPSCLIGIEACGTSHHWARELIKLGHEVRLMPPAYVKPYVKRGKTDAADAEAVCEAVTRPTMRFVPVKSPEQQAALSMHRTRDLLVKQRTQLINMIRGLLAEFGVDIPKGLERALLMARQIVDGRAPDVPIEAAKIVGTLSRQALDTHVRLREIDRDLLVWQRGNDVARRLMTIPGIGPVGATALAASVTDPHQFRSGRQFAAWVGLTPLQKSSGGKERLGRISKMGDKYLRKLLIVGMTSLVRRARHNRATIDPRLADLLARKPTRVATVAMANKTARIIWAIMAHGETYHAGHRPALAA

SEQ ID NO: 402544 - protein, 345 aa, unidentified
MKISTIGIDLAKELFQVHAVDDHGKVVQKKKLKRKEMTTYFANLAPCLVGMEACASSHYWARKLQSMGHTVKLMAPQFVKPYVKTNKNDAADAEAICEAVTRPSMRFVGIKNVSQQTVLSLHRVRRLLVEDRTAQANQIRGLLAEFGVVLPQGIKVLRQRINDILEDAENELTPEMRELITMMSERIKDIDEKVNELELKIRQSSKRNAMIAEIEAIPGVGPLTASAVVATIGDFKEFKSGRELAAFLGVVPRQHSSGGKQNLLGISKRGDGYLRTLLIHGARSVIRFAETKREKNLWLVSLIGRRNKNIAMVALANKNIRIIWAMMTKGVKFDPAHVGQAPLTA

SEQ ID NO: 402545 - protein, 427 aa, unidentified
MEAYYIAGIDVHKKMLAVVIAAVQPGEWEFQRRRFGTTPAQLRELAGGLREQGVSEAVMESTAQYWRPVWAALQGQLRLHLAHAHSNGARRGRKSDFRDAERLTHRLVAGDLVLSFVPDAEQQSWRDLTRTRYQLVVERGRVQSQVENLLERASIKLSSVITDLFGSSGRRILQALSEEAGAPWHSQNLARLAHPSLRASHEQLAEALDGHWSSEHRLLLQLHLERLSLLDRQIETLQQQMAESMKAHQAAVARLCQVPGIRTDAALQLLAEVGPTAAAFPSASHLASWAGLCPGQQESAGQSYSKRPAQGNWQMKRVFHQVAHAAALKKGSFFQHLYRRLIVRMGPQKAIGALANRLCRLIWKILHEGVHYVAKGTAPLDPRAIRRRQQKVAAEFRKLGYNVQYVPPTARHHPGNLAVGFRVFDGA

SEQ ID NO: 402546 - protein, 419 aa, unidentified
MEIISQRVAGLDVHKKTVMAAVRVPDPEGGERLEIVKQFSTFYCDLICLRKWLNQHGVTDVAMEATGIYWVPVWRVLEQGDFEELILANPGHIKAVAGRKTDVKDACWIAQLLECGLVPPSFVPPREIFELRQLTRYRRKTIEGRSREILRVQKLLEDAGIKLDSVISNVMGVSGREMLDALIAGERDVDVLSEMAHGKMRNKREDLKLALEGLFDSHHHAKLLQTHLDCIDAYSATVERLNAEIVAKTCDYSKEIQLLMTITGIGRKTAEIIIAEIGIDMSRFRTANHLASWAGLCPGNHESAGKQKSGRARTGCPALRSALVESAWAAARVQDSYFSAQFRRFCRRFGKKSEKKAAFAVAHSLLVTIWHVLNYGVEFEDLGANHFNNVVDNKEVLKRRKIKELESLGYVVTCSEAAA

SEQ ID NO: 402547 - protein, 343 aa, unidentified
MTTIDYIGFDIHKKTISFCAKAQDGTILEEGTIPALRNKLLAWAKARPRPWMGAMEATLFTGWIYDLLKALAQELKVAHPPMLKAIAAAKKKNDKVDARMIADLLRCNLLPECYMAPVAIRDLRRMLRYRNLVVRQTTRMKNRMAGLLMETGVAYNKERLHGKAYFSELLGSLQEVPDSVVELLQLSRGQVEFFVAIQRRLLKGLREHPELSQRVMRLQSIPGVGEILALSWALEVGEKDRLRSIARAVSYCGLTSAQHSSAGKEQRGPISKQRNRHLQTVLIEAAKLAPRYNSQLAAVHERELQRGNRNRATLAVARKLVAYLMAVDKSGQPFQMRDKEAAA

SEQ ID NO: 402548 - protein, 353 aa, unidentified
MLADQADHVLGVDTHRDSHSAAILAADTAIVQGQTTTAANERGYRRLLRFARENAPGRRAWAIEGTGSYGAGLTVFLHREGEIVLEVDRPRRPARRDRAKSDELDAIRAAKEALTREHLARPRQRGEREALRVLLATRESAVKSKRAAITLMKGLLVSAAPSLREGLRGLATREQLDRCARLRISPTQTSEQRATIIAIRASARRATALREEALQLEREIEPIVERVAPSLLTEMGVGPIVAAQILCAYSHTGRIRSEAAFAALAGVAPIPASSGQTVRHRLNRSGDRQLNRALHTIVLCRMRDDPQTRAYTARRQAEGRSTREIKRCLKRYTARHLYRLLNNTLPNPANSET

SEQ ID NO: 402549 - protein, 421 aa, unidentified
MKKRTYRRKPVNEFEPSRIQPETFGSRLVFAIDIAKVDMVAAIADGHGQVLDTVDWKAPSQNATVIDLLRRLRDRGFTVEAVMEASGTYGDVLRQMLEDNGFPVFRVSGKKTYDARELYDGVPSMHDAKAAAILARLHAEGLSAQIQAEPEDKRSLRAAIAIADLHQRRYLELVHKLESWLARYWPELPDLLALTSASLMALLARIGGPADVAAAPDEARRLLNGISHRLLEDETVEAVVVSATTSLGVRPLPLEREALMAIAAEAHRSLRAFKEAKLTVERLSADTPARALAPVVGSTTAAVIFTEVGDPNAFRSVAGFVKAMGLNLREKSSGKTKGQLKLTKRGPARVRQYLWLAVHRWVQRDPIARAWYQSKKARDGGRASRAVVAMMRKLAKALFHVGRGAEFDSTKLFDIKRLGFA

SEQ ID NO: 402550 - protein, 386 aa, unidentified
MLAELVGKLKEKLDPKKVGATSAGEKHQRGELRPNLDRLTVGVDLGDQESHYCILGLEGETLAEGQLRTTEEDFAAFFQGLNAARVVEEVGTHSAWVQEVISGCGHEVLVANPRLMDGSKRRKRKNDRIDANKLARLGRVDPESLYPIQHRSREVRQDLVMLRARDALVAARTEIINTTRGLVKSMGTRLPKCSSRSFAQKGEEAVAVEMREALLPLVRLAATLSADIKEYDKKIEELGREKYGHTALLRQVKGVGPITALAFVLTLESRQRFVKSRDVGPYLGLVPKQEDSGESQPQLGISKAGDTMVRKLLVGSAQYILGPFGPDTDLRRYGLRLCERGGKNAKKRAAVAVARKLAVLLHRLWVSGEVYEPLHNAISAPIAAAA

SEQ ID NO: 402551 - protein, 469 aa, unidentified
MQRHFPQLKMEQAVAQRSPAPSLKPSKSRAAALSITHPNAAGIDIGNASHFVAVPPDRDDEPVREFASFTADLNAMADWLKACGIDTIAMESTGVYWIPVFELLESRGFTVMLINARHVRNVSGRKSDVLDCQWIQQLMTYGLLRGAFRPADQVCVLRSLWRQRGMLLRSQARHVQHMQKALTQMNVQLANVISDVVGVTGQKILRAIVAGERDGHALAGMKDARIRASVDEIAKSLQGTWRAEHLFALRQAVHAFDFIGTQLAECDREIEQQLQRLQTCEGEPARGKRRGRTRNAPKFDLRSQLFRMCGVDLTRIDGIDVTTALAVISEIGADMSRFPSAAHFASWLGLCPGTRITGGKVMSGKTGRCANRAAQALRLAATALRTSQSALGAYFRRMCSRMDKPKAITAVAHKLARLIHAMLTKGEEYTDQGQDYYEERYRERVLRQLSQRAQKLGMKLVATEQPQPV

SEQ ID NO: 402552 - protein, 364 aa, unidentified
MDEVRRFVGIDVAKAALDVFIGSAGTAFSVANDEVGVRELLRQMKPADFVILEATGGLETPVASALAAAGIAVAIVNPRQVRDFARATGKLAKTDRLDAEVLARFGEAVRPEARPLADEQAQALEALVTRRRQLVEMLTAEKNRRARAPKVLHRSIDEHIRWLEKRLSGFDDELGELIRNTPLWRERDELLRSVPGVGKVLSSTLLAQLPELGMLNRKQIAALAGLAPFNRDSGKLRGSRCIWGGRAQVRRVLYMATVAGVRSNPTIRTFYLRLRTNGKHAKPALIACMRKFLVILNAMLHDKTRIRDYLHSRGIPDAIIDRYFLGWNGSRITIPVFNEKRVCAFFRLAKDPDDASDASKRLSP

SEQ ID NO: 402553 - protein, 341 aa, unidentified
MKQEMHVLGIDIAKRMFHAVGMDNKGNVVYRKRLSRHDLIPFIAKLPPVLIGLEACGGAHYWARRFCAYGHEVKLMAPQFVKPYVKANKNDMRDAEAIAEAVTRPTMRFVPAKDVDQQDIQALHRVRERLMGERTALVNEVHGLMHAYGIVIPKGVAKFRQAVVEKLESEQDKLTPLSQEMFWKLVEEFVALEKQLAYYQEKLEALATTHPECQRLMTIPGIGPLSATALVAAVSDASAFKNGRQFAAWLGLVPRQHSTGGKERLLGISKRGDSYLRKLLIHGARVTLRWVKLKTDRRSQWRRQLLERRGKNRTAVAVANKNARIVWALLTSHQDYQPVQG

SEQ ID NO: 402554 - protein, 342 aa, unidentified
MTKYAGLDVSLEETAICIVDPEGRIVCEASVATEIEAIDSYLRAQGVLERVGLEAGPLSSWLYAGLAAAGWPAVCIETRRLRAVTRTMPVKSDRKDAAAIAQTMRTGWFQAVHVKSPASQRLRVLLRYRRLLQGKRLDLENELRGTLKAFGHKLGPLSPRRFAARVQELVAGDAFLASLAAPMLAARAQLLASFGELHAQLLAIVKEDDVCRRLMTVPGVGAVTALAFKTGVDDPARFTHSADVGPHFGLTPRRYQSGETERSGRISKAGDALVRSLLFEAAMALLYRVRAASHLKSWARKLAKRAGGRKAATALARKLAIILHRLWVDGTTFQPHHPRAAA

SEQ ID NO: 402555 - protein, 339 aa, unidentified
MSILYVGIDLAKNVFAIHGVDEHGKPALVRPSVPRARLHQLVAALPPCTVGMEACSGAHHWARLFAQHGHTVRLMAPKFVSPYRMSGKRGKNDAADAQAICEAVQRPHMRFVPVKSQDEQARLCVHRVRQGLVEQRTATINRIRGLLSEFGIVLPQKAAAVRREAAAHLEDLPGWANTAVGDSLSELHRLDERIAEYDRHVVHMAREDARSRALMQLPGIGSTTASALVSTIGNARDFKNGRQLAAWLGLVPGQYSSGGKTRLGSITKAGDGYLRTLLVLGAKAVLAAARNKDDRLSRWAMALEVRRGYWKAVIAIAAKNARMAWAVLAKGENFKLLEA

SEQ ID NO: 402556 - protein, 428 aa, unidentified
MDFTQNNRLAQINEQTLIIGVDVAKRKHVARAIDDRGRDLAKRLVFTNSLQGFSDLVDWAGSLSEKYSRPNIIIGMEPTGHYWLNLAYHMKAKSIRAVVVNPMKVKRFKEMDDDSPTKNDTKDAKVIAQIVRDGRFHEPTLPEDVYAELREGMKLYDIIQEDMSSIKAQMHNALDRYFPEFLNVFKDWTGKAAFYLLEKGYLPEDIRKTSEEDLLLEVKKAAKRGVGIKRIRDLKQAAKDSIGLTVGLRMARQEIRYLIDQYKAFEERLIALEAQLEEFVLHIPGADQMIAIKGVSAITVAGFFAEVGDLSNYQDPRQIIKLAGFNLKMNQSGLFKGQTTITKRGRKRLRSLLYQVARPLSLHNEGFKQLHHYYRRRSDNPLTGKQSFIALSRKLIKIFYVLGTRKCTFSEERMIRDIPMISTLQEVA

SEQ ID NO: 402557 - protein, 296 aa, unidentified
MELYAGIDLHSNNSVVTVLDEQDRTVFAKRLANDLTAIIAALRSCAGTVRGVAVESTYNWYWLVDGLQDAGFTVHLVNTAAVKQYDGLKHGGDFSDARHLAHLLRLGILPTGYIYPREQRAVRDLLRKRSQLVRQRSTQILSIGNLVARNLGTHAGGNEIKRWQREHVDAMPLLDEQKQALMANLAVMRCLDSQIDALERSILAKAKLREDYQALKTVSGIGEVLALTIALETGEVGRFDSPGHFASYARTVDSRRESNGKKKGEGNAKCGNKHLAWAFIEAAHFAVRYDAAIQCW

SEQ ID NO: 402558 - protein, 405 aa, unidentified
MNAVGIDVSKGRSTVTIRQPGDVVVLPPRDFRHTQSSINDLIAAIKELDGETKVCMEHTGRYYEPVASWLSSAGIFVSAVNPCLIKDFGDESLRAPKTDKADAKKIARFALDRWTKLRQYSRMDELRNQLKTMNRQFGFYMDQKTAMKNNLIALLDQTFPGANDFFDSPARSDGSQKWVDFVYTYWHVDCVRGKSLDAFTEHYRNWCKRKEYNFSAEKAETIYHAASDLIAVFPKDDNTKLLIRQAVAMLNTASETVETLRAKMNQTASLLPEYPVVMEMNGVGPTLGPQLIAEIGDVTRFEHRGSLTAYAGVDPRPNESGDYKRQSNPTTKKGSPYLRKTLFQIMDGLIKRSPVDDPVYAFMDKKRAEGKPYHVYMTAGANKFLRIYYGRVNAFLAPAKVTEEP

SEQ ID NO: 402559 - protein, 339 aa, unidentified
MTTLVTIGLDLAKTVFQVHGITAEGKVLVRRQLRRGEVLKFFQGVPSCLVGIEACGTAHYWAREIAALGHTVKLMPPAYVKPYVKRGKTDAADAEAICEAVTRPTMRFVAIKTTDQQAALMLHKTRDLLVRQRTMLVNGLRGHLAEFGIIAAKGLGGVKTIIEALHEAQDQLPELAQLALHGIVEQLRHLGTEIERLEARILAWHRASDVSRRLATIPGIGPITASAIAAAVPDGTLFRSGRQFAAWLGLTPKAHSSGGKERQVGISKQGDGYLRRLLVVGATAVMRLARKDNASRSWATKLSERKPAKLATVALANKTARIAWAVMTRGKTYEAPSAA

SEQ ID NO: 402560 - protein, 484 aa, unidentified
MPERLAKTSNNHTLRVEAEACAKLASLPVQQTHAAGIDVGDATHWVCVDADGGDAAVREFPAHTPGLRQLVAWLGQCGVTTVALEATGAYGHVLFLTLLEAGFHVVTTAPTFTRQIKGRPKTDRRDCQWIQRLHRHGLLPSIFQPDEVTQTLRDLVRQRANHVRLSGQHIQRMQKALELMNVKLTKVLGDVTGVTGLKILRAIVAGERDPRVLAKLRDRRCKRTVEEIATALDGRYRLEHVTELKLCLRMWDQYQVVIMELDHVIAKQLHAMRKQTTLLPLPPKPRVRGRKPHDPRFDVRTALYYLCGIDLTAIEGIDEIHALTLISELGTDFTKWPTVKHFASWLGLCPNWKKTGGKVQSSKTRKGKNRAASALRLAAWSLVRSKSYLGAYLRRQRARLGAPKAITATAHKLARILYNLMRHGVAYMRKEEAAYAEQVRERLEKQLHRRARELGYELKPILHEVVMSDGEVVMVKADGEIVTA

SEQ ID NO: 402561 - protein, 343 aa, unidentified
MDHFAGLDVSVKETSVCIVDDTGRIVREVKVASEPEALLAVLTNPACTFKRIGLEAGPLSQWLFSAIAEAGLPVICVETRHMRAVLKAQINKTDRNDARGIAQMMRVGLYRPVHVKTLRSQKQRMLLTHRKLMQSKAIAIENDLRATLRNFGLKVGVVGTVKFEARIKELVENLPDLVVLVEPLLIVRRVLREQIGILHRRLLAIVRDDDVCRRLMTVPGVGPVVALTYRATVDVPSRFRNSKAVGAAFGLTPSKHQSGESNRTGGISRCGDEMMRMMLYEAAHIMLVRSAKWSWLKAWAMKIARHRGLKKAIVALARRLAVIMHRIWVDGTEFRWTREVAAA

SEQ ID NO: 402562 - protein, 428 aa, unidentified
MKNRNNQKLEAITPKTLIVGVDIAKETQWARFVDYRGLELGKALKFQNNKKGFENILASIEAICKNKRFDNVLVGMEPTGHYWKPLANYLIMHGVTVVMVNPYHTKRAKELDDNSQTKNDKKDALTIAKLVRDGRYYEVYMPQDIYAELRVLSNSRVSLMKRYNALKNTITAVMDEYFPEIKTVFKNPLNGKAAMQILKSCPFPSLILELGVEGVLAEIKKAVKKTVGRKKAQQLVETAKNSIGVGYGIASAKLKLGLMIEELELLTKQLEHLETAMEVALAETGFGEIILGIPGIGVVTAASFLGEIGDPLRFDHPRQISKMAGYNLIEDSSGKNKSGTVISKRGRKNLRNVLYQMAMTMVAVNNEMKELYRYLKTRENNPLKKKQALVVISKKIITVIYNLVKKQTEYKAELVLGEYRKNQMKKAA

SEQ ID NO: 402563 - protein, 316 aa, unidentified
MAMRVSKSVIGVDVAKIELVTYQADSDLLALIPNEKPAIKRWLKTLPRPAALAVEATNIYHVDLVELAYQAGFDVYIIDGFQLSNYRKGVGGRSKTDASDARLLARFLKNEGECLRPWTPPPAVYGKLQSLLRRRASLIQAKTSLTQSWANDASLKASFAAFLKSIERLDLLVKKKLKDALREAGLLEQVARCQAVEGIGFLTATALVMAYSRGDFNSSDSYIAFLGMDLRVTDSGQKNGRRSLTKRGCSEIRRLLHNAAMSASRTSAWKEFYNHHRGRGKATTEVLVMLARKLARVAFALMKNQSEYQPRGCVMA

SEQ ID NO: 402564 - protein, 387 aa, unidentified
MANPDAAAQDLTATHFDVATLCVSLELSPAKWLVTSLSPGSNKLSKHTITGGDSNALLDLLACLSGKAERRVGTPIKIVVIQEAGLDGFWLHRLLVAHGIESHVVEAASIAVPRRHRRSKTDRIDGEMQLRTLMAFKRGEPRVCSMVVAPTPEEEDQRRLSRERRTLVKERTQHVNRIKGLLAAQGIQGYQPNRRDGRQSLEALQTGDGRPLPAQLEAEILRELDRLELVKRQIAEVEAARDAQLRSAQGAAKSPGARLMQLKSIGPEFASVLWLEGFYRSFNNRRQLAAYAGLAPSPWRSGKIDRDQGIAKSGNPRLRTTMIELAWLWLRHQPSSALSRWFHTQVQGKRGRSRKVAIVALARKLLIALWRYVVEGLVPEGALFKPV

SEQ ID NO: 402565 - protein, 349 aa, unidentified
MKKIVKQVLGIDVAQKELVVCLGRMHDDWTPELYAHRTFANSKKGFEAMTKWVKKLVLEDTPVRYVMEATGVYHEALAYYLEGKGYEVSVVLPNKISNYFRTLEVKTITDKTASEAIARFGLERKLDKWKRPKQIFKNLKQLTRERDQIVESRTLVKNQLHAEMAEAFPNPSSLHRIKAHIKFLDKQVAEIVKEITELVKQDAQVKDSIELICSIPGVGRLTAATVLAETNGFELMRNKRQLTSYAGLDVREKQSGTSIKGKTHISKKGNRHLRKAMHLPALAAIRHEKKFKAVFVRLVSKHGIKMKAAVAVQRKLLEMIYTIYSKNTAYDKNYIDQNETKLDKQPSLV

SEQ ID NO: 402566 - protein, 343 aa, unidentified
MELYVGMDVSLKETSICVVDGSGRIVSEGTVISEPSAIAAFIRVKAGSAKRMGLETGPTATWLWHELRAFGLPVVCIDARHAKAALSLQINKSDRNDAVGLARIMQAGWYKEVQVKSLPCHEIRAVLNSRAQLVKIKRDLKNQIRGLLKNHGLIIGKAGGKVFRHRAEKLVGEHGLLQEAVRPLIEIREIVSREIAGLYRMLLSLARNDVDSRRAMTVPGIGPITALAFRSAIDDPTRFKRSRSVGTYVGLTPRRHASGEVDWSGRVSKCGDAMVRTYLFEAAGVLLTRVPQWCKLKGWGLRLVKRIGFKKAKVAVARKLAVILHRMWCDGTNFIWSTKEAAV

SEQ ID NO: 402567 - protein, 358 aa, unidentified
MSTLKRNKLDFTGQPIYIGLDVHKKSWSVSISTQHGQFKSFSQPPEIDKLVHYLRHHFPGAQYSSTYEAGYCGFWIHEQLKKNGIGCLVVNPADVPTKDKERKTKRDRIDCRKLSRSLRNGELEGIYVPPREKLEDRSLIRTRLSMVRKQTRCKNQIKAMLLFYGVVIPEEKEMGHWSRRFIRWIEGIRMERASGDIALQIHLEELCHLRQIIAKLNRAILALSRTEEYRSWVLLLRTVPGISTLTAMILLTELGEITRFPSIDELTSYVGLIPDTDASGKKEHIGGITQRSHPQLRWVLIEASWRAVQKDPALMMAFDQYCKRMRKTKAIVKIARKLLNRIRYVLKNQSEYVPAVLE

SEQ ID NO: 402568 - protein, 382 aa, unidentified
MEFYHKTHRYYCGIDLHEKTMYVCIVDQEGKILYHRNIKTSREEFLAVVAPYRDDICVGVESTYAWYWLADLCEDEGIHFQLGHALYLKAVHGGKTKNDKIDSKTMAFILRGGNFPVAYVYPRKMRATRDLLRRRMYIMRKRVAILAHIQNTNSQHNLGPFSKTLKYKANREGIANRFEDRSVRKTIEVDLYLLDCYDEVLRDLELYILKTARLDDPISLHLLQTAPGIGMILSMVMMYEIQDIGRFKRVQDFLSYARLVKCPRESGGKKYSSKNSKIGNAYLKWAFSEAAVLFLRGNEQIEKKHNRRVSKHGKAKALSILSRDLGTAVYFMLKRKEPFDMNKFLGAGNASQKYNWTDHGETLNEAAKTKCIEECQPVAVGQ

SEQ ID NO: 402569 - protein, 354 aa, unidentified
MEGNEEMIVIGVDSHKRTHTVVATDETGRKLAEKTVVATSAGHLELVRWATRLTDHRWALEDCRHLSRRLSTDLLVAGETVVRVPPKLMAGARRSSREPGKSDPIDALAVARAALREDLPVATLDGPDREIRLLVDHRDDLVAERTRAQNRLRWHLHELDPGTEPGARSLDRAVVLAGLERHLAGVPGTVGRIARELVARIRELTATINELERELGRLVMCLAPSLLALTGCGPLTAAKLLGETAGIGRFRSRAAFARHNGSAPLPVWSGNTERHRLSRTGNRQLNVALHRIAITQLQREGPGKTYLEHRRAQGDTKTEAIRALRRRISDEVFRRMRHDEVARAAGPSGLAAAA

SEQ ID NO: 402570 - protein, 450 aa, unidentified
MAKAQRKKPRKLERNLPVMRPNASGVDIGATEIFVAVPADRDAESVRSFPTFTADLHALADWLRQCRVDTVAMESTSVYWIPLFQILEARGIEVHLVNAQHVHNVPGRKSDVLDCQWLQYLHSVGLLKASFRPEQAVCEIRSLMRHRDNLVQLACVHVQHMQKSLDQMNLQIHHVISDITGVTGLAIVDAIVAGNTVPQELAKLRDYRIKASIETVTKSLVGDYRPEHIFTLKQSLTAYRHYQQLIADCDQEVQRRIETFQSKDAGPTAPADSASPATAPQTSFDLRTHLERIFGVDLTRIPGFDVLRVQTIFSELGADLSDFRTDHSFASWLNLCPKDGTSAGRRIRGPRVKTKNRVTQAFRMAAFSLHNNKSYLGDYYRSQRARHGAIKATKNAAHKLARIFYHLVTTRQPYDETVFAKLEASNQKRKLHKLQTLARHLGYSLVTLPA

SEQ ID NO: 402571 - protein, 332 aa, unidentified
MQQVAVLDTGTGEIQEHQFPHHGDAVERFYAALPRPVTVAVESTGYSLWFHTLIRQLGHTLIVGDAAKIRAMVVRKTKTDRRDALHLLELLRHDRLPTIWVPDPATRDRRALLAHRMRLVRIRTTVKNGLHAIALSHRLVEGSKRLTKPRLAVLQGLPLAPYTARRRDESLELLHWLDEHIRQLDDEVAEAAAGDLAARRLLTHPGVGPVTALATVVVLGPVGRFPGSKEVASYVGLAPALHASADTHHLGQITKQGNPFLRLVLVQAASIAIRYDEDLHRLYTTLHRRRGHAKAKVAVARKLLIRLFIMLRDGIDYDEFRRRGRAAQPMPT

SEQ ID NO: 402572 - protein, 479 aa, unidentified
MNERRLVGIDLGIASAHTVRVLDGGGNTVAKRKAWPTVESLGEVEAAALAGCPAGTTLEVIVEPTGPAWLPIAVFFNARGHLVYRVSSAKAADLRRFLSRHTKTNGIDADTLARLPLFDPAGLQPLRLPDAPRAALDRRVRATDRLTRAGAEHKRRIKDLARQVLPMTPLTGDLGVADLAVLERYADPNALVKLGLKRLTALIAKHSHGHQGADRARQWIGAAQASIELYAGHPTVAFADLAAEIATEVRLLRAVQAELATHATERETAYRWVDPLELARSLPGVADIGGPALVAAMGDPKRFARGKQFRSFTGLVPKASETGDTDRKGQPMSKAGSSLLRTTLVRAADTARKQDPQLARIYYVQIVERGKDHLGALCVVAANLAERFWAVMTRGMPYVICDTDGRPVQPDEATAIIAEHWTVPPEVRARRRSKKKGKAPQKVHTGQSKPRARGAGKRGDLPRTASSTHDATNVNRRTA

SEQ ID NO: 402573 - protein, 357 aa, unidentified
MTDVRIAQRTERVVVGVDTHADVHVAAAMDPLGRMLGRLEVGTSTRGYAQLLTWAHTFSPTTTFGVEGTGAYGAGLARFLVDAGCEVIEINRPDRRARRGHGKSDPIDAEAAARSVLAGGTLCIAKRDHDRVGMIRTLRVARRSAIKMRTQVANQIHALVVTAPDSLRHQLRDLPLDKLVAVTAVARPGTVTTPISASKLALRSLAIRHQGLTAELVVLDRELGRLTLEAAPALCDLTGVGPDVAGALLVAAGDNPERLRSDAAFASLCGVSPVPASSGKTNRHRLNRGGDRIANNALWRIVMVRLTCDQRTTAYVARRTAEGMAKRDIVRCLKRYVAREVFHALLATAPALARISA

SEQ ID NO: 402574 - protein, 316 aa, unidentified
MNEMIVEKFVGIDVSKSTLDVCIEPAAQALHVAYDEAGIAQIIGCLKEVSPTLIVIEATGGLEVRIATELASLGLPVAVINPRQARDFAKATGQLAKTDQVDAAVLAAFAKAIRPQARPLKDADTRALDDMVSRRRQLIDMRVQETLRLGTAASKPLQKSLSRHIAWLDKRIAEVDTDLTKRLRESDVWRTKDDLLRGIPGVGAVTTLTMLAKCPELGTLNRREIAALTGVAPLANDSGKHRGKRFVWGGRADVRAVLYMATVSAIRCNDAIKAFAERLKKAGKPPKVVIVACMRKLLTIMNAMLKNNAPWNPKNA

SEQ ID NO: 402575 - protein, 400 aa, unidentified
MISVGIDVSKGKSTVCILKPYGEIVCSPFEVLHVEKELDALDNLLNKLDGEIRIVMEATGIYHLPILTFFHEKGYFVSVINPFAMKKYAKDNSIRGAKTDKLDSIMIANYGIEKWFKLQRYEGDEETYAELKLLGRRYRYYMELHVKALQELTHILDYAMPGIKKMFNSWNEANGKDKLSDFVERFWHYDLITSMSLEKFTEEYLVWAEEKKYHRSRSKALTVYELASSGIPTLSSSTPSTKMLVQEAVSVLRTVDCSLSLILTRMQVLAKSLPEYTTVREMGGVGDVLAVKLIAEIGDVRRLHSAKALIAWAGIDPPPYESGQFVGSKRKITKRGSSTLRKVGYEVMRVLKSHPAPKDDAVYNYILKKESEGKSKKHAKIAGLNKFLRIYYARVIAVYQ

SEQ ID NO: 402576 - protein, 345 aa, unidentified
MELHTIGIDLGKTVFHLVGLNLRGEVAVRKKFSRTQLLRFTANIHVELIGMEACGGSHFLGRALREQRHEVRLIPAQYVKPYVKTNKSDYIDAEAIAEAVGRPTMRFVPIKTDDQLDMQSLHRVRERWVMRRTAVINQIRGLLLERGITLRKGRHHVDAALPLILEDADANLSGAVRLLLAQLKLDLDQLSVRIDEADAVIQKTAHENEACQRLVAIPGIGPVTATALIAAIGNGGAFHKGREFAAWMGVVPREHSTGGQQKLLGISKRGNSYLRRLFVQGARAVLQQRTKQSSGLSAWLAQLTSRTHRNVAAVALANKLARIAWAVLAKNEQYRPSVVADVAAA

SEQ ID NO: 402577 - protein, 355 aa, unidentified
MNSSKYIGMDVHTATISVAVLDAAGKLIMDSVVEAKASTILQFIHGLRGELYVTLEEGTWAAWLYDLLRPHVTNIVVCDPRRNALLKEGSKSDRIDARKLAELLRTNLLRPVYHGEKGLRTLKELARAYLTISKDLIRVMNRVKAIYRSWGIPCAGQSVYHPRNREEWLRRITQASVRRRAELYYEQLDALVLLRKQARQELLAESKKHQAWKLLRSIPALGPIRVAVLMAIVQTPHRFRTKRVLWKYSGFGVVTHTSADHRYVKGQLERSKKPALVRGLDPDHNHDLKDVFKGAAIQASTREGPFREFYESLLAKGMRPEMARLTLARKIAVITLTVWKKGVAFDAKYLKPQTA

SEQ ID NO: 402578 - protein, 317 aa, unidentified
MKTVPFEQVILRGCGIDVHKDMVVATISGEGLKTETRSYKTFSSSLTELKEWLLSSGITHVAMESTGVYRKPVYKILECPDMKVWIVNARHIKYVPGHKTDKKDSGWICKLLLAGLLKPSYIPEREQRELRDLTRYRNKLIQHVSSEKNRIVRILEDCNIKLSSVVCSLDGVVANKLIDMLIDKGHVTMDDITCIYHKKLEASPELLYQACEGFIEPHHIYMLQTIRKDMEQTKAIIADLTCRIKEVLSPYENVMELLQKIPGLSRKTVEDLIAEIGVDMEAFPTEKHLASWAGVCPGNNESAGKKKVVEPPMATNS

SEQ ID NO: 402579 - protein, 475 aa, unidentified
MKEKVSMNVVNPKAAGIDIGSRSHFVSIGQNAKDVREFGVYSPDHQDLIEWLMNVGIQTVAMESTGNYWQRLFSALQLAGFEVLLVNGRQIKNVKGKTDVKDCQWIQKLHSLGLLSGSFLPSTEIEKMRNYERHRSWMVEQCAKMSNKMQKALRLMNIRLDIAISDITGKTGMAIIKAIIDGERSGEKLSMLADPRVRKSKQEIAKALQGQWDAGLLFELKDCYELYCDYQQRIMESDLQVEQLLKSLPKRDGGSKSIQRAKTSKRPHKNQHRINIHEYSFQYLGVDLFAIEGVKQQTIMSFLSEVGMDIVRFKTAKNFVSWLRLAPNNKISGGKTLSSRTPKGKNKMAIALRNAANTIGLMKKGVLKRFFDRIAYKKGRAAAVTATARKLAVIIWNMVIKQQQFQPIDETSYNERIRKNVIDNINNKMRRMNLSINERLKLYFEKQVLQDIDLIYFLTDFWLVRLAYSSILKNH

SEQ ID NO: 402580 - protein, 465 aa, unidentified
MGCEPVLFRGRPCDWPGCAESTNPSVSFAHLVSRVVDWEEEVAVRYIGLDVHREFCEVAIVEEGRVRSAGRVRTRRPELELFAQSLGRSDEVALESTGGAEAIARILRPHVARVVVVNTKKLRQISEAKAKTDRLDARRLAELLASGYLAEVWCPDEGTRALRRRVARRAQLVRQRSRAKNEIGAALQRNLLDRPPVYDLAGGNGRRFLEGLELPLDERNTVAGCLRQIDFLDEEIAVVDRALAEAAVGSGEMRRLITVPGVNLHTAATFMACVGDIGRFPSPRELVSYLGLDPRVRQSGEERVRYGHISKEGAAEARHMLCEAAWIVVRYPGPLRAFAERIRARRGAGIATVAVARKLVVLFWHLLTSEQDYAFGRPTLTRKKLRRLELAAGAPRGKGQPGIWAADKALRQAELELALQAETAYRRLVTDWQPRKGAGARPGRASQGRQSGKQRGRASVPDPAL

SEQ ID NO: 402581 - protein, 347 aa, unidentified
MNISMIGLDTAKSVFQVHAVDEAGKVEIRRKLRRSELVPFFEKQEACTVVLEACGAAHHWARMLTGLGHDVKLIAPEAVRPFVKKGCKNDAADAAALCTAASRPDMKFVPAKSLEQQGVLTLHAARTLLVKQQTMLANAMRGLATEFGVTVPQGIGKLGELMALGDADEAFPKKARQAIRGLLDHCDALAESIETFEAEIVAHARHDATARRLATIPGIGPITASLIAVTVADISVFKSARHFAAWLGLVPRQHSTGGKTRLGRITKTGNREIRRLLVLGATSMVYRAPQWNSAAGVWTRAILERRPVRLVTVALANKMARIAWALMTRSEVYHAKGRVATAAEAVA

SEQ ID NO: 402582 - protein, 407 aa, unidentified
MPLFVGIDVSSKNLDACLMDRMGETLATQTVTNNLPGAYELRDAILQHAEADDTIQIAMEVTSVYSWHPAMFFHEDPELKQRRTKVFTLNPKLVRNFKKAYAEMDKTDPKDAWVIADRLRFGRLPKSVIQSEQYLALQRLTRMRYHLIQSLTREQQVFLNHLFFKFSAFNLEVDTPVFGHAITEFLLEAYSLDEIAQMPLEDLAMYLQTKGHGRFSDPEDLAASIQKAARSSYRLSKCVEDSIDLVLGSSIEIIRHLKRQIKDLDKAIARVLEGIPNTLQTIPGIGPVSCAGILAEIGDIERFDDQAAIAKFAGLFWPRHQSGDFEADDKMLARTGNRYLRYYLVEAANLVRRHEPEYRAFYQKKYREVHKHSHKRALVLTARKLVRLIDALLRNDQIYAPKKKVTR

SEQ ID NO: 402583 - protein, 345 aa, unidentified
MTAPANRGSYQLFVGVDIAATTFSAAWTAEGPPRERARTFAQTPQGFAALMDQLRASGVSPTNTLIVLEATGSYWVALAVTLHEAGYRVSVVNPAHAHHYAQSLPRRAKTDLLDAFLLAQFAAERKPVPWTPAPQVYHELRQRLVARDALLEMRTQARNQRHALLQWPVVIESVREHLEELIADLDRRLAALEAEIAQVLRDGAWAESAALLRGITGIGLITTAWLLVGTLNFQACASAASASAYVGLVPLARESRSSVRGRAQIGHAGHARLRTALYLATLSAARFNPLIKAQYERLRAAGKPPKVARCAAARKLLHLAFAVVSKGQPFDPTYRTRLLSERLAA

SEQ ID NO: 402584 - protein, 401 aa, unidentified
MPQWVTSWPRGPLKRRFLRKDSAMRILALDLAKNKSVYLDYVTGGERTFGKVATNAPEMEKLLSRCRPDWVVIEACPAAGWVCDLVQRMNIPIQVANANDERWKWKTVKDKSDRKDALKLAQLSEMENLPTVHVPKPEVRQWRSLIEYRHGLVARRTAIKNSIRSIYERQGLGLPSRTNAWTQQALAELDKEVSAASSQQVWLFQVGCELEQFRQVQQQIEQVEAKLKQIADGNEAVRRLQTAPCVGPRLSEAVVAILDDPHRFRNGRQVACYAGLTPRRFQSGESDRQGHVTKAGNQLLRGLLVEIAWLGVQKRTWMLGVYEQVRRGSDKRKKIAIVAVARRLLVRLWAMLRDGSEWKEKAPGKEAGSGKQALDLSLCPSSGCEGGSDADEAGRSVKRPA

SEQ ID NO: 402585 - protein, 345 aa, unidentified
MHIASIGIDLGKTTFHLVALGERSTVLVRKKFSRAQLLAYTANLPSSRIGLEACAGAHFMGAALREQGHEVRLIPAQFVKPYRKSNKNDFIDGEAIAEAVTKQNMHFVPIKAPEQLDVQAMHRVRDRLVQRRTALINEIRGFLLERGITFPAQPIHLRKNLPTVVEDAEQNLTPRLRWLLDRLWQEWKQTEVDIETVTDEIERISNEDERCRRLRQIPGFGPLVSTATVAAIGNGAAFRRGRDFAAWVGLVPRQYSTGGKQKLFGISKRGNIYLRRMLIHGARAVLFRIKYDTAGLGQWVHRLSQRAPRNKVIVAIANKLARIAWAVLSSGKDYRHQPLPQRAAA

SEQ ID NO: 402586 - protein, 421 aa, unidentified
MSKIQRIVGFDCGEDGHIAVLLDVAGKFEKEFGVDNERGQIQELLAELMLIVGPDAQLIVVVESKRSYGRIVADVAVELGCDLRQVNTVALNHYRDLEGQPRKDDEWDAYLGARMVYLEMGGSREAAETTEEERALWRLTRTHSRLVEDRKKHVARLRAVLLELAPEVLHSSWEGPQPGSKAMLYLLERWPGFEGLERAQMRSIEKVLHRCRYGSKATHVAKLIRKMAGGISIAAEERSAVTLEIDLLVRQIRFCNESVAQVYGKIARRVERHPVGMKLLEMHGNGPVIVGTLVSELLPVARTSTEPKCATYAGVTPLARKSGKSLNNDKLAQGVNKRVLHALYTSSVVAIGHSSVDRAYYQKKLRDYAGHPKPHVAAFIALSRQRHKLVYKLITTDARYSKETLIAAHLARLEQNRNAAA

SEQ ID NO: 402587 - protein, 349 aa, unidentified
MVADEVDYVVGVDTHRDQHVLAVVVAPTGAVVARREVAANARGYAQALRVADEHAAGARVWAVEGAGHYGAGLARYLSARSETVLEAGRSPRGERRLHGKDDRLDATRAARVALGQELGSPRAGQRREALRLLLVARRSAVDVRREALVQLRSVIVTAPDRLREELRGLPVQRLLDRCSRLRHSTTAAADELATRLVLRTLARRISAATVEADELEHEILAHVRTLAPQLLDEPGVGPIVAAQLIVAWSHPGRVRSEAAFARLAGVAPLPASSGQTTRHRLSRGGDRQLNRALHTVILHRRQHDPATKEYIARRVAEGKSRRDATRLLKRYLARHLYRALNHQEARLMT

SEQ ID NO: 402588 - protein, 319 aa, unidentified
MKMANPTTLTAGIDTGKEKLDIAVHGRPGVLTVTNDARGWKKLTAHFAAVGVGRVGIEATGGYERGVVRHLQAAGLTVIVLQPLQVKAFAQLHLRRAKNDRLDAALIAACTNMMPDPKTAPDPRLQALTDQLTFIEQQEEDIARLKTRLEHVEEPRLARVIKADIKRIVARRAAELRRLLAAVRAEADLARRLELVISIPGIGERTALALILRMPELGRISREEAASLAGLAPFVHQSGKHKGETHIGGGRSRLRRSLFAAAVPASFRWNPALVALYVRLTQRGKPPVSALTACARKLLVFANTVLARGTPWRKDQVPA

SEQ ID NO: 402589 - protein, 334 aa, unidentified
MERVTTIGLDLAKRVFQVHGVDAAAAVIVRRSLRRRQVLAFFAKLPPCLVGIEACATAHYWAREIARLGHDVRLIPPAYAKAYVRRNKNDPADAAAICEAVSRPSMRFVTVKTEVQQAAAGIHKVREMLIKQRTMLINTLRGLMAEFGIVVAEGPRHISELVAILADPADQRIPAPLHDGLMAIVETLRGLERRIERVEKQIVGWGRGSATCRHLITIPGYGPILSTAMAAMVVNPAAFTSGRHLSASLGLVPRQDGTGGKVKLGPISKRGNGYLRRLLVNGAMSVLCSKRAKADPWLGRLQDQPRPDRPQPGTVLAAVKTAARAPAAVACGQS

SEQ ID NO: 402590 - protein, 399 aa, unidentified
MFYGLDVHKEFIQVCEVDDKGVNRKEYRIGGTAEEIDRWAQGLGPRDQVVLETTFHSWAIHSIVSQYAGRVVVANALQVKAIAYAKIKTDKVDAYTLARLLQADFLPSVELPDEKTWALRQLVSHRRLLVKQRVAIKNTVLAVFHRCLVCPPQGDAFTARGRRWMRSVKLAAAQHFLVHNGLDLLETIEARIEATDQELLKTAAIEEQAQLLMTIPGVGVTVAMGLLAAIGDIRRFPSPGQLASYFGLVPRVSQSAGRCYHGRITKAGPGNARSLAIEAAQVLARSPSPIATTFYRVRHKKGYNVAVTALARKLIVLVWYMLQNGEPYRYASVESTRRKLRSLVPKHERTRALRPPRTVEEVYREAGLTLPAPASKAERRAAASNRRTRTRLTRLQAKT

SEQ ID NO: 402591 - protein, 366 aa, unidentified
MLQKAELSCEADSENDLGGSSETMYSIGLDVHKRTISYCVKDAAGRVHMEGKIGSTRRELDSWIKTLPQPRTIAMEATIFTGWIYDHLLPHAEKVKVAHPLMLRAIAAAKRKNDQIDASKIADCLRCDFLPECYMTSTEIRDRRRTLRYRGLLVKQMVQMKNRISGLLMEKGVTHTKRRLHKVGYFAELMGGNEEIDQSIRPLLKLSREHIVRAQKLDYALVSSLERDPLLVERLKRLRTVPGVGPITALTWALEIGDVARFRSIKQAISYCGLCGAEKSSADKMLRTPISKQRNKHIQHVLVEAAKLAPRQCHELALIYEKEMQRGNRNRATLAVARKIVAYLLAVERRQQDFVPTEEFGGTAAA

SEQ ID NO: 402592 - protein, 353 aa, unidentified
MRRPKEKLIAGLDLHSNNVMIGIINQDGKRVTHRKLECDLKQVTAFLEPLKPQLQSMAVESTFNWYWLVDGLRERGYPIDLANPAKIQQYNGIKHVDDKDDAFHLADLQRLNILPKAHVYDPELRPVRDLLRRRAGLVHQRTALLLSFKSLYARTNGETLDLSDAKKMEPKEAPKLYEHPANQLIAQVQAEHIQALAKSVSRIEKAVLGCTREIPMYEKLLTIPGIGRILGMTITMEVGDIKRFKTDGDFASYCRMVDARRLSNGKCKADNNQKCGNKYLSWAFVEAANFARRYCEHCRRWYDRKAAKTSKVLATKALGCKLAKAAWHVMAKQSDYDEKRMFPELATKVMKTQ

SEQ ID NO: 402593 - protein, 313 aa, unidentified
MQEQICIAGVDVSKAELVICMDDRMSGIQQVPNEAEAIRRWLQKLPQTSIVAMESSGIYHRLLAQLAHSAGFRVYVLNARDVHMYAKAISARAKTDRLDAHVIVRYVRENMEHLRVWKPGAEVSEHLQQLLERGDKLTDELVKIRQSLRDVPQLKLQLKQLEGVFKDVKAQIDKMVEQLLGQEPKLQEDYRRLKTITGVGQQAGARLSALFSKIEFANADAVIAYSGLDPRANDSGTKRGRRSLSKRGPAALRRQAYMMAMGACNSKLFKPYYEKLRTRFAGTEALVILGRKLLRIAWAVWKSGKTFDRSMFA

SEQ ID NO: 402594 - protein, 343 aa, unidentified
MYYIGLDVHKRTISYCVKDAAGHVHREGKIGSTRRELDGWIKTLPEPRTMAMEATIFSGWIYDHLLPHAEKVKVAHPLMLRAIAAAKKKNDRIDAAKIADCLRCDFLPECHMASTEIRDRRRTLRYRNLVIKQMVQMKNRVSGLLMETGVDYNKRRLHKVGYFADLMSSNEEVNQSIRPLLRLSRATIVRSQRLDYALVSSLERDPLLAERLKRLRTVPGVGPITALTWALEIGDFSRFESIKEAVSYCGLCGDERSSADKVLRMPLSKQRNKYIQRTPIEAAKLATRYCHELAVIYEKERQRGNANRATLAVARKLVAYLLAVERRKQDFVPAEEFRSTAVA

SEQ ID NO: 402595 - protein, 387 aa, unidentified
MYYIGIDISKFKHDCAVIDDSGEIVTPSWSFTNDSEGFSQLKTLVDSLDAETRIGLESTGHYGMNLKLFLESNNFSFMEFNPLLINRFVKSKSLRKTKSDSIDCMMIAHYLMTVEYKPYPTLLYHTEKLKSLTRFRDSLIRLRSRHLVELTNILDKVFPEFKPFFGGKFSVTSLYILSNYSSPEKISNMNSKSYETLRKLSRGRFSTVDFAKLKQLAKNTVGNTEDYLLQEMQIVLELYKQLDSKIDETEASIKECVSAMNPPMLTVPGIGVESTAIILAEFGDFSKFKNASQMLSFAGLEPGYFQSGTSETTGKMVKHGSSYLRYALMNCAQTVVTYEPTFAMFYAKKRAEGKPHRVALSHVVKKLLRVIYTLHTKNIVYDADFVR

SEQ ID NO: 402596 - protein, 350 aa, unidentified
MKIIGCDFHTRYQQIAMLDEATGELIERRLEHQNGEADAFYRSLAGPVRVGIEATGPIQWFQRLLAELGHQLWIGDSAQIRASAVRQQKTDQRDAALILDLLLTNRFPRIWVASPAQADLRQLLWHRHKLVRMRTMVGNQLHALALGQGLCRKAKLFTRKGRAELRDLSLGPWASRRRRELLMLLDQLDPSIQELDRAVMEQARRRQEAVRLMTHPGIGPVNALAFLLTLGPVTRFGCSKQIVSYLGLNPRERSSGGKQRLGAISKQGNSMVRWLLIEAAQHASRFDPALRQNYQRLKFRRGSAVAKVAIARKLAVRMYWMLRTGADYAQLVRMQGSPRGTLVSTAPPIC

SEQ ID NO: 402597 - protein, 491 aa, unidentified
MSLLTGPSGGLDSLTTPQRASVYRDDSSILPSLGQACGRLKPNTKHKNKMTNLNTAYDLVIGLDRSDRKADLHFIDTATSQTRSETLASSPENLRQWLLDLRQRHPKGSVAICLEQPAGHLIPFLETYNWITLYPINPISLQKYRETFVTSRAKDDGKDAQYLAELLLNHPDKLKAWKPQDSQTRLLQQLVAHRRAVVDERTALTNRLQALLKAYFPQALELCGEDLWRPLATAFLLKWPTLTTVQKARPETLKQFYYLNGSRSQKLIQQRLKLLQQAVAVSDEPALNQSFALRVQLVCRQLQDVVRTIKDYDTQIAQSFAQHPDRETFASFPGAGPVLAPRLLSALGSDRERFDSAANLQRYTGIAPVTKQSGKMRYVHRRYLCPLFERQSFHEYAKESVLWCRWAAAYYLDQRTKGKPHHTAVRALAFKWQRIIWRCWQNRTPYKEQTYEAALRKNGSKLVSLFDQIEVGKNPAKNLGTKTPKTTVKKI

SEQ ID NO: 402598 - protein, 346 aa, unidentified
MGKLAIDLSSVTTVGLDLAKHVFFVHAIDADGKVVVAKEVRRRNLLAFFASLPACRVGMEACSSAHHWGRELEALGHDVRLMPPAYVKPYVKRQKNDAADAAAICEAVTRPSMRFVKLRSIDNQAVLMHHKVREMLVRQRTQILNGLRGHLAEIGIIAAQGPSHAHALANLLREGDASIPPAVTTALLPLVTQLDRLESEIKLADTAIAKLAKADPVANALMSIPGIGPVTASALVASVGDPCGFSGPRQFAAFLGLVPRQNSSGGKARLGRVSKMGNAYLRKLLVVGAHAVLHHRARHTDPLRCWADKLMTTKPFKLVAVAIANKLARIVYAVMTTGTSYRNAAA

SEQ ID NO: 402599 - protein, 341 aa, unidentified
MNQVSTVGLDLAKHLFQLHGADSAGAVVFRKRLRRGQLLAFLATLPPCTVAMEACGSAHYWGREIAKLGHTVKLIAPAYVKPFVKRQKNDMADAEAICEAAQRPTMRFVALKSANQQAAAVVFRTRDLLVRQRTQAINALRGHLAEFGVIASKGLVHTSKLIAALEDPASDLPQAARGILAVLVEELRSLDERVAVLDREIARHAKENAVARRLMTVPGIGAVTAAALTALAPPADTFRRGRDFAAWLGLTPVQRSSGGKERLGKTSKMGERALRRLLIIGASAVARWATRKGAPAGSWLGRMLARKPPMLVRVALANKMARIVWALLAKGGVYRAPGAAV

SEQ ID NO: 402600 - protein, 412 aa, unidentified
MKIAGIDVHKKVLMVVVVDTSVPEEKPARRRFVTLPSELQRFRIWLQEQGVEEAVMESTAQYWRSVGLELEPHMRLHLAQAFSNRAPRGRKHDFKDAERLVRRLIADELILSFVPNGEQRIWRSLTRMKVQLTRDRVRLQNQIECLLEEMRIKLSIVVSNLLGASGLRILQALAQGETDAKRLAQLGDERLRCTEEQLVDALTGRVQPMHREMLALQLQRLQLIDQQMAELNRMIAQAMRPHQEAVIRLAEVPGLGVDSAQQIIAEVGAQASTFSSAAELTSWVGTCPGKEESAEQNHSSRSAKGNKYLRRVLNQAAHAAVAKKGSHFQVVFRRLLPRLGYKSAIWAVAHRLCRLVWKILHEGVRFIEQGCEPDPRAKKERARMLARALRKLGYEVAIKPINQVAATNGIRI

SEQ ID NO: 402601 - protein, 286 aa, unidentified
MNNVTLLGIDIAKTVFQLHGVDRTGKVVLKKRLQRTRLVEFIANLPKCTIAIEACGGANYWVRRFSAFGHEVKLMSPQFVKPYVKSNKNDFNDAEGICEAASRPNMRFVSPQNIEQQDIQSLHRIRSRLIQERTALVNQTRGLLMEYGIIIPQGIGKVRKLLPEILEDAENELSVISRRFIFDLYEQLDNKDKKIKEYEESLKMIFQTNKNCQKIAKIEGIGLLTATAVVADIGDAKVFKNGRHLAAFLGLVPRQHSSGNKERILGISKRGDAYIRMFASLISVSI

SEQ ID NO: 402602 - protein, 422 aa, unidentified
MLGIGIDWAEEFHDVALGTPDKGVVEQFRIDHGPAGVDRLVGRCLALEPDPAEVRVVLETRHGLLVEALLDAGFTVVPVNPDLVARRRGPARKKDDAEDARICCLLALDRHAGLKTLIPHGELGGELRAIARDDERAARDQRRLLNRLRADLQTTYPAALVVAGADLGAPTVLRLLERWPTQPELAQASREELVGFARAGHHGWPEKFADRVAAALAAPSLPTRDYLVRAKAAGIRLAAVQLLALHEARRGWETRMAELLLGARRTGRDHTAKQPDPGNAFPGGAIYLSFPGLGDRLAARVAGEIGEHIDQFDSPNGLQCYAGQAPVTRRSGKSDYVVARRLAHNRYLGDAVHQWAFCSLQLSPWAREFYDSKIAAGKSHHNALRALGNRWLEILWHCLIKGVLYDEAVHVANRNRALGRAA

SEQ ID NO: 402603 - protein, 402 aa, unidentified
MGIDVAKDKHNAFFGTARGHTLLKRLVFENNIEGFEKLLTFSESMKVKHALEEVVFGFEPTANYHKPLGEYLVKRGLSVVLVSGKAVKNNREMLDNRWDKNDTKDPANIADLISQGKFMYYDHPVLPLRDLRNLLSLKRRLKKQEHGLKVRIRNHLLAQYFPELDRYYGQWERGGLSIVRWCLSPSAIAGMEYEQFERLIVPGSRMNLSQQERLKAIWQKATDSIGCEVGEALEFEARMMVEGLKQVREAIRVTDEKIKGVCLHFPEYSYLRTIPGFGPDVSSKVLAAIGNPFRFDNETQVLKLAGWDLSATRSGKNSNAIRPVISKKGKAELRYALYQAALIASTRNQFFVMYYTNKLRGREKEKGIKTKMRVKLAAKLLVIAWTLMKKEEPFNPDFLHID

SEQ ID NO: 402604 - protein, 320 aa, unidentified
MQTLQPPLDVGADVSKNQIVVACAEQSFTTRSIANTGAALLSWLKQLPAGSRVGMESTGTYHELLAELAHKLGLIVYLLNTKDVRHYAKGVGLRGKTDRVDAQLIARFVAKEHTKLHPWLPATREQRQLNRLLRRRAMLTPTKAALVQSLKGLIGCNAQLKALLGRLDALIGYIDARIQALIKAHPARREGYARLQSIVGVGPVVGSALVSALQRRCFERADAFVAFCGWDPCARDSGHKRGRRRLSKRGPGELRRLLYNAAMSAARTKTWKPRYQRERAKGLSRTAALVVLARHIARTAWSIYTHNTTFDPDRINHGLT

SEQ ID NO: 402605 - protein, 423 aa, unidentified
MKSSGTQTFRAYVGIDWADTKHDFCLQERGSDRREFGCIAHQVECIDEWAKSLQQRFGTPVAIALELAKGPIVYALQKYDFLVLFPINPLTLAKYREAFKPSRAKDDPSDAELALDLLIRHPERFAALRPQSVGMRTLISLTERRRELVNDKIRLTNRLTHTLKEYYPQALDWFDQHDTVLFCDFLTRWPTPLQARRAHQASLKAFFHAHNAHRPQIIAARLKAIKAAVPLTQDPGVIVPCRLHVMVLIEQLRLALQAIEQFDRHIAELAPTLPDYRLFAGLPGAGPHLAPRLLVAFGEDRERFQRAEELQKYAGIAPVTERSGKKTWVHWRWQCPTFLRQTFIEWAGQTINKSFWAGAYYYQQRARGSTYQAAVRALAFKWIRILYSCWKTRTPYDESKYLNALKRRQSPLLNNLVPIPQNA

SEQ ID NO: 402606 - protein, 370 aa, unidentified
MIFVGQDLHVRNSMFYVTDAEGRMLMQRRCVNRPAEMAAFWETLLKKTGGEVQPVRVVLEATTNARAGQRLMIDSGAAAGLSVQADVVDPRKIRLIAESVVKTDLLDAKVLCELACSNFRLPVCYMPDDEEFALREHLRARNDLVRLRTMLKNRVHAVLHRRGILTPRDGLFSRNGQAFLKSLELDPEGRELLDRFGRLITQLNEALAASEQSLRKLRQTGRWHRSAELLETIPGIGLITALTILAELGDLSRFRSRAAVANYAGLTPRVHWSDEKGYLGRTSRRGSAHLRQMLCEAAWVSIRKAPAYEALFNRVAARRGKATAIVAVARRLLEGAFVILKRNEPFRFVSPPSPADTTCADRKVAPSVAG

SEQ ID NO: 402607 - protein, 452 aa, unidentified
MREPQEVEDREDEQAVARVAAVDVAKASAVVCTRVPREGGPGAGRFVTRVWPVGATTNEIIELAAYLAGQQVEKVVLESTSGYWRPFFYLMEAAGLHVELVNARDVKNAPGRPKTDRLDAVWLAKLAGWGMLRPSFVPPAEIRQLRDYTRLRTDLTRERTRHWQRLEKLLEDALIKVTTVASRIDTMSVPDMVEALIAGERDPRTLAGLARGRMKAKRAALIEALTGRFDAHHGELAAILLAQIDGLTAQIDTLSTRIEELIAAIPGAQGVNADGTTGPQAGRGPDAAALPAIDRLQEIPGISRHAAQVIIAEIGLDMTRFPTAGRLISWARLCPRTIQSGASERPGKTAKGNPYLKGILGDAAAAAAKTTTFPGQRYRRLARRRGKLKALVAVARTLLIIIWHLLADRAARFEDLGEDYYLNTIDTDRRARSHIRQLQALGFTVTITPAAA

SEQ ID NO: 402608 - protein, 429 aa, unidentified
MSYRIAGIDVHKKMLAVVVSDVEIDSEYRFERTMFSSSPEQLRSLAAWLVVQEAEEVVMESTAQYWKPVWEALERYWKPAREKREGRRRRSGTLHLAQALSNRGRRGRKNDFRDAERLVKRLVAAELTLSFVPDAEQRLWRTVTRKKYQLRRERVRIHNHLESLLEEAHIKLSSLVSDLLGVSARRMLNALADGETNPAVLAALADQKLRATPEQLCDALGACTELKPVYRRLLRMTLQQLQLLEQQIGQLDQELATLLHPHQDPVQRLAEVPGFGVDSAQQIIAEVGPTAATFPSKKCLSSWVGACPGEEESAGVNYSHRSPKGNRHMRRLLNQAANAAVKVKGSIFEIIYRRCVPRLGHNQAIGVIAHRQCRLIWLILHQGARYEERGPAVNERSRYQRTWRMIRQLRSLGYRIESPNTQPSQAPAQ

SEQ ID NO: 402609 - protein, 407 aa, unidentified
MEVLYPRCAGLDVHKDTVVACVRCVTDPQHREVRTFGTTTSELFALGDWLEAHGCTQVAMEATGVYWKPIWHVLEGRFDLVLANAQHIRNVPGRKTDVNDATWIADLLAHGLIRGSFVPPTRIQELRDLTRTRKQIVREISQHTLRIQKVLEDANLKVGSVLSSVVGTSGRAMLDAIIAGEEDPERLADLAVGTARKKKAELIEALRGRVTAHHRAMLKLHLGIIGALQTALAQLDASAGKLLAPIKERAALLTTMPGVSDIVAQVVVAEIGVDMSRFPTAGHLVSWGGLCPRNDESAGKRRSTRVRKSANWLKTTLVTAAWSAVRKKESYLRAQFLRLKSRRGAKKAILAVAASMLTACYHMLRDGVVYEDLGAAHFDRRDKTKTIRRLVRRLSDLGCEVEVRQAA

SEQ ID NO: 402610 - protein, 359 aa, unidentified
MSSIALDRSDVIVGVDTHKDQHVAVAIDGLGGRLGDYGLSADPDGYEQLVVWAGDLGTVVRFGVEGTGSYGSGLARFLRRNGHIVIEVSRPPRKGERRLSGKSDTIDAEHAAREVLSGKATATPKLADGIVEAIRLVKIARDTAVKAHTTAMITLKATLVTASDELRRELEPLTDFKLVTACADLTASADLDDPAEAMCYVLGSLARRWLELHEEIKLHSRHLKKLTKTAAPELVAAFGIGPDIAAELLVTAGDNSDRIRSDAALAKLCGACPIPASSGKTNGRHRLNRGGNRQANAALHRAIVVRMRWHPPTIAYVQRRTTEGLSKKDIIRCLKRFVAREIYGLLPAPSTTAVLASAA

SEQ ID NO: 402611 - protein, 345 aa, unidentified
MKHFTGLDVSVKETAICIVDENGKICREVKVTSHPDDLIAVLQDPAWNFARVGLEAGPLSQWLFEGLARAGLPVICIETRHVKAFLKAQPNKTDRNDARGIAQMMRVNLYRPVHVKTLTSQKRRALLTARKLLQGKAIAIENDIRGLLRNFGLKVGNVGVVKFEERIHELIDDIVDLQEIMEPLLIARRKLREEFARLHKKVQDITRNDKMCQLLMTIPGVGPVVSLAFTSTIDIPQRFKNSKAVGSILGLTPKLNESGESKRVGRVSLCGDAMMRTLLVEAAQVLLTRVAKWSWLKAWAMNIAKRSGMRKAIVALARRLAVVMHRMMSDGTEFCWTRDDLPVAA

SEQ ID NO: 402612 - protein, 370 aa, unidentified
MTSIIYVGMDVHTTNYTLCCYSVAPEKIFATVTLEPDYRSILKYLDRMKRNIGGECRFLCGYEAGCLGYSLYNQLTAHGVECIILAPTTMATTRKKGIKTDKRDASNIAKCLAYNTYSPVYVPTIEDSAVKEYIRMRNDAKDTLKRIKQQLLAFCTRHGKRFTEGRNNWTQKHLAWLKKLDFSNAILKETLQEYLALYHQAADKVELFDKRISELAHTEKYEEKVKKLSCFIGIKDHTALAAIVETGDFFRFPTAQNYASYLGLVPGEDSSGESIQRTGITKAGNSHVRKLLIEAAQCYNRGSVGVKSKALKDRQAGNAQKVIAYADKANERLKRKYYRIMFHSKRNIAVTAVARELACFIWGMMTDNTA

SEQ ID NO: 402613 - protein, 347 aa, unidentified
MRFYNQQHKYYCGVDLHARKMYVCILDQSGKTKVHQNIKSDPEQFFALIFPYLDDIAVGVECVFCWYWLADLCAHHHIPFVLGHALYMRAIHGGKTKNDKIDSYKIASLLRGGNFPTAYPYPAKWRATRDLLRRRMYISRRCAELVAHIQNTNTQYNLPAFGKKLSRKYNHDGVAQRFKDPQVRKSVEVDLELIGAMNQLLNKLEYHIEKTARQHDYHTLYLLRSIPGVGQILALVILYEIHDIKRFPTVQDFSSYCRLIRPAKESDGKWAGHSNNKIGNAHLKWAIKEAVIMFLRDSSQAKAYVARYKRKYNKGKALGIFTHKLGRAIYFMLKNKEAFNIKRFFAH

SEQ ID NO: 402614 - protein, 358 aa, unidentified
MKHYIGCDAHKKYSVFVGISEAGEIIPSQRVEHDRESYRSFLKGLPPASKIAVESVGNWYWLIDEMEKAGHIPTLVNAGKAKLMMGNINKTDKLDARGLAVLSLNGTLPAVWIPPGELRDQRELARMRIFLVHIRTGLKNRIHATFAKYAITFQEVSDLFGVRGRNLVENRLVELPPETRHSMKEQLKLLDQLQKQITEVEKRIWQIVKVTPEMQLLMSLPGVGPILAILIAFEIGDVARFGDGAHLASYCGAVPRVKSSGGKTYYGKTRPDVNHYLKCAFTEAGNAIVANQHRMTGRHVVALYQRISRTKGHAKAIGALRRHLAEAAYAVLKSRQPYHEPKAPRKCSVTKEVCAGLA

SEQ ID NO: 402615 - protein, 411 aa, unidentified
MGIFCGIDWAEDHHDIALVDQDGQILARQQITDDAAGLARLLELLAGHGDAPDAPVPVAIETPRGLLVACLRATGRKVYPVNPMAVARYRDRHSVAGRKSDKGDAAVLANVLRTDMHAHRPLPADSELAQAIAVLARAQQDAVWDRTTACNKLRSHLREYYPGFLAAFAPARGGIMRPEARAILAAAPTPAAAAGLTLAQLRALLKKAGRSRGIDAEAQRLRGALRKEQMRQLPLVEEAMGRQALALLRQLEAACASADDLEQAATESFNQHPDAGVITSFPGIGALTGARVLAEIGDDRSRFQDARGLKAYAGSAPVTRASGKTRSVTHRRIKNNRLAAAGYTWAFAALTASPGARAHYDRRKDAGDRHGAAQRNLFNRLLGCLHHCLATGQHYDEATAFPSQASTPAAA

SEQ ID NO: 402616 - protein, 388 aa, unidentified
MPAAETPVAYLGIDVGKSSHSACALDAGGGVAFRAELANRPDDIDRLLERAGSGALVVVDQKRNIGALVLARAHAHGNPCAYLPGYAEKQARGMFPGTAKTDAIDAEVIARTALGVPRALRPAPEEPEGTASLRILSSQREFASSARTRAKNRLRATLLEADPALEGAVDPSSRWQVSVLAEFGGAAGCSAAGWRRFSSAARRAGAPAAGARRLWEALLASSRSGRRLPAGEDVAVRILAREIASLDADIEELDSLVADSLAGDEVYECLLTVPGIGPKTAAALVTSIDISAFRGHDELASYCGVAPSDRRSGSSIRSTSPQHGGNRQLKNLLIFSCNSLIGTDNRFGRYYGECRARGMRHSKALKAVARKRLKVIYAIMRDAVPYAA

SEQ ID NO: 402617 - protein, 309 aa, unidentified
MKEKIEFEQVIERGCGLDVHKETVTATIKGKGIKQQTRKFSTYTRSLISLRDWLLKNGITHVAMESTGVYWKPVYNVLGEHFKIILVNARHVKNVPGRKTDQLDSQWLAKLLMAGLLKASFIPCRKIRELKDLVRYKTKLTHQISSEKNRFIKILEDANIKLSSVLTDVFCVTGRNIIHEIVESDYEPEKLLHYVHGKVKKSRSEIKEAITGYVTDHHRFMMQTILESIEKIEDTIAKIESQIAEQTKEYGLEIELLETIPGVGRDGAIGIISEIGVDMSAFASEKHIAKWAGMCPGNNETGGKKKIAE

SEQ ID NO: 402618 - protein, 343 aa, unidentified
MKNTIVGVDLAKDVIQVCIYTNKKVRSNIEMTPPEFIEFLANYTSLTIVFEACGTSNYWKQKAISLGHDARLISAKLVSVVRQNQKTDKNDALAIIQAALLPDVTFISGKSIEQQQLQSIMRLRELCVKQKTAAGNQLTSLLLEFNIKVSSRNSGLKGAVESTLEDAENGFSFEFRKALSEAWQLYLSVIKSIHTYDECLECAIEGHTDCKKLRQIEGVGTLNAINLYIALGCADLGVFNKGKDASACIGLTPIQYSSGGATKLGSIGKYVKSSVLRSQLITGAMSAVNHATRRKAKTKKDQWIQEMVERRGKKCTAVALANKTVRTAFAMLTQNTEYKAELI

SEQ ID NO: 402619 - protein, 346 aa, unidentified
MSYSTTVGVDLAKNVIQVSVVSPRGKELLNRSFTRRKFAEFLGKQKPSLVAFESCASAHYWARAAKRHGHEARIIPAKAVAPFRQGHKTDSNDALAVAEAARRPNIKEAPMKTAEQQGLQAIQRSRELLIGECTALSNHLRGILMEFGVAIPQGFASLLRALPEILEDGDNELPDLYRPTLHRMHQRLLELREDIEAMTREVDGLVKQHPVCKRLTAIEGIGPIGALSLYAVMGSGKAFTRSREFSAYLGLTPRQYSSGGKTNIVGISRKVGNRRLRSILIQGARAYVYRMKEPRSLKDRWLKDLIERAGPNRAAVALANKNVRTAWAIVTQGTEYQRRLQLEMAA

SEQ ID NO: 402620 - protein, 339 aa, unidentified
MAILFVGIDLAKNVFAIHGVDEHGKAVLVRPSVQRARLHQLVSALPPCTIGMEACSGAHHWARLFAQHGHAVRLMAPKFVTPYRMGGKRGKNDAADAQAICEAVQRPNMRFVPVKSLDEQARLCIHRVRQGFVEQRTATINRLRGLLSEFGIVLAQKAATVRREAAAHLEDLPGWANTAVGDCLSEVHRLDERLAEYDRHISQIAAEDERSSRLMRLQGVGCTTASALVSTIGDARDFKNGRQLAAWLGLVPGQYSSGGKTRLGGITKAGDGYLRTLLVLGAKSVLAAARNKHDRLSRWAMALEVRRGYWKAVIAIAAKNARMAWAVLAKGENFKLIEA

SEQ ID NO: 402621 - protein, 359 aa, unidentified
MNTQSKPFSFKGQKIFVGLDVHLRSWSVTILSEQAVLKKFTQDPSPAALNKFLTNTYPDAEYYSVYEAGFCGFWIHWELQNLGINNIVVNPADVPTMAGERLRKTDAVDSGKLARSLRAGELKGIYVPDSVATEIRSLIRLRDSLTKDQTRHKNRIKAHLRYLGIDIPEEFCRPSRTWTNRFVLWLKGLELETKYGKKTLDLLIAQYEDLRDQQLKMMKELRVLSRIERFDKPLQFLMSIPGIGQLAGLTILSEVDDISRFKDAAHFASFIGMVPMCYSSGEHDGTGNITVRRHAKLRWLIVEAAWIASRKDPVLSAAYVEYCRTMKPSKAIIKIARRLVNRIYFVMKHQQPYVNCYVS

SEQ ID NO: 402622 - protein, 422 aa, unidentified
MSGNQSEIQYAAFLSIDWADEKHVWSLQETNSSRRERGEVGPMPEAVEAWVAQMSQRFAGRPIAVAVEQTRGALVFMLSKYEQLHIFPVPPAMTAHLRKAFYSSGAKNDPSDADLLLDVVQMHRDKLRRLSSDTEATRRIQNLVEERRKLVDEKTAQGNRLEAHLKIYFPQIPHWFGDVDSPLVCALLERWPTLEALQKVSADTLRSFFHKQHCRKEELIESRIKAIGEAKPALKDRAVVEAKVAAVKVLVQLIQVLHKGIEGFHQQIQEAAEAHPDFFIFDSLPGAGAVMAPRLLAAFGSQRERFRDAAEVQILSGIAPVTESSGKSSWVHFRFACPKFLRQSFHEFAACSIPKSQWARCYYELQRRRGKKHNAAVRALAFKWIRVIYRCWKERVAYDENVYLAVLIKHNSPLLAVTNIAL

SEQ ID NO: 402623 - protein, 430 aa, unidentified
MKSNTQNAKIEAVTENTLVVGVDVGSEFHYARAFDWRGIEFSKKPFKFSNTEPGFTEFKAWILHIQTEHDKDAVVPGMEPTGHYWFNLGKFLQDNGMKPVLVNPHHVKKSKELDDNNPTKNDRKDPKVIAGLIKDGRYSYPYLPDGVYADLRTASNLRFQMQSELTRIQNRISRWFSIYFPEYKDVYGNPDAKSGMMILKVAPLPEDIVTLGVEGINRIWREAKLKAVGLKRAKTLYEAAEHSIGSREGATAARLEIRMLFEDYESRAARLQEIMTLIESLVKQIPMAEKLLEIKGVGIKTVSGFLAEVGDISRFDNPKQLQKLAGLAIKENSSGKHKGETTITKRGRKRLRYLLFEVAMSLVSKNAEFSQLHQYYTTRRINPLKKMQSLMAVACKLIRIFYVMLTKQVDYDPQKMISDIRRPEIYLQTA

SEQ ID NO: 402624 - protein, 342 aa, unidentified
MIASTIGLDLAKHNFHVHAVDAAGLVIKTAALRRSEMIKFFQSAKPCLVGMEACATAHYWARELTKLGHEVKLIPPSYVKPFVRRGAKNDAADAAAICEAVRRPDMRFVAIKSEANQGFLMLHRARGLLVRQRTMAVCAIRAHLAEFGIIFGQGRQRIETIMSSIEEVAASLPEHARFALNSLMRTVGELNTQIEGIETKLAEVGRSDPVSNLLSSIPGVGPITSTAIAATVPNARMFRSGREFAAWLGLTPRQNSSGGTTRVGGITKQGDAYLRHLLVIGARNIVRYPKARAKVGGAWIDALLQRRRPMIVAVAVANKLARIIWAMMTNGEMFREANVKAA

SEQ ID NO: 402625 - protein, 351 aa, unidentified
MLADQVDYVIGVDTHCDAHELAVVAASSGGVVARSSQRANPRGYGEAIRFAAAHAPGVRVWAIEGSGHYGAGLARYLAVRGEAIVEVGRAPRSGQRLEGKDDRLDAVRAARAALGSDKLAAPRTGERREALRMLLSTRRSAVEVRRQSLTQLRSMIVTAPEELREQLRALPAQQLLTRCGRLRGPRSGSPDKLAAVLVLRTLAHRIQAATDEATTLKREILGHVRALAPQLLDEPGVGPIVAAQLIVSWSHQGRVRSESAFARLAGAAPIPASSGHTTRHRLSRGGDRQLNRALHTVILYRRRHDPTTKSYIARRVAEGKSTREAVRLLKRYLARHLYRVLNQTAKPATTT

SEQ ID NO: 402626 - protein, 323 aa, unidentified
MCKFIGIDVSKASFDVSYENSDGKFTHYKFSNNAKDFFRFIELIGDRDHCVMEATGPYYLNLACYLFDQNIKVSVVNPLQIKHFVRMRMTRAKTDKKDAAMIALYGQSEKPRLWQPDEPHVMQLQQLHTVIEGLQKQSTMLKNQLEAFSQSPVKDATVINTLKSLLKTLEAKINKLENRMQEIVKTHYGPTFNSLISIPAIGPKTAILLIAITNNFKKFNDIKKLSAYVGIAPRIYQSGTSVKGKAHISKMGNKYIRKLLYICSWSAKTCNEPCKQLYERLKAKNKPERVIKIAIANKLLRQAFVIGSNLSLYNKNYEFKFGI

SEQ ID NO: 402627 - protein, 338 aa, unidentified
MSIVAVGIDLAKNVFAVHGVGASGKPELVKPDVKRKKLLELIASLPPCLIGMEACSGAHYWAREFQKFGHTVRIMAPKFVAPYRLGGKHTKNDAADAAAICEAVTRPQMRFVPIKTLDQQSHLFIHRAHQGYVAERTALINRARGLLSELGIVLPQAYRAFKQGVHQVLEDLPGYCNQVIGDMLSEIAHLDERIDQDAKLIAKLAKEDEQSRRLMQLSGVGPTTATAIVASIGNGHDFKNGRQFSAWLGLVPRQNSSGGKTKLGSITKAGDSYLRMLLVLGARALLLSAPNKTDPVSKWALQLKERRGYGKAVVAIAAKNARMCWAVLSLGEGFRVPA

SEQ ID NO: 402628 - protein, 402 aa, unidentified
MPFFIGLDWASREHAVCVIDDTGRVGWEGRVEHSADGLAELRRRLARFGSPASLPVAIERPSGLVVDTLLDAGHPVVPIHPNALKASRPRYSAAGAKSDPGDAYILADLLRTDGHRFRPLQPLSDDTRALRALVRGRDDLVAQRVALANQLRALLERFWPGAAALFADVDSPIALAFLSRYPTPQSAERLGDKRLSRFLTQHAYCGRRAVGELLARLRAAPPSRVSEAEAEASGEVVRSLVAVLTPLVSQIQQLSAAIAAALAQHPDGPLVQSLPRSGQVNAAQILAELGDDRTRFPTPEQLAAESGVAPVTRASGKQRAVGFRWACNKRLRQALTTLADNSRHASPWAAAIYTNARARGCDHPHAIRILARAWVRVLWRCWQDRRSYDVTLHRAAQRLVAA

SEQ ID NO: 402629 - protein, 369 aa, unidentified
MRSHTLWFVDWTISPYMEFTMIARRDAACFVGIDLHKDTLTACAITAKTGEITYRKIACVAREKVREFLSGLPRPSVVAIETVGFYRWLWTEAEPIVDQVLLADARGARALAGRRIKTDREDAFNVAELVMTGRLPLAWAPPGQVQRLRDWTRHRNSLSRDHARGLHRVKSIMNRLNRPGPARMDAAGLQRYLLASVERIEADDLTMLWQHQRRLVEIEQDISASERRIVDLMKAPEFRPLRAILESIPGVGLITAATAIAEIGDFSRFPDSKAIGRYAGLTPIGYSSADKHRLGRICKTGSPDLRWALQQAAWTAIRCDASIKKNWLKISKTAGKKAAAVAIARKLLVLMWTLVRKDEPYKAREPLAA

SEQ ID NO: 402630 - protein, 387 aa, unidentified
MSQPFDASRSLTYLEQDSTIIAVIEMSQAKWLVAAVVPGVERQPLKRLDADEAALLKLLHRWRNEAGQAGREIKRIVVAYEAGRDGFWLARWLRVRGVEAYVIHPASIAVSREHRRAKTDRLDTELLLRAFLGWLRGEKRHCSMVAIPTVEEEDARRPNRERGNLVTEQTRIVNQIKAILTRFGIRTFRPTLRKAEEHLEGLRTAEGLPLLENTRAELRRHLARLHVVREQIRAIEQSRLGKLAMTSEKGPHAMVRLIARVVGVGVETADMLVNEVFSRHLRDRKAVARYAGLTGSPDESGKRRRERGLARAGNARVRCGMIQLAWRFLRFQKDSALTQWFQARTADGRGSTRKTMIVALARKLLIALWRLVTMGELSDGIVLRPAS

SEQ ID NO: 402631 - protein, 354 aa, unidentified
MSSTKYIGMDVHTESISIAVRNSLGKLVMECVIETKASTIVQFIDGLRGDLRVTFEEGTWAAWLYDLLKPHVTEVVVCNTRKNASRDSSKSDRIDARKLSEQLYMNNIKSVYHGEHGLRTLKELARSYLTISKDLTRVMNRLKALYRSWGIPCAGKEVYAPRHRAEWLAKISEAGVRRRAEHYYQQLDVLRPLHQEARRDLLLEAKKHKPWKLLRLIPGIGPIRAAIVIAVMQTPHRFRTKRHLWTYSGLALETYDSAQYRVAEGQLQRSKKPATVRGLNKDYNHDLKDIFKGAAMRASTAAGPMHDFYEALLAKGRKPTMARLTLARKIAAITLIVWKKEVRFDANYLKPQAA

SEQ ID NO: 402632 - protein, 380 aa, unidentified
MRSVALDLGAKSISYCEVSNGQVIRRQTVKAIGSLEPSLGSQAAPARVAIEACREAWFVHARLTEWGNEVLLVDTTRSRQMGVGQHRRKTDRIDAEVLARAVERGTIPLAHLLSPHRQDLRRQLGVRRALVETRAQYIVVIRGLLRERGLRLPACSRPWFPTRLRETDMPTELRALVEPLAVAMGVLNAQLEQVEVRLAEVCAMEPAINQLATVPGVGLIVAASFVSVIDDAGRFNNAHQVEAYLGLVPSEYSSGGPAKRRLGAITKQGKTYLRSLLVQAAWLIVRSNQKDDPLYCWAKAISERRNARIAIVAVARRLAGILWAMWRDETVYEPGIVARTSSRGLRRAAQAIELRADALQKASKKTRRQARQLPQEVPVQ

SEQ ID NO: 402633 - protein, 392 aa, unidentified
MSQHFRFDASRSLTALKQDSTIVAVIEMSQTKWLVAALVPGVERQPLKKFDAQEEMLLKLLHRWRCEAGKTGRNIKRIVVAFEAGRDGFWLARWLRARDVEAYVIHPTSIAVSREHRRAKTDRLDTELLMRVFLGWLRGETRHCSMVAIPTIEEEDARRPNRERQNLVTEQTRIINQIKAIFARFGLRTLRPTMRKLAEGLEDLRTAEGTSLPQNTLSELRRHLARLRFVRDQIRAVEQERLRKLAVAPAAETKSPDAMVRLIARVFGAGIETADMLVNEIFSRHWRDRKAVARYAGLTGSPDESGSRRRERGLARAGNVRVRCGMIQLAWRFVRFQKNGALAQWFAARTADGRASTRKTMIVALARKLLIALWRLVTRGEVPQGIVLRPAS

SEQ ID NO: 402634 - protein, 391 aa, unidentified
MIFIGIDAAKDKHDCFVVSSDGEVLCDVFTISNTLDGFNDLLSKIKSFSKDLSKTKVGLEATGHYSYNLLGFLLDTGLPTYVLNPLHTNLYRKSLSLRKTKTDKVDARTIASMLMSCQSLKPYTRALYHNEELKSLTRYRFDKVSERAKLKTSVSRLITILFPELEKLVSVVHCISIYALLSEFPSAKHIANANLTRLTNLLYSASKGHYNRDTAIRLREAARNSIGSVMPAKSLELKHTIKLIGELDDEIIEIEAAIKQIVDSLGTTILTIPGIGYATAASILAEVGDFSNFETSDKILAFAGMSPSTYQSGQLTNCYAHMEKRGSKYLRFALYNATKYVCIYDGNFAAYLAKKRAEGKHYNVAISHAAKKLVRLIFALEKSRLPYMPVA

SEQ ID NO: 402635 - protein, 319 aa, unidentified
MQTTAVVTTFIGVDVSKDSLVSHVYERGTRRTVPNQRHAILAWLKTLPSGSSIGVEATSTYHELLADLAYRHGMLVYVLNPKDVHRYAKGVGMRAKTDRVDAALIARYIVRERSQLHPYCPASSELRQLQRLLMRRAKLSRCRAGLQQSLRGVTGLTRALNQLLERFDALIEQIDQRIEGLINACPQRQAANRRLRSIKGVGPVVAPALLYLLLRFAFLNADSFVAYIGYDLCADDSGQRVGRRHLSKAGPSELRRLLYTAAMAAVNSRAWKPIYQRQLDKGLSRTAALVVIARKIARTAWSIYTHNTTFDPARITQQA

SEQ ID NO: 402636 - protein, 342 aa, unidentified
MSSIRGMVGIDVSKKELTYALGDARTHQIRWERAVPRTVAGVKKLLSQTPPEVPWVIEPTGRYSLMVAKLALEAGQEVLMAPPRKAKAFLASLPQRAKNDRLDGRGLALFGLTRAVSRPLMPYPVKSEKVEQLDQLLSARKGISQALSRLKQQQRELPYAAGALGEAVADLEKRLVALDERIAEQTKAQDGFPVAKELDAVHGIGGITAAAVAARLDAKGFGHPDQFVAYIGLDLVVCDSGEKKGKHRLSKQGDAELRRLLYLCAAASLRAKGSPFAAQYERELAKGLPRTAALCIVARKMAKLCWSLHHHRSTYDPRRVYQQAPAQPRPDATPAAEAASAD

SEQ ID NO: 402637 - protein, 393 aa, unidentified
MRISVGTDVAKETHWVVALTETGEVLLDHAVDNDPAAIEALIAELGALPGECTIGLDVLGGIATLLSAMLLAAGQRVVHVPGLAVNRARQGTTGGETKSDPRDARVIAEQVRSRRDLRSIAVEEEPLAELQLLVGRRRDLVAEQTRRLARLHDLLSRIHPGLERALDLTNKSGLCLLTRYVTPAEIRHAGRARLVRHLRASGARHVEAIATAALEAAQRQQIALSGERVAAGLARELAREALAVRERLGEIDAELAQVLAVHPDSTLIRSLPGMGVILTAEFIAEVGIRDRFADADALAAAAGLAPVLRQSGKVRFLRRPLGGDKRLKRVFYQAAFCSLSCPASRAFYARKRREGKRHHQALLALARRRVNVLWAMLRDRRPYELQEPRCGAA

SEQ ID NO: 402638 - protein, 400 aa, unidentified
MRVVFGIDVSKASSEVAILVNGEKVHGYTIPNDAIGFNRLLEDLGTVYQPEIVFEATGVYSRRLQAFFEDNSYAYIRLNPLESKKQLDSLRVRKTDKIDAEKLATSQFILNRKPSYVQEALYQELRDLSRFYQNLTEDIVCAKNRLHKVLQVTFPELENILSAPTGEQYWNLVMTFPCNSFVLELDDAALRAIIRQSTSKRISEKRVTYLVDKLTKLANQSYCAVKKTSPVIEEVKYYAGELLRLSEYRQGVLEEMVTLAQPLPEYEILLSIPGIAETTATSIIGELGDIRRFHSANQINAFIGIDLRHYESGNFLAKEHITKRGNPYARKILFKCIHNIASASHTNPCHIADFYEKRKRQSQVTSTKPHTIASIHRLIRTMYYLITHNKLYDYTSTQNR

SEQ ID NO: 402639 - protein, 393 aa, unidentified
MSLDHHFAEPTAIRTNLGAIFVSLELSRSTWLITSLSPGGGEKMSKHGLSAGNIAALLARLSELKQKAFARTGQSFQVIVIQEAGLDGFWIHRVLQSEGVESHVVDAASIAISRRRRRAKTDRVDGEALVRALLAYKRGEPRVCAMVRTPTPEEEDRRRLCRERKTLTNERVQHVNRIKGLLFCQGISDYEPQRRNRRQRLDELKTGGGRPLPPHLKAQITRELDRLELLLGQIEAVEIERDALLSAMKPDGMNADAVRSPPAMLINLNGIGPEIAAVLWSEGLYRSFANRKQVAAYAGLAPTPWQSGSVAREQGVSKAGNPRLRTTLLQLAWLWLRHQPQSALARWFHERVRRNGGRLRKSTIVALARKLLVALWKYVTAGVVIDGAVARAA

SEQ ID NO: 402640 - protein, 404 aa, unidentified
MTSSRRVVIGADTHLDTIHLAAITDTGQLLGDAEFRTNPTGYWAGICWARSFGEVLTAGVEGTGSYGAGFTQALQTNNIHVVEVNRPDRSARRRHGKSDPLDAYSAARTVLAGGALAVPKDPHTGALKALLVARRGAIKARTAAIQQIKDLLVTGPAELRERYRRYPTTLRLVEALARCRPTAHQDPASVSVLIACKALSQRIQFLEHQADELTAEVDALTTAANPALRAAFGVGPDTAAQLLITAGTNADRLRSEAAFARLAGVAPVPASSGKTTRHRLSRSGDRAANNALHRIALVRWSHDPRTRDYAARQLAAGRSKKDVLRLLKRAIAREMFKHLTAPCPIDDYSDLRPARQSKNITLSTVADHFGIWPNDISRLERGLKRDDTLAANYRHWLNTQLIAA

SEQ ID NO: 402641 - protein, 423 aa, unidentified
MSTATLCVGADVHLDEIVLRAVDKADGHEVIRRFRVTNNLPGAQSAAATLAQTATQGGYPRVEIGWEATGLLWVPFHRLLSTSPLLQPFELELICINPKLVANFKDGLVLRRPKNDDRDAADIAARVRFGELPLSYVPSDFWQGLRRLTRYRFRLSQMLAREEMRFQSYAFLKASDWKRVKPFSTILGATSAALLTEFTISELTAMSHDELVDVIAHRGRGHFDDPDETARAVQEALRTSYPIDPHMDEMVTLTLATGWEHIRFIKRLMKRLDRQIAHYIAPFPNPLISVKGLGAVITAGLLAEIVDITRFPHHKHLAQYVGLTWEKRSTGQWVSQTTRLSKVGNVYLRYYLILGADKLRQFNLEYQAYYWRKYQEVSKYQHKRALVLTARKLVRLVFALLTKNVLYVRPQMLLAVQEDQLLQ

SEQ ID NO: 402642 - protein, 358 aa, unidentified
MHAWGQQARDLAWVFIHLEFLSPYSRKGRVATLLSQGWTNMEKAACFVGIDIAKAKLDVHFHPSGDTFTLPRNQEGISSLVTRLQDCQPTLVVLEATGGLEIVVVSALGLAGLPVVAINPRQMRDFSRAAGYIAKTDRLDARLIALFAARMQPEIRPLPNEQSIRLAELLARREQLIAMITAEANRRQALMSTQLTHQIDEHIEWLEKRLSDIEAALDNAVRKTPLWRETADLLTSVPGVGPAMTRTLLFELPELGSLSRRRISSLVGVAPMARDSGKMKGKRSIRGGRGSVRAKLFMATWVARTHNPVIRASYERLIAAGKPRKIALVACMRRLLVILNAIVKTKTPWHSDLALNRP

SEQ ID NO: 402643 - protein, 373 aa, unidentified
MPKYSTAFGMDVHLRSTTVCALDADTGEAVTRRFPGNPWGEIAGWMDGFPGPSLAAYESGYLGFAPQRELAGLGVECVVAAVSKIPRSAADSASKNDRNDAARMAKAILAHDISPVWVPSPEVEGIRDLAGAYDGATARLATAKQRLLAFLARRGFVYGGTTPAGNPRKYWTYDFLRWLDKVRPEDDGGVRTLAALRNEVEAAAEARADLLSEYRAAVDASPIAAEVAALQSIKGCAFALAAAFSAEVGDFTRFRSGRRVTAYFGLAPSQRSSGDSVRLGGISGAGNALVRKLAVEGSWCYAAARHQPKLMPRDTGVPLEIRMHGRKGSERLLRRREEMLARGMPAAKANAATAAELVRWLWALGMMCREGAE

SEQ ID NO: 402644 - protein, 425 aa, unidentified
MNYKQNEKINQVKESTLVVGIDIGSTTQYARAFDWRGIELGKVFTFSNSREGFESFKAWMQHLQDKYRKSDVIVGIEPTGHYWFDLGAYLEDEGILLVMVNPYAVKQTKELDDNSQSKNDRKDPKVIAKLVTEGRYSAPYTPDGVYADLRIMVTNRKRLIREMTQIKNRFARWFAIYFPEYTDVFGDYEAQSSMLLLKKTCTPEAIVELGAEKINQIWRDAKLRAVGMKRATTLCETAKRSIGLKKGSSAARYEMKLLLEDYEYKKAQLDAVMEEIEKLCRKIPESGQMLAIKGIGVITVAGFLAEVGDVRRFESPRQIQKLAGLSLRENSSGKHKGQTSISKRGRSKLRAVLFNAAIPLIAKNPEFKSLHEYYTTRANNPLKKKQSVIAISCKLIRVFYAILAKGVTYDAQKLISDIHRQPQVA

SEQ ID NO: 402645 - protein, 415 aa, unidentified
MVDVIVERCAGLDVHRDTVVATVRVPGSGKSRRRRLQETRTFGTTIGQLERLSDWLAECEVTRVGMESTGCYWKTVFYALEDRFDCWLVNAKHLRNVPGRKSDVIDSRWCCELVELGLVRPSFVPPPEIRRLRDLTRLRSTQVQERTRAIERLEKVLQDAGIKLTSVASGVYSVSARAMLEALLAGVTDPVVLAELAKGRMRKKIPQLQEALASRFDIGHHGVLVAGLLAHIDALDQAIGNIEARIGIATAPYAELIELLCTIPGVGVRIAEILIAECGVDMSVFPTVAHLASWAAICPGTNQSGRKRGSGKTRNGDTWLSTALTQAAHAAVHTKDTYLASHYWQLRGRRGDAKAIGAIRHDILTAYYHIVRDRVAYRELGPDWLTRRHSPEHRTRRLVKQLEALGHHVTLQPAP

SEQ ID NO: 402646 - protein, 428 aa, unidentified
MNCNTQNAKIASITEKTLIVGIDVGSETHYARAFDWRNYEYSKKPLKFSNTEAGFLTFKAWVEGIAEKHGKTAVIPGMEPTGHYWFALGKFLQDNGMKPVHVNPHHVKKSKELDDNNPNKNDRKDPKTIATLINEGRFSYPYIPTGIYAEIRSLSNLRFQTQEELTRIKNRVARWFAIYFPEYKDVYGDFKAVSGRMVLKEAPLPEDIRKLGVEGVNQIWRDAKLRGAGMKRAKTLVSAAEHSVGSKEAPEAARYELRNLLNDMDVYAVRMEELLRSIEEKLKEIPYVDKLMEIRGIGLITVSGFVAEAGDIGRFDNPKQLQKLAGYAIVANDSGKHNGESRISYRGRKRLRYVLYEAAISLVGKNAEFKVIHEYYRTRKENPLKKMQSVVAVACKILRVFYAILTKGVDYDPVKLVRDIRRPQLQAA

SEQ ID NO: 402647 - protein, 345 aa, unidentified
MTIVKTRAITGGVDTHADVHVAAALDPIGGLLGVREFPATVAGYAGLLGWLGGFGAIALVGIEGTGSYGAGLARHVTAAGIRVVEVDRSGRQDRRRQGKSDPLDAVSAARAAQSGRARGAPKGRDGAVEAIRALMVAKRSARSERVQTINQARALVLTGPDDLRTRFARHTAASLVSGLASLRPRPGDVVGYATRIALRELGRRAEFLDAQLERLDELIAPLVAARAPGLLALHGAGPDTAALLLVAAGDHPERLRSEAARAHLCAVAPLQASSGKVTRYRLNPGGDRQANHALWRIVLTRMSAHPPALIYVERRTKEGKSKKEIIRCLKRYVAREVYRHLRAAG

SEQ ID NO: 402648 - protein, 457 aa, unidentified
MSKRRSKTKSKSINVPKLPPQLQHMNLNAAGIDIGSERHMVAVPEGRDTVSVREFGTFTADLEALATWLKQCGVTSVAMESTGVYWIPLFELLERHGFEVKLVDARHVKNVSGRKSDVLDCQWIQQLHTYGLLAGAFRPPDEICVLRSYLRQREMLTQSASMHIQHMQKALQQMNLLLHNVVSDITGVTGMKIINAILAGERDPRVLARNRDQRCHNTTATIAKSLVGNYREEHLFALRQAVDLYETYQAKIADCDRAIIKQVEKQPNSSDEGPPTPAKQVQARDRIRAGVDVRDLLFKKSGVDLFAIPGLAADTLLTVASEVGFDMAPWKTEKHFASWLSVCPGTKKSGGKVLNNKTKRNPNRATQAFRMAANSLSHSQTALGAFYRRIKARSGGQQAVTATAHKIARIYYAMLTQGTSYVELGQQAYEQRYKERRIDHLKVQAKSLGFQLVPCAS

SEQ ID NO: 402649 - protein, 446 aa, unidentified
MSDRSGLSRGDRNRNARLARLRQLLPFDHAIVGIDLADDKQAAVVTDHDSRVIARRRVSARAWELGDLLDWAVAKAFAAGFASVTVACEPTGHRWRVLDQLAAGRGLALVCVQPLLVYRSREGEDLTRDKSDPKDAVLIARLAGELRCYEPERADAVWARLRHLGARRRQLTTDATAQVNQIRDLLECAWPAVLGASGSPFRSTTWCAALAVVLDRCAGDLSRVVRLGPARFEGAVRRELPRWGAVRPCLRIVRAACAALRDPAGVMVHRPGALERAHLALGDWRDTCARLAGAEARMVAVLDDLGLTALVTTIAGLTPAGAAAILAETGDPARFASPRSLVKHAGLCPRDNASGEHQGKTSISGRGRPGLRLAAWRAVWAAMPNNPVMAARFTHLTTRQDNRLARQQARTACAAALLRWIHVVVTRRVTWDPAIAAGGTSLQHAA

SEQ ID NO: 402650 - protein, 284 aa, unidentified
MRFYNAPHRHWCRIDLHARTMDVCILDSQGETLVHRNLKANPEAFLETVGPYRDGLVVAVECIFTWYWLADLCAREGIAFVLGHALYMKVIHGGKAKNDRIDSKKIATLLRGGMLPQAYAYPTAMRATRDLLRRRLHLVRKRGQLLAHIQMTAQQYNLPPLGKRIAYPANREGVAAHFPDRAVRKSIELDLALLERYDDLLRDLELDRVRQAKQHDPQAFQLLRSVPGIGKILALTILYEIHDVHRFDRVQEFASYARLVKCAVESAGKKKGTSGAKMGNVHLK

SEQ ID NO: 402651 - protein, 337 aa, unidentified
MQRQYVGIDLHRRRSVIVRMTEDGEVLECVRIDNDPVALSLELAKAGPDPEVALEATYGWYWAADLLAADGAGVHLVHPLGLHWDARRVKNDERDATELAHRLRRGDLPESWIAPPELRELRELIRYRAKLAALRTSAKAQIHAVMAKLGILPTLTDMFGPVGQVLLDEMPFEGAYAIRVGSLRGLLERYEQELAMAERELHGRLVDHKGYWAIQALNGVGRVTAAIFVAEIGDVTRFSDARHLCSWAGLTPTHRESDTKVHRGHITKQGSTLVRWAAIEAVARYHGGAPIAPAFRRIQQRRGTMIARVAAARKLLSLVFYGLRDGEIRCLADKEAG

SEQ ID NO: 402652 - protein, 408 aa, unidentified
MKTLHKRCAGLDVHKAEVVACLRVVNKRKVGHEVRRFPTTTHGLLELAEWLEHAGCAHVAMEATGVYWKPVWHILEGRFALILANAAHVKNVPGRKSDVNDATWIADLLAHGLIRASFVPPPAIQELRDLTRTRKQLRREIVQHTQRIQAVLEEANVKLCSVITDILGASGRRILTAMIAGETDAQKLAALGSERLGCTRTALVEALTGRVREHHRFLLDQHMRTIEQLEASVAAFDTRIKAALAPFRDAVERLKEVPGLATIATEVVIAEIGPDMSPFPTAGHLLSWAGFVPRLDESAGKRRSTRIKKGAPWLKPVLVQAAWAAARKKDSYFQAQFLRLKARHGAKKAAIAVAASILTTVYHMLRDGTCYQDLGSEYFARRNPARTAAKLADRIRNLGYHVEIRAAA

SEQ ID NO: 402653 - protein, 453 aa, unidentified
MAQRKAGKGPKIKKARANLVITYPNAAGIDIGSASHFVAVPPDRDDEPVREFPGFTTDLSAIADWLSACGVDVVAMESTGVYWIPLFELLESRGFKVLLVNARHVKNVSGRKSDVLDCQWLQQLMTYGLLSGAFRPEEQVCVLRSFMRQRTMLLKSQATHVQHMQKALTQMNIQLANVISDVVGETGQKILRAILAGERDGHVLAAMKNSRIHASDEEIAKSLQGNWRAEHLFALKQAVAGFDFVGSQLAVVDQEIERQLQDLEVHEGDPPPGKKRGKARNAPRFDLRSLLFRMCGVDLTRIDGIDVTTALAVISEIGIDMSRFPTEKNFTSWLGLCPGTRITGGKVMSGRTKRCANRAAQALRLAAAALRTSKSALGAYFRRMCSRMEKAKAVTAAAHKLARLIYTLLTKGQEYTDQGQEYYETRYRQRVVNHLSQRVAKLGMKMVPIEEAL

SEQ ID NO: 402654 - protein, 347 aa, unidentified
MSDIIRIGMDTSKHVFQLHGVNAAEEAVLRKTLRRKEMIDFFAKLPPTEVAIEACGASHNWGRTLTGMGHAVKLIPPAYIKPYIKRGKNDAADAEAICEAMSRPSMRFVPIKSADNQAALMLVTMRDRLIRTRTQLCSAIRGNAAEFGLVAGAGTCRVEPLLERVAGDPDVPQLARDLFALQAEELTLLRARIKDIDAKLLAWHRSDARSRRVAQIPGVGTLGATLLALKTPAPEDFQSGRAFAAWIGLTPRDHSTGGRVRLGSITRAGDALLRRTLVVGATALLRHIRNSRSRHASPWILDMLKRKPPKLVAVALANKMARVAWKLMVSDQDYRAPTAAVPLSSAA

SEQ ID NO: 402655 - protein, 330 aa, unidentified
MHVAGIDVAHKTLGVVLSADEKAGKAQEFANTADGHQALVKALKAARVERICLEATGSYHLDLALALDAAGLALMVVNPKAAKRFAEALLTRTKTDAVDAAVLAQFAQRMPFEPWQRPDNQALALRACARRLEALNRAKTEAKHQLHALTQSQTTPEVVLADVRLTITQCEAQIKDLRTWAEGQIQADAHLKEIFALLTTVKGIATASAIQLMGEILVLPADMRAKQWVALAGLDPRQSLSGTSVHKKPRLSKAGNRYLRLALFMPALSAARHDRHVNGYYRHLIEERGLKKIQAVCAVMRKLLHAIHGMLKSRQPFDGSRFYTLAATPT

SEQ ID NO: 402656 - protein, 438 aa, unidentified
MTKTVTSSLRDIAYKLDVDYIIIILRISNQDVTCIELRILSKLQGDVFMYIVGIDIGKANHEATIIDETGTIIGKSLKFSNSHIGANKLIDYIIKNIGQSDVTFGLEATGHYWLSLYSFLLDKGYTIHVINPIQSDSFRNLYIRQTKNDTKDSFIISEVIRFGRFTKTKLADDKLLSLRQLCRYRLSLVDSVSELKCRIITVLDQVFPEYEKLFSDTWGISSKKLLEKYQTPEEILEIDTSELASFLSESSRGQLGYAKAEKIKVAAQNTFGIKVAQSAFKFQLKQLIDQVLFIESQIKSLDKEIEFYYNQFDCHLTSIPGIGAVTAAIILSEIGDIKRFSNSSSLVAYAGIDPTVKQSGQFSSNNNRMSKRGSPYLRRALFLAASTCTLHESSLNDYYNKKRSEGKHHLTAVGAVAHKLTHIVFAIMRDNKDYEPLS

SEQ ID NO: 402657 - protein, 355 aa, unidentified
MDSEKYIGLDVHQATIVVAVMDSTGKLVMESILETKAATLLQFFAGLRGTLSVTFEEGTWAAWLYDLLKPHVDKLVVCNPRKNALLKDGNKSDRIDARKLAELLRGNQLKPVYHGETGVRMLRELARSYLTIVKDLSRVMNRLKAMYRSWAIPCAGRDVYYARHRAQWLDKIREAGVRRRAERLYEQLDMLRHLRQQARRELLAESRKHAITAKLRQIPYLGPIRSALAMALIQTPHRFRTKRQLWAYSGLALETRISAEYRYVEGQVRRSKKLLSIRGLNKDHNHDLKGLFKGAATMASARPGPFQDFYQAALAKGIKPTMARLTLARKIAAITLTLWKKGENFDAEKLKSQAA

SEQ ID NO: 402658 - protein, 382 aa, unidentified
MLNASGAVVMQQRITHDVAGLTLLASRLAQLGSPVSVAIERAEGLLVEFLQTLSMVTLYCVPPKISARARERYRLSAAKSDLFDAFVLADTLRHEHQRWRPLSRPSALTAELQAVSRDRQRVLHAKLACESRLRAVLETYHPAPLHVFSELDRDISLAFIRAYPTPDQARRVKTARMAAFCARQQYSGRTDPQVLVDRLTPHLLSASAGTTAGKSFAARLFAEELQVHSDHLRAFDKRIGHLLKDHPDAPIFLSFPGIGPIVAATLISEMGEDRDRFPTVEVLLAETGLAPVTKASGRTRQVRFRYAANRRMRHVIDWWVFVASREDPWSKTVYDTARSRGQGKYRALRGLGARWTRILWRCWTDRTCYDPDRHPRPELTAA

SEQ ID NO: 402659 - protein, 357 aa, unidentified
MKSQEIKYVGIDCGKKTLEVIRIGDNSLHQRQQFSTTEIGISKLINWLNPNDVVGLEAGSQSFRIAKSILNKGVQVIVLNPGNLATIYQSLKKTDKEDSLKIARLIQRHPIEELPTVPIPNDEEEDNRRLCSEHENWTKQLTQGKNRLHSLFTQAGLTQITKKHLRTKANREISVALLPSRYQKEAERILKVLDLVEQNLKLIEEEIKEALKKNKAYAQTIMSMPGVGMITSLAIMSYMGNCKRFSSAKQAAYYVGLVPRVDISGDSAYYGRIVNRGCHSIRRVIVQAAWSLVRCQYGGKIKEFYQRLYPKKGAKKSIIATSRKMIEILYTMIKTGELFDSMPEKVLNRKLTQYGLM

SEQ ID NO: 402660 - protein, 350 aa, unidentified
MQTQRKQLEFSGQNFYCGIDTHKRNWTVTIQTDELVLKTFVQDPEPSILHNYLQNHYPGGNYIAGYEAGYFGYCIQRNFESLGMKCVILHAGDIPVSQKDKEQKRDARDSRKIANILKNNDMVPIWVPPVSLEQDRQLLRTREKLTTDQTRVKNQIKAALQINGIRYPDSFKSKGSHWSARFIQWVNDIQLSEPSATEAIRSKIRHLLFIRGEMLNLLRQIRALSRTDRYTRLYNKLIQLSGIGMIMGMTILTETGDIRRFKRPDNYRSFLGVVPRAHDSGDKEHPGRITKRANSHLRYLIIETTWIAIRSNPYYLNIYQQYRKRMKTNVALVRTTGKLANQIYFCLKNE

SEQ ID NO: 402661 - protein, 320 aa, unidentified
MRFYTQQHRYYCGIDLHARTMYLCVLNQEGEIVLHRNMPSTSESFLKAVAPYRDDVAVAVECIFTWYWLADVCAKENISFVLGHALYMKAIHGGKAKNDKIDAHKIAVLLRGGMIPMAYVYPAGMRSTRDLLRRRMHLMHKRSELLVHIQNTNSQYCLPQFQKKIAYKKNREGVAEHFPDLSVRKSMEMDLALIDHYDKLLTDVELYITKTAKIHDIERFSTVQDFVSYCRLVKCSKESAGKHYGFSGAKIGNVHLKWAFSEASVLFLRQNPEAKRYLDKLTSKHGKAKALSILAQRLGRAVYYMLKRDKAFDMKKFFSS

SEQ ID NO: 402662 - protein, 364 aa, unidentified
MFKTVELEEVPMEIVSALDIHRSQITFKTLDLRSGEVRRGRVSPATREALGEWLEPFAGLDAHFALEGTTGWRFVVEEIERAGHRAHLADPAETAAKRGRKRRAKTDNADCDLQLKLLLAGELPESWIPPAHILELRTRVRMRKVLVDQRTAWQQRLQAQLFHQGIPSGLRLRTRAGREALARAELSPAGRQLVSLGLRMLEVIDLELVPLDRQLRAFARRQPGCRALIDQLYGVGPVSATAILAELGDCRRFARSNDAVRHSGMDVTVYQSDSKRAPGHLSHEGPELLRWALFEAAQCASRQASPDHAYYRQVAERIDHNRACLSVARKLCRRAYHILRELGEQALAPVEVAPTVKEVVRPAA

SEQ ID NO: 402663 - protein, 318 aa, unidentified
MKYYIGLDAHSTTSTFAVVDENGQCVLRETVKTSEQSLVHVINRIHGERHMTFEESTISQWLYIQLKDKVDNLLICNPTYVAKKQGAKTDFRDALHLAQELRTNHLQTVFHDTSHWMEIRTTVSGYLDIVEEIVRFKNRLKAVFRAEAIQTDENSFYKNKNRIKELKNPSAKFVAEKLFDQIEYLESEKDKYKEVFERNRKKYRPIRNLMTIPGISIIRANIIAAIVCQPARFENKHKFWGYCMLVRHIQISGGKIYGNKRFFGRRELRNVFLGAAENVMRLDGELRDQYDALRAKGTDHKDAKISLARKLLRLHCAS

SEQ ID NO: 402664 - protein, 338 aa, unidentified
MYYTGIDLHKKTSFITTINESGKVVFRHNFPNKEERILDYFVNLDGPTKIVIESMCSWYWLYDLLTAHNFNVVISNPLKTKAIASAKIKNDKVDSHMLAQLLRADLIATVHVCSLKTRKLKELLRHRRRLVQDATRMKNRIHMLLMKNNTSIPVSDLFGARGMKYLKEIELPIYHQKQLKSYLTLYGQLTKQIEPLTKRIGHLAKKDPLAKLLMTIPGIGPLTAMFVIAEIEDISRFPSYRNLASYAGLVPCLDASADKSRTGRITKQGSPYLRTALVEAAQVIPRMKKSRLNIFYRKRIVRAGYQKAIVATAHKILQYVYYVLKNQTPYLEKYPAGA

SEQ ID NO: 402665 - protein, 295 aa, unidentified
MANEAEGWGELTAMLQAAQVDLVVVEATGGYERGLVCALQGAGVSVARVNPRQARDFAKSMGVLAKTDQVDARALRDFANVLARHEARHKYITPMLESAREVLAELMTRRRQLVDMRVAEHNRLEHAGKRAAGSIASVIKTLDKQIATVDWHIDDHMDHHFRSQRELLDSVKGVGPVTILTLTAALPELGRLGRRQIAKLVGVAPLADDSGSRQGKRRTWGGRADVRAVVYMAAIVAMRHNPVIRAFYERLVAAGKPKKVAIVACMRKLLTILNAMLRDQALWDATRHIQLAPKT

SEQ ID NO: 402666 - protein, 375 aa, unidentified
MKEKLRFLGLDVHAETIAVAIAEPDGEVRSLGTIPNRAESIRKLIKKLGPAEQLRACYEAGPTGYVVYWQLAELGIQCEVVAPTLVPVKAGDRVKTDRRDAEKLARCYRSGDLTAVWVPDEGSEALRDLVRAREAAKQDQMRARHRLSKFLLRSGQRPPTGVRSWTRPYLIWVAQLRFTQIAQESTRQDYLHEVEHMRERVARLEQAIMEAVKVASPALQQVINDLQALRGIADISAVTIAAELGQVSRFGSARQLMGYCGAVPSENSSGKRVRRGSITKTGNAHLRRIVGEAAWSYRRPPGIWYGLRRRQESISEETKEIAWKAQHRLHKRYMKLGTAGKVQGKIITAVARELLGFIWAIGTRAEMIVNQRTAA

SEQ ID NO: 402667 - protein, 383 aa, unidentified
MDTTATRTREYSAGGPVLYLAFELGNAEWKLGFSVGFAQRPRVRTISARDLEGLQREIGLAKKRFGLADTARVVSCYEAGRDGFWLHRYLVEAGVENLVVDSSSIEVNRRFRRAKTDRMDVAKLVDQLMRFEQGEKKVWHVVRVPGAEAEDRRHLHRELEDLKAERTQHINRMKGLLAGQGVQLGIEAGFLERLSAIRLWDGRPIAEGLKGRLQKEYERLRFIQEQIHELEAERVEAIRRSESPEVEKVRQLLRLKGIGLNSAWVDTMEFFAWRDFHNRKEVGGLAGLTPTPYQSGDSSRERGMSKAGNRHVRALAIEIAWGWLRYQPESQLSQWYQRRFGEGSSRVRRIGIVALARKLLVALWRYLETGLIPQGAVLKTRFI

SEQ ID NO: 402668 - protein, 386 aa, unidentified
MLPVIDALEVQKGRPAMKQNTTELENPRRRVVRKNKQRELTIGVDLGDKTSRYCVLDREGNVLFERSTATTKKGLAQAFASMGASRIAMEVGTHSPWVKRLLESWNHEVIVANAHRVRLITESTRKDDRLDARKLARLARVDPELLSPIRHRSEGAQAHLVMIRARAVLVEARTKLVNSARGVTKSFGERLASCDPDQMRVKCLVGLPSSLQSALQPLVTAVESLTRQIHEYDNKIAQIARSEYPETARLRQVTGVGELIAYVLTLEDPQRFRRSRDVGGYLGLRPKRRDSGASRPQLRITKEGDVYLRMLLVQGAHYILGWHGVDTDLRRWGLKLAARGGKNAKKRAVIAVARKLAVLLHRLWVTGARYEPLRHSQIASSLQVAV

SEQ ID NO: 402669 - protein, 346 aa, unidentified
MDQQHYVGLDVSLETTSICVVDQNGAIIWRGKCSTEPEAISQAVRTHAPSAVRVGLETGQMSNWLTLQLRKHGLPVVCLDARHAKGALSMQLNKTDANDAHGLAQVVRTGWFREVAIKSMDAQALRMLLMARAQLVSQRQAVANNIRGLLKTFGFVIARGSNGPFAVRVREVIADNATLSVIIEPLLLVWQALREQVATLDQQVNLRAKSDAAARRLMTVPGVGVIVALAYTAVIDNPSRFRRATSVGAYLGLAPRRYQSGEVDKAGSISKCGDGLLRSYLFEAANVLLSRHPRSCKMKTWGLALAKRIGMRRAKVAVARKLAVVMHRVWKDDCDFNWGDAPAAAE

SEQ ID NO: 402670 - protein, 346 aa, unidentified
MTHSTTVGVDLAKNVIQVSVISGRGKELSNRSLSRKKFAEFLAKQKPSLVAFEACATSHYWARAAQRHGHEVRIIPAKFVAPFRQGHKTDSNDALAVAEAARRPSIKEAPMKTVEQQALQAIHRSRQLLIQECTALSNHLRGLLMEFGVVIPQGFASLLRAVPEVLEDGENELPDLYRPTLHRMYTRLLVLREDIEAMTKEVEVLVKQHPICSRLTALEGIGPIGALLLYATLGSGTAFSGSREFAAYLGLAPRQYSSGGKTNIVGLSKKVGNCRLRSILILGARAYTYRLKEPKSAKDRWLKNAIDRNGHSRAAIALANKNVRTAWAMVTQGTEYQRRGHLKVAA

SEQ ID NO: 402671 - protein, 403 aa, unidentified
MTAFFAGLDWASQSHAVCIIDDHGNVRERVDIAPSAAGLTQLQRSLVRDERPPIAIERPSGIVVDTLLDAGFTVIPIHPNAVKATRPRYRSHGAKSDASDAYLLADLLRTDGHRFAPLPAQSDDIRALRALVRGRDDVVAARTQLANQLRSLLASFWPGAAEVFADVDSPIALAFVERYPTPESAHRLGPKRMAAFCAQHAYSGRRSAQDLLARLQQAPAGVCAEMEMEAKGELARSLARALSQLVEQIRLLSSRIEHHVESLDDGRIVMRFPRAGRICAAQILAELGSVRERFANEARLAAEAGIGPVTYPSGKSRTVTFRCACNHRLRAALTCLANNSRHASAWAAHVYNRARARGCDHPHAVRVLARAWVRVIWRAWTDRKPYDPTRHGAPQLLAKSAGG

SEQ ID NO: 402672 - protein, 443 aa, unidentified
MSRKRRTHLRGKRGQAFADQIRGIPLDRILCVSIDVHKYFHVVMIHNVLGEIVTPTFEIDIFQTGFDQLCQAIDEAIARTKAQLVLTGLEPTGHYFENLARHLCQRPQPVTLINSYAVKKNRDQQMMHREKDDEIDTASIGDLLRRGEGTPFKPASGVYLQLQHLDRVRLSKIKIRTMLQNQVLGHLDRIFPGLVIIAEEAKARYTPLFATDFWKCQTMQHLIRVCPDPRQLAAMSPQDLIDAFHAQHYPMGPITAAKIIAYAQKVLLPDAELIAIRCELLAHDLALLDEVEDHITQLEDRLRTLLAETPYQIWINLKGLSDIQVASLAAAIGDPANYSYAAQVFRRSGLVSGRDDSGIRQRQGKGKRVVKVGDVYLRRALMNALTTLILHQPVLQQYSNKLKKSKPAGVAHVATARRATGILWATLRDQQAKTLILKKGTAM

SEQ ID NO: 402673 - protein, 333 aa, unidentified
MQHYAGLDIHKKNCQAIVCTEKGNTVKKGRIPTDPEKIQEFFQDFKDLTIAIEACNHWEYIFEILESKGHQVVLAHPLKTRIIAEARVKTDKVDAKILTHLLRTGFLPTSYIPCKKIRDLRNLVRRRIFLGRYTARLKNKIYAELLRHGIKYERGPTLFNGKGRYWLQTLKISSIDSYLNMYESTLEEIKNLELELKKEGRQYEETRLLTTIPGIGTYSALIILSEIGDITRFPCEDKLYAYAGLIPTVHQSGEHTYHGHITKQGSKHLRWILIEAVRIHLIWTKHHEVETKISRFYQRLCKKKPGNVAATAAARKLLQIIYHMLKNKDEFRG

SEQ ID NO: 402674 - protein, 343 aa, unidentified
MKVTTIGLDLAKNVFQVHGVDERGHAVVRKQLRREQLMAFFAAVPPCLVGMEACGGAHHWARRLQEYGHRVRLISPQYVKPYVKTNKNDAVDAEAICEAVGRPNMRFVPIKTLEQQLVLSIHRVRQGFVKARTAQANQIRGLLAEFGLVAPRGISNVVGKIPVLVEAATALPAAMRPIVDRLLEHMKALDRQVKEMEAQIKAWHEGSDLSRKLAAVPGIGPLTASALVASIADARSFKNGRQVAAWLGLVPKQDSSGGKPKLLGMSKRGDTYLRTLLIHGARSTIVAAQRWKKPSPWLQGLLSRRHPNIAAVALANKNARTVWALLAHEREFRPDYVPRPPTA

SEQ ID NO: 402675 - protein, 342 aa, unidentified
MDTSKHLFQLHGVDAAEKPVLRRTLRRRDMITFFERLAPTRVAIEACGASHHWARLLRGFGHEVQLIAPQLVKPYVKRGKNDAADAEALCEAMSRPTMRFVPVKTAEQQAALMLVKLRDRLIRNRTQLVNAIRGYAAEFGIAGAKGIAHVTTLLARLQADVTLPALARELFAMQAGEYAQVQAKIAVVEAKLLAWHRADPCSQRLAGVPGIGPIGATMLTMKTPAPEAFRSGRQFAAWIGLTPKDHSTAGKARPGVITRAGDEGLRSVLVVGATALIRRVREGRCRDGDRFAAWVGKLLERKPPKLVAVALANKLARVAWKLMITGEAYAVKPASTGAASAL

SEQ ID NO: 402676 - protein, 386 aa, unidentified
MLAGTSLSESPVAIRVDLGAVFVSMELSRSKWLITSLSPGGGEKMSKHTVAGGDLAGLFERFGLLQEKARARTGRDYRIIVVQEAGLEGFWIHRALEAAGIESHVVDPASIAVSRRKRRAKTDKIDGETLVRTLLAYKRGEPRVCAMVRAPSPQEEDRRRILRERKALIAEKVRHVNRIKGLLFAQGIGDYEPLRRDRRARLETLSTGDGRELLSCLKTQLLRELDRLELLLNQIKAVERERDERLATDQAASPARMLMHLRGVGPEFGAVLWSEGLYRRFDNRRQLAAYAGLAPTPWQSGQVQREQGVSKAGNPRLRTTLIQLSWLWLRHQPQSALALWFEERVKRNGGKQRKSTIVALARKLLVALWKYVAAGVAIEGAVSTAA

SEQ ID NO: 402677 - protein, 421 aa, unidentified
MTPPNEVVWAGIDTHTDTHTIALLDERGRPLGAETFTADPDGYDRLIGMLPGPGRVAAVGVEGTNSFGAALARRLTAAGYEVREVLRPRRSVRRRDGKSDPLDAVAAARSVMAGDGTSLPKSSDGWVEALRHLNARRSQPVSAMTAIPDSTNGLLAAAPEPIRERYRGLRSETRMNRLAECRPAGGLVERSVPAALKSAAKAWKALKRQAGLLEERMRLILEEHARPLLDMYRAGTVIAATLAIVAGDNPERIRSEAAFAKLRGVCPIPASSGRTNRHRLNKGGNRQGDMALHRIAIVRLRYHKPTRDYMAKKTREGKGKLEIIRCVKRFIAREAYRALISIRNGEVGRGTPAERGAKLRELRVSRNITQQQIGEALCVPSSRISEIERGARDLPELEQRAIQWIHSTTNPKQHTQTLDNV

SEQ ID NO: 402678 - protein, 378 aa, unidentified
MKSLVHVGLDVHAQSISIASADVNGVTFLSKLAHDVPKLKKRLEQLDEPGRLRVVYEAGPTGFGLARALRDWGADCAVIAPSLVPQAPGDRVKTDRRDAQKLAQLSYGGLLTEVFIPDAQQEALRDLVRARESAKKDQTRARHQLSKLLLRRSLKPKASCCKWSKDYMQWVRALRLEEPAAQHALEEYVAEVEHQSERVKRLEQQLRDVSADLPAELAAVVKALQGFKGIAHLTAVTIVSEIGDMKRFGKATKLMSYAGVVPGEHSTGDDIRRGAITKAGNAHLRRVIGESAWSYSRGISTPGRTILKRREGLSTEIVQILQRADHRLRGRFRRLTAQGKHRNKAATAVGRELLGFIWAVGVQAQLEADEAINGQMTA

SEQ ID NO: 402679 - protein, 331 aa, unidentified
MTMFAGIDVGASSVVLVCRQNGRGSAPETFDQSVAGHAALVRRLCRVAPQCVVLEATGIYYLDLALALQAAGLPVAVINPRSFHHFAKLKLVGSKTDGVDAALLAEYAERMNPALWQAPEPHRLALRDVGRQINRLTAARTQAKNRLHALRARASTLPLLIDDELEGIAVFDRRIQRLTAAATDLLDQAPLLARQCQLIDAATGIAKASAIAILAELCVLPGHLKANQVSRYAGLDVRLWQSGTSVNQRARMSKAGNTYLRSTLFMPAMSAVRYDPRAKAFSLTLQRNGKKKMQAVGAVMRKYLTGIWACLKTDQPFDSAKLFSEIHFREA

SEQ ID NO: 402680 - protein, 318 aa, unidentified
MTQNGTLVGLDIAKGKVDAAIRSAGAEASFANNPPGRRQLLDWLNQHGVCKAVMEASGGYERSWAALLRKAGLEVLIVDPKRVRHFARSAGQLAKNDPIDARMIAWFGEVFGGAPGKTEDADRQELDQLVTARLGLTRLQGQIEGWGEHEQPKMVQKVHQALLKAVTAQLAKLEDVIATKIGDTERFAQRADIIDSVPGLGEASTAGLIAFLPELGHVDRQAAAALLGAAPFDDDSGKRHGPRRIMGGRRKLRNLLFVPILGAATQHNPVLKAHYQRLIARGKPHKVALMACLRKLIGILNTMLARGEKWDPTKHAIA

SEQ ID NO: 402681 - protein, 294 aa, unidentified
MAYFAGLDVSLNQTSICVVDAAGEIIKEFKAPSEVEDLVSALRPMASDLERVGLEAGPLSQHIYSPLADAGLPVVCVEARHMAQVLRAQTMNKTDRNDARGLAQMMRVGLFKPVHIKSDRSQRLNVLLQARKVLKSKLLDIEADLRGLLKNFGLKVGKVTPKTFETRVRELADFDAFIAEVVEPMLAARSAMRSQYDELHSILLRVVKDDPVCRRLMTMPGVGAVIAMNFRVVIDVPSRFTRSRTVGAHLGLTPKRYQSGEVDWTGRISKAGDAMLRASLFEAAQMLMTRVAKP

SEQ ID NO: 402682 - protein, 362 aa, unidentified
MNRNTGMSAGQIIGTMHGLQVVGLDIAKHVFQLHTVDMGTGEVINVQIRRAAVTEHFANKLPCLIAIEACGGAHHWARELKQLGHTVRLLHAKAVRPFVAGNKTDATDARAIWLAVQQPGVKFVGVKTAEQQATLTLHRQRELLMKMRTMQTNALRGLLYEFGATFAKGRNALFKDIEQALEDLANKLPQMVRDSLREQVERVKALCQDMLAIEKRLALQLKADAQMQRIAQIPGVGVLTATAAIATMGEASAFKSGREFCAWLGLVPTQTGSGGKVRLGNISKRGDTYMRTLLIHGARSVLHHVKEPGPWLQQIKERRPANVVIVAQAAKMARTIWALTAKEADYQRGFKSVRPIATVQAA

SEQ ID NO: 402683 - protein, 459 aa, unidentified
MRPKANKTKPRSRAPFNSPPMLRPNAAGIDIGAREIYVAVPRERDPKPVRAFETFTESLHKLADWLQSLGIDTVAMESTGVYWIPLFQILEARGIEVFLVNARHVKNVPGRKSDISDCQWLQYLHSVGLLNGSYRPAQHVCAARSLFRHRDSLIEMAASHIQHMQKALDQMNLQIHHVISDITGLTGLAILDAILAGQRDPAVLAKLRDRRIQASPETIIKSLRGEYRPEHLFTLKQALVAYRHYLQLISECDLEIQSHLRQFESLYEAPTEPPSTPVQRRRGRPCGSHTPQAKMARELHRIFGVNLIEVPGLNVSTVGTLVTEVGPDLSKFRNAGAFSSWLTLCPDNESSGSTVLAGKTRRSKSRAREAFRMAAYSLHHSMSFLGEYYRRLRARLGAPKAITAAAHKLARIFFHMVTTKQAYDESIFAKQEIIYRRRLQNRLKAQARQLGFQLVPITD

SEQ ID NO: 402684 - protein, 338 aa, unidentified
MEQARTVTRATQARIHKEGTTMTEATPIYVGIDVSQERLDIATTIKEKIWSVRYDDDGLKKVCTHLRRLQPERIILEATGKLERPLVAALAADGLPVVVVNPRQVRDFAKAMGILAKNDRLDARVLARFGQSTKPELRPLADEARQALAETVTRRRQLVEMITMERNRLPRALPPVCQQIEAHIHWLEQQLRQRDDDLKQTLEQSPHWQERYNLLQSVPGIGPTTAAVLIAQLPELGTLTHKQIAALAGVAPFCRDSGTLRGRRTVWGGRAFVRTALYMATLVAVRHNARLRTFYERLVTAGKAKKVALVAALRKLLTMLNAMLRDHTPWIETLPITT

SEQ ID NO: 402685 - protein, 370 aa, unidentified
MAKYSEAFVGIDTAKVRHAIAVADAGRDGEVRYLGEIDSAPAAVERVIKKLASRYEKVHVCYEAGPTGYGLYRQVRELGHECTVVAPSLIPRKAGERVKTNRRDAVSLARLFRAGELTAVWIPDAVHEAVRDLVRAHASAAADVRKKRQQLLSFLLRHGRIYSGTRHWTKAHVRWLANQAFEHPAQQIVLQEAINAIEDWASRLQRLDEQLHAIVPTWSMAPVVAAYQAMRGVSFIVAVTFVAEIGDVRRFETPRQVMAFLGLVPAERSTGDNVRRAGLTLSGNQRARRVLIEGAWSYRYKARVSAVLQRRSEELPKEIRDIAWKAQVRLCGRYRRLAAKGKKMPVIVAAIAREMAAFLWAIGQRVSPVA

SEQ ID NO: 402686 - protein, 341 aa, unidentified
MTIKTVGIDLGKNSFHLVACNQAGRPITRHKFNRRQLAQFIANLPQCLIGMESCPGSQHFARAFQQHGHDVRLIAPQFIKPYLKGQKNDFNDAEAIAEAVTRPTMRFVAVKTNDQLDLQAVHRIRTRLVSERTAVINQLRGFMIEYGLAVKEGRAALRREIPAILEDASNGLSPRMRQLIVQQCDHWEALEVQITAVTREIEAVAKDHEDCRRLVTIPGVGPLVATALVAAVGNGAIFRKGRELAAWLGLVPRQHTTGGKPMLLGISKRGNRYVRILLIHGARSCLQHLKRGQHRLGSWMTRLEQRTHKNKVAVALANKMARIAWAVLARGEVYRSGIVME

SEQ ID NO: 402687 - protein, 310 aa, unidentified
METKVFVGVDVSKDSLDVAIGSQKDIITFANDQKGVDALVKKLSRIDAELTVFESTGGYELLAASSLAEAGLPVVIVNPRQVRNFAKATGILAKTDAIDARVIAHFAQAVKPEVRQLKDRETSELTALVTRRRQIVEMIVAERNRLRLANKRNIKDIKDHIRWLKKRLDKIESDIGKMIQGSPIWRCKDDILQSVPGIGPITSASLICDLPELGVLSPKKIAMLAGLAPLNCDSGKFKGRRRIWGGRASVRSGLYMATLAAIRCNPAIKIFYQRLTDAGKCHKVAATACMRKLLIIVNAMLRDQTLWQQN

SEQ ID NO: 402688 - protein, 471 aa, unidentified
MNSGYVGIDVSKGYSDLVILNQELQVLTKPVQFDDTRKGHQRLIQWLGRCMDTYNLDRLYGGVESTGGFEDNWYASLMEAGKALPLHVARLNPLAVKNAARASLSMQTTDALSAVHIARYLIRYADEITWDTALTKYRSLRSFDGHIRLLVRQRTQLITQFRQLLYSCFPELQRFCKHGIPNWVLELLKAYPSPQKLSRARAQTVAKINFISLEKAARLIDNARQTVAARGHESDEFLIASMARQIQESQKQVNALKEKLVADCQGEHTKLLETISGIGNYSAASLMIQIEDIRRFACPGKLSGYFGVYPSLKESGDKQSVVRMSKKGRAAMRATLYMCANNAVLKDPHLKAIYHRHRSKGKSHKQSLGVIMHKLLRIIWGVLSSGSGYDQAVDQANQLKKVSDPRKDTLQQEMASKRREQPFDDAAPISRIATKKRKAYQLSQVSSAEQVRDLEARLKKDKKISKNTLEV

SEQ ID NO: 402689 - protein, 369 aa, unidentified
MEKTTRFVGLDVHKASIAVAVADAFGDPEDHGQIANDPSAIRKLVDRLGGADVHLSVAYEAGPTGYALHRQLSAMGIDCIVVAPSLIPTRPGDRVKTDRRDAAKLARLLRSGDLTPVWVPDEAHEALRDLVRDRDDAKQDLLRAKHRLSKFLLRHGIHPQAGVQAWGRAHEAWLNRLALDHRADQVVFDDYWSVVRDGKDRVRRLEAALVTCAAESPHGEYLAALQALRGIGFITAVTIVAEAGDLRRFPTARAFMAYTGLVPSEYSSGTTRHRGRITKTGNRLIRHVLGQAAHNARYRPNVSSALRARQRGVPPAVVELDRRAQARLHHRYRSLVGRIGKNKTVIAVARELAGFVWATGQLVAGPVTA

SEQ ID NO: 402690 - protein, 348 aa, unidentified
MLYAGLDLSRRRLDVCILDEEGDRVLEIGVSPDADALRTLTARVAHLRPEPVSAAIESMTGARFVHDSLERLGWEVDIADAQRAKGLAPLVAKTDRIDAWVLAELARRELVPAIWLPDPGVRAERERARFRLHLVHHRTALKNRIHATLMSFGHPVPVSDLFGRAGRERLERMALPAAWAASVTTSIALIDDLDRQIAAAEAELRQLGAEHRYVPLLCTLPGISWVLASTIAAEIGDIGRFNRAKALVGYTGLVPFVMQSGERDRRGPLTKHGPRYLRWALIEATIHAARHPAYRDRYERTRRRLGKQRGPRVARIEVARQLATAIWHRLTKQEPFAPPAGPTIDLVA

SEQ ID NO: 402691 - protein, 364 aa, unidentified
MVLTNQKAREKRSRYVDYRMRLPPELSANCTCRYRHRELQERRLEHREEAEKFYRELAAQGVKVRVGMEASGQARWFERLLGELKFELWIGDATEIARKRERKQKTDRQDAQHILKLMLKDDFPQIWVPSWENRDLRQLLWHRHRMVQTRTRIMNQLQAVALNEGIRCNKRLWREKGREQLESFRLAPWASRRRHDLLEWLDRLNPTIGALSQAIEQEVEKCPEAQRLRTHPGVGPLTALAFVLIIGKPDRFQCGKQIASYLGLVPLEDSSGNRRRLGHITKQGNSLLRFLLVEAAQVTVRSLPEWRSKYVHLTMRRGRKIAKVALARKLAVRLYWMMRKGWDYEQLKKFGSHAGQPGNRDGVK

SEQ ID NO: 402692 - protein, 381 aa, unidentified
MSIVALDIASKAATFCVLGTQGITGQGSLTFDYDGFSSFFASEQVSDASLFVMESTGGYHLPLYHFLLNHGRKVRIINPLLIKQFHDGQTLRRTKTDALDAVTIARYAQSHMSALEEERMQLDSESKMLARRRARNAEDLAKAKTILKSDLSVAFPELLRFNVFIKTLLEFLSIYGCAKDVLAANEEQLQQALDVQKGRKSDVVTVQKIQELARISIGVSYRAAMVRDSAKAVLACQQRDEELTKALVELENALHKRQMEILTSIPGIGEVTASHFLSEIPDITQFATYQKLIAFAGTDPGIYESGNTSKALKISKRGNPLLRKYLYLMADSCMRHNIVFHAYYHKKREEGFPHRKAMVATMNKLIRTLHALLTKDETYSI

SEQ ID NO: 402693 - protein, 392 aa, unidentified
MRYVGIDIASEKHFVAVVDDASEVLLKSTPVGGDEVGYSKLFQLLGEPSETLVAMEATGHYWRNLYAALAARGFAVALLNPVRTRRFAEEDLQRTKTDAIDALGIARFAAQKHPAVSRMPDSATEELRELVRHRDRLVQEFGDKTRQLHRLVDLGFPEFKRYVRHLDSALATAILADYPTAQAFAQARPRGLANLKYDGHHLVGLELATTLIEAAKHSVGAHHGYAYRLQVKHACQDLDLLRQRLRDIDRDIEAKLDEHEIGSLLTTIEGIGPTTAARLIAELGNPADFKSPAALAAYVGVVPATRQSGKALGTRAGITSMGHAELRHSLWMPVLTAVRRNPWLRQHYRRLRANGKPAKVALIAAMRKLLHAVYAVARDRQPFSPRLAGAPA

SEQ ID NO: 402694 - protein, 423 aa, unidentified
MSYKVAGIDVHKKTLAVVVADVEVEGAYEFERRRCGSNPEHLRQLAEWLIDQQVEEIVMESTAQYWKPVWAALEQYWKPNGQKPESVGPKSGTLHLAQALSNRGRRGRKRDFPDAERLVKRLVADELVLSFVPDAEQRLWRTIARRKYQLTRDKVRLQNQLEALLEEVHIKLSSLVSDLLGVSARRMLKALAEGETNPAALAALADQRLRATSAQLTDALGACAALKPIYRRLVKMFLNELQLIERQISQLDQELARLLSRQQNAVVHLAHVPGLGADSAQQIIAEVGANAASFPSGKHLASWVGACPGDEESAGVSKTHRSPKGNRHMRRILNQAANAAVKAKGTIFEIVYRRLVSRLGHNQTIGAIAHRLCHLIWIILHRGVDYEERGPSVRAKSKQNRTNRMIRELRLLGYRVELLGTPA

SEQ ID NO: 402695 - protein, 423 aa, unidentified
MMKLKYSICCGLDVHKNVIVATIVTTNKDGISEYLQKFFSTINSDIQRFHNWLIENNCYHVCMESTGKYWIPIFNYLENDIDVCLTHPKYVKAIKGKKTDKKDSKWIADLYKFDLVRCSFIPPKDFRQLRELSRYRFKLVCMKSSEKNRIQNCMTISNVGIASVLSDPFGKTATEIISYLLEHTADSMDEKAVRKLIKKGAKSKSDEIIEAIKGYTIETDQAKKLELARGHLEYLDDMITQTEVELYVRIKPYYEFVEFVSTMPGMTELSSTIVLAETGVDMDIFDDAKHLCSWCGLSPANNESAGKKKSVRIAKAGDYLKPMMVQCALAAIKSKKQPYFAIKYGRIKKRRGHKKAIIAIARMMMVCIYHMVSEKKPFTPTDYEELMDPQNHVESVVLNENNVFAYLESLGYDSSKLVKRNDN

SEQ ID NO: 402696 - protein, 428 aa, unidentified
MNDNEIIRNQQFRQLKEVIRGSDQHLIIGIDVAKEKHHAFMGTATGKSLLRRLIFENNFEGFGKLMTHVEAVKVQNGLPLSVFGMEPTGNYHKALGSYLINGGHQVVLVAGQAVKNNRILLDGRWDKHDTKCAANVADLISQGKCLFYDSPPEAIVQLRSLLSFRKRLKKEEHSLRMRIRNSLLAKHFPEMDRYFGQCLSENLSIVYWCLDPKKIAAMDFGRFFQLVTTRERGLAQQRRLKAIWQVAAASIGCAVDRASQFEAQVLVEKILQVQKEIKDTQQLIETISQQFMEYHLLLTIPGFGPYVASLVLAVIGDAWRFDSARQVLKMAGFDLSAERSGKSSKKAVPVISKKGNAALRYGVYQAAFIASTRNIDFVEYYTNTLRGREQERGIKTKMRVKLAAKMLVMAWTLMKKKEEFNPDYLKQD

SEQ ID NO: 402697 - protein, 355 aa, unidentified
MSKHKSKGLSKLAVVGVDIGKDVFHLVGFDDGGNLVLRQKIKRLALTATFEEMPRCVVGMEACLSAHFVSRTLRSLGFEPRIIPAIYVRPFIKGQKNDYNDAEAIAEAALRPNLKTVTEKNQDQLDLQALHRVRSRLVSRRTATINQIRAFLIEQGITVRKGPHALKRSFLPILEERQDEISPRMRTILTGLYGDWLWLDERIETIAKEIEDISRTEESCANVMTIPGIGPLISTAMVAAVGRGEVFDRGRDFAAWIGLIPRQYSTGGRTVLGRISKRGSRYLRMLFVQAANVVLMRPHRWPDFSFGDWLARASSRMHRNKLAIALANKLARIAWSVLRHRTPFGAQRDEVMASV

SEQ ID NO: 402698 - protein, 343 aa, unidentified
MRPVCALGIDVHQDFYVVVEQVDGTNPKPPQRFPKRAFLRWAARLKENTGAEVHAVYEACGFGFSLQRQLSSLGVQCHVVCPQKLDEQNRRVKTDGLDAKALVLKLDRFVQGNRSALALVRVPTEEEEQKRAIHRQREQLVKARKQLEAQGRSLMVNHGLEPVQSWWKPRAFAALPVPQWMKELLANSQPILVALQQKIASLTIQLQSSATPKQPRGLGLMTSVIIDREIGDWRRFSNRRQIGSYTGLCPGEYSSGNTRLQSCVTKHGNPRLRAALVELAWRLVRFQPNYKPIVKWRQILAKGALATGAARKKAIVAVARQLAVDLWRIKTGRLRAEELGLIN

SEQ ID NO: 402699 - protein, 375 aa, unidentified
MREKLRFLGMDVHAETIAAAIAEPDGEVRSLGTIPNRMESIRKLLKKLGPMEKLRVCYEAGPTGYVLYWQLAELGVQCEVIAPSLVPVKAGDRVKADRRDAEKLARSYRSGDLTAVWVPDAGSEALRDLVRGREAAKQDELRARHRLGKFLLRSGHRPPAGVRSWTHLHLTWVSQIRFAQPAQESTRLDYLHEVEHMRERVLRLEQAIVEAVKLASPALQEVITDLQALRGIAHISAVTIAAELGQVSRFTGARELMGYCGAVPSENSSGKRTRRGSITKTGNAHLRRIVVEAAWSYHRPPAIWAGLRKRQQSASEEATEIAWKAQHRLYKRYARLAAKGKDKRKIVTAVGRELLGFIWAIGTKAEATVSQRIAA

SEQ ID NO: 402700 - protein, 310 aa, unidentified
MDAINIGIDVSKDWLDVHILPCGEAFRVDNDGGGIDRLKARLCAVKPDRVALEATGGLETAAVAALAGAGLPVVVVNPAQVRSFADALGKRAKTDPIDAAVIAAFTAALRPALRLLPDAETRLLADLVARRRQILSMILAEENRARTLAGKQTKKSIARLLAALRRELDAVDGDMDSHIRKSPIWLVRQDLLTSVPGVGKTVARTLIAELPELGNLDRRQIAALAGLAPYTRQSGKWRGSSFIGGGRSSVRAALFMAALVASRHNPHLKAFRDRLVAAGKPKIVAIVATMRKLLTILNAMIRDHKPWQTP

SEQ ID NO: 402701 - protein, 350 aa, unidentified
MAIVGGFDVHRKQITFDYVDNDGLVQWGQIRPATRKTLRSWLAKHCPEGAGEFALEGCTGWRYVSEELTAAGVGVHLGDPAEIAALRGPKKRAKTDRADARLLRTLLVEGRFPESWIPPAHVAEIRALGRLYCALMEERRGWQQRIHAQLFHQGCPPVKALLSEPGREVLVAAELSAAGRQYVDTALRRIDELTAEIDPLRMQLVRFARRQAGCRVLQRHYGVGWLCAAIIWAEVGDPRRFSSSDQLVRFAGLDVTVYSSDGKRAPGHLSRQGSPELRWAAFEAAKCAARRGSPDYAYYHNLAAKHEGRNGKNPTLAVERKILRRCYHTLRELGDAVLAMPIAEAEEVAA

SEQ ID NO: 402702 - protein, 424 aa, unidentified
MKRTRNEVTNQRIEKISPHDLVVGIDIAKDRHVAQATDYRNRVLSRQALSFSNTEEGFLKLKRWIQEVQVRHQLTGLLIGMEPTGHYWFNLADWLLDQGMEVVLVNPVHTHRNKENRDNTPSKNDAKDALTIADLVNRGLYTEYHPQEEHFERLKTVMSDREYWVTQQTTLANRIIRWIDLYFPEFRQVFEEWNGVRALATLRAFPLPRDLRGLSVDEVIAGWRKQGMKRCGGASGKAVAMRLLNCAANSIGNRRAIEEARRDLRRLLDQYEAISSMLEEMEEEVGQLLSEIPQAKLLRSLNGLGTIPIGAILGLAGDLRHYRHGRQLLRRAGLNLAERTSGKYKGQVKLSKRGDSTLRKHLYLAMLNLVQHHPDFKRWHERNLRKGMKKMASIFKLMGKLARMVVGMVRHGETYRPEMHLTAA

SEQ ID NO: 402703 - protein, 313 aa, unidentified
MSFIGVDVAKAQLEFACRPDGVTGTVANDEAGIQTLVARCQALGATLIVCEATGGYEAALVAALVTIGLPVVVANPRQVRDFAKATGQLAKTDAIDAQVLALFAERVRPEPRPLPDADAQALDALLTRRRQLVEMLVAERNRLLVAAPAVRRDLQQHIRFLERRLREADDDLHTAVKASPVWRVKDDLLQSVPGVGRVVSLTLLAELPELGRLSHKAIAALVGVAPLNRDSGTLRGKRLVYGGRAPVRAVLYMAALVASRRNPVIRAFYERLRAAGKPAKVALTACMRKPLTILNAMARSGTPWQPTRALART

SEQ ID NO: 402704 - protein, 340 aa, unidentified
MNISTIGLDLAKKVFQVHGVDKHGQVVMRKALKRAELAEFFATLPPCLIGMEACGTAHYWGRKLESFGHTVRLMAPRLVKPYLTGEKNDANDAAAICEAVGRPSMRFVPLKSAEQQALLVLHRARAGLVRARTGASNQVRGLLLEFGITLRIGRCEVAARLPEILEDAENGLPALARQGLAVLQAHLQDLEQRIAEIERAVTLWHRSQEASQRLAAIPGIGVFSATALVASAGDATVFRNGRQFAAWLGLVPKQRSSGGWIRLSGISKRGDRYLRTLLIQGAHAVLCHRSPGADIWLDQLVQRRHKNVAAVAIANKNARLAWALLAHQRVYQNGYVTCAP

SEQ ID NO: 402705 - protein, 362 aa, unidentified
MKYVGIDYHKRYSVVCATNERGGEIKQQRINGNTVAGFTRFFSELGEPAKVVVEACWNWGWLYDLLGQIDGIEEVVLAHPYKTRLIAEAQIKTDALDAQALAKLLRGDLIARSHAPSAATRARKHLLRQRLFFVRLRTMLRNRMHAILDRQHGLERPQLKNFFCRRGRDWIETVQLPCANDQPLLKQDLEVAKVLEEKIKELDRSIGHTQSAEEKLLESIPGIGPLFSSVIATEIDGIGRFNSSAKLAAYAGVVPTTHASGGRVFNGRLLWQCNKWLRWALVEASWSAIQFSAYFGGVYRSARARGKNKNIAITMVAHRMAKIIWLLLREQRPYTETLPDRSEDKLTVVVRRDKRARVSYAS

SEQ ID NO: 402706 - protein, 444 aa, unidentified
MQYQKVLQMLNCTPYLSVGLDVGADFTWMSIMLPNGTLTGKPFKIVHSDPHSRELAVTKIKEAQEMYSLKSRCFLESTGIYHIPLLCFLRDKGFDCSVINPIITKNSTNMNVRKLHNDKFDSKKAAKVGLDASLKTSIVPDNAIIDLRNMVRDYYYYKDMQSAIVLKLNAELKVSFPAYLQVFSKITTLASLKLLETYPLAADMLAAPKDEVIKIIRETARFGEKYALSKYNALHAAAEDATVFGRALPSNALRIKLYIETYREYQKHLDSILEELHKAVDELQGKPAHDQICLIQSLRGVGFLSAVVLIAEMGSFDLFSSPKKLYAYFGLDPAVKQSGKFNGDKVHMSKRGSSLARRILHMVSLNNLKIDKGTKMPVNPVIHSYYTDKCKSKKKNVAFGAVMHKICNIIFAMLRDNKPFEMITPQEHCKLYKEEHSPKSDDVA

SEQ ID NO: 402707 - protein, 350 aa, unidentified
MNAYFGCDAHKRYSVFAMMNERGQTGRPVRVEHTRAMFREFLNGLPAGSPIAIESVGNWYWMIDEMERAGHSPRLANAGKAKLMMGQINKTDKLDAAGLAMLLRNGTLPSVWIPPGELRDQRELPRMRMSLVSVRTMLKNRIHATLAKYAIEIGEVSDLFGVKGREMMGKRLEELPPFTRQSVETQLDLLDEVEAHIDRAEEQIRGVVETTPAMGLLKTIPGVGPILAVVIASEVGDIDRFPSPEHLASYAGTAPRVKSSGGKTSYGRVRADVNRYLKWALIEAANMIVLGQRHRPDDHLTQLYLRLRERKGHAKAVVAVARHMATAVFWILKKNAPYKEPNKPISSSQE

SEQ ID NO: 402708 - protein, 385 aa, unidentified
MVIIGVDPHKRIHVASVVEPATNRQVAALQIEASLAGYRRLLRWADKFGERSWAVENTRGLGCHLAQWLLARGEAVEDVPSTATARVRELSRGGRRKNDVIDAAAAASVAALHGDATPVLAEDITTVLGLLDERRANVTTQRTRLINQLHAVFRDVLPGGAPKGLTAAIASALLAGIRPVGPVEAARKQLARDLVAEIRDADRRLKLLTAQIAQTVAATGSRLMEVDGVGPVVSGRLLARTHRMSRFATAAAFASYAGVAPVEVSSADRLRHRLSRGGDRQLNLALHIVAVNQIRMPGSAGRAYYDTKIAAGKTEKEARRCLKRRLADHIWRLMIKDEHGAAGPGGQQGATMQSSAAGSTPTTSSSDKSLPEPATPDSTTSRPAA

SEQ ID NO: 402709 - protein, 343 aa, unidentified
MDRFYYIGLDIHKRTIAYCIKAIDGHLIDQGKIGADRQSLGAWVEGLPGPWIGAMEATMFTGWVYDFLKPHAVTLKVAHPAMFKAITAAKKKNDRADAEKIADLLRVNLLPECHMLSEEIRELRRILRYRNHIVRTAVKMQVKMSGLLMEVGVSYSKKRLHGKKYFRELLERVDEIPPSVKELLQLSRSSYEMFRSFQKRLVETLRTNQLIRDRVQRLMTIPGVGEITALTWTLEIGDPGRFSSTRKAVSYCGLCSAQKESAGKEQRGPISKKRNKHLQTMLIEAAKLAPHWNEQLAIVHEQELKKGNRNRATLAVARKLVAYMLAVDRKQADFKLSSEIRAA

SEQ ID NO: 402710 - protein, 387 aa, unidentified
MQAETPATVVATTTPSDVDTLFASLELSKSKWLLTVNSPGGEKFSKHQLEGGDSGSLLGLLARLRTKAEQRCGRPVRVMAIQEAGLDGFWLHRLLIDNGVESTVVDPASIAVDRRHRRVKTDSVDGETLLRTSMAFARGERRVCSMVRAPSPEEEDRRRLTRERGTLLKERIQHTNRIKGLLNGQGVRDYDPLARDRIARLEAVRTGDGRALPQMLKAEIRRELERIEMATAQLAIVERARDAQLRTQAEGRENPAAMLLEIKGIGAEFASLLWLEALFRNFANRRQVAAYAGLAPSPWRSGAIDRDQGISKAGDRRLRRTMIELAWFWLRHQPSSALSRWFQERVGAGRGRIRRIAIVALARKLLVALWRYVAQGIVPKGAVLKAA

SEQ ID NO: 402711 - protein, 341 aa, unidentified
MEAKVKYCGIDLRSNNSVIVVIDEEDRVVGQKRLPNELARIVVFIVQWRDELAGVVIESTYNWYWLVDGLQAAGFQAHLANTAAIKQYDGLKHGGDEADARHLAQLLRLGILPTGTILPRDERAVRDLARKRIQLVRGRTTHILAIENIMARQFGARMTSNQIKRLSADDIDQMPIEADVRLAMNANLAVIGALDAQIEVLERRLRERAKPRPEYAFLTSVPGIGQALSTTILLETGPIDRFASVGNYASYARCVDSAHTSNRKKKGEGNVKNGNKYLAWAFVEAANFARRYCPEAKRFYERKKAKTNNIVATKALAHKLARACYHILREGRPFDVTRCFA

SEQ ID NO: 402712 - protein, 308 aa, unidentified
MNQPKHTYIAIDIAQADLEVLAAGKRVKAANTPAGFRQILGIARDLEAPLVVFEASGGYERALMEHLSGQNVPVAMISPARLRAFARSEGVKAKTDPIDARMILRFAQEKKLAPMRILEGKRRELADLMDRRSHLSEQLTREKTRLQKAPELLHASIRRMIHHVEKEISLIEKQIEELIAADEAMSEEAERIQSIKGMGKVNAWSLMGYLGEIQDLKRNQLVALAGLAPFNRDTGKSSKNRFISGGRAKVRKTLYMAATCAAVHNPVIKAYVQKLRQRGKPYKCAIVAAMRKLLLHVQSLLKNQPLPA

SEQ ID NO: 402713 - protein, 400 aa, unidentified
MNAVGIDVSKGKSTVAVLRPFGEVVASPFDVTHNDNDLKRLVKLIRSLPGESKVVMEYTGTYFEPIAQFLHNNGIFVSVVNALLIHDYGGTSLRKVKTDKKDALKLASYALDRWTELDEYVPADEQRKILKLLNRQYNQSIKIQTMMKNNLISLTDSVFPGINRLFTSLERQSDGHEKWVDFLHAFPHKDCVAKLYLSAFKAKYKSWCSRNKYRYSESKAEKIHSYAKSVIAVLPLNERVKLLVTQVVSQLNTILETAFSIRTEMDRIASSLPEYDTVMSMFGVGKVYGPQLIAEIGDTRRFRNRRAITAFAGLDAPPYQSGQLDVSSRHISKRGSAALRKVLFQITEIFILSKPENEPVYQFIIKKRSEGKHYYSYRIAAANKFLRIYYAKVNQVLNAM

SEQ ID NO: 402714 - protein, 401 aa, unidentified
MQETKQHDAVDVFVGVDVGKGQHHAVALDRNGKRLYNKALPNDEVKLRALIAELKTHGRLLFVVDQPSTIGALPVAVARAEGVLVAYLPGLAMRRIADLHAGEAKTDARDAAIIAEAARSMPHTLRSLRLADEQLAELTMLCGFDDDLAAQVTQTSNRIRGLLTQIHPALERVLGPRLDHPAVLDLLERYPSPSALAAANEKTLANRLTKLAPRMGKNLAAEIVQALNEQAVIVPGTQAATIVMPRLAQQLAALRKQRGEIAAEVERLVLAHPLWPVLTSMPGVGVRTAARLLTEVAQKAFATAAHLAAYAGLAPVTRRSGSSIRGEHPSRRGNKVLKRALFLSAFAALRDPVSRAYYLRKIQQGKRHNQALIALARRRCDVLFAMLRDGTIYQPKSAPDA

SEQ ID NO: 402715 - protein, 312 aa, unidentified
MKNICGVDISKARLDACIEPGSIRGSFANDPAGIAGLAAFCRQHRVELVAMEATGGYERRAFLLLWEQGLPCTVTNARQVRLYAEAMGVLEKTDTIDAHIIARFAQAKNLKPTPLPSSSQKRLKALVARLRQLTDDLTVQKQRRSSLFDDAEMLASIDEVIALLKRQSRTLEGEIGSMIDDDSLWACLSDTFRSIKGVADRTVAWIMADLPEIGTYSNKAIAKLVGVAPIANDSGKRRGKRPIRGGRAGVRSILFLVAAIAARYDKSLGEFRARLVAAGKEKMVIRIALARKLLVRLNAKARDARAQYANAT

SEQ ID NO: 402716 - protein, 391 aa, unidentified
MECPMPQSNDLSRSLTAFAQDNTIIAVVELGLRSWLVAGIVPGIDRHPLKKLKADEQALLRLLQRWRDEATKAGCVITRIAVAFETGRDGFWLARWLKAQGIEAYVIHATSIAVSREHRRAKTDRLDTDHLKRAFIGWLRGEPDHCHMAAIPTIEQEDAKRPTRERENLVGERTRIINRIKGCLARFGIRGFKSTLRKAAERLAVLKTPEGVLLPPNTLAELRRDIARLRFVMDQIKVIEVARLERLKKAPKEGPHAMVCLLARVIGVGIETADMLVHEVLSRNLRDRRAVARYAGLTGSPDESGKRRREKGLARAGNARVRRGMIQLAWRFLMFQKDSALSQWYRTQTADARRGTRKTMIVGLARKLLIALWRLVTSGEIPIGVALRPAA

SEQ ID NO: 402717 - protein, 387 aa, unidentified
MPQPNDLSRSLVALDQNSTIIAVIEMSQSSWLVAGMLPGIERQPRKKLEPSPERLLALLQRWRDEAVRAGSTITRIALAFEAGRDGFWLARWLEARGVEAHVIHASSIAVSREHRRAKTDRLDTALLQRGFLGWLRGERGHCSMARVPTIAEEDAKRPNRERDCLVGERTRIVNRIKSTLARLGIRNFKPTLRKAAERLATVHTPEGTPLPPNTLAELQRDMARLGVVVSQIRQIEEARQKRLEQQHETGPHAMVRLLARIVGVGVETADMLVHEVLSRPMRDRRAVARYAGLTGSPDESGAQRREQGLARAGNARVRRGMIQLAWRFLMFQKESALALWYRARTTDSRRGTRKTMIVALTRKLIIALWRFVTTGEPLEGVILRPAS

SEQ ID NO: 402718 - protein, 354 aa, unidentified
MIIIGVDFHPEFQRIASVDTDTGDFQEKRLAHPEEAEKCYRSLAAQGVKVRVGMEASGHARWFERLLAELQFELWIGDAAKIRTKRVRKQKTDRQDAQLILQLLLENRFPKIWVPSWENRDLRQLLWHRHRMVQARTRIMNQLQAVALNEGLHCKKKLWREQGRRQLESFRLAPWASRRRRDLLELLDRLNPTIAELTRAIEHEAEKNPGVQRLRTHPGVGVLTALAFVLIIGQAERFQCGKQVASYVGLVPLEDSSGKRRRLGHITKQGSSILRFLLVEAAQVTVRSLPEWRSKYFHLAMRRGRKIAKVAMARRLAVCLFWMMRKEWDYEQLKKFGSHAGQPENRHGVQSNTE

SEQ ID NO: 402719 - protein, 333 aa, unidentified
MATWVGIDIAAKEFELVSRIDGKSSRSMKFKQTSEGHQRAIKHLRALAPSGVVMEATGVYYLDLAVALFRAGLPVMVINPKSFHHFAKLMLKPSKTDGIDTALLAEYGERMTPARWIPPDTTCLGLRDIGRQINRLTASRTQAKNRLHALQAKGMTLSLLLEDEQEGIALLDRRITRLQEAALTLVADSEELSVQLQHLTTAVGVGTASAIALLGELCVLPREMKAPQVSRHAGLDVRLNLSGTSVHRPARLSKAGNAYLRAAMYMPAMSAVRYDARAKAFYDGLVGRGKKKIQALCAVMRKYLTGLWACLQHGTPFDSTKLFSDCHQDNACR

SEQ ID NO: 402720 - protein, 412 aa, unidentified
MKDLLEISCGLDVHKEKIVACILTGPLGKPTRSEIREFSTLIPDMIALRNWIVSKNCHHVAMESTGIYWMPIYEILEDAFYGDITLLVVNARHMKNVPGKKTDMRDSEWISTLLRAGLLNGSFIPEKRIREFRDLNRYRKSVIRDITSQKNRIEKFLQSSGFRLSSFISDIFGASGRNIILHLIEHGQIDKTALDSCLKTKTRNCIDEILMSVNGTLSEHQKAFLRILMTHYDSLKKHLAEIETSLEEDMAPFALQVEQLNSIYGISTTASCAIIAEIGIDMKPFKTAEHICSWAGLCPGNNESAGKRKSTSVTKGNPYIKSMLCEIAWVIAGKRNTYLSAWYWRIKQKKGAKKAIVALARKLLVIIYTMLKQGTLFDESCFETRRKHCEQKQLSRYIRELEKHGYHVEAQS

SEQ ID NO: 402721 - protein, 359 aa, unidentified
MLYSGIDLHKDMCWIATIDENGVVVKQVKLPNDPALILEYFRSLGADHKAVVESTSNWYWLSDLLRENGIELVLAHAKYVKAISYAKVKTDKVDSLTLAQLLRMNLIPVAHQISPELRASRDLMRARLNLVHKRISCINSIHRLFEKFNIVLTEHNLQTLQGFKELKEIPLPPEYQFHLHCLIDQILLLRDQITNLEKSLHPHLVPNPDIQRLLMVPGIGKISAFTIYLEIDDISRFPDDKHFFSYARLVPGASNSNQKFKHKSGNKDGNKYLKLAFTEIAVQAIQNYAEIKRFYQAKARKSPKAIARTIVAKEMARIVYHMLKEHSEFRTFKGLTLSKTKKRGWPRLSKPLRITGTLI

SEQ ID NO: 402722 - protein, 415 aa, unidentified
MLTSGWEGTIGMTSEVVDDTADQDVSGGVDSHADTIHVAVISDNGGQLADAEFATTAAGYAAALAFLNAHGRVTAIGVEGTSSYGAGFTRAARSHGHPVVEVNRPDRVERRRIGKSDPIDAYAAARAALSGRASGAPKDDTVAGIRALHNAARSAVKARTAALNQITRLLFTAPEGIRARHGQLKGTDRTDALARLRPTGDTVHIAVLTALKSLARRVKELTAEHEALTRALDSGVSAHDPGLRAAYGVGPDTAAQLLVTAGGNPERMRTEASSAALCGVAPVPASSGRTTRHRLSRGGDRDANAALYRIALVRMSSDARTRAYTAQQTAAGRTKKEIIRLLKRAIAREIFRCPTTTVTVPGIADLRPLRQARNITLTAVAQHFGVWPTTISRLERGLSRDDDLAHAYRDWIQTA

SEQ ID NO: 402723 - protein, 354 aa, unidentified
MPRQSKSASARLRVVGVDIGKEVFHIVGFDSAGKLAFRRKIKRLALVEVFETLPRCVVGLEACLSAHFVSRTLRGLGFEPRIIPAKYTKPFVKGQKNDYNDAEGIAEAALRPNLKLVGEKTQDQLDLQALHRVRSRLVSRRTATINQIRAFLIELGIAVRTGARALRNSLCAILDNRADELSPRMINIIVGLQDDWVSLDKRIESLTAEIEKISEVETNCARLKSVPGIGPMISTAMVAAIGAGEAFERGRDFGAWLGLVPRQYSTGGKPILGRISKQGSRYLRTLFVQAAHVILMRPHNWPKFNFGPWLEQASTRMHRNKLAAALANKLARIAWSVLRNGGTFGEHQVLPEAI

SEQ ID NO: 402724 - protein, 347 aa, unidentified
MRPKLLMENDYILRQCVGIDVSKETLVVTMCMFSFAEEAHNSDVKTFKNNKTGFNQLVKWSRKEAYTDKPLRYVMEATGVYHEELANHLVKIGCTVIIMMPNKAREFAIWEGMISKNDTIDSRVLALVGCVKRSMRPWQPSKEIYHELRAMTRFAQDTKKLRLALKNHLEALEHSHQAEKSVVKHYEAMVSYLDKRLKMNLKNMKEKVASDEALNKKVENIITAPSLGFTSVITVIAETHGFALIQNRKQLTSYAGFDVKDNQSGNVEGTSRISKKGNSRIRAILYMPAVQAQLRSKHLKEAYDRIVQKHPDKKMIAVTAMERRLLLLIYALWKSDKPYDEDLKKKK

SEQ ID NO: 402725 - protein, 342 aa, unidentified
MQVTTIGLDIAKNVFQVHGIDAAEKVVVRKQLRRSQVLEFFKALPPCLIGMEACATAHYWARELTKLGHKVRLMPARDVKAYVKRNKNDAADAEAICEAVRRPTMRFVQVKSAEQQSQLMLHRTRDLLMRQRTQVINALRAHLAELGITAAQGNAGLRELLAIIAGAADDRLPVEAHASLLVLAAELQAMRTLIASIEKRIIAHHRSDEASKRLRSIPGIGLVGATAIVATITDPKAFRSGRDLAAWIGLVPRQDSTGGKQKLGPISKQGDRYLRRILVVGAHAVLKLARQKPEKYPWITQLLARKPFKVVAVALANKMARIAWALLVKGGPYRPRALVAAA

SEQ ID NO: 402726 - protein, 469 aa, unidentified
MDKNKKQKRKYKRHRKVNTSHLEQLNINAAGIDIGAEFHYVAVPNGRDPEGQDVRHFSTFTADLNQLADWLRQCNIDTVAMESTGIYWIPVFEILDSQGFDVRLVNPRNVKNAPGRKTDVLDCQWIQQLHTYGLLQSAFRPEDRICELRAYLRQRAMLVSYASHHIQHMQKALEQMNVKLTQVISNITGVTGMKIIRAMISGERNPVKLASMRDARCNNSETIIAKALEGNWRSEHVFALQQAVELYDFYEKQIIECESRIQDHLESFDDRSNGTPLEKPRRKSRGSSNQFHFDARRYLHRMTGVDVTRIEGIEGPTALNIIGEIGIDMSPWPSEKHFASWLGLCPGSKITGGKVLSSKTKPSANRAAYAFRLAAYSLQRSKSAIGAFLRRKKAQKGAPKAITATAHKIARIFYNMLKYGTEYVDLGQEYYEQRYQDRVIANLKRKAKQFGFDLVNIKEHKLLTGLPAS

SEQ ID NO: 402727 - protein, 314 aa, unidentified
MEVFVGIDVAKDTLAVALSTEEQWSCANDAQGIAALCAGLAELKPALVVLEASGGYERALSVALYAAGLEVRVINPRQAHHFTRALGQQAKTDRIDARMLARFAQNMQPPAREMPEPEREELKALVNRRNQLLQMLTAERNRRAQAPKWLRKSLDRTIRALERELGTIDHQLADKLEHSAKLRPLRELIVGVPGAGPVLSATLIARLPELGRLSRREIAALVGVAPFTRQSGAWRGRDTIFGGRAPVRTALYMAALAGVRHNPVLRTFYRRLRERGKPAKVALTAVIRKLLVILNAMLKHHTPWRTSPCPAAAS

SEQ ID NO: 402728 - protein, 307 aa, unidentified
MYVGIDVAKDRLDVHLRPQGEAFSVARDGDGLAALAERLSTLRPMLIVMEATGGFEVTVAATLGAAGLPLAVVNPRQIRDFARATGKLAKTDALDAAAIAHFAEAVRPEPRPLPDEQAQALGELVARRRQVVEMIVAENHRRRQMTQRLLLRRVDRRLAVLQEELSEIERELDDSVRGTPVWRANDDLLKSVPGVGKTVSSTLLADLPELGTLDRKKISALVGVAPLNRDSGTMRGRRITWGGRASVRSALYMAALVAARHNPVIAAFYKRLRVAGKPAKVALTACTRKLLIILNAILRDRQPWQNA

SEQ ID NO: 402729 - protein, 339 aa, unidentified
MQNTQNNIYRHYIALDWSKQVVAMATMRDSGSKVEVQMLQPETRIIKEQINKYSGSKILTIEETTTSHWLYVELKDSVDKILICDPYRNSLLKDGPQTDKIDAKKLCILLRGGMLKEVYHTLDKEYEIRKLVSGYSDVIKASVRLKNQRSAIFRSEGKNHKKEKVLSDSPIKKFITEKQNEHVEHYRDTIEEYEEKFKKIEKSNKTIQNLRKISGIGTKTAIMIYSTVIDANRFENKYKYWSYCGLTKHYKESGGKVYRSKMVRYSKLLKRCYKSSALAAINGKNDIREYYEYLLHEGLSIEKARHQISRYISKVSYAVMKNKIEYRAYQWRESKDKDS

SEQ ID NO: 402730 - protein, 324 aa, unidentified
MDSVKYIGMDVHKEAISIAVLSSSGKLVMECTIETKASTILQFFQGLRGSLHVTFEEGTWAAWLYDLLKPHVTKVVVCNPRRNALLKEGSKSDRIDARKLAELLRSNLLRPVYHGEHGVRALKELARSYLTISKDLGRVMSRLKAIYRSWGIPCAGKQVYAPRYRSEWLGKIREAGVRRRAEFYYQQLDALRPLRQQVRQELLAEAKKHDAWKLLRGIPSIGPIRAALIIAILQTPHRFRAKRPLWTYIGFGIETHSSAESRFVHGNLQRSKKQISIRGLNRNHNHDLKNLFKSAATIAAVKPARFRSFTLRWWPRASSRRWRV

SEQ ID NO: 402731 - protein, 304 aa, unidentified
MEQITRGERGRVVVRVGVDLAKRVIQVHAVDAAGQLVLGRALARDRFIAWCAQLPGGCVVAMEASSSAHHWARKLCSLGLDARIIAAHLVKPYRKQGSSGKNDANDAAAICEAASRPSMHFVPIKSVEQQSMLCVHRLREGIKEERTACINRVRGLLAEFGLVFAQSPKVLRLALADTIEDASNEMGTLARLTLQRAHAQWRELDEHLAWCDERIAEHTRTNEQVKTATTLLGVGPLTASAVVATVGDFRQFRNAAQFGAWIGLTPKQHSSGGKTRLGKITKRGDTYLRTLLIQAAKSAVLTAH

SEQ ID NO: 402732 - protein, 330 aa, unidentified
MSKRALLFVGIDVSAHTIDVALNINGRWQQTTFENSNKGHASLVRYLRKWGHVVKVCIEATGIYHLDLALALHQDDRIEVMVVNPKAANAFAKAMMQRGKTDRTDAYMLANFAQRMTFTTWQPPCQNVWDLRDIARRSDTLSRSRAAEKNRLHSCRCSTIKKDIEVHIRHLDQRLKRLENAAMKLIYPDDKLLQVFTLLTTIKGVAALSAIRIMAELMMLPPDMKARQWVAHAGLDPRDFESGSSVKKRVRISKVGNIHLRNALYMPALSASLYDEHVKLFRETLAARGKTPMQGVVAVMRKLLHTIYGMLKNQEPYRSELFYQPMQNKA

SEQ ID NO: 402733 - protein, 382 aa, unidentified
MRLRRLMGVANGMDTPHPYHTGLATLYKHGLFVGWEAQMGTIIRVGVDLAKNVFHIHAVDENEKTTWQGKYARNTWLKAIMKRVPFTAIIGMEACGSSHYWARELIKAGYTVKLVAAQFVKPYVKTNKNDKVDAEAICEAINRPNMRFVSVKTSEQQDIQSMHRVREELIAQRTARANQIRGLTAEYGIVAPVGISNLRKHIPCWLEDVENSLSFQFRELLQVLYEDLITLDERIDKVTNKIKLSLSDNPVAQRLMKIIGIGPLVCSALLIDLGNGMSFKRGRDFSASLGLVPRQHSTGGRERLLGISKRGNGYLRKLLVHGARAAFRYVKDKTDALSLWIKKLSITKHPNVTIIALANKLARISWAIVAKNVEYDASRAAA

SEQ ID NO: 402734 - protein, 349 aa, unidentified
MRFYSSEHRFYCGVDLHARSMYLCILDAGGQVVFDKNLPATGQAFLQAIAPFRDGLVVAVECLFCWYWLADLCAREQIAFVLGHALYMKAIHGGKSKNDQIDAGKIARLLRGGTLPQAYVYPAGMRETRDLLRRRQYLVHKRVEAIAHIQNTNSQYNHPVFGKKLGYAANRDELDIANRFTDPSVKKTVEIDLCLIDHYDTLLGDVELYLTRSAKVDDVQTYHRLQTLPGVGKILALVLLYEIHDIRRFPDVGNFLSYARLVRCAHESAGKKKGSGGKKIGNPHLRWAFAEAACLFLRQSERAKKWLARQEKKRGKGKALGILAAKLGRAVYHLLDKKVAFDEARFWGS

SEQ ID NO: 402735 - protein, 400 aa, unidentified
MDRNRIVAGLDVHKDSVFLCIMRYDEAIIFEKTYGTLTTQLRQMRDDMLCHGVTECAMESTAVYWIPVWNELCEHMTLRLANPHFIKQLPGRKSDTKDAQWIAECQLKRLIRESFVPNPVVQDMRKLNRRIFNLNEDLTYNKNKLDAAMQRCGFRLSNYVSNTGGKSYQSVVRAISQGETDADKLVLLVHGRTVNKHGRDTIAGSVTGNFSPTDIAVIRQYLAMIDLVNAQIDECQKALTAMCGEHFPEQYKRLQTIPGVKERAATAIIAETGADMSMFAKATNLVGWCGLKPRNDESNRRIKSNRITHGNRYLRQILIEIAWVASRTRNCFFSNFSYVQVTVKKKRKMKIQVAIARKILVAVWHMLSHEEDFIDIYLKRLEEQRLIQLQIEQLESSMVL

SEQ ID NO: 402736 - protein, 423 aa, unidentified
MDILYERVAGLDVHKDTVVACVRVATGRQTQRECRTFATTTEGLTALAAWLEESQCTHVAMEATGVYWMPVWKILGQSDFELIVANAAHIKNVPGRKTDMNDATWIADLQACGLIKASFVPPEEMQELRSLTRTRKQLVREQTRHAQRIQKTLAEANIRLDSVISDIMGASGRRIIEAMIAGVRQPSKLAELASKQIKATPKQLYDALHGRLTDHHRFLLDLHLRQWDVLDAAIRNIDREIGQRIDRTDAQIGTGKVPFRALIDLLDTAPGVSTVAAPAILSEIGYDMSRFPTSGHLVAWTGICPGHAESAGKRKSSRLRKGAPWLKTMLVQCAWAAIRKKGSYYRAQFFRLQSRRGPQKAICAVAASLLTAIYHMLKYGVEHRDLGGDHFDRRPTELKAKRLVAQLGKLGFTVQLQPIAQAA

SEQ ID NO: 402737 - protein, 303 aa, unidentified
MEPMHQRVAGIDVHRMKHVVTILIGREDGAVSSETREFGGFKRDMRALVAWLQTHRIQQVVMESTGIYWKSVFAHLEAAGIPALVVNAFHVKNVPGRKTDVGDSEWLAQLARFGLLRGSFIPPKDLRELRIVSRYRRKLTGMLAGEKNRLHKLLDDAGIKLGGVVADIDGVCASKMVEGLIAGGKPDELAALGRGKVRAATDILEAAMDGELSGRHRLVLDMAYDHLRYLEGKLVALDRYLLAAMQPYAWAWRLLQTIPGIDAISAAMILIEIGDDPHRFGSPARLASWSALMSRQQRVGRQA

SEQ ID NO: 402738 - protein, 398 aa, unidentified
MKFKSQDKQNQLIENITVSHLVIGVDIAQEVHVARAVSFRGIALGTPLEFGNHREGFNLLGRWIQDLLKSYKLSSVIVGMESTGHYWFSLAHWLLDQGIEAVLVNPHLVKKNKENRDNTPSKSDHKDALVIADMVKNGYYSPVRFHPESYEELRILMANRETVTKRLNAAVNQIHRWVDIVFPELRHVFKILTCTSAIATLRLFPLPKEISRLNTEQVLAGWKQYVKRHAGVKRAELLISLAKTSVGTTQALHAYKLHLILEHIPYAQQLLEIRGVYVTNLAGVLGEAGDLSGYAHGNALLRHAGLNLAEASSGKWRGKMVLSKRGRPRLRHFLYLMTMSMVMTNPEIRAEHRYNVEEKKLKKMKSIMKLIGKVARMLVALAKNNSSYEPIRVFPQAA

SEQ ID NO: 402739 - protein, 456 aa, unidentified
MKEKELSMQIVHPNAAGIDIGSKTHWVAVDQIPGNVREFGVYTRDHQRLIDHLKSHQITSVAMESTGSYWQTLFHALQKAGFEVILVQGNQTKNVQGKKTDVLDCMWIQKLHSLGLLSSSFLLSDYLQTLRSYYGHREHLIEQTAMYINKMQKALRLMNIRLDVAIRDLAGKSGRAILDAILAGHRDPNYLASLAHFRVKKSPDEIAATLHGNWREDLLFELRSCLAFYYAYRKEILICDQTIQTIMLEFIPDAEALTLDSNTAGKPIRKQVNRNSPSFNIRHLAFAHLKIDLFPIPSVSHSTALCILCNMGNDIKRFASAKRFASWLRLVPNNKLSGGRIISSKTPKGKNAIALALRQAANSIGNQKEHPLTPFFKRIAYRKGRNAAITATARKLAVIIWNMITNTQPYRQPNFELLLEKRKYAQVKNIKSRLFRLNLTDDEMMELFQKTSFPST

SEQ ID NO: 402740 - protein, 460 aa, unidentified
MSEPIPAAEPDYAAFIAIDWADRQHAWVLQVSGSTQRETGQLEHTPEAIEDWAMQLATRFAGRPVAVALEQARGALLYSLSRFEHLVLYPIHPSTSYNYRKAMFPSGSKDDPKDAAILLDLLTLHRDRLRLLRADTAPTRKLQILVEKRRQLVDERTAQTNRITDQLKMYFPQVLKWFDSLHAPIVAAFLQRWPTLPRLQKEAPEAVRKFFYEHGSRSGERIEKRLQEAAKAQALIHDAAVIEPGVLVVKALLAMVAALNEGIRALEKAIEDVTAAHPDYSIFYSFPGAGPAMAPRLLAAFGTQRERYASASELQSFSGIAPVMEASGRQCWVHFRWACPHFLRQTFHEYAAASVQFCDWARVFYQEQRAKGKEHHAAIRALAYKWIRILFRCWQSRQPYQEQLYVAAREARALALPSRQQNLPAQTASHGKPTSRKTGKAQDFAMKSIGEILKSFMAEA

SEQ ID NO: 402741 - protein, 351 aa, unidentified
MAVAEGGLRGEVRDYGRIANTPAALRRLAHQLGQDGLTLRFCYEAGPCGYGIQRQLSALGHECVVVAPSLIPKRAGDRVKTDRRDAASLARLHRAGELTAVWVPDPGHEAMRDLVRARLDAVRALRRARQQLSGFLLRQGCHYGRPAWTKLHRRWLAGLKFDQAVHHIVLEDYIAAVEAGEARRDRLTAQIEAMLPDWTLAPVVAALQTMRGMALVNAATLIAELGDLSRFANPRQLMAYLGLVPSEYSSGASIKRGSLTKAGNSAARRLLIEAAWCYRFPARISRELRLRQEEQPRPIREIAWKAQLRLCARYHKLARSGKPANVVTAAIARELAGFIWAIARRVPPAAG

SEQ ID NO: 402742 - protein, 340 aa, unidentified
MEQITRIGMDTSKQFFQLHGVDAAERVVLRKKLTRQGMVKFFAELSPTEIAIEACGSSHHWARQLQSFGHVVKLIAPQLSKPYVKRGKNDAADAEALCEAMSRPTMRFVPVKTSEQQAALMLVGIRERLIKSRTQLSNSVRGYAAEFGITAAKGTAHLVLFFERLRSDETLPALARELFSGLAADYAQLQGRIGEIDAKLVEWQRDNECSRRLVKIPGVGPIGAALLQMKTPDPSLFRSGRQFAAWIGLTPKDHSTAGKVRLGVITRAGDEMLRSTLVVGATAVIQHVRRGGKASPWLLELVRRKEPKLAAVALANKIARIAWKLMVSGETYKLSVVAAA

SEQ ID NO: 402743 - protein, 322 aa, unidentified
MTMKTHEVYIGIDVAKTSLDVAMHSTEQRWNFSNDDIGIEHLVSALQELTPILVVLEATGGIEFPAASALALAGFPVAVVNPRQVRDFAKATGKLAKTDTIDAKVLAHFASAIRPEPRVLPDAVAEEFATILARRRQVIEMLTSEKNRLCRAKMSVKVSIQDHIKWLEQSLAKIDDDLNQSVRKSPIWREKSLILRSAPSVGPVLSVTLLAQLPELGTLNRKQIAALVGVAPLNRDSGTLHGKRTIWGGRASVRSALYMATLVATRHNPVIKAFYQRLLNKGKSKKVALIASMRKLLTILNAMLKHGTPWRYVESPIFGSCS

SEQ ID NO: 402744 - protein, 350 aa, unidentified
MIIIGCDYHPGFQQIAFVDTDTGEWNERKLGHREEAEQFYRQLKVGGKEVRVGMEASGHARWFERLISELQFELWIGDAAAIRAKRVRKQKSDRQDAHLLLTLLVEDRFPRIWIPNPENRNLRQLLWHRHRLVQMRTRVMNQLHVVALNEGIRLKKALWRPAGRAQLESLELACWSGRRRQDLLDLLDQLTTKIQELTRALEAEVEKRPVARRLMTHPGVGPLTALAFELVIGTPERFGCGKQIASYVGLVPSEESSGDRRRLGHITKQGNSLLRFLLVEAAQVTVRSNPDWRRHFLHLAMRRERRIAKVAMARKLAVRLYWMWRKQWDYQQMRKFGSHVGEPGNRQGVS

SEQ ID NO: 402745 - protein, 340 aa, unidentified
MSNVTTIGLDIAKSVFQVHGVDASSEVVVRRKLTRGRVLAFFESLPRCLVGIEACSSSHYWARELIARGHDVRLLPAQYVKPYLKRQKNDAADAEAICEAVTRPTMRFVPVKSPEQQSVMMLHRVRLMLNRQRTQISNALRAHLSEFGVVAPIGRNGIEQLLTVINDENDARIPADARLCLRMLEAQLRVVKEQILENDRRVRTSARETELGRRLMEIPGVGPLLASAFVATVADPHAFKSGRCLSAWIGLVPKQNSSGGKEKLGSISKAGNRYLRQLLVVGAMAVIRYAERNGTRRPWLVQLMARRTTKVAAVALANKTARMVWALMTGGERYREPVIA

SEQ ID NO: 402746 - protein, 363 aa, unidentified
MKIVGCDLHARQQSIAMVDTETGVLTETVLKHEGNAVREFYAALEGPVVVGIEATGAMQWFLELLEQLGIECRVGHPAKIRAAETRKQKHDRRDAEVILDLLLMNRFPDIWMPSTEQRDLRTLLRDRHQWVKMRTRLQHTLQAIALNPALREGRALWTAAGRRSLQDLTLPKYTAQRRDELLSLYTQLDKRIQQLDKQVETEARQRPQARRLLTYPGVGPVTALATEVFLGDPHRFAGANQVASYIGMIPCEHSSGKRQRLGKLSKEGNSLLRYLWIEATLHAAVKDSELKRFYRRKLVQKGMGKARVATARKLGIRLWIMLRDEIDYEEFCRRGKLPQKGKTHAGMPDYNSGPARAVTGSTE

SEQ ID NO: 402747 - protein, 313 aa, unidentified
MSISIPQTIGIDISKATLDCHTHPAGLDRRFANTAKGHKALLAWLGQWDIERVAYEATGTYHRALEAAMAHLPCVKLNPERARRFAQATGTLAKTDRIDAAMLARMAATLQPPIRPAKNKQQVKLAELINARDGLVRDRTALKNREKNLTIAILKRQCKQRLDQIARHIEALDAEIARIITADAAMARRHQILTSIDGVGALTANQLIVTMPELGTLENKQAASLAGLAPVARQSGQWKGKSFIRGGRANVRQALYMPALVAARFNPDLKAKYRQLIAAGKPAKIAITTVMRKLIVIANALLKADRLWVRNPT

SEQ ID NO: 402748 - protein, 315 aa, unidentified
MIIGIDISKRSFDVSWVVEDKLHHQVFDYTDEGIADLLSKTSNEAHYVMEATGIYHTRLALRLHLAGRKISVVNPLIIKRFSQMSLSRVKSDKADALLIRSYGEQHTLSLWSPSTEEVLELQQAHSWLDDLIRERTRLFNHQEAHNFRASPSQFVKKQMSRQLHHLEKQIKECEQYLEVVVKKSFLSLYQRLQTIPSIGAKTAIELIIVTNGFSRFNDVKSLCSYIGVSPTTFRSGTSVKGKGRIAKMGQGRMRQLLYLCSWTAKSCNPSCKALNARLRAAGKPGKVIHIAIAHKLLRQAFAVATKGLPYSENYA

SEQ ID NO: 402749 - protein, 364 aa, unidentified
MKRKVYVGMDVHKETIQIAYLTSNSKEILKEQQIKHNEVQIKKFIKKLKTEWNEIHCCYEAGVTGYPLYRYLKSLGVNCILVAPGKIPRQNTDKIKTDKRDAIKLARLMRSGELESIHVPSEEDEAVRDYLRSRDSLRLDLGRNRQRLMKFLLRKDIKYSTTKYWTVSHYKWLNNLHFNNEILQETFNDYYSRVRVQEENLNSMDKKIQEIAESEPYREKVGILRCFRGVDYLTAMFLLCEVNDFKRFKTAGSFMSFLGLVPGEYSSGSKRKQTGITKTGSPRLRRILTEAAWQHRFPGTGSKIITARRSGQPALVVALSEKASLRLHKKFRNLQLRGKTPQVMITAVSRELSGFLWAAMNLVA

SEQ ID NO: 402750 - protein, 337 aa, unidentified
MKNTNFTYFIGIDISKEKFNYCIIDNCMNIINEGEIQMTQEGFNSLNDIINSYKNSIIAIESTGSYHLNLLSFLISKRHTAALINPALIKKFTQTITLRKTKTDKIDANIIAKFILKSVEHITYFTPSGMNDIIALARVRENIAQQVAKVKTQFKQHLAIVFPELLAQYNVFTNSILSILEVFPTPKDVIHAPKNKVENLFNKAFKKGRKPSLTPEILRELAYKSIGISTDGFAKIIKHDVKMLRFLQEQLDDITNDFIDKINKNKKDDMDIISSIKGISHITSAHFLAEIKDIERFENHKKLSAYAGLDPAIKQSGSMYSRGKISKKGSNRNLRSK

SEQ ID NO: 402751 - protein, 343 aa, unidentified
MDHFAGLDVSVKETSICIVDDTGRIVREVKVASEPEALLQVLGNPIYRFKRIGLEAGPLSQWLFSTLAEAGLPVICVETRHMRAVLQAQINKTDRNDARGMAQMMRAGLYRPVHVKTLRSQKLRMLLTHRKLLQSKAIAIDNDLRGTLRNFGLKVGIVGTVKFEARIKELVENLPDLAVLVEPLLMVRRVLREQFAILHRRLLAIVRDDEVCRRLMTVPGVGPVVALTYRATVDVPARFRNSKAVGAVFGLTPSKYQSGEINRTGAISKCGDEMMRVMLYEAAQIMLVRTAKWSWLKAWAMKIARHRGMKKAIVALARRLAVIMHRIWVDGTEFRWTREAAVA

SEQ ID NO: 402752 - protein, 321 aa, unidentified
MEQSFIGIYVAKDRLDVHVRPSGDTFALARDGEGVAALVERLRAAIPQLIVLEATGGFEQVVAAQLAAARLPLVVVNPRQIRDFARATGRLAKTDRIDAAVIAHFADAVRPPVRPLPDKQAHVLDELVTRRRQVIEMMTAEGNRARQIDNKRLKKRIERLRSILQAELTAIDADLDEIIRGTPIWRESEELLKSVPGVGNVVARTLIAELPELGTLDRRKIAALVGVAPFSRDSGTMHGRRTVCGGRAPVRTALYMAALVASRRNPVIAAFYRRLVAAGKCKKLALTACMRKLLVILNAILREHAPWQAARPTRQSLIFAP

SEQ ID NO: 402753 - protein, 341 aa, unidentified
MSIVTVGIDLAKNVFAVHGVDDNGKAVLLKPKVSREQLLPLMAQLPPCVIGMEACSGAHHWARQFRPHGHTIRLMAPKFVTPYRMSGKRGKNDAADAAAICEAVTRPNMRFVPVKEEHQQIILCLHRTRQGFVEERTATYNRLRGLLSEFGIVLPQKVACLRREIGAHLEDLPGYANQCVGDLLAHADQLDARIETYDRIIAKAARDDARSKRLMTLPGIGPNTASAMLASIGGGHDFKNGRQVAAWIGLTPGQYSSGGKARLGRITKAGDNYLRSLLVMGARAVLSGLGEKQDRFSRWARNLLERRGYWRAVVAIAAKNARLAWAVLKYGEDFRLNRSAA

SEQ ID NO: 402754 - protein, 345 aa, unidentified
MKITTIGIDLAKSVFQVHGVDARGKAVLRKQLKRKEVRPFFAQLPPCLVGMEACGSAHHWARKLQQFGHDVRLIAPQFVKPYVRSNKNDAADAAAIAEAVSRPEMRFVPIKTAPAQALLAVHRARQGFIKQRTAQANQIRGLLAEFGIVIPTGLHRLFAQLPEILEDGENGLPGLMRQTVARLRDHLRLLDQEVAALDRQIQLWHQTDPTSQRLATVPGIGPLTASALAATFGNAQTFHNARQFAAALGVVPRQHSTGGKSTLLGISKRGDVYLRTLLIHGARAVISNLARKATPDPWLQRLCARRNANIAAVGLANKNARVVWALLTRGETYQPGHRPRQPLAA

SEQ ID NO: 402755 - protein, 349 aa, unidentified
MEHYAGIDVSLELSSVCVIDANGKIIRETKVASDPDALSHFFHGLGFKVERIGIEAGPLSQWLHAGVTKAGFDTILLETRHVKAALSAMTVKTDRKDARGIAQLIRMGWFRPVHCKSAGSQEVRALLVARKLLLGKLLDVEFSVRGILRGFGLKMGVVTRKSFEARVRELCSNQPMLEQIAGAMLAARCALLTEYTRLHKSMLSIVRGDETCRRLMTAPGVGPLVAITFKTAVDDPVRIGKSKAVGALFGLTPRKYQSGETDVTGGITRVGDEMVRTALYEAANVLLSRVTRFSALKRWGMDVAKRRGMKRAKVALARKLGVILHRMWVDGTSFRWTKETRGGEQLARA

SEQ ID NO: 402756 - protein, 332 aa, unidentified
MDHCAIDLGGRKSQVCVRSPDGRLLFEGPYDTRSLPEFLRLLPRSRVIVETAAEAFRVADAAKEAGHEVRVVPGTLVRSLGVGARKTKTDRRDARTLSEVSCRIDLPSVHIPSARSREWKTICGMHDALVSSRTKLINNLRGWLRGQGLRLTRGTAETFALRMTRLAQPLPEHVTRQVDVLAYLTERTRESDRRLQAIAQSDEVCRRLMTVPGIGPSTAMRFVAAIDDVSRFDSAEKVCAYLGLTPGESSSSEHQQRLGITKAGPASVRWVLVQAAWILQLRCRSSAARPLQLWAAEIAKRRGRLIATVALARKLAATSYALWRDGTTYQPR

SEQ ID NO: 402757 - protein, 400 aa, unidentified
MRTVFGIDVSKASSEVAILVNGERVHGYTMPNDIIGFSRLLEDLKTVSNPEIVFEATGVYSRRLQAFLEEYSYDYTRLNPLEAKKQLDGLRVRKTDKIDAEKLASSQFVLNRKPTYVQEEVYQNLHDLSRFYQNLTEDIVRTKNRLHKVLQIAFPEIENLLSTPTGEQYWNLVSIFPTKHWVLELSEAELKEAIRNSTSKRISENRVGNLTEKLVGLAKQSYSGISKTSPMVEEVKYDAQELIRLTNCREQVLQQLIALAEPLPEYEILLSIPGIAETTATSIIGELGDIRRFKSANQINAFIGIDLKHYESGDFLGQEHTTKRGNPYARKILYKCIHNIASASHTNPCHIADFYEKRKRQSQITSTKPHTIASIHRLIRTMYYLIMHNKLYDYTLAQSH

SEQ ID NO: 402758 - protein, 347 aa, unidentified
MRFYAQQHLYYCGVDLHARSLYVCILDQAGDVQVHQNLRADPQAFLQLVAPYRQNLVVAVECMFAWYWLADLCAREGIPFVLGHALYMKAIHGGKAKNDRIDAHKIAVLLRGGMIPMAYVYPARMRATRDLLRRRMHLMRKRAELLAHIQNTASQYNLPAFEKRIAYESNRAGLPYHFDHPVVRKSIGVDLALIEHYDRLLKELELYILRTARQHDPNALYRLRTVPGIGKILSLVLLYEIHDIRRFPTVQDFASYARLVKCTKESAGKRTGTSGTKIGNAHLKWAFSEAAVLFLRQNPTAQAWLKRTASKHGKPKALSILAHRLGRIVYYLLLRDEAFDMQRFMAA

SEQ ID NO: 402759 - protein, 351 aa, unidentified
MRRSTTLSCAVTYAGIDYHKKFSVVTLGDSAGKVITTQRIPNEQHAIKQFFEEFANVQCAVESCRGYEWFVDLLKELKLTVHMANPYEVALIAKSRCKTDKVDSRILMELLAMGFLPTCYQPTAAERKLRERLRWRCQLVRNTTRIKVRIHSLLDKENVGVRLGNTIFKGKGRRLLEEIELQAPGRQELLNKHLKLLGHFEKLVEAEDTWVKKTAKASPDAQLLMTIPGIGDFSALLILAELGSVSRFKRSAQVVNFAGLVPTIRQSASSTFRGPITKQGPPMLRWILVQDAWQAIRNSQQLRNFFLTVSKRCGRHAAIVATARKLLEIAYRVLKDQKPFNAALVGKQAAT

SEQ ID NO: 402760 - protein, 390 aa, unidentified
MRKPKQRKPNDLSRSLAALDVDHTLIAVVEMSLSSWLVAGIVPGVERQPLKKLKTDACALLELLHRWRAEAVRAGHKITRIAVAFEAGRDGFWLARWLKAHDIEAHVIHASSIAVSREHRRAKTDRLDTDLLKRSFLGWLRGERDHCKTVAIPTLEEEDAKRPNRERESLVGEQSRLVNRMKATLVRLGIRGFNPKLKRAAGGLEALRTPEGAPIPPNTMAELKRDMERRRFICDQIRKIEQARIERLDRAPNTGPNAMVRLLARVIGIGVETADLLVHEVLLRNMRDRRAVARYGGLTGSPERSGTISREKGIARSGNARVRRGMVQLAWRFLLFQKDSALAQWYRQRTENAPKARKTMIVALARKLLIALWRLVREGVVPEGVAMRSA

SEQ ID NO: 402761 - protein, 339 aa, unidentified
MSTSYDGQQYVGIDLHRRRSVLVRMTEGGERLETVRISNDPEYLRAVMARAGEAPEVALEACYGWYWAADVLTELGASVHLAHPLGVKGFAYRRVKNDERDAADLADLLRMGRLPEAWIAPPANRELRELVRHRAKLVGLRTHLKCQVHAVLASAGVPVMSSDLFGPGGRELLERVVLPAAMRAKTNSALRLIDAITFEIDTFAGLVTTQLHADPGFAAVQIIPGVGPTLGAVFVAEIGDVRRFRRPEQLASWAGLTPKHRESDTKVRRGRITKMGSKLVRWAALEAVQRVGPQTRIGAFRDQIAERRGRNQAKVAAARELIECVFYALRDHHVRRLAA

SEQ ID NO: 402762 - protein, 339 aa, unidentified
MNATPVGIDIAKNVFQVHYVDLETGEVVNKPIKRAQFLQHFANRARCLIGMEACSGAHHWARQLMRMGHEVRLMPGQFVKAFNIRNKCDAADAKAIWLAVQQPCKAVAVKTEMQQAVLMMHRQREQLVKFRTMQINGLRGMLAEFGEVMGKGRTAMTTAIPSALASVEERLPKVLIDLLREQWVRIEKMDEEIAAIECRLREWKKEDKAVKMISEIPGVGLLTATAAVAMMGDPKAFRSGREFAAWVGLVPRQTGSGGKVNLHGISKRGDGYLRKMLIHGARAVLNRAKEPGAWVHQMKARRPSNVVVVALANKMARTIWAMLAHDRPYEKCYVSVRPA

SEQ ID NO: 402763 - protein, 416 aa, unidentified
MYYVGIDWADENHQVFITDDSAQRLGAFSIENSRSGVEELFERIRYFVKDQKQVLFALETSKGLLIDSILDAGYTVYPINPKSVDRYRDRYKVSGHKSDDFDAMVLANILRTDRHNYRPILPDSPITRELKILTRECCSLIRLKTLLSNQLTSCLKDYYPVALELFCKLDQPITLLFLKNFPTYQQAKQVSLPQWGKFLSKHHYRVGVKKKANEIYLKLQEPQFNVEPFVDNAKARYTLALVEQLQLLLAQIKSFEDKIEQLLKQHTDGEIFLSLPGAGITLAARMVSEFGDNRERYKKVSSVQAEAGTAPITESSGNWKFVHFRSACRKSFRNTMHQFAFCSIKESSWAKQRYQRYVASGKKHTQSIRCLANAWLEIIFPMWKNYMPYSEQRHLLKYVKEQKPVNYSRNLNYLSV

SEQ ID NO: 402764 - protein, 333 aa, unidentified
MAEVKRFVGIDVSKAQLDVALGANEGTFSIANDEQGIRELLKRLIPGADLVILEATGGLEVPVAGALAAAGIAVAVVNPRQVREFARATGRLAKTDRLDAQVLARFGEAVKPPVRPLKDEQAQALEALVMRRSQLVTMLTAEKNRRANAPRVIRRSIDEHIRWLEKRLSGFDDELSDLIRATPIWRERDELLRSVPGVGTVLAVTLLAHLPELGTLTRKQIAALAGLAPFNRDSGTLRGSRCIWGGRAQVRRVLYMATVAAIRANPAIKSFYTTLRQRGKHPKPALTACMRKLLVILNAVLRTNTPWQTPTSTTSISTFSPLLGAVTQHGCCW

SEQ ID NO: 402765 - protein, 339 aa, unidentified
MQVTTVGLDLAKDVFQVHGVTADGTVVFNRSVRRSQLLPFFEKLPPCLVGMEACGSSHHWAREISKLGHEVRLMPAFYVKPYVKRGKTDAVDAAAICEAVTRPTMRFVEVKDPEQQALLGLHRVRDLVVRQRTQVINMIRGLLREFGHILAKGAGAAIRFAKSCLAGDLPDIPDLAKGLISTLCDQLTELCGRISMYSKLVERHSRLDKRAWRLRSIPGVGPMTASVIVATIGDGKQFRNGRELAAWLGLTPLNRSSGGKERLGRITKKGDRYIRKLLVLGMTSRVQRARRHPEQVDTWTAKMLERKPVRLATVAMANKTARIIWAVLTRDTDYRRSAA

SEQ ID NO: 402766 - protein, 437 aa, unidentified
MEVINASAAGIDVGSRSHFVAIGQNPEDVREFGVYTEDHHKLVNWLSSRGISTVAMESTGSYWQTLFSALQRAGFEVLLVNGRQIKNVKGKTDVKDCQWIQRLHCLGLLTGSFLPSTQVERLRTCQRHRDWLVEECSRLCNKMQKSLRLMNVRLDVVLSDVMGVSGRKITEAILNGCRDGHQLARLAHSSVKKSKEEIALGLQGNWNAELLFELSQSYDLYRIIEAKITECDHLLEKLLRDFTQHIQKPSHGRKVINKRAWKHQHKFDVSSLSHQMVGVDLFSIEGISRSTVMTFLSEVGNDIHKFKTAKQFTSWLRLAPNNKISGGKILSSRTPRGKNYLAASLRNAANSIGLMKIGALKTFFSRIAFKKGRAAAITATARKLATIIWSMVTRQLPYKPYDQTTYSRKVKESVIFNIKAKMKRLDIQPNEILATFS

SEQ ID NO: 402767 - protein, 464 aa, unidentified
MRAGKQLWRNRKEKKEWGRRLQSEDPGLEVVHPHAAGIDVGNSTHYVAVRPDRDPEPVRRFECFTADLHRLADWLQSCGVKTVAMQSTGVYWIPLYEILEEHGLEVYLVNARHTKNLPGRKSDVQESQWLLKLHTYGLLNNSFQPVSEIRVLRTYWRQRGEHVRGAATCIQRMQKALTQMNVQLANVISDISGLTGQAIIRAIVAGERNPLKLAMLSDPRVHASHEEIAKSLEGNWRPELLFVLHQELDMYDTYQKRIAECDQRLQKHLASFTRPLPIQPPTQKLKTKKPAAKNAPRFNLSSELQRVTGVDLTRIDGIDVMVAQTLLSEVGLDMSRWTTESHFASWLGLCPDNRISGDKVLSRGTRRVVNRAATALRQAANTLMRSRSYLGAQYRRLRTKLGAPKAITAMAHRLARLVYRMLKYGQTYVDKGTEYYEERFRQQQIQLLRKRAAKLGLQVAEIHA

SEQ ID NO: 402768 - protein, 520 aa, unidentified
MRALKTDIALVLDTRTLAWSGVGEHTIGDAWRSRFGRMQDHSTTPRPHAPSLIMEGHAMKNKPSPERAHKRLTKHLEQINLYAAGIDIGSESHYVAVPEGLGDEPVRCFPCFTGDLESLADWLVQIGIQTVAMESTGIYWIPCFEILEERGLEVLLVNARHVKNVTGRKSDVLDCQWLQQLHTYGLLAGAFRPQEQVTALRAYMRQRGTLVRYAGSHIQHMQKALRQMNLLLDNVVTDITGKTGMTIIRAIMKGERDPNRLAAYRDPRCKKSEQEIAQSLKGHYREEHLFALRQSVELYDTYQAKITACDEAIEQQLNHFDAQGDLEQLPVSKKKQAANAPAFDVRGELYRMCGVDLTAIDGVSDITALKVLSEIGTDMSRWKSEKHFASWMGLSPGNKVSGGKILSSKTKPTNNRAAAALRMAAFTLSNSRSALGAYYRRMRSRHGSPKAITATAHKLARLIYSMLKHGTEYVDQGQDYYEQQYQDRIMKNLKRRAAQMGFALVPSSGENRLVSENSIA

SEQ ID NO: 402769 - protein, 317 aa, unidentified
MALPLTFVGIDVSKLWLDLWLAPQKRFERISNDAAGWVAIISLLKSLGDEAGLVVAFEATGGYERGLRQAVLEAGFEVRRLNPLRVRLYAKSLGRNAKNDRIDARVIARYAEAADTTPEILDTAREHLAELVSHRRRLVDERVSVSNQTNMLPCAVLQAQNRKRLALIERQIDETDALILGAIGQVPSLLAKRDLLKTLKGVKDITATTLVALLPELGRITRRAIAALVGLAPFDHDSGQFKGSRSIAGGRSAVRTALYMAARAAARSNSPLGAFYRRLVAAGKPPKVATVALMRKMLVTLNAIIRDNQPWKHATGG

SEQ ID NO: 402770 - protein, 345 aa, unidentified
MEHHAGIDVSLEWSSVCVVDASGKIVTEIKVASEPEVLVEFFKGLSFPVTRIGLEAGPLSQWLHAGLTRAGFETVLLETRHVKAALSAMSIKTDRNDARGIAQLMRMGWFRPVHAKSVGSREVRALLVARKQLLSKLMDLEASMRGILRGFGLKMGVVTRKGFEARVRELSAGQAMLERVTSAMLEARAALWREFEQLHREMLRIVRDDEICRRLMSTPGVGPLVAITFKSAIDDPGRIAKSKTIGALFGLVPKKYQSGERDVSGGITRTGDESVRTALYEAANVMLTRTTRFSSLKRWALEVAKRRGLKRARVALARKLGVVLHRIWIDGTTFRWTKHNPAIAG

SEQ ID NO: 402771 - protein, 363 aa, unidentified
MKILVGIDLHSNNAVCGLMDERGRRLVHQQLPCDLPAILRLLDPYQDRIVTIAIESTFNWYWLVDGLQDHGYHVVLANPAGMQPYRGKKHTDDVSDAYFLAELLRLEILPTGHIYERHTRPVRDLLRRRLLLVRQRTTLILSFKSLHERTLGQRLPLARVKSMTVQDAQACFSAPADQLLSGQQITLMGHLTDSIAKLEQHILGVAGNWPTYRRLQELPGVGKILGLTIALETGEVGRFADAGNFASYCRCVKSRRTSNSKKKGENNRKCGNRYLAWAFVEAAHFACRHDEACRRFYDRKRQQTNPIIATKALACKLAKAAWHVMAKDVPYDPTRVFGPARKNDFGETGREPAKGSGPASQPN

SEQ ID NO: 402772 - protein, 357 aa, unidentified
MYSIGVDFHKAYSHMTVMDAQGQVVRAGKVPNTAEAVHAFVAPYRGDAQAVLEATRNWTVMYDMLERELRAVYLAHPLKVRAIAEARIKTDRIDSKILAHLLRCDLLPTAYVRPREQRVSQQILRQRMFMVRVRTMVKNRIHVLIDRQLDVREVAAQFSDLFGGAGLAWLRAVGLTDIERRLLNAELALFEAVQERIAESDSLVRSLAAGDPRVRWMRTIPGFGRFFAVLVVHEIGTIRRFSTPEKLSAYAGLVPSVHASGGKVFHGRLTKQGNKWLRWAVVEAVRPAVTTDPDLRRYYERLRQRKGPNPAKVATARRLLLLAHRVLSQERPYRKPESVTERPRPRTALMNPLPAAG

SEQ ID NO: 402773 - protein, 344 aa, unidentified
MVLIGCDFHPSWQQVCWLDVETGETGENEVVHAPGEVEKFYRRFAAPALIGMESTGNCQWFVELVEKLGHQVWIGDAAKIRASEVRQQKHDRRDAALLLRLLREGRFPRIWTPSSEQRDARQLLIHRHKLVRVRAQVKNGLQHLAMNRGVQKKRKLWSAAGQQALRELPLRPWAGRRREDLLKLLAMLDGQVAALDLAVKAVAEKDANARLLMSQPGVGPITSLAFVLTMGDVRRFPRGKQVASYLGLIPREYSSGGHQRLGSISKQGNRFMRMLLVEAAQVAVQCDPGFRNEYLHRRHSKPSGVAKVAAARKLAIRLYWMLRTQKRYPEIVRIESSPRVALVG

SEQ ID NO: 402774 - protein, 345 aa, unidentified
MENMYYIGLDVHKKTISYCVKDGSGRIYAEAEIPATRLDLDMWMKTLPQPWTAAMEATIFTAWIYDHLKPHAAAVKVAHPLMLRAIATAKKKNDRIDANKIADCLRCDFLPECYMASTEIRERRRTLRYRNLLVRQAVQMKNKIAVLLMEAGVSYNKQKLHKVGYFRELLATNQDIDAGLKPLLRLCRETVVRLGKTESALVRSLQRDSLLMERVERLMTIPAVGPITALTWALEVGDVQRFSSIKKAISYCGLCGAENSSANIIKRTPLSKQRNKHLQTMLIEAAKMAPRNSPDLAMLYDREKQKGNANRATLAVARKLVAYLVAVDRRQKDFLVVESENRTAA

SEQ ID NO: 402775 - protein, 407 aa, unidentified
MNVIYPRAAGLDVHKQTVVACARVTSDGALLQEVRTFQTATSGLLELCDWLESLGVEHVAMEATGVYWKPVWHVLEGHFELVLANAAHVKNVPGRKTDVNDSMWLADLLAHGLIRASFVPPVAVQELRTLTRTRKQFVRERASHVQRIEKVLEDANLKLSVVLSDIVGKSGRAVLQAIIDGHTDPERLASCIGMRVKASRAELIEALRGRISTHHRFMLKLHLGHIDALDQAIAAIETEVGLGLEPFRHAARLLSTMPGLSSVSANVIVAEIGIDMTRFATPAHLLSWACLCPRNDESAGKRRSTRLRPGGKWLKTTLVQAAWAAVRVKGGYLQAQFHRLRARRGAKKAIVAVAASMLTAAWHMLRDGTEWTDLGAAHFDRADATKTANRLIRRLQQIGYIVQASPT

SEQ ID NO: 402776 - protein, 411 aa, unidentified
MEIVHPRCCGLDVHKKTVVACALISQPDGLIERHVRTFKTMTGDLLALADWLSSLGVTHVALESTGVYWRPVFNVLEDESRTLLLVNPQHMRAVPGKKTDVRDSEWLADLLRHGLLQASFIPPAPIRAIRELTRYRKTLVQERTDEINRLQKTLEGANIKLASVASDVLGTSSRAMLTALLDGERDPDVMADLAKGRLRNKLPELRQALASRIQPHHMVLVGQILAHIDYLEQAVTQMENEIERSLAPFLQALELLQTIPAIKSVAASAILAEIGTDMSRFPSAGHLASWAGLCPSNKQSAGKRLKGPLNRGNVWLRAIMGEVAWNAMKMRDSYFHAQFNRGARRRGRQKAVIAVAHSVLVVIYHVLRTGRPYTELGANYFDQLDATRVERHHVHRLEQLGYTVTLTPATA

SEQ ID NO: 402777 - protein, 333 aa, unidentified
MDLAKHVFQAHGASAAGAVLFRKKLRREQVLSFFAGQPRCRVALEACASAHHWARAIGELGHEVKLIPPAYVKPFVKRQKNDAADAEAICEAAQRPTMRFVAVKSEAKQAAAVIFRARDLLVGQRTQIINALRGHLGEYGLIAPQGPSNIERLIVQVEDPTSGIPAAARACLVRLVAVLRHLQDEIAELDKAVAARAKADAAARRLMTVPGIGPLIATAIEALAPPAETFRSGRDFAAWVGLTPIQRSTGGKERLGRTSRMGERTLRRLLIFAASAVVRWAKRKGVPAGSWLGRMLARKPPMLVIVALANKNARVAWALLAKGGTYRAPAVAA

SEQ ID NO: 402778 - protein, 339 aa, unidentified
MKYTPVGVDIAKHVIQIHFINEHTGEVVDKQLRRQDFLTFFGNREPCLIGMEACGGSQHWARELTKLGHKVRLLQARFVKAFVMGNKNDVMDARAIWVAVQQPGKEIAVKTEEQQSVLVLHRTRMQLVKFRTAQINALHGTLLEFGETIHKGRAAMEREFPEALERMKERLPPYLIMVLENQYNRLNELDSLIEDIEKQLTSVARQNETCKRLLDIPGVGPLIATAAVATMGEASAFKSGREFAAYVGLVPKQTGSGGKVRLLGISKRGDTYLRTLFIHGARAVALVAKEPGPWITELKKRRPASVAIVAMANKLARTVWAITAHGRKYDRNHVSIRPY

SEQ ID NO: 402779 - protein, 429 aa, unidentified
MNPPHDASNPAAHADFAAFVGIDWADRCHALCLRVAGEHDACALTLDHTPEALDAFATQLRQRFGGRPVAVAVELSRGPLIYALCRHAHLVIHPVPPARLSSYRKAFVASGAKDDPTDARLILDYLLKHRDQLRPWRPEEESVRRLRALVEQRRAFVEQRTALSNQLVSRLKTYFPQAIDWIGDKSYGRMACDFLTKWPDLASVQRARPATVRAFYFAHGVRRADVIQRRLEAIAHAAPLTDDPAIIDVGVQTVLALAKLLHELGKVIAGFDKRIRTQFAQHQDMGLFASLPGAGKALAPRLLCALGADRSRFTDARQLQAYSGIAPVTRRSGRQHTVHRRWAAPTFLRQTFHEFAQHSIGQSAWAAACYQQQRQRGAGHHAAVRALAFKWIRILFACWRTRTPYDESRYHDQLRRRRSPLQAHLPDTA

SEQ ID NO: 402780 - protein, 375 aa, unidentified
MKKVRFLGLDVHAETIAVSVAEIDGEVRSLGIIANRQESIRKLIKKLGPAEQLQACYEAGPTGYVLYWQLTALGVKCDVVAPSLVPVKAGDRVKTDRRDASKLARSYRAGDLTPVWVPDEEHEALRDLVRAREAAKQDQLRARHRLSKFLLRHGRRAPSGVKVWTQKHLDWIKEQVHFKQPAQEYTLLDYWHEVEHVTARIRRLEQAIEEAVKLAPARMQEVIQALQALRGIAQISAVTIVAELGEISRFERPRQLMGYSGAVSSEHSSGKRIIRGQITKTGNAHLRRIVIEAAWSYRHRPSHGWALRKRQKDLSEEVKEIAWKAQHRLHQRYRKLLAAGKDKQKVVTAIGRELLGFIWAIGIQVERNNQQSRVA

SEQ ID NO: 402781 - protein, 468 aa, unidentified
MAGRNKSRQASPEQLTGEPAEVSDEPAEVISRAAAIDVAKGSGMVCTRVPHPDKPGRRIQRVWQVSARYADVVALMDELADLGIQRLVLESTSDYWRIWYYLAEAAGLQVWLVNARDAKHLPGRPKTDKLDCVWLCKLNERGMLRRSFVPPEAVRDLRALTRLRSRLAQDQARHQSRIEKILEDALLKISAVISDLMGTSGRRFLAALVAGERDPAKLAALGDRRLKASAAELEAALTGRFRDIHALETGMLCELIDDMNAKIARLDAEITARLARLPGIAPACAGCGEIGGGHAPACPRAGTPVLPVIERLDELTGIGIAAAQVIVAELGTDKTTFPTPGHAAAWAKLTSRTIQSGATSKNGRAGKGNPYLRAVLGRAAMAAAKTDTYLGERYRRIARRRGKQKAIVAVSRTICEIAWMIITDPAVRFSELGPDYYARLDAGRQTRNKIRELERLNPGMNVTLTPAA

SEQ ID NO: 402782 - protein, 367 aa, unidentified
MKEYIGCDAHKKYSVFVAVNERGQHGRALRVNHDRDEYRQFLASLPAHSQIALEATGHWYWLVDEIEAAGHQVHLANAGEAKKRMGKTNKTDKLDAGGLGMLLRNGTLPEVWIPPAELRDQRALLRTRMNLVRVGTAVKNRIHGALDRYGLQSEGYSDLFGTSGRRHLADCLKYLPQYTRLSVERELALLDHLQPQIAALEEHIARVVQPSQEIVRLRTLPGVGEILAPLIAWEIGLVKRFAGPGKLTAYAGLVARTISSGGRTWHGRVSPAVNRYLKWAFLEAANAVVRHQQKYDGWHVMMVYQRLRGPKGHAKAATAVGRHLAEATYWILQRGEAYRDPARSTLEAAAVAAGSSCPGKRDVALTL

SEQ ID NO: 402783 - protein, 366 aa, unidentified
MLIIGCDFHPKFQQIAFTDTETGEYGERRLHHPQEADQFYRALAGRQVRVGMEATGSFRWFGRLLSELGHELWLGNPTQIRASAPRRQKTDKRDARQLLKLLLEERFPRVWLPNTTDEDVRQLLLHRCRLVRVRTRVQNQLDAIAKNEGLVGQRVGTQKGRQQLEALPLSGWYQRRRQDLFELLDQLEQRIAPLNQAVEQAAAERADAQRLMTHPGVGPIVALAYVLVIGDWQRFARGKYVASYLGLIPEEDSSSHQRRLGHITKQGNSLVRWLLVQAAVRAQQYDPAWHRQYLRLARNKHHGVAKVAIARKLAIRLYWMLRSGQDYEQVKERGSHAGQSGSPSGTRSSEIDLLIGRPVSLAGEGV

SEQ ID NO: 402784 - protein, 372 aa, unidentified
MYNTTVYVGMDVHKESFTVCAYTVETDKASYFQKMEADYKKVLSYLDYLRRIYGEAVEFVCGYEAGCLGYTLYHQLTDHNVNCKILAPSTMLEQRSKKRIKTDKRDAELIAKCLVSRSYSPVHIPTQQDEETKEFLRMRDDHKLALKKIKQQILGFCLRHNYRYGSRHYWTQVHIKWLRSLKSEGLYSEILTEYLLTYDALTDKIERLDRRIEELASQEVYAEKVKMLTCYIGVKTNTALSTIVEVGDFHRFATAERFASYIGLVPGEDSSGPDCTRLSITKAGNRHVRLLLVESAKCFGRGEIGFKSRELKARQAGNRSEVIAYADRANERLRRRYYKMVLGQNKKHNVATVAIARELACFMWGMMTDHIA

SEQ ID NO: 402785 - protein, 337 aa, unidentified
MEKIRELKQFSESVGIDVSKLTLDVFLYVRKKHKQFANTPKGHIVMQKWIKSETENLKNIIYCFEHTGWYCLLLSHFLHDQSLYYCCINPLDLKRSMGFKRGKTDKTDSYEIARFAWLRKEELEPSVPISLKLLELQRLMSVREQFVKQSTALKNLEKGLLVTIKKLSSDIGLKLIRRSIQQLEQQVVKIEKAMEELIKEEPDMKTNYKLAKSVKGVGKILSIQMLLHTHNFTRFAEWRQFAAYCGLVPYPFQSGTSINGRKKIHAISDVKMKSLLSMSAISAIQHDLELKLYYQKRVEEGKPKMVALNIIRNKIVSRIFATVKRGTPFLELSKFAA

SEQ ID NO: 402786 - protein, 388 aa, unidentified
MIYVGIDIAKLNHFASAISSDGEELIKPFKFTNDNDGFQLLISKLDPLDKDSLIIGLESTAHYGDNLVRYLVAKNYKVCVLNPIKTSTMRKNNIRKTKTDKVDTFIICKTLMMQESLRFVTFYDLDLMDLQALGRFRQKTIKQRTRLKIQLTSYVDEIFPELQYFFKSGLHQKSVYALLKEAPTPEAVASMHMTHLAHLLKVNSHGHFNKEVAQQLRVLAQKSVGASDSSLSIQVTHTIQQIELLDSQLERVEAEMTEIMKFNDSVIMTIPGIGYINGGMILGEIGDIHRFSSPNKLLAYAGLDPSVYQSGNFQAKKTRMSKRGSKVLRYALVNAAHNVVKNNATFKAYYEAKMAEGRTHYNALGHCAGKLVRIIWKMMTDNVEFNLD

SEQ ID NO: 402787 - protein, 455 aa, unidentified
MPKKTTGGRPELKAVNVGAAAIDIGSKMHMAAVNPASTDVPVRSFGTFTQDLHDLADWFKACGVMSVAMESTGVYWIPVYEILEQRGFDVILVNARYAKNVPGRKTDVSDAAWLRELHSYGLLRGSFRPDAEIATLRAYLRQRERLVEYAAAHIQHMQKALMEMNLQLHHVVSDITGATGMRIIRAIVSGERNPDVLATYRDVRCHSSIETIRAALVGNDRHEHVFALTQSLELYDVYQAKMLDCDRKLEVLLAGLNDRGAKPVGRLSKPRIKTKQVNAPTFDVRTTLYGVLGVDLTEIHGLGPSLALTLVGECGTDLRAWPSAKHFTSWLCLAPGNKISGGKVLSSRTRRSSCRAAALLRLAATTVGRSDTALGAFYRRLSSRAGKSKAVTATARKIAVLFYNTLRHGMSYKDPGADHYEQQYRSRVLANLQRRAKSLGFVLQAIPEHANPAVS

SEQ ID NO: 402788 - protein, 412 aa, unidentified
MEVIIERCCGLDVHQETVVACVLIGAPGERPRKEIRTFRTMTRDLEALRDWLQELGVTHVGMESTGVYWRPVYAVLEGCFDLIVGNARHIRNVPGRKTDVKDSEWIADLVRHGLIAKSYVPPRPLRELRELLRYRRKLVESQAAERNRLLKLLETANIKLASVASDVFGVSGRAMLRALIAGEASPEAMADLARGLLRRKRADLILALDGRLEEHHRFLLAMQLRRLEAIEADIAGLDSRIGERLEPYSAPHALLMQIPGVDWVVAAVLIAEIGVDMSVFVSVYHLSAWAGVCPGNHESAGRQRSGRARKGNVHLRAILVGAAVSASRTKGSYLKDKFHRLKARRGALRAALAIAHKILVSAYHMLERNRPYRDLGEAYLDQISQTRTVANLKRRLERLGYKVTLEPNAQPT

SEQ ID NO: 402789 - protein, 344 aa, unidentified
MDHFAGLDVSVKETSVCIVDGAGRIVREVKAASEPEDLVRILSNPAYHFKRIGLEAGPLSQWLFSALAEAGLPAICVETRHMQAVLKAQINKTDRSDARGIAQMMRAGLYRPVHVKTLHSQKLRMLLTHRKLLQSKAIAIENDLRGTLRNFGLKVGMVGTVKFEGRIKELVEDAPDLALLVEPMLVVRRVLREQIGILHHRLLVIVRDDEVCRRLMTIPGVGPVVALTYRATVDVPARFKNSKAVGAVYGLTPSKYQSGEINRSGAISHCGDEMMRVMLYEAAQVMLTRTNKWSWLKAWAMQIARRRGMKKAVVALARRLAVIMHRIWVDGTEFRWTREETAAA

SEQ ID NO: 402790 - protein, 350 aa, unidentified
MEYVGIDWSYRRAAWCALSDAGAIVGEGAVSSDEDGLARLVIKRGTEVSAVVEMMSGAIWVRDTLVAAGWEVQIAHARKVRDVAPLACKTDKVDARVLAELCRRDLVPELWVPALADRELRERLRRRMHLVRMRASAMNRIFGLLTQWGLRLSLKRLREPDAMTLLEQRGVPPVWRRSIAEALAVIELLDARIGPIDAELGPLARADTRVVLLDTIPGVGALLGLTIASEIGDVARFGSPRKLVGYAGMAPKVSQSGDRSRTGALSKAGSRTLRWAAVEAAQHAWRPTNPWHQLYTDVATRAGKNPAKSAVARKILIATWHVLSRQQPFKPAAPRRPHPASASSRCFLAA

SEQ ID NO: 402791 - protein, 411 aa, unidentified
MDILHARCAGLDVHKDFVTACVLSPGAGSEPIKHLEQFGTTTQELRRLSQWLERAQVTHAAMESTGVYWKPVFNILESSCELVLVNSRQVRNVPGRKTDPADAAWLARLLRHGLVEASFVPERETRELRDLCRMRTTLVRESVQTGNRMRKVLEDANIKLDSVASDSLGVSGRSMIEALVQGETDPIVLAELARGRLRAKRPELALALEGRVTRHHQFLLGEWLRLLHFVEEQIARLEAQIESHMPPFEAAATLLLSMPGVDRTTACALLGEIGQDMTRFASARHLASWAGVCPGNNQSGGRRMSGKSHRGNRWVKGVLTEMAWAATRTKNTYANALYRRLMIHKGKKRALVAVAHHLLEAVWHMLTLGAPYRELGSDYFDRLDRDRLKRNLVRRLQKLGYTVDVQPVSAA

SEQ ID NO: 402792 - protein, 349 aa, unidentified
MAEAGLRGEVREHGKIPNTPAALKALTVKLAPARKELRFCYEAGPCGYGIQRQLTEAGHECAVVAPSLIPRKPGERIKTDRRDAINLAKQHRAGELTPVWVPDQAHEAIRDLVRARQAAVRTLRQARQQLSGFLLRHGRHYHRPAWTLLHRRWLASLKFDQAVHHIVLEDCIAAVEAAMARRDRLEAHIEAVLPEWSLAPVVEALQALRGVRLVAAATLVAELGDITRFTNPRQLMAYLGLVPSEHSSGRTRRQGGITKAGNGAARRMLIEAAWSYRFPARISREQLLRQERQVKPIRDIAWKAQERLCRRYRKLARAGKQPTVITAAIARELAGFMWAIAKQVPPMAT

SEQ ID NO: 402793 - protein, 465 aa, unidentified
MKSKTPKSQKQKKKTVINPAWELINPAAAGIDIGSREHWVCVPARSAQNNVRPFGTFTADLEALAAWLQECGVKTVAMEATGVYWIPVFQILERRGFQVVLVNARQTKNVAGRKTDMKDCQWIQRLHTYGLLQGSFRPGDKYCVVRTYLRYRDELVSARATQCQHLQKALQQMNVQLHHVLSDVTGVSGWRIIEAILEGQRDPVKLAAMVDVRVRASQDTIQKALVGDYRPEHLFVLKSAFELYAAYEAKMNACDEQIVREVAKLPDQVDGKIKPLPARKEGRPASADKMLDQDMRASLYPKLGVDLTAIEGIGVLTELVILTEVGPDLSRFPSEKHFASWLGLCPDQRISGGKVLTSRTRRVINRVSDALRMAALTLQRSQSALGAFYRRMKARLGAAEAVTATAHKLARLVYRLLKHGEAYVRQGMADYEKKFQQRKLYALQKTAKTMGFQLVAQQPITQGVS

SEQ ID NO: 402794 - protein, 321 aa, unidentified
MAAILGIDVAKNKFDVALYRNGKYKTKVFDNKSSGFEGLAVWLKQHGEMLVHACMEATGSYGDALARFLFEAGHKVSVVNPARIKAFGKSELLRTKNDKTDAKLIARFCEAHKPGPWQPDSPEIEHLRMLGRRREALIDLRTQEVNRLNGPDSAVNESVQKVISFLDEEIEQISKAIKDHIHKHDGLRKKQALLKTIPGVGDVTIEAILSEINGFEGFDTIEQVVAFMGLSPKEHNSGTSVRGKAVLCKIGNARLRKVLYMPTLSAIQHNPFVRALYDRLIAKSKNGMIIACACMKKLVHIIYGVIKNGKPFDPAYNIKTA

SEQ ID NO: 402795 - protein, 377 aa, unidentified
MARTKRPLTPAAQSVAVPAGDPVTAREREVVGGVDTHKDTHTAAVVDTAGRMLGHETFPASGAGYARLLGWLVGFGSVLLVGVEGTGVYGAGLAAHLRRHGVVMVEVDRPDRKARRWQGKSDPVDAEAAARAALAARASGTPKDRDGAVEALRVLRVARRSAVDQRADVQRQIKALVVTAAEPLRAQLRDLSDRHLLAACAGLHPDTARLHEPVEATQHALAALATRHARLTTEITGLDTHLVALVARINPALLQLNGVGVEVAGQLLVTAGGNPQRIRTEPAFAMLCGVAPLPASSGKTRRHRLNRGGDRQANAALYRVVLCRLRWDPRTRAYAQRRTTEGLSKKEIIRCLKRLIAREIYHVLQPEAIKKPHAQTA

SEQ ID NO: 402796 - protein, 300 aa, unidentified
MSRDIKYIGMDVHKEATVIAVLNGSGKLVMESIVETKASSILQFIHGLRGELHVTWEEGTWAAWLYDLLQPQVARVLVCDPRRNALLKEGNKSDKVDARKLADLLRTGMLRPVYHGEHGLRTLRELGRSYHTLTQDLNRVMNRIKALYRGWSIPCAGTQVYAARYREQWLQKIEHAGVRRRAELLYQQLDGLQILRRTLRPELLAESRKHKASKLLRQIPCIGPIRAARLIALMQTPHRFRSKRQLWTYSGLGIETRDSAQYRYVHGQLQRSKKPQQIRGLNQNHNHEMKEIFKGSRPLL

SEQ ID NO: 402797 - protein, 385 aa, unidentified
MSQLNDLSRSLTSLEQDNTIIAVIEMSQSSWLVAGIVPGIERHPLKKLEPNEGELLRLLMRWRAEAIKMGCTITRIAVAYEAGRDGFWLARWLRAHDIETYVIHPTSVAVSREHRRAKTDRLDTGLLKRVFIGWLRGEPDHCHMVTIPTLAEEDAKRPNREREGLVRERTRIVNRMKSCLARFGVRSFKPTLRKASERLATLVTPEGVPLPANTLLELRRDMVRLRFIMDQIKEVEETRAQRLEQAPQEKSHAMVRLLARVIGVGIETADMLVHEILSRSLRDRRAVARYAGLTGAPDESGSRRQEKGLAKAGNARVRRGMIQLAWRFLLFQKDSALAQWYRTRTESAGKKRKTMIVALARKLLIALWRLATIGEVPVGVVLRAA

SEQ ID NO: 402798 - protein, 289 aa, unidentified
MRYFIGLDVHSNNTVIAVLDDKGKRVYSRRVKNFIKFVLEELKSFKDKVQSIALESTYNWYWLADGLIEAGYEVHLANPSANKQYEGIKHTNDFSDAFFLAELLRLGILKEGYIYPRRERAIRDLLRRRLMLVRQRTAHILSFQSLYNRVKGCSFGGVMYVKRLKEDEMDDYFEDQDFALAAKANIASIHFLTQRIKEVEKIVLKKMEILPEFEKLKTVTGIGNILALTIMLETGDIRRFPKVGNYASYCRCVPSERSSNKKKKGENNRKNGNRYLAWAYVEAANFATR

SEQ ID NO: 402799 - protein, 470 aa, unidentified
MTPRKDNFPHPDPPVRSPSLQVVHPHAAAVDIGAAEHWVAVPPDRDAQPVRGFGTCTIDLEAIADWLLACDVTTVAMESTGVYWIPLFEVLEARGFQAILIDPRQAQRAPGRPTSDPRDCQWLQRLHAYGLLAAAFRPDEQVCVLRAYLRQRRMLITYASQHIQHMQKALEQMNLKLPEVVSDITGVTGMAIIKAILAGERDPVRLAQLRDRRCQHSEEQIAKALQGTWRAEHLFALRQAVELYEFYHRQLATCDTQIAAHLATFPDQSDGHPLPPKSRKSKRKAHAPRFEVRTPLSRMAGVDLTALEGIEEETALVILSEIGTDMSRWPSVKHFCSWLGLCPIHKVSGGKVLSRRVRPGANRVAVALRLAAGSLHHSQSALGAFFRRLRARLGAPKAITATAHKLARLVYSLLKHGTAYVQQGMEEYEAQYRERKMKAMARQAKAFGYTLVPLAGQDGQTMHAVLGSTP

SEQ ID NO: 402800 - protein, 430 aa, unidentified
MNCNAQNKKIEAITETTLVVGIDVGSETHYARVFDHRGIEYSKKPFKFSNSEAGFETFKAWVLDYKEAHGKDKVVPGMEPTGHYWFNLGKFLQDNDMKPVLVNPHHVKKSKELDDNSQTKNDRKDPKVIAGLVREGRYMIPYLPDGVYADLRTASNMRFQLQSELTRIQNRISRWFNIYFPEYTTVYGKADAISGMLILKQAPLPEDILTLGAEGINQIWRDAKIRAVGMKRAQTLVSAAEHSVGSKEGATAARMEIRMLLEDYESRSTRLQEVMELIEDLVSKIPMAGKLLEIKGVGIKTVSGFLAEVGDISRFNNPKELQKLAGLALVENSSGKHKGETTISRRGRKRLRYLLFEVAMSLVSKNPEFAELHHYYTTRETNPLKKMQSLMVIAAKLIRVFYAMLTKGVDYDPKKMRGDIKRPVAYLQAA

SEQ ID NO: 402801 - protein, 338 aa, unidentified
MIVIGVDVHKQSLTAVAVDEAGRMLDERTVTGANDGLVAWASSLSDERLWALEDCRQLTRALERELLAAGEELVRVPPKLMAPERRAGRARGKSDPIDALAVARAALREPRLDHPRPAEQRLRELKLLVDHRDDLIDERRRAQQRLRWHLHDLDPTLAVPLGALDRAVWLDRLGRWLARREQTTQVRIARQLLGRCRASTREIVALERELEARAQTLAPRLLELPGCGPLSAAKLLSEIGPIERFANDARLARHAGVAPLEASSGKRLRHRLDRGGNRQLNCALHRIAVTQGRVHAPARAYLERKQGEGKSRREVLRCLKRQLVRTVYSTLKAESALT

SEQ ID NO: 402802 - protein, 333 aa, unidentified
MVEGTEGSHHKEGSTKMSKDIMVCAGIDTGKYKLDVAIDGSAEQLQVDNTPEGHRTLLSWLRRRGVERVGIEASGGYEQLVVSGLRADGLVVIVFQPVQVRAYARFVLQHAKNDNIDAALIACCTAAATDIHEPPDARLAPLAQHLTMIEQITEDIAQLKTRREACREGRIRTFWKQEIDRLKRLLQAELKQLVAAIREHRDLSDRLDLIASVDGVGLRTAVAILVRMPEIGRVTREQAAAIAGLAPYDDDSGLRRGSRHIKGGRQRLRQSLYAATLPAVFYWNAQLKTIYKRLIAAGKTHKLALVACARKLLIFVNTVVARGTPWTSTPAAT

SEQ ID NO: 402803 - protein, 423 aa, unidentified
MITKDAKLIQPKTVVVGVDIAKRVHWATVMYEGMPVGKAFAIRNTREGFENLLFTLNALKQKLGAHSIVVGMEPTGHYFKPLAYFLANTGMCQVVLVNPYHVNRSKEFDDNSPTKNDRKDARVIARLVSQGNYFFAPLNYGVWAELRNSNAERLQLIKKRWQLKNQLTTILDQFFPEFADVFKDILGKGAIYILTHYPFPADILEVEEQTLCEGLKEATTNRVGQKRARKLREAASHSIGIKEGLKGARNQVYHLVEQLELIQRQIKDVEIKMAEQIEETGMGKYLTSIKGVGVVSAAAFLAEIGNPDDYENYKQVQKKAGLNLKENSSGQHKGKTTVSKRGRPSLLQLMYQIALVSVARNPEMKNFYRYLTTRQENPLAGKQALIAVAVKMIKVMLAVCKRREYYDGSKVGKGHRDARLQAA

SEQ ID NO: 402804 - protein, 455 aa, unidentified
MNRKRSKARIDRKMLMVHPNAAAIDVGATMHMAAVRADRTPEPVRSFGTFTTDLHRLVDWFTECGVETVVMESTSVYWIPIFELLDARGFTVFLVNARDAKHVPGRKTDVSDAQWLQRLHSYGLLRASFRPKGQIAELRAYVRQRERLLEYAASHIQHMQKALTQMNLQLHHVVADITGATGLRIIRAILAGDHDPKVLAQLRDYRCHARAETIEKALTGSYRPEHLFALEQALALYDAYHEKVSACDVRIEAVLKELSIGRGRRSDSLLSPRRPRTNPVNGLAFDVRAALFALLGKDLTQIDGLGPYLSLKLVAECGDDLSAWGSAKHFTSWLGLAPSNKISGGKVLSSRTRRCGSRAAALLRLAAVTVGRTDTALGAFYRRLSARVGKAKAVTATARKIAVLFYNAVRHGMEYVDPGASYYETRYRTRVIDNLHRRAKAFGFVLQPVEPSAVS

SEQ ID NO: 402805 - protein, 355 aa, unidentified
MIHVGIDQHKRFSVATSVDSETGEVRTVRLYHDEPDRIRSYIRSLGPGARVALETTGNWYWLVDLIEEEGAEPHLANTIEARRIVKARAKNDKLDSLHLAMLDMDGILPEVYVPERSIRDARERHRYRIRLIWLRCRIKNAIHAILAKLNINHPFSDLFGKRGREFLDGLRLREPYETELRSALRLLDAFDREVSLMRDEIRKALQGHPLAEVLQTAPGIGELTAYLILHEVGPVERFRGEKEFVRYCCLAPGTWQSAGRRRDLPIGRHGNLYLKAAFTEAAQVAVRCDEALGGFYARLRRRKGTGKAMAAAARKLAVSVYYMLKRHKAYRPAASISRGSGKPVLRLGRRLETVA

SEQ ID NO: 402806 - protein, 387 aa, unidentified
MLTEATACPAVIGLDVGKFSHWACHVTRQGEILASGPVANTEHDLDSLFARVDAGTLVVVDQVRNIGSLAISRARLAGLPVAYLPGIAAHGAAKLFAGDAKTDERDAAVIAKTALGIPDSLLPVPRRDERLEAARSMAAQRNHMVTCSTRDKNRLRSILLESCPAFEALADLADPHWLKMMESLGGPWGLLDAGKHAVGAVTRGANRARIDAALAAISSSTRPSEYQVMAENPQVRMLARRIRESAEEAARLDTEITALLVEDGTYECLLTIPGIGPRTASELVISIDIDDFPDHDHLASYCGIAPRNRQSGKSISSVSASRQGNKRLKNLLIFSCNSLSRSRGRFGDYYRKCRDRGMCHGEALKAVARKRMKVIYAIMRDKVPYSA

SEQ ID NO: 402807 - protein, 414 aa, unidentified
MIGIVNKSCGLDIHKRFLIATILSKSGEKQQQRFDRNDEGILALKNWVVSEECDVVACESTSDFWVPIHDSLIKHLPVIIGNARDMKAFTHKKTDKIDSEVIAQLALNNMIQPSRVFPKDQREFRSYIRLRLALVRKRTDIKNEAHAILTSEMFNLHDVLADIFGKNGVAILSGISSGKTVDQIIESLSPNVRKKSSQIRETLDREISQSAAIRLQICLKLIKHLDDEIEVLEKEIFIYSYGKHKREMDILMSIPGIGEIGAATLISEIGNLRDFPSGDKLASWLGIVPNVYQSADKYYKGRITKRGSKVARWILTQIAQAAARKKNSRLKEFFNRKMKSIGYAKAIIALARKIVTIIWHLIINDEMYQDETGYQKGEVHKRKIVETEIFSVDERIKIISGIIAIMEKKEEEST

SEQ ID NO: 402808 - protein, 359 aa, unidentified
MKEHSTEVFIGIDLGDIQNDVVILDREGEVTEVTVIANTIESMNAFFDRFEEPGRVRVAVETGTHSPWVSDLLLTRGFEVLVGNARKLRMIWEQDNKTDAGDAEMVARIGRFDPKLLCPIRHRSRAAQMDLTVLKARDALVRNRTRLIQFVRSTTKSAGQRLPSCSAEAFPRAVIEAVPEDLLPAAVPCLEMIEALTKKIRRLDKQIEALCAELYEKETAILRGIGGVGPLTSLAFVLTLEETSRFAKSRDVGPFLGLTPRRDQSGATDKPLSITKAGNGYLRRLLVGSANYILGPFGPDCELRRYGERIASRGGKVSKQKAKIAVARKLAVLMHHLWKNQAQYDPFYHANSKRMKQAA

SEQ ID NO: 402809 - protein, 419 aa, unidentified
MQPTATHTTEYNEPQPILYLAFELGERTWKLGFTSGHGQKPRERNIAARDLERLAHEIAQAKQRFRLAPTTPVVSCYEAGRDGFWLHRFLQAQGMTNSIVDSSAIEVNRRQRRAKSDALDVRKLVTMLIRYQHGERKLWSVVRVPSVAEEDQRQLHREIHTLKQERTRTSNRIKGLLSAQGLRVPQLKHLPVQLAALRLWDGSPMPASLWRRLERDYAHYIFLVKQLREVEAERRALVRTSSASSMAKVRQLMQLRGIGINGAWVCVMEFCGWRQFANRREVAALAGLTPTPYQSGGRAREQGISKAGNRHVRWLMIELAWCWVRYQPESALTCWYLERFYDGGSRARRIGLVAVARKLLIALWRFLETGELPEGATLKSECPRCPSESRGDPAPGAGERRELPSDAGTPSGSPPPSRS

SEQ ID NO: 402810 - protein, 305 aa, unidentified
MFNRFIGVDVAKAKVDVFLSETGELLQIKNIEIDLKRFVQSLERTEETLVIIDLTGGYETQCVKAFYQAGFTIHRAEGRKVKAFMRACGQLAKTDSIDARALADYGKRLQDKLTLFQPVDNEIKPYVMRLNELKQLLQMEKNRLQSPQTDNKIYEQVSRHIAFLKTEINLLAKELQQIIEKTPQLHQKQKVLTSQIGIGETTANLLLALLPELGYLPRRKIAALAGLAPYAKDSGTLNAARHVYGGRKEVKRALFICALTAIKRDKEMKRFYEKLIKNGKKKMVALVAVMRKMIIILNAKCKNLS

SEQ ID NO: 402811 - protein, 423 aa, unidentified
MKVIYQTCCGVDVHKSFLVATIIKTTSGVEPTYQKKRFSTFNNSILEFKQWLIENECRDICMESTGKYWVPVFNLLEEDINVTIANPKWVKAVKGNKDDTKDSKWIGNLFRLGLVPGSYIPCKPIRILREYTRYRYKMVCCRSGEKNRYQNALTVCNVALDSVVSDIFGKSSTSIIDYLLEQSGNSINHEEIASKLLKKLKEKEPAVIESIEGYQMTDTQKYRMRLVRAHMDYITAEIQDIDSQIEFLISSHADFENAIQFLCTIPGVKRDSAITIISEIGIDMSQFSSNKRLCSWAGLTPGNNESAGKKKSVRITRAGVYLKPALVQCAHAAVKSDKSPYYKKKYESLLKRRGKKRAIIAIARMILTAIYQMLSNGEVWNPSDIYKIDMPVTLVEKQKEKAIKQAKKLLLREWVITESQLLS

SEQ ID NO: 402812 - protein, 426 aa, unidentified
MIQTIPASTFAATIGLDWADQKHDLWIQANSDQPEHLILEQTPEAIHEWVAKMCVRFPNQRIAIAVETSRGAIISALQAYAFIVLFPINPKMLCSYREAFCVSGAKDDRTDAMLLEEYVRFHFAKLRPLNPDTELTRKLSGLVENRRDLVDERTRLVNQLHSLLKTYYPLMEVLFDDLTTLLATQFLLKWPELASAKRAGAVALRKFFYGHNCRSAQTLEQRLQALEKAQPLTTDPALIEPAVLKVKALAGMLKVLHEAIAEIEDHTHQAMDAHPDAPLFRSFPGAGPVMAPRLLVAFGTNRDRFENAQETQQFFGIAPVKKQSGQSKVIHMRYRCPKFGRQTFHENAGHALRKEGWTKVFYDQQRERKKGHHAAVRSLSFKLIRIYFRCWKDSKPYDRALYEKALDTHGSPLSTALKKKGTGPTK

SEQ ID NO: 402813 - protein, 341 aa, unidentified
MSIVGAFDVHRRQLTFEYLDTVTGELKRGRIMPADRPHLRAWLSRFAGQRDVQFALEGCTGWRYVVEELYAAGITPHLAEPADTAALRGKKRHAKTDKTDTRHLRVHLMAGDLPECWIPPQHVLEARATARLYKDLVDERGGWHQRVAATLFHHGVPAAVSVAKPDGRAAAEQAFLSPAGRQAVETGLRQIDRLTAELEPLRRQLDMLSRRQPGCAALRAAHFGIGAVTSVAIWAELGDVRRFGNSDDVVRHTGLDITVYSSDGKRSAGHLSRQGPPLLRWALYEAAKCAARPAAPDYGYYTAARDDRGGGRATLSVARKLARRCYHTLRELGEEAMAPAA

SEQ ID NO: 402814 - protein, 461 aa, unidentified
MAYHHCGAVSYTKRRGRDALVIQGIPGILLDERRKVMGRKKRSYRSVDVKKVDRARLGEALEGQRVVLSVDVAKETIYGSFMKEDRGTELTIRWDLVEESRSVVELLKELPAARVEVAMEPTGTYGDPLRTLMQAAGIPVYQVAAKRSHDAAEVWDGVPSLHDAKSSEIIGRLHLDGVSKPWEGRTEEEREIAAAVGMIEVHGGVYDKRINQVEALLARHWPELTRYLDLTGATILELLAQMGGPRGVAEQPEEATRLMRKVGGSFLADWKIEEAVRSAGETIGMPMIPAEEAALQEIAKEGRRAQKKEREARAKVERLVKQDDTSRELADLVGKVTTAVFVAQLGSIGDYDNAASVEKAFGLNLKVKSSGKYKGQLKITKRGPALARRYLYYAILRLIQNDPVVAAWYSVKVRENGGYKKKAVVAVMRKVSRALWHVAQGAKFDAKKLFNVGLLKAKAAA

SEQ ID NO: 402815 - protein, 342 aa, unidentified
MAHYVGLDVSMEETSICVIDEAGDKVWQGKTSSSPHMIAKTIARRAPEAIKIGLETGPLSTWQWHSFQSMGLPVVCLDARHAKAALCMQVNKTDANDALGLAQIVRTGWYREVKVKSMDAHLLRTLVAARSNLVELRGKLSNHLRGILKVFGLVVGKVSKGAFERRVRELTIGRVGLESIIESQLIVWRCVCDQVEILEKQIRCYASADQVCRRLMTAPGVGPITALAFKAVIDDPSRFRKSSSVGAYLGLTPRRYQSGEVDRNGRISKCGDILLRNYLFEAANVILSRVHRWSKLKAWGVKLSRRIGIKKAKVAVARKLAVILHRMWVDQSCFKWSRSATS

SEQ ID NO: 402816 - protein, 344 aa, unidentified
MIKQTSPAAISTIGIDIGKNSFHVIGFDDKGAIVLRQKLSRGQIAVRFANLPRCLIGMEACVGAHHLSRRLQALGHDVRIMPALYVKPYLKGQKNDFRDAEAIAEAVQRPTMRFVATKTMEQLDLQALHRLRTRLVRQRTAVINQIRAFLLERGFAVRQGLNPLRQALPDILAKPGDELSPRMVQMIEGLCEDWHHFDRRVDDLTNEIEALVKADDGCQRLMTIPGVGPLTASAMVAAVGDGAAFRRGRDFGAWLGLVPRQMSTGDRTILGGISKRGNKHLRTLFIQGAWAVLMRSKNWANYSFGPGLEAASKRLHRCVLVVALANKLARIAWSVLNHRQAYQA

SEQ ID NO: 402817 - protein, 403 aa, unidentified
MNNVAGIDVSKGKSMVSVLRPFGEVVAKPFSIGHTGSELKELADYLKSLDGETRVVMEHTGRYYEPVARFLHDEGVFVSAVNPKLIKDYGNNTLRKVKTDKADSRKIARYGIDNWAELRQHTPMDTIRMQLKTLNRQQSLYTKTKTMMKNNLIALLDQTYPGVNALFDSPVREDGSQKWVDFATTFWHVDCVRNMSLTAFAERYRKWCKRHGYNFSQSKAVEVHAGAQDLIAMLPRDALTKTMVRQAIDALNAISASMERLKAEMQALAAQLPEYPVVMAMHGVGDSLGPQLMAELGDVTRFTHRNAITAFAGVDPGADQSGTHEAKSTRVSKSGAPELRRALFLVMDCLLKTQPQDDPVYRFMDKKRAEGKPYLVYMTAGANKFLRIYYGRVKEYLASWEGN

SEQ ID NO: 402818 - protein, 331 aa, unidentified
MEKYKIFVGIDISKGWIDVAVINGNLTDHRNYENNKKEFKLMLSWLKTFARPGEMILCMENTGVYSRPLWEYLITHNIPVVVENALQINRSMGIKRGKSDKTDAQIIARYIRLHHTECRLYKAPAQIITRLKVLFGYRERLVKVKHQLSVSSKEIKGFISAELCKEMVQDTAILVKNISNRIKKVDNLILEIIKSDTEAQRIYKLITSVPGIGLITACYLIIITQNFTTIQNSRKLSRYGGMSPEKNESGVVKRKAHVSPIGNQKIKSLLSNGVGTNLQYDRETKEYYTRRVMEGKPEGVVINNLKNKILHRVFAVVNRGTPYVDIKRYAA

SEQ ID NO: 402819 - protein, 415 aa, unidentified
MNKNKVEFDQVIERGCGLDVHKKVLVATIRGTGIIETTRTFGAFTENIEELKEWLMEHKVTHIAMESTGVYWKPVYNLFEEDFAIILVNARHIKNVPGRKTDKKDSKWIAKLLLSGLLKGSFIPKKEIRELRDLTRYKRKVIEQITSEKNRMEKILEDANIKLSSVVSSMGGASATKIINAMIRGEDNTEELVKYKHKLMKVSDKDLNSALKGKLTPHHIFMLNTIKESIEEKQKIIDTLDAQIEAHLKANELELDAKLLQSIPGVGKDGAAYILAEIGNEMEQFPNEKHLASWAGMSPGNNESAGKKKSGRITHGNKYLRTMLVQFAWAATRTKNTYLRSKYESLIGRIGKKRALIAVGHKILIATYFILKDKVEYKELGAQFLIKRKKDKQAQYYLKKLKDLGIELEVKKDVA

SEQ ID NO: 402820 - protein, 388 aa, unidentified
MFFLGIDVGKNTHVASLLDEKAKIIFKAYSFANTLDAAEALLVKLEPYKDSLEIGMEATGHYWLSLYSFLAEHKFIVHVINPIQTDGWRKGIEIRKRKTDVIDSVLIADLIRYGDFLETSLADEDILSLRNLTRFRAYLVNSVSDLKRKAIAVLDQIFPEYASVFSNVFGQTSKELLKSLSLPSDYENLSATKIEEVLSNITQKKKASKTISTLSDKARRSFGIAFCKDSFAFQLKLIIEQICFIEEQISSVELEIEQLMSKLGTNIKTIPGVGSVIGAVILGEIGDIERFDNPSKLVAYAGLDVSVSQSGEYESSSGKLSKRGSPYLRKALYMAAQRAEFCDPVFHAYYEKKRNEGKHHLVATNAVARKLCHTIYAILKKDIPYEVQ

SEQ ID NO: 402821 - protein, 416 aa, unidentified
MNAVGIDVSSRKSTVAVLRPLGEVVCLPFDVTHDIAGLASLVEKLKALDGETRVVMEHTGRYYEAVAKALHEAGLFVCAVNPLLIKEYGANSLRRVKTDKADAVKIARYALDNWADLRDFTPMDAIRYDLKTLNRQFQLASKQRTASANNLIALLEQSFPGIRKCFDSPVRSDGTQKWVDFAHSFWHVDCVRKQPFAAFCERYRKWCKRHAYLFKLSNAEEVYALAKRAVVLTPKSKVVKVLVQEAANQLSSISRSVEVYRAEMDRLAAMLPEYPVVMAMYGVGKSYGPQLMAEIGDVRRFERKQALVAFAGIDPMPNQSGDKNVRSNKSSKRGSPYLRKTLFNVIRTYLQCAPQDEPVFQFLNRKRAEGKPFYVYMLAAANKFLRRYYAKLRDYFASLDTLQPVDPIPTILKATL

SEQ ID NO: 402822 - protein, 360 aa, unidentified
MPMKTVQRKGLNFEGQNVYIGIDVHKKSWQVAIQTETGYEESFRMSSNHVEELRKHLTTNFPQANYHSVYESGFSGFSTHRELTSAGTNNIIVNAADVPTMQKEQVTKTDVIDARKLVRALRKKSIEGIYVMTKQEESFRELERHRDSLTEDIGRLKSRIKHLLHRNGIRFEEKFGGSGHWTKAFVKWMKEEIELPQMTKRALDDELDLYLILRKKKLEISLEIRHLMKDEFASEHELLTSVPGIGLITAATLLAEIGNFDRFRNEKTLASYAGLSPTCHSSGEKETKGEITFRCNRRLRRCLIESSWVAIRTDSALSSSFLELRKRMPACNAIIRIARKLLNRVLYVMKNGAIYEKGIN

SEQ ID NO: 402823 - protein, 362 aa, unidentified
MERGIKFFVGLDVHKETIAVAEAEAGRLPGRLQGTIAHDVNKLLKLLARFGEPGQVHVVYEAGPTGYGLQRALAHRGYRCEVIAPSLIPKRAGDRVKTDRRDCLRLAELSRAGELRAVWVPDCADEAIRDVSRAREDAVNARTQARHQLKGFLLRRGLRYPGKTSWTKTYYRWLATLNLGESGAQTAFTEYGLAVTAADDRVARLTEALARSIVGWRFESVVAALQALRGIDQISAIGLVAEIGDIGRFAHPRQLMGYLGLVPAEHSSGDRVVRGSITKTGNAHARRLLTEAAWNYRFKARIGHRAQQRQKELPQAIRDGLESTAAPDRSLCAPARPWGADQQGLRGCGARIGRFYLGACSR

SEQ ID NO: 402824 - protein, 408 aa, unidentified
MEQLYVGIDVSSTKHAAYFMKPNGDKFSSFPMQNDLGGAKMISKKIVSALTKLGLDTVVIGMEATSVYGDNLVYALREDGSLGRFHRKIHVLNPKQVKNFKKSYPELPKNDPVDAFVIADQLRFGRIGKEVYMDDYRYKALQTLTRARFFAVQNLTREKERFANYLFLKCSGIAQSKDIPNTSATTLALMEHFETVDDLANAELDDLTAFVNKAGHGRFSDPEATAKAVQAAARGSYRLPATVNDSVNQVMSASIAAMRALESQIKTLEKAIEQQFEIIPNTLTSIPGIGKVYSAGIIAEIGDISRFAGQASVAKYAGLVWTQYKSNEFEAEDTRLVKSGNRYLRYYLLEAANSVRRCDSEFRRYYDLKFKEVNKHQHKRALALTARKLVRLIFRLLKDNRLYKLPEG

SEQ ID NO: 402825 - protein, 338 aa, unidentified
MNVTTIGIDLAKNTFSLCGSNVHGKVLFRKTLQRDKLLAFIAQQPPCLIGMEACSGAHYWARQFQSLGHTIGIMAPKFVTPFRKGGKNDSNDAAAIAQAVAHPEMHFVTVKSAEQQAALCLHRLREGLVADRTAQVNRLRGLLSEFGIVIPQGFSEAKRAIPAILDDGNNALPVLARRLLRDAYDHLEHIHQQVLAYDREIESIARLNEDAKRLTAIPGIGPITATALLATVGDFKQFQNGRQFAAWLGLTPRQYTTGGKTRLGRITKRGDVYLRTLLIHGSRSVVARREQKLDAVGHWIKALVNRAGFKRAAVALAAKQARMVWAIMTKQSEYIAVM

SEQ ID NO: 402826 - protein, 352 aa, unidentified
MSVDTIVGLDVHAESITAAILHPGSDQPEVIKLSSDLMKIRRLFRQLSEHGRVRSCYEASGAGFVLQRVLADDGFSCDVIAPSLIPRKPGDHRKTDRLDAVMLARLYKSGHLTPVHIPTEDHEALRRLLRLRATYHLYVTASMHRISGILRNHGHVYAEGKSTWTKKHRQWLARLRQTLQGPLATALAIELEHLEYLELQVHAMDADLERYAQSPLYRCGVEALCCLRGVKTLTALTLLCEVDDVRRFDSPRKLMAYFGLVPSEHSSGSREYRGSITKAGNTHVRRILVEAAWNNRHAAGAALILNRRRQGQPPACRRHRRGARTLWLRLGDPDGLATNTALTNTSSRGEGR

SEQ ID NO: 402827 - protein, 332 aa, unidentified
MEFFYFIGVDVSKKKLDFCVMFEGKVVHEEKTANHQSAIMSLLRNLEEDYGITSGQMLVCAEHTGQYTFPLACACKSVECKLWLENPAEIKYSSGVQRGKNDKVDAKRIAIYANRFQDKVQYYERPTEDIERLKQLESERTLYVTDLAKYKGQMKDQKDYMPKALYERKMKRLQALMDDLEEAIQAITDEMDEVIASCPVLSRQRELLMSIDGVGRVVATNMIIATEAFTRFVDPRKFNCYAGIAPFYYSSGSSQHSKAKVSHRADKVMKRLLHLAAAAVTHRVGGELKMCYERKVAEGKNRMSVINALRAKIVARMFAVIKKNEKYKPILS

SEQ ID NO: 402828 - protein, 370 aa, unidentified
MVLIQPPTEEEVSMNTVTTMGVDLAKSVFSVCAVNAAGRVMSRQDLQRDAFALWLAQVPAGTVVAMEACTGAHHWGRRCLEYGLVPRLMAAEFVAPFRKNRTAKNDHNDAEAIATAARQGNMRFVSVKDVGQQARLAWHRVREGYKAEGLAISNRLRGILAEFGIVMARSDTALRRVLADLDAYPELPTECKELLRSANAHWEQVRKARDACEARITAHARSDARCVRVRAPTGIGPLTADAMVATVGSAREFKNGRQLAAWIGLVPTQHSSGGHARLGTISCRGDAYLRTLLIQGARSSLERAKRVSVEKSTPEQIWIRSLACRLPFGKVVVAIANKHARQMWAMLAYEVDYDPAAGRWHPLQSTQQAA

SEQ ID NO: 402829 - protein, 455 aa, unidentified
MRKKIKKAIPVRYHDGLSQLRPNAGGIDIGGSEVWVDVGNKDAESTRMFETFTADLNRMGDWLKSCGIQTVAMESTGVFWIPVCQILESKGIEVYLVNARQAKNVSGRKSDMLDCQWLRILHSYGLLPASFRPAKDIGVLRAYMRHRQMLIEYAAAHVQHMQKALTQMNLQLQHVISDITGWTGMKIIRAIVAGERDRRRLAALRDARTKANEETIAKALEGDYRAEHLFALKQSLELFDTYQKQITSCHDQIEQHLKSLATKADPAELKAARTRKRRHRNQPEFPIREQAFRISGVDLTQIDGIHDSAALSLIAEIGVDINAWKTEKHFSSWLALCPNNKISGGKILRRSTRKTANRPREILQLCAQSLLRSHSALGAYCRRMCGRLGTPKGIVAAAHKLAVLVYRMLKFGHQYTDIGQERYEQQYKQRVLQRLARRAQDFGFQLVPCPEKQVP

SEQ ID NO: 402830 - protein, 342 aa, unidentified
MKNTKYFIGLDVHKEKTSYCVRDRLGNILVEGETATLYTELSQRLKSYLAASKIGLEASTSYYTLYQNFLKNRYDIRVANTIQLRQLIAKNDKLDAKRLSEMLRLGTFPCSYIPDERIQHLRNLVHVRHTFMEEKTRCNNRIQAFLDRNGVVMPMCKAFSKKWCEALVQYMGTGNVSVELRYAYDHYVYLKEKQEQADQEMIGYAKKHWNQEYWLIRSVTGFGPVLPCYVIANILPIERFLSNRKLRRYAGVVPVFKDSAGHTSKGRIPKESSRKQLRWALIQASNAIAKTKTRLGMYYRKKVKQKKNKALAKIAVASSLIDILYQVLTTKKPYDPSPLLNE

SEQ ID NO: 402831 - protein, 387 aa, unidentified
MAAVVIGVDPAKRSNTIEVIDAAETVLLTARFENTREDYRRMLALVKRWPQRKWAVEGATGVGLGLAQRLVADGERVVDVPSKLSTRVRAIDTGHGRKNDPTDAHAVAVVGLRTAGLREVTVDDEAVVMRLLSQRRRDLVRSRTQAVNRLHQALMQLIPAGARKKLTVDKAKELLATVRPRDAAGKARRQLAADLIDDVAVLDRKLDAVDKRITEAVKAAATTLTDIVGVGPVTAAAIIGEVGDVARFTTADRFASYTGTAPLEVSSGDVVRHRLSRAGNRRLNNALHVVALSNKRYDPRGKAYYERKLTAGKGKKGSLRCLKRRLSDVVFRTLVEDRARANPGGQMGATLTASAVDQIPKANTSDKPQPGFATEATPTRRPAKAAS

SEQ ID NO: 402832 - protein, 368 aa, unidentified
MRAVCGLDVHKDTVYLCILCSDGEIIERVFGVLTFQLRDMRRLMQSHGVTEVTMESTAMYWIPIWRMLEPHFRLKLVNPYFIKQLPGRKSDVKDAQWIAVCTMKDLVRGSFVPPERIQQLRQYDRRIFDLDAEIVRKLSKLDGIMQRCNIRLSNYVSNTDTKSYKAVVDMLCEGITDAEELIRKVHGRIVNKHGREIILASLTGVVSDAEKDTMRQLREEIALAETHKRECLDKMLQICRTYYPNELRRLMTIPGIKERAATSLIAEIGVDMTKFQTAAHLASWSGLKPRNDVSNGKFKSRRITHGNAYLRKTIIECAWAASRTKDCFFSRFSYHQTVVRKKNKMKVLVAVARKLLIAVWHVLHDANG

SEQ ID NO: 402833 - protein, 515 aa, unidentified
MIALEAIPGCDGVLQNETLMTGFRSPQPMKMCEMVGEGGRRRPDWVMDRLSRKRNWSGRHVESPNGAGEPRKKIVLKMSLFFRREGEQKMICAAIERCAGIDVGKKFLAVCIMTGALDAEPRVERRRFGTTTAELESLRDWLKTENIAQVVMESTGSCWKPVFNVLEGSLKLCLANPLEVKNRKGHKTDDKDGWWLAHLLRHAMIYPSFIPPRPIRELRDLTRRRKRLLGDATAEKNRVQKVLEDANVKLGNVLTDVFGVSGQLMLDALLEGKAQPAEIAQFAKRGAKKKIPEIIQALEGHRMSDHHRQMIRYSLSHMTFLEDQIAEIDRDITAKIHEAGLDKALQLMQTVRGIQDRSAANILAETGADMKQFPSAKHLSSWAGVCPGNNRSAGKNKSSRTTGGNPWLRSALTECAWAASATKHSSHRDKFWRVTSRSGGQKAPALIAVAHLMLTLIHRTLETQQPFEDRKAPPLGEPQRQRMIRHHMRRLGKLGISIHRISSVPAGNQIITSTD

SEQ ID NO: 402834 - protein, 410 aa, unidentified
MPEPTYALYVGVDWGNQTHQVAVLDTARGLRGERGGAHDGPGLHALASWLAELAAPGTVAVAIEVPHGAVVDTLLERGFDVYALNPRQMDRFRDRDTVAGAKDDRRDAQVLAAALLTDRPAFRRLHVDDPQVVQLRELTRIEAELSEALRRLANRRREQLLRFYPQALELCPAADEPWFWALLTQLPTPPAAARRRRGPVAALLREYRIRRRTADEVLTVLRRTPLTVAPGTLEAATEHIALVLPRLELIATPRRACAPRVETMLAVLAAAGQQQGHRDVTILRSFPGVGRVVAATMLAEASQLLAARAYHRLRASGGAAPVTRQSGKQRGVPMRYAWNPRLRNALYYWAFIAARHDPAPRQHYEGLRARGHSQGRALRGVADRLLAVLIVMLKTQTLYDPSRREAKFAA

SEQ ID NO: 402835 - protein, 392 aa, unidentified
MGPRYIGLDLHARYIHGCEWTPEADDGQKERHFRFPNTPDGWAQLLPQLDRTCWVALEVTGSAFEVHDLLSAHVGRVLLANPIDLKRFGSGRHTDRVDAARLAKMLAVGTIPTVWVPPQPMREVRRLVYYRARLASNRRRAINQAKNVLRRHGQVLPRETDVQRWLTAERVAALPAVDQVILLSACRQITALEAEIDGLEGEIARGVADVPAVQVLLTITGMGLIGAAATWAILGDPHRFTRPKQVTRYAGLDSSIVQSGEQHRQGRISKTGSPLLRTLLVEAAHTLTQWDNGPLGQFYTRKAQEIGARKAIIALARKLLIVAWRMLLTGEVYRAARATTVARKHRELQNKTRIQMPSMVPLPEPAHVTRQSRAGAGGTEGAPSRRRTLVST

SEQ ID NO: 402836 - protein, 347 aa, unidentified
MTQAQIYIYGIDLGKNWFHLVAMDRMGHVLAKQKLTRSQLKQFISTTPPCRVAFEACPGSQYWGRLFQQAGFEPKIIPAQFVKPYLKSNKNDFNDATAIAEAGSRGTMRCVPLKSHEQLALQATHRVRQRFIVERTATVNQMRALLLEYGLTVPVGRKVFERSLPTILEDAENGLPDFIRALVLRLRERWQQLDIQIDDMSLMLGQASSASGLCQKISTVPGIGPIVSTALIAAISNGSQFKKARDLSAWLGLVPRQYSTGGKSSLGGISKRGNSYLRQMVIQGAKALKIHMKRDKSSLGEWVARLEAGHHHHVVLIALANKIMRICWKVLTSGRDYQPYPNASAAV

SEQ ID NO: 402837 - protein, 353 aa, unidentified
MNSLTDLRDVVDVVIGVDTHVHTHCAAVVDAATGGVLDEITVEATTQGYAELVEFANTHAMLRAWAIEGTGGHGAGLSRHLLEMSEIVIELDRPKRAARRNGAKSDPLDAIRAAREAMARPRLGTPRSGGERQALSVLLAARRSAINASTEAQQQVFSLVIAAPEPIRVRFRGQKLAAMLNTAASLRVHASWDTETTSTVVALRTLARRAHAMLKEARELQKAIVVIIRSWRPDLLEEFGVGPIVAATVLCAWSHPGRIHSEAAFAMLAGVAPIPANSGQVTTRYRLNRYGDRQLNNALHTVVQSRIQYQPATRDYVARRTAEGKTGREIKRCLARYVARDLYRLLENTATAA

SEQ ID NO: 402838 - protein, 371 aa, unidentified
MNHVTSIGLDVHARSVTAVALDSITGEVRSQKFGYSPAEIAGWILQLDSPKAVYESGVTGFHLVRELREMGVDCIVGAVSKMHKPASDRRKKNDRNDAEFLARQLMAHNIVEVFVPDVETEGARNLSRALEDVRDDLTRAKHRLTHLLIRWGYVWNEFNEDGKRRGSWTHAHWEWIRGIELPDAAARESLDYYISEVRHIESQKKAIEKRVAQCASRPRWRDRVEALRCMKGIETVTAFALTVEAGVFSRFDSARAFASWLGLVPSEHSSGERASRGGITKAGNSHLRKLLVEASWHYTRTTKERKRSLYDESVPASISNHAAVGVKRLVERRRHLSCELRKRPVVANVATARELACWIWALGRMSEGALA

SEQ ID NO: 402839 - protein, 443 aa, unidentified
MKRNRRRHLRGRRGQAFADLVRGVCPEQILCVSIDVSKDFHVVLLHNGLGEIVTPSFEIDIFHTGFDQFCQAVEAALADSAAQVVLVGMEPTGHYYENLARHIQEMGQKVTIVNSFSVKENRRQQMMAHEKDDEIDVAAIGDLLRRGEGSPFRPPTGIYLQLQQLDRARLGELKIQTIYKNRVIGHLDRIFPGLILTKAATKERYEPMFATDFWHCQTLQNLVRICPDPRELAVLSPAGLVALFHQNDCRMGPRTAARIITYAQKVLWPDPAVVTIRCQLLATDLQTLDQVSVRIAHYSQQLQQKLAQTPYQILTRVKGLSPIRAASLAAAAGDPTNYRFAGQLFRRSGLVSGRDDSGARQRQGKGKAITKTGDIYLRRALNDLLNGLILHQPILRAYYHRLKQTKPVGVARVATIRRTVGILWATLRDQRADSLLLRGDTMT

SEQ ID NO: 402840 - protein, 391 aa, unidentified
MIYVGIDVAKDKHDCFITNSDGEVLFKAFSISNNLDGFTELYQKIESVMDDVTKIKVGLEATGHYSYNLLGYLIDKGLPAYVINPLHTNLYRKSLSLRQTKTDKVDARTIASMLMSDVNLKSYSDTSYHNEGLKSLTRYRFDKVKERAKLKTSISRLVCILFPELEKLVPQLHMASVYAMLSEFPGAKQVASAHLTRLTNLLSESSKGHYGKGTAITFRDAARASIGSYMPAKSLELKHTIKLIQELDSEIDEIENEIKIIMDKINSPILSIPGISYRMGAMIIAEIGDFSRFDSPDKILAYAGFSPSTYQSGQLNGAYAHMEKRGSRYLRYALYNATKYVCHWDPTFTAYLAKKRAEGKHYNVAISHAAKKLVRVIYHLEKTKQQYITAA

SEQ ID NO: 402841 - protein, 375 aa, unidentified
MKEKLRFLGLDVHAETIAVAVAEPEGEVRSLGTIPNRAESIRKMIKKLGPAEKLRACYEAGPTGYVVYWQLAELGIQCEVVAPTLVPVKAGDRVKTDRRDAEKLARCYRSGDLTAVWVPDEGSEALRDLVRAREAAKQDQMRARHRLSKFLLRSGQRPPTGVRPWTRPYLIWVAQLHFTQIAQEATRQDYLHEVEHMRERVARLEQAIMEAVKLASPALQQVINDLQALRGIADISAVTIAAELGQVSRFGSARQLMGYCGAVPSEDSSGKRIRRGGITKTGNAHLRRIVGEAAWSYRRPPGIWYGLRRRQESISEEVKEIAWKAQHRLHKRYMKLGAAGKPQGKIITAVARELLGFIWAIGTRAETTISQRAAA

SEQ ID NO: 402842 - protein, 344 aa, unidentified
MKHYAGLDVSVKETAICIVDENGRICREAKVVSHPEDLSEALTETGFRIERIGLEAGPLSQWLFEGMARAGLPVICVETRHTKAFLKAQINKSDRNDARGIAQMMRVNLYRQVHVKTLASQKRRALLRARKLLQEKAIAIENDIRGLLRNFGLKVGIVGAAKFEARIKELIEDMPDLEEFIDVLLAARRKLRDSFSRLHGKILELVGNDAACKRLMTIPGVGPVTALAFISTIDIPARFRSSRSVGPALGLTPVLKQSGESERVGRVSLCGDGMMRGLLYEAAQSMLTRVKKWSWLKAWAMTVARRGGLKKAVVALARRIAVIMHRIWIDGSEFRWSREGAAEI

SEQ ID NO: 402843 - protein, 344 aa, unidentified
MDSYVGLDVSLREVSVCVVDEAGTIQSERTVAADPDVIAALVHAQAPTVRRVGLESGPTSAWLWRELAKRGLPVICIDARHAKAALSMQINKSDRNDAAGIARIMQTGWYREVQVKSPHSHAIRGLLNSRSLLVKVQRDLENQVRGLLKSAGLIVGRAKDGVFSARTKQLLAAHIDLAAIALPLLEAREAIHQQLVQLERRVRQLAKEHRQTSAFMTVPGIGPMTALAFLATVDDPTRFRRARAVGAYVGLTPRRYASGEVDWTGRISKYGDTMLRTYLFEAAGVLLTRVQKWCALKAWGLRLAKRSGMKKARTAVARKLAVILLRMWRDGTQFHWTAAPPAAS

SEQ ID NO: 402844 - protein, 349 aa, unidentified
MRFYTGQHRFYCGVDLHARTLSLHVLDAAGETVLAKTIPASPNAFLQAVAPFRDGLAVACECMFAWYWLADLCLEEKIPFVLGHALYMKAIHGGKAKTDKIDAHKIAVLLRGGMLPQAYVYPRGMRETRDLLRRRTYLVRRRAEALAHLVNTNSQYNYPPLAKKLCYAANRQELDLPARFTDPSVKKNVEVDLALIDTYDEHIGALELYLSRSAKVDDAQAFARLRSVPGVGKVLGLVLLYEIHDVHRFAEAGQFLSYARLVRCAHESAGKKQGTGGNKIGNAHLKWAFSEATCLLLRASERAKAWLARREKKHGKKRALGALAARLGRAVYHLLRKGEAFDEQRFFAS

SEQ ID NO: 402845 - protein, 340 aa, unidentified
MNHYAGIDVSLECSSVCVVDASGKIVREGKVASEPEALISWLALLGVSLTRIGLEAGPLSQWLFAAMREAGLAVELLETRHVRDAFKAMPVKTDRKDARGIAQLMRLGWYRPVHCKSMAAQETRAMLSARKLVQAKLHDVEMSLRGILRGFGLKVGKTTVRQFEGRIKELVTGHASLEAVAAALLAVRAVLRREFGALERRVRSMARNDARARLLTSVPGVGAIVALTFASAIDDPARFKSSKSVGAHFGLTPKKYQSGETDVSGRISKIGDGGVRTAAYEAAHVILTRPVKGCASLKSWAMKLAKRAGMAKAKVALARKLTVIMHRMLADGTTFANLPA

SEQ ID NO: 402846 - protein, 367 aa, unidentified
MQNTIVHDEGATSPEVTRTIVKPGAAVIKIGLDVHARVYVAVAQYDHLLPKAARRFAPAEFVPWVKGLLRAGHSVQVVYEACGFGFGLYRQLRAAGASCYVIAPRKLDEQSTGVKTDPRDATTLCQRLSRYCDGNTRELAVIRVPSEEEEQARHVSRQRQQLVHHRQKLEAQGRALLINHALASPAHWWKKQTWNRLSKLLPEWMSVRLEVYRPALFALQEQITALSGQLEADASNAIPRGVGKLTSVVLTREICDWHRFHNRRAISSYTGLCPGERSSGSKRVPGSVTKRGNPRVRAALVECAWRMVRFQPNYPPVKKRLALLAKGSRALGAVRKKAIVVVARHLAVDLWRLHTGRCRAEQLGFII

SEQ ID NO: 402847 - protein, 357 aa, unidentified
MKKTYRLQDHVVQGKEVFVGLEDSKRTWKLAVRSEKMVIHQVSMEARYPVLIGYLRNKFPECTIHLMYEAGFKGFNLYDQLTEDGIDCVVIPPHVVTEPKVNRVKTDKRDARRLALVLENHDFKDSCYVPDKERREDRQVSRTLIALQKDIIRTRNRIRKLLQFHGIEVPFPDRWGRGEFRALKKLELSEPLRISLAIFLTQLEELWAHQVALRAALRKLCKKERYHKAFTIARSLPGIGWFTAIRLVLELGEDLSRFGSGKKIASFVGLTCSEDSTGETEHKGRITGMGPGFIRSTLIENSWTAIRKDPVLLAKFTRVWHASGNRKKGIVAVARMLIVRYRACVMSGTPYMIGVAA

SEQ ID NO: 402848 - protein, 339 aa, unidentified
MGEIITVGLDLAKTVFQVHAVDANGTVVVRRTLRRSQALAWFAKLPGCVVGMEACATAHHWARELTKLGHEARLIPPAYAKAYVRRNKNDAADAAAICEATSRPSMRLVAIKSVEQQGAAGVHRVRDLLMKQHTMLRNQLHGLMAEFGVVAAKGKLGLKELLAVLADGEDGRIPDPLCAALRMIAETLREIDGKLAAIDRQLAAAGRENATYRRLITAPGYGPILSSAKAAMVANPQAFRRAADFAASLGLTPRQEGTGGKIWLGPISKRGNGYLRRLLVNGATALINSKRAKQDPWLAKLLAAKPRKVAAVALANKLARIGWALMTRQEDFRVRPVAA

SEQ ID NO: 402849 - protein, 382 aa, unidentified
MSAYDVNDCYVALELSQRTWLIGYLLPGSEKVKTISVAGGDSEALINTLSTIRSMVGSRSSEGRSVGQVRVCFEAGYDGFWLARFLLDRGIETTVLDPSSFLVSRRGRRVKTDRIDVEAMVFTLKAYLLGDKSVCRPVRLPTIEEEDAKRLSRERTQLKKERTRHVNRIRALLVLHGIRSVPGLWGGRWRDALLNVRTGDGRELGRFIFREICRQFERLDIVHSQLNALEKERAQACATEGAINSGSKIRVLKQLNGVGEVGAALLVAEVFHRTFKNRKHLASYLGLSPSPYASGEVHRDQGISKAGNKQARVMLIELAWCWLKYQPQSQLTLWYRSRFSGHGSRSGKVGIVALARKLAIAFWRFIEDGVVPEGSTMSNVAN

SEQ ID NO: 402850 - protein, 400 aa, unidentified
MSASLIVGVDPGRYGHGVVARTAEDAEVLRERVANDAGAIDELVTRVVGLAGGAGQALWVIEADGGDGTVLIGELLARGELVATLTPTEVAVRRKGRRQVHKSDLIDAEVCARIGREEQASLRHLVAVPETVAEMRVLARYQDGLIRDRTRLINRLRFLLSQYWPEFLAARAFAALDGDAVTALLVAFPTPSALRTQSSLELAGFLAHQRYRRRPLERAQQLLAAAQVGPRPQETVYGRLVAEVAGELGALKQRIGALDAEIRDRFLSRPEAPIVLSLPGMSHRTGPRFLAEVGILERFGSPDALAAYAGLTPTLWQSGRSSGTHFLSRRCNLHLRQALWSAAIGSLKTPASRRFYDRKRAEGKSHHQAIIALARTKLRVLWAMLKAGTLFSPERALEAA

SEQ ID NO: 402851 - protein, 330 aa, unidentified
MNSICLSTDQLTPALPVLGLDVAKKSVQAELRTNGKRVRFGFENNAKGFAQLARMLKEQGAPKVWAGLEATGPYSHALALWLHGQGHRVSLLNPRRVKQYARSAGNRNKTDLLDAAIIADFVCAHLPAAWQPPTLEVAQLQALVRRREELSLMLQAEKNRLEGIAPNVRCSLERIIDTLSAEKTRLEKLITQQIRSHQQLSRDHQLLCTIKGIGSLTAAILLAEMARPGQVERARQAAAHAGLAPRREQSGTSVRRNRGLGKEGNRYLRKALYMPALVAIKYNAPLRHFASRLRTAGKPKMSIVCAVMRKLIHIAFGVLKHQKPFNPSLA

SEQ ID NO: 402852 - protein, 406 aa, unidentified
MGEEQQYDLGELKRLWKLDYESLAMAPAEPNGRLREVRFVLQAKVALETRLCMRVLRRRRPMELHTIGIDLGKTVFHMVGLNLRGEVVVRKKFSRTQLLRFTANIHVGLIGMEACGGSHFLGRALREQGHEVRLIPAQYVKPYVKTNKSDYIDAEAIAEAVARPTMRFVPIKTDDQLDLQSLHRVRERWVMRRTAVINQIRGLLLERGITLRKGRCHVGAALPGILEDADAKLSGALRMLLAQLKLELDHLDMRIDEANALIKKTACENEACQRLVAIPGIGPVTATAVIAAIGNGGAFHKGREFAAWMGVVPREHSTGGQQKLLGISKRGNSYLRRLFVQGARAVMQQRTKQSSGLSAWLAQLTSRTHRNVAAVALANKLARIAWAVLAKNEPYRPPVLADVAAA

SEQ ID NO: 402853 - protein, 410 aa, unidentified
MQIRSVGIDLGKTTFHLVALGDNGKVLLKRKFTQKQLIAFTANMQTSLIGMEACSGAHFLGRALRGQGHDVKLIPAQFVRPFVKSNKNDFIDAEAIAEAVERHNMRFVPIKTDDQLDLQALHRVRDRLITRRTSVINQLRAFLLERGLVFAKSPARLRERIPETLEDADEKITPRMRNLLALLWEEWKDLDQQLEDMNQEVKRIASSDPACMRLRQIPGIGRLVATAIVAAIGNGAAFRKGRDFAAWTGLVPKQYSTGGKTKLAGISKRGNLYLRKILIHGARAVVLRSKRERIAMGEWMNTLEARASRNVLILAMANKLARIAWAVLSNGQDYRAVQEPLAAQANSTIKIEFSHRRLHWIRSDERTVKTACLKPVFSNGPYTVEGFRRTGTRRISSWPGESSPPKGRIH

SEQ ID NO: 402854 - protein, 416 aa, unidentified
MNLRDFIFVGIDLHKHTHTAVIKDFTGKTIGSITFNNLPSDYHKLEYKVKKCIQNIKNSQNIDVEAFYCLENAYGYGRALAIWLISRNHIVKDVNPSLSNRQAKHRPMFRKSDEYDADAIAMTGILYFESLPDAHPLDEYWSIQQLVHRRDTIMNQRVRLVNQLHEMIHRAYPYYKEFFKDISRPTALFFYYKFPSRKHLIDLSLNDIINTLNKTGHYRCSTKLCQKIYKYTSSDTSSICDHQDSRDLITRGIISEIHHCDKMLVEIDTELEKLYHELNLTLATMPGMKIIMSMKLVAEIGDIHRFKSSEKLAQYAGIAPMPYGSAGKNKYYAARQGNRRLQSTIYYLAVQQIQVSPSGKPRNAYFRDYYEQKLHEGKVPKQALICISRKLIKIIYSMMKYKTEYIMPSSTKTTDE

SEQ ID NO: 402855 - protein, 458 aa, unidentified
MNGKRKKKAGNEQQDWKVNLEVVHPNAAGIDIGNASHYVAVPPDRDAEPVRQFACFTEALQQMAAWLKSCGIDTVAMQSTGVYWLPVYEILTEEGLQVFLVNARHTKNLPGRKTDVQECQWLLQLHTFGLLNNSFRPPEEICVLRAYWRQRAEHVASASTCIQRMQKVLTEMNVQLANVISDISGLTGLAIIQAILAGERDRYKLADLANFRIQASREEIARSLEGNWRKELLFILQQELNLYQTYQQQIAECDTALAAHLQTLEDKVEPGSQPPAAKANKRAGSNAPTSFDLRGELYRVSGTDLTQIDGINIMNAQTIIAEVGVDMSRFPSEAHFASFLGLCPDNQITGGKVLRRGTRHVENRAATAFRMAATSLWRSKTYLGAKFRRLRARLGAPKAITAMAHMLARLVYRMLRYGEQYVDKGMKYYEEKYREHEIRSIQKKAKDLGLVVTLTTAA

SEQ ID NO: 402856 - protein, 336 aa, unidentified
MKYSGIDLHSNNSVVTVTDEEDRVMSEKRLPNDLATILGFLLPWRDELVGVVVESTYNWYWLVDGLQEAGYRVHLAHCSAIKKYEGLKHSGDEADARHLAQLLRLGILPTGTILPREQRALRDLGRKRMQLVRSRTQHILAVENITARERGARISSEQVKRLSVEVIDRMPIPEDVALAVKANVAVIHTLSVQIDLLEKRLQKAVPRTEYDLVTTIPGIGRILATTILLETGPIDRFASPGNFASYARCVDSQHTSNGKKKGEGNSKNGNKYLSWAFIEAAHFAMRYCVEAKRFYERKKARTNNVVAIKALAHKLARACFHMLKERKPFDVTRCFA

SEQ ID NO: 402857 - protein, 360 aa, unidentified
MAKAKTLVGLDVHATRIVAAVLDAETGQLQTFGMSGESTTAAAFCAGLPKPVRVAYEAGPTGYGLARELAKRGIECIVAAPSKIPRASGDRVKTDRRDAEHLVRLLLAGKLHPVRVPGDEEEALRDLVRAREAVRVDLMRSRHRLSKLLLRHGIRFDDGQAWTDRHRDWLASVTLDWPAAQATLLDAQGAIDALAHRRGVLEREIVAMLPACPWTVQVGRLRCLRGVDTLTAVGLCAEVGDFERFARAEQLMSYIGLVPSESTTGQQRRLGSITKTGSGHARRLLVEAAWHYRKRPTIGKALTDRQHDQPPEAIAVAWSAQRRLHRTWTRLEKRAKRRTIIAVAAARELAGFAWAITQIE

SEQ ID NO: 402858 - protein, 311 aa, unidentified
MSSSTNVAVSAVPAVHSIIYLGMDVHKESITIAVLPDGATVPTRLDRLPNDLPKLKRWLDRLARDGEIRACYEASGAGYVLHRAMKEWGYASEVIAPSLIPKRAGVQRKHNKRDAADLARLYRAGELTAVRIPSEADERVRDVVRCRETFQREILKSRHYILKFLARRGFVFREGTNWCTPHLKWLQHLTTDNSPLAPHDRLVFREYHALLLYKLERRDELDRQIEQLALLPTLAPMVGRLQCFRGISLHSAMVLATEIVDWRRFERPAQLACYLGLVSKEDSSGDRTRLGSITKAGNSHCRHVLVQAAWS

SEQ ID NO: 402859 - protein, 389 aa, unidentified
MSQPFDASKSLATLEQDNTVIAVIEMSQSKWLVAAVVPGVKRQPLKKLQADEEALLKLLNRWRTEAGQTGREIKRVVVAYEAGRDGFWLARWLRTRGVEAYVIHPASIAVSREHRRAKTDRLDTELLMRAFLGWLRGEKRHCSMAAVPAAEEEDARRPNRERENLVTERTRIANKMKAILARFGRRSCKPTLRKAAQKLDGLRTAEGTPLLENTRAELSRHLARLRVVREQIRAIEQKRLHKLAAAPAEENGPHVMVRLIARVFGVGVETADMLVNEVFARHLRDRKAIARYAGLTGSPDESGKRRRERGLARAGNARVRRGMIQLAWCLIKFKKNSALAKWFDARTADGRGSTRKTMIVALARKLLIALWRLVTTGEVPEGVILRPAA

SEQ ID NO: 402860 - protein, 343 aa, unidentified
MSISMIGLDTAKSVFQIHGVNEAGKVELKRKVRRSDLITFFEKQERCTVVMEACGAAHHWARILTGLGHTVKLLAPEAVKPFVKKGKKNDAADAAAICEAASRPDVKFVPVKTVEQQGILALHTVRSLLVKQQTMLANAIRGLASEFGHVVPKGLNNLEPLVDLVDADEDMPKQARQAIAELHERFGELAKGIQSCEAEIVKHARNDVTARRLATIPGIGPITASLIAATVVDISLFNTARQFAAWLGLVPRQSSTAGKARLSRITKAGNKEIRKLLVLGATSMVGRAEGWHSALGAWLRDILQRRPVRLVTVALANKMARIAWAVMTRDEVYRPQGGVAAKA

SEQ ID NO: 402861 - protein, 403 aa, unidentified
MQRIAGIDLASEEHCLVVVDVDGIRLEQRRISHSEDGLQLLVCRLLELEVARVALERPNGLVVDRLLEAGIAVVPVHPNQLAAARDRYRSGGGKSDGFDAYVLAELARTDMHRLRVLEPDRDETRALRALTRARDDLVATRVALANQLRAQLELFWPGAARIFADIDSPIALAFLERYPSPEDARLLGAKRLAAFLARNGYCGRRSSDGLLQRLRTAPAARTGELEAEARRQIVLGLVAALRPIVEQIKLLTSQIRGAIDAHPDGQIFRSLFRDPRSVVTAAELVAEIGDRRERYDTRARLEARAGHCPVAIESGKKKVASFRWACNKTLRDAVSVLADSSRKHNPWAQKIYADAIARGCNHPHAIRILGRAWLRVIWRLWHDRTPYDPNRHGSLNRLLAAQG

SEQ ID NO: 402862 - protein, 401 aa, unidentified
MRYFVGLDWGGTEHAVCVVDESGREALRFSATHTADGLAELRRRLARLAAPAELPVAIERPSGLLVDTLLEAGHPVIPIHPNAVKAARPRYRMSGAKSDSGDAHLLADLLRTDGHRLAPLRPQSDAVRALRVLVRSRDDLVATRVQLANQLRALLDTFWPGAATIFADIDSPIALAFLRRYPTPASAERLGEKRLAAFLAAQSYSGRRSAVDLLARLRAAPVGHAGEAEAEACGQLAAALAASLEPLVAQIALLSARIAHAVAQLPEGRIVMSFPRAGTICAAQITAELGGVRERFPSAEALATEAGVAPVTRQSGKSRSVVFRWACNKRLRAAVTCFADNSRHASPWAAALYQRARSRGCDHPHAIRILARAWLRVLWRAWHDGLAYDPAKHASVKLIAA

SEQ ID NO: 402863 - protein, 415 aa, unidentified
MFKIFRKNCCGLDVHKTWIYACIGITDNNGRTEYKQARFSSFSKGLKELLNWLVKYDCFDVCMESTGKYWIPVFNILEKDCKVILAHPKYTKPQKGNKTDRKDAKWICDLFTCDMIKPSFIPPAPIRHLRDLVRYRFKLTNMLSGEKNRAQNCLTVSNLKLDDVFSDVFGKTSMAITNHILEHPGESFDVTPFVHKHCKTPISEIQAAVDGAISQEQAVKLRTCLSHINQITESKEKITQEILRIAKPYSEALNLLQTVPGLGKNRITAISILSEIGADMSVFPTAKHLASWAGCCPRNDESAHKIKSTRISRAGSYFKPVLVQIANALLKSKEHPEFGERYRRIKARRGHKKAIIAICRMLLTVIWHILKKHVPYSAEGFIEQRKVKPSKKLSLSQALHLLKERGYIIDMPLRE

SEQ ID NO: 402864 - protein, 374 aa, unidentified
MENTITYVAMDTHKKQHKIALHYPCREEIVELAIGNTVRDIKKMVNKIKKQAPGKVEFCYEAGVCGFTLKRRIEQLGCRCRVIAPSLVPRKPGERVKTDRRDARKLLMMYRAGLLTEVHAPNEHQEAARELTRLRETARDNLKRIRHQLLKLLTRHGYVYTEGRHWTQRHITWLRTVKFAESTLTSVFENYFNEMIYCIGRLENLDKEVGLLAGSQEYKEIVGLLCCYHGIDTLTAITIITEIFEFGRFESPRHLMSYLGLTPSEDSSGEKQKKGAITKAGNKRIRRLLNEASWHYRHRYVPSAALKKRRKGQPQWAIEIADAAGRRLSTRHRYLINKGKMPCKANIAVARELAGFIWFTVTQYQARKNTIDAA

SEQ ID NO: 402865 - protein, 360 aa, unidentified
MTSTPATRQVVGGVDTHKQTHHAAILDASTGKQLTDREFPATAAGYSQLVMWMQGHGEVLKVGIEGTGSYGVGLCRQFKAQNVTVIEVMRPNRQARRARGKSDPIDAINAARSVLSESAVTTPKDHDGFVEAIRLIHATRRSAAKARKATLAQIHGMLWGAPEELREKLRGHNRAALVTRCARLRVPTSAAPDDPAATARRMLRRLAKRIQYLDEEIAEANEHLKAILEEHAPNLMQVYGVGTEAASQMLITVGENAQLLNTEASLARICGVAPIPASSGQTTRHRLHRGGDRAANCAIHLIVINRLRWHEQTRAYNERRIQEGKTKKEIIRCLKRAVVRELYRAIQADLNQYEKLLDAA

SEQ ID NO: 402866 - protein, 359 aa, unidentified
MTSMQDAPRRRRVVVGVDTHKHIHVAVALDELGGRIEARSFAADRSGYEQLIDWASSLGREVMFGVEGTGSYGAGLASAIRRRSIGVLEVLRTDRRDRRLRGKSDTIDAENAARAVLNGQASAVPKSADGTVEMIRLVKVAKDVAVKARTSAMISLKAVLVNAPAELREQLQPLTKMALIRRCAALRPGPVTDPMTAAKHTLRAIARRWLALDAEIKAHEQVLNRLTTELVPDLVAAFGIGADIAAEMLIVAGDNPERVRSEPAFARLCGVAPIPASSGMTTRHRLNRGGHRQANAALYRAVIVRLQYHQPTQAYYQRRTAEGRTKAEIIRCLKRLLAREIWSYLRPLRQARQPLVLAA

SEQ ID NO: 402867 - protein, 429 aa, unidentified
MDGVDTTRLERFRQLRKEIRGSDEHLIVGVDVAKDNHHAFFGTATGKTLLKRLVFNNNLQGYEKLFTYVEAAKVKNNFNKVVFGLEPTANYHKPLGEYLIKCGFDVVLVAGTAVKRNRELLDGRWDKHDTKDAANVADLISQGKCLFYEYPIMPIRELRNLLSFKRRLKKQEHGTSVRIRNHLLAQYFPELDPHFSRMSSCSLSVVKWCLEPSVIAGLEYEAFLRLVAPGKRTIKQREHVKLIWEKAFESIGCNAGETVQFEAKMMVEELQHVREAISEVEEKIEEICLNFPEYKYLLSMPGFGKDISSKVLGAIGNPFRFDNAKQVVKLSGWDLNANRSGKSSGSATAVISKKGKADLRYALYQAALVASSRNQHFVAYFTEKLRQRSREKGIKTKMRVKLAAKLLVVAWTLMKNQEPFNPEYLKVTL

SEQ ID NO: 402868 - protein, 331 aa, unidentified
MKIKDIVGIDISKLTFDAAIHSNQMESQFENGKKGFGELVDWAFENSGSPRGSVLFVLEHTGLYSYGLSVYLSSNDIPFLLVPGLEIKKSMGMVRGKSDKADAKMIAKYGYRLRDEIKPSVLSREQEQSIKRLLSLRERLVKQRAGFKASLKEQKRVLDKKENATLFSTQQKMIGYLSKQIREVERQIDLVIRNNESMSQNYKLLTSIKGIGPQTALFMIAYTANFTRFDNHRKFASYCGIAPFQNQSGTSIRGRTKVSHLANKKLKSLLDLCAKTSIQHNTEMRIYYEKRIAEGKNKMSTINIIRNKLVARMFAVVKRGENYVDTMKYAA

SEQ ID NO: 402869 - protein, 350 aa, unidentified
MKFCGVDWANDHHDALSIDEQGHQLGSIRVAHNPEGLSQLDAYLEQIAGPGGKEQVACIIETTHGLLIAHLLEQGWSVYPVNPRTVERRRAPSGAKTDTIDAYLLAKTGRADFQDLRRLNPDSEQIQELKTLTRDQDALVRMQTRLLNQLTACLKAYYPVALELFSKLQQPSTLKFLRAYPTLQSARSASVEQLTATLKQARYPGAGRAAQQMLQHLQQPSLQASEVTTRTKARLMLALVDQLEPLMKQIADYDKETLRLFLMHEDHELFQSLPRAGERLAPRLLAELGDDRTRYDSASSLQALAGTSPVLFQSGAYQKAHRRLGCIKPWRNVLQQFGGPSTLQDTWARE

SEQ ID NO: 402870 - protein, 320 aa, unidentified
MSQNTTALMTEKPSSVHAGLDIAKASLQLHLQSKSYDLPNTTEGHAQLIKRLAAIPGVHIICEATGGYERAVVAALGAATIPVSVINPARVRQFARASGELAKTDPIDAAMLTAFGQAFTPEPTAARTASEIKMAALVTRRVQLLELRVAEVQRADTCADLDLRKLFTPWLAQMEKQITKVEALIEALLKIQAPLANQVQRLDDIMGVGRITAVMVLATMPELGQLNRRQAAALAGLCPYNRDSGQWAGKRCISGGRAEVRRALYMAALSASRSNHLLKPFYDRLIAAGKPAKVALTAVMRKLIVLMNHLLKNPEFSLAH

SEQ ID NO: 402871 - protein, 352 aa, unidentified
MIVLGADMHKRSHTIAAVAATAGELLGEETVEVGDRGFRAAVEWARGLGCERVWALEDCRHVSGAFERFLLVNGERVVRVATHLMAGERRGARQRGKSDRIDAIAVARAALREGVDRLPAAQLAGIELDIRLLVDHRGRLVRMRTALNNDLRWHLHDLWPEQTLPPRALFSANHSGRVARRLARAEQTARVRIARDELRHMRELTHTIDTLQAQINELVAEVAPQLLAEPGFGPLTAGKLIGEIAGAQRFATDAKLARAAGVAPIPASSGTTNRHRLDRGGNRQINTAIHSIALTRARCHPETRTYIARKRSEGKTHREAIRSLKRHLARRIWHLLQTPHPPGRTPPSPSIS

SEQ ID NO: 402872 - protein, 365 aa, unidentified
MKIIYWIGIDDHADKWTIAQYRGDEARPSKEFELVPDEKGYRRLLAYLKGLDGEVRIVYEAGPCGYELYRRLTKAGYQCQVAAPALTPRKPGERVKTNRRDAAKLGRYLRAGELTFIAIPDEERESLRDVIRSREAAQKDVGRTKKRIVHLLLRYGQRYRDGQAWTVRFWAWLKAIELAGENSQFVLAEMISELEHRMAQVHRYDEQIELAAQQPEYKTYLDGLRTLRGINTLSAMTVLSELGDLRRFPTAPQLMAAIGVVPSESSTGDKTNRFSITKAGNAHVRRIAVEAAWNYRRRPTAGRSIQARRKGQPKEIVDIAEKCEKRLNSKFFRLTSRHKKSTVAVVAVARELLGFIWAIGQIAHP

SEQ ID NO: 402873 - protein, 354 aa, unidentified
MVEYIAFDSHKHYTWAEREDVQTGKVRHCRIRHEPGAIREYLIGCEAGTPVAVEATANWYWIVVEIEQAGLKPLLVHPGKAKLMMGMVNKTDKLDAHGLNRLQRTGTLPTVWIPPADLRDLRELTRTRAVIGGQRTRLKNRITATLAKYGLQVTGYSDPYGRKAREELSRHVAELPPETRHVTEMLLKHLDFVEQQIAELEERMKTLVRVTPEMQWLMTLPGIGLILAAVIGLEVGDVRRFASAERLASYAGTTPRVHASGDKVRYGPLRPDVNHFLRWGFVEAANSVAVNHERCPDRHVSQLYRRLRGRRGHSKAVGAVARHLAEAAWHVLNRREPYRDPALKNRPLREAQAR

SEQ ID NO: 402874 - protein, 395 aa, unidentified
MYKVLVGIDVSKERFSAAGIDSVGKEAFSQAYTMDSKGFEDLLKMVRSHCEEDSKVLMAMESTGCYHINLYSFLISQGIRTLVVNPLLISNYAKLSLRKTKTDKKDAMTIAKFLLDHHKEISQLSISQDNQDLRDLSRERESLSHLISATKVEIKRVLRTTFPELETIGDIYTGVMLRLIQEYPSARLVRAAKLKGIIKLLKEPRRGNKLTYTAEDIYRAAKTSIATVSSGKEIILRGKVATLLHLQERLEEITKLLTELCQSTRMDDLDILQSIKGVGPNTAAPLLAEMGSIENFSSHKKLIAFAGLDPSVTESGQYIGASRLSKRGNRHLRRAIYLMTTSVVSWNAWFKAYFQKRKAEGMAPQKALFATAHKLIRVIFAMLSQRTYFKVKEAK

SEQ ID NO: 402875 - protein, 400 aa, unidentified
MNPELQVAVDVGCTRHRVTIGLSEGKLLEEFDIGHDAAGLNEFFSRIERHERQWGLPVAVAMEGYNGYARPLDERVLLHGYRLFNVNNMKLARFKEIFPGPAKSDPVDARKMLEMFSLKDKLPLAREVLQEVAPVAPVNVQLKALTRRRKQLVNERKRVSSRMQTDLQAVCPGLFDITGEADNLWFLNFLTCRADLTKLRTVREASLLALSGVGKGYAGKIRLWQKQATFSDTVAWIGPMIVEDARRMLELRHKIGALQKQIDTLATHSEMACHIDTIPGFGRVCSAELAGEIGSLQRFSGESSLALYVGMAPLNNSSGARSGSKPPRHVNVRAKAAMMIAAAQNAATVPDSRAFYDKKRSQGKTHNQALRALARVLVRIIWSMLKHGRDYQTVSPTKNA

SEQ ID NO: 402876 - protein, 420 aa, unidentified
MPSQPSDFAAVIGLDWADRKHDICLMPAGQQNPEFTVLEHDPVAIDSWANQLKKRFAGRPIAVCLEIARGPIVSALLEYDFFVIFPINPAALAKYRQTFTPSHAKDDPTDAFFAFDFFRCHFDRLAPLRRERPAMRALQHLVQDRRTLVHDRSRLINRVTYALKEYFPQVLRWFRDKHTDVFVDFITRWPTLLAAQRAHRDTLVDFFHLHNVRRGYVIERRIAAIKAARPLTSDPAVIEPNRLVAETLLAQISILSKAVERFDAEIATQCAALPDFKIFNALPGAGTAMAPRLLAAFGEQRERFPNAAAIQKYAGIAPVVERSGNKSWTHWRYICPKFLRQTFVEWVGETVPRSFWAKAFYESRRAKGVDHNAIIRALAFKWLRILWRCWVDRQPYDESRYLLALQKRHSPVLAFAVHSS

SEQ ID NO: 402877 - protein, 387 aa, unidentified
MMKNKGRVVGLDVHPDSFAGAVVEGRDPASAVVSSTSTRVELERLEEWALRHTSTKDTLVLEASGNAFAVAARLRAIGREVEILDSHRAGKVGKVYCANDRVDAVKIARIYLSALSPIVWQPDQKTLERREIFSAYQAVVKESTRAKQQLRSMLNEHCVRLEKGFRLCHPYAIGRLLALREWTPARRMLLQQLHGSLLAARARRTMLRRHMAQEIVAEESLLRLTRLCGINLITLYGVVAAVGDVRRFAHSKKLVAYLGLNPSVSQSGNFEGGGALKRHGRGALRALLIQSGKKLLEVNNPLQKWGLAVAARRGRNKAAVAVARKLCVALWHVLMGHAIGALERLDTLETKLSKFATEMGPAALAAFGYNNKADFVEKKLYVLRSYP

SEQ ID NO: 402878 - protein, 348 aa, unidentified
MPGEHVNVTVGVDTHADTHTAVALDEVGRRLDITQITADEAGYGRLLDWTRDLGELRCVGVEGTGSYGAGLTRFLSAAGIEVVEVGRPNRQHRRRHGKSDPADAEGAARAVLAGEASAVPKSRDGIVESIRALHVVKRSAIKARTQAANQLTALALTAPEATRAELEGLTPLKRARRAAGWRPGAGHDPLTVTRRAIRALARRWLDLTAEINTHNAELDELTTAAAPGLVAQQGVSRDVAAKLLIAAGDNPGRLRTEASFAALCGVSPVRASSGKTNRHRLNRSGDRQANNALWTIARVRLSRDPETRAYADRRGHEGLSHREIVRCLKRHLARRLYPIILADLAKLT

SEQ ID NO: 402879 - protein, 386 aa, unidentified
MIYIGIDISKYKHDCFIATETNHVSFSFENNKLGFDEFLTHTKPFSKSEMIIGLEATGHYGDNLKSFLLFHGYKFMEINPFLVKKFSDSKSLRKLKTDKKDAKLISEYMMTVDFKAYHHQSYHINKLKSLTRYRSRLVSSRTSLYNQVTKSLDIVFPEYRPFMKEQGYSELSLYLLGKYTHPLKIKALKQSHHDTLIKVSMGKFSYVKFIKLKELASNSIGTHDETQIYLIKENIKLIQTYNNLIKEIESNIFSIMEKYPTYFQTIKGIGLLSAAIILAEYGDISLFDNPAQMTSFAGLDSSINQSGTTSSTGKLVKRGSKYLRSTLINVCQTVYIYNSIFYDYYTKKKLEGKHHRVAMTHLAKKLIRIIFHLEKNQVSFNQSLLK

SEQ ID NO: 402880 - protein, 414 aa, unidentified
MESGYRLMVGIDWATEAHQVCVLDSQGRLLEQRRVEHRAEAIAAMIDRLITLAGGDPASIAVAIEVPRGAVVEALVERGLHVFAINPKQLDRFRDRHTVAGAKDDRRDAFVLADSLRTDLLAFHRVHLDDAWTIQIRELTRIEENLNTEINRLANQLRDLLLRFYPQLLRLCPAADQPWLWALLKLAPTPAKAQRLRRSSIQRLLHQYRIRKWTVDQVRTELKTAPLSVAPGVTQATSAHIALLLPRMELLMAQLKLCSKAVQTALDEKIAEEEQRREHRDVAILLSLPGVGRVVAATMLAEASQLLAQRNYHALRTLGGVAPVTRQSGKRLAVRRRYGCNHRLSNAFHHWARVSSQCDPRAKHHYQTLRQIGHSHGRALRGVADRLLALLVAMLRDQTLYDTTRALAPKPIAA

SEQ ID NO: 402881 - protein, 337 aa, unidentified
MELKRIAIDTSKSVFTLHGVDAQERPVLRRDLRRGRVVAFFAELAPSEVVLEACGGSHHWARTLSKFGHRVRLIPPQYVKPFVKRGKTDRNDAEAISEAASRPAMRWVAIKSAAQQADALALSARELLVAQRTQTINALRGHAAEFGVVVAGGPSRVAELLAAVARDAEIPQAARRLLAFLGQQVAHLDREIAKLEVALMAQHRANPVSRLLAEIPGIGPIGALTLAVRIDPRQFQSGRHLAAWIGLTPRQHSSGGKQRMGGISRAGDERLRQLLVLGATAIIRYAKPGRASAWLLSLLERRPRKLAAVALANKMARVAWAMMTTGQAYRRASLAAA

SEQ ID NO: 402882 - protein, 480 aa, unidentified
MSQSKTRKSPSRKRHRQIRKAQGRIRKVGLEATAAAAKPVPAPQLIHPHAAAIDVHSDNHVVCVGPGQVRTFGAYTIDLHAIVDHLREHGVTTVVLESTGVYWVALFELLESRGFEVFLIEPSQARHCGARPKTDVADCQWLQRLHTYGLLRPSFRPPESVLTLRGYWRQRQMQVRYAASHVQHIQKALEQMNVKLTEVAADIMGLTGTRIIEAILHGERGAEQLASLRDPSCKKSAKEYAKALVGTWRPEHLFALKQAYALYRFHHQQITECDQCLAEELARLPNRAAGKPFQPRPRRNGRKNNDVRFHAAEPLFKALGVDLTLIDGIEVNTALVIVAEIGVDVSRFPTEKHFASWLRLSPQLEESNQTRKKRSPRRGKNRLAQALRMAAQAVSRTKTPLAVFYHRIKGRLGGKGAITATAHKLALLVYRLLKYGVEYVRQSLDEYAAKVKEQMERSLRRKAAQLGYDLVPKPAAAQPS

SEQ ID NO: 402883 - protein, 343 aa, unidentified
MNTYVGLDVAQRKTAVCVVDDDGKTVCHGTVDTRPEMIRAFLEAKGCSHAKVGMETGPLAVWLYHSLRKLNLDIDCIHARHVHSALTVQLNKTDRNDARGIANLVRSGWYRPTFVKSLECHNERLLISARDRLVRVRVSINNQIRGLLKTFGVVLSPGRNDVFRREVLAADPSVEAVKSVILMLLDTWRHVSLQIRACSRMLEKRATQDPVCRMLMSIPGVGALTALSYRTAIGDPARFRRVADVGAYLALTPRKYQSGDVDRNGGISKQGNRQTRSLLYEAASCLLSRYGTEPSLARWAGMIRQKKGYKKAVVALARKLSTVMLSMWRTGQLYKDPALQVGR

SEQ ID NO: 402884 - protein, 347 aa, unidentified
MKILKQVVGVDVAQKELVVSLGRINEDLSKELYAHKVFSNKESGIVALLKWIKKYTLEEVKLSIVMEATGVYHQKFAYYLNDRGYAVSIVLPNKISNYMRTLETKTITDKTCAEAITLFGLERNLDLWERPKPIYKLLLQLTRERDQIVEERSMVKNQLHAEESEAEPNIGSLKRLKLRIKFLNKQEKEIKSEIDSNIKNESEIKNQLEIVTSIPGIGNLTAVTILAETNGFELIRNKRQLASYAGFDIKEKQSGTSVKGKSKMSKKGNRYLRKAMHLPSLTAVKYDENFKEIYNRLVSKHGIKMKALIAIQRKLLELTYILFKNNTKYKKEFELIKREQPEMAAAL

SEQ ID NO: 402885 - protein, 606 aa, unidentified
MKIQPATKAQKDKKASKKASGKATPGKWDEMNRKQRREMMRKMQSEDLSLEVVHPHAAGIDIGNASHYVAVPPSRDPQPVRCFGCTTAELKKMAEWLTQCGIRTLAMQSTGVYWIAVYDILEEAGMEVYLVNARETKNLPGRKTDVQEGQWLMKLHTYGLLRNAFRPSQEIRTLRTYWRQRHDLVRSTGRHIQRMQKALTQMNIQLANVISDISGVTGQTILKAILDGQRDPRELAAYRDCRVEASEEEIVQALEGNWQEDQLFVLRQEQAGYEFCQKQITECDQQLAQYLARLEDQTQGATLPEETRKGRRKKKKGNPQFNLREELFRMTGTDLTQIDGIDVMTAMTVVSEVGWDMSKWKTENHFVSWLKLSPDNKISGGKVIGKGRMPTNNRATTVLRMAATTLRESDSYLGAQFRRFRTRLGPPVATKAMAAKLARLVYRMLRYGMKYVDQGAEFYETQHPQTAGHSSQAKSRPARVGNHRSCCRGLKLRPRVSDGEFLERERSRPSRSRIPFACRHLCLLGNATLGHEVNRKAPQPMTTFIMLASHRGQSGTAMLLGSRHDHRQAAVALGQARSDALQHPCTTQVEPIQMCQLGVAGIGRHH

SEQ ID NO: 402886 - protein, 313 aa, unidentified
MSDPQVFVGIDVSKARLDVALRPTDDCWHVGNDESGIADLVERLRAVQPILVVLEATGGLEVPVTGALAEAGLPVVVVNPRHARDFAKATGRIAKTDTLDARGLAHFAEAVRPTPRPLPDAQAQALSALLTRRRQLVQMLTAERRRLQTAPQPIRADIQAHITWLTRRLARTDADVAAAIHASPLWRATDEMLQSTPGVGPILARTLVAEVPELGRLNRQEIAALIGVAPLNRDSGTIRGKRAVWGGRAHVRAVLYMSTLSAVRHNPVLKAFYERLRAVGKAPKVALTACMRKLLTILNAMIKHHTRWQGKTA

SEQ ID NO: 402887 - protein, 315 aa, unidentified
MRDVPCFIGLDVAKAQVDIAVRPSGERWAVPNDASGGMTLVDQVHALPPTLIVLEATGGLERAVTSALATAGLPVVVVNPRQVRDFARATGQLAKTDALDARALAHFADVIRPAPRPLPDAQTQELRALLGRRQQLIVMRTAAQNRRAGTSARLTKDIAAHIAWLNADITTLDNDLETLLRASPVWRENDDLLQSAKGIGPVSAHTFLLELPEWGTRTRQEMSALVGVAPLTCDSGTLRGKRTIWGGRAHVRTVLYMSTLVATRYNPQIKVFYERLLTAGKVKKVALTACMRKFLTILNALLKHRTPWQPQEVQS

SEQ ID NO: 402888 - protein, 354 aa, unidentified
MSQKLNTAIAVIGIDIGKNSFHVVGLDKRGAIVLRQKWSRGQVETRLANMPPCLIGMEACVGAHHLSRKLKGLGHDARLMPAKYVRPYSKGQKNDFRDAEAIAEAVQRPTMRFVATKTAEQLDLQALHRVRERLVSQRTGVINQIRAFLLERGVAVRQGLRFLRAELPDLLATRTEALSPRMTRVIEDLAGDWRRLDERIESLSTEIAALAHQDAACNRLMTVPGVGPIISSAMVAAIGTGDVFSKGRDFGAWLGLVPKQTSTGDRTILGKISRRGNRYLRVLFVQAAWVVLIRPKSWERYGLKPWIEAAKKRLHHNVLAIALANKLARIAWAVLNKERNFECNSMDKMASRPA

SEQ ID NO: 402889 - protein, 406 aa, unidentified
MDVIYPRCAGLDVHKQTVVACVRIASGGPALQEVRTFETTTSGLLALADWLESFGVEHVAMEATGVYWKPVWHVLEGHFQLVLANAAHVKNVPGRKTDVNDAMWLADLLAHGLIRASFVPPVAVQELRTLTRTRKQFVRERGSHAQRIEKILEDANIKLSVVISDILGKSGRAVLQALIDGQTEPEELVRLIGRVKASRAELLEALRGRVSAHHRFMLKLHLAHVDVLDQAIANIETEVGRGLEPFRQAAKLLSTMPGLSAVSANVVVAEIGIDMSRFATPGHLLSWSCLCLRNDESVGKRRSTRLRRGGKWLKTTLVQAAWSAVKVKGSYLQAQFHRLRARRGAKKAIIAVAASMLTAAWHMLRDGTEWHDLGAAHFDRADATKTANRLIRRLQQIGYTVQATPA

SEQ ID NO: 402890 - protein, 360 aa, unidentified
MPLDDLCSVSIELKEPAVTTFVGMDVHRAQITYNALNTDSGEVRTGRICPANRGTVRAFLAALPAGETIVAVEAMTGWRFIAEECARAGVDVRLAEPAETRQRQERKRRAKTDKLDARLLRELLVEGRLPESWIAPPHILDLRAKVRLRKTLVSQRTQWLQRVHAVLFHHGVPVQPGRLARLEARSVHEQLADLELPAVAEQQITVALRVVENLNDEVHRLDLELERFARRQPGCRALMGHYGIGPLVATAIVAELGDARRFSSSKQAVRCAGLDVTVHESDVRRRGGHLSRQGSPVLRWAVFEAAQCAARPSSPDHAYYVQVKERLGANRAALTIARKLLRRAHHTLRELGDDAMAPAT

SEQ ID NO: 402891 - protein, 356 aa, unidentified
MARLTMPNAQTESKPSSRIVVGGVDTHADTHTVAVVDQVGRRLGCAVFPASRAGYRALTGWLAGHGEIYAVGVEGTGSYGAGLTRWLTAHQVRVVEVNRPNRAERRRRGKSDPVDAEHAAAAVLANTATTIPKARTGLVESLRLIHATRAGAVKARTAARNSFINTLRSSPDAVREALQPLSRARQLKAAAGYRPQGDDPVATVKRCLRRLAVRITELTAEITAADRDLDRLTQLLAPSMRSRPGFGPETTAQLLITAGDNPERIGSEAALAGLCGVSPVQASSGRTRYHRLNRGGDRQANRALHMIILNRLRHHQPTRAYLAVHSPDGRATPHLRRVLKRYLVREVYQLLSQLQP

SEQ ID NO: 402892 - protein, 338 aa, unidentified
MKLKRVGVDLAKQVFQIHGVDSHEQVKCRKQLKRGQMLSFFRQLEPCLVAMEACGSSHYWARELSALGHQVKLIAPQFVKPYVKSGKNDANDAEAICEAASRPNMRFVPIKSAEQQAGLSLHRIRSRLIRARTALANEIRGLLAEFGLIEPVRGVTATRRLLQASLETADNGLPGKMRRLLRELQNELQEHDARLSRLDELLLQEAREDERVKRLLKVEGVGVISATALVSAVGDARHFSSARQFAAWLGLVPSQHSSGGKTRLGSISKRGDTYLRTLLIHGARAALNACKDKTDKRSRWVQQLQCRRNTNIATVALANKNARIVWAILSRGERYQPG

SEQ ID NO: 402893 - protein, 388 aa, unidentified
MPAAETPVAYLGIDVGKSSHSACALDAGGGVAFRAELANRPDDIDRLLERAGSGALVVVDQKRNIGALVLARAHAHGNPCAYLPGYAEKQARGMFPGIAKTDAIDAEVIARTALGVPRALRPAPEEPEGTASLRILSSQREFASSARTRAKNRLRATLLEADPALEGAVDPSSRWQVSMLAEFGGAAGCSAAGWRRFSNAARRAGAPAAGARRLWEALLASSRSGRRLPAGEDVAVRILAREIASLDADIEELDSLVADSLAGDEVYECLLTVPGIGPKTAAALVTSIDISAFRGHDELASYCGVAPSDRRSGSSIRSTSPQHGGNRQLKNLLIFSCNSLIGTDNRFGRYYGECRARGMRHGKALKAVARKRLKVIYAIMRDAVPYAA

SEQ ID NO: 402894 - protein, 355 aa, unidentified
MNSVKYIGLDVHLSTISVAVLDAEGKLVMHSVLATHAAAILDFMHGLSGTLHVTFEEGTHSAWLYDLLVRQVARVVVCNPRKNALLKAGNKSDTIDARKLAELLRAGMLSPVYHGETGTATVKQLGRSYTALTEDTTRTMSRLKALYRGQAIPSAGKKAYGRRHRDAWLAQLKGAGLHRRAEILYQELDSLQALRRQARRELIVESGKHGAVKLLRTVPFLGPIRAALLLGRVQTPHRFRTKRQFWAYCGLALETRTSSDYQFVNGQLERKKKPVWIRGLNLNHNHDLKNVFKSAATSASVREGPFRTFYEGLLAKGMAPAMARLTLARKIAAITLSVWKKGETFDAEQLKPQAA

SEQ ID NO: 402895 - protein, 341 aa, unidentified
MAEYIGLDVSMKETAVSIRCEGKRIWRGKCASDPKIIAELVRKRAPAVERIVFETGPLSVWFWHALQAAGLPAICIDARHAAKALDMAPNKTDANDADGLAQLAEIGYFKPVRVKGFDSMLTRTLVAARTRLVRITVELSNQIRGLMKTFGLVVPAGGGSVFENNIRGLLADEAALARIVLPLLESWRSVRQRAAELSRQLISEARHSQACQILMSIPGIGSITATSFMAAIEDPANFKKSRSVGAWLGLTTRRYQSGEVDYDGHISRRGDSHLRGLLYEAAVTVLTRSKVDCGLRAWGLKLRERIGFKRAAVAMARKLAVIMHTMLKSGELFDPVAGAAA

SEQ ID NO: 402896 - protein, 374 aa, unidentified
MSAEIKFIGLDVHRDTIAIAIAEGDMKQEVRFFGTVANTGEALRSALRKIGQDGAELRVCYESGPCGFVVYRFLLKLGIDCIVISPSSMPRRPNDRVKTDRRDAQTLARLLRAGELVAVWVPDEAHEAVRDVVRAHRQTKQDIASAKSSLKSFLLRHDRRFPGKAIWGGGHWRWLSEQTFPFPHQQFVFEEYKRRIKELEERCTRLEMVLEEALQDWALAPIVMALQALRGIKLIAATTLVAEIGDLHRFDSPKQLMAWIGLVPAEYSSGKRIKRGEITRAGNAAARSMLIESAWHYRFPAREGRALRERNGNIPDNIRAIAWKAQVRLCGKYRRLAATGKQTVKIVVAVARELVGFIWDIARHTQGIAVTAQR

SEQ ID NO: 402897 - protein, 321 aa, unidentified
METWVGIDISKDTFDAAWIMDGKKIHLKLENSSNGFKRLLNEVPAESRFAMEATGEYHLNCARYLSSRGNPVAVLNPFAVKMHMQSDLRRCKNDRADAYSIAKFAAEKNTDCWTCPTDDEIRLKHLDAVIDNLQKQIRQSKNILHSLTQVNLRDDQAVSIIKKTISSLEALMEKARNRQLEMVETGKKEEIALACSIPGIGLETSLKFFTHVGNIERFGSSRSLISWIGLTPRNAQSGTSIHKNGSISRMGCTRLRGQFYMCAVVAIKYNPDCRSFYTRLKESGKPSKVALIAVANKLLRQLYAVLTKKEAYVPNFCTKAS

SEQ ID NO: 402898 - protein, 335 aa, unidentified
MQIKHFIGIDVSKDTLDLSVVVNGKNLHYCRIKNTTKEIKSTITRVIQSLNGSFDDTIFCMEHTGLYNLPLVKWLHANGGSMWLESGVHIRRTLGLVRGKNDKVDSSRIAMFSYINRHQIRLWKPPRKVLEKISVLLSQRSRLIKAKKQLQTANQEQRKFIDKDIMHSLNNYTNRTVSVIEKQIKDLENEIIEIIKADEVLFHLYRIITSVSGIGFVTACHILVTTNEFINISDPKKYACYSGVAPFEHTSGTSIRGRNRVSHFANKSIKTLFHLSALADISTPGEIQEYFNRKVEEGKNKMCVLNAIRNKLILRIFACVRENRPYEKNYLYKVA

SEQ ID NO: 402899 - protein, 427 aa, unidentified
MSERKSLEIRVSVDVGSRSHQVAIGLSSGEVLEEFEIAHRVEGFEDLFSRIERHRKGNSYRVAVAMEGFNGWARPLDSMVRGRGYRLYNINNLKLARFKEIFPGAAKSDRIDARKGLELFQLRDHLPLAKEVLQEVVGTPHENEVLKRLSRRRRRLVDERVRVVNNLQADLQAVCPGLLEITKEAGNRWFLNFLISADTLPQLARLRRTTLLKIPSVGVKYARLIQDWQERAHFSEEVEWVSAMIQEDARRILELDETIKALEVKTAEVAETSTIAKLLRSIPGYGAICTSELAGEIGTIERFNKEGSLALYLGMATLDNSSGKYQGTKRPKHINTRAKAAMMTALDRHRKYVPQSQKYYEKKRAQGKSHNQAIRALGRHLCRIIYKMLKEKREYEVRPLKRDTQAKVTSRSSRIGQIGKKKISAKG

SEQ ID NO: 402900 - protein, 343 aa, unidentified
MKQYIGLDVSMKETAISIRQDGKRIWRGKCASDPQLLAAVIRKRAPHAQRVVFETGPLSVWFYHALTAEELPVICIDARHAKAALDMAANKTDANDADGLAHLAEVGFYREVRVKGFDSMLIRTLITARNQLIKMRLQISNQIRGLMKTFGLVVPKGAGSVFEGNVRDLLQGEEKLAHIIMPMLQAWRDIRHQSATLSKELVVMAREDQRCRLLMSVPGVGTVTATAFAAAVEDPANFRNSRAVGAWVGLTPRRYQSGEVDHDGHISRRGDNQLRGLLYEAAAVILNRSRDTSSLRSWALELKERLGFKRTAVALARKLAVIMHAMLRTGELFDPHAGRLIAA

SEQ ID NO: 402901 - protein, 482 aa, unidentified
MKPKQKDKSKTATGRPTQPSWQEMNRKQRREMVRKIQSEELRLDVIHPDAAGIDIGNESHYVAVPPSRDSQPVRRFGCTTAELKVMAGWLHQCGIRTIAMQSTGVYWIAVYDILEEAGFEVYLVNARETKNLPGRKTDVQESQWLMKLHTYGLLRNSFRPPQEIRTMRTYWRQRNDSVQAGARHIQRIQKALTQMNIQLANVLSDVSGMTGQAIIKKILAGERDPHKLAELRDPRVKASEEQVERSLEGHWQEDLLFVLKQEQDGYEFCQGQMAECDRRLDQYLQQQKDRSQGASLPEEKRKERLKKKKGNKPRFDLRTGLFRMAGVDLTQIDCIDVMTATTILSEAGSDMSKWETEHHFVSWLRLCPDNRISGNKIIGKGRLPTSNRITNALKMAASTLRTSNTYLGAQFRRLRTKLGAPIAIKAMAAKLARLIYRMLRYGMKYVDQGAEFYEVQHRKLQIKHLKSKAAKLGFQIVQAPAA

SEQ ID NO: 402902 - protein, 364 aa, unidentified
MKHASEVRFQHVMGIDISDREAVFVKLNLARKVVAEGKVSMTREAIRKEFERQAVLKIIVETGTHSSWLVRLLRELGHEVVLADAWRLPLISKGSKKTDRSDAELLARLGLADDELLSPVHVRSEQTLRDRVALMARDGLVRTRTKLITMVRGLIKPFGERIPACSTEAFASTAIEALPAELKPVLHPTLEMIAQLTQQIRKQEQEIVKISRARYPAAKRLQQISGVGPITSLAFVLTIEDPSRFKKSRDVASYLGLTPRAFLSGDSNPQLGITKVGDGTTRRLLVNSAQYVLGHFGPDCDLKRFGEAIYARGGDNAKKRAVVAVARKLAVLMHRLWASCDKYDPDRRQKQIQTQSCSGMQEAV

SEQ ID NO: 402903 - protein, 343 aa, unidentified
MTSWTEHLVRRPLDTTTGEVLEQELVHEGDAVERFYRALPPPVTIGIETTGYTQWFHALMHQLGHTVVVGEAAKIRAMVVRKTKTDRRDARHLLDLLQHNRFPAVWIPDPDTRDRRALIAHRVRLVRMRTVVKNGLQAIALNQRLALHSALWTQRGLTQLKALALPPHTTRRRDDSLALLAWLTTRIDQLDAHIATVASADPRVQLLLTHPGVGPLTALTTVLVLGPLARFPDSKHVVSYVGLAPAVNASADKQRLGKITKQGNALLRWVLGQAAPLAARADDELRRRYFSILHRRGRPKAKVALARKLLVRLYIILRDQIDYEEFRRRGRAPRPHQLPVAVM

SEQ ID NO: 402904 - protein, 349 aa, unidentified
MRFYTKTHRHYCGIDLHARTMYVCILDADGKTLVHRNIRTDQTRFLALIEPYRHDLVVSVECIFTWYWIADLCAREQIAFVLGHALYMKAIHGGKAKNDKLDSHKIALLLKGGMLPQAYTYPPAMRATRDLLRRRLHLARQRAHLIAHIQNTVHQYNLPALGVRLGKPTERGGVAECFPDPVVRRMMQLDLDLIDYYDQQLAQLEWQLVKQAKGHDAQMYHLLSSVRGIGKILTLVLLYEIQDIQRFPTCGQFLSYARLVRCPKESAGKVVGKSNKKIGNSYLRWAFGEAAVLFLKGNPAAQHWLEKQASRHGKGKALAILSKKLGQTVYAMLTKNRCFDEAQFMANLQ

SEQ ID NO: 402905 - protein, 367 aa, unidentified
MSNATTFVGLDVHARSVKACAFVPETGETIRRSFGYEPCEIASWASSLPQHAKCVYESGVTGFRLCRELRSMGVDCVVGAVSKMRRPAADRGRKTDRRDAQFLAVQLALGVVTEVHVPDAECEGARDLTRALADARDDAVRAKQRLSKFLLRHGLVFSETTPSGQRRGNWTAAHWAWINAISFKEGADNEVLAYYIDAVRQKLEDKKRLVKDEASKARWRKRVDSIRCLKGIDTMSAADLVFEADEFSRFKNARSFGAWLGLTPSEHSSGESVRQGGITKAGNKHLRRVLVESAWHYLNATARSKDLVKGQIPDPAARRHAAKGVRRLVKRREGMLERGVHKNKANVATARELAAWVWAVGCIVEGA

SEQ ID NO: 402906 - protein, 312 aa, unidentified
MPAKLPPSYIGLDISKDQLDYCLSDTVEGHCAYTPEGCTELIKKLRPIKHARVICEASGGYEKLIVAELLHAGLEVCVVQPGRVRALAYAEGLMAKTDRIDARLLRRFGEKVEVRVAPPTDPALSTLRELLEHRRQLTMQLVEVNGRMALAGHTLRKFLEEQKGFLENQIQKVDKMIDEHIDQNPDLKNKSERLQQVKGVGRILAATVLAYVPELGRIEDNQLSALIGVAPYPKDSGKTIAPRHVRGGRAQVRHVLYMAAVCAARSNPILAAFYQHLRAKGKPAKVCLVAVMRKLACLMNKLIQNPNFALAQ

SEQ ID NO: 402907 - protein, 444 aa, unidentified
MQYQKVLQMLNCIPYLSVGLDVGADFTWMSIMLPNGTLTGKPFKIIHSDPQSRELAVTKIKEAQEMYSLKSRCFLESTGIYHIPLLCFLHDKGFDCSVINPIITKNSTNSNIRKLHNDKFDSKKAARVGLDASLKTSIVPDDEIIDLRNLVRDYYYYKDLQSAVVLKLNAELKVSFPAYLQVFSKITTLTSLKLLESYPLATDMLAAAKDEIVKTIRETAHFGEKYALSKYEAIFIAAEDAAVFGRALPSNALRIRLYIETYREYQKHLDSILEELHKAVDGLQGKPVHNQICLIQSLRGVGFLSAVVLIAEMGSFELFSSPKKLYAYFGLDPAVKQSGKFNGDRVHMSKRGSSLARRILHMAALNNLKVDRGTKMPVNPVIHSYYTDKCRSKKKNVAVGAVMHKICNIIFAMLRDNKPFEMITPQEHCKRYEVDHPSKPDNVA

SEQ ID NO: 402908 - protein, 367 aa, unidentified
MESYVGLDVHSKRSVFVIEAQDGRVVARGDMPTTSEGFRQLRRQHQLPAETPVALETGTVAFYAARELARVGLRPVVIDAHEVRVKAHRPRQKSDRRDAFELCEGLRRGQYRAVVHVPPAPIGALRETLSRRRHFVAVRVAEVNAVKRLLRAAGLGHLSKSLGTDAAWAKLLAAIATEPALRTYVAQHHALWRCAQEQIVALEETLAAQPATIAKVAARLQTVPGVGPLVSLTAVAVFSDVHRFPSAKHAASYAGLVPSTDQSGDRDTHGHITKRGSAALRTMLCEAAHHAQRPNHPLHPYFARRCAQRGYKMAVVAVAHRLCRILFALLRDGVEFDVAKLAVEEGPFRRTSVQRYRLKRPTASRRA

SEQ ID NO: 402909 - protein, 305 aa, unidentified
MEKKWFIGIDISKKTLDVVIYVPTKKHADETNYERFLNKEEGYKSLLCWLKKKNMAKKRLVISMENTGIYSFDLCLFLEAASIDYCSFNPLHLKRSLGLVRGKNDRVDAERIAYFAYLHRDELSYSKLSGSSIIRLRDFAAERKRFVKQQAEYKGFLTDRKDCEMTSTIERAAHMVKILDEEIASVEEEMLQIINSDPSILRNYELLNSIKGIGTINAMNTIIHTNNFQAFETARQYACYLGIAPFEHSSGTSIKGKTRVYPTGAKLLKADLSQAANSAIAEIARLTSLTVFYRPIICIGLRILW

SEQ ID NO: 402910 - protein, 364 aa, unidentified
MQCVITNTELSSHEGTRCQFNGGTGAIKLGIDVHQDFYVVVEQVEGSNPKPPQRFAKAAFLHWATKLKNGKGEVYAVYEACGFGFSLQRQLSSLGVQCHVVCPQKLDEQNRRVKTDGLDAKALVLKLDRFVQGNRSALALVRVPTEEEEQKRAIHRQREQLVKARMQLEAQGRSLMVNHGLEPVKSWWKGRTFAALQVPEWMKELLGNSQSLLLALQEKIGALTLQLQAAALAQQPRGLGKMTSVIIDREIGDWKRFNNRRQIASYTGLCPGEYSSGNTRLQSCVTKHGNPRLRAALVELAWRLVRFQPNYKPILKWKRLLGKGALATGAARKKAIVAVARQLAVDLWRIKTGRLRAEELGLIN

SEQ ID NO: 402911 - protein, 314 aa, unidentified
MPYLAMDISKEEIVFYADSLKQCFTVQNSSEALRTFLERTSFHPDDTIVGCEATGDYHRESCLFFLQLGYQVRMLNPILTKQVINATIRKKKTDESDAKIIAKLLADGHGEEVTVEQFHQRKRTMLRTEKKLVECYSDLKRVRKTLEEKGKTMDTADALDAVNHCIAVLEEESKRLTEKTIKEQNRQEEIIDSVPGCGAKLAAIISSEAGEITRFPSASQFKAYVGIDPKVTQSGSKEHTGHMTKRGNPILRYSLFLAANIARQHDPDMKAFYEKKRTEGKSYRHAVCAVSRKLCERIYAIVSKNEFYKVKEFS

SEQ ID NO: 402912 - protein, 333 aa, unidentified
MNNAGIDVSHKELVIVVSVKGKARKAKTFENTPSGHNAIIQLLSKLKGESKVCIEATGIYHFDLAVALSRAEGIEVMVINPKASHNFAKVLMKRSKTDAVDAEILAIYCERMPFEAWQRPADEYIALKAISRRIATLTKLKTQTKNQLHALKATAETPALVIEHIEELIEVLDKQIQVHRESALDLIHQHAELAEAYALITGIKGIAQASAIQMLGELMILPQDMSAKQWVAYAGLDPRQFESGSSVAKKSRISKAGNKFVRQALYMPALVATQHEPHVKGYYAHMINDNGLKKIQAICAVMRKLLHAIHGMLKAKKEFDGTRFYTFPVEASS

SEQ ID NO: 402913 - protein, 349 aa, unidentified
MVTIGVDSHKRTHTFVAVDDVGKKVAERTLPATTDGHLDALGWAQRWPDRRWAIEDCRHLTRRLESDLLAGGQAVVRVPPRLMAGERRGGRERGKSDPIDALAVARAALREPDLPVARLDGVARELRLLVDHREDLVRERTRMQARLRWHLHELYPELAVAPRSLRSHKVFDQLEEKLAGVAGTVARIARELVGTIRGLTVQVNALEKEIAGMVKPLVPTLLALPGCGALSAAKIVGESAGVSRFKSKAAYARWNGTAPIPVWSGSTNFRLNRGGNRQVNTALHRIAVTQIRHGGPGRSYTDARIAAGDDKTEAIRMLRRRLSDEVFRRLLLDESSTHPATTAPLQVAA

SEQ ID NO: 402914 - protein, 343 aa, unidentified
MQTVTTIGLDIAKSVFQVHGIDAAGQVVIRRQLKRRYVLAFFQKLPPCLIGIEACASSHHWSRELQALGHTVRLMPPAYVKPYVKRQKNDATDAEAICEAVTRANMRFVVTKTPEQQSGLVLHRARHLFIRQQTAVINAIRAHLAEFGIIAPVGRHGVEELLNVVADPNDKRVPEIARACLMAFGAQLRRLKEQILEFDRMIRAWHRSSETSRRLDDCPGVGPVLATALVATVADTKSFRSGRNFSAWIGLVPKQHSSGGKNRLGSISKQGDRYLRGLFVAGALAVIRYAKIHGTKHRPWLTALLARRPTEVAAIALANKIARMAWAMMAKGERYKEPIALAA

SEQ ID NO: 402915 - protein, 395 aa, unidentified
MFYVGIDIAKYKHEVSLVDATGKALVESVSFTNSKEGCEKLLCLLERFEVDKSDVVIGMEATGHYWLSVHTFFFEMGYDVKVINPIQSEAFRKMYIRQTKNDSKDSFIIAQIMRFGQFSATNLSEEGVVALRQLSRYRLALVDSCGDCKRRVIALLDQVFPEYGKFFSDTFGVTSKEVLLNYPTPEDMLTVSIDELAAVLNKASRGRFKEGKAEELQSLACNTFGISFAKDAFAFQIRQLIEQLIFLENQIADLEKEISLLLEQLGSFITTISGIGHTLGAIIVSEIGDIHRFDTSSKLVAFAGLDVKVNQSGEFSSTRSKISKRGSPYLRRAIWLAAGRAAFCDPILAEYYQSLRTRGKHHLTAVGAVARKLCNIIFVILKENRPYQPLPPKKL

SEQ ID NO: 402916 - protein, 354 aa, unidentified
MNTTQVFEKRKIAVAIGIDLAKDHCDVVAYNADNKICFTKANWAYPHLMEWLANAQPAVVLMESCKGCHVRARDIADLGHDTRLVKGADVKALRNVCQKNDIRDADYIARLLYVPGTKFVFVKNQRQQSLQFLQNEYKSIQELRIQVGNQIHAGLEEFGCPGPKSKKFIQSRMMAHLEKNAEPISDEVMLSFLRRREMWLNLFEQEEEAKKRMEEIAKTDDDAQRIMTVPGVGAQTAVGMLVHIGGDIGRFKNSGQFAASIGLVPKQNSTGGNTTLNGITKCGPKRLRANLVQCGQVILMHADKLKGNFGDWVRKLRDSGKKRGVIVCAIAAKIARIVYRLMKDKVDYTPVPSR

SEQ ID NO: 402917 - protein, 474 aa, unidentified
MKKHKKTKPKETKPLHEPVADAAGIDLGATEIWAAVPPERCQLSIRRFGAFTEDLKALVAWLVDCGIRSVAMEATGVYWIPLYQLLSDAKVEVCLVNARHVKNVPGRKSDVRDCQWLQYLHSVGLLQASFRPDQAVCDVRTIFRYRQSLLKQGAENLQHMQAALDQMNIKLHYVIDDLSGQTGQAIIEAILNGEREPLRLAKYRHKRIKASEETIAKSLQGDWRREHLFVLRVAWQNGKHVQEQIKKCDQELMEYTRQLEASTVLAKPIRPVRIVCLNAEPNLPKLKPALAVQPAKPRRKTSKNEPDGPWREELHRFFGVDLTLIPSIGIISGITFMTELGNDLSAFKNSHHFSSWLCLCPDNETSASKVLHRSTRRSQNRVRQALRMAASSLHHDKSYLGDKYRRLRAKLGAPTAITAMAHQLARIIWHLLTYRVPFDIGIFAALEKANQIRRLNRLQSNARQMGYQLTPIAA

SEQ ID NO: 402918 - protein, 403 aa, unidentified
MKRTCGLDVHKDTIFCATYDGKKHGSVIEYSTLTTSIRAIGAALLSEEVKEIAMESTGMYWIPVWNILEEMGFNLTLVNPYLIKQMPGRKSDVKDAQWIATLLHKGLLRSSLVPCKEIRELRTYSRRYVKLQQRKTSVLQDMERTLEVCSIRITSLVSNISGKSIMKVIHAIIEGENDPEVLAGYIHGRIVNKHNREKVVESLRGYITPQHRFQLELSLEEYELLCRQSDRCVEKMNTLCHEHYPKELELLQTIPGISLLAAMIVIAETGADMKAFENSGKFAGWTGLRPRNDESAGKFKSTATTKGNRFLRAILVQIAWAASRTKGSFFKEKFNRLCIRKNRKKALIAIARKMAVLIWNVLYDQEGYNPRKLIVYEPGKVQAKMNYHQKELERLEKLMQNYA

SEQ ID NO: 402919 - protein, 424 aa, unidentified
MKVTFQTCCGVDVHKSFLVATIIKTSSGIEPSYQKRRFSTFNNSILEFKKWLLENECLHVCMESTGKYWIPVFNLLEDEINVTIANPKWVKAVKGNKDDTKDSKWIGDLFRLGLVRGSYIPCKKIRILREFTRYRYKLVSCCSSEKNRYQNALTVCNVALDSVVSDVFGKSSTSIIEYLLEQSGTSIDHEVIASKLLKRLKAKEDAVIESIEGYQMTDSQKYRMHLIRAHMDYITAAINDVDSEIESLIASDPDYENAVELLCTIPGVKYDSAITIISEIGIDMSQFYSSKRLCCWAGLTPGSNESAGKKKSVRITRAGVYLKPALVQCAHAAVKSDKSSYYKKKYESLVKRRGKKRAIIAIARMILTAIFQMLTTGETWNPCDLYKIDMPEALLEKQKQKAIKQAQKLLIREGLLPPTEPIAS

SEQ ID NO: 402920 - protein, 535 aa, unidentified
MGTTFPTKLYGPPQRSSRTKGLRIPCRRAAQSNGSAPVMTTKSSIYSHSNPQLLKVFEAAGHPAKVMCVALDYAKAQHSVLICNGLGDLLKGAFAVDNAPTGAEALLHQVRRSAKQRKIRLEHVFFGGEDYPSYAQNFLRRLRQEKFLVVRVNAWEAKQQRSNFQASSDSLDLLGIARCCLNRRGQTVRDWPVAYTNLRIATRDRDQLVRNRTAVSNRIHSYVDRLFPSFLKVEKSGLAPFSAASLDLMVERFSPAQLRRRPRQGLADWLGRRNVEEPKKVADQLKQLAKAVLPPAPEQTVMLQRSLTQWVELYRGLEKSLTLLDREQAYWLARTPGALLTSIGGFGITLAAGWTAELGPPTQWQAVRRLCSYAGVVPRSKQTGGPDQEPVVGPVQQRCNKRLKNVVLQAVGKVRQYGPEDLRQAAQRLEAQGSHVEFALAKRLVRLGKYLATTGTLYRPKALLDPDTPKLTLATHYQHLWDKLLQKWKAKADLRDVFAPEHPLGQWRNMARELYALELRLPQQGVAHCPRALTP

SEQ ID NO: 402921 - protein, 350 aa, unidentified
MTRSLKQYVGLDVSLDVTSIAVVDENDKVVWRGRVVSTPDAIAEVVQKHAKRADRVGLEAGQLSAWLYHGLRAKGLPVICIDARHAKAALSLKINKTDANDALGLAQIMRVGWYREVAVKGHACQAVRALLVARAQIVSQITTLKNCVRGILKTFGYVLPKKLRAPYITSVREIVEGNITLEPILMPMLKTIAATMEQLQVYDRAVHRIAREDETARLLTTAPGVGAIVGLAYITGVETPARFSRSSSVGAYFGMTPRRYQSGEVDLAGRISKCGDGMVRGLMFEAAKVLLSRSAKPSDLQAWGRALMKRIGRKKATMAVARKLSVILHRMWATGEPFRWTAVPAHAAAA

SEQ ID NO: 402922 - protein, 353 aa, unidentified
MRTYYVGMDVHRASIVIVVLNGAGKVVMQSVIETGAERVRGFLKQLRGKVYVTFEEGTQANWLHDVVRSLVTEVVVCDPRHNKLLQSGNKNDRVDAQKLAELLRNGSLRAVYHGDNGVRTLKELVRTYDCLVSDTTRVMNRLKAIYRGRAIACGGHDIYRQDRRGQWLEKLREPGATQRAGYLYRQLAALKPLRHEAKREMVKEARRQAAYGWLLSVPKLGSVSVAQLIAVVGTPYRFRSKRQFWTYVGLAVVTCTSADHEIVNGVMRRSTRPIATRGLNRNHNHLLKRVFKNAATSACHSGPFKAAYDTRVAQGMAPSLARLTIARQLAATTLAIWKRGERFSPERMKQQAA

SEQ ID NO: 402923 - protein, 370 aa, unidentified
MNKKLLSRPLGRCIGLDVHLDFIEIAICEEGQVYSAGRVPCTPEGIGTLIDSLLPSDRVALEVTGSSREIARLLEPHVKKVIVVSPGDTGISQARAKTDRLDARTLAKLLWTGELEAVWIPPDWTCRMRRRLARRDQLVRARSRVKNELHAVLIRCLKGRPPVSDLFGVRGRDWLRGLELPEVEEETVNAGLRHIEFLDSEIEQVERLIAKDALRSPQIKRLMTVPGVNVICAAIFLAAVGDIHRFKGSRPVVAYLGLDPRVYQSGSAAARGGRISKQGSPRARWALVEAARSVAHQPGPMHALYERIRARKGHNAAVVAVARKLAVLFWCMLTREQDYAHQQPSLTAQKLRRLEVKAGDPTRPGKPTDV

SEQ ID NO: 402924 - protein, 398 aa, unidentified
MLAGIDTHKDTLAVAVIDAAGRPLVITDLANTEAGFDELEALLAEHSVDRVGIEGSGSYGRGAAVRLVLAGDIDVVEVPPLLTSRERSSRPGQGKTDPVDAVAIARITARETCLPPVRLAVGQAADLRALVDYRSQLVHERTGLANRTHAELHGLLPGYHATVPRLTAPTFIAAAQQLLRDDTRVRAQLTRRRLGRLAQLTVEIKELTALVTAALDTVDTGLTDLYGVGPVGAATILGEVVDIRRYRSRHAFAPANGTAPIPASSGRTSRHRLNRAGNRTLNRVLYTMAITQIRADTEGRAYYQRKRAEGKTGREALRCLKRRLSDLIYKTMHADLAGRSQPTAAASVAIGTVDAATAQDTTNGQGQLRDKASSPNPARRSSQKTAPTADRNATPDQR

SEQ ID NO: 402925 - protein, 356 aa, unidentified
MIYFKNIKNYVKNKKVFCGIDIHNYHWNLCYICDGEVMEKIRIIGDWKKLKSHTEQLYGSARSVHFVYEAGFSGFYLYRYLRACGYRCTITPPNRVLRSGNKVKTDKRDATKLAQFLSIGLLKKVFVPPVSAESDRQLLRVREGYQKKLTRVKNQIKSHLHLYGVKWPSEEGNKWTKKYIMWLKGLEFEQKNLRFILDHYIAEYQFLRDQIATLTRQIRKLSRNDPYQVHFKRLVACKGIGLITAMTFLLELHEMTRFASAEQFCSYLGLTPSQYSSGEHVRLGHITREGNSHIRRVLVESAWTVIRYDPFLKEKYDRIRAKGTNGKKAIVAVARSLAVRLRRCLLDEVAYEMGIC

SEQ ID NO: 402926 - protein, 338 aa, unidentified
MAILYVGIDLAKNVFALHGVDEAGKPALVRPSVPRAKLLELVAALPPCVIGMEACSGAHHWARLFLQFGHTVHLMAPKFVIPYRLSGRRGKNDAADAAAICEAVQRPNMRFVPIKVLAQQAQLSVHRVRQGFIEQRTGTINRIRGLLSEFGIVLPLKAATVRREATACLEELPGWANITIGDLLSELHHLDERIAAYDRHIAQIAREDARARQLMRLSGIGETTATALLAMVGNGHEFKCGRQFAAWLGLVPGQYSSGGKSRLGHITKAGDPYLRSLLILGARAVLNSAKGKTDSVSLWATTLAERRGYWKAIVGIAAKNARMCWAMLSRGEQFAMPA

SEQ ID NO: 402927 - protein, 308 aa, unidentified
MHYLYYVGLDVSKETFDASLVAFEDANEMAHRKFANSRKGICSCLHWVEKRHGILLDDVIFCAEDMGSYISEMAVCASDRTLTFNFSLISPLVIKYSMGIARGKTDRVDARRIAEYAITHYRKIALYLPAEKELCQLRTWLILRAHLAKQRVAKLVLLEKLDYKEKFADVSIQRSMLQEEIAYAETHMKTIEREMKELIAADSNICRNYKLLTSIKGVGPITAIVMLCSTLNFTKITDHRKFACYCGLAPFEHSSGTSVRGGCHTSSMANRDIKVQLNRSALIAIRCDPQLKAFTNAKWLKVNINSAS

SEQ ID NO: 402928 - protein, 352 aa, unidentified
MEIIALDAHKHYSQVCVQKKDGQLLCEKRINHSQGAIRQFLSGWTAGTNVAVETVGNWYWIVDEIEQAGMQPQLVHAHKAKLMLGSINKTDKLDARGLNRLQRAGTLPTVWIPPSDIRDSRELPRTRMVFANLRTRLKNRIHSVFDKYGLQTDFTGISDLFGKRGREQAGLTMKQLPPETRYTLRCLFRELDGVVAQIQRIEKRMKKVFSETVSVKQLMTLPGIGFILAVVIANEIGDITRFATPQRLASYAGTVPRVHSSGGHTRYGKLRSDVNHYLKWAYSEAGNSTAVNHKRLPDRHTSRLYRRIRERKGHAKAIGAVGRHLAEASYWVLTRNENYKEPEVKSVSPTAI

SEQ ID NO: 402929 - protein, 358 aa, unidentified
MSKRIVAQDETVVVGADVHMNKHVVTVKVAEEVKGTSHLPPTPEAWRSFIKRFPGCRVSVVYESGPQGYNLHDWLTQMKMDNGTQVRVYIAPPAQVPKAPGKQVKTDKRDSLSLIQAFEMKSFRPVVVPVRAAREERELVRTRDQVKNLLKQIKNQIHGMVKFHSVQYPESGAWSRAWLGQLEMNIKARDTTGCLYHAFKVKLDLYRTMLESIKDLEKKIFETTRSGKCAETAQKIERLTGIGWSSAAVIATEVADFTAFDNSAAFASYIGVVPRENSSGETTRRGHITKAGNRRLRHIFVECAWAWVRFNEDARRQYNRIKMGKPERARIAITAMARKLAVKTYHTVVSGPPLEKAA

SEQ ID NO: 402930 - protein, 345 aa, unidentified
MTVYCGVDFHARQQTIAYCDTQDGEIKFIQLKHDDRESLRRFYTQFQAPVIVGLEAGGYSEWFERFLEDLKIEVRVGNPTEIRRRARSRQKNDWRDAELLLDLLMKDEFPRVFRQSAESRAVLAQLRHRHKLVQLRTQVTNSLHALAIREGLSLQAALLTKAGRDKLQALPLTTAKAQQRDEWLDLIDQLSGNIKRVEQDLSKLAAQDEQVKRVRTHPGIGLLTGLALVHTLAPVTRFSNSRKVTAYVGLEPREFTSDTKQRWGGISKAGSPLLRFLLVEAAQQAARVDPELKNTYRHLSVRRGRPKAKVAVARKLLVRAYILLRDKIDYATYLRRTVAVRSARD

SEQ ID NO: 402931 - protein, 372 aa, unidentified
MNYNTVYVGMDVHKESFSLCAYTIEAEKASHYQRTEADYKKVLNYLEFLRTIYGDDANFICGYEAGCFGYTLYHQLTANNVKCIILAPTTMLEQRSKKRIKTDRRDAEIIAKCLAQHNYSPVHIPTAQDEETKEFLRMRDDHKLALKKVKQQILAFCLRHNYRYDGKSHWTAAHLKWLKALTPEALYKEILDEYLLTYQTLSDKIERLDKRIEELATQDEYKEAVKKLCCFIGVKTHTALSVLVEVGDFKRFASAQHFASYLGLVPGEDSSGDDQNRLGITKAGNRHVRLLLTEASQCYARGQVGFKSKELKSRQSGNTPAVIAYADKANERLRRRYYKMVLNKYKKHNVAKTAIARELACFMWGMMTDNIA

SEQ ID NO: 402932 - protein, 370 aa, unidentified
MSVRRILAKTIDTDLEYEAIGIDLAKNCVSTALLTTDGEVVCIDRLDYSELEKSAQALSPTTFAMEPCTEMNYLVQKLEAWGHRCLVIGGKNVQNYVENHYSGQKTDLNDAQALAFLAQDTQLRTIKAKDMEQQKYASLTTLREQYIKQYRQTIVSLKGICQAWGLNISKGISGKAQLKDLIENHAAFPEELRESLVDMVTHAQTTQKVLNKITKTLEVLAKNDKVCQLIQTIPGLGTICSCRLRATIGDIKRFKNPKDFPAYYGLVPRSIATGHNEKKGKITHRGDRTMRSLMVQGAGCVIRLATCGKLKSKQLTKWILKKQKEKMPWGKLVCAVAAKLLRIVRAILISSKPYNPKIAGVAKCSLSKGS

SEQ ID NO: 402933 - protein, 324 aa, unidentified
MIDTVLGIDVSKNTLDTSFLVGTKPRSKSFANSPAGWRNLIAWLAEHEIRQVHACLEATGRYSLGIALALHEAGHVVSVVNPAQIRDFTRSKLGRNKTDQVDAANIREYAELFKPRPWTPPSSAMRRLCELQTIRDGAVAGLTEWKNRSASSMADDMARSLAERTIQHFTSQLAAVNQAIAEIIDNDPDLCAKRDLLISISGVGETLAGIVLAELPEPDVLGSSAAVAAYAGLNPQQYRSGTSINRPARISKIGNAVLRAALYMPALSAMRYNPVVAALVNRLKEQGRLKGKQIVIAAMRKLLVLCFGVLKTGREFDPAIAMGK

SEQ ID NO: 402934 - protein, 371 aa, unidentified
MDESIKFFVGLDAHKDSIAVAVCEAGREPSRFVGTLGPDVQGVLKTLRKYGPARQVSVVYEAGPTGYGLHRELTRRGYRCEIIAPSLIPRRAGERIKTDRRDCARLAELSRAGELKAIWVPDEAHEAMRNLWRAREDAVNLRLKVRQQLKAFLLRQDRRYAGKTSWTKMHQRWIADQHFAHPADQIALTEYQLAVQATEERVQRLTAALQQIVQGWRFEPVVAALRALRGIDTVSAIGLVCEVGDISRFGTARQLMGYLGLVPSEHSSGNSVRRGSITKTGNAHARRLLTEAAWNYRFPARISNELRDRSKALSPGIRTHAWKAQVRLCSRFAQLSSRGVQANKVCVAVARELAGFVWAIAQQAAPTPEAR

SEQ ID NO: 402935 - protein, 405 aa, unidentified
MHSPITIFAGIDWATDGHAICVIDGSGTILERYEIEHSEAGLRDLVHRLRVDRVSGIAIERPDGPVVDALLAAGLEVVVIASRHVKGLRTRYGLAGNKDDHADAYILADVLRTDGHRLRPLVPDAPATVALRTSVRARKDLVYAKVRLVAQLRAHLALVFPGAVGLFDRLDSPIAEAFLTRFPSAERAAWLGPRRFESWLARAGYPGHRSGAELHARLIAAPAGVSGEGAGSLAAVTLGYVRAITALREQIAELETRIAEQLAAHPDGAIFTSLPRSGSVRAATLLAEIGDCRERFPSPEALICLAGAAPSTRQSGQHRAVTFRYACDKKLRDALTDFAADSRFGNDWAADIYGRARARGKRHPHAVRILARAWVYVIWRCWQDRVPYDPERHQALQRLTLAKAA

SEQ ID NO: 402936 - protein, 347 aa, unidentified
MRFYNQQHPFYCGIDLHARTMYVCILDHNGEIVVHRNMKTTPEAFLQAIAPYRQGIVVAVECMFTWYWLADLCADEGIPFVLGHALYMKAIHGGKAKNDKIDSQKIAALLRGGMLPQAYVYPAHMRATRDLLRRRMHLAHKRAELLAHVQNTNSQYNLPAIGKKIAYKANRDGVADRFADPAVQKSIEVDLALITYYDELLGDVERTIVNTAKHHDANTLYLLQTVPGVGKILSLVLLYEIHDIHRFPRVQDFVSYCRLVKCAKESAGKRLGTSGAKIGNAHLKWAFSEAAVLFLRDHPAAQKYLARLEKKHDKGKALTVLAHKLARAVYHMLQRQVAFDREKFFQR

SEQ ID NO: 402937 - protein, 385 aa, unidentified
MTYLVCPDTPAVSEYATVHIAWELSKADWKLGVILPGAKTMSRYAIKGGELAAAAARLAAIRAKAGKSSLPVRILSCYEAGFEGHWLHRWLEGQGVVSHEIDPSSIEVNRRARRAKTDRIDLERIMRAFLAHLRGEPKACAIVHVPSPAEEDDKRLSRERERLLKERTAHTNRIKALLHAHGVRDVQPLARDFLTRLKGMRTGDGRPPPPRLAAEIAREHERLVLADKQIAAIEADSKAECRNAAPKSTGAKIVQLTQLKAVGVTGAQVLVNEVFYRRFANRRQVGACFGLTGTPYSSGEDERDQGISKAGNRRARAMAVELAWRWVHWQPDSELTRWFKARVGDAKGRVRRIAIVAVARKLMVALWRYLETGVVPDGAVLHPSF

SEQ ID NO: 402938 - protein, 420 aa, unidentified
MASWALFAGIDWSENLNDLAVVDRTGQLVASARFEATPAGIRDMLKVISGVRASKGFSRKSVPVAIEASRGLLVAALQQHGQPVVPIHPATVARYRGRINPGNRKKSDAGDCLLLANILRTDGHLHRRLHRSSDHANAIGALTRAQLRAVRTRQYHYLQMRAQLRQVHPAAISAWATMEHRLLRPEAREVIALAPTSSRAALLTRRQIRAALERGGRSRLLDSETDRLHTVFREPVLRNPPALEDALGQGVLSTLRFVNEASKSVEEMTSTTTDLFLQHPQSGIYLSFPGVGALTGARLLGELGDDPARFPTGKGMAAYAGARPFTWASGSSRTVLHRRISANKFLAGYGHFWAFTTLTKSAECRAYYDRRREAGDRHNAALRRLFAKLMSSLHYCLRHDVEFDAAAAWPRAPEAEAAAA

SEQ ID NO: 402939 - protein, 333 aa, unidentified
MNTINPQDRVANSGRPNCGIDMSKQHADACWLGNEQRFANDREGRRELIARLLADQVDLVVIEATGGYEREMVCEMQQAGLTVARLNPRQARDFAKSLGYLDKTDRIDARCLRDFADVLARHKDRHKYITAPADAAQQELAALMTRRRQLVDMRVQEMNRLDLASKRARRSILSVIRTLDKQIEQIDREVQDHIDDHFDGQRKLLDSFKGVGPVMILTLLAALPELGRLNRRAIAKLVGIAPLADDSGPRKGKRRIMGGRSEVRNVAYMATIAAIRHNPVLRNHYQRLLTAGKAKKVAIVACMRKMLTILNAMMRDGTSWDLAMHAAQTAACA

SEQ ID NO: 402940 - protein, 387 aa, unidentified
MPQPNDLSRSLVALDQNSTIIAVVELSQSSWLVAGTLPGIERQPRKKLEPSPERLLGLLHRWRDEAVRAGRTITRIALAFEAGRDGFWLARWLAARGIEAHVIHASSLAVSREHRRAKTDRLDTELLKRGFLGWLRGERGHCTMARVPTIAEEDAKRPNRERDGLVGERTRIVNRIKSTLARLGIRNFKPTLRKAAERLATVHTPEGMPLPPNTLAELQRDMARLGFVVSQIREIEAARQKRLEQQHETGPHAMVRRLARIVGIGVETADMLVHEVLSRPMRDRRAVARYAGLTGSPDESGARRREQGLSRAGNARVRRGMIQLAWRFLTFQKESALALWYRARTADSRIGTRKTMIVALARKLIIALWRFVTTDELLDGVVLRPAS

SEQ ID NO: 402941 - protein, 386 aa, unidentified
MRGKTFIPRDYDVFAGLDVDKRSISVTFSNHQGFISSLHMPYSAEHLIKHVRKHFGDQKVAFAYEAGPTGYGLYDGIVAQGYHCLIAAPAMIPRAPGQRVKTNRLDGVSLSENLRGGQLKSIHVPTPIYRELRHLVQLRDTEMSEVVATQQRIKSLLLFEGLDFPTAPAGSQWSLKVKRQLQKLACSKGVRFKLDELLDSLEFLEKKVVKSTREIHRFCNDDPELLQCIQYMMSVSGIGWIVASQLLARIGNWREIQNVRQLAGFLGLVPTEHSTGERIRRGSITHSGDGRLRSKLIQASWSAIRQDGELRDFYRSVCRTHARHLGPRVAIVAVARKLSARIAVVLMQQRPYVVRKKVDSAPLTQEETVPQGTTRRRGEPGETDNS

SEQ ID NO: 402942 - protein, 356 aa, unidentified
MKYVGIDVHKKMCQVAVLGEDGKLLDEIRFANDPDGIEEFADKLTIFHDEVRAVVESTGNLWIQIHDRLEEHGFDVALSNPSKTRLIAEAKVKTDKVDARTLAGLLRSDMLPTCYVPGEELRSRRELLRHCLNLVKNRTEVKNRIHGLLDKHGLRMPGTTAFSNGNIAWLRERSLGFMDDAILRSDLAILETVDEQVERIEEKIATLAAERPARLLMTMTGVGYFNAMLILSEVGDIGRFHSDKAFASWMGLAPSVHQSGEKIRIGSTSPGNKRLRWALVECAQAAVRFDPRFRGLYERVSRRRGAGCATVAVAHEMARIMYFMLVRGEPYRDMNRGLTERKLKSMSKKAYDGLRN

SEQ ID NO: 402943 - protein, 423 aa, unidentified
MDVMHERVAGLDVHKETIVACVRIMAGGKVTRECRTFDTTTAGLAALLSWLTESGCTQVAMEATGVYWKPVWNILSDGKFELLVANARHIKNVPGRKTDMNDAMWTADLVSFGLIKASFVPEQEMQELRSLLRARKQLTREQTSHVQRIQKTLEEANIKLDSVISDIVGFSGRRMIEAMINGVRDPWKLAELAHHRIKATRKQLYDALHGRLTDHHRFMLRLHLRQYDALEDAIKEIDQQVDAAIARMDTEVAADQATFRTLTNLLCTIPGVGELAAKTILAEIGTDMGRFPTAGHLLSWAGMCPGQNESAGKRKSSRLRKGSPWLKTLMVQCGWAASRKKDSYYKAQFNRLRGRHGAKKAICAVAASMLTAIYHMLKNGTEHEDLGADHFDRRSTEIKARRLAAQIKKLGFEVEIRPVPQAA

SEQ ID NO: 402944 - protein, 376 aa, unidentified
MHTSPFEFHHTQPELDAFIKYILNSKQSATILMENTGHYHYPVLKAFQEAGLPVCMVNAYQIKKFGDTDLRKAKTDKKDAVRIARYALEKSYSLVPYTSMEQKYEDLRFLARQYNQRMLTLKTNKVFLLNLLDETMPGITNILPLTTRTPETSLSVLFINRFKSYDRIKKMGKSRFLDAFEKIARKSRNRQTKTYGLAIYEAALRNITTRGENEYTLAAQDQCLELVCESQKAADSIILKMKTLAETLPEYAVLRSMTGVGNRLGPLILAEIGDIRRFHSGKALNAYAGNDAPPYQSGTFESHNRHISKRGNAALRKYCFEVMQALKLTRPQNDPVYLFLLKKEQEGKPYNVAKMAGVNKFLRIYYARAMETLKQQ

SEQ ID NO: 402945 - protein, 359 aa, unidentified
MNKNNMFFVGLDLGDKFSYITIVDQDGEMIEESRLPTSMASFQRKFSTLQPCRIAMEVGAHSRWASHLLKDLGHDVLVANARKLRAIYHNPRKGDRVDAETLARLARLDPKLLSPIHHRSPQAQADLAVLRSRDAIVRCRTLLINHARDIVKASGSRLPSCSADSFAQKVAPHIPGHLRPALASILDTIASLTQQIKSYDQKVEELCSERYPETKLLRRISGVGPLTSLGYILTLENPHRFRRSREVGPALGLVPRRDQSGDHDPQLRITKTGDVYLRRLLVGSAQYILGPFGPDCDLRRWGLKLAERGGKNAKKRAVVAVARKLAVLLHHLWKIGEIYDPFYLARKHDRAPEVVPAAA

SEQ ID NO: 402946 - protein, 342 aa, unidentified
MTALYYIGLDLHKKIIVYCIKVADGTVIGRGTLAATRPALLAWTESLPGPWVAAMEATMFTGWVYDFLKPYAKEIKVAHPEMLKAITAAKKKNDRADAEKICDLLRVDLLPICYMASEQIRELRRVLRYRNHVVQMSTAVKNRMSGLLMEVGAQYSKKRLHGRKYFNDLLDSVEDVPTSVKELLKFSRSGLEIFTEVQKKILNALKENKLIRDRVERLMTIPGVGEVTALTWVLEIGDPNRFSIAQAISYCGLCSAQKESAGKETRGPISKKRNKHLQSVLIEAAKLAPNWNPQLAKVHERELTKGHRNRATLAVARKLVTYLLTIDKSEKNFVVDAKAEAA

SEQ ID NO: 402947 - protein, 347 aa, unidentified
MKVLIGVDPHKASVAVAAVDEAAGELVERASFPQNRAGLRALERWAKRFSERRWAVENAGGLGRHLAVRLAAAGESVVDVPPKLSARVRVLSTGNARKNDGLDALATALAASRNDRLAAVDHEAHSETLRLLSERREDLVAERTRALNRLHALLRDLVPGGVARTLSADRAARILRGIRARGGASARLRRRLASEILRDVRTLDRKIADLNGRIEAEIEASGTTLTEIFGIGPILAATIIGTVGDVARFPTKAHFASYSGTAPLEASSGEVVRHRLSLAGNRKLNYALHMVAVCQARSDARGGAYYRKKIAEGKSRKEALRCLKRRISDAVFKSLTADSRAPSRSAA

SEQ ID NO: 402948 - protein, 318 aa, unidentified
MSDPVFVGVDVSKDSLDVCLLQGFVREERRFARDASGIRQVFDLAHQRQAQLIVLEASGGLERPLLAASAEGKLPLAVINPRQARDFAKAAGLLAKTDTIDAYALALFAQRMQPQTREIRPVNQVQLIDLTARRNQLVAMRTAEVNRLQQAANKNVTRSIKTLIKAIDKQLNDIDKQICQLIEADEQLSRKAQILDSAPGIGKTTAHMLVAHLPELGKLNRQQIGALSGLAPINHDSGKMRGKRHIRGGRGAVRAGLYMAMLAAIRFNPTIRAFYQRLVGTGKPKMVALTAAMRKLLVILNTMIRTGKNWDENLITHG

SEQ ID NO: 402949 - protein, 375 aa, unidentified
MTMMHHREIHYIGLDVHKATISAAIAEESGAPTSYGRIPNDPAAIRTLMTRLGGPQVELRVAYEAGPTGYALHRQLTRMDINCIVVAPSLIPKQPGNKVKTDRRDALKLARLLRSGDLTPVWVPDEAHEVLRSLVRARADAKADQLRAKHRLSKFLLRQGCWPPSGVRNWSQRYFTWLHQLEFEHLPDRVVFADYLAEVTAAGERINRLEAALHQCAQSSSQVALIRALQAFRGIGFLSAVTLVAEAGDLRRFRTAPQFMAYAGIVPSESSSGGKQQRGSITKTGNSLLRHVLGEAAHHARHAPRVTSKVKQRQTDLPADIVELAWRAQVRLHTRYRHLSGRIGALKALTAIARELAGFVWAAGQVFQEEVPAAA

SEQ ID NO: 402950 - protein, 435 aa, unidentified
MKNSDPHMSPSSNESWAACVGLDWADEKHAVVLQAAGSQIKEHATLEHTPEALSDWVAQLHQRFAGGKIAVILEQSRGSLLYALLPHAHLVLYPINPQMAAKFRKAFYPSGAKTDPLDAELLLQILLQHRDRLKAWQPDEPITRQLQLLVEARRRFVADRVRLSNRLENALKSYFPQALQLAGESLTTPMACAFLQKWPTLEAVQKAGAQRLRKFYYGQHSRAEELIQQRLLLLAQAKPLTTDAAVVSAQSLLVKSVAHELAALPAILAEYDQQIATLFAAHADCGIWDSFPGAGAALAPRLAAAWGTQRDRFESSDAMAAYSGIAPVTQASGRSVWIHMRWACPKFLRQTFHELARTSLCFCVWAQCYYQMQLQRGKGRHAAFRALAFKWQRIMWRCWRDRVPYDDAKYLASLKRDNNELYTRIIAFQSAQVGA

SEQ ID NO: 402951 - protein, 363 aa, unidentified
MTKIAKKITEREKVNFSGKNIYIGLDVHKKNWYASVYVEQQFVKTFHQESTGTILLKFLQTNYPNGQYKACYEAGFCGFSVYRELTSLGIECVIANPADIPQTNKGQLSKTDASDSRRIGEAFSKQFIKPIYIPDKVTESDRSLIRYRKKTQIALKAKKQNIKSCLNTLGIKIPIQYDKPYWTNNFINWLKGLDINETSSKITIEFIIEDILLLRKRLLSINKKIRDLSKTSIYYDNYLILTSAPGVGLITAMTLLTEVGNIKRFDNFNKFNSFIGLCPMEFSSGEKQKKGPMTTRSNKTIRSLIIEASWIAIRQDPALTLKYQELIKTKTNKRAIVIIARKLLSRIYTIWKTGQMYERAIVK

SEQ ID NO: 402952 - protein, 372 aa, unidentified
MSQSSTLYVGMDVHKESIAIAYVAQDHGAEVVSLGTIGTRQCDIDKLIRQLQSKSKQLVFVYEAGPCGYWLYRYLLKKGYVCWVVAPSLIPKKAGDRVKTDRRDAMQLARLMRSGDLTPVYVPAIDDEAIRDLSRAREDTLRDLKAAKLRLKAFLLRHDIRYTGRANWSPAHLRWLSEVVCPTPAQQIVFQEYVQTVTEQTERLGRLELELHEQVQTWRLSPVVEALQALRGVQFTVAVTMVAELGDLTRFANPRQLMNYLGLTPSEYSSGARRQQGSITKTGNSHARRALVEGAWAYRYPAKVSRHLQLRLEKLPTAIQAISWKAQVRLCKRYRHLMAKGKNANQVVVAIARELSAFMWAIAKHVAVTPKA

SEQ ID NO: 402953 - protein, 379 aa, unidentified
MNKRIIFIGLDVHKETISVAIAEHQKEPRSLGKITNKPEAIYKVMRKLGPFKRLKVCYEAGPCGYVIYRQLSKLGIECVVVAPSMIPKKPGVRVKTDKKDATMLARLLRSNDLAPIWVPDERHEALRDLSRAVEAAQGDLVRARHRVRKLLLRQGIRKPEGMSSWTYRHQRWLHSVKLPRANQQVVLREMMLTMEQAQERRQRLEAELEHSVEFSPLADLIRAWQCLRGIKVISATRLAAELGDIRRFTNPSQLMGYVGLVPSERSSGSRERRGSVTKTGNAHVRHVMVQAAWHSRHPPSLSGELRRRQRGQPERVKAIAWKAQDRLHRRFRRLVGRGKPRQKAVVAVAREMLGFVWAIAQEIPVQEYEQQPDSFSQAA

SEQ ID NO: 402954 - protein, 344 aa, unidentified
MDHFAGLDVSVKETSICIVDDTGKIVREVKAASEPQALLKVLGNPTYRFKRIGLEAGPLSQWLFSGLAEAGLPVVCVETRHMQAVLKAQINKTDRNDARGIAQMMRAGLYRPVHVKTLRSQKLRMLLTHRKLLQSKAIAIENDLRGTLRNFGLKVGMVGKMRFEARIKELVESLPDLAELVEPLLIVRRTLRGQIVILHRRLLAIVRDDEVCQRLMTTPGVGPVVALTYRATVDVPARFRKSKAVGAVFGLTCARYQSGEIDWSGRISRCGDEMMRVMLYEAAQSMMRSKKWSWLKAWAMQIARRRGMKKAIVALARRLAVIMHRIWVDGTEFRWTREQAAAAA

SEQ ID NO: 402955 - protein, 335 aa, unidentified
MDRQYVGIDFHRRRSVIVRKSGAGDKLGSVRVANDPLAIASAVAEAGPNPEVVIEATYGWYWIVDWLQVQGATVHLANPSGLNWGARRVKNDERDASDLVDMLRLGRLPEAWIAPPATRELRELVRYRAKLVALRSGLKAQVHAVLAKEGVLPSVRDMFGGSGNAQLDALELGDAYTTRVESLRDLIERYDREVGMLERTIYQRVRDDRGYRAIQRIHGIGPTMAAILVAEIGDVSRFRSAEALCSWAGLTPKHRESDTKVHRGAVTKQGSRLVRWAVIEGTVRYHGGGKLAADWHRIAERRGKHKATVAVARKVLTLVYYGLRDGEIRCLAKAS

SEQ ID NO: 402956 - protein, 356 aa, unidentified
MSHEVKYIGMDVHKEAIVIAVLNGSGKLVMETIVETKASNILEFLHGLRGELHVTWEEGTWAAWLYDVLQPQVQEVVVCNPRRNALLKEGSKSDKVDARKLAELLRTGMLRPVYHGENGLRTLRELARSYQTIGKDLTRVMNRLKALYRGWGIPCAGTQVYAPRYREEWLSKIAQAGVRRRAELLYQQLEGLQALRRNLRPEFLAESRKHKAAKLLRQIPCIGPIRAARLIALMQTPHRFRSKRQLWTYSGLGIETHDSAQFRFVRGQLQHSKKPQQIRGLNRNHNHEMKEIFKSAATRASCGMGPFHDFYAGLLAKGMKPEMARLTLARKIAAITLTLWKKEERFDAGQLKTQAA

SEQ ID NO: 402957 - protein, 408 aa, unidentified
MTVVGIDVSKGKSMVAAMKPGGELVAAPYEVRHSDIELSHLALDVLCMEPDTRVVMEATGRYHEPVAALLHSEGIFVSILNPLLIKQSGAGSLRKVKSDPKDALKIAKYGLDNWSTLREYTPMEAIRQQLKLCARQCDLYNKNIVMLTNILISLSDKTFPGVNELFSSPEKADGHLKWVDFYRSFWHCDCINRMSPDAFEERYKKWCKRKGYHFSTDAADALYAASCGPYTTLPRDNNAKLLVTVAADQLIALRENQSKLEAEMLNLCKQLPEYETVMAMYGVGKSTGPHLMAELGDVRRFPHRSSIVAFAGVDPGVVGSGKMQLSSVTTSKRGSPQLRKALFQVVSTYVKCKPENEAVYQFYAKKRDEGKPFFVCTTAAANKFLRIYYARVKECLNAAESATQVEEG

SEQ ID NO: 402958 - protein, 319 aa, unidentified
MIRTICGVDVASSSLEARIGPLGPSARFANNPTGITALAQFCRDHQVDLVAMEATGGYEQQAVAHLSDQELAIAVLNPRSVRQFAQSMGRLEKTDAIDAGMIAWYAEVKQSKPITLAPHTQRHLRALVTRLRQLTELRTAQLNQQRLITDPLVQDSFAQLLGLLAEQIAMLAQSIAALIEQDPLWRELNLAMRSIKGVADRTVARLMADLPELGTLSNKTISKLAGVAPIAADSGKHQGKRAVRGGRSSVREILFIVASVVGRYEPDFIAFQQRLRASGKPPKVVRIALAHKLLVRLNAKAREVRTQIQAASPKRTVTP

SEQ ID NO: 402959 - protein, 422 aa, unidentified
MNTPSNRPFTAFIGIDWADAKHDICLQAAGDERRECSRISHKVDEIEDWAQSLYRRFGGPIAVALELSKGPVVYALQKYDFFVLFPVNPSTLAKYREAFTPSRAKDDPSDAELALDLLLRHPDRFKPLAPQSVAMRALATLVEQRRGLVNDRVRITNRLRNALKQYYPQALEWFDRIDTPLFCDFIERWPTLVQIKRARRTTLETFFHEHNMRFAHVLQARLKSIKAASPLTLDEAVITPHRLQALVLVGLLRATLAAIRRFDEEIAELAPKHPDYGLFSALPGAGPSLAPRLLVAFGEQRERFNSAAEVQQYSGIAPVTERSGKKHWVHWRWQCPTFLRQTFVEWAAQTINKSYWAGAYYRQQRGKGCSYQAAVRALAFKWIRILFRCWQTRTPYDESTYLNALKRRGSPLLNPPTTAEMT

SEQ ID NO: 402960 - protein, 436 aa, unidentified
MRCERGSVVAVLPASSLFNTVDEEQRMRAIGLDIHRVFAEAVAVSGTKIERLGRVGMTRIHLAAFGRTLTHDDHVIIEATGNATAVAEVLAEYVGRVVIANPRQVRLIAEARIKTDVIDATVLARLYASGFLPEVWIPDQATLALRRQVTRRNQIVRQRARLKTILQSILHAHLIPPCPHADLLGPKGRAWLLCQELPEDERCAVERHVREHDRLSDDLRVIERELAQDALGDANVKRLMTIPGVDMVVAVGLMAAIGPIDRFDGPEKLVAYLGLNPSVHQSGEGRPRHGRITKQGRTHARTMLVEAAWQAVRGPGPLRAFFERVRRRRGNHIAAVAVARKLAVIVWHLLGRNEDYAWVRPALHAKKLRDLELRSGLPARRGQRGPAYAYNLAAARRDERRRVEAAELAYRRLTEGWSRRGPRRRAASSEYAAPTS

SEQ ID NO: 402961 - protein, 354 aa, unidentified
MTVYIGVDFHPYEQSIAFVDERDGEIGYRRFLHSDKQSIRAFYRKYGEGAVVGVEATGCLWWFEKLLEEVGIKLRIGDPRMIRRVALSRHKNDFRDAETILDLLVRGSFPAIVPRESESREALDLLNYRQSLVRKRTSLANQLQAYARGKGLSRFRLPAVKGRKKLYEVEGTDAESFLLISRLSLYDELTRQMKALEEKILEKVSEHERVELLMTHPGIGPINALALVHTLGDVRRFRRKEEVVAFVGLDPLEKSSGEKKRMGQISKHGSRLVRHLLGQAAQACRDKRIRKFYLEVSRRRGRPKAKVAAARKLLINCYVMLRDNISYSEFCRRGEVGLCEGSGEVRRNSQSLEA

SEQ ID NO: 402962 - protein, 407 aa, unidentified
MEALYERCAGLDVHKESIFACVLIGSGRTPEKIKQKFGTFPDDLWRLRQWLVQQGVTHVMMESTGVYWMPIYDVLEAAVEIVVANAQHIMNVHGRKTDENDAEWLAKLLRFGLVNPSFVPPRAFRQLRQLTRYRRAVVQARASEKNRIEKHLQIAGIKLSSVASKVFTVSGASMMRQIARGNTDGQELAKLARSHLRKKMPQLARAFPSSIPEHTQQLLGMQLRQMDRLDAAVAETELRIEQTTHEYADVIARLDQVPGVDVLTAIDILAEVGTDMTPWKTHRQIAAMAGVCPGNYISAGKQLKNRSRRGNPYLKTILVQAACSAIHVRGSYYQAKYARLKQRRGHKRAILAIAHSLLVAIYYMLKRNEPYAERGAHSVTEQEAARKKGSLVRQLETLGYAVQLTER

SEQ ID NO: 402963 - protein, 416 aa, unidentified
MTSPPKTIPFERYLAIDAHKQYVVVGGLNAQQEIVLPVRRIGVDEYPKWAKANLKPGDAVVIEATTNTWNLYDATAPLVGKVVVAHPFEVKQIANARVKTDKLDVYRLARLLAADLVPEVWVPPIEVRELRTLIAHRRRLVKLRTMTYNRLHSLVHRNNLTPPEGDPFVDKNRSWWEGLPLSPIEKLRIRQDLALLDHLGPQIAEVDRELTRLSTLSPWEEYTPYLMQLPGFGLTNTMTVLSAIGEITRFPNAKKLVGYAGLGSSIHDSGQTHHSGHITKQGRRELRWALVEAAWVAVGSHPHWKQQFQKLTRRMKSSKAIVAIARKLLVVIWHVMTERVADRKADPDMVAFKLMTWSWKLNDLERGGLTARQFVRYYLMQLKLGKDLTHVRRAGQRPIASVEEVLAVRPDLRPPV

SEQ ID NO: 402964 - protein, 453 aa, unidentified
MKNEKQPNVSNESVKKKKFSQGLPVFNPYAAGIDVGDTSYEVAISNGAKGHEVREYKTFTSDLTNLINWLVCEGVTTAAIESTGVYWLNLYLKLEEAGIEPYLVNAKHVKNVTGRKKDDTDAIWLHKLHSCGLLQKSFQPEAEIRVLRTYVRQRKNLISISSDSVRRMQKAMELMNIKLHAVISDILGKTGLQMVNAILDGERDPEKLIILKDPRIKASEEDIKKSLNGIWKEEYLFMLRQAYDEYMFYQSQILDCEEKIKEQLLKQAAEVSDGEISETILKKKPKKNQFGIELQPLLKKIAGVDLCRVEGIGEISCLELISETGLDMNKWQSSKHFSAWLNLVPNTKITGGKIISSKMQKKKNHAGQTIRMSANSLKASKSPMGDYARKMKSRLGKKGGVVATAHKLSRIIYTMLKDKTEYNPDILVQNNEKWKAKKIKYLEKQLYLLKSAI

SEQ ID NO: 402965 - protein, 356 aa, unidentified
MKNTIKYVGLDVHPSTVSVAVLDAEGKLILQSILATHAAAILDFVHGVRGSLQVTFEEGTQSAWLYDLLVRHVAKVVVCNPRKNALLKAGNKSDQIDARKLAELLRAGLLSPVYHGENSYRILQELVRSYTTLTEDTTRIMARLKALYRSHAVVCGGKKPYGKRHRQEWLQQVRQPGLASRAQRLYDQLDAVQTLRRAAKHEMLAESQKSGAYRLLASIPYLGPVRASILMARAQVPNRFRSKRQFWAYCGLALETRSSAEYHVVQGQVQRSRKPVFIRGLNLNHNHDLKNVFKGAATAASIHDGPLRQFYDRLLAKGMKPELARVTLARKIAAMALILWKKGESFDPKYLMLPAA

SEQ ID NO: 402966 - protein, 341 aa, unidentified
MKVSTLGIDLAKNVFQLHGVDHEGHTILRKKLTRAKFVQFVIQLEPCLIGMEACSSSHYFARLFTRYGHEVKLIPPQYVKPYVKTNKTDAADAEAICEAVTRPNMRFVQIKTEEQQAVLALHTERGILIRERIACANSLRATLAEFGITIAAGQSHLTRELPAILEDSENGLSPFVRTSIYRQSKHIRELEEQVKQVEEALASWYRTQEACQRMAKIPGVGMLTATYVVAAVGNARQFSTAKQFASWLGLTPKEHSSGGKQQLGGISKRGDGYFRYLLVHGARALTAWVNRNGAVEENSWLQGLLERKHYNVAVVAMAAKTARSMWSMLSHNTEYQPRQLA

SEQ ID NO: 402967 - protein, 470 aa, unidentified
MFSWLGLHMELPVSNARLFDVLHVADALIHSKPKGCVTLSKFQDDFVVGIDVSSEFSIIAMLEPSGALIRKPFRIDHTPVGFYKLLEILKKEEERLNRKPIYFVESTGIFHLPLFFFLRSNDLQGFVLNPLSVHSIKNFDLRKVKNDAKDAEAIARLAKYQDVKLSLMPEPQILALRMIAREYYAISDMLTEVKNRLCTDLYLLFPGYLDVFGNPFGKASLALLRDFPSPQHILSADRDDLTQMISKLSRKSYEWATKKVDRLFEIASLAKSMPSDFSVLSIKIKFHLDSIDSLLTNLKGIEDKIHEMIDSAEFPDKFRKRIELIDQMPGIGFMTAVTLIAEIGDFDMFKSPKAFTAFFGIDPSVNQSGKFTGDRNKISKRGTRFGRRVLFTVALSSIRTTRNGDAINPILRDYYAKKCVTKKKKVALVAVMHKLLHYIFAVLRDGKPFELRSPEEHQSWRISKNQSMAA

SEQ ID NO: 402968 - protein, 371 aa, unidentified
MNSIVYVGMDVHKESYTVCSYSFDTDKVMYQQKLPSDYKMILKYLEQLRKKFSDDIEFVCGYEAGCLGYSLYHQLTEHGVKCIILAPSTMAITNTNRVKTDKRDAGNIARCLAFHTYSEVHVPTDEDNSIKEYIRMRDDQKINLKKTKQQILALVLRLGKKFEGGKTYWTIAHMKWLKSLSLGGVFQETLEEYLITYEYFTAKIRRLDQRIEELASGGEYEEKVKKLCCLIGVKTHTALSMVVEVGDFERFVKAEKFTAFLGLVPSEETSDEKQKRYNITKAGNSHLRRLLVEAAQAYSRGTIGHKSVALKQRQQGNPPQVIAYADKANERLRRRFYKMTLNKRLNRNIATTAIARELACFMWGLMTGNIG

SEQ ID NO: 402969 - protein, 387 aa, unidentified
MLQTVASVKPSAVDYERTLVLAIESSNKSWVLAAQVPGLPYTKVKCTVNPKAEGLLAAIAGYRSRAAATGRSIERVIAVYEAGWSGFWLARWLMRRGVEVYVIQPSSVPVDRRMRRAKSDGIDAELLLRTLLAWLRGEPRVCSMVPVPDEADEDARRCVRERTELISERIGLSNRIGAVLATLGVSDYNPLLRNRNRRLAELRTGLGEPLPRNAHAKIERLLARLELVLAQIAELERERDAVVETEASDKASKMIQQLTSLRGIGVQSATVLVREAFVRCFANGKALGSYAGLASSPYSSGGIDREQGIGKAGNRRVRTVMVELAWLWTRYQPAAAQVCWFRDRVRSTGRRVRKIMVVALARKLLIALWRFIIDGVVPEGAVLKAAT

SEQ ID NO: 402970 - protein, 364 aa, unidentified
MISVGVDVHKKRCRACLKDEKGRLIEELSFQRDAEGTADFRILLQSYGEAKIVLESTGNLWIPVYDNLTENPRNRVILANPRKTRIIAEAKIKNDKLDARILADLVRADLVAASYVPEEPIRQQRALLRQRRTLVQGTVAIKNRIHNQLDRHNLSHEYSDLFGKQGREWLRSLQLPSIEQTILNVEMKQLESLEDGIGELTEKIAIEASMEPRAKLLMGFTGIDYYSAMLLLAEIGDIKRFPSPKKLVAYAGLAPGIRSSADKTIRGHITKEGNKYLRWILIEAAQHASRFDPKLQSFYLRVSARRGRQKAIVAVARKLLVSIYHVLNRNETYHGQRPELLERKIRNLQRTVESSLQDARDNQT

SEQ ID NO: 402971 - protein, 413 aa, unidentified
MDVLHPRCCGLDVHKSSISACILLRESGRVQKHQRRFGAMTQNLHELAEWLQQFGVTQVAMESSGVYWKPVWNILEGQFTVVLANAQHIKNVPGRKTDQKDAEWIAQLLQHGLLRPSYVPCEIIRDLRDLTRMRASLSQEASRISSRIQKVLEDANVKLASVATNALGKSGRAMLEDIISGEDNPEQLASLALGHLRVKIPQLRLALEGKIRSHHRFLLRRLLDQMQFVEHEIALLEERMEDIGRQRPELSQAVARWDTIPGVDRVAAWALLAEVGDNMAQFPTAEQLASWASLCPGNHESAGKRLRGATRQGSPWLRRMACQCAWAAARTKNTYLSSQFRRLAARRGKKRAIIAVAHTLIVIGYHLQKNQSTYEDLGGNYFDRIHSDGLKRYLVKRLQQLGHKVTLEPMEAA

SEQ ID NO: 402972 - protein, 355 aa, unidentified
MDSKKYIGMDVHKESISIAVRNAAGKIVMECVIETKASMVLQFIEGLRGDLHVTFEEGTSAAWLYDLLKPHVTKLVVCDPRKNASMREGNQNDKIDARRLAELLRLNHLHPVYHGEHGLRSLKELVRSYLTITKDLVRVMTRVKAIYRSWAIPCSGKQVYAPRYRVEWLGKITEPGVRRRAEFYYQQLDALRAVRQQVRRELLAEGKKHPAWKRLCQIPAIGPIRAAVLLGVLQTPHRFRSKRQLWTYSGFGIETQSSADHRSVDGQLKRVKKQSSIRGLNRNCNHDLKNLFKGAAIVAASKPGPLQEFYSALLRKGLRPEMARLTLARKIATIVLIVWKKGVCFDAQHLKPQTA

SEQ ID NO: 402973 - protein, 406 aa, unidentified
MDVIYPCCAGLDVHKQTVVACARLCAQGAPRQEVRTFATTTSGLLGLADWLESLGVQHVAMEATGVYWKPVWHVLEGHFTLVLANAAHVKNVPGRKTDVNDAMWLADLLAHGLIRASFVPPVAVQELRTLTRTRKQFVRERGSHAQRIEKILEDANLKLSSVISDILGKSGRAVLQAILDGQDDPQRLASCVGRVKASRSELVEALRGRVTAHHRFMLKLHLEHIDTLDEAIAKIETEVGLGLEPFRQAAKLLSTMPGLSSVSAHVVVAEIGIDMSRFATPGHLLSWACLCPRNDESAGKRRCTRLRRGGKWLKTTLVQAAWAAVRTKGSYLQAQFHRLRARRGAKKAIIAVAASMLTAAWHMLRDGTEWHDLGAAHFDRADATKTANRLIRRLQQIGYKVEATPA

SEQ ID NO: 402974 - protein, 359 aa, unidentified
MTSVQQVPAHRRVVVGVDTHKYVHVAVALDDLGGVLEARSFPADSAGYTQLLDWASGLGGKLTFAIEGTGSYGAGLTSAVRRRDIGVIEVIRTDRRDRRLRGKSDTLDAENAARAVLAGQATAIPKTADGTVEMIRQIKVAKDVAVKARTAAIISLKQVLVNAPAELREELQPLSKMALINRCAGLRPGQVTSVVASTKYTLRAIARRWQQLNTEIAGHENVLTTLTRHAAPDLSDAFAVGPDTAAEMLIVAGDNPDRVRSEPAFAKLCGVAPIPASSGMTNRHRLNRGGHRQANAALYRVVIVRMQHHEPTKAYVARRTAEGKTKAEIIRCLKRLLARELWAAMRPLRTAGQAHATAA

SEQ ID NO: 402975 - protein, 411 aa, unidentified
MPRAMKNKKVIEFEQVVERGCGMDVHKETIVATIQGKGIKTQTKSYKTFTSSLIKLKEWLLKNKVSHVAMESTGVYWKPVFNVLGDDFELLLVNARHVKNVPGHKTDKKDSRWLAKLLLSGLLKGSFIPERPIRELRDLTRYKTKLIHQISAEKNRFQKILEDANIKLSSVLNDVFGATGTKIIKHILFHENYCPQDLLCYVHGKVKASRTDIKEALTGYITPHHKFMLKTIIANIARIESTVAEVDAQIDLCVEPYKVERELLETIPGVGTEAATKIIAEVGVDMGQFPDQNHLASWAGVCPGSNESAGKNKSGRITYGNKYLRGLLVECGWASSRTKNTYMSAKYKSMVGRRGKKKTIIALGHKILIATYFIIKDKVAYNELGPDHLNNFRKDRLIDYYKRQLEKLEAA

SEQ ID NO: 402976 - protein, 414 aa, unidentified
MLKIVYRVCCGMDVHKSFVVACIASTNEYGVTTYKSKRFSTFTRDLRRCADWLSENNCKDVCMESTGKYWIPIYNILEPTCNVVLAHPKYVKAIRGKKTDKRDAKWIADIFKHDLVAGSFIPPADIRQLRDLVRYRWKLTNFTTGEKNRAQNCLTVSNFKLDDVFSDVFGKAASAITTRILEDPTEKITDVSGFRTKGMKATNEQVLAAVDGEMCEEQAEKLRIIRSHMDSLELCKLNLESLILSTAEQYLPQLNLVMTVPGIQSFAAIGIISEIGVDMSVFPTSKHLCSWAGLTPQNNESAGKKKTTRISRAGAYIKPLLVQCALCAIRAKQFPELRNRYLALKKRRGHKKAIIAIARMLLTAIYNMLKKNETYNPEIYRKGDRPPAHREVSVEEAIFILQRQGYLVTAPPTS

SEQ ID NO: 402977 - protein, 358 aa, unidentified
MKGKLNKIDFTNKSIFLGMDVHSKTWYTTILYDDFVKKQSFHADARKLAAYLRKNYPNARIQAGYEAGYFGFNLQRNLESEGIETIVINPADIPLSNKDTRNKTDRRDSYKIALNMKSKMVEGIYVPKVENEQERSLLRRRADTVRKQTRIKNQIKSNLKILGINYPIEYEDRGKHWSRHFISWLGCLTIATQEGKAVMESLLRELEFYRKEVLIATRQIRELSKSERYAYNIKLLLGISGIGLITAMTFLTEIVSITRFKKGDELVSFLGFSPNEHSSGEKRRIGHLSKRCNHILRGMLIESSWVAIRNDPALSEYYHKTQKKIGSSKAIIKVARKLIMRMRYVLKTGNKYVTEVIK

SEQ ID NO: 402978 - protein, 423 aa, unidentified
MAAMKECCCGVDVHKSFIVAVIARFEGREVTFSSYTRFSTFTKGLREFKDWLRSNNCFDVCVESTGKYYIPVYRIISDETFHVDVVHPKYVKAPRGKKNDKRDAKRIADMYMRDHIAEYSIIPSADVLAIRDVTRYRRKTVNHITSEKNRMSNCLTVSCIKLDEVLSDTYGKSGQAIIEQIIAHGGCDFDPIPYIDKRVKADPELIKMALDGNVTPSTLAKMSMIQQRLKFLGNQKAELEQTMASLSKDFSRQLEILDSAPGVDSLSAISILAEIGTDMKQFGSVKRFLSWVGVVPQNNESAGKKKSTRIGIGNMWLKPVIVQCANAAIRDKKHPEIREKYLALKKRRGHGKALIAIAKRLMTAIYYMLLRDKLYQPYLGKDSAPDRGKIELEKLIEYYHSKGYTIVSNGQSVTPLFEVENAV

SEQ ID NO: 402979 - protein, 319 aa, unidentified
MAQNDLVVVGIDVAKGKVDACIRRFTLRQTFPNTAQGHRKLVAWLRKYQVGKAVMEASGGYEREWRNVLHDAGIEVRIVDPRRVRNFALSAGRLAKNDPIDAEMIAWFAETFSQAPGQIPDAAREELAALAKARKALIDVKIRLLTQNEHAAPEPARKAHARVLKGLAAEIAELEAAISAKVKATPEFVELAEIIESVPGLAQATSAILIAGMPELGRVSDEVAAALIGLAPYDDDSGKRRGERHIKGGRRWVRNAIYMPCLGAATQNNPVLKAFYQRLLAKGKEPKVALIACMRKLIIILNTMIARRQKWNPGRHAVA

SEQ ID NO: 402980 - protein, 348 aa, unidentified
MREATTMKATTIGIDLAKHLFQLHGVDQHGKTVLKRQLKRDQMLSFFSNLPPSLIGMEACGSAHYWANKLQGMGHTVKLMAPQFVKPYVKTNKNDAADAEAICEAVTRPNMRFVPIKNGEQLAVLALHRARQGFVKARTAQANQIRGLLAEHGIIVPKGIAHISLRLPELLEDAENDLPGTFRQLIERLGEHLKELAKQVNELEEQIWCWHKENSASQKLAKMPGIGPLTASALVASIGDAKQFENGRQLAAWLGLVPKQHSSGGKQTLLGISKRGDIYLRTLLIHGARSVLRVAERKTEYAGSWLAGVMERRNHNVTVVALANKNARTIWALLAHEREYDADHAVAA

SEQ ID NO: 402981 - protein, 349 aa, unidentified
MRAGWYLVSDKAERGLEDARILSGGVMTHETALHVGIDVSLARLDAVILPTGEAISVENTPAGILSLVGLLSEAGDAALVVMEATGGLERDCAVALVAAGLPVAVVNPRQVRDYARATGVLAKTDRIDAAVLARFGAAVQPEVRSLLSQDEHEFRAWVRRRNQVVEMAATEKRRLAFEKVAAVRASIQAHIELLSKESREIERLLLASVKVHPSWRYRAELLESVPGVGAITALTILAELPELGALSEKQVAALVGVAPMNRDSGRYRGRRQIAGGRRRVRNTLFMAAGTAMLRNPVIRAFRSRLDERGKCRKVARTACMRKLLIILTAIVRTNTTWAGPNIAPLRAHP

SEQ ID NO: 402982 - protein, 445 aa, unidentified
MVACLREVVVTVDIVHPRVAGIDVHKRVVWVAVRLPGPGLGERTVTVRGFKTFWRQLRQMAGWLAELGVSDVAMESTGVYWWPVYHALMAAGGIEVCVCNAAHMRNVPGRKTDIRDCQWIAELHEHGLLRPSFIPAAEVAALRQRTRYRKKLIEHRAAEGQRLSKVLEDAGVKIDSVASELLGVSGRQMIEALIAGERDPARLAGLAKGRLRAKLDALELACDGRFAASHAQMCRLHLDAYDRLTTQIVTLDVLVAEAAAPFEAVIAKLMTIPGIGRRIAEVIVAETGAQMTRFPSSAKLAAWAGLAPGSNESAGKRKKAAARNGNQHLRAAMVEAAWACSRTATRPGARFRRLAYRFGKLNIKKAAVAVAHTLLSIAWAVMKDDADYAEAGADYYDLRDRRNHEHLARHHQQALTRLGYQVTLTPPGDGPPPGTPPDQPQQPAA

SEQ ID NO: 402983 - protein, 342 aa, unidentified
MSSIQHVSAVGVDSHKDTLATAGVDGAGAAVFTCEVPNTTDGMDDLISRIDHDVVWGIEGTGGYGRALCDRLINDDRLVVEVPTRITGRYRAGAGHAKTDKGDSVAIARAVLGDRGCGVTHEPVPEALRILVRQRQTLVEDQTAGINRIRAHLVELDPDVEKTLKRIRGVTVFTRFSQWPTDTTGDPYREALVSVIRIDGSNCVTRLRQIQALEKMIAEIMPQAGVALTEIVGIAIVGAATIIANTRDIGRFPNEGHYGRYCGTSPLDVSSGRQEHHRMNRFGNRDINTTLRTAILTQLKHNGQAATYVPRRMTEGKTKKEAIRAAKRHLNKKVYRILKQHT

SEQ ID NO: 402984 - protein, 413 aa, unidentified
MEVIHERCAGIDISKVDVKVCIRVPSDTGKRRRSEVRTFSAVTSGLLAMRDWLLAEGITVVGMEATGVYWKPVFYLLEHDMECWLLNARHMKSVPGRKTDVKDSEWIAKLVEHGLVRPSFVPPEPIRQLRDVTRYRTEIVRERTRETQRLEKLLEDTGIKLSATVSNILGVSGRAMLEALIAGERDPRVLADLAKGSMRRKTDALAEALTGNFTAHHAFLARAMLDRIDACTATETRLSEHIEVMLQPFRRRIELLVTIPGVEARAAQVILAEIGADIGRFPSAADLASWAGVCPGNHQSGGRTGSGKTRHGDPWLKAALGQAAVSASRTKDTYLAARYRRIVARRGKKRALVALEHSILTAVWHMFTHDTEYADLGGQYFIERTGRARQTRRLVSQLNQLGYQVTLQTEGAA

SEQ ID NO: 402985 - protein, 342 aa, unidentified
MEKVSIIGLDLAKRSFQAHGALAEGGVAFRKKLSREKVLAFFAEQPRCVVAMEACGSAHHWGRAVRDLGHEVRLIPPAYVKPFVKRQKNDAADAEAIAEAASRPTMRFVAVKTEEQQARAMLFRTRDLLVRQRTQLINALRGHLSEHGVVAAQGPANVKILEEAVEDQGTSLPILVVELARVFLDQIEGLSKRISELEKVTVHEAACGEMTRRLQTMPGVGPITALAIETFAPPMDVFRRGRDFAAWLGLVPLQHSTGGKQVLGKVSKMGQRDIRRLLITGAMSVVRAAMRRGAPEGSWLQRMLARKPKMLVAIALANKMARAIWAMLTKRENFRVPAVAAL

SEQ ID NO: 402986 - protein, 352 aa, unidentified
MRTSQKTAGIITTIGIDLGKNTFHLVGFDQRGVIILQQKVSRGQLERRLANIPRCLIGMEACSGSHHIGRQLAAVGHDVRLIPAQYVKPFLKGHKNDYRDAEAIAEAVQRPTMHFVAIKTPEQMDLLALHRVRSRLVGQRTGVINQIRGFLIERGIIVRQGVMPLRKALPEILSSHTGVLSARMVSLITDLAQDWRRLDERIAAVSAEIEALAEQDNGCQRLMTVPGVGPIISSAVVAAIGNGAGFKQGRDFGAWLGLVPKQESTGDRTILGKISKRGNKYLRTLFVQAAHVVLVRRPRAAMRGLWPWIEQASKRLHRNMLAIALANKLARIAWAVLARGRAYQPRITADAA

SEQ ID NO: 402987 - protein, 344 aa, unidentified
MDHFAGLDVSVKKTSVCIVDDTGKIVREVKVASEPEALLAVLKNPAYQFKRIGLEAGPLSQWLYSALAEAGLPVICVETRHMRAVLKAQINKTDRNDARGMAQMMRVGLYRPVHVKTLRSQKLRMLLTHRQLLLSKAIALENDLRGTLRNFGLKVGMVGKVKFEARIRELVETRPDLAELVEPMLIVRRVLREQIVILHRRLLAVVRDDEVCQRLMTTPGVGPVVSLTYRATVDIPARFRKSKSVGAVFGLTCAKYQSGEVDWDGRISRCGDEMMRTMLYEAAQAMMRSKKWSWLKAWAMQIARRRGMKKAIVALARRLAVIMHRIWVDGTEFRWTREQAAAAA

SEQ ID NO: 402988 - protein, 427 aa, unidentified
MNCTQNQKIDQVTEQTLVVGIDIAKRTHYACFVDDRGRVLRKSFPIFQSKEGFRQLYEAIQEAMQEFAKSDVIVATEPTGHYWLDLAYFLEEKEIPVVMVNPAHVCRSKELDDNLPTKHDAKDALVIARLAKDGRFLVPRLLHGIEADLRVGSTLKEKLRKEQTAVKNAIVRWTDRYFPEFWAVFRDLGKTALSVLEWTPFPADMAGRTAEELIEVYRQSEGLKSPQKAKIQALINAAKDSIGVTEGTAMARFEIVAFVRQYRQFEAEIAALDAELKALVQMTMEYQWLKTVDGLGDAIIIDLLAEIDSFSHYRDPRQLVKLAGLTLKENSSGQRRGQKHISKRGRKRLRSVLFRAVIPLIRHNEAFRELHEYDTTRPVNPLTGKQSIVALCRKLLNVLFAICTKKQAFDAERMRQDVLSQVQHRAA

SEQ ID NO: 402989 - protein, 332 aa, unidentified
MYLGIDVHKRYAQVAVMDEAGEIVEEVRVENANLDDLAQRYAGAEAALEATSNYYHIHDTLSEHLDVTVAHPEELNQIAQSDKKTDRVDAKELARMVRLNSVPESYVPTDEVREARALVRGRQTLVENRTEYANKIHGLLSDHGITEDVKPLNKEGREFLRELSLPTPWDALLESYLEVIETLTEEIQNLEETIEERAGSLKETQLLMTIPGVSYYTALTIYAELGEIERFDDDKSVVSYVGLNPVIRESGDSRIEGSISKRGSGRVRWLLVQAAHNAVHVCNDEYLSRFYERLASRKNSQKAIVATARKMLVSIYHMLDRGEVYDPPGVSA

SEQ ID NO: 402990 - protein, 381 aa, unidentified
MRKVIMIGCDLHDRSMLLMVAVGLEKPVKKTFPTRNRAEMIAWLKDWAAQEGAARIVFAYEASGLGFGLHDELTEAGIECHVLAPTHLPHTTHRRKNKTDEKDALMILEEVRAHVLAGRQLPAVWVPDPQTRDDREPVRLRLSLGEQRTQIKNQIRSLFKRTAVELPVWFTKSGDWSRRSVQWLRDVSLGNEGSLSPGARATLARLVDLYQVFSEQLRTLDKAVAELAESDRYARKFNKLRQFAGVGTLTAMVFLTELGDLNRFANRRQLAAYLGLAPAAFESGERGDRKGHITRQGPSQVRHVLCQAAWTAIRYSSTWRERYQRIKRGSPKRNKIAIVALMRQLAITLWQTARSPEFDRWCDKFDRWCGKVQHQQPAALT

SEQ ID NO: 402991 - protein, 345 aa, unidentified
MQNMYYIGLDVHKRAISYCVKDGSGVIRAEGTIPATRFDLDRWMKTLPQPWTAAMEATVFTGWIYDHLQPHAAGLKVAHPLMLRAIAAAKKKNDRIDANKICDCLRCDFLPECYMASTAIRERRRTLRYRNLLVRQMVQMKNKIGTLLMEAGVSYNKQRLHKAGYFRELLATNADIDEGLVSLLRLCRETVVRLGKTESALICSLERDPFLVERVEHLMTIPAVGPITALTWALEVGDVQRFSSIKKAVSYCGLCGDEQSSANTVQRTPLSKQRNKHLQTTLIEAAKMAPRNSPELAMLYDKEKQKGNANRATLAVARKLVAYLMAVDRRQRDFQLVETSSGIAA

SEQ ID NO: 402992 - protein, 341 aa, unidentified
MQVTTIGLDVAKNVFQVHGVDASGAVTLRRRVRRSEMVRLFGRLEPCLVGIEACATSHHWARTLQALGHEVRLMAPHYVKAYVKRNKNDAADAEAICEAVTRPSMRFVPVKSVEQQGTLMLHRSRELLIRQRTMLINALRGHMAEYGIIAAKGPANVAQLVALLGEPADDRLPAPALAALRAIAAQLAVADEQIAALRGEIVAWHRSSAASCRLAGAPGIGPVIASAIVATVSDASAFTSGRHFAAWLGVVPKQNASGGRQALGRISKRGDSYLRRLLINGAQSVLRWAKKGKSSAWLIGLLERRPRSVVAIALANKMARIVWAMLRRGEDYRKEGMASVA

SEQ ID NO: 402993 - protein, 314 aa, unidentified
MKMAMLSFCGIDVSKDRLDVVVLPEGWFFSVSNDTAGWAELVVRLRPLTVSAIGLEPSGGYERGIIRALLAAGMSVRRINPNKLRQFARARGVLAKNDRLDARLIAEYVAIMPTRVVQRDAAVERLAEIVTMRRQLCDEHVAAENQAAHLEDAMLRRLSKRRQTRLEADIRLLDKRLAEMVAANVALAQRYELLTSMPGVGPVLAFTLIALLPELGKMTRKQIAALVGLAPYDFDSGKLKGHRSIYGGRMPVRNVLYMAALSASRYSPALKAFHDRLADADKKSKVIIVAVMRKMITTLNAMLRDNAAWQPQSA

SEQ ID NO: 402994 - protein, 408 aa, unidentified
MNTLYVGIDVSSKSNVVYLMLPNGDKHSNFSVANSHEGSTLLVKKIYSALTSHSLDTVLIGLEATSVYGVNLVYFLREDATLAPFNRKIHVLNPKQVKKFHDTYNDLPKNDYVDSFVIADCLRFGRINKEVYMGEYRYKALQNLTRARFFAVQNLVKEKQRFMNVLFKKYSTMTQEKVFSDAFSTTALAVYDEFESAEALANMDLHELTDFIIEKGKNRFPDPDAVAKAIQKAARSSYRLPKTVNDSVNQVLSISITSMKALESQIKEFDKAIKALMELLPNVLISIPGIGPVYSAGIMAEIGDINRFDNQASLAKYAGLAWKQHQSGGFEAEVTRLIPSGNRFLKYYLCEAAFSLVRCDKEYCDFYHLKYKEVNRCQHKHALALTARKFVRLVFRLLKDNRLYCPAK

SEQ ID NO: 402995 - protein, 344 aa, unidentified
MTIVEEKLAITGGVDTHSEVHVAAALDPVGGLLGTAEFPATAAGYASLLGWLGKFGDVALVGVEGTGSYGAGLARYLARRGIRMVEVDRADRQDRHRQGKSDPLDAVSAARAAQSGRAAGEPKGRDGAVEAIRALMVAKRSARHERTQTINQARALILTGPDELRTRFTGLRAGALAEAIAALRPRPGDAADYSVRIALRELGRRVQFLDEQIGRLDELIVPLVTIRAPGLLSLYGIGPDTAALLLIAAGDHPQRLRSEAAWAHLCAVAPIPASSGKTRRHRLNRGGNREANHALWRIVITRMSAHPATRAYVGRRTAEGLSKKDIIRCLKRYVAREVYPYLRG

SEQ ID NO: 402996 - protein, 391 aa, unidentified
MICVGIDVAKDKHDCCILDSEGTTLADCFTIPNNLDGFKRLLQTIKDCIQKSDKIKVGLEATGHYSCNILGFLLDNDLPVYVMNPLHTNLYRKSLSLRKTKTDRVDAKTIATMLLSDVDLKSYTDTAYHNEELKSLTRYRFDKVQERAKLKQSVSRLVTILFPELEQLVSSIHGTSIYALLSEYPGAKQISEAHLTRLANILVTTSRGHYRKDRATHIRDAARTSIGSVMPAKSLELKHTIKLIQELTSEINEIEDAIRKIMDELKPPILSIPGMGFYSAAMILAEVGDFSNFNSPDKVLAYAGCSPSTYQSGKLTNCYAHMEKRGSRYLRYALYTATKYVCYWNPVFTEYLTKKQAEGKHYNVALSHATKKLVRLIYALQKSGKAYLAIT

SEQ ID NO: 402997 - protein, 350 aa, unidentified
MLIVGCDFHTRFQQIAMVDTTTGEIVERRLEHATGEARKFYAGLPGPARIGMEATSDAPWFERMLSEYGHELWVGDAAKIRAAMVRKQKTDTRDALHILDLLVTDRFPRIWIPSRAQRDVRQMLRHRHKLVGFRTSAMNQLHFLAMGQGVCRRKKLWTTVGRRELEGLELGPWASRRRRELLQLLDQLHAWIKELDQAVEKEAASCPEAILLMKQKGVGPVTALALVLTLGPVSRFPNSKRVVSYLGLNPSEDSSGGKQRLGGISKQGNSMMRWLLVEAAQTAARFDPELRRDYLRLKFRRGPGVAKVAIARKLAVRLYWSLREQTSPAPPARMQGSPSVPMVDESPSTF

SEQ ID NO: 402998 - protein, 364 aa, unidentified
MKRKVYVGMDVHKETIQIAYLTSNTKEMVKEQQIKHNEVHIKKFINKLKTEWNEIHCCYEAGVTGYPLYRYLKSLGVNCILVAPGKIPRQSSDKIKTDKRDAIKLARLLRSGDLESIHVPSEEDEAVRDYLRSRDSLRLDLGRNRQRLMKFLLGKGNVYSTTKYWTVSHYKWLNNLHFENEILHETFNDYYSRVRVQEENLKAMDQKIQEIAKSEAFRERVGILRCFRGVDYLTAMFLLSEVNDFRRFKTAGSFMSFLGLVPGEYSSGSKRKQTGITKTGSPRLRRILTEAAWQHRFPGTGSKIVAARRTGQPALVVALAEKASLRLHKKFRNLQLRGKTPQVMITAVSRELSGFLWAAMNLVA

SEQ ID NO: 402999 - protein, 318 aa, unidentified
MTHTTQTTAHYVGIDVSQNTLTIAIYPTDEVWIIDNTSEHHTALVQHLAHLPVQRVLLESSGGYEKAVVSALQQAGLPVVVVPAQRARYFAKSMRGDLKTDRADARMLAYFACCYPVQPVAPCAPVQAELKELWARREQLVQELEREKKRLQTVQSEAVRASLARMLAVLKEEIAQIEARVEELIASDADLSQKAALLQTAVGVGRVVAYGLVAELSELGQVSHRAIAALAGLAPVRCESGDWVGRARVRGGRPRVRRLLYQAAVVAATHDGRWRAVYEGLLGRGKAKKVALCAVARQLLVVLNAMVRDGRAYERVSE

SEQ ID NO: 403000 - protein, 415 aa, unidentified
MEELHPIYFVGIDWAKDTHAVCVLDRQGSIRLQFTISHTADGLAELVRSLGRLAEPGRIALAIERPSGLLVDTLVEAGFGVVPIHPNALKATRPRYSAAPGKSDPGDAYILADVLRTDGHRFRPLRSPSDATRALRAAVRTRDDLVATRVQLANQLRSLLESFWPGAAAIFADVDSPIALAFLDRYPTPESARRLGEKRLDRFLKQHAYSGRRSAAALLERLRAAPTGRAGELESETKGVLVRSLVAVLQPLVAQIRELDGLLAAHLEQHPDGALLQSFPRTGCINAAQILAELGDDRLRFQTAEQLCAEAGVAPVTHSSGKHRGVACRFACNKRLRQAITTWADNSRHAHPWAATVYRQARARGCDHPHAIRILARAWTRVLWRCWQNKTPYDPQLHGRALPFLNAQQPASAAA

SEQ ID NO: 403001 - protein, 347 aa, unidentified
MRFYTKQHRYYCGIDLHARSMYVCVLDWQGEIVLHKNMPCTPDLFLKAIAPYREDMAVAVECIFTWYWLADLCGKENIPFVLGHALYMKAIHGGKAKNDKIDAHKIAVLLRGGMLPMAYVYPALMRSTRDLLRRRMHLMRKRSELLAHIQNTNSQYCLPQFGKKIAYKANRQGVCEHFTDSSVRKSMEMDLSLIDHYDKLLTEVELYITKTAKVHNVNAFFRLRSVHGIGKVLALVILYEIHDINRFPTVQDFVSYARLVKCAKESAGKRQGTSGKKIGNVHLKWAFSEASVLFLRGNPAAQRYVDRLTSKHGKAKALSILAHKLGRAIYYLLKREQAFDINKFFSS

SEQ ID NO: 403002 - protein, 378 aa, unidentified
MKAALQTKDNASGDVLYMALELSNKKWKLGFSNGEKTRIKTIDAGHWVSLIAEIEHAREKLGCSPGCRVVSCYEAGRDGFWIHRALLEAGIENYVLDSASIEVSRRRKKVKTDRVDVVALLRLLMRYVSGEKEALHAIRVPTVEEEDQRRLNRERDRLIKERGAHSARIKSLLKLHGISLGKVNDLPGLLPSAKALVVEYALPADLKRELEREYERYELVNQQIKGLEKLQIQRAEDLDKPAMQQITQLMGLKGVGWQSSWILTMEFFLWRDFKNTKQLGSCAGLTPTPYDSGDSTREQGISKAGNKRIRRLMVELSWLWLRYQPDSELSQWFERRFGQGGKRMRRIGIVALARKLLIALWRYLEHGVLPEGAVLKAA

SEQ ID NO: 403003 - protein, 415 aa, unidentified
MYYIGIDVAKSFHIVTVINENEEKVISKPFRVENLNEGFAKLLTIINSISSDKREFLIGLEATGIYGENLWEYLNSNGYSVKLLNPFQTSRYREQITMKKVKNDNIDSLVIALFIKDGKYSSGYVTDDEYQSLRTLYRNRVSIQSDMKAIKKRILTQITVTFPEFEGFINPFTISGLALLDKYPTAHHYKRSSADRIMKLFRHIQGNNFNNAKALKLLSLAKDSIYSGKAKDARAIAIRSSIRLLKTYQSELDILESEISSLLQTHKMSTPIDEVGQEIEHNDRLIDNLKSIPGVSDKTIAAVISECGDLTRFPSVAKFIGYIGLFPTENSSGNTQRTGHLSKRGSAISKHALYMSASSCLIHNKQLKQLYDTKRSQGKSKKEGLIAVSRKLATIIYSIFKYNIPYDPSRVFAKS

SEQ ID NO: 403004 - protein, 344 aa, unidentified
MKKNLFFIGLDIAKADFAASIYKTPGQSIITKEAIPNDPKGFEMLLLWLKDYHINKKNCHICMEATGVYSQAIAYYLLFQGFPVSVEPPLKVKRAFDPVGHKTDPVDSKQIAEYAYRFQDELTSWQPKDEILEKIRQLLSVREQFTKQKTALDNSLQAYSKQRVQVALIKKAHQETLNQLKKQIARIDKELANLIKQDPQIFQRANNLDSIPGCGMLLAAHLLVITENFTKIQNSKRLAAFIGIVPYQHQSGTSVFKRAKIRHFGPMPSRKLLRLAAQSVSTHNVTFRLYYLRKLDQGKAKPLVLNNIANKLLKVACTIIRNNTRYIKEHRSIHPMYLKSLKSA

SEQ ID NO: 403005 - protein, 423 aa, unidentified
MEVVAARCAGLDVHKATIVACALIAQEGRARPRKEYATFPTTAAGLASLAAWLKGLGVEQVGMEATGVYWRPVYAVLEAQGGFELIVANARHIKTVPGRKTDIKDAEWLAMLVRHGLMRKSFIPDQPFRDLRDLTRYRRALVETQASERHRLIQVLESADIKLSGLVSDVFGLSGRLMLRALIAGEQDPAVLADLARGQLRKKRDALREALAARLGEHQRRMLAIQLSRVEAAEADIAVLDQEIDQRLEPYAEEMALLITIPGVDRVVAAAVVAELGTDLSSFPSAEHLAAWSGTCPGNRESAGKAKPARARKGNPHLKTALCNAAIAATRKKGSYLRAKYYKLKARIGGGKAALAIAHKLVVVIYHVLSKRVAYRDLGEDYLDQINAKRTAQRYVQKLNALGYGVSLSLLTRPAPAPQAEPL

SEQ ID NO: 403006 - protein, 379 aa, unidentified
MSPEHSIDIFLGLDVGKSEHHACALDRDGNKVFDKPLPQLESELAGVFHQLQKLGTVLVIVDQPNTIGALPIAVARDCGCEVGYLPGLAMRKAADLYPGRAKTDKRDAFIIADTARTMPHTLRAVDRNDEVLSALKMLSGFDDDIARDCTRTVNRLRSVLTQIYPSLERVFAGSTLTRTPILELLIHYKGPQGLKRAGYQRVLNWMIKRTRKDPTPLVDDIFTALKAQTVTVPGSDAAELVIPQLAANIQALKEQRNTIAEQVEEMLADFPLCEVLMSMPGVGIKTAAQILLAIGDGSDFASAGHLAAYAGIAPVTRRSGSSIRGEFPARSGNKRLKNALFYSAFAVIRSHEPSRRYYERKRAEAVSYTHLTLPTNREV

SEQ ID NO: 403007 - protein, 342 aa, unidentified
MFYVGLDVHSKHITICVLDDDGKVSSRWTVRQVDQMMNVLEQLAGPFRVCYEASTGYGSIYEALAGVADHVAVAHPGLLRIIFQSKKKNDRRDAEKLAKLLYLDQVPLVHVPSADVRAWRELIAFRRRLVEKRTRAKNGIRGLLRSLAIRAPRTASLWTRKGIAWLKQLALDNSMHALKRDLLIEEIARFSAQLRRVEIELAHYSADNVAVRLLMTIPGVGLRTAEAVAAFIDDPHRFPNSKRIGAYFGLIPSQDQSGGTNRLGRITREGSATVRHLLTEAVWQAVRRSPTVAAYFARIHRDEKDRRKIAIVATAHYLVRVMWAMLKNQTAWKENIAVEGSL

SEQ ID NO: 403008 - protein, 417 aa, unidentified
MKPQLSQFTAIIGIDWADTKHDICVQESETDTREFSRILHKVDKIHEWAQSMYQRYGGPMAVAVELDKGPIVSALQKYNFFVIYPINPTTLAKYRQAFNPSGAKDDPTDAELALDILLNHPEHFAPLNPQSVEMRTLMTLVEHRRRLMNDRIRITNRLRNALKQYYPQVLDWFDRIDTQLFCDFIKQWPTLAQVKRARRTTLEKFFREHNMYRKPVLERRLEAIKSATHLTQDEAVIIPYRLQVLTLINQLEGALNSLRRYDKEITQLASQHPDFQLFNSLPGAGPLLAPRLLVAFGEQRDRFTSAAEVQKYAGIAPVTERSGNKSWIHWRWQCPTFLRQTFVEWAAQTINKSYWAGLFYHQQRAKGCTHQATLRALAFKWIRILYRCWKTRTPYDEAKYLKALKDRGSPLLQAQTA

SEQ ID NO: 403009 - protein, 409 aa, unidentified
MTDKDTRYVGLDVHKHFVMVGAVARNQKVLMPPRKVGLTEFQDWAKKHLLPTDEVVLEATTNAWYVHDLLAPIVGRVVVTHPPHIKLIAATMVKTDKKDTMTLAKLLAAGLAPEVWVPPEHIRDLRALISHRRRLVSQQTQCKNRLQSVLHRNHILPPQGKAYHPDNRDWWTKLNLSPGDTLRVRQELVMLEQLDTLINETSDELHRLSLSDPWREQLPYLIQLPGIGVMTGLVILSAVGDISRFPSAKKLVGYAGLGARVHASGQSYRTGGITKQGRKELRHALIEAAWITVRFDPAWNEPFERLANRIGRRKAIVAIARKLLVVIWHVLSKRRVDRQADPERLVRYFLAWGRQTRVYTRLGLKAPEFARQQLDLLGVGQELSLITFGATYRLPPSTLPVIEAAVASA

SEQ ID NO: 403010 - protein, 422 aa, unidentified
MLTESHDEEQIIARVAALDIGKAELVCCVRVPALDSARKRLQEVSTHSTMTGSLIELANRLVELRVERVVMEATSDYWKPVFYLLEAHGLAPWLVNARDVKHLPGRPKTDVLDAVWLCKVAERQMLRPSFVPPPAIRRLRDLTRYRIDLVGVRTAEKNRVEKLLEDACIKLSVVASDIFGVSGRAMMAALIAGQRDPKVLAQMARSRMRTKIGRLEEAFNGHFDAHHAFLLARMLHRIDDIDADIAAVDEQIEAYLTPFASAAARLDEIPGIGPVAAAVILAEIGADMSRFPTAAHLCSWAKFSPGINSSAGRTKGNGSTGHGNRYLARVLGEAAVVAGRTDTFLGERYRRIARRRGKKRAIVAVGRSILVIVWHLLADEDTHFTDLGADHFTKHVNPDAKKRNHIRQLEALGYTVTLTPAA

SEQ ID NO: 403011 - protein, 342 aa, unidentified
MREITTIGLDLAKNVFQAHAAAADGSTIFSRKLRRSEVLEFFQKTPPCLVGLEACGGAHHWARQIRALGHEVRMMPPAYVKPFVKRGKTDAGDAEAISEAVGRKTMRFVPIKPAEQQADAVVLKTRALLVGQQTQAINALRAHLAEFGIIAGAGKSKVAPLIAIVDDEADTRLPSAARFALHHLAREIERLTDHIKTLEKAIVVATRRDDTARRLTTIPGIGAITAATILALVPDPAGFRSSRHFAAWLGLTPKPHSSGGKERLGCISKMGNPILRSLLVVGATSVLRYARNNPNASQWITALLARRPYKVAAVALANKMARIAWALLVKGGSYRAAGIVSA

SEQ ID NO: 403012 - protein, 343 aa, unidentified
MQTVTTIGLDIAKSVFQVHGVDAAGNIAIRRQLKRRYVLLFFGKLPPCLVGIEACASAHHWSRELQKLGHTVRLMPPAYVKPYVKRHKNDATDAEAICEAVTRPNMRFVPTKTAEQQSCLTLHRTRHLFIRQQTSVINAIRAHLAEFGIVAAVGRNGMEQLLEVAADASDKRLPDVARACVAALGAQLRTLKVQILQFDRMITAWHRSSEASRRLDDIPGVGPALATALVASIADPRAFRSGRDFSAWIGLVPKQNSSGGKDRLGNISKRGDRYLRSLFTIGALAVIRYAKIHGTKHRPWLTTLLMRRPAKVAAIALANKMARMAWAIMAKGERYKEPAALAA

SEQ ID NO: 403013 - protein, 472 aa, unidentified
MKDRRLVGIDLGITSAHTVRILDGEGTTIAKRKCWPTTESLSEVETEALRGCAAATALEVVMEPTGPAWLPIAVFFSARGHQVFRVSSQKASDLRRFLSRHTKTNGIDAETLARLPLFDPTGLHALELPTAERAGLDRRVRACDRLTQAGATHKRRIKDLMRQLIPMSPLSGDLGVADLAVLERYADPNALVRLGEKRLGDLIAKASHGHQGLERAREWLGAARAALELYEGHPAVAFSDLAAEVASEARLLGAVQRELAAHGAVREEAYGVVDPDALARSLPGLATIGGPALVTTMGDPGRFKEGKQFRSFSGLTPKASETGETDRKGQPMSKAGSSLLRTTLVRAADTARKLDPQLARIYFVQMTERGKDHLGALCVVAANLAERSWAVMARGTPYVICDTDGRPVDSEEAKAIIAERFTVPPEVRARRRSNKSGGKAPKNVLSGQSTPRAQGGSTRGYLPPNASSALAS

SEQ ID NO: 403014 - protein, 339 aa, unidentified
MKLYSAIDLHSSTNHLAIIDDDMKRVFAKKLTNDSQIILDALSHYQEDIVGVVVESTYNWYWLVDALMDEGYQVHLANPCAIQRYSGLKYSDDTHDAFWLARLLKLGILPEGYIYPKQERPVRDLLRKRGHLVKLRTSLVLSLQNIITRNCGVKVCSNDLKKLTEDCVSAHLCGNEDLSLCGNVSKESIDVLTRQIRRIESFVEKKLKVTEPYTNLLTIPGVGTILALTIALETGPISRFPTVGNYVSYCRKVASAWLSNDKRKGTGNRKNGNKYLAWAFSEAAEYARRYHRASRNFYNRKLSHSNVWVAHNALAHKLSRAAYYIIRDNVPFAEEKLYR

SEQ ID NO: 403015 - protein, 355 aa, unidentified
MNSEKYIGLDVHQATISVAVLDSTGKLIMESILETKAATILQFLAGLRGTLSVTFEEGTWAAWLYDLLKPHVANLVVCNPRKNTLLKDGNKSDRIDARKLAELLRLNNLKPVYHVESGVRMLRELARSYLTIVQDLTRVMNRLKAVYRSWAIPCAGRDVYYSRHRAQWLAKIREAGVRRRAERLYEQLDMLQHLRQQARRELLAEGRKHAVTARLRQIPYLGPIRSVLAVALMQTPHRFRTKRQLWAYSGLALETHTSADYRYVEGQLRRSKKVVAIRGLNKDHNHDLKGLFKAAATMASVRPGPFQDFYQAALVKGIKPTMARLTLARKIAAITLTLWKKGENFDAEKLKSQAA

SEQ ID NO: 403016 - protein, 343 aa, unidentified
MGEVSTIGLDIAKSVFQIHGVDVDGAVVVRKRISRAKLLEFFSALPACLVGIEACPTAHYWSRQLGVLGHTVRLLPPSYVKAYVKRSKNDANDAAAICEAVTRPSMRFVATKSEEQQSSLMLHRSRQLLVCQRTMLSNAIRGHMAELGIISAKGRNGTAELLKIIADEQDDRIPVAARFSLEVLARQYAAVRAEIAAIEKRIHAWHRSSEESRRLEEIPGVGPIIATALVAEVGDWKVFSSGRSLAAWIGLVPRQHSTGGKERLGRISKQGNRHLRWLLVAGAMAVIRYARQHGTKRPWLARLMDRRPIKIAAVALANKIARMAWAMMVRGERFKEPKLLPAA

SEQ ID NO: 403017 - protein, 394 aa, unidentified
MFIVGIDIAKRSHEAIIIAEDGQVVRKAFSFRNNCTGYNLLLEQVRRLTLVKSQIVFAMESTAHYWLALYARLLKDGYTVMVLNPIQSHSLRELYIRKTKTDARDSLIIADLVRFGRCKASNVPQDKILALLELCRSRAYLVDMAADLKRKLIALLDRIFPEYESLFDSVFSKASIAVLSKYSTPQKVKNANLRKLTDLLMESSNGHFGEWKAHQLKEAACSSFGIDDSGGVYSTLLGMFLEQILSLTAQADSLEKQISVFFQEFNNPLTSIPGVGTVLAATILSEIGDITRFSSADKLLAYAGLDPSVKQSGEFKSNQNRMSKRGSPYLRAIWLASTVAVHRDPMFQTYYEKKISEGLHYMNVIGHVSRKMTAVIFAVLRDGQPYQPILQSAG

SEQ ID NO: 403018 - protein, 350 aa, unidentified
MDKELYIGVDVSKQTLDLAYYDGESIDWKKAHIKVSNNNAGFKKIGSWVAKVSKGFDIVLFCMEYTGLYTQNFRLWLEEKHYIYRMVEPRKMHRFEPDLDDGLRSLDRIKTDELDSFRIAIYCEQNHRKILRNPSKLPPPVYFKLKRLLAERKQTVKQSVLYKQQLHDICAYDTDLSVERKNGQLKTLNDALKGIDNEIDMYIKEDADISKNFSLLTSIPGIGRVVALETIVLTENFMAIDNPRKYACYIGVAPFKKESGTSVRKGSSVSKKGFKQAKADLSIACLVCMQHIPNIRDYWERKKKEKCSGIVFNAIKFKMILRMFAVIKRGTPYVETDNYRNGKNKQPGVN

SEQ ID NO: 403019 - protein, 315 aa, unidentified
MTNTKTRKSVVNVGVDVGKVSLDIVIHEKQLHWQEDNTVAGIKRILQRLSHYRVERLVMEATGRYEFELAKAAYEKGLPVCIARPLSVRRYAGAVEQLAKTDKIDAAIIAEYAAVVQPRATPQKSKNLIAIKNLVVRRRQLVNLRTQEMNRLKIMGKTLEVSCRRIIRALDAEIGRMEKRLATHIEQQAEWTEKQALLTSAPGVGNTLCYSLLADLPELGTLNNREISALVGVAPINRDSGRLRGKRRVQGGRAAIRAVLYMATLSALQCNPVIRAFYQKLLAQGKHTKVAITACMRKFITILNTMVKNKTEWAY

SEQ ID NO: 403020 - protein, 483 aa, unidentified
MKKKNIYVNQSQELLRLFEEAGNGSRVMCVPMDYAKKDHVVMFCDGYGHILRKPFPVKNTPEGIEYLTEQVIRSCRHRQIDTKHVFFGGEDVGSFAENFIHTLRSGGWIVAGVNAHDAKEQRANLQASTDRLDLMGIASMLLNRRANCSPAQSGIYCNLRTVVRHRRNLVAMSTEVRNRIHTVVDRLFPGFLDDKKSGISPFSKSSLYLMENRFSPRQIRRRKRPKLIEILRRYGTGNPENAAAKLQEYAARVLHTPDEYISTLQLSLAHHIKHFRCLQDSIHQLEHELAVWLAQTQGAFLTTMRGIGIVLAGGVCAEIGNPYVQKPLNNLVSYSGIIPRVKQTGGPEGKTHTGKVAKRCNRILKDYVVQSANQLGLHGPEDLMADHKRREAAGQHADFGIGRRYLRTAMHLMRTSQIYLPQRLRSNAEATPEERTGYYLMTWPALREKWNKADALEAAFDKDRPLGRWRNMIQELYGIKLKL

SEQ ID NO: 403021 - protein, 337 aa, unidentified
MNVTTIGIDLAKSVFQLHGVDAQGAVVFRRKLRRGGVLDFLRDLPVCLIGLEACATAHFWAREIGALGHEVRLIPPAYVKPYVKRQKNDAADAEAICEAVTRPSMRFVPVKSEARQGVMMLHRTRDILMRQRTMLLNAIRAHLAEFGIITAQGPHKLAVLLDTLDEDRLPAIARSALTSLAAQLDSLAAEIRTLERQLMAWHRTDETSQRLETIPGVGLITATAISASIPDPSVFKTGRQFAAFLGLVPRQNSSGGKERLGRISKMGDGYLRRLLVVGATSVIRRVGTNTSATGEWVRRLLERKPARVATVAMANKTARIAWAVLARSETYRAPARA

SEQ ID NO: 403022 - protein, 375 aa, unidentified
MGDHSEAFVAFDTSKLRNAVAIADGGRAGEVRFLGEFESSTTATSKLVRKLAAKYQRVTFCYEAGPTGYELHRQIKALGHECLVVAPSLIPKKPGDRVKTNRRDAVSLAKLLRAGELTAVWVPDCRHEAVRDLTRGRETAVIDLRSKRQQLSAFLLRQGRWYPAGKKTWTKAHMNWLASQKFEQPERSIVCEEMMFAIRQAQERVERLEQAIRAAVPDWSLAKGVTALMALRGIDLISATGLLAELGDLSRFRTAPELMGYLGMGCSESSTGDTIKRGPITKAGNRRARRTLVECAWSYQHPPRIGIAKQEKVAAAPPKVREIAWKAQSRLNRRYRALIRRGKLKTVAITAVARELAGFVWAVAREAGSAEPATK

SEQ ID NO: 403023 - protein, 370 aa, unidentified
MEAIYIGVDFHSRQQTICYLKTETGELVIRELKHQDKEQLRAFYQQFQVPVTIGLEASGYSPWFEALTEELGCQVWLGDPVEIRRRARWRQKSDRRDAELIWDLMVHNEFPRLYQPPLASREVLRMLRYRQKLIKMRTMTKNSLQAIALQAGLAKGPRLFSAGGQEEFRNATMSPVLQWQREHWCSLLKPLNEQLLETMVWFKAQSKNDSQIARLRTHPGIGLLTSLCLLHTLQPVSRFRNQRKVVAYAGFDPLIRSSAERAIYLGISKAGSRMLRYLLVEAVHTAVRYDEDLKRFYQRVAVRRGRAKAIVATARKLLIRAYIMMRDEIDYAEFRRRAVAVRLARRGQGPAPTAGALPEVLIGQSTSPGV

SEQ ID NO: 403024 - protein, 332 aa, unidentified
MQLLAIDLGKQSFHIHGITDEGEVISKKVSRLKLEAAVQKLSPETVAMEACASAHHWGRCFEAMGYPVRLIHPRFVTPFVKGSKNDAVDAEAIHEAALRPTMRFVPVKTTEQQDLQMLQRTRDRLIAQRTGLINHIRGLLGEYGIVIAAGAFRFRKDVRNVVAEASLSLLAKQNFNALIAEFEALDKRITEIDKKLVAICRTDDRCKRLSTLPGVGPVIATASIAAVDDGRHFSSGRALAAWIGLVPRQYTTGGKPRLGGIGKRGNQYLRRQLIHGARSVLIRIAGRNDRRAKWAQDLLARVGHNKTLVAIANKTARIAWAVLRSGESYKTA

SEQ ID NO: 403025 - protein, 349 aa, unidentified
MAMAIVDSARLIVGGVDTHRDVNVAAVVDMNGGLLGVESFPTTGNGHKMLASWMSGFGTIERVGIEGTGAYGAGLARHFARASVTVIEVDRPNRQKRRRNGKSDRLDAVEAARGALSGRCEGFAKSGDGHAEALRALLVAKRSARSTRIRTIVQLRHLMFTAPDELRAKLGGLSAALLVSEAAKLRPRPGGDIVMHGVKTTAVILARRVQALDVELALIDAQIGPLVKAAAPALLDLFGVGIDTAAVLLVTAGDNPQRIVSEAKWAMLCGIAPVPATSGLMDGRYRLNHAGDRQANNAIWRIVITRLGQHEPRTVAYMERRLAQGKSKRYIIRCLKRYVTREIFLALPR

SEQ ID NO: 403026 - protein, 310 aa, unidentified
MDAIFVGIDVSKDRLDVHVRPSGEAFVVTRDGKGLEELVERLRALVPRLIAVEATGGFETIVAAAVGGAGLPLVVVNPAQVRHFANAIGRRAKTDPIDAAVIALFTEAVKPELRPLPDEAQRLLAELVGRRRQIIEMLVAERQREKRAANVPVRKSILRHIKVLEKELPEIDGDIGTLVRGSPVWREKQDLLVSFPGVGDKLARTVLAELPELGDLTRREIASLVGVAPYTRQSGHWKGRSMISGGRAAARAAVFLAALVASRHNPVLKVFHQRLRAAGKPKMVALIAVARKLLTILNAMLRDKKKWQPA

SEQ ID NO: 403027 - protein, 340 aa, unidentified
MRELYAGSDLHGNNNLLGLIDGEGKRVFNKKLPNDPQLIREVLEPFKEEIVGIVVESTYNWYWMVDALMDEGYKVHLANPAAIQQYSGLKHIDDKHDAFWLAEMLRLGILPEGYIYPKEERPVRDLLRKRGHLVRLRTSLILSLQNMLSRNLGMRVRVNEVKGIREDRVSGLLGGSEDLALAGRVSKETIDFMTHQIHQIEGVVEKRVRLKEQYRYLLTLPGVGKILSLTIMLETGPISRFATVGDYASYCRKVPSQWTSNGKKKGCGNSKNGNKYLAWAYSEASDFARRDYPEPRAYYQRKMQKTNAAVAHSALSHKLARAGYYVMKDQVPFRAEKLFG

SEQ ID NO: 403028 - protein, 333 aa, unidentified
MTRRREATPVWIGIDVAKQTIDVARGPAGPLERVERAPGPLQQWAQSIPKQARVVLEATGGLERVVTTVLRARGIAVCVVNPRQVRDFAKATGQLAKTDRLDARVLAHFGAALMPRVTLARASDVDALRALLDRRRQLVETRTAEKNRRHTASETVIGSIDDHIAWLDQQIEQLDQAIEAAATACTALAEPLGRLQAIPGVGRIVGLTVLTHLPELGTLDRKRITALAGLAPFACESGLQRGRRAIWGGRGDARAMLFLAAQSAARWNAPLRHFYERLVGRGKPKKAALAAVARKLLIAINAMMRDQRPWPTDSSQDSIPTLTKPGLSGQRPR

SEQ ID NO: 403029 - protein, 370 aa, unidentified
MKEHSIFVGMDVHKNSIDIAIAEKGRQGQLRHFGTIESSLTALDKVVRKLVSNGKRPCFVYEAGPCGYEIYRHLTAKGFDCAVVAPSLVPRASGNRIKNDRRDSLMLARLHRAGELTAVCVPHDADEALRDLTRAREDAKIDEKKAKQRLLAFLLRSGHRYSGRASWSQAHRRWLADLKMPHRCQQIVLQEYIEALSHCSQRLQRLTDQIRQMVPQWRLFPVVQALQSLRGVSLIVSATTVAEIGDFKRFQNPQQLMSYLGLVPSEHSSGEKTRRGSITKAGNTHVRRMLVEAAWAYRFRARVSRALLQRHEDLPQAIRDMAWKAQVRLCARYRRLWARGKIKAVVTTAIARELCGFIWAIATAVEGPTA

SEQ ID NO: 403030 - protein, 321 aa, unidentified
MSPSSVYIGIDVSKSLLDVAQTPRGEFWSVGNDAEGISALVEQLKALKPALVVLEATGGYESAVAATAMQAGLPVVVVNPRQVRDYARATGRLAKTDKIDARILAAFGEAVRPEIRDLPNAALQALSSLLRRRQQLVEMLTTERNRARLAVAVVRKDINAHIHWLEKRLKDVDRDLHQSIRSTPAWREKDDLLQAVKGVGPVLATTLLAQLPELGRLNRKEVAALVGVAPFNRDSGQFRGRRTVWGGRAGVRAVLYMAALSASRHNPVVSIFYQRLITAGKPEKLALTACMRKLLIMLNAIVRDGQFLTITTPGLAKQDSC

SEQ ID NO: 403031 - protein, 410 aa, unidentified
MVERRVRAGLPPVALAIGTPARSKAQVVEAEGRPAMRTVALDLGGRKTTFCEVAEGRVVERATVRSLRQLERWLGPNTPPARVAFEACREGWYVATLLQRWGHEAVMVDTTRSGAIGIGRHGRKTDRIDGDTLALALEKNQIPLAHILSPHRRELRFQLSVRRALVETRAQHVAMIREIVRARGGRIASCDVSAFPAKLQETELDEATRLLIRPLESLLGALAERIGEVETKLAQLCEQEPVAMRLMTAPGVGLIVSAGFVSVIDEARRFRRAHEVESYVGLVPSEDSSGGKRRLGAISKRGNSYLRALLVQAAWCILRQKDEANPLVLWGHQVERRRGSRIAVVAVARRLVGILWAMWRDGTVFDPARVGQMSAIGLKFYSLKLGLQATAMARATKKAARIAKTTMAIS

SEQ ID NO: 403032 - protein, 423 aa, unidentified
MDVLYERVAGLDVHKDTVVACVRIVADGRTKRECRTFATTTEGLKELRAWLEECQCTHVAMETTGVYWMPVFRILDAGKFELIVANAAHIKNVPGRKSDMNDAMWIADLLACGLIQASFVPDEEVQELRALTRTRKQLVREQTRHVQRIEKTLAEANIKLSSVLSDIMGATGRRMIEAMIDGVRQPNKLAELAGKQIKATPKELYDALHGRLTDHHRFLLDLHLKQWDGLDKTIREIDREIDQRIGRLRTKGESGEVPFRTLIELLSTVPGISTVSASAIVSEIGCDMSRFPTAGHLVSWSGLCPGKNESAGKRKPSRLRKGAPWLKTMLVQCAWAAKRKKDSYYRAQFFRLQARRGPQKAICAVAASILTAIYHILKEGTEHHDLGATYFDRRPVAVKASRLVAHLKKLGFIVQLQPIPEAA

SEQ ID NO: 403033 - protein, 415 aa, unidentified
MEGLFERCAGLDIHKDTVVACVRVPGEEGGRYQETRTFGTTTEQLLVLLDWLRSWGVTLVGMESTGIYWRPVYYLLEDHMECWLLNAQHLRNVPGRKTDVKDAEWICQLVEHGLVRASFVPPREIRELRDLVRYRKAQIEERTREVQRLEKTLQDAGIKLSSVASRVLGVSGRLMLDALISGTHNPEVRAELAKGKLRNKLPALREALQGRFTGHHALIVSRQLAHIDFLDEAIAELSQQVDEVIAPFASKVALLDTIPGVDKRTAELLIAEIGADMSVFPTHRHLASWAGICPGQNESAGKSRSGKTRKGSKWLRAGLTEAAKAASRSKGTYLNAQYQRLRGRRGHQKATIATAHSILVAAWHILSREVPYADLGDDYFIRRQAEHAERYRNRLVRQLERLGHKVTLEPLPQAA

SEQ ID NO: 403034 - protein, 293 aa, unidentified
MNEVSTVGIDLAKNVIQIHGVDSDGKVVVRRQLRRSHFLAFFEYRPACLIGIEACSGAHHWGRQLQEMGHEVRLMPRSYVKPYVKRNKTDAADAEAICEAVTRPSMRFVPVKSEADSAALVLHRARDFLVGQVTQTGNAIRAHMAEFGIVTAKGSKRVASLEGELDTLPEAARLPLQALFEQLAETQARIDRLTDEIEEVHQQNEVSRRLVSIPGVGVLTATAIAATTPDVSNFSSARDYAAWLGLTPKQHSTGGKPRSGGISKMGNRYIRRLLYLGAMMSQWNATGPRDIGE

SEQ ID NO: 403035 - protein, 372 aa, unidentified
MNYNTVYVGMDVHKESFSLCAYTIEAEKASHYQRTEADYKKVLNYLEFLRTIYGDDANFICGYEAGCLGYTLYHQLIEHHVNCVILAPTTMLEQCSRRRIKTDRRDAEIIAKCLAQHNYSPVHIPTAKDEETKEFLRMRDDHKLALKKVRQQILAFCLRHNYRYDGKSHWTAAHLKWLKALTPEALYKEILDEYLLTYQTLSDKIERLDQPTEELATQDEYKEAVKKLCCFIGVKTHTALSVLVEVGDFKRFASAQHFASYLGLVPGEDSSGDDQNRLGITKAGNRHVRLLLTEASQCYARGQVGFKSKELKSRQSGNTPAVIAYADKANERLRRRYYKMVLNKYKKHNVAKTAIARELACFMWGMMTDNIA

SEQ ID NO: 403036 - protein, 434 aa, unidentified
MHWARFADYRGKEIGKPISFTSNRQGFEKIAARIGEICKGKILNNAETKSAAKLTTEPDSVKPKTKPETKSKQRNFNNTINSGQVFDNAIIGMEPTGHYRKTLADYLTNIDYKVVCVNPYHTKKAKELNDNSQTKSDLKDTLTIALSVKDGRFFNPYLPQDIYAELRVPANTRVSVMKRLMSVKNTVTAILDEYFPEIRTVFKNPTTGKASRQILKSCPFPSLILEMDESSLLTEIKKAVKKTVGAKKVKELITTAKESIGVKYGLQSAKLRLEQLLDESELIEKHLGRIESSMEETLMKTGYGELFLSVKGIGIITAASFLGETGDPLRFGGARQIANYAGYNLVEDSSSKSKSGTHISKRGRSQLRSLLYNMAFTMVSHNAEMKALHKYLTTRNKNPLKKKQSLVAVSKKIITVIYALLKKQAVYTFSGLTR

SEQ ID NO: 403037 - protein, 329 aa, unidentified
MKIQHIIGADLSKKSIDLVCHLLSTHLQIGNSIAGFKDLLQWLKEQKINTSTIMIVMEHTGLYSYCFEKFLHQHQIAFCKVNALSIKRSIGLVRGKTDKLDAARIAAYGYEKKDKLAIDVPASDALKRLQMLHATRNRLVKQRTALICAIKEYRHIGIQEKDIILQTQLQLIKNFDHQIEKLMTQIDTIIGEQESLKQNFCLLQSIKGVGKILAITAIIKTSNFTRFANARKFACFCGTAPFEHSSGTSIKRKARVSHLADKQMKALLDLSAKSAIQYDKELHDYYLKRTEAGKSKMSTINVVRNKILYRMFAVIKRQTPFLENYLQAV

SEQ ID NO: 403038 - protein, 340 aa, unidentified
MNATTYGLDIAKRVFQMYWVDAQTGEIANRRFGRDDLITFLAQRPAGRVALEACGSAHWWARKIRALGHEVVLLHAQFIRPFVQTNKTDAADAKAIWTAVQQPGMRTVAAKTEDQQAMLSLHRMRSQLVKFRTMQVNQLRGFLYEFGVTFRAGRLAGLAEVRERMAELEDVLPGSIILNLQDQLRRIDAFEQDIEQLEKRIGAWQKQEAACRAISQVPGIGRLTATALVATMGDAKTFKSGREFAAFLGLVPRQSGTGGKIRLGSISKRGDPYLRTLLIHGARSVLCHAKVPTAWQKGMQERRPGNVVAVALANKMARTAWAILAHESTYEMSHVSIRPG

SEQ ID NO: 403039 - protein, 319 aa, unidentified
MAQNDLVVVGIDVSKDKVDACIRALALQQTFPSSAQGHRQLVAWLRKHQVNKAVMEASGGYERGWARVLREAGIEVRIVDPKRVRSFAQSAGRLAKNDAIDAQMIAWFAETFSQAPGQVHDAAHEELVALVKARIALVDLKTRLEVQHQHAAPASVQKARARVLKSLVGELAKLEAIIAATIKATPCLAERAEIIESVPGLAETTSANLVAGMPELGQVSNEIAAALIGIAPYDDDSGNRRGERHIKGGRRWVRNALYMPCVGAATLNNPVLKAYYDRLIAKGKKPKVALVACMRKLIVILNTMIATGQKWDPSRYALN

SEQ ID NO: 403040 - protein, 347 aa, unidentified
MRFYNRPHQYYCGIDLHVKTMYVCILDTTGQVLVHRNVPSTPAAFLEVVAPYRTGLVVAVECMFTWYWLADVCAAEGIAFVLGHALAMKAIHGGKAKNDKIDSHKIAVLLRGGMLPQAYVYPAAMRSTRDLLRRRLHLVRKRGQLLAHIQNTRAQYNLPAFEKRLAYPGNREGVVDHFPDPSVRKSIEVDVALIDQYDALIIDLELTIVREAKRHDADAFHRLRSIPGIGKILALTILYEIHDVTRFDRVQEFASYARLVKGRRESAGKVVGGGGAKMGNVHLKWAFSEAAVLFLRHSAEGKKLLARLERKHGNGKALSILAHKIGRAVYYILSRETVFSMEKFLAA

SEQ ID NO: 403041 - protein, 394 aa, unidentified
MKLVGIDVGKNSHHFCVMDKETGEFNVTPSSFSNNKEGFDFLINSLKPYSKKSILLGMEDTGHYHVALLKFLLSNGYTVALINPKTTDLTRKMEGGITKNDKLDTITICDVLDTPERKKQYRITKVDRFDLYEQRQLTRHHHNLKEELNVYCNRLQKSIDLVFPEFNTLFSSKYGVVYMNLLKTFGSAEAIASTDIRTIRKCFEIKGKGNRISLTPEKLKECAKNSIGISSEVETIQIKHLVSQITLIKEQIAEIDKKIEEFSITNNSPILSIPGISHFSGTSILAELGDIGNYSKPSQIIKFAGVAPYHYESSQYNAQHTAITKKGSKYLRKTLYQIILPVIKYNPVFKKYYLLKISQGKGHRCAQGHCIRKLLRIIYHLLETGQSFDPALLR

SEQ ID NO: 403042 - protein, 351 aa, unidentified
MTMLADRVDFVIGVDTHKDSHTAAVLSAAGATLSRLTVPATGRGYRELRLFVARAAVGRRVWALEGSGSYGAGLAAHLLEAGEWVVEIDRPKRPARRNGSKSDELDAERAAREAFGRDHLAQPRLRGDREAMRVLVSTRQGAVSARTSAINLLKELVVNAPEDLRKQLRPLATPELVRHCAHMRTSSCRTTEYRVTVLAMRSAARRILALGAEAADLEAELEQIVGRVAPRLLAEPGVGAVTAAQILCAWSHPGRVRSEAAFASLAGAAPVPASSGQTVRYRLNRGGDRQLNRALHTVAMSRLARDAETQAYAARRTEEGKTPREIKRCLKRHLARRFFKLLESGDAALAA

SEQ ID NO: 403043 - protein, 359 aa, unidentified
MQDTRKEINFKGQNIYVGIDSHLKNWRITIMTENLLHKTFSQDPSAKLLVQYLKKNFPGANYFSAYEASFCGFNSHRELEKLGVKNIVANPADIPTTDKEKRQKEDRRDSRKIAKTLRAGDLKGIYIPSIESEELRSLVRYRQSLVKDISRGKNRIKSTLYYHGVAIPNEMDNASKHWANVFTNWIKGIELSTSYGTIVLQDLLENNLILRKRLLSVTKEIRKAANTDKYIKAYGLLCNIPGIGPIVAMTIISELETMKRFKSLDKLCSYIGLVPTTESSGEIEKIGRITPRANRVLRGCIIESAWVAARIDPALSLSYNELCKRMKPNKAIIRIAKKLLNRVRYVLKNEKEYVYSIVS

SEQ ID NO: 403044 - protein, 312 aa, unidentified
MEKLSYGGIDVSKDCLDVVVLPEGWFFSVSNDTAGWAELVARLRPLAVSAIGLEPSGGYERGIIRALLAAGLSVRRINPNKLRQFARARGVLAKNDRLDARLIAEYVAIMPTRVVQRDDAVERLAEIVTMRRQLCDEHVAVENQAAHLEDAMLRRLSKRRLVRLEADIRLLDKRLAEMVATNAAFAQLYELLTSMPGVGPVLAFTLIALLPELGKMSRKQIAALVGLAPYDFDSGKLRGHRSIYGGRMPIRNVLYMAALSASRYNPALKTFSNRLAHANKKSKVIIVAVMRKMITTLNAMLRDNAAWQPQSN

SEQ ID NO: 403045 - protein, 418 aa, unidentified
MATPAPTAISGREVNRMFCGWDWGSTEHAVCLIDDHGAVINRWMVSHTEDQLMLVFAELAELVGGDVERVPIAIERGEGLVVGLIAGAGHPVWVVEPSAFKAARPRWGSAGAKSDVGDAFMLADYARTDGHRLRRVEPVAEATRNLAALVRARMALVEARTAASNQLWAILAEHWPSAAVVFQKLTSQIALAFLTDYPTPQSAALLGEGRMGQFCRRHSYRGGKSATELVRRLRAAPASANPIAPTILEAIVHGSTAQIRLLNTEITRLERDISGALAAHPKTPLLQTLPRVATVSLAALIAEIGPLLERCQGPEQVAALCGASPVTRASGKSRTVGFRYTANKPARVAITGFADNSRHASAWASDAYRRARARGARHPHAIRIIARGWIRVIWACWTTNTIYDPSRHGAEQLLAPAT

SEQ ID NO: 403046 - protein, 375 aa, unidentified
MEHHSEAFVALDTAKLRNAVAIADAGRNGEIRYLGEIDNTEAETRKLVAKLASKHARLTFCYEAGPTGYGLYRLIKSIGHDCLVVAPSLIPSKPGDRVKTNRRDAVNLVKLLRAGELTAVWVPDERHEAMRDLVRARDAAVKDYRIKRQNVSSLLLRLGRHYPGKKTWGRTHINWLTGLKLEHREQRIAFEEMLLAVRQVRERIERLEQAMREAVADWTLAPVIEAVQAMRGIDMIGAIAFLAELGDLSRFQNPRQLMAYLGLTPSERSTGESVKRGGITKAGNTRARRLLIEAAWSYRFPPRVSKDMQTRIGAAPRTAREIAWKAQMRLCGRFRTLTRKGKRPTIVVTAIARELSAFIWAINREVIGSHATANQ

SEQ ID NO: 403047 - protein, 384 aa, unidentified
MIFLELGRYLGPDIHETVSKASKGDEEDCGFNRLFMKKIILKQALGVDISKASLSMCLGIMNGDLSKDFIPRADVSNDKIGFKKLAKWLEKVSGQGPNPIIVMEATGVYHEEVALYLNNLGYAVSIMQSGRVKRYAQSLDQRSKTDALDSKMLSMLGCEREVPVWEPPSALMQEMKALSRERSALIKTKCIEKNRQGAIESSAYSDKKEIKRHKQRMRLLELQIAEIEVEMEEKTAGDSFLSRKLSYLTSINGVGFISAITVVAETSGFALITSGKQLTSYAGYDVVLKESGNYRGKTKISKKGNSHIRAVLHMPSMTCIRLNPTLKTFYQRLKPTKAKPIIALVAVQRKMLILMYTLWKNEEFYDAEFEKKKAANLQETCCTG

SEQ ID NO: 403048 - protein, 407 aa, unidentified
MNQLVVIAGVDTHKDTHHAAVITATGQHLGAAQFPTTTAGYRALAAFIAGFGTVAKVGVEGTGSYGAGLARYLSSAGVPVLEVLRPSRQIRRMRGKSDEIDAYAAAETALAGTNCSVPKDRDGRVEAIRVVATARRSAVAATTDAVLQIRDILVTAPEPIRARYRALRGKPLIAALAKIRLHDPDDVVAEHTLTALRALARRVQHLRIETDAHEQTLDDLVTRVNPALLQAKGVGVICAADLLIAAGENPDRISSEAAFAALCGACPVPASSGKITRHRLNRGGNRHANRALHRVAVVRLHTDQRTRDYTASRRAAGKSSKEILRCLKRAIAREVYHLLTNPPEPISTTQLRPLRQAAGITIETAAHDLHWSMATVSHIERGHTSNRAAIITYRDYLATQQPPGCAI

SEQ ID NO: 403049 - protein, 311 aa, unidentified
MENVVGCDVSKEWIDVCTVDRAFRIDNNVQAAARLARDLPQASVVGMEATGELHIVLADTLAKRGHVVFVINPRWIHNYGKSLGLRGKTDRTDAALIARFVAAEGHGLYRYVTASAQSRQLRKLLLQRRKLVELKVATRQSLGKVGASIVRQFDRSIERAERAIEQLVRQSPDWNSIYERLLGQPGVGPVLGSHLLDVLTRIPFKNQDAFIAHTGLDPRGCDSGQKRGRRYLTGHGDAALRSTLFVAAMSASRRGPWRPYYQAQLQKGLAPTAAIVILARKLARVAFRLFKSGNKFDLALVPEPKISGHRP

SEQ ID NO: 403050 - protein, 355 aa, unidentified
MSSEKYIGLDVHQATISAAVMDSQGKIIMESILETKAATILEFFAGLHGSLFVTFEEGTSAAWLYDLLKPHVTEVLVCNPRKIPLHKQGNKSDKIDARKLAERLRLHDLTPVYHGENGIRTLRELARSYLTVVKDLSRVMNRLKALYRSWAIPCAGRDVYYTRHRSEWLDKIPEAGTRRRAEHLYEQLDLLQHLRQQARRELLTESRKHAITAKLRKIPSLGPIRSALAVALIQTPHRFRSKRQLWTYSGLGLETRDSGEYHFVQGQPRRRKKQATIRGLNKDYNHDLKGLFKGAATRASVKPGPFQEFYQRSIAKGIKPTMVRLTLARKIAAITLTLWKKGEDFDIHKLNSHAA

SEQ ID NO: 403051 - protein, 356 aa, unidentified
MSKNSMLFVGVDLGDKFSHVTVLDQEGELVEEARLPTNRAAFERKFSVLSRSRVAMEVGGHSRWASQLVEDLGHEVLVANARKLRVIYTNPRKGDEADAETLARLARLDPKLLSPIHHRSPQAQAHLSMIRSRDVLVRTRTLLINHVRGTVKASGERLPSCSARSFHHKVGDSLPEALQPAVLPILETVARLTEQIKVFDQKIEELCKESYPETQLMRQISGVGPLTALAYVLTLEDPGRFHKSREVGPALGLVPRRDQSGDQDPQLHITRTGDVYLRRLLVVAAQYILGPFGPDCDLRRWGLKVAERGGKNAKKRAVVAVARKLAILMHRLWKTGEAYDPSYQIRGEIEAPSLAA

SEQ ID NO: 403052 - protein, 428 aa, unidentified
MNFNTQNAKIASITEKTLIIGIDVGSETHFARAFDWRNYEYSRKPLAFSNNEAGFMEFKAWMEDIAEKNGKDVVIPGMEPTGHYWFALGTYLQDNGMRPVHVNPHHVKKSKEMDDNNPSKNDRKDPKTIATLVNEGRFSYPYIPTGIYAEIRSLSNLRFQTQEEITRIKNRIARWFSIYFPEYKDVYRDLEAVSGMMILKTASLPADIKKLGVEGVNKIWREAKLRGAGLKRAKTLVAAAEHSVGSQEAPDCARLELKNLLNDFALYNGRLEELLQKIQEKLSEIPYIDKLLEIKGIGLITVSGFIAEVGDIRRFDNPKQLQKLAGYAIVKCSSGKHEGESRISYRGRKRLRYVLYEAAISVIGKNAEFKEIHNYYQTRTENPLKKMQSVIAVACKVLRVFYTILTKGVDYDGAKLMSDIRRPQLKAA

SEQ ID NO: 403053 - protein, 343 aa, unidentified
MTLVGCDLYTRKQQVAALDTETGEMCERELVHDGSAVEEFYAALPRPVIVGIESTGYAIWFHALMHRLGHTVLVGDAAKIRAMVVRKTKTDRRDARHLLDLLRHDRFPTVWVPDPATRDLRALLTHRRRLVRIQTMLKNGLHAIALNERLVGGSKLLRHAGLAQLQALPLLSYTAQRRDHSLELLELPHTKIQQLDGAIATAALAHPDAPRLLTHPGVGPLTALAAVVVLGPVTRFADAKHVVSYVGLAPSLNASADKYRLGRITKQGSSLLRWVLGQAAPHAARLDVDLNRTYCTLRQRRGRAKARVAVTRKLLVRLFIMLRDHIDYAEFRRRGRPPVPVAG

SEQ ID NO: 403054 - protein, 338 aa, unidentified
MTTTIGTPAIDLATGGFQVCAVGADGAVPFDRALSRTRLAALPAERPACVVAIEACATWRHRGRVAQRHGHEVRLVPAAYVKPFVKRRKNDRADGEAIAEAASRPTMRFVAVESAETQGRAVAFRTHRCLVRQRTQRVDALRGHPAEFGLVAPKGPASLKALEIALADETGELPGPVREMGAIHLERIGRRAEVVERLAEELETASRSDAASRRLRTIPGIGPVTAGAVAAFAPDLDTFESGRDFAARLGLVPRQRSTGGKVEPGSVSETGRTDIRRLPIVGAMSVIRWGVRKGGSSHRRLAAFVARKPKTVAAVAPANGTARMIRAVTTRQEDHRMA

SEQ ID NO: 403055 - protein, 420 aa, unidentified
MRNAGIHANSLLEVRRMYNAVGIDVSKGKSTVAVLQPGGTVIRKPFDVSHTSQNLNELADYLSSLDGTTKIVMECTGRYHEPMIKALSEAGLFISIVNPHLIKNFGNNSLRKVKSDPADARKIARYTLDNWTELRQYSGMDNTRTQLKTLNSQFSFFMKQKVAAKANLIALLDNTYPGVNKLFDSPTREDGSEKWVDYAYSFWHADCVRKIGLKAFTERYMSFCKKHHYIFQQDKPEKLFNASKELVAVFPKEKTYKLLIHQSIQQLNLASEHVERLRREMNELASTLPEYSTVMGIYGVGKTYGPQLIAEIGDVSRFTHREALTAFAGVDPGVDESGQHKSKSNRASKVGSARLRKTLFQIMTTLLQNAPEADPVYRFLDKKRSQGKPYYVYMTAGANKFLRIYYGKVKECLRNLEQTE

SEQ ID NO: 403056 - protein, 357 aa, unidentified
MSAAGASPKEHEEEAQDVLAVGVDTHKASLAACAIDGLGRPISERSFINNPQGHEEFLRWVGALAAPRRIGLEGAGGYGAGLARRLIDAGEDAREVPTILTHRERRRTGQPGKCDRTDALAIARVVARGERLPIAMASAMYRDLKVLVDYRQQLLAEQARVRNRLHADLQALLPGYGEQVGRLTLQSQLKAARRMLRPLDGVAAEVAILRLGRLEKIMKEANQVKCRIAASLGGSHQALTAITGVGAVLAAQLLAETGDPRRFHSSAAFAMNCGAAPIPASSGATRRHRLNRGGNRRLNRALYIVALTQVRCHPPARAFIERKRAEGHSWSEAVRCLKRHLADTVYSAMLRDQAAMP

SEQ ID NO: 403057 - protein, 477 aa, unidentified
MNEVLEKLSVEDGAEVNPLFEYGVGIDTHRDFIQVCVLVRAGAAIRKYESEHRTTWDGLVGAGEWIIDIIKGKSIPTIEPGPLRYTIESTSTYHLPVIKAVKGKPCVVNPVLAGSTKKKTDVLDARLLSYHCITGLWPESFVVPPDIEEFRLLMKQRQYHSRQSTAITNRINNYILRFGHTLGSYKSIRSIENRAVIEDMCADGYVYKGNCPGIEASRFICPDGLPYEVKNILKDMFSEYDAHVEKAKQYQKLAMDSAKKINWETDSGYVEGAVLIKNLLTVPSVGDLTALTWLCEIMTPLRFETASHLAAYCGCDPSLKVSAGKVTSQTRRKGNANLHFQLTKIAGTCINRHSEPFGQWGYAISKKHAKGGYKKASGAVARRIAVSLYYVHKQNVPFSYDKYNFYKIDVPCVPLCDIGFSKRLENLLSSTGLMDSKAIVESYLIGNIYEIKGLGKKCANEINTWIQLNKNRKTKEI

SEQ ID NO: 403058 - protein, 342 aa, unidentified
METAMLAVIGLDIAKRFFQLHSVDPETGEITKLKLKRAEMLPFFANRQRSVVAIEACGSSHHWARQLRSLGHEVRLIATKFVKPFVKGNKNDAADARAIWEAAQRPEMRFVPVKTEAQQAILALHTMRDGLVKARTAQLHQLRAAFYELGIDLPEGRHWCVKRLPEAFAGLENKIPAMVIDAFHDQYQLIVRLSERVEAIERKLDAFRRSDERCERLIEVPGVGLLTATSIVAAVGDAKEFRSGREFAAWLGVVPRHSGTGGHVRILNISKQGNSYLRTMVIHCARAVMARQKEQSPWLQRLMRERPWNVAVVALANKLARTIWALLAHGRHYIPEPRQAAA

SEQ ID NO: 403059 - protein, 341 aa, unidentified
MNITRIGIDLAKTVFQVHGMDEKGKTVLRKQLRRAQLLEFFANLPRCVIGMEACGSAHYWARKLSSLGHEVKLMAPQLVKPYVKSNKNDRNDAEAICEALGRPNMRFVPIKNPEQQALLALHRVREGLVAARTAQVNQIRGLLAEFGSIIPKGIAKMSPRVPEILADGANELPGMMRVLLARCYERFQRLDTEVHELEVRIVRWHRENETSQRLAKVPGVGPLTASAYFATLGAAQSFKSGRQAAAWLGIVPRQNSSGGKQQLLGISKRGDVYLRKLLIHGARAVLRQLKPEQAYSWLAQLAKRRHHNVAVVALANKNARILWALLAHGGEYQHDYVPARP

SEQ ID NO: 403060 - protein, 418 aa, unidentified
MKVVYPICCGADVHKTFLVATIITSQGITPHYSKKRFSTFNKSILQFKQWLIENNCLDVCMESTGKYWVPIFNLLEDTIRITVANPKWVRAVKGNKDDTKDSKWIGDLFRLGLVPGSYIPAKPIRILREYTRYRSKLISCKSSEKNRFQNAFTVCNVALDAVVSDMFGKSASSITDYLISSDSFNPEYCSSLLQRSLKKKAATVVESIEGYQMTKEQKERILMVRSHLKFIEQSIAKLDKKLDKLVLPYESAITLLCTIPGVDRASAITIISEIGTDMSQFANSKRLCCWAGLTPGNNESAGKKKSVRITRAGIYLKPALVQVAHAAVKSAISPYYRIKYERISKRRGKKRAIIAISRMILTAIYNMFITGEEFNPSDLYKIDMPQEMVEKQKEKAVKQAAKLLISLGLIKETDISMV

SEQ ID NO: 403061 - protein, 344 aa, unidentified
MVVLGTDAHKRNHTVVAADEAGVEIGSVSVGATPEGHLKLVKWAARWPERRWAIENCRQLSRRLEADLLEIGELVVRVPPKMMAGVRRSARTRGKSDPIDALAVARAALREPDLPVAQLDGPSRELRLLVDYRESVVKDRTAAQNRLRWRLHELEAGYDPAPGSLNRYKTLDEIDQLLAGHTSMVAELGRREVARIRELTREANQLERDISRRVVELVPSLLDIPGCGSLTAAKLVGEAADITRFKSRDAYAMWAGVAPIPVWSANNQRFRLNRGGNRQTNAAIHRIAITQLRIHPDAQTFIKRRLETGSTKREALRLLKRKLANVVYRNLLADTQQPALTQAA

SEQ ID NO: 403062 - protein, 385 aa, unidentified
MIVSTKVSSIIPAQFDIFAGLDVDKKSMATTFTDHGTLFKSLRLPYSSTQLLNYVDKHFPGKRIAFVYEAGPTGFGLHDDLMAQHRTCLVVASSMVATAPGNRVKTNRLDSKKLSVQLRGGELRGIHVPGRRYRELRHLVQLRDTQTRQLTATKCRIKALLLCEGIEFPERSGYWNAAAIDQLRRLPCTSEVRFKLDHLIGTLYFHFNSAALVQKRIRQFCQNDPELRQSISLLTSLPGVGGITAAHAVARFGDWREIKNVRQIAGFLGLVSSEHSTGEKENRGPITRSGDSRLRNKIIQCAWVAINKDPELRAFYRSVYQRQPKKVAARKAIVAVARKLTTRMYVVLKEQRPYIIRPEISAAPLTAEETVGPRERLDASQNEQL

SEQ ID NO: 403063 - protein, 385 aa, unidentified
MRGNAFIPRDYDVFTGLDVSKKSMSVTFTNHQGFIRSLNMPHKAEPLLHYVRKHFPDQKVAFVYEAGPTGYGLYDGLAAQAYPCLITAPSMIPRAPGQRVKTNRLDSKALSESLRGGQLQSIHIPSPPYRHLRHLTQLRDVLVSDLAGMKQRIKSLLLFEGIEFPPAPPGSQWSFLVKDKLRKLACSGTVRFKLDQLLDSVEFNEKQVLKTITEIRRFCRKDPELSQCIEYLMSLPGIGWITASQLLARIGDWRELNNIRQLGGFLGLVPTEHSTGERVDRGSITRTGDERLRSKLIQASWSAIRQDDELREFFRTVYRKHPREVASRVAIVAVARKLSVRISVVLMKQRSYEVREKVHSAPLTQEETSPQGTTRRQAEPGEKNS

SEQ ID NO: 403064 - protein, 316 aa, unidentified
MENKSIWIGIDVSKETLDIAKGSADCPYTIDYTAGELRKLVKALQKESVRGVVVEATGGWEKRLVKALQAGSIPVIVMNPRRVRDFAKAAGRMAKTDRIDAGMLALFGERMQPQERFSAEPADEKRRALFDRRRQLNDMLTQERNRLGLAPKEMRKEIKQHVDWLRKQLKDLDARVEKAMEADPVWKAKDQCLQQTQGVGPNLSLGLLGALPELGHLNRRQIAALVGVAPYNCDSGQQRGNRRIIGGRRGVRNALYMSTLAAIRCNAVIRDYYQHLMSKGKKFKVAMVACMRKLPIYLNTLMRQHLALQEHANAHA

SEQ ID NO: 403065 - protein, 400 aa, unidentified
MSPPARFVGLDIHKEYLVAAAVNALQETVLKPQRVAIPDLAHWIESQLCEQDAVVLEMTTNTYAVHDALLGRVHSVTVVHPPHVALIVRAQVKTDRKAALSLAQLHAAGLLVGVWIPPKQVRDVRALVAQRWKMVRLATIAKNRLHSALHRHHLEAPPSSLPFSPKHRDFWLNLPVSPLERANIACDWETVQFATQQRERLEEAMAQIAATDPRVPLLVQLPGIGLIGAVTLLAAIGDIARFPGARELVGYAGLGAKVHDSGNLHQSGRITKAGRKDLRYSLVEAARIAARTHRHWQAEFARLEPRLGKHKATVAIARKLLVAVWHVLSKAEADRFAEPVQVACAFFAHAYRLGIENLPEGQSALQYTRQQLDRLQIGQEVSEIPWGSKRFKLPLSGLRA

SEQ ID NO: 403066 - protein, 380 aa, unidentified
MFEKERFGATTARLRELEAWLAERQVELVAMEATGVYWKPVYYALEAKFAVWLCNARHVKKVPGRKTDLTDAEWLADVAAHGMIRPSFVPPPPIRELRELTRYRKTQSAARAAEIQRLEKVLQDAGIKLTSVASRVLTQSGRAMIEALIAGERDGARLAELAMGKMRPKVPALTEALTGHFGSHHAVACGRILGHLDFLNASIQALSEQIDARTAAFASVYTSLLPVPGFDRLSIDVIIAETGADMSRFPTPGDLASWVGVCPGSHESAGKRRRVGTTKGNPWLRQALIESARAAARTKGSYFGAQYRQIARRRGPNKAAMAIAHSLIELVWHLLSTGEVYKDLGDDYFTSRQDPERRARRLVAQLEELGFKVTLEAAAA

SEQ ID NO: 403067 - protein, 455 aa, unidentified
MQGMLWIGFITYRIDGSCEAPTTALCRFVNQLDTARRFIWNEVTRQGVLWMQHHKSSFGGIIMICVGIDVAKDKHDCFILSSEGEVLADVFTIPNNRDGFETLLQRIRSCAFPADKIKVGLEATGHYSYNILGFLLDCGLATYVINPLHTNLYRKSLSLRKTKTDRIDARTIAAMLMSDVDLKSYTDTAYHNEELKSLTRYRFDKVRQRAKLKQSVSRLVNILFPELETIVPTLHMASVYALLSEFPGAQQIADTHLTHLKTLLNDASKGRYDREKAVEIREAARRSIGSRMPAKSLELRHTIQLIRELDKEIAEVEDSIEEIMNSIQSPITTIPGMGLRMGAMILAEVGDFTNFDSPDKILAYAGLYPSTYESGKLSLAGSYSHMEKRGSRYLRYAIFNATKYVCHWDSTFAAYLAKKRAEGKHYNVAISHAAKKLVRVIYSLQKSGQAYQTAA

SEQ ID NO: 403068 - protein, 346 aa, unidentified
MTIVEDRRAVTGGVDTHLDVNVAAALNEIGGLLGVESFSTDAAGHLQLLGWLQSHGTVTRVGVEGTGSYGVGLARALRAADIDVVEVDRPNRLARRRQGKSDPLDAVEAARAALSGRASGSAKTRDGNVEAIRALLVAKRSGRSTRTQSLNQLRHLGFCAPDQLRQRFHGLTAARLASDAAALRPVRGSDPVVFATKTAMRALGRRVLLLDQEKADLDKLLGELVTETSPELLAVYGIGVDTAAILLVTAGDNPERLRSEAAWAHLCGVAPIEASSGKVTRRRLNRGGDRQANHALWRIALCRMRHDARTRAYVERRTAEGRSKFEIIRMLKRYIAREVYRQLPRS

SEQ ID NO: 403069 - protein, 480 aa, unidentified
MAKARKSTFERLQKGQLNRQQRKELQRKFDADSPELDVKHPHAAGIDVGGASHFVSVPPNRDEMPVREFGSWTEDLRCMARWLKACGMETVALQSTGVYWIPVYDVLEGEGLEVYLVNARGTKNLPGRKSDVQECQWLRKLHTYGLLHKSFRPPEQIRMVRTLWRLRDRVVKDAGRAVQQIQKALRQMNVQLSNAISDVSGVTGMNIVRAILRGERNPYQLAKLRDPRIQASEEEIARCREGNWQPDLLFELQQVMDAYDFYRRQLGIIDKQLEEYLATLPAREPVGKVEPAQLTAKQRKKLKASRKSKDNRPAFDLGAELTRLMGVDLRIIDGIDLMTAQTIYSEVGADLSAWPTEAAWASWLELVPRNDITGGKVIKQKKRPSNNRVATALRNAAESLYRSDSYLGARYRHFTGRLEGLKGVKAMAHYLACLVYRLLTKGQAWVDRGAAYYENKRQQREMVHLQKRAAAAGMKLVPIT

SEQ ID NO: 403070 - protein, 311 aa, unidentified
MMNDSIGIDISKATLDIHRLSDGKTTSFSNCGAGFKQLAKFCGETDVIRVVYEATGSYHKGLERALGGALPLVKVNPLQARRFAQAQGVRAKTDAVDARMLAAMGTAFEFEPDKPATKLQHDLKELRAFRSGLVKDRTRILARLKTQTLPVTRRQSKARLAQVEKQITEIDAEISGLIQSDETLAQSMKILCSIPGVGAVCASTILIEMPEIGTMGRRQVASLTGVAPMARESGQWRGKSFIQGGRKVVRDALYMPAIVAMRHNPDLKAKYQAMIAAGKPPKVAITALMRKLIELANILIKENRCWVKKGA

SEQ ID NO: 403071 - protein, 384 aa, unidentified
MRKRRSPSQVMLDSIETPEESQMDWLSQVAHRAKKETAVYDRKDIILAVDYHAQNIEVRWLNCSTGEERCLNIPTTRIGILRLVEKAVAEAAQAGGKVVWIMESTTGWARVKDLIGSRVQFVMANVLQMPLPPKAYRHKTDKIDTGRILREFLNGLLPRSYQPDLRWRELRRLVNSRQDLVKRQTAVKNWISHFLHHETWADREGLWTQKGLTRLHGLKLSTSDRMVVDLKLQELEQLEALREKVQAAMQAVYDQWPEAQWVDEVRGIGMVTAVSILAHIGPIERFPTAEDLISYAGLAPGHRRSDQTAHNGKIGGGGTDSHLRYLVIESMQWVCQIPRYRDAFDRAAAKHGKNIARIIVARMLLRSIFKMLKDQVRFNQVAAA

SEQ ID NO: 403072 - protein, 384 aa, unidentified
MPDVSSNAPGVVRMRAALDVHKRTIVCASQPDDPRAGELRLQEIPNTERALRALIRRLGGAEGLVVCYEAGPCGYEPYRLLSEMGVACDIVAPALVPVAPGARVKTDRRDAKRLLVLHRAGALKFVHPPTPAQEGLRDLVRCREDLVCARRAARHRVAKQLLRHGHIFREGKKSWTKIHQAWVRRQRLADPLAQSALEHMLAHLDGLDAQIAVLDHQLDKIAQREPWSDPVRWLSCFRGITTLTALALLAELGDFRRFGTARELMGFLGLTPSEYSSGEQRHRGHITLAGNTHARRLLIEAAWHYQHAPRVSQRIAAVQPHVPPDVAARAHSAQVRLHHRHRSLTGRGKRSTVANVAVAGELAGFIWAAMTRQPLRDPEVNAAA

SEQ ID NO: 403073 - protein, 406 aa, unidentified
MEVFYERIAAIDIGKRQSVVYIRTPSLEATRSFGMMTADLLALSDWLQECQVEQVAMESTGIYWKPIYNLLEGDGFELWLVNARDFRAVPGRKTDVQDCRWLGDLMRHGLLRRSFVPPKAQRELRELVRYRRSLIEERAREFNRLEKVLEGANIKLGAVASTLSGKSVRLMLKAMVSGERDPEVLADLAKGRLRNKHQELVQALRGLMDSHQRFMLQEQLGHLTDLDERIARLDEEIEARLRPFEADLARLRTIPGVGFRVAQELSAEIGFDMGRFPSAQHLASWAKLCPGNNLSAGKRKHSRTGHGNRYLRTALTEAAHAAGRKKGTYLHAQYHRLASRRGKKRATTAVAHSILTIAYHLLCRKSEYQDLGANYFDERKEQTVVRRLQQRLKKLGYQVDLTRQAS

SEQ ID NO: 403074 - protein, 423 aa, unidentified
MRAVALDVHRDFCEVALVEDGELRSAGRIETKPEALELFAQSLGPHDHVALEVTGNAWEIARIIEPHVARVIVVSPSDTGIRQARAKTDRLDARALAKLLWAGSLDAVWMPDERIRAMRRRLARRTQLVRARSRAKNEIHAVLMRCLKGRPPASDLFGVKGRRWLAEQELPLPERETVDSAMRQVEFLDQEIAAVEALIAAEALSWPEVKRLMTVPGVNVIVAATFMAAVGDIARFPDRRKLVGYLGLDPRVRQSGVGPANHGRISKQGSASARHALVEASWSTVRQPGPIAGFYVRIKARRGHSIAIVAAARKLACLFWCLLTRGEDYAFAQPSLTKKKMRRLELLAGAPKLQGGRGVWSTNDALRKAERELALQAQRAYERTVSDWQAKKVGAGATPGRASQRPSSGKAARQTSKPQRSAL

SEQ ID NO: 403075 - protein, 404 aa, unidentified
MSVQSAPVTSSTIVVAVDVGKTSATVSVTDGARRRLMGPVEFAMTRSGLRAATQRVLAVAPSCPQIRVGVEAAGHYHRPVVDYRWPPGWEVLELNPAHVAEQRRVMGRRRVKTDGIDLEAITELMLAGRGRVVGEREVLIGEVAAWAQHRSRRVATRTATKNQLLAQLDRAFPGLTLALPDVLGTKIGRLVAAEFADPARLATLGTTRLIRFAAARDVQLRRPLAERLVTAAKDALPTRDAVVARQVLASDMALLADLSSRIADAETELARLLPLSPFSTLTSVPGWGVVRVSNYAAALGDPTRWPGPRQIYRASGLSPMQYESAGKRRDGSISREGSVALRRALIDLGIGLWLTEPSAKSYAHGLKDRGKRGGVIACALAHRANRVAHALVRDHAVYDPARWT

SEQ ID NO: 403076 - protein, 416 aa, unidentified
MSSRTQSRPRIKADILVVGIDVAKRTHVAAIRKPDGTKEKPFPFGNDRPGFEHLQARSERTRERLGLNGVVFALEATGHYGHALRQYLGLQGYAVLGINPAHTKKAKEFEDNSPEKSDPKDARLIADLAAEGRGRLVRPVKGVFAELRRLGKLRERYVVERVRLSNRYSCLVDLVFPELVQEVRKLTIRSIRRLLAEHPTAREIADLEYEDLEDRLGRWSQRRLKPDKIARIHRLARESVGIVEGLETARMEMRQLLESLELVEQRLQEVAAAQGAALEKVPYAELLLTVPQLGSVTVATILGETGDLRHYKNAEMVIKMAGYNLYTISSGMFRGKTRITKRGRPMLRRYLFIAACRLSKKGAPLREFHTRLTARKAKPQVLVGSCRKLLRLLVAMVRDGKPYEPGRLAIPLGEAA

SEQ ID NO: 403077 - protein, 326 aa, unidentified
MSKRKLDIVLLDEAGKFKSKVLANDSVGFKSLVVWLEERGIEPGNAHVCMEATGVYSEACATALVDWGWKVSVVNPSLPKRFGECELKRNKTDATDAALLARYCAKMVPEAWQPPPLEFRKLRSMVERLQALKDMHQQELNRLEGTAATAAEARQSIADHLTWLEARIAELEKDVDDHIDGHKATLGKDAELLASIPGIGRTTAAKILGLLGDLRRFSSGKALAAFIGVVPQRYESGDSVRGRSGIGRAGHTQIRHALFMPTLVATRYNPKIKAFRDRLVAAGKPKKSAALAAMHKMVHLMHAVVSKGIIFDPQFGSLALDAQDGI

SEQ ID NO: 403078 - protein, 347 aa, unidentified
MRKIAYLSMDVHVRNCVLGDMNGNGKFLNNRPFTTSENNIIDALQAIKAKRKYLVMEAGPLANWVAQTATPYVTQVFISDPRENALIYKSSLKKDKIDTKKMCRLLRLNEFKEVYQPENDQRAIFKAAVQHYIDLRDQLTAIKQKTKAMFRQWGVIDVFTKSIYSTSGRKKFLIQVKQRPIYLQLKRLYALMDLTAAMKQDAKKTMKSLGRNYREIKEFIKMPGIGTVGAHTYDAYIQTPHRFEKTNRMWRYCQMGVTDRSSDGKPLGYKRLDKAGNGELKALSHRAFMVAMKTDNEVKRFYLNSLRATHNRVHARLNTQRKILSVMLSIWKKGKAYRPELFLDPSI

SEQ ID NO: 403079 - protein, 407 aa, unidentified
MNAVGIDVSKGKSTVAVLRPFGEIVVSPFDVSHSPKELSKLVTLLKTLNGDTKVVMEYTGNYYLPIALFLRNNGFFVSVVNPILVKDYSTKSLTVRKVKTDKKDALKIASFALDRWNELSPFSAQSEARLLLKSYNRQYNQYNKLKIILKNNLIALLAQTFPGANTLFSTPTRKSDGHEKWVDFVLKFSHSECISKKSFSFFLKSYLSWCKKFGYKFSKSKAQAVYDFACNCSPSLSFSDSSALLVSNAIIQLNSINETLASLASEMNKIAATLPEYDSVMSMFGVGSVLGSQLIAEIGDVSRFPNKKALVGFAGLDASPFQSGNFNPQSRSISKRGSAALRKTLFQVMSVVLQRAPTNNVIFQFMDKKRSEGKHFYVYMTAAANKFLRIYYARVTEHLNLFTTTTA

SEQ ID NO: 403080 - protein, 357 aa, unidentified
MGKSIQKLSSVTRVGLDLAKRVFQVHAVDSNGEVVVIRKLARGRLVGFFSELPRCVVAMEACPSAHHWGRQLLALGFEVRLIPPAHVKPYVRRNKNDAVDAAAICEATGRPGQRFVPVRSIDNQAELMRHRARELLAGQRTAALNALRGHLAEIGLIAPQGAQHAYGLKRMAADGFDEYGGVVVPDCVRAALRPLVSQIDALDEAIGAIDKEIAMSVKGDETAKRLMTIPGVGPVTASAITATIQDMGDFASGREFAAFLGLTPRQSSTGGKPRLGRITKMGDRYLRKLLVLGACATLCHRKGHNDALRLWASGMLERKTVKYKFKLTAVALANKVARIVFVLMTRGGQYDDRPVAA

SEQ ID NO: 403081 - protein, 413 aa, unidentified
MELVHARCAGIDISKKDAKVCVRVQGTGRRRTAASVTTWGSMTNQILALREHLLAEKVTCVVMEATGAYWKPFYYLLDDGLDVMLVNARDARNVPGRKSDVSDAAWLADLGAHGLVRASFVPPPPIRELRDLTRARTVITRERSREAQRLEKLLEDAGIKLSSVATDITGASSRRMLEALIDGQQDPTVIADLVHWRMRPKIAALMEALTGRFSEHHRFMTRLFLDRIDAHSADIARLDARIEAAMEPFASARDLLMSIPGISRITAEAFIAETGADMSVFPTAGHLASWCGLSPGSNEAAGRVKSTKTRPGNPYLKGALGVAALSVVRRKDTYFWAKYRRITVRRGPMRALVAVEHAMVVAAWHMLTNGEFYHEPGPDYFTRRMPAKTQARAVAQLESLGYKVTLEPLADTA

SEQ ID NO: 403082 - protein, 348 aa, unidentified
MTVTIVETRAITGGVDTHADVHVAAALDPLGGLLGVAEFPATAAGYARLLGWLGGFGTVCLVGIEGTGSYGAGLARHIAAAGVRVVEVDRSDRQDRRRKGKSDPLDAVSAARAAQSGRAAGEPKGRDGQVEAIRALMVAKRTARSERIQTINQARSLIVTGPEDLRARFAHHAADDLVAELAALRPRPGSMIRYHTLLSLRELGRRVAFLDGQLQRLDDLIVPLVTARAPGLLSLYGVGHDTAAKLLIAAGDHPERLRSEAAWAHLCATAPIPASSGKLTRHRLNPGGDRQANHALYRIVITRMSSHPPTRAYVNRRSKEGLSKKEIIRCLKRYVAREVYPHLRPGAG

SEQ ID NO: 403083 - protein, 332 aa, unidentified
MCKKIWIGVDLAKASFHAAVAPVEAHPSDWARLHHREFEHSAKGVTALCAWVKKQGYGVEHIAGLCVEATGRLSWTFAELLGERFGSVSIVNPARPVHFAKSVGLREKTDRSDACVLALFGVAMRPMPRPLPTERQHQLRELAGLYASTRRDLTAVSNQLKEPIRCTFVRRRLRLKQRRLEQDIELIEEQTDDLLAQDPQTAEDAQRMQTIPGVGPKTARMILAHLGDLRQYTRNELTARVGLYPRQYQSGVSVHKRPRMVKGGGQAIRAALYMAALSARRFCPHLCAFAQRLKQNGLSNMAILGAVMRKLLLLIRTLITRGVDYNPKYALT

SEQ ID NO: 403084 - protein, 308 aa, unidentified
MKTVPFEQVILRGCGIDVHKDMVVATISGEGLKTETRSYKTFSSSLTELKEWLLSSGITHVAMESTGVYWKPVYKILECPDMKVWIVNARHIKYVPGHKTDKKDSAWICKLLLAGLLKPSYIPEREQRELRDLTRYRNKLIQHVSSEKNRIVRILEDCNIKLSSVVCSLDGVVANKLIDMLIDKGHVTMDDITCIYHKKLEASPELLYQACEGFIEPHHIYMLQTIRKDMEQTKAIIADLTCRIKEVLSPYENVMELLQKIPGLSRKTVEDLIAEIGVDMEAFPTEKHLASWAGVCPGNNESAGKKKG

SEQ ID NO: 403085 - protein, 475 aa, unidentified
MNLNGTKKKNQVSNANIFEQQELLKKIEVVRENLTASTWHELETKGKFDKNAKLSFICDDMLILGCDVGSETHYLRAIDTRGRELSKSAFSFSNNADGFSKAKEWAVKIAAEYDKKQIVLGLEPTGHYWFCLAAWMISNGISVVQVNPYAVKQTKELEDNSQLKDDTKDPKLIANLVKDGNFGMPYLPEQLYADLRRLSMFRDQLNEDRIRSINRLHRELKIYFPEYKEALGKTEGTFSLELLKQAPFPDDLAALKEDGIRQIWHNAKLRGRGYSRAGEILEYAKASVGIREGKETGKLVVQWFVQKILELDEELALIETQINQKCLEIPHTDKVLEICGIGENTLSGMVAEMGDISRFDDVKEIQKLSGLGLVASSSGKHKGETRISHRGRKRLRYWLFQAAKSAVAHAEEFKKLHVYYTTREQNPLKKMQSLIAIACKLLRIIFTILKKGIKYDPRKMLKDIRRESRQESLAA

SEQ ID NO: 403086 - protein, 347 aa, unidentified
MLADQLDYVVGVDTHRDAHALALIAASTGVVVLEVEVGADRRGYARALTLAFEHAPGGRLWAIEGSGGYGAGLARFLAEEGEQVVEVERPRRSERRQGKSDPIDALRAARTALGRTKRALPRAGGAREALRALGTTREGAVATRRAALNQLRALIVIAPESLRAELRQLTRAKLLARCARLRPERHVCPELRGTTLALRACARRVQAASAEERELKREIVRLVTELAPQLLAEPGVGPVSAAQLLVSWSHRGRFASESAFAHHAGAAPIPASSGQVIRHRLDRGGDRALNRALHTIVVSRRKHDPATIAYAQRRTSEGKSVREAIRCLKRFLARHLFRVLEGTPMPA

SEQ ID NO: 403087 - protein, 414 aa, unidentified
MAEEETISWFAGVDWGSERHQVCLLDVQGTIAGEREFPHSGEGLAELDDWLLSMASAASTVAVAIEVPHGPVVDALIDRGFVVYAINPKQLDRLRDRFSVAGAKDDRRDAYVQADGLRTDRRLFRRLQVADPRLIELRAWSRLAEELRAERVRLSNRVRHQLWRYYPQMQKLTNDLAAPWFLELWAIASTPAKAGRLRKSTVERLLKQHRIRRMDAETVLRILREPAIKVAQGVAEAASIHMRSLVARLRIVNRELREAERKLDELCTAISEIEQTSGEGLQRRDVAILRSMPGIGRINLGTLLSEASGPLSRRDYEGLRTLSGAAPVTKRSGKSLIVVRRYAAHVRLRDTVYHWARVATQRDPKCRARYTALRKRGHSHGRALRGVADRLLALACVLLQRQTLFDPSFGRSTA

SEQ ID NO: 403088 - protein, 345 aa, unidentified
MDIGKRNCKACIMNSDGSIAEESVYNNTLAEAEIFAYSIVKKYGKCMAVCESTANLWLKTYQAFEKYNIDVKLANPLKTRAIAEAKIKTDTVDARTLAHLLRSDLVAECYIASREIREDRLLLRLRINLVQDRTRVMNRVHSLLDKYDVKCDYDNIFGVKGIRWLKSLKLSDNDKILLKEYVMQIEFLNTEIKNIESKITCEASKNESVKILMSMTGIDYFSAMMIASEIGDITRFSTPEKLVSWSGLCPSIHQSGNSLYMGRMKYGNKKVRWILIQAANTAARKDDRLRKFYLRIAKRHGHNIAITHVANKMVTIIWYMLVNKKLYNERKQSLYETKLKRIQKT

SEQ ID NO: 403089 - protein, 360 aa, unidentified
MITSSSAQVQITVGLDVGDKNIHACFLDQDGAIVEESKLGATPAALRRRFSGQGRYRIILEAGLHSPWMSYLLLGLGHEVYVANPRRLRAIYENESKSDRVDAQYLARIGRLDPTLLYPLRHRSPETRADLAVLRSRAALVRIRGTLVNHVRGVVKSAGSRLPRCEPQYLARRAELNLPDELVPALSPILLTISELTARITAYDRQIEEMAKVRYPETELLRQVGGVGAITATTFVLTVEDPARFPRARAIGSYLGLRPRQADSGTLKPQLHITKAGDKNLRSLLVECAHHILGRLGPDSDLKRWGLKLAERGGKAAKKRAAIAVARKLSVLLLRLWVTGEVYEPLRNSRLKGDLLPTTP

SEQ ID NO: 403090 - protein, 355 aa, unidentified
MSQEKYIGMDVHAATISAAVKNAEGKLLMECVLETKAATILEFIQGLRGTLALTFEEGTSAAWLHDLLKPHVRRLVVCDPRKNALLRDGNQNDRVDARNLAELLRTHQVKAVYHGEHGTRALKELGRSYLTLTQDTTRVMNRIKSVYRSWAISCAGTSVYSRRHRAEWLAQLVEPGVRIRAEHLYQQLDSLEPVRQAARRELLRESRKHAAVKLLRQIPAIGPIRSALLVAILQTPHRFRTKRQLWAYSGFAVQTYDSGEYRVVRGKLQRNRERITVRGLNHNHNHDLKNLLKGAAISAIQRPGPLQDFYAALVEKGMRPSMARLTLARKIAAITLTMWKKGVSFDPKQLQRQAA

SEQ ID NO: 403091 - protein, 310 aa, unidentified
MNDTIGVDISKPTLDAFCLGTGDHRQFSNDRKGCAALIGWIGSSQTRVIFEPTGPYHRLFEASLVSAGIEMVKVNPRTARRFAEATGELAKTDLIDAAILTRMGAVLDLRGRSSKSETLHELRELSVARQALVKDRIAATNRAQIAMNPVIKRQLRARLKQIGTQLKEIDAAIATLVASDPELSRRRSILASIPGVGPVTAMEILTEMPEIGALDNKQAASLAGLTPMTRQSGSWSGRARIRGGRRGLRNALHMPALVALRFNPDLKKKYQDLKDAGKPSKVAITAIMQKLLVLAKALIRDNRKWTAKHA

SEQ ID NO: 403092 - protein, 406 aa, unidentified
MNQLYVGIDVSSRNNVTYVMKPDGSKHSEFSVANNLPGAKELSFRVCQALDELQLDSVIFGMEATSVYGEHLARALREDGSLGKFNRKIFVINPKQVRKYREILPELPKNDFIDAYVIADSLRFGRILPREYAENNVYESLKTLTRTRLALIQKQADAKQKLANLLFQKCSSLAQDNVFGGISTTFLNLMECFDSVDDLANLSLPELTSFIAGSGRGRFKDPDAIAKAVQAAVRGSYRLPKVMNDSVNQALSLYVSLIQTLKTQIDALDTSIEKHFDIIPNELKTIPGIGKVYSAGIIAEIGDIGRFDSHASLAKYAGLVWSQHQSGNYEAESTHLIKSGNRYLRYYLLEAANSVRRCDSEFKRYYDLKYKEVNRGQHKRALALTARKLVRLIFRLLKDNRLYSAR

SEQ ID NO: 403093 - protein, 371 aa, unidentified
MDESSKTLYVGLDVHKDSIAVAYAPEDRGAEVVSLGAIGTRQSDIDKLIRRLESKSATLVFVYEAGPCGYWLYRYLTGKSLACHVVAPSLIPRKAGDRVKTDRRDAITLARLMRSGDLSSIYVPGIEDEALRDLSRGRDDAMQDLKRSKRRLKSFLLRQDIRYEGRANWNAAHLRWLSEVVCPTPPQQIVFQEYVRAVTEQQERVQRVERELHEAVKGWRLYPVVEAIQALRGVELTGAVILMAELGDITRFESPRQLMSYLGLTPSEYSSGARRRQGGITKAGNSHARRALVEGAWAYRYPAKVSRHLQLRLEKLPAEVQAIGWKAQVRLCRRYRQLTARGKHVNQVVVAIAREMAAFAWAIARLVPLAS

SEQ ID NO: 403094 - protein, 346 aa, unidentified
MAIVETTRSITGGVDTHLDTHVVAALDPNGGVLGVTAFPATRSGYCLLSSWLGEFGMIGRIGVEGTGAYGAGLARHLRSLGVEVIEVDRPNRQLRRAQGKSDTIDAIEAARAILSGRATGVAKTADGNVEAMRALLIAKRSGREARITCLNQIRHLGFTAPDELRERFQPVSRGMLAAQAAALRPRPDSDTVIYATKLAMRSLGRRVLSIDDEIARLEVVLGDLVTATAPGLVGLYGVGVDTAAILCVAAGDNPQRVRSEAAWAHLCGVAPLEATSGKVTRRHRLNRGGNRQANHALWRIVFTRLGSDPRTRAYVARRLDEGRSRPEIVRILKRYVARETYRHLPR

SEQ ID NO: 403095 - protein, 343 aa, unidentified
MVHYVGLDVSLKQTSICVVSDTGSVVREGVTDSDPEAIVAFVRSKAPDAARVGLESGPTATWLWTELKRLGLPVICIDARHAKAVLKMQINKCDRNDAVGIARIMQTGWFKEVRVKNLGCHAVKALLTSRALLVKIKRDLENQIRGLLKNLGLVIGRAKFNGFAARAAELIANRPELVAVVSPLLKAREAIEKQIDDLDRKVLKLARQDALIRRFMTVPGIGPITALCFKATIDDPTRFKRSRSVGAYIGLTTRRHASGEVDWSGRISKCGDAMLRSYLFEAAGVLLTRVPKWSAIKAWGMRLAKRNGLRKAKVAVARKLAVVLHRMWIDNAEFTWSNKEAAA

SEQ ID NO: 403096 - protein, 371 aa, unidentified
MKSIVYVGMDVHKNSFSLCAMNERDKQIIAETKIAANAVLVKKFIDNVLLQFNNQDVEVIAGYEAGCLGYSLFRQLEDLGIECEILAPSTMSKSAKNKVKKNDKMDAHNIATNLMNKSYKSVYVPNESDVEVKEYIRMIADFKESRKKFRQKILALLLRFGLNNYPKKSNWVSAHIKWLKELECSPTIRTILDEYLSEIESLSDKIDRFAANLEEISHNEEYEEKISELRCFKGIDTAAAMILHVEISDFARFPTAAAFSAYCGLTPGEDSSGDKSRRTSITKQGNITVRSTLVECANALVKGTPGVKSKRIKARQKGNDVKVINYADKATYRLQKKFHRLMYRGVNRNVAITAIARELACFVWGMETGRI

SEQ ID NO: 403097 - protein, 358 aa, unidentified
MKYVGVDLHKNQFTAYDSSTGRYRNYGSNAIWIMSFIRDCKDTTTGEQIVVGVESTGNTRYFKRLLEAERIQVKVINTMKFKVITESVKKTDKHDASTIAEFLGKDMLPEAWLCSEYSERLRRLLHVRKTLVKAIVTTKNQIHGMVTAYGYEDKKSSLQSKRGRHMIMNTLASTEIGLVVQLLMDTIESLSENVKNIEKKIEELVEGDTRIELLMSIPGCGRITAWTIRAYTDDMNRFKSAQQYAAYVGVVPYVHNSNTLIRHGRITKHGPEPLRTAFVQLVMGINRMRALHNYRIMKRYRFIKENKGSGKAIIATARKLTHIVWHILTNNEPFNPDLQLRSSWESNRHVQFEEKRFA

SEQ ID NO: 403098 - protein, 369 aa, unidentified
MKHCTEVFVGIDVSKARAAIALADGERGGEVRYLGEIDASVENMRRFVKRLAAKHERLYFCYEAGPTGYGLHRLITEMGYDCIVVAPSLIPKKPGDRVKTNRRDAVSLAKLLRADELTAVWVPDAGHEAMRDLVRARTAAVECLRVHRQQVSAFMLKHGRIYPQKTGWTMRYLRWLQEQRFDHPAHQIALQEMVDAVRVAKGRMMRLEEAIAEFVASWSLGPLVVALQALRGVNLIVAVTFVAEIGDVSRFDNPRQLMGYLGLVPGERSTGDTIRKGGITKAGNSRVRSLLVESAWTYRHPPKIGKTKLYRLEAAPPKVREIAWKAQTRLTARYRALSARGKKTTVVCTAIARELAGFMWSVAREIKAA

SEQ ID NO: 403099 - protein, 351 aa, unidentified
MLIIGCDFHTRYQQIAMAEETTGELLLEQRLDHESGEARAFYRSLQGPVRVGIEATGPIHWFERLLTELGHELWIGDSAKIRASEVRKQKTDERDAALILDLLLAKRFPRIWVPTPAERDLRQLLWHRHKLVRLRTMLGNQLHFLAMSQGLCRKKKLFTKKGRAELGNLTLGPWASRRRQELLKLLGQLDPPIAELDRAVLEEAQRRDDAVLLMTHPGIGPVNALAFVLTIGPVTRFPCSRKIASYLGLNPTEESSGGRRRLGGISKQGNTMVRWLLIEAVHHAVRQDPALRQDYQRLKFRRGHAVAKVAIARKLAVRMYWMLRSGADYARLVRRQGSPGATLMNAGSSLG

SEQ ID NO: 403100 - protein, 344 aa, unidentified
MQIKSIGIDLGKTTFHLVALGARSQVVVRKKFSRRQLLLYTANLPSSLIGMEACVGSNFLGRALREQGHEVRLIPAQFVRPFVKSNKNDYRDAEAIAEAVERENMRFVPIKTEDQLDLQALHRVRERLVSRRTSVINQIRAFLLERGISFAKGPASLRREMPEILENADEKLTVRMRRLLDFLWQEWKHLQLQIESLSEDLEKIASSDEACARLQQIPGVGPLVATAVVSAIGNGAAFHKGREFSAWLGLVPGQWSTGGKAKLLGISKRGNPYLRKMFIHGARAVVLRAKREGSYLGQWMKGLEGRASRNVVIVATANKLARISWAVLSSGENYHPMPAVAITS

SEQ ID NO: 403101 - protein, 435 aa, unidentified
MNFIGVDLHKKSITICVMDEKRKILARKTLPCTQTNEIVEFFRQFRPFKVVVEATASYVWFVELVEPLAEKIVLANPKKLRVIAESTKKTDNLDAQVLTEFLVLDMIPESYQATPRLRQHRALVRHRQYLQGRITSVRSKIRHILSNYNADRKDLFSSNCGLAYLKEVRLNDVDRFVMKQLWAEWQDHLAQRLAVSKKLKAFVAKAPQREAEAREILKTASQVGSVTAEVILSELGDISRFRNAKTVCAYAGLVPVVRQSGERKSKDMKITKEGSGLLRWALVEAAWRLVGKSPKWAALFSRLRHRSGKKRAIVAVARKLLCVLYAMLRTSTPYKIVTTQTTAARTTGKESVRTSTPDQTTPTETTAPRTTGKKLVRTSTPEQTTPTETTAPRTTGKKLVRTSTPEQTTPTETTAPRTTGKKLVRTSTPDQTITT

SEQ ID NO: 403102 - protein, 344 aa, unidentified
MTYHTALDVSLRSVSICIIDDEGVIQFECTAASEVEEIVAHLKRFSPEIRSVGFEAGALTQYLTYGLQAAGYEVICLEARQVNSALSAMRNKTDKNDARGIAQILRTGWYSRVHVKSMESHLIRALLSSRKTVLKKCVDLENEIRGLIRLLGIKLPGTLKHGAYEAFVRQLLETHVTFSRTLIPLLDARLVLYKTYLKLDNQVKALVREDSVCLRLMTVPGVGPITALTFKAGVDDPTRFKRSRTVAAHFGLTPRRYQSGDVDNPGHISKAGDADVRSALYVAAHALVTRSSEWSSLKVWGLRLSKTKGHRRAVIAVARKLAVILHKMWMDSTDFRYGSTEAIT

SEQ ID NO: 403103 - protein, 354 aa, unidentified
MPRQSKDTIAVLGIDIGKNTFHLIGLSKRGVIVLRQKLSRGQLEAKLANLPPCLVGMEACVGAHHLSSRLKALGHDTRLMPAKYVKAFLKGNKNDFRDAEAIAEAVQRPTMRFVATKTAEQLDLQALHRVRSRLVSERTAIANEIRAFLLDRGIAVAKGLHRLRTALPGILATRTDVLAPRLLHLIEDLIGDWRRLDERIDNVSLEIETLAEQDGGCERLMTVPGIGPIISSATVAAIGTGDVFSKGRDFGAWLGLVPKQISTGDRTILGKISKRGNRYLRTLFVQAARVVLLRPANWERYGLRPWIEAAAKRLHHNVLAIALANKLARIAWSVLHHGRNFEVRKMSKPVCQSA

SEQ ID NO: 403104 - protein, 383 aa, unidentified
MDAPDTALRGQNTTVAGRLYMAFELGEKSWKLSLGDGHRAPSRCTVAAGDTSAVLTAIANAKARCHLCADAPVYSCYEAGRDGFWLHRWLAQQGIANLVVDSASIEVNRRSRRAKTDRLDSDKLLSMLMRYYAGEHRVWAVARIPTPEQEDDRRLHRELERLRQERTAHTNRIRSLLVLHNLRVRYVGGRIWTHWWAQQREQLPPDLRAEIERECERHALVRKQISVLEAQQDQQVRSGLHPGMALLAQLAGIGTGSAWTLMRELFGWRQFHNRREVAGCLGLTPTPYASGTSEVQLGISKAGNKRCRWLMVELAWSWLRYQPSSQLSRWFNQRFAGTGKRLRRIGIVALARRLAIALWRYLEHGEIPDGAILKPRDVNMANA

SEQ ID NO: 403105 - protein, 360 aa, unidentified
MFCERTSVGLDVHARSVVAAAIDGRSGEVFRARLTPSHAEVIEWVGKLPGPCAVVYEAGPTGFGLARALSAAGLRCQVAASSKLLRPAGDRVKTDARDALNLARLLRLDEVVPVRIPSAAEEAARDLVRIREAARADLMRARHRLSKLLLRHGIVYYDGKAWTERHDRWLHHQRFDAAPTQSAFEDAYEAVVLATARRARLDEKITALAADSEFSPLTRRLACLRGISTLTGFALAVEIGDWDRFTGASIGAYLGLVPSEYSSGTSRTQGAITKTGNTHVRRLLVEAAWHHRSTYRPGPVLRHRWDQAPAAARARAHAGNQRLHARWVGLNLRRKPAVIANVAVARELAGWCWSLAVLPD

SEQ ID NO: 403106 - protein, 354 aa, unidentified
MQIIAFDSHKRYTLASVETKDGKILKEQRIEHRKGEILQFLSKCQKGSPVAVETIGNWYWIVDEIEQANFKPKLVHARKAKLMLGCVNKTDKLDVRGLNKLQRTGTLPAVWIPPGDLRDKRELPRTRMVFACQRTRLKNRIHSVIDKYGLQADFDGISDIFGKAGQQQITACLSQLPPQTVYTMCCLLRHLSPVENEIKQIEKRMREVFEETDDVKLLQTIPGIGFILAVVITLEIGDVGRFSCPEQLASYSGTTPRVHASGDKVRYGRLRPDTNHYLKWAFSEAGNSIAVNSKRFSARHVSILYKRIRSRKGHAKAVGAVSRHLAEAVYWMLSRKEGYKERGFVQAGISAKVS

SEQ ID NO: 403107 - protein, 355 aa, unidentified
MVIIGCDYHPSFQQIAFMDTETGEVGERRLVHRKQAEQFYGELKQQNLKVRVGMEASGHARWFERLLHDLQFELWIGNAAEIRTKRVRKQKTDRQDAQLLLKLMMEDRFPRIWVADAENRDLRQLLWHRHRLVQMRTRVMNQLHVVALNEGLRRKKALWRPAGRNELESLVLAPWASRRRQDLLELLDQLAPKIAELTQALEREVEKRPVTRRLMTHPGVGPLTALAFELVIGTPERFRCGKQIASYVGLIPEEKSSGNRRRLGHITKQGNALLRFLLVEAAQVTVRSQPQWRSRFFHLAMRRGRKIAKVAMARKLAVHLYWMWRQGWDYGQWQELGSHAGEPGNLYGGRKTPTL

SEQ ID NO: 403108 - protein, 345 aa, unidentified
MHSINNIELSSLEETRCQFNGGKCTIKLGIDVHQDFYVVVEQVGGSNPKPPQRFAKEAFLHWAARLKQKSSAEVYAVYEACGFGFSLQRKLSALSINCYVVCPQKLDEQNRRVKTDGLDAKALCLKLDRFVQGNRHALAIVRVPTEEHEQLRAIHRQREQLVGARKRLEAQGRSLMVNHGLEPVHNWWKLRTFAALAVPQWMRELLLNNQPILLALQEKIALLTLQLQSAAAPSQPRGLGKMTSVIIDREIGDWRRFNNRRQIASYTGLCPGEYSSGNTRLQSCVTKHGNPRLRAALVELAWRLVRFQPNYKPVVKWRQILGKGALATGAVRKKAILIGPNRVDK

SEQ ID NO: 403109 - protein, 342 aa, unidentified
MGAVVTIGLDIAKSIFQVHGVDAAGEVVIRRRLTRRKVLEFFQGLPACLVGVEACASAHYWGRELRKLGHDVRLMPPAYVKPYVKRQKNDAADAEAICEAVTRPTMRFVKIKSPEQQSVMGLHRVRQMLMRQRIQLSNAIRGHVAEYGLVAPVGRNGLARLIAVIGDPDDDRIPDEARASLALLVAQLNLVNEQILETDRRVRTSARSTDVGRRLMEVPGVGPVLASAIVASVPDAQAFKNGRSLAAWIGLVPRQNSSGGKERLGGITKQGDRYLRQLLVVGALAVIRYAQRHGTRRPWLVQLLARRTTKIAAVALANKMARVIWAIMTSGERYREPQVASV

SEQ ID NO: 403110 - protein, 345 aa, unidentified
MMVTLGTDAHKRSHTIVAVDTAGAEIGSLTVAATTDGHLRAVQWAAQYTKRQWAIEDCRALSRRLEADLLGLGERVVRVPPKMMARARSTARQAGKSDPIDALAVGRAALREPDLPVAQLDGPSREVRLLIDYRETLVHQRTGFQNQLRWRLHELEPGFDPPAGSLNRYCTLDAIDELITTHDSMVADLARRETARIRELTAEINQLERDITRRVTDLAPTLLAIPGCGALTAGKLIGEAADITRFKTRDAYAMWAGVAPIPVWSANPNRFRLNRGGNRQTNAALHRIAITQARIHPDAQAFIKRRIETGSTKREALRLLKRKLANVVYRTLLTDTQTTPLAQAA

SEQ ID NO: 403111 - protein, 430 aa, unidentified
MKSNTQNAKIEAITEKTLVLGIDVGSEMHYARAFDYRGIEYSKKPFKFSNTEAGFVTFKEWILDIKERHEKDKVVPGMEPTGHYWFNLGKFLQDNEMKPVLVNPHHVKKSKELDDNNPTKNDRKDPKVIAGLVREGRYMIPYLPDGVYADLRTASNIRFQLQAELTRIQNRISRWFNIYFPEYKTVYGKPDAKSGMLILKTAPLPEDILTLGIDGVNQIWRDAKLRAVGKARAKILIEAAEHSVGSKEGAVSARMEIRMLLEDYESRNTRLQEVMVLIEELVRKIPMTEKLLEIKGVGIRTVSGFLAEVGDISRFNNPKELQKLAGLALVENSLGKHKGETTISRRGRKRLIYLLFEVAMSLVSKNQEFRELHNYYTTRRLNPLKKMQSLMAIAAKLIRVFYAMLTKGVDYDPKKMVSDIKRPAVYLQAA

SEQ ID NO: 403112 - protein, 344 aa, unidentified
MMNIQLKTNDVQVNSIHQAGIDVSAEELVMVIRKNGKLFNPQTFTNTRADRARLVMKLVKLPGVIVCMEATGVYHFDLAVALHDAGVLVMVINPKSSHNFAKVLMKNSKTDAVDANTLAEYAARMDFVAWTRPSDETIAVRCFSRRITALTTQKAAAKNHLHALTATQETPKAVLRDAKLAITQLQKRIDRLTTEALLLIGKHPKLERSLTLLISIKGIAETSAISLMGELLLLPPDLTHREWVKFAGLDPKAFDSGKSVHKKSRISKAGNRNIRAALYMPALSAKQHDPHVRAYFQHLVANGKKPLQAVCAIMRKLIHAIHGMLKNDEPFDNTRFYKIPVSAV

SEQ ID NO: 403113 - protein, 390 aa, unidentified
MIYVGIDVAKDKHDCCILGADAEVLFSPFTIPNNRAGFDELYEKILSLTSDLSEIKVGLEATGHYHLNLLRSLLDNGLACFVINPLHTNLFRKGQSLRKTKTDKVDAASIAMMLLTDRTLAPYTDTSYHNEELKSLTRYRFDKVRERARLKTSLSRLVSILFPELEKLVPTLHMASVYTLLSEFPGASHIASAHLTRLKNLLYDASKGHYGRDMAIFIRDTASSSIGTIMPAKSMELKHTIHLIEVLTAEIDEIESAINAIMDELDSPITSIPGLKNRMGAMILAEIGDFSRFDNADQILAYAGLSPTTYQSGQLTSSYAHMEKRGSRYLRYALFNATQYVCIWDPTFKAYLAKKRAEGKHYYVAVSHACKKLVRLIYSMQLTGESYRAA

SEQ ID NO: 403114 - protein, 346 aa, unidentified
MLADDVAYVIGVDTHAETHSLALLEAHSQHTRRRLTIPATRRGYRRALRLARRQAPGRRAWALEGSGSYGAGLARFLCERGERVLEVERPARTGARGRLKSDALDAERAARALLAGRAGATPRLGRETQALRALLVTREGAVRARSAALNELRALVLTSPPELRERLQGRSRAALIEACARLRPGPADSERAACALALRALARRVRQLSSEAHLLEGELARRVGALAPELLARRGVGPICAGALLVTWSQPGRVRSEAAFARLAGVAPIPASSGKVVRHRLDRGGDRRANRALHTIVLALRRVDPETKAYIARRVAEGKSEREAVRCLKRYLARSLFRMLEAMPGA

SEQ ID NO: 403115 - protein, 341 aa, unidentified
MPATKYFIGLDISAEDFSASCITNPDNNVFPIQKFPNNFDGFNEFISLLNKNSIKQSEVIICMEATGVYSENLSYFLASREFLVAIEAPQKIKNKIKDSPRKNDFVDALSIAEYAFRYHDKLTFWKPKEEIIEQIQVLLSTREQLSSQMIANENALKTIKHKYYQTPLANRIYEQTISKFKEHIKHIDQEIKSLIDKDDSFKQKISLAKSVPGVGLLLAANLLVLTKGFTEHLNYKETAAYSGICPYEQTSGKSLHKLPRSKKCGPAKLRKLLYLAALSVRTHNQVFKKYFLRKETEGKNKRLILNNIENKLLKIIFAVINSGIAYTNNYKSINPAQLKSA

SEQ ID NO: 403116 - protein, 315 aa, unidentified
MDTAIYVGIDIAKDRLDIAVRPTGTSWSVPNDDAGIDDLRNRLAGLAPSLIVVEASGGYERPVVAALAGAGFPIAVINPRQARDFARSIGQLAKTDALDARMLAHFAEVAQPTVQPMRDDEARALSDLVTRRRQVVGMLTAERNRLHGAVVPLRERIEAHVAFLEAEVSALDAEVERAIRRSPLWRENDARLRSVKGVGPVVSATLLSTLPELGAVEHKRLAAFVGVAPFNRDSGKYRGKRAIWGGRAQARQALYMAAVVAARHNPVIKPFYQRLLAAGKPKKVALTACMHKLLTILNAMLKHQTSWGQQAARTI

SEQ ID NO: 403117 - protein, 392 aa, unidentified
MVISVGIDVSKDKHDCFIVNSEGEVLADVFTIQNTRDGFNFLLQKIQDCTTPQDKIKVGLEATGHYSYNLLGFLLDNGLPTYVLNPLRTNLYRKSLSLRKTKTDRVDARTIATMLLSDAGLKPYTDTAYHNEELKSLTRYRFDKVKERAKLKSSIARLVCILFPELEKLVPSLHTASVYTLLEEFSGAKQIAAAHLTKLKALLETASKGRYKRDMALEIRDAARNSIGSWMPAKSLELQHTIRLIRELDVEIAEIEEQIQSIMDELCSPITTIPGLGFRMAAMILAEVGDFTRFDSPDKLLAYAGMSPSTYQSGQLKNCYPHMEKRGSRYLRYALYNATKYVCHWNPTFAAYLAKKRAEGKHYNVALSHAAKKLVRLIFAMEKSRQPYCSAA

SEQ ID NO: 403118 - protein, 369 aa, unidentified
MGEYSEAFVAFDVSKTKHAVAIADGGRGGEVRFLGEVSSSPAAVERLIRRLAGRYGKLHFCYEAGPTGYGLYRQIAALGHACLVVAPALIPKRPGERVKTNRRDAVILARLHRAGELTGVWVPDTVHEAVRDLVRAREAAADDLRRKRQQLLSFLLRHGRVYSGGGHWTLAHRRWLAKQSFDHATQQIVFQEAINAIADAAQRLHRLEQQLTRIAPNWSMAPLVEAYQAMRGVSFLVAVTFAAEIGDVRRFDTPRQLMSFLGLVPAESSTGETVRRKGLTLAGNRRARRVLVEAAWTYRYPARVGETLRARLEGLPKAVRDIAWKAQIRLCARYRRLSGAGKKLPVVVAAIAREIAAFLWAIGREVAPG

SEQ ID NO: 403119 - protein, 342 aa, unidentified
MQITTIGLDIAKNVFQVHGIDAAEKVVVRKQLRRSQVLGFFTALPPCLIGMEACATAHYWARELTKLGHTVRLMPAKDVKAYVKRNKNDAADAEAICEAVRRPTMRFVQAKSAEQQGRLMLHRGRDLLMRQRTQVINALRAHLAELGITAAQGSAGLKELLKIIASAEDERLPVDAHASLVVLAAELQAMQTLIGSLEKRIMAQHRKNEASRRLETIPGIGFVGATAIAATVTDPSAFRSGRDFAAWIGLVPRQDSTGGKQKLGPISKQGDRYLRRILVVGAHAVLRYAKQNPEKYPWLTQLLARKPFKIVAVALANKMARTAWALLAHGGTYRAPRLAAAA

SEQ ID NO: 403120 - protein, 339 aa, unidentified
MKLYAGNDLHSNNNFWGIIDETGKRIFYKKLSNSPEKILSTIEPFKPDLAAIAVESTYNWYWIVDLLMEQGYTVCLANPAAMKKYSGLKYSDDKHDAFWLAEMIRLNILPQGYIYPKEERPTRDLCRKRLQLVNMRTAIILSLKSMIARNIGQRISAENIKKLPQEDITEMLSGHEDLMLRAAMDKVAIDNFSGQIKFVESTLKNKIKSNTKYLNLMTMPGIGPILSLTILLETGPVERFEQVGNYASYCRKVDSKWTSNNKNKGKGNKRNGNRYLAWAFSEAAEHARMCNHQAKRFFEKKMSKTNRMIAHGALAHKMSRAAYFIMRDNVPFEPKKMFS

SEQ ID NO: 403121 - protein, 356 aa, unidentified
MSSIVSEEYDFVIGVDTHAATHTFAVVAGSTGAVLSHAVFPTSPAGLERAKGWLVRRCGDARTLIVIEGTGSFGAIVTERLMAAGRTVVEAARMPPGDRRGKGKSDELDAARIARAVLGLAITDLRIPRSLTGDRSRVAMRVLVVAREEMTGERTRAVNALTALVRTIDLGVDARTSLSAAQVTAIAGWRTRVEDINTRICRQEAVRLAQRIRTLDGEIASNRATVTKLIEQDTPQLLELTGVGAIVAASVLVAWSHPGRVRSEAAMASLAGTCPIPASSGNTVRHRLNRGGDRRLNRALTTIAIVRMRTDPATRAYVARRRAEGRTTKEIMRSLKRYITRQLFRTLAAAHPIPVT

SEQ ID NO: 403122 - protein, 378 aa, unidentified
MKNDIRYVGLDVHAETIAVAVVEPDGEMRFLGTIPNRPEAVRRLVKRLGSTTQLKACYEAGPTGYVLYWQMIELGVQCAVVAPTLVPQKPGDRVKTDRRDAEKLAVLYRGGHLTPVWVPDQAHEALRDLVRAREAAKSDQLRARHRLQKFLLRHGRRPPQGIKAWTQKHLDWVRREVHFEAPAQEAVLVDQLAEVEHARERVRRLEGAIDTAVEAAPACLRGVIEALQGLRGIAKVSAATIVSEVGLLSRFRKPRQLMGYSGGVPREDSSGERVRRGSITKTGNAHLRRIVGEAAWSYRHRPTVRGELLKRQAGLSEEVKAISWKAQHRLYSRYRRLIGKGKAKQQVITAVARELLGFIWAIGVHVEQQHGTATRRAA

SEQ ID NO: 403123 - protein, 408 aa, unidentified
MRIIGLDIHRAFAEAVAWKDGKLSRLGRVIMRREPLEEFAKQLSKSDIVVVEATGNAASVAAVIGPHVSRVVIANPKQVRLIAHAKIKTDKIDAGVLAQLYASGFLPEVWIADETTQALRRQVTRRNQIVRQRSRLKNIIQSILHAHLIPSCPHQDLCGPKGRAWLSEQILPGDERLAVERHLREFDRLTDDLKVIERDLAQSALVDERAKRLITIPGIDMVVALALIAAIGDIERFARPEQLVGYLGLNPSVRQSGPGPAYHGRITKQGRGHARGMLVEAGWAAARSPGPLRSFFLRVQSRRGQHVAAVATARKLAILIWHLLTKNESYLWARPALHARKLRDLELRAGHKPARGQKGTASAYNLKSQRDQERRWVEQAEAAYARFVAGWNARGPKARTGAANEERQ

SEQ ID NO: 403124 - protein, 347 aa, unidentified
MEDTMGMFAALDVSQEETAICVVRQDGTHVAEAKVPTCPDAIADWLAERTEGLERVGMETGPLAVWLWNALTDRQVPIVCMDARHASGVLKMMPNKTDRHDARGLAQIIRTGWFKAAQIKSHDAYVNRAMLTARDALVGMRVRLENEIRGLLKTFGIMVGKRVGGVKRRAEEVIEGEMAVAPELVPIFEALMQARRDILARIAALDSRIRAVARRHATVRLLMTAPGVGPITAMAVVAAFDDASRFRRSSSVGAYLGLTPRRYESGEISRNGRVSKRGDGFTRKCLFEAANAIFCRNLGGPRLRDWAKAIAERTGPRKAKVALARKLAVILHAMWRTNTPFREIAMA

SEQ ID NO: 403125 - protein, 469 aa, unidentified
MGFEPGKFRWPPLRLARVCREHVSVVVVSPLLLQWFTQSEEDEVRSAGRAIGLDVHRDFCEVAVAKDGEVSSVGRVDTTPEALELFGGSLDPRDRVALEVSGGAWEVARILERHVARVVVVSPADTGIRQARAKTDRLDARTLARLLAAGELDGVWSPDERCRVMRRRLARREQLVRARSRSKNEIHAVLVRRLVGRPPTSDLFGVKGRRWLAGLDLPVEESETIEACLRHVEFLDAEIAAVERHIASEALDSLEIRRLMTVPGVNVICAASFMAAVGDIRRFSNPRSLVGYLGLDPRVYQSGSAPATGGHISKQGSASTRWALVEAAWSAVRQPGPQHAFYQRVRARRGHGIAIVASARKLCCLFWFLLTREEDYAHQQPSLTAKKLRLLEIRAGAPTLKGQRTGTFATRQAMRDGERRLAEQAEASYKRMVSDWQAATPKKAGASVTPGRASQKPSRGNVARQTTSP

SEQ ID NO: 403126 - protein, 337 aa, unidentified
MSVYVGIDVHRKRSQVAVVTEDGTVELNKNVVNGSEPMLRLIGDLPSGTPVAFEAAFGWGWLVQLLEDYGFEAHLVHPLRCKAIASARLKNDKVDAAILAQLLRADLLPEAWIAPPQVRQLRALLRHRASLVRVGTQQRNRIHAVAADHGYDRSASYWTGPGRGWLAELDLPAASREIVTDCLAVIDGLAPVIDRIDGELHAHAKADPRVKVLRTLPGVGEFTALVMVAEIGDVSRFGSARKLASWAGLTPTVRGSDLKVRHGHISKQGSAWLRWVMNQAAQTAKRSPEFAASYAVIAKRRGKKIATIAVARKLLTRAWHLLAELQAADASTPPRRP

SEQ ID NO: 403127 - protein, 336 aa, unidentified
MTIIRIGLDTSKHVFQLHGVDENEKPVLRRQLQRRAVEKFFAKLPSARVGIEACGASHHWARVLCGFGHEVVLIPPQYIKPYVKRGKNDAIDAAAICEAMSRPTMRFVPVKTAEQQAALTMLGVRDLLVKQRTMLINALRGHAAEFGVTVAKGPQQMRELLQRLTTAEGVPALAREMLGMLAAQIEAVNGKLRAIEARLMAWHRHDQTSQCLATIPGIGPIGGVSFALKVADAKAFRSGRHFAAWIGITPREGSTAGKHRLGRISRAGDEDLRRLLVLGATAVIQQAQRGRASPWLLGLLARKPKKLAAVALANKMARIVWAMMVSGETYRRPAQA

SEQ ID NO: 403128 - protein, 344 aa, unidentified
MNHVAIDLGSKESQVCIRQADGTIVVERKHPTRRLGDWMKDWSRSRVILETSSEAFKVADAARSAGHEVRVVPATLAKQLGVGERGVKTDERDARKLSEVSCRIDLPSVHIPSAEARELRSLVRSRELLVATRTKTVNHVRGWLRTQLGRLRSGATATFPDRVRARATETQQVIPIHIEQVLVVIDALNVQMLAADRQVKELARKNEVCRLLMTIPGVGPVTSLTFVAAIDDVSRFPHAYQAQSYLGLTPGENSSSERERRTHITKAGSTSVRRTLIQAAWAAFLRYPNDPMVRWATQVADRRGKFIAIVALARKMAGIMFALWRDKARYQSSKAALPTGVSIT

SEQ ID NO: 403129 - protein, 347 aa, unidentified
MVVIGVDSHKRTHTVVAVDEAGRKLAERTVATTADGHLELLGWGRTWPERTWALEDCRHLTRRFEADLLKAGEAVRRVPTKLMAGARRSAREPGKSDPIDALSVARAALREPNLPVARLDGVEREVGLLIDYRDVLISDRTGHQSRLRWFLVELGIPEPPARRLSTRVVLARVDLQLVGRAEPCARIARDLVARISELTVAIDDLARRIGELTETLAPSLLDLFGCGSLTAKLVAETAGIGRFRSRAAYAAHTGTAPIPVWSGNLVRHRLNRGGNRQLNAALHRIAITQLRCPSLGQAYVAKRIVAGDTKTEAIRALRRRLSDEVFRRLQADEAARASSERVVRAAA

SEQ ID NO: 403130 - protein, 310 aa, unidentified
MEHSFIGIDVAKDHLDVHVRPTGEVFRVPSDDAGLGTLLTRLRVLSPTVIALEATGGYDVPVATALASAALPVAVVNPRQIRDFARATGQLAKTDTVDARVIALFAEAVRPTPRPVPDAQAQALGELMARRRQLVDMLGAEQNRRRLLRDRRLQRQLDAHIAWLEEALRRLDHDLTTLVRSTPIWREADDLLRSVPGIGPVTACTLIADLPELGRLDRRRIAALAGLAPFARDSGTFRGRRMIAGGRAPVRRVLYMATLAAIKHNPVIRLFHQRLRTAGRPGKVAITAAMRKLLTILNAMLRDRRPWQPA

SEQ ID NO: 403131 - protein, 371 aa, unidentified
MADYREAFIGIDVAKLKNAIAVAESGREGEIRFWGEVDASDASMRRIIQRIAAKFDRVHFCYEAGPTGYGLHRLIRSLGHECVVVAPSLIPRKPGDRVKTNRRDALALARLLRAGELTAVWVPDESHEAMRDLVRARAAAVETLRVHRQQISAFMLKHSRIYPRKKGWTMRYLRWLQEQQFDHPAHQIALQEMVEAVRVSKERVERLEKVIEEFVPTWSLAPVIQALQTLRGVDLIVAVTFATEVGDVSRFESPRQLMGYLGLVPGERSTGETVRRGSITKAGNGRVRHMLVESAWTYRYPPKVGARKLYRLEEAPPAVREIAWKAQSRLTARYRMLVARGKRTTVVCTAIARELAGFMWAVAREAQAIRT

SEQ ID NO: 403132 - protein, 352 aa, unidentified
MFWVGLDLPKRYITACAVDDDGGVVAEHRRLPADAPTLVEWLSALGGPVTVAMEATLYWAWLHDQLGAAGIAAVAAHPYQVKLIGQARCKTDPIDARKLADLLRVHLLPTVWVPDADVRARRKLLRGRAYLVRLRTSVTNRIHGHLTAENCRTTVTDLYGRAGRAWLATVSLSPMGRLQVDLLLELVDALGERIGRLDDRVKRVAQEDPHARLLQTWPGIGLFGAALLVAEIGTIHRFHSSRELATYAGLTPSTQSSGDKTRHGSVGPAGSPWLKWILIEIVQSLKLAPGPVGAHYQKLLRSKGKAKATVAAARKLCCYLYWCLQEEWSYEEWLRQHEKLEVRPVQALGSAA

SEQ ID NO: 403133 - protein, 344 aa, unidentified
MDITTIGLDLAKSIFQVHGVDANGRVVIRKSLRRAQMLPFFARLPSCLVGMEACGTSHYWARELIKLGHEVRLMPPAYVKPYVKRSKTDAADAEAVCEAVTRPTMRFVPVKSPEQQAALSMHRARDLLVKQRTQLVNMIRGLLAEFGINIPKGLERALLMARRIVDDEAPDVPIEAAKIVGTLSQQALDIHVRLRQIDRDLLVWQRGNDVARRLMTIPGIGPVGATALAASVTDPHQFRSGRQFAAWLGLTPLQKSSGGKERLGRITKMGDKYLRKLLIVGMTSLVRRAKDSPPTIDPRLANLLVRKPVRVATVAMANKTARIIWAIMTRGETYRASHQPALVA

SEQ ID NO: 403134 - protein, 309 aa, unidentified
MFVGVDVSKAKLDVAFRPEGESFGVDNDESGTAECVRRLRELRPQLVVVEATGGFETAFVAAAAVAALPVVVVNPKQVRHFAKAVGRLAKTDSIDALVIAQFAEAVRPELRPIADEASERLSALLSRRRQVLEMIVAEKNRLASTREKQVRQRITYHLHFLKQELGELDDDLDGEIRASPAWREKEDLLRSVPGVGPVVARTLMAELPELGQLDRKRIAALVGVAPMNNDSGTLRGQRRIQGGRARVRTALYMAAVVGSRFNPRLKSFYEVLRANGKSAKVALIACARKLLVILNALVRDGQRWNPEAA

SEQ ID NO: 403135 - protein, 407 aa, unidentified
MLFLGDDWAEAHHDIELEDDQGRLLVRRRLPEGVQGLTALHTLVGDHLVEGEEPDQVLVGIETDRGPWVQALIAAGYTVYPINPLQAARYRERHAVSGAKSDPGDAHVLAEIVRLDRAHHRPMAGDTVLAEHVKVAARAHQSMIWMRQRAANTLRSLLRECYPAALTAFADDLAGRDALAVLAAAPDPAAGRRLSPARVATLLRKAGRQRNLDKRAEEIVAALRSEQLPVRVELAAVNRASVSALVAVITTMVAQTGVLEEQVRLGFGRHPDVEIYLSQPGLGLILGARVLAEMGDDPDRYADARGRKNYAGMAPVTRASGTKRVVLARYARNRRLADALYQQAFAALTASPGARAHYDRHRARGATHHQALRALANRLVGILHGCLRHHTHYDENTAWPAEHQLAA

SEQ ID NO: 403136 - protein, 388 aa, unidentified
MNVGAEKSEPLTAIQTNLGAIFVSLELSRSSWLITSLSPGGGEKMSKHSVPGGDFVGLMERFAQLQEKARRRTGQSFRIIVVQEAGLDGFWIHRALQNEGIESYVVDAASIATPRRRRRAKTDKIDGETLVRALLAYKRGEPRVCAMVKVPTPSEEDRRHLCRERKALTAERVRHVNRIKGFLFSQGVSGYQPLRRDRRQRLEELQTGDGRAFPQHLKALVNRELDRLELLLKQIKTVEAARDALLAVEQTAKPGPAAMLLNIKGIGPEFAAILWSEGLFRHFENRRQIAAYAGLAPTPWQSGAVDREQGVSKAGNPRLRTTLIQLAWLWLRNQPRSALSVWFHERVSRNGGRLRKTTIVALARKLLVALWKYVTAGVVIEGVTMKVA

SEQ ID NO: 403137 - protein, 311 aa, unidentified
MNSPAWFVGIDVSKGTLDVFVRPTGEAKTFVHTEEGLAQMADWLQSFPQALIVLEATGGWEMGAVRILVARGLFPVVMNPRQIRDFAKATGILAKTDKIDPQVIARFAEAVRPEVRPLPTLEAQELEALNARRRQIVEMLTAEKNRLSLAPRWIRKEIQAHIRWLEKCLEKVNKELKDRIQKSPLWREKDEILRSARGVGPVTSTALLCDLPELGTLNRKQISALVGVAPLNRDSGLFRGRRMIWGGRATVRSALYMSTLVAIRFNPVIRAFYERLRAAGKPFKVAATACMRKHLTILNSMIRYRTRWQTA

SEQ ID NO: 403138 - protein, 344 aa, unidentified
MPIVGGLDIHRKQITFDYLDTMTGQVRRGQVSPADRAHLRAWLARFAGLEDVAFAVEGCTGWRYVAEELAAAGVTVHLAEPAGTAFARGRKRHAKTDKTGSRHLRMLLAAGRLPECWIPPGHILEARALLELYHDLRTGHTAWVQRIHAVLFHHGAPALGEGTLRTGQGVAALQAAAAHLSPAGQLQVATALEVLEALETRLHLLRHQLLAVARHLTGAKVLAARLYGAGPVTGLAITCWLAGEGRFSSSRKAVRFAGLDITVSSSDRKGPPGKLSRQGPPVLRWAVYEAGKTHARTSAPDHAYYAAVKDRKNSKRACLSEARKILRQAHHILAEPGDDALAAA

SEQ ID NO: 403139 - protein, 410 aa, unidentified
MDLLRREVPASSLVVAIDPGKAFNRVWLTSGERGLVGEPVSLPVLRDGVDELQRLIAQSGIGGAPVIGLEATGSLHRAWASEIERRWPGSLRLFAPSETAAARGQLGSRRIKTDDRDCAALVWLLRQGAGRPAGPDTVEALLGTVRHRRQLVDARRVLQQRMHDQLNALCPGLSAPPGHGRALKLEGPTGQAVLACAAAFGGRPPSTRSLLARAPGRMTQATAAFWAARWKQLLAPPPDAELRAARIGRDLERWQGLQRDVAQDELDLGDLLAGTPGQILTSLPGVAEVRAAAFSAYALPINRWPTPEHLYSATGLAPATYQSSTITRRGQISRQGLPEHRDALMSIAWGLSQNSPAFKARDAELRARGMRPIQARVALARHACRLCWRLLHTQEPFDERRYAHARRRGR

SEQ ID NO: 403140 - protein, 332 aa, unidentified
MSTFVGIDIGATAFEVVVRHNDKNSDAKSYKQTHQDHEKLAARLIKLYPACVVMEATGVYYLNLAVVLYNSGLKVSVINPNSFNHFAKLKLSNSKTDAIDAALLAEYAQRMSPCLWTAPDPKYLSLRDTGRQINRLVGRRTEAKNNLRALKAKDTTYQVLIDDEQEGIEYLDSRIDRLRNLALEMIQEDEFLSQKLENLTAAIGIGVNSAIMIICELELLPKHLKSAQVSRFAGLDVRLTQSGTSINKPGRLSKAGNAYLRTALYMPALSAAIHDPNAKTFYQSLILRGKKKMQALCAVMRKMLTGIWACLQTNTPFESSKLFSEEHKKACA

SEQ ID NO: 403141 - protein, 412 aa, unidentified
MSDVTRSWFAGVDWGSEKHQVCMRDVAGTVVGERAFAHNGAGLVAMCDWLVSVAGRPSTVAVAIEVPHGPVVDVLLDRGFAVHAINPKQLDRLRDRFSVAGAKDDRRDARVAADGLRTDPHLFRQVTAGDPSVVELREWSRLAEELQQERLRLANRIRQQLWRYYPQLLELGEDVTAEWVLALWSVAPTPAKAAQLREATVARLLARHRIRRLDAASVLGVLRQPAITVAAGVTEAAVLHLRSLVARLRLANTEFHQAEQKLDELCARLSQDATVAAHGPCDAAILRSLPGVGLVVLATLLTEAGDPLARRDYAALRTLSGVAPVTKRSGKTCLVVMRYAAQDRLRQAMFHWARVAAVHDPKSRSRYAALRARGHSYGRALRGVADRLLGVACVLLRRQVLFDPDHGKSAAT

SEQ ID NO: 403142 - protein, 335 aa, unidentified
MRDIGVDLHKTSFQCCYLTESQTEFRKFSSTELEIFKKDLRQTDRIAVESTGNSRWFLNQVKDKVSEVIVVNPGQFKVIVNSSKKTDKADAELLAFYLSKGMLPEVIMKDEYSSQIKSLCNTRDKLVKLRTALKNKIHNILLSHGIISKREDFSSDKGLRKAQSYAFGEVAELEIDVIVAQIRHLNEGIKKLDREIESKGKHLKGYKNITSIKGIGPKSGTILLSVIGDIDRFPSQKALDSYFGIVPRVRNSNDTIHHGRITKQGSKLGRTTLVQCTLIAIRYSPYLRDFYLRLKAKKGSGKAIIATARKLLGIIYQTLKNEWIFEDFPNFVLQS

SEQ ID NO: 403143 - protein, 400 aa, unidentified
MISIGIDVSKGKSTVCMLKPYGEVVRMPYDINHTKDQLNVLVEKIHSLEDECKVVMEATGTYNLPILKYLIERGIFVCVMNPLVMKKYFSVNLRKGKTDKLDAAKIANFGIEKWFCLKPYKEGNDKYTELRALGRNYANLMEAHISRKLALSNVLDQTMPGIKKLIGHGKNDRKKDKLADFAYRYWHYDNITRMSGKAFTENYIMWCNRKGYRPGINKAAEIYAIARNGIPTMSSSTSSTKMLVQESVRALQSTAMSLNKILNQMQVIAKGLTEYETVRSMAGVGDTLSVRLIAEIGDVRRFHDKKSLIAYAGIDSLPYESGQFVATKRRITKRGSALLRKIGYEVMLRLKQLKPTVDADVYDFIMKKESEGKHKNVAKIAGLNKFLRIYYARVMEAYQG

SEQ ID NO: 403144 - protein, 410 aa, unidentified
MAYKVAGIDVHKKVLMVVILEVDDPASEPQRRRFGTTTSELRNLSDWLRQQGVQQAVMESTAQYWRPVWCELEPYMKLSLAQAFCNRAPRGRKHDFRDAERLIRRLPAGELTLSFVPEPEQRTWRMMTRARVQLTEDKSRLHSQRECLLEEMRIKLSSVVSDLLGVSGYRILRALADGETDPRKLAALADDRLQCSEKQLIDALSGNPQPAHQRVLTLSLNRHQLMVEQIAEFDRLIAEALKPHQEAVARLALAPGLGVDSAQQIIAEVEVEAGTFPTAGHLSAWVGTCPGRNESAEENHSSRSAKGNKYLRRILNQAAHAAVKTKGSHFQAVFRRLLPRLGYKAAIWAVAHRLCRLVWKMLHENVSYIEQGSQPDARTKRRRARNLLRALRKLGYEVNLQPTSTACPAA

SEQ ID NO: 403145 - protein, 357 aa, unidentified
MSEITRVGVDLAKNVIQVHAVDAQGKLVTNRALMRDKFLAWCAQLPARCLIAMEASSGAHHWARKLVSLGLQARIIAAHLVEPYRSQGKSGKNDANDAAAICEAASRPSMRFVAIKTVDQQSMLSVHRLREGFKEERTAGTNRIRGLLAEFGVVIPQSTTVLRESLSEVIEDANNELSGLVRLVIERAQTQWKELDEHIDWCDQRIAAHLKNDAQARAAGQLIGVGPVSASAVVATVGDFKQFKNGAQFGAWLGLTPRQNSSGGKNNLGAITKRGDMYVRSLLIQGAKSAVLTAHRREDPISQWVLRLREKSGWQKAAVALANKNARILWAVMTKGAPFDARHVSLKPGASTALAAA

SEQ ID NO: 403146 - protein, 337 aa, unidentified
MKSYLFIGIDISKVTLDVCVLLVSGTMEIHYHQFSNSSKGFIHFLKWIKEKSEGIAVEDWRVCMENTGIYSLALNCFLHEKGIWQSMENALQIKRSMGVVRGKTDKADCKTIALYAYRFYDKLKPYILPGETLLRLRALFSQRERLVSIHSQLLVANQSMKGYARELVKDIQSQNETLLKNLAEQIKSIDTSLKDCLQQDEELKRKAKLIQSVPGIGQQTASYLLIVSRGMQSFATPREFACYSGCAPFAYTSGTSNRGKTKVHFIANKKMKMLLHMAAMNAITFNEELKTYYQRKVAEGKNPMSVLNAVRFKLICRIFSVIKRNEEFQKEYKKIAA

SEQ ID NO: 403147 - protein, 378 aa, unidentified
MRFYNQPHRFYCGVDLHARTMYLCILDQAGAIVLHQEVPAEPGAFLEAVAPFRDGLVVACECLFCWYWLADLCAGEKIAFVLGHALYMKAIHGGKSADDRIDSQKIAQLLRGGNLPIAYVYPKGRRETRDLLRRRMYLVHKRAEVVAHVVNTNSQYNLPPFGKKLIYARNRQALQIADRFADAGVRKSIELNLRLLDTLDDLIGDVELYLVRTVKVDDADTFYRLRSIPGVGKILALVLLYEIHDIQRFAGEGMFLSYARLIRPLKTSAGKVKGGGGAKIGNAHLKWAFSEAACLLARESDQAKRFLARQQKKHGKPKALGILAARLGRAVYQMLRQKKAFDPKRFWNGEAGVTPEQLQKAAVNRPRRAQRSRCVLEA

SEQ ID NO: 403148 - protein, 344 aa, unidentified
MTYYVGLDVALRSVSACVIDDQGEIVKEAKLDSEVEPIVAWLASIRSEIEIVGLEAGTLTQYLTYGFQAAGYPIVCMESRGVHAALQAMRNKTDKNDARGIAQILRTGWYRSVHVKSIESHHIRALLSSRKAVLNKCIDLENEVRGLFKIFGFKLPGKLKHGAFDGAVRGIIEADPALSHALLPLLDARGVLYRTFLVMDLRARKMAQQDEVCRRLMTAPGIGAISSLTFKAAVDDPKRFKRSRTVGAHFGMTPRRFQSGEMDNMGHISKAGDKSVRIVLYAAANALLTRTTGYSSLKAWGMGLMKTKGRKRALVAVSRKLAVILHRMWIDGNDFQWGTEGGQS

SEQ ID NO: 403149 - protein, 342 aa, unidentified
MPHSPKREVEVFAGLDVSAREISAARFRSQEGTLTVASFANTASGHKALLAYLLQATEGVRVCLEASGNYSLDLALTLHAHHHVEVSLVNPRRARRFAESLGERSKTDPVDARVLCEYAARMPWVVWRPPTARALRLRAITRAIESLGVMHTQEKNREHALKASQALPSLVIREMQRHQRYLENRMEQLRREARRLIAKDPELDRRFRLMVTVPGIAETSALQILGELAVLPDSLDARQWVAFSGLDPSQFTSGTSVEKRPRISRGGSRHLRRALYMPALVALRREPHLRTFYQRLVNRGKARLQALVAVMRKLLHALFAMFRCHQTYDGAKLCSVELASCA

SEQ ID NO: 403150 - protein, 320 aa, unidentified
MKTSDNVSVTVGIDVSKLHLDLHVSSGLYDSFRNDGSGFSDIKKLLSKFTVSLILLESTGGYENGIVCYLQRLGYDVVVINPRFVRDFARSLGRLAKTDKVDAELLSQFATVINSRGDRARFVRPLTDETRRHLADMVSRRRQLVDLITVERQRKSVSSQYASESIDAVISYLRSQLERVDADISAHVSLYYSDLSDLLTSFKGVGSATVGVLLGEVPELGKLNRRQISALIGVAPFNRDSGQMRGRRRISGGRSLVRNSLYMPTLSAIRFNPVIRDFYERLLKSGKSRKVAQVACMRRMVCILNAMLRDGSRFEPVMGN

SEQ ID NO: 403151 - protein, 329 aa, unidentified
MSAFICGLDVHKDSTYATILNDEGKVINHVRMSNEKVLSYLTYFKVRRVAMESSTAVAPLYRQLASKGFDVLVSHPKKTRYIAEANIKSDRVDSKAIAELARLDALPLAYVPNEETAILREKVRRRAFLVRQRAKLKVKIKSVLTYEGIKPPSDNGLFTLKGVEWLRSLSLEPVDSYLRIMSTFNREIKLLSRQLLGLAEEDEDVKLLMTIPGIGYYSALLVKSEIGDISRFPFGERLCSYAGLVPSTRASGKAVRHGAITKEGSRWLRWVMIQAAQTHVHMFDSTVTRMYNRVAQRRGHQVALTTAAHKLLLVCYSVLRNKRPYYDQA

SEQ ID NO: 403152 - protein, 356 aa, unidentified
MSHDVKYIGMDVHKEAIVIAVLNSSGKLIMETIVETKASSILQFLHGLRGELHVTLEEGTWAAWLYDLLQPQVQEVVVCNPRRNALLKEGSKSDKVDARKLADLLRTGMLRPVYHGENGLRTLRELGRSYQTISKDLTRVMNRLKALYRGWGIPCAGTQVYAPRYREEWLNKLPQAGVRRRAELLYQQLDGLQALRRNLRPEFLAESRKHKAAKLLRQIPCIGPIRAARLIALMQTPHRFRSKRQLWTYSGLGIETHDSAQYRYVGGQVQRSKKPQQIRGLNQNHNHEMKEIFKSTATRASCATGPFHDFYAALLTNGMKPEMARLTLARKITAITLTLWKKEERFDAEQLKTQAA

SEQ ID NO: 403153 - protein, 405 aa, unidentified
MNEFIAEGRKGAGSVTGLAGVRQALEQASNVYGAYIGLDVHKDTIAVAVAECGRGSPEYYGEIANTPKKVAKLMERLSARFGGERLLWVYEAGPCGYGLYRQIVEMGHDCEVVAPSLIPQKVGERRKTDRRDALGLARLSRAGELTAVWVPSLEQEAIRDLTRAREDMKKLELKARQTLGAFLLRHGQVYGGKSKWTQAHFRWLETVIFDAPVQQIVLQEYIEAVKTAERQVAALEQQMHAVLPQWSLAPVVEGLMALRGVSMVSAMTVLAELGDISRFDSPRQLMAYLGLVPSEHSSGPRRRQGAITKAGNGHVRRILTESSWNYRFPARKTRDIQKRAEKTSAAVQAIAWEAQKRLCGRYQRLLRAGKVKQQVTTAVGRELAGFIWAIACEVMGKPHGSRATA

SEQ ID NO: 403154 - protein, 404 aa, unidentified
MYNAVGIDVSKGKSTIAVLQPGGTVIRKPFDVSHTSQNLNELADYLGSLEGPSKIVMECTGRYHEPMLKVLYEAGLFVSVVNPHLIKNFGNNSLRKVKSDPADARKIARYTLDNWAELRQYSDMDDTRTQLKTLNSQFSFFMKQKVAAKANLIALLDNTYPGVNKLFDSPTREDGSKKWVDYAYSFWHVDCVRKIGLKTFTERYKAFCKKHHYIFQQDKPEKLFNASKELVAVFPKEKTYKLLIQQSIQQLNLASGHVERLRQEMNALASTLPEYNTVMGIYGVGKTYGPLLIAEIGNVSRFTHREALTAFAGVDPGVDESGQHKSKSNRASKVGSARLRKTLFQIMTTLLQNAPVDDPVYRFLDKKRAQGKPYYVYMTAGANKFLRIYYGKVKECLRNLEQAE

SEQ ID NO: 403155 - protein, 273 aa, unidentified
MLYVGLDLSRKRLDWQALDLYGERVAVGAVPPDRDGLAKLGQRLGDAAVLAVIESMSGARFVHDQLERAGWDVRIADALKARGLAPLACKTDKIDCWVLAELARLNLVPEIWLPDPEVRAERERARFRLHLVKHRRALKNRVHSILFQHGVANPHSDLFGVGGRRLLERLALPEPWASTVESSLSLIDTLDEQIHACEREPRRLGADHPYIPLLVTCPGIAWTLAYTIAAELGDLSRFASPRKLVGYTGLCPKVEQSGERDRRGPLRKNGPDY

SEQ ID NO: 403156 - protein, 349 aa, unidentified
MVADELDYVIGVDTHLDEHVLAVVASPSGAVVAKRSVPANSRGYALALRFAFEVADGVRVWAIEGTGSYGAGLARHLVGRDETVLETSRVPQTERRLRGKDDALDAVRTARALLASETLTLPRRGERREALRLLLVARRSAVDVRREALGQLRGVIVTATDGLRDELRTLPVGRLLERCSRLRRSTTMSDGEVATRLVLRSLARRIQAATVEAAELEREILAHVQALAPRLLDEPGVGPIVAAQVLVAWSHRGRLRSEACFARLAGVAPVPASSGKTTRHRLSRGGDRQLNRALHTIVLHRRQHDPATRDYIERRIAEGKTRRDATRLLKRYLARHLFRLLQQTEPLMT

SEQ ID NO: 403157 - protein, 313 aa, unidentified
MSQNNTSILYVGLEVAKFSLQLHLAGRFHSLANDPKGHAQILKLLRSQPGAHVVCEATGGYEQSVVRALQAADLPVTIVEAGRVRYFARAQGQRAKTDPIDSAVLTSYGTTFKPAPTPAVSAHQQRLADVSQRRRQLIHTRTAEHNRAEHYTDPLCVRQARQLQKTLEKQINQCDQAITALIAEDAGLAQKASRLQAIAGVGPVVAATVLAELPELGKLNPQTAAALAAVAPYNRDSGKLTGIRHIRGGRRPVRCALYMATLSAVRHDRILKEFYTRLRAAGKKPLVALTACMRKLIVLMNHLLKNDKFQLAN

SEQ ID NO: 403158 - protein, 411 aa, unidentified
MHYYVGIDIAKSFHVACVINQDDKVIKKSLKFNNDASGFDELLLLLNSIDEVSTFTVGMEATGIFFENLYLYLREKGFNVILLNPYQTNRFREMDSMKKVKNDNIDALMIAALIKSGRYSKAYVSQDLYQSIKSLYRHKNNLLEEMKKHKRQISTLLAVVFPEMEQVIKDPFNVTGLALLEKYPTAKHYHHASVERILKTFRGIKGNNFNEQKAQKLLELAKHSVYQGNGVDERAYVIKSHIRVIKLLQEELKELENEMLKLFNEQVSLDKDEEQEIMDIIDNLRTIPGVSDKTIFALISECGDLSRFKNNSHLIGYLGLYPTLEQSGNKLTYGPIAKRGAKLAKKALYQAAIAAIRHNDELNKLFRDKVSQGRAKKEAVVIVARKLAHIILAIYKNNVAYNPQRVFQASA

SEQ ID NO: 403159 - protein, 449 aa, unidentified
MSRPQVIGDTGHERVHDRVAAIDVAKDTGMVCTRTPHPARPGARRATVQSVRARMNAIRALGRQLHKDGIEIVTLESASGYWRIWFFVLGACGLAVQLVHAAQAKNLPGRPGTGKLDAMWLARLTELGLLRASFVPPKAIRDLRDYTRARTRLVQERTRCWQRLEKLLEAALVKVSSVASKLTTVSAQDMIKAMIAGQRDPEVLSALARGRMKAKRDDLVRALDGMFDDHHGELAGLLPDQIVFPDARIAQLTARAAELTAAMPAAWGVDGDGTGGPGAGTAPDAPVLPAVARLAEIPGVSENLARSIIAEVGLDMTRFPTAAHLVSWAGLCPSARQSGPRSRPGKKGQGDTWLRGSLGQAAVGASRTATFPGERYHRIARRRGKARAQVAVARSILIIIWHLLKNPGARFTDLGHGYYQARTDTGRKIRNHIRQIQAPGCDVTITQAA

SEQ ID NO: 403160 - protein, 348 aa, unidentified
MAIAMIGLDTAKNLFQVHGVDEGGRAVLRRKLHRSELVGFFEQQPRCTVFLEACGAGHYWGRLLSGFGHEVKLIAPEAVRPFVKKGRKNDAADAAALCVAGTRPETRFVPIKSVEQQAVLALHAARSLLVKQQTMLANALRGLAGEFGVTVPRGLHKLEELAALVSAEESIPAAGRQAMAELHAHGRAVAERLATLEERIVRHVRRDATARRLATIPGIGPITASLIAATVGDHVGAFRSARHFAAWLGLVPRQHSTGGRTRLGGITKAGNAEIRRLLVLGATSMVWRATCWDSKAGLWVRGVLARRPVRLVTVALANKLARIAWALMTRGEVYQAQGRAPAAAATVA

SEQ ID NO: 403161 - protein, 368 aa, unidentified
MFEHTFIGLDVHAVNVVGHALNPGTGEISCHTTAADPALVLEWIRRLDPPVKVVYESGPTGFGLARYLRAAGINCVIAASSKLLRAPGDHIKTDRRDARVLAEMLAVGSVVEVRIPGEDEEALRDLSRLRTGTAKDLKQARQHVNAILLRHGIRYAKDTKWTKEHGLWLHRQRFDLPALQFTYQADVEQAELLAGQLKRIDRQVATTASQCRYAPLIDALMCLRGIQITTGFGLAVEIGDWSRFTGSSIGSYLGLVPSEESSGQSRHQGPITKAGNTYARKLLIEAAWQHRRPYARPGERLLRQLDLVDPATRIRALEGNHRLHHKWEYFDARKKMPVKANTAIARELAGWCWSLAAPLQQGERVNAA

SEQ ID NO: 403162 - protein, 460 aa, unidentified
MPFLDHLRQDLPARYYLGIDIGYKEHVAVVIPLASFLRGGTQWQRARCLHFASTQQGLAQLDQYLVGFSADPAAFLGLCEPTGGYYGATLFEHLIEQCYPMRWIDNGAVRKMRDQLFPQLAKTDEMDPRVMARIGYLHEAVGEEFNLRPLVLPSADDADLLALCRDHWKLSTLICRARNQFTQLMAVVFPELKTFFTSSVSTLAPVQLVARYASPADLSAATVDDIAALLHQVRAHKHAWRAAELQALARTSAGVVPDAGRAWRIAWLTTFLRDNFAHDEQLEKRIEQMVRQRADYCLVESVPYAGPSTLGLILAATGDVNRFSTYRRYVAYTGYFAGLEQSQTIDRTKMSKRGNRDLKRALFQIVAPLVWLDKEANPYKTLYQRKMAEGRPWYAAMPFACAALARHLYHCLKTKDPYDVAQAFRTPLSARACDEALAELHGNLDDKIEEMEASLSQMAP

SEQ ID NO: 403163 - protein, 476 aa, unidentified
MAALQKANEKLNRQQRKELVRRLWSSNPGLDVVHRNAAGIDVGNEEHYVAIAPTQDEVPVQRFNCFTAELIRMAVWLKGRGVQTVAMQSTGVYWIPLYDILEEHGIEVYLVNARDTKNLPGRKTDVQESQWLLKLHTYGLLRNSFRPASEIRVLRAYWRQRDQHVKTAGQCVQRIQKALTQMNLQLANVISDLSGKTGLQILRAVVNGERDPAKLADFRDPRIKASREDIIASLRGNWRAELLFQVKQELARYDFCQTQIEECDRELKQQLQSLPELRAGEEKSGAKETQQQPKKRKRRKDGNIPRFDLHHELQRISGVDLTRIDGIDVMTGQTVISEVGLDMSRWPSENHFASWLGLCPSNELSGGRILKKRTRKVVNRAATAFRMAASTLRTSQSYLGAKFRRLRSRLGPPKAITAMARTLAILFYRMLKFGQDYLDRGTEFYEQRQRDQQLQYLQKKAAQLGFQIVAVPQTPK

SEQ ID NO: 403164 - protein, 355 aa, unidentified
MEKLIRIGMDTSKQVFQLHGVNAAEEPVLRRKLRRKEMVAFFQGLEPTVVGIEACGGAHHWARVLQEFGHQVKLLPPKYAKAYVKRGKNDAADAEALCEAMSRPTMRFVAAKTAEQQAAQMLAGTRDRLIRRRTQLTNAIRGYAAEFGLIAARGVDKIAPLLARLHSEPTLPALARELFAGHAKEYAQLQAQLEAIDAQLMAWHRQNEPSRRLVKIPGIGPIGATLLVMKVAQPEAFQSGRHFSAWIGLTPKDHSTAGKTRLGGITRAGDEALRSVLVVGATAVIQQVRRGKACRWQGTGGQPSPWLVELLKRKSPKLAAVALANKMARIAWKLMVSGQHYNPAHVVSAGMDKAA

SEQ ID NO: 403165 - protein, 458 aa, unidentified
MSNPDQPIAVQSSLPPINLNAAGIDLGADRHWVSIPTGRDSECVRSFGCFTADLYALADWLAHCGIETVAMEATGVYWIPVFQILETRGFEVKLVNAHHVKTVPGRKSDVLDCQWLQQLHTYGLLAGSFRPDDQVCVLRSYIRQRDNLIKSANVHVLRMQKALTEMNVQLHRVISDITGTTGMAIIQAIVAGERDPQILAAFKDRRIKASTREIAAALTGDYRAEQVFILQQELQLYQVYQAQIAAVDQKIEQCLAEFSDKVDVTAHPLPKPKRRGKKPSGNAPSFDLRTHLYRICGVDFTQIDGFGALTVLTLLSELGLDPSRFPTVKHFTSWLGLCPGSRITGGKVKSSKTRPVVNRVANALRMAAQTLSRSHSALGAFYRRLQSRLGAPKAITATAHKLARIFYRLWTSGGAYTDPGVDAYERQYRERLVKNLKKKAQSLGFELVVSSAADECVS

SEQ ID NO: 403166 - protein, 340 aa, unidentified
MHITTIGIDLAKSVFQLHGVDAEDKVVVKKKLRRGAVLDFLAKLEPCLIGMEACATSHHWAREIAALGHEVRLIPPAYVKPYVKRQKNDAADAEAICEAVTRPSMRFVPVKSAAQQGVLVLHRSRDLLMRQRTMLLNAIRAHMAEFGIIAAQGPRNVMGLIGELRDNEEIGLPDIARSALLALAAQLDAKGDEIRIIERRLMAWHRADKTSQRLQTIPGVGLITATALAASVTDPSVFKSGRQFAAFLGLVPRQNSSGGKERLGRISKMGDGYLRKLLVIGSTSVIRRADSNTSATGVWVRSLLERKPARVVTVAMANKTARIAWAVMARGETYRAPAIA

SEQ ID NO: 403167 - protein, 370 aa, unidentified
MERGSLMLNTTTFVGLDVHARSIKAVALDAMTGEVRSATFAYDAAAVAEWVRSLDPAAKCVYESGVTGFDLQKRLAALGVDCVVGAVSKMIKPSADRKRKNDRNDAEFLARMLSVGNVVEVWVPDDECEAARDLVRALDDAREDLKRCKQRLSKFLMRHGYAFSETTPTGRRKGNWTAAHWTWIRSISFPEKADGDALAYYVDAVRQAMEDKARLEKLVEAEASKPRWKRRVDSVRCLKGIDVTSAADLVFEAGEFSRFKSARSFAAWLGLTPSEHSSGESVCVLSSSRRQNRRYDFDTFGVSRADLFFYSRDLPSISAFSILLLAPPNSTSLPWCMMRSMMAEASLSSPNTTPHLLNSIFVVITRLRFS

SEQ ID NO: 403168 - protein, 345 aa, unidentified
MGEVSTIGLDLAKSVFQVHGVDRHGAVVVRRSLRRAQVLDWFAKLPPCLVGIEACATAHYWARELRRLGHDVRLIPPAYAKAYVRRNKNDPADAAAICEAVGRPSMRFVTIKSERQQAAAGLHKVREMLVKQRTMLTNQIRGLMAAPGLDPGVGIVAATGTRHFGELVARLAIPDDQRVPAPLRQALLGMAEVLRAVTKKIACIEQEIVAAGRDDATYRHLITAPGYGPILSSAMAAMVVDPAVFRGAGDFSASLGLVPRQEGTGGRIKLGRISKRGNGYLRRLLVNGAMAVLSSRRARQDPWLAKLLASKPRMLVAVALANKMARIGWALMMRQEDFRARPAAA

SEQ ID NO: 403169 - protein, 339 aa, unidentified
MSASIIGLDIAKNVFQVHGEDAAGKIIVERRLGRKRMIEFFSKLPPCVVALEACGTSHYWGRTLRALGHDVRLIPAAYVKPFVKRNKTDARDAAAICVAAQRPDMRAVAIKSEEQQASRALERSRELLVKQRTQLMNSLRAMLAEFGIVAAQGARGFAELRARLVAGEGLPETLTDALKLVLVQLDRLTPTIEALEDRIKAVVKADPDMRRLSRIPSVGFLTAHAVVAAVGDGRQFACGRAFTSWMGMTPRENSSAGKRRTGGLSRQGESRLRKLFALGAVTLMRNARSRDDRATQWQRGILARRPMKVAVMAQAAKTARIAWAVLASGKDYAPRPAAM

SEQ ID NO: 403170 - protein, 309 aa, unidentified
MEIIVGIDVSKDRLDVHIAPSAEAFWLGNDHAGVEDLVRRLAALSPTAIGLEATGGFENLAVAALAGAGLAIVVVNPAQVRAYANALGKRAKTDPLDAAVIAAFVAATKPELRPLRDAETRTLADLVARRRQIVQMIVAEENRARTVTAKQAHKSIKRLLAALRRELASLDADMDDHIRKSPVWRVREKLLSSVPGIGPVVARTMIAEMPELGSLDRRQIAALAGLAPWTRQSGKWRGKSFIGGGRSRVRAVLFMAALVAIRHNPVLKAFRDRLVEAGKPKIVAVVATMRKLLTILNAMIRDQKPWQAA

SEQ ID NO: 403171 - protein, 375 aa, unidentified
MKDVQKFVGLDVSKDSIAVAIADSGRGEPRFHGTIQNKPEDIRKLMKKLGKPESLLVCYEAGSSGYGIYRFLLSMDIDCMVVAPSLIPKRSGDRVKTDKRDSIRLAQLLRAGELTSVWVPDEDHEALRDLIRARHDAREDLQSSRQRLVHFLLRHGIRPPQGVRNWSVKHREWLKRLTFERASQRIVFQEYLHAINEVEDRMKRIEAQIHEEAIQCEHAPVIQALQTLRGVAEVTAVTLVAEIGQFSRFSNPRQLMSYAGLVPKEYSSGSSRWQGSITKTGNSQIRRSIVEVCWSYRHRPSLKGELLKRQEGQDPEAKRIAWKAQHRLHMKYHRISAKGKGGKVAVVAVARELLGFIWAIGCAIEDKQVSVSNVA

SEQ ID NO: 403172 - protein, 336 aa, unidentified
MEKITTVGIDLAKSVFSLHGVDGAGRVVLRRTVRRDQLVEVVAGLSPCLIGMEACSGAHEWGRRFQEHGHTVRLMAPKFVAPYRKSGKNDGNDAEAICEAVSRPSMRFVPVKSAEQQALLTLHRVRQGFVVERTATINRLRGLLSEFGVILPLRSVTVRRQAAAAAEKLPELARRAVGDLLQQLRILDERIGGYDREIELQARLCEPAQRLMKIRGIGPTTALAIVATVGNAREFKNGRQFAAWIGLTPSQYSTGGKPRLGHISKRGDAYLRNLLVQGARSVLNSASAHQDRMSRWILELQPRRGYYRTLVAIAIEPAPEAPPQPAPGRSPLWRLV

SEQ ID NO: 403173 - protein, 431 aa, unidentified
MNPPYDLVIGLDRSDTKADLCLIDTRSGQRRRVVIDTAPEALWEWLLELRQQYPAARVGLCLEQPAVHLIGFLESYPWITLHPINPITLQKYREAFVTSRAKDDTRDADYLADLLWNHQSKLPVWTPQDGATRAVQQLVVHRRAVVEERTALSNRLIALLKQYFPQALKLCGEDLWRPLATRFLLKWSSLQAVQKARPASLKHFYYLHGSRSAKLLEQRLALVQRAVPVTDERALIESFALRVQLICRQLQLVQRSVGEFEQKIAAAYAGHPDRQIFASLPGAGPVLGPRLLASLGSQRQRFDSAAHLQHYTGIAPVTKRSGGSCHIHRRYLCPKFHRQSFHEYAQESVLWSRWAAAFYLQQRTKGCAHHTAVRALAYKWQRVIWRCWQDRQPYDERIYEAALRKSDSPVVALFERVELGKSPWKNPAKKN

SEQ ID NO: 403174 - protein, 458 aa, unidentified
MSKKRSSGTGKKNRRILEQINHNAAGVDLGAREVWIAVGDHVSNEPVQKFGTTTSELRRSAEWMRSCGVNTVAMEATGVYWVAAFEIYEEYGLTPVLVSSRAIRSFNGMKKSDYIDCQWLHMLHTFGILQASLRAEAEMIELRAYMRQRRMLTERASEHIQHMQKALVVMNVRLDQAVTDITGVTGMSILRAILNGKRDPKELAMLRNPGFAKSEEQIAEALTGHYRDEQLFALKQAVELWDFHRNLIRECDQKIQTVIEKLPIKADRTSVPEARGKRGKPRKNEVQFDVRTLLYERLGLDLTQIAGLHILTILTVISECGIDLSRFPTAKHFCSWLGLSPGTKITGGRVISSRSRRTANRAATALRVAAQALADSKTELGAFYRRKKGQIGPEKAITATAAKLARRIYDSLRTGRPYSDRGPQFYEQMDRERTLASLQKRARRLNMRLVPIDQKEAA

SEQ ID NO: 403175 - protein, 422 aa, unidentified
MEVLIERAAGLDVHQKTVVACVLIGAPGAAKVTQEIRTFGTMTRDLEALRDWLAERGVSHVGMESTGVYWCPVHNVLEGHFTLIVGNARHMRNVPGRKTDVKDAAWIAHLVRVGMIQPSFVPLKPMRALRDLLRYRRKTVEAQSAERNRLQKLLETANIKLASVASNVLGTSGRAMLRALIDGTASPEAMAELALGKLRIKRADLARALDGRLDDHHRFLLTMQLHRLEAAEADIDRLDQEIRRRLAPYGATMRRLMQIPGVEWLTAAVILAEIGEDMSVFVSAHHLASWTGVCPGNNESAGKRLSGRSRKGNVHLKTTLINAAIAASRAKGTYLRDKYHRLKARRGGMRAALAIGHKILLAVYHMLAEGVDYRDLGAAYLDQIDQARTLSNLKRRIERMGYVVSLAPTAPMANTEPEPATA

SEQ ID NO: 403176 - protein, 342 aa, unidentified
MFYAALDVSLRAVAICIIDETGKVRLERSVPSDVPDIVRCFDEFGEPIHEVGLEAGTLTQHLTYGLTEAGFDVVCMEARQVNAALSAMRNKTDKNDARGIAQLLRSGWYSRVHVKSVESHYTRALLSSRKVMQRKCLDLENEIRGLLKVFGVKLPIRLRGGAFEEAVRDTIENDPPLSHALLPMLEARQMLLETFLELDRRVRKAANQDTITTRFMSVPGVGYVTALSFKAAVDDPARFKSSRTVGAHFGLTPRRFQSGEKDNPGRISHAGDADVRATLYAAANAMLMRSIAWSSLKAWGVRLMKTKGRRRAIVAVARKIAVLLHRMWIDGTEFRFGLEAAA

SEQ ID NO: 403177 - protein, 382 aa, unidentified
MPAYADPTPKPISADTIFLAFELSGTSWLVALHAPDADKVERHRLSAGVAAEVLGLIARTKARVTRRLGTTPRVACCYEAGRDGFWLHRVLEAEGIASHVMDPTSLQVDRRARRAKTDRLDAQALLRALMAWSRGERQVCSMVRPPSPEHEDERRLSRERGTLLKERLRLSNRIKGLCAAQGIYDYEPLGADRRERLARLVTGDGRALPGRLAAEIGRQLDCLELVLRHLAEVEAVRDARAAQARKEGGSKLAALLRLKGIGPEVATVLELEVFHRHFANRRDVAAYAGLAPSPYASGGTSREQGISKAGNRRARKALIELAWLWLRHQPESALARWYRDRVGTATGRVKRIAIVALARKLLVAIWRYVETGLVPAEAAVRT

SEQ ID NO: 403178 - protein, 341 aa, unidentified
MKNLFIGVDFSKEKVDVAIIFADGLTETAPRVFNEFKTTVSGYKQLVKWVEQNSCGIDSSLWLFCGENTGDYSKGVCNFLYGKGYDMWLENAKSIKDASGLRRLKSDRADASMIAEYAMRNYDKAVMYEPLSESLAQLRELFLYRQMVVRHRCSFQVRRGEKRLTMEKSPIKTMISQSGRHIVSELNKEVEKIDKRIAELIKSDEELTEVFTIVTSVPGIGTQNAVCLMVYTDNFRRFNYDSRKISCYYGIAPFGKDSGTSVHSDPHVHYMANRQIKAMLTQAALAAINFNPVMARYYMRLVERGKKKQVALNNVKNKLVHLVTAMVRNRQTFTPEYKISA

SEQ ID NO: 403179 - protein, 343 aa, unidentified
MTKTLIATLGIDLGKNSCSLAGLDASGAVVFRRRMTREGLVTFAAALPSCVIAMEACCGAHFLGRTFEAQGHAVRLMSPEYVSPYVKAQKTDDRDAEAIAEAATRPTMRLVTLKSEAQLDLQVLHRARERLVAGRTRLTNQLRAVLLERGMILPKRRTLMRQRLEAMMADDLAVSPRTRILLEDLCEEWADLDRRIGRYGDELAAMTRENETARQLATIPGIGVINATALLAAVGDASAFAKGRDLAAWLGLTPRQHSTGGKTRLLGISKRGNKYLRTQLIHGARAAMVHFSKKLTPIGAWVRQMQARAHPNVVVVALAAKLARIAWAVLRHGREYQPQAAMA

SEQ ID NO: 403180 - protein, 355 aa, unidentified
MVTTQAEPRQARIVVAGVDTHKSTHHAAVLTLTGTVLADAEFPTTGAGYQALLDWVGSYGVIDRIGVELTGSYGAGLTRHLAASGIEVAEVNTTDKATRARRGKDDRIDAIAAGQKVLAGMATATPKDTTGVIESIRMLAMVRDLAVRNRTQAFNQIKDLRITAPAGLREAIAGLSLKALAKEATRFRPDLARMVEPEQAAKLVLKRLGDRIGALTTEINAAEKELGALVAATAPTLISRPQIGVHTAAQFLVSAAANIDRFPDDAAFARLCGAAPVPVSSGKTHRMRLHRGGDRQANKALHMIIVGRMKNHPETLAYVERRLAEGLSKNDIKRALKRFLARQVFNDLKTDLSQT

SEQ ID NO: 403181 - protein, 454 aa, unidentified
MTKSRKKQKAIKVTEDMPVINSNVGGIDVGAAEVWVSVPPGRDEEPVRRYGMFTRDLYEMAAWLKQCGVESVAMESTGVYWIPVFQILERRGISVALVNAKYAKNVAGRKSDWLDCQWLRILHSFGLLAGSFQPTADIATLRCYLRHRQMLIEYAGAHIQHMQKSLTQMNLQLTNAVSDITGTTGMRIIRAILEGERDPHRLAAMRDWRTKNDEETIAKALEGYYQPEHVFALRQAVQLFDFYQQQIVACDQEIGDYLRSLESKIDMEMNPIKPARVKRKNQRNAPHFDCRHEAYRISGVDLTQIDSISESAALTILSEIGTDTSPWKTEKHFASWLALCPNNKITGGRIFQRRTRKSSNRVRDVLCLCAQSLFNSRSALGAFSRRMRSRLGPQKAMVATAHKLALLIYRLLKFGKDYVDIGQDAYEKQYKQRMVKNLARRAKEFGFQLVPAAG

SEQ ID NO: 403182 - protein, 315 aa, unidentified
MNQTWVGIDVSKNTLDIAVRPGDQQWSISNQESDLTVLAERLQTLAPDLVVMEATGGFEGVAAGILSAEGLPVVVANPRQVRDFARSMGILAKTDRVDARVLALFAERNRPEIRPLANEETRTLKALVARRKQVIEMLTMERNRLPRATPEVRSHIEAHICWLKQQLDDFDDTLKSTIQRSPVWRERDNLLRSVPGVGPALASILLSDLPELGHLDRKQIASLVGVAPLSRDSGKWHGQRCIWGGRGNLRKVLYMAALVARRCNPVIRAFYQRLKENGKPPKVALTACMRKLLVILNAMVKQGTLWNEKHAYATA

SEQ ID NO: 403183 - protein, 328 aa, unidentified
MTQIDNVTEFIGIDIAKQKIDVCMGRKKAKSEYRNDSTGHNQLIKRLPLPSQCLIVMEPTGGYETALIDALHSANYNVILANAFKVRRYAQAMGYLAKNDPIDSRVIKYFGEDAYPKGKLDILEKKPASFKKLEAILNRNRQVTKTLKIEKQRLEKAIDQEVIRMIKKQISSLEKVLKKIEERVAQLSQENSLTDKAKKLKKVQGIGDVGAIMLTTYLPELGTVSNKKITALVGVAPYCNDSGTYKGQYTIRGGREALRSVLYMGMLSAIKHNPVIQVFYDRLRSKGKLHKVAMVACIRKILCILNAMERNNTDWQVNYVADINFKRN

SEQ ID NO: 403184 - protein, 428 aa, unidentified
MKDDRTATAFGERFCVFLGFDWARDHHDVVGVDASGGIVLDLRIPDTAEGWASLRQALTDRAGPELSVVAVAVETCNGPAVDRLLGMGCAVYPLNPKSAQRYRDRKAPSGAKSDRLDAWSFADALRSDGHGWRALVPDEPLTQELRLLCRDEVHLIQQRTALVSQLKQALYEYYPAALEAFDDWTSAGPWAFVEAFPTPEKLLRAGKRRWEKFLHSHKLYRPETYSRRMTAFAGAEQFCGSAPVTRAKSRLAVALAKQLRLLAREIGDYRRAIEALFAQHPDGDLFDSLPGTGAKIGPRLLAEMGDDRGRFDQAESLQCYGGTAPVTLQSGRRRWVKLRKGCNKSLRHAVHLWANGSRRKCAWAEAYYQHKKAQGMSHACALRCLGQRWLKILWKMWQTRTAYDEALHIRNQVKHGSWILALPQETPC

SEQ ID NO: 403185 - protein, 339 aa, unidentified
MRIIGLDLAITRAHKAVVMDEHGTFVTPVLAVATWPDELAAMLQRAREGAPPDRPVAVVMEPTGLAWLPVAVYLMRHPVTVYLVNSQPVADLRRYYHKHAKSDRIDARVLAKLPLVSPEKLHALVLPPAALLKCQRACKQLDWVITQITALHNQLTGLDRRVWLGGWRDHVFADPFGPAARGCREHDYDPTAVLRAGPETIRHAWRATGLDPADGGEWVEPLVKLAKHVMAVYGDPSTYVDFAALQAEVRLIQKWLAQFEADRDQLRRTVVRSLYRRLHPSRHLETLKGIGQDSAAVFVSFIGDPTRFANGRVCRGWSGLVPRSSQSADSESKGLRIST

SEQ ID NO: 403186 - protein, 441 aa, unidentified
MKNEPTQNNNSIPAADPIAAWVGLDWADKKHSLFVRPTDGAATTACELEHKPQALDQFFLQLHQKHPQGRIAVCLEQSRGPVLYALMKYDFVVIYPVNPRCLADFRRAFKVSGAKADPTDADLLSELGCKHHQRLRALVPEDLATRQLRFLVEARRDFVNKRTALANELTATLKSYYPLALEVVGENLEGPMGLEFLRRWPNLAKLQGAKPSVVRAFFYAHNSRSEEKIAARLEAINTAVPLTEDPAIVGSLQLQAAGLARQLTAVQKTVAEYDQQIRVVFEGHSEKWLFEKLPGAGPVLAPRVAAAFGTIQTNLGAALDLLCLSGVAPVKRHSGQQETVHFRFARPKFLHQSLVEFAKCSIGQCDWARLLYEKQIKQGKSAYAAIRVVAFKWVRILWRCWKDGRAYDEVKYLHSLKKRGIKLYESLYNALPAETGPVNNS

SEQ ID NO: 403187 - protein, 439 aa, unidentified
MSQELPTLDPLASFVDVGSEHMHVSVGGNKPEVFGTVTSQLHALRDWLLEQGVHSVAMEATGVYWLPLYGVLESAGLEVRMVNGRQTRNLPGRKTDMADSQWGATLHMHGLLHAGFVPPADIRRLQDYLRLRASHVAAAAACVQLMQKAFDRMNIKLHDVISKLGGVSGMAVVRAIVAGERSPEALAALCDVQIRRKKERAVIEALRGTWADEHIFALDQALQSWDHYQKLIADCDRRIAAVLPPHDETQPPLPSSTKQTGVNAPEISRLREILAQMCGGRDLTKLPALSQYGVLQLIGEVGTDLSVWPTEKHFTSWAGLAPGSNDSGKRKKRVSRGRNRTGQLFCMMAQSLVRSKDIALGGFYRRLAARRGGLVATKALARKLAGWFWRVMVKGDDYVEKGIARYEEQVRKTKEHALKRLANELGRQLVPVPSSSQIT

SEQ ID NO: 403188 - protein, 348 aa, unidentified
MKNLAIGIDFSKKTFDATIMRRDDDDFIELGYSKFDNDTKGFKAFEKWVRKTLRGMPEAKDKASWLFCGEHTGMCSIALCDYLASRGCFMWLESALRIHHTRGLVRGKDDKVDSRRIAEYALRQYSSKVRAYELDSKELRQLKSLQAAHTILVADKVAKTNQLKSGTLDACPEARRQIEHQLDSIKKSLARIDGQIQALLKAKEEFARNAEIMGSFKGVGMLTISYLIIKTRNFKDMLDPRELGCYLGVVPHRVQSGVSIDKAPRTSHYRDAQGNSLLTNCVTSAIMHNNPIIRPYYDRLVARGVHPNKAKNNCKYKIINVLLAMIRNNVTFSMDIHGKAKAQWQTPV

SEQ ID NO: 403189 - protein, 395 aa, unidentified
MFIVGIDIAKRSHEAIIIAEDGQVVRKAFSFRNNCTGYNLLLEQVRKLTLVKSQIVFAMESTAHYWLALYARLLKDGYTVMVLNPIQSHSLRELYIRKAKTDARDSLIIADLVRFGRCKASNVPQDKILALRELCRSRAYLVDMAADLKRKLIALLDRIFPEYESLFDSVFSKASIAVLCKYSTPQKVKNANLRKLTDLLMESSNGHFGEWKAHQLKEAAYSSFGIDDSGGVYSTLLGMFLEQILSLTAQADSLEKQISVFFQEFNNPLTSIPGVGTVLAATILSEIGDITRFSSADKLLAYAGLDPSVKQSGEFKSNQNRMSKRGSPYLRRAIWLASTVAVHRDPMFQTYYEKKISEGLHYMNVIGHVSRKMTAVIFAVLRDGQPYQPILQSAG

SEQ ID NO: 403190 - protein, 484 aa, unidentified
MKMYTVAGGVCQGRIRRVMRMQLGFKAGLGVTRRENCCHASQEVKHVEETCVRFHTPRTSCVECKEEVKGDTDMQVVHERCCGLDVHKKTVVACILVTSPQGVVQKQVRTFSTMTVDLLALADWLKSSEVTHVAIESTGVFWKPVFNLLEADFSVVLVNAQHIKAVPGRKTDVKDSEWIADLLRHGLLKASFIPPEPIRVLRELTRYRGSLIQERAQEVNRLQKTLEGANIKLAAVATDVLGKSGRDMIQALIDGETDAQALAELARGLLRKKLPQLQEALLGRVQPHHRTLLRHILAHIDFLESLLEQLMADIETQLSPYKEEQELLTSIPGISGTAAAIIIAEIGVDMEVFPSDKHLASWAGVAPGNRQSGGKRLSGAITGGNPYLRSVLTQVAWAVSHTKDNYLSAQYHRLARRLGRKKAIVALAHSILVIIYHVLRTKKPYTDLGADFFDKLDTTRIQQHHTRRLEQLGFTVTLTPKEAA

SEQ ID NO: 403191 - protein, 349 aa, unidentified
MKILALDLAKSKSVALDMNTRTGEVEYETVRTVPAEVDVLLERRRPDRVVLEIGAAAGWVHDLAVARGIQVQVANPNGEAWRWSGLKVKTDRKDVDKLAYLSSVNQLPLVHMPSPQVRQKRMLIAYRHKLVERRTGIKCQIHAILDRQGLSCASGKKTWNQESLQRLRELSKPLAELAELELWRGLLALELTALDQIEEQLQTAEQKLNALGKQDPKVRLLRTIPGVGARLSEALVAVIDDPHRFRSGKEVSSYLGMVPRLYESGQTCRNGHITRAGNALLRGLLVEVSWLALRWNPYLAEMYKRIRGGSKTRSKVAIVAVARHLLVMAWAILRKNQPWQAPKVPAATT

SEQ ID NO: 403192 - protein, 416 aa, unidentified
MTFKIVRFICGGMDVHKNLIVATIGTTDKQTLTTEYIQQSFSTFYSDLIRLKEWFISHDCYDVCMESTGKYWIPIYNVLETELNICLTHPKYVKAIKGKKTDKRDSKWICDLYKCDLVKHSFIPEKEIREMREIARYRCKLVYMRSSERNRYQNCLTVSNIGLASAVSDPFGKTATNIMKELMQSEVIEDDKILKLIHKNCKDKDKILDSLHGYHIESDQRFKMDTVMNHIEYLDKQIQACEAELIKRAYPLRDYFQHITHIKGISALSAILIVSEIGTDMNQFESDKQLVNWAGLSPANNESANKKKSVRISKAGQYLKPLLVQCALSSIKDKNSYFGIKYCRIKKRRGHKKAIIAIARMMLVCIYHMILTGEEFNPCDYESLTNPKPKKEPIMTVESALQFLKDSNFDFSSIQL

SEQ ID NO: 403193 - protein, 373 aa, unidentified
MQYNTLFVGMDVHKESFTLCCYDMSRDKVSYTQKTDADYTRVLQYLQTVRKAMGGDVQFVCGYEAGCLGYTLYHQLTKSRVQCELLAPSTMMQAGGRKRVKTDRRDAERIAKCLAFHTYSPVHIPTDQDEKVKDYLRMRDDHKLALKKVKQQILAFCLRHGYVFTGTSTHWTESHLKWLRQLEGEGLYNEILSEYLLTYQTLKEKIERMDRRIEELAQEDAYREPVKKLSCFLGIKTHTALATIVEVGDFKRLPTADRFASYLGLVPGERSSGDSQIRLGITKAGNCHVRTLLTEAAQCFSRGRVGYKSRVLKKRQEGNTPEVIAYADRANERLRRKYYQMVLGKNKKANDAKTAVARELACFIWGMMTDHIA

SEQ ID NO: 403194 - protein, 362 aa, unidentified
MESMRWVGVDVHAKESVAAVLDHATGEVSTHRIAGRPEDVLDWLATVAQPFRAVYEAGPTGYGLVRRAEERGLDVVVCAPGHILKSATDHIKVDKRDAVRLARLLSAGELRLVRIPEPDEEQLRDLVRSREDVRVDLTRIRNRIGKFLLRRGLCPPKHAESWGVLHRKWLQQLRFEDRASELVFQDAMQAHDILVARREQLERALAEIAESSPWSPTVGRLRCLRGIDTLSALGLVAEVGDFRRFVHPRFLSSYLGLVPSEHSSGDKRRQGGITKAGSKHARRLLVEAAWQYRHVPRTSHHISQRQLGQDPRVIDIAWRAQRRLYKRWQRLHEERRKRSTVVAVAVGRELAAYCWEIATLTG

SEQ ID NO: 403195 - protein, 420 aa, unidentified
MNAETNKVERVIGFDSHPDSFTAAIARGPTPAAAVIENVFNKLPMSRLETWAQKHTTPQDLLVLEASGNSFHVVRVLAKLNRRAVVVESGHLGKLKEAHANNDKISAIRIAKAYLAGTARLVWLPDLKTQERRDLLHMHRKAVKRTTQLRNRLRSYLSDNGVRLSKGTRLTQAETLDKIRKAHNWLPRQCQLIEGLLMELGHAQQQRQHWRALIAQEVLADPLLLSIVRLCGVREMVAFGLGAVVGDVRRFSHPKKLVKYIGLNPAFDESGKDKWTGGIGGHGRKDLRCLLIEAAQAILRCSKTALAQWGKRLLRRKSSVNLAVAAMARRLAVAAWYLMMGRWTTLEEIDQRLSQKIGKIISQLGTDRLKKLGKTRKAFREQICQSLKSGRQYVLDSNKKFITKSSPDCSLTSAQEYGLR

SEQ ID NO: 403196 - protein, 354 aa, unidentified
MSNKSTAIVATIGIDIGKNWFHVVGLDRRGAIVLRQKWSRSQVEARLANLPPCLIGMEACVGAHHLSRKLQLCGHDARLMPAKYVRPYSKGQKNDFRDAEAIAEAVQRPTMKFVAIKTADQLDLQALHRVRGRLVSQRTGIINQIRAFLLERGVAVRQGLRFLRTELPIILATRSDVLSPRMMRMIEDLAGDWRRLDERIEGLSNEIEAVAYHDPACERLMTVPGIGPIISSAMVAAIGNGAVFTKGRDFGAWLGLVPKQISTGDRTILGAISRHGNRYLRALFVQAAWVVLIRIKDWDRYGLKAWIDAAKKRLHHNVLAIALANKLARIAWAVLRKECAFECMKRRAMASRPA

SEQ ID NO: 403197 - protein, 345 aa, unidentified
MKLYGGIDLHSNNSVIAIINEQGETLSCKRLNNDMSVILSFLAPYKDKLTGLVVESTFNWYWLVDALMDAEFKLHLANPAAIQQYSGLKHADDHSDARWLAEMLRLNILPEGYIYPRELRAVRDLMRKRMDIVQQSTKNLLSVQSCYMRHLGYKLSSNKIKQMAAIRKGVDTEQVHADFSSMNTALSVISNLSLIRCAQQQINAIEGAILKQTSLSPEFINLTSIDGIGNTLALTIMLETGTIRRFDSPGNFSSYCRCVKGARYSNGKKKGATNQKNGNRYLAWAFTEAANFAIRYNPTVKKYYQRKLAKTNKVVAIKTVAHKLARACYHVLKDNVPFDEHKAFA

SEQ ID NO: 403198 - protein, 375 aa, unidentified
MSKHSEAFVALDTSKLRNAVAIADGGRAGEVRFLGEIENSTAATAKLIRKLEAKYERITFCYEAGPTGYELHRQIKALGHECVVVAPSLIPKKRGDRVKTNRRDAVNLAKLLRAGELTAVWVPDRRHEAMRDLTRARETAVIDLRSKRQQVSAFLLRQGRWYPAGKKTWTNAHMNWLASQKFEQPERRIVFEEMMFAIRQAQERVERLEPAIRAAVPDWSLAKVVTALMALRGIDLISATGLLAELGDLSRFQTAPELMGYLGMGSSESSTGDTIKRGPITKSGNRRARRTLVECAWSYQHPPRVGIAKQQKVAAAPPKVREIAWKAQSRLNRRYRALIKRGKRKNVAITAVARELAGFVWAVAREVASAERAAK

SEQ ID NO: 403199 - protein, 354 aa, unidentified
MARYIGLDVHSASCTMLVLSPSGKKLACHVVQTNAKSLIDLIKTIPRPRLLCIEEGTQSAWLYETLSAHVDQMTVEAVSRTRGPAKPKDDLTDALGLAERLRTNSIKSKVFKDVGRFGKLRELVRVYGYQVRDTVRVQNRLKAVYRSRGIKTDDAIYHPDDCKEWVSQLAPKLRPVAQLLSAQYQAVEQVREHAEKQLEAEARKHPIVAKLRTIPGIGSIRSAQLAAFIVSAHRFRTKRQLWKYSGLGVVSFTSSNWDKDNDGPWERRMTNQTRGLNRNHNTIFKDIFKGAATTVIQRSDPTCPLYQHYLALTQGKTKPNLAKLTIARQIAAITLTIMKKEVVYDPAAIRKTTT

SEQ ID NO: 403200 - protein, 387 aa, unidentified
MPQPNDLSRSLVTLEQDSTLIAVIEMGQSSWLVAGIVPGIERQPLKKLTADQDGLLQLLHRWRKEAAQAGHTIKRIAVAYEAGRDGFWLARWLRAREIEVYVIHPSSVPVSREHRRAKTDRLDSELLKRAFLGWLRGEPKHCSMAAIPTVEDEDAKRPSRERESLVGECTRIVNRVKANLARLGIRGFRPRLAHAPKRLDTLRTPEGTTLPANTLAEMQRDMAHLRFVKQQIKEIETTRTKRLQQASEGGRDAMVRLLARVVGIGIETADLLVQEAFSRKLRDRKAVARYAGLTGAPDESGQKRRERGLAKAGNARVRHAMIELAWGHLLHQPDSALAEWYRRRTVHARSGTRKTMIVALARKLLIALWRLVTTGEAPAGLLLRPAV

SEQ ID NO: 403201 - protein, 379 aa, unidentified
MEIITRNEKILYIGIDVHKDTYSLCCFDFHKNELSDEMTIKATTKAVIKYLEAIKKKHREEILFACGYEAGPTGYGLCRGLQKAGYGCVVMAPTTMSNPDGKRRVKTDRIDARAIARILAYKSYSQVHLPSEEMEALKEYTRARDAKKRMFKKAKQELLSFLLRNGKSYPESGNYWTEKFFKWVKTVQFSEKWMQEAFSEYLAEVYSLKHKIELMDAKIKEIAGLEIIKYKVDKLVCFSGIDVTTAVETVVEIHDFTRFATAAQFVSYLGLCPGEDSSGKTKNMLPLTKAGNKRVRALFCESAKAIKRTNPYGQKSKRILERQKNASPEIVAYADKATKRIRTKMRHLEERGKNYNVSSAAGARELACFVWGMMNGKIA

SEQ ID NO: 403202 - protein, 379 aa, unidentified
MTCKECGQVVKLTRTMNKCHSNTELSSLEETRCQFNGGTGAIKLGIDVHQDFYVVVEQAGGSNPKPPQRFPKAAFLHWAAKLKSQATEVYAVYEACGFGFSLQRKLSALSIKCYVVCPQKLDEQNRRVKTDGLDAKALCLKLDRFVQGNRDALAIVRVPSEEEEQARAIHRQREQLVKARKQLEAQGRSLMVNHGLEPVPNWWKPRTFTALPAPQWMKELLANSQPILVALQQKIAALTVQLQSAASPDQPCGLGKMTSVVIDREIGDWNRFSNRRQIASYTGLCPGEYSSGNTRLQSCVTKHGNPRLRAALVELAWRLVRFQPNYHPVRKWRQILAKGALATGAARKKAIVAVARQLAVDLWRIKTGRLRAEELGLIN

SEQ ID NO: 403203 - protein, 314 aa, unidentified
MSAEIFVGMDVSHACVDVAVHPGTAFQIAHDERGIAEAVERLHALQPTLIVLEATGGLEVPLTGALAAAGLPVVVINPRQVRDFARATGQLAKTDRLDAQILARFAEAIRPPIRPVPDAQTQALAALVARRRQLIEMLTAEKNRLRLAAKPIQKRVEAHITWLEKELATTNTDLMTTIRQSPMWREKEEVLRSVPGVGPVLTTTLFANLPELGSLTRKEVAALAGVAPFPRDSGTLKGRRAIWGGRAHVRAALYMAALVATRRNPVIREFYQRLCQAGKAKKLVLTACMRKLLTILNAMLKSGTLWRVAVNQPA

SEQ ID NO: 403204 - protein, 465 aa, unidentified
MPKKNVTRKSRKRQSHLLKTVQPDAAGIDLGSREHWVAAPPLPDGSPSVERFGTTTPELLRLCQWLKQQHVTTVAMESTGVYWIPLFEILDSHGFEVHLVNARQISHVPGRKTDMLDCQWLQLLHACGLLRGSFRPGDEICRLRALIRERNGIVEQRSDWVRRMQKSLDQMNVCVHHAVSDITGVTGMAILRAIVDGERDPRVLARLRDRRCLKSEEQIVAELTGNWRPEHLFNLGQALKIYDQLNGVISDYDTEILRCIDSLQSAVCEDSSAPPPASKAKASKISQRGQESLRQALYRMSGFDLTTIDGIGVDTAAVVLSELGPDLSTFADEGRFVSYLRLAPNMSISAGKKVPGKFKAVSSTRVCNALRMAATTLRTSKTALGAYYRRIAWRKGASVAVFATARKLAQLVYRLIHYGQSYVDVGAKAYEARCAQRRLSSYARALNELGYKIEPLTDQKSLAAI

SEQ ID NO: 403205 - protein, 347 aa, unidentified
MRFYNRQHQYYCGIDLHVKTMYVCILDTTGQVLVHRNVPSTPAAFLEVVAPYRTGLVVAVECMFTWYWLADVCAAEGIAFVLGHALAMKAIHGGKAKNDKIDSHKIAVLLRGGMLPQAYVYPAAMRSTRDLLRRRLHLVRKRGQLLAHIQNTRAQYNLPAFEKRLAYPGNRDGVVEHFPDPSVRKSIEVDVALIDQYDALIIDLELTIAREAKRHDADAFHRIRSVPGIGKILSLTILYEIHDITRFDRVQEFSSYARLIKCTHTSAGRTLGTGGAKMGNVHLKWAFSEAAVLFLRHTTEGKKILTRLEKKHGKGKALSILAHKIGRAVYYMLSRGTVFSMEKFLAA

SEQ ID NO: 403206 - protein, 313 aa, unidentified
MQRTRVAPADRAAVRKFLSRFRGQHLEVALEATTGWRFVVEELRGIGVEVHLAEPAETAGLRGPKKRAKGDRADARHLRELLMIKQLPESWIPPDHILDLRARVRLRYTLSEQRGEWQQRIQATLYHHGCPQRRQLMVGDGREWLAAQPLPVAAREQVTVALAMIDGIDRQMAPLDKELRAYARRQVGCKALMAHYGIGALTAVTILSELGDCTRFSSSRQAVRCAGLDITVYQSDQHRAPGHISRQGPPALRWALYEAAQVARRPGSPDRDYYTQAAERVGGNRACLSVARKLLKRSYHTLRELGEEALAPA

SEQ ID NO: 403207 - protein, 406 aa, unidentified
MDKPSVETAVLKTDRGGNQLYFVGIDISKFKHDCAIVDELGDVITPSWSFQNDCEGFSLLRELLNALDGEKKIGLEATGHYGQNLKLFLENNGFSFMEFNPLLINRFVRSKSLRKTKTDSIDALMIAQYLMTVEYKPYPPSFYTLEKLKSLTRFRDSLIRQRSRQLVELTNILDKVFPEFKPFFKGRFSATALYILSHYASPEKISNMNSKSYEPLRRLSRGRFSMVDFVELKTLARNTVGSTCDYLLQEMEITIDIYNQLQSKVEEVELQINDCVLGLAPPMLTVPGIGAASAAVILSEFGDFSRFKSPAKLLSFAGLEPGYFQSGTSESTGKMVKHGSSHLRYAIMNCAQTVVNNEPTFATYYTKKRAEGKEHRVALTHVAKKLLRVIYTLQTKEQSYNPDLVR

SEQ ID NO: 403208 - protein, 342 aa, unidentified
MAKVTMIGLDLAKNTFQAHGENADGSVAFRKKLRRDKVMTFFAKQPRCTVAMEACAGAHFWARSLREFGHEVQLVPPVYVKPFVKRQKNDAADAEAIAEAASRPTMRFVAVKSEAKQAQGMAFKTRDLLVRQRTQTINALRGNLAEFGVIAPQGVAHLGRLRAVVDDSETYLPTAVVALAQTLLEQIDTFTEQINAIEQDIKQLARKQDSSKRVMTIPGVGPICATAVEAFAPPMESFKSGRDFAAWLGLTPRQHSTGGKERLGKVSKMGQRDLRRLLIGGAMAVVRWAAKNGAPEGSWLARMLQRKPRMVIAVALANKNARIIWALLTQGGVYKDPAAAAT

SEQ ID NO: 403209 - protein, 312 aa, unidentified
MAKRVEEITLGVDTCKEKLDVYHWEAEEGCQVSNDWQAIKDFLMDLQGPVRLAVEATSNYHVAVVEVALELGHMVYLVNGRQLANYRKAVNVRNKTDPLDAWLLARYLDREAASLRPFQPQSAQAQELWALLKRRALVVNTRKQIDLSFRDLHFSTQAMFSEFQRLLARIEQRLRTLVRALGWWADYQRCRSIPGVGPVNAIALTAVYHRGAFGSSDAFVAFIGFDVRIRESGKYKGQRKLTKQGEPEIRRLLWCAAHPARLYHRFDRYYRQQLDKGMTKIAARVVLARKIARIAFTLLVNQQTFKKAEVPA

SEQ ID NO: 403210 - protein, 341 aa, unidentified
MTFYSGIDLHSKKSQVCIIDKDGKKVKEANLNNDLSLILEFFKPFGKDVHIVIECTINWYWIVDGLQEAGYDVKLAHTLGLYMITGAKVKTDRRDAFKLAKLLRMGEIPESYIYPKEKRPLRDLLRRRAGLVHERAECYSSLRVQFMKYNLNTMSGDGVKRLLPSDIDIMPIPQEVKDYCVMILQRIDLLSSQIEEIDKRLKDITLEDPRFKLLLTLPGVMYVLGLTIYYEIGNISRFSDARQFASYCRLVPGISQSSTTIKRGKGKKQGNHYLKFAFTQAANIAVRYYPKLRKFRDKHANRRKGSVATMVANCILAHKIATATFHMLKEGVPFDEAKLFG

SEQ ID NO: 403211 - protein, 343 aa, unidentified
MDHFAGLDVSVKETSICIVDDTGRIVREVKAASEPQALLKVLGNPTYRFKRIGLEAGPLSQWLFSGLAEAGLPIVCVETRHMQAVLKAQINKTDRNDARGIAQMMRAGLYRPVHVKTLRSQKLRMLLTHRKLLQSKAIAIENDLRGTLRNFGLKVGMVGKMRFEARIKELVESLPDLAELVEPLLIVRRTLRGQIVILHRRLLAIVRDDEVCQRLMTTPGVGPVVALTYRATVDVPARFRKSKAVGAVFGLTCARYQSGEIDWSGRISRCGDEMMRVMLYEAAQSMMRSKKWSWLKAWAMQIARRRGMKKAIVALARRLAVIMHRIWVDGTEFRWTREHAAAA

SEQ ID NO: 403212 - protein, 341 aa, unidentified
MKSKFPVDRYFRQCVGVDISKNKFTACLCMLSWGCPAQSTEPIDFANTKTGFNQLVKWARREAEKGCTIFFLMEFTGTYYEDLAYHLHKLSFTVYVMPTGRVNAFFKEEGIKTKTDAVDAFGLAMMGCAKPYLKPWSPPNPIYRELRQLTRLGVHLKDIRTMLVNHHEGLSHQYEPSAEALKQINATIKSIDTRIEKNQAAIEALVARNSDIKEKAGYIQSIKGFGFLAAVTLLAETDGFENINSRKQLASFSGLDVAARDSGNATPSRHISKKGNTHIRRILYICSMSATVYNTQIRALYSRLSLQKPPKVARTAAMRKLLLLAYTLCKTKTMYDPTIRK

SEQ ID NO: 403213 - protein, 330 aa, unidentified
MNAAGIDVSAKTVTLVISREGRTGKPREFANTPQGHAALSKVLHKAQVERVCLEATGLYHLDLALALDDAGLAVMVVNPKAAKRFAEAMQTRTKTDAVDAALLAQFAQRMPFKPWERPDDLALGIRACARRIAALNKQRTQTKNQLHAAQQTALTPDFLLANLRHNIEYLDAQIEHLRQRVLDLIAADAHLQQSFDLLTSITGIAAASAIQLLGELLVLPPDMKAKQWVALAGLDPQVHDSGSSVHKKPRLSKAGDRYLRIALYMPALSAASHNPHVRGYYRHLIADRGLKKIQAVCAVMRKLLHAIHAMLKTRTTFDSSRFYTLTETTA

SEQ ID NO: 403214 - protein, 396 aa, unidentified
MRFYTGRHRYYCGIDLHARTMYLCILEHEGGKVVLHRNLRCDPELFLDAVAPYRDDLVVATECIFCWYWLADLCARENLPFVLGHALYMKTIHGGKAKNDKIDSHKIAVLLRAGAIPEAYVYPAGMRATRDLLRRRLFFVRKRGELFAHIRTTFHQYNLPSPSGQLLYQCNRAGIPEAFADPVVRISVEADLAMATHFDGTIRSIERTIREQARSENPATLDLLQTIPGVGPVLALTLLYELHDVARFKRVGDFLSYARLVKSQKASAGKVLGTSGAKIGNAHLKWAFSEAAVLFLRKNARGQKLRDRLRSKHGKGMALSILAARLDWTPPPAPTHTRFGVFAGCSAPHPSPQITGHGFGHLSPRLSCIGRHEGTHDFPGRGSSPPAPASSPAEPR

SEQ ID NO: 403215 - protein, 356 aa, unidentified
MSHDVKYIGMDVHQEAMVIAVLNGSGKLIMETIVETKASSILQFLHGLRGELHVTWEEGTWAAWLYDLLQPQVEEVVVCNPRRNALLKEGSKCDKVDARKLADLLRTGMLRPVYHGENGLRTLRELARSYQTIGKDLTRVMNRLKALYHGWGIACAGTQVYAPRYREEWLRKIAQAGVRRRAELLYQQLDGLQALRRNLRPEFLAESRKHKAAKLLRQISCIGPIRAARLIALMQTPHRFRSKRQLWTYSGLGIETHDSAQYRYVGGQVQRSKKPQQIRGLNQNHNHEMKEIFKSTATRASCGTGPFHDFYAALLAKGMKPEMARLTLARKIAAITLTLWKKEERFDAEQLKTQAA

SEQ ID NO: 403216 - protein, 418 aa, unidentified
MKGCITWVGVDAHKKTLVIAVLHPGRQEAEEFTLENDERSIRRLVRRLERDAGGGEVRICYEAGPCGYALQRRLEAAGPVVCEVVAPSLIPRKPGERVKTDRRDARKLAELYRAGMLTMVSPPTPEQEAIRDLCRCREDVRADLGRCRHRLVKMLVRRGHVFNSTSGLWSAAHRAWLAAVSFENETDRVVFAEYTLAIEQAERRLTAMDHALEQAARHPLYREHVAWLRCFRGVDTVIAMIFVAEIHGVDRFESPRELAAYLGLVPSVHSSADTTRRGGITKTGNGHVRRAIVQAAWQYGRRAGVGRKLRLRREGQPESVLTIADEAQRRLTVRFRRLAERGKAKNKVVIAVARELVGFMWAALREDRQPARHRVRTSTQASGAAMSAAPRSNARRTKKFSKIEAGQRREARKEKRAT

SEQ ID NO: 403217 - protein, 378 aa, unidentified
MDVIYPRCAGLDVHAETIVACALWEEDGHIQKDIQTFSTFSKGLGDLLEWLEDHGVTHVAMESTGVYWKPVFAFLEGYVDLTLANPQRIKNVPGRKTDVSDAEWIAKLLRHGLIEKSFVPPAPIRELRDFTRLRKKWVGQLSSEKNRIQKVLESSNVKLGSVLSDLFGVSGRNILARLLEKGYVDKDELDQCLRGRLKKKKQAVYDSLLGTLTEHELRLLRLLWKHVEELEQLIEEVDQHIDRLLEPYREEVELLMTMPGVKKQTAAVIIAEMGTDMSVFETPERAASWTGLSPGNHESAGKRKSTRTTKGNPHLRSALCEAAWSAAQSKTHPLSRKFWSLAARCGKKKALIATARRMLVIIFCMISRKESFRQPQLI

SEQ ID NO: 403218 - protein, 360 aa, unidentified
MAKARTLVGLDVHAAKIVAAVLDADTGELKAFAMKGDVVAAAGFCAGLPRPVRVAYEAGSTGYTLARELAKRRVECVVAAPSKIPRATGDKVKTDRRDAEHLVRLLLAGKLHPVRVLGPEEEALRDLVRARETLRLDLMRARHRLSKMLMRHGIQFDDGRAWTDRHRAWLKTVCLEWPAAQTTLLDLAGVIDVLVHRRDHLEREIVSDLPGSPWETQVGRLRCLRGVDTLTAVGLCAEVGDFERYARAGQLMNYLGLVPSESTTGNSRRLGSITKTGSAHARRLLVEAAWHYRKAPAIRKTLTDRQAGQPAEAVAVAWSAQRRLHRTWARLEARNKRRTIIAVAAARELVGFCWAITQIE

SEQ ID NO: 403219 - protein, 314 aa, unidentified
MFKKKLRNDPENILAALMPHKDKISGIVVESTYNWYWLVDLLMEEGYKVHLANPAGIQQYKGMKYRDDKDDAFWLAEMLRLGILPEGYIYPKEDRPIRDLLRKRGHLVRLRTSLILSLQNIISRNNGFKMTANDMKALKTDHVAPLLQHNEDLALAGKVSKESIDFFTRKIRAVEAVVEKRMTLEDPYTSLLTVYGIGKILGLTIKLETGPIERFKKAGNYVSYCRKVSSKWISNEKKKGKGNVKSGNKYLAWAFSEAAEIARRSYPEARAYYNRKMQKTNFMVAHNALSHKLAKAAYYIMRDGVSFMPEKIFV

SEQ ID NO: 403220 - protein, 413 aa, unidentified
MSYTVAGIDIHKKVLMVVVVEQDAGRAEFLGRRRFGTGSSELQQLAAWLKQQGVEEAVMESTAQYWKPVWYALEAHMRLQLAQAFSNRAPRGRKYDFKDAERLVRRLLAGELILSFVPPPEQRALRTMTRTKVQLSRDRGRLHNQLEGLLEEMRIKLSSVLSDLLGSSGLRILRALAKGDSDAESLAALGDDRLHCTHEQLVDALRGTFQPMHRKLLTLYLDRLELLDKQIAELHQATAEAMREHAEAVARLAEVPGFGPDSAQQVIAEVGVEASTFPSPAQLASWVGTNPGRQESAEKNHSSRSAKGNKYVRRILTEAAQAAVKTKGSHFQEVFRRLLPRLGYLQALWAIAHRLCRLVWKILHQKVRYVEQGAQRDPKALKKRLHHVARALRQLGYDVNLNIAPSQPTPAVG

SEQ ID NO: 403221 - protein, 343 aa, unidentified
MGEVSTIGLDIAKSVFQIHGVDADGAVVIRARVSRSKVLQFFTDLSPCLVGIEACPTAHHWSRQLQSLGHTVKLMPPSYVKAYLKRAKNDANDAAAICEAVTRPSMRFVATKSKEQQAALMLHRSRQLLVRQRTMLSNAIRGQLAEFGIVASTGRLGFNRLLEMVDGPEELGIPKVAWVSLMALAEQHQRLQVEIGKLEQCIQAWHRSSELSRRLEEIPGVGPIVATALVGTITDPHAFASGRHMAAWIGLVPQQNSTGGKDRLGGITKQGNRYPALAACCRAMAVIRYVQKHGTAKRPWLARLIERKPTKVAAVALANKIARIAWVIMTRGERYRAPTLLTA

SEQ ID NO: 403222 - protein, 358 aa, unidentified
MSKVAQAKVDGKPLVVGPEDAVHVGLDVHKSSIHAAVWLNGRVVRHWVMPAESARVLRKLEPLRPALKRVVYEAGPTGYGLARRLRGAGLPVRVVAPSKTPHRTDASAKSDRLDCISLAEYSAGGLLHSVAVPTEAEEADRQVLRLRDQVMGKRRRVKQQIKSLLLQYGIAEPAGLTHWSRSGVAELAELALCAELRFCLDELLAELAESDRRLTRVNQQIAELTREERHAAAATLLQSHPGVGPITSMTFLTELYQAGRFRNGGQVARYFGLAPRVRQSGASRRDGPICKTGRGHVRAILIQAAWRWIRRDPRAKAVFNRLVHNTGLSQKAIVGMARRLAICLWRMRLTGELYRTAA

SEQ ID NO: 403223 - protein, 378 aa, unidentified
MHKDSVYLCILRENGEKIERVYGVLTPQLDSMRDFMAENEVSEVAMESTSVYWIPIWRVLVDSFELKLVNPYFIKQLPGRKSDVKDAQWIAECVMKELIRGSFIPPPLIQQLRLYDRRIFELNAELVRKYSKIDAILQRCNIRLSNYVSNTDCKSYKNVVKRISEGVTSPQELLMLVHKRIINKHGEDTILAALTGVVSEAEIDMLAQYVAESALLEDYKNKCIEKMREICNREFEEQMKNLQTIPGVSERSALTVLAEIGPDVNAFPSAKHLVSWCGFNPRNDESNKKIKSNKITHGNRFIRIASVQCAWAASRTKDCYFSKFYAFHTQVRKKFKLKVVVAVARKILVCIWHILKFNVSYKDFEPQKSVAKDSTQLA

SEQ ID NO: 403224 - protein, 356 aa, unidentified
MLYLGIDQHARQITISLRDAAGDVVQAQQVSTQPEKITAFFQQLTRERLRKDESFVAVLEVCGFNDWLIRLLHDYRCHKVILIQPDDRKRCKTDRRDAASLSELLWVNRDRLLEGKPVRGVRQVDIAGSSDQENRRLTTLRKEAGGARTRLVNKIKHLLRRHNLQWAMPTKTFPTGAAIAWLKGLVLPEIDRLEMDHLLTDLDQVEKRLKELERVIARRAGANKEVAILASMPGVGSGFTAISLACRIGRIERFPRACSLANYWGLTPGCRNSGENNQRLGSITKAGSSTARWLLAQVVYKVLRRDAQLREWFKRIKRRRGSTIARVAVMRKLATIIWHMLSQKMTYAECRARVAA

SEQ ID NO: 403225 - protein, 335 aa, unidentified
MKKAVVVGIDVSKSWLDAHLIADRNITNSWLRVDNSIRGFKKMVKWISTQSSEETCGWLICMEHTGSYSYKLNLFLQENNICQSMVNPLAIKRSMGIVRGKNDKADARTIALYAKRFEESLELYQLPSEALQKLKIQLVQRERIINMKRQLELANDSLKDMPTSTTKEVTRQNNQLRKLLVKNLSDLDKLIKETIRSEEDLNSKAKMIESIPGVGPQISAHVLVATQGMTRFTNSRKFACYCGVAPFEYTSGSSYRAKTKVHHLANKKLKSLFHLGALSALQMEGDLRQYYERKLAEGKNAMSVINAIRFKLIDRIFAVVRRAEKYDPDYAKKAA

SEQ ID NO: 403226 - protein, 320 aa, unidentified
MAQQGRIVGIDVAKLKADACIRSLQLRLSQPSTAQGQQDMIAWLRRHEVGLAVMEASGGYERVWAEALRAAAIAVRIVDPKRVRYFAKSAGRLAKNDPIDAEMIAWFAETFAAAAEPAHDADRDALNRLVTARSLLVRLTTPIRQLGEHGQPRVVENAQRAILKTIKAQLAKLEAAIEAKIAANAQFLARRAIIASVPGFGDHFVAGALAWLPELGRISNKAAAGLVGVAPYDEDSGQHRGERHIKGGRRDIRTLLYMAALGAATRHNPVVMAYYKRLRAQGKKTKVALVACMRKLVVILNTMLARGEMWNPTPRTTAVA

SEQ ID NO: 403227 - protein, 425 aa, unidentified
MTAQPNATPAATWVAIDIAKRHHAVLIETPDGKQQQFRMASSMEEHDRLVALLRGLPQPARIAMEPTGDCHRTLAFRLLTEGFDVCLVSSVAGARYREAMFNSWDKNDPKDARVILALLKQGMTLRYIDPLLAGYHGLQELSKTHYQISLARTRLQHSLMTHYLPLYFPEIERYFDSAHADWFARFMLRFPTAASIQQRDYETFRKEAWDLVGRKVNKAAWLRELYEIALRSIGLPVADDSLEVQSFRLQLQRFQELVQQRDRLAEQAHQTLSGRPDYESLRSIPGIGPVLALTILAEAGDLRRFAHHRQFLKYCGLDLAKCQSGQYKGQERLSKRGNARLRFAFWFAATVAIRMRENSFREKYERYIRNDPSNADRKRKALTAVAAKMARVAYGLVKQQTQYRCYFENALPRGSTPLRRAVGTS

SEQ ID NO: 403228 - protein, 363 aa, unidentified
MTSMSVMTPGVTGGIDTHGQTHHAAVLDHVGRQLGDREFPTTPAGYRQLLAWLRGHGPLERVGVEGTGTYGAALARHLGSHSVPVVEVDRPDRKARRAKGKSDPLDAYAAARAALSGTAGGTPKAQDGPVEAIRALRVVRCGAIKARTQAMNQLQALLVTAPAELREQLRPLTTTALIATCARLRPTSELTDPEQATKTALRRLAQRHQHLCQEIVEADTELRTLVSAAAPRLLALPGVGIEVAGQILTTAGDNPHRLRSEAAFAHLCGVAPIPASSGRTHRHRLNRGGDRAANNALYIVVLGRLRYDPRTRRYADRRTTEGLSKPEIIRCLKRYVAREIYNQLATHTADDRPTTPPTMSRAA

SEQ ID NO: 403229 - protein, 366 aa, unidentified
MYIVGLDVHAKRSSMCILDENGKLVKHLEVKGSWQRMLQVVDEQVPKPFAICYEASCGYGYLHDQLARRAERVTVAHPGQLRLIFRSKKKNDRVDADKLAKLLYLKEVPAVHVPGVDVRAWRGLINYRRKLIGRRAAVKTQIRAHLRGLGIAVGVKGGLWTKKGIAWLSEQAMSSSAADGLRRDVMVDDLTELEAKVRKVERELDRIGRAHPGVTLLRTIPGVGPRTAEAFVAHVDDVSRFARVKQVGSYFGLVPCQDASADRNRLGHITKDGPAPVRWLVAEAAWQGRRRSPKIRAYFDRVMRGDPQRKKIALVATAHHLTRVMAAMLRSGEVWREEEPQQPQTPPPASDQQEAKKTKTKTSNKE

SEQ ID NO: 403230 - protein, 325 aa, unidentified
MTYIGIDISKATFVVAFPSGSGYSTETYTNDTKGIRKFIGKLSADTHHCVMEATGNYCFLLLYLLEHAGITASLVNPKKIKNYSRVMMSVTKTDDMDARLIADYGEKMKPAPYKLPSESLMLLKQKKTVIRQLQKQLTATKNLQSSLELLPVKDRKCISSLKQTMTFLEKQIRYLERELVQTAESVFDKQLKALTSIKGIGVTLATALIIATGGFTCFNNAKQLSRYIGLCPTIEQSGSSVNIRGHINRNGDRNLRAMLYIATWSAIRYNKSCKECYERLRQRGKPGKVALVAVANKLVRQAFAVATSNTPYIDGFLSTKPDTAV

SEQ ID NO: 403231 - protein, 330 aa, unidentified
MKKWEFTLGVDVSKNTLDISCSELNEHIKIKNGTEGFTVFLKWCKHFKIDLKQSFLVMEFTGGYEYKLIQFCESRGILYTRIPGLAIKNSLGITRGKNDKVDSSRIAQYGEEKHKSLTPSRPLNPAIVSLKELLSFRKRLVRENAGYQATIKERIHMYGGNKKDIIVKKLEQKLKGNIKNIAAIEAEMLNIVAQDEKISINYSLITSIKGIGKINGLMTIAFTENFTSFTNPRSYAVYVGVVPFDHSSGISIKGRKRVSHIANKELKQELNQAARSAMEWDKEMRSYGEEKLKTKCYKIVLNNIKFKLILRMFAVVKREEIYVENYRNVA

SEQ ID NO: 403232 - protein, 297 aa, unidentified
MLLTRAVACSGKCASTPEAIAATLSSKAPEAERIGLESGPLSIWLCHGLTALGLPVVCLDARHAQAALKLQLNKSDANDARGLIVRTGWYREVAVKGLDGQLVRALITARAQLVALRVDLGNQIRGILKPFGLLAGKGVGKTFAEKVRSLVPDSPLHDVVEALLRSWEAINKEVATLSRRLVTEARQDDTVSRLMTAPGVGVLVALTYVSTIADPARFPHSSSVGAYIGLTPRRFQSGETDYTGKISRCGDRLTRTYLYEAAGIILNRVSRWSTLKAWGTRLARKIGHKKATVAVAR

SEQ ID NO: 403233 - protein, 356 aa, unidentified
MPEATWVGLDVHARKVVAGVLDAKSGELRSLRAPTLPVETVEWLRQFRAPVRVAYEAGPTGYGLARACSDVGIACTVAAPSKIPRASGDKVKTDRHDAERLARLLRLGELVAVRVPEPHEEAARDLVRAREDARGELMRARHRLSKLLLRHGLVYDASAWTGAHDAWLRRQQFASRPLALAFDESYAAVLQAKTRRDTLDQAIAELAGEPPFNEIVGRLCCLRGVSTLTAFALTVELGDWTRFRPQSLGPFLGLTPSEDSTGERRRLGAITKTGNTHARRLLVEAAWQQRRPLRESATLARRRQGQPAAVRARADQGARRLHQRWHALERRGKRRTVVAVAVARELAGHCWALATM

SEQ ID NO: 403234 - protein, 320 aa, unidentified
MQTPSVVLNIGADVAKDEIVVACSEGSFPVRKVANKRPALFAFLKGLPAGSRIGVESTGSYHELFAEAAHQLGFLVFLLNPKDTRHYAKAVGLRGKTDRVDAELIARMIAHEHSKLHAWIPPTAQQRELDRLIKRRATLISLREAVAMSLHELGGFADELKALRTRFNQLIARLDLRVKALVEASPERKQNCTRLCTITGVGRVTGTALVNTLERVPLKSADAFVAFTGLDPRADDSGQHRGKRRLSKRGPAELRRLLYLAAMSAAKTKTWRPLYEHNRAKGLSTTATLVILARRIARTAWSIYTHKTEFDPGRLTKPLT

SEQ ID NO: 403235 - protein, 390 aa, unidentified
MGEAWVGFDVGKEFHWATMLDVGGDTLVSRRIDNDEADVVALIDEVLSYGLDVTWAVDQPGGTGSLLLALLWERGQRVIYVPGIAVDRARDAYRGESKTDERDARVIADQARMRRDFNELKPSEDLLSSLQLLVAHRRDLVADQTRAITRLRDALIALFPGLERALDFKTKGALELVARYQTAASVRRAGRRRIESYLRNRGVRSVASVTDKALAAAMAQSVDLPGQDVASEIVADLAVQVLGLKGRIAKIDEDIETRFFCHPQATILISLPGMGPLLGAEFLVAVGDISAFASADRLAAYAGLVPVARDSGKSIGNYRRMQGGNKMLKRVFYQSAFASLRTPESRAFYDRKRSEGKRHHQAVIALARRRLNVLWAMLRDDTLFKPSFAA

SEQ ID NO: 403236 - protein, 354 aa, unidentified
MKQYNTLSVGLDVHKESIAVAYAPDEDGAEAIYLGPVGTRQCDVDKVIRQLHSKACKLRFVYEAGPCGYWLYRYLQKKGQECIVVAPSRIPRRSGDRVKTDRRDALQLARLLRSGDLTAVYVPKPEDESVRDLSRLREETLRDLQAAKNRLKAFLLRHDIRYEGKANWTASHLRTLAHICMATAAQRVVFQEYLGAVTHLMEKLALIEAELREHAKSWRLAPLVQALQALRGVQFHVAVTIAAELGDLRRFEKPRQLMAYVGLHPSEYSSGGKRHQGAIAKTGNAHARRVLVEGAWSYRHLAKVSPQIQQRLEGLPEDIRSIAWKAQVRLCKRCRRMIAHGKNRTSSSLPSLVN

SEQ ID NO: 403237 - protein, 490 aa, unidentified
MKSLRPTHHGSHHLRAVTLREDASRLRKNPGIFAKIRRFAYNILRFNQRDSVAQDRYAAALGGLNTLLSMNFCNEIPWGVDSSQFCEQTGVVYPLNPRRRPMSLDHHREELTAIRTNLGAIFVSLELSRSIWLITSLSPGSGEKMSKHRVSAGDIAALLTRFSELKQKAFARTGKSFPIIVIQEAGLDGFWIHRVLQSEGIESYVVDPASIATSRRRRRAKTDRIDGEALVRALLAYKRGEPRVCAMARAPTPEDEDTRRLCRERKTLTVERIQHVNRIKGLLFSQGVSDYEPLRRNRRQRLDELKTGDGRPLPPHLKAQISRELHRVELLIEQIKAVETERDALLEPAAKTKGTLAPQAMLHAIKGIGPEFAAVLWSEGLYRSFSNRKQVAAYAGLAPTPWQSGSVDREQGVSKAGNPRLRTTLIQIAWLWLRHQPQSALALWFKERVSRNGGRLKKPTIVALARKLLVALWKYVTAGVVIEGAVMKSA

SEQ ID NO: 403238 - protein, 404 aa, unidentified
MKGPIVSIDVSKGKSDYQAFKNLNVKYTGSRSIKHTKEGFDEIVNLVREMEKKLETEVCVVYEATGVYHRVLKKVLEDNNIKQFIINPLLSAKTRKNDSLRCPKTDKLDPKSIAKTYYSHSLHNSHKPETIYHELRELSRYYEDILVHIRKDKVAFRAQLDIVFPGYDALYDDLYGPVALAVIEKYPHPEMLQKKKINTVSKVIQSKTCHRQAASDTMADKAIEYSKTIYSGCDKDDIEVLILQRFIKKLKEDMAEAERTIGEMIKLAQELPDFSIIKSIPGIGDNLAARIIAELGDMTRFKKKNELVAFAGLDPRISESGQDDGDHMHITKKGNKRLRCLLYLAVTCSIRLKRDDNSIKDFYIKKKQQSNPMCSKAAKTACASKLVRIIYSMCKTGELYQYNK

SEQ ID NO: 403239 - protein, 345 aa, unidentified
MKNTMVGVDLAKKVIQVCIYTNKKVRSNVEMTHHEFLTWLFKTKPVTIIFEACSTSNYWNQKAIDAGHKPRLILAKLVASVRQNQKTDKNDALAIIQAAQLPDINFIKGKNVEQQQLQLIMRLRELAIKQQTAISNQIKGLLLEFNVRVSPPNGGLKGAVQSFIDDAENALSFEFRESLNTAYEQYVLLAKSIKTYDSCLEKVVGQRSDCKKLRRLEGVGTINAVNLYIALGCAELGVFTQGKDASACIGLTPMQYSSGGKIKLGSIGKYVKNSLLRSQLITGAMSAVTQATKRTAITKKDVWIQALVERKGKKCAAVALANKTVRTAFAMLTQGTQYKAELLSV

SEQ ID NO: 403240 - protein, 371 aa, unidentified
MPEIVTIGLDIAKNVFQLHGVDRSGKIVLRKALRRSQVPGFFSALPPCLIGLEACATAHHWARTLMAFGHEVRLIPPAYVKPYLRRQKNDAADAAAICEAVTRPSMRFVPVKSPQQQSTLMLHRARDLLIGQRTALINALRGHFAELGIVVAQGARNTRQLIALIHDNASPDLPATARIALQPLAAMLVEIEAQIARLDKAILAAHRSDPVSTRLAGIPGIGPIVASCLSASVPDASLFHGSREFAAYLGLVPRQPSTGGKPRLGSISKMGNRHLCKLLVVGAHAALYSLKSGKTRTALADWARSLLAKKPFKVVAVALANKIARSAWAVMARSTAYQPGEHGSRRAGGLIDSELRLFAPQGNSVGTVMMR

SEQ ID NO: 403241 - protein, 340 aa, unidentified
MTITTIGIDLAKNVFAVHGVDQNGKTVLVKSRVTRAALPGLIASLPPCVIGMEACSGAYYWARLFLQYGHEPRLMAAKFVSPYRMVGKSGKNDAADAQAICEAVRRPHMRFVPVKDESQQAMQCLHRNRQGFIEEKTATYNRLRGLISEFGVIAPQSTDALRHMVSAQKSSLPLQVQQCVDDLLEHVDRIEANITEYDRILSRIAKTDHRSQRLMKLKGVGPTTACALVACIGNAHDFKNGRQLAAWLGLTPSQYSSGGKSKLGRITKAGDSYLRTLLVQGARSVLIGAEKRTDLFSRWVCSLVERRGYWRAVVAIAAKNARLCWASLHYGDDFRLYSAS

SEQ ID NO: 403242 - protein, 345 aa, unidentified
MQTITTIGLDIAKSVFQVHGVDAEGKVIVRRQLKRRYVLAFFQKLPPCLVGIEACASSHYWSRELQALGHTVRLMPPAYVKPYLKRQKNDSADAEAICEAVARANMRFVPTKTTEQQSCLMLHRTRHLFIRQQTAVINAIRAHFAELGIVAPVGRKGVEQLLKIASDGNDKRLPDVARVCIAALGAQLQMLKARILEFDRLIMAWHRSNQVSKRLDELPGVGPALATALVASVADPKAFRSGRDFSAWIGLVPKQNSSGGKNKLGSISKQGDRYLRSLFVAGALAVIRYAKGRGSKHRPWLAALLARKSTKVAAIALANKLARMAWAMMAKGERYKQPVALAAAW

SEQ ID NO: 403243 - protein, 371 aa, unidentified
MTNHSTFIGMDVHKNSIDIAIAEQGRKGQVRHYGKIDGTLTALDKAVRKLVSKGNRLHFVYEAGPCGYQIYRHLTAQGFECDVVAPSRIPKQNGKPIKNDRRDAMMLARLHRAGELTAVYVPRFEDEAIRDLTRAREDAKSDEKRSKQRLLSFLLRHGIRYTGGSPWSKAHMRWLSDIKMPHRSQQVVLQESISIVNHCNERVHRLTEQIQQLLPEWQLFPIVQALQSLRGVSTIVAATTVAEIGDLKRFQTPGELMSYLGLVPSEHSSGEKTKRGSITKAGNGHVRRVLAEAAWAYRLPARVSRVLLKRQEDLPESVCDIAWKAQLRLCSRYRKLWNKGKAKQVVATAIARELCGFMWAIANEIEGPVNA

SEQ ID NO: 403244 - protein, 360 aa, unidentified
MPEPIHHDQDDNTASEAILGVDTHKDLHAAAVINPLGMVLSSEIFPTTEAGYQELLAWADRLGLVRRAGVECTGSYGAALARHLRAAGVEVIEVNQPDKATRRRRGKTDSLDAESAARAVLSGRASGSAKAGDGPVEMLRMFKLAKSSAIKARTQTINQLKAVLVSADPQLRETLSGLSNVLLIRRCTQLDIDTPCDTTSAAAYTLRLLARRILALTSEIRELEQQITAAVTSHTPRVLTRPGIGPDNAAALLIAAGDNPDRLRSEASFAALFGVSPLEASSGRTSRRRLNRGGDRQANSALYRIALSRLRCDTRTRDYLARRITEGKTRREAIRCLKRYIAREIYQIITSPPETQPSVA

SEQ ID NO: 403245 - protein, 341 aa, unidentified
MDTGYSGRQIVGIDLHPKRSVITRMTEGGSPLGTVRIDNDPFTLAEQMAAWGDAPMVVLEATYGWYWAADVLTEQGAIVHLAHPLGVKGFAYRRVKNDERDAADLADLLRMGRLPESWIAPPQTRELRELVRHRAKLVTLRSGLKCGVYAVLAKNGVHIPMSDLFGAAGIRLLDELRLPAAYQARIMSLRRIIDGLTFEIDAFAKQISARLVTHRGWQAIQAIPGIGPIMAAILVAEIGDVTRFSRPEQLCAWAGLTPRHRESDIKVHRGRITKQGSKLVRWACVEAAQKSRAPHLAQTRARIGARRGGNIAKVACARKLLTLVFYGLRDGHIRCLTKEPG

SEQ ID NO: 403246 - protein, 317 aa, unidentified
MEKTNPAQEDPVYVGVDVSKDRLDYTVDGKRCDHVSNTEVGRTKLATLLKNWPHACRVVCEATGGYEAPLVAQLLLEKVDVCVVNPARVRAFAQAEGRLAKTDKLDAFLLKSFGEKVRPRLETPRDESAQKLRELLDYRRQLIEQTVAARNRRDLAGATLRPLLEEEITFFEGKLEEIDRLVEKHLEEEGDLKAKAERLRQLKGVGPVLAATLLAYVPELGSIGDKALAALIGVAPYARDSGKSERRRFIRGGRAVVRHVLYMAAVSATRHNRILAEFYQRLVGKGKPACVALIAVMRKMLGVLNRLLAEPNFTLVR

SEQ ID NO: 403247 - protein, 318 aa, unidentified
MKSSIFAGVDVAQRTLDIALEGVAQVRRIDNQLAPIRRWLHSLPEQCAIGVEATGNLHQLLVRAAIAAGRTVYLLNARDLSHYARSLGRRAKTDRLDAQLILRYLQREHEHLHPYLLPSARQAELDELIGRRHQVVRARGALQQSFTTSSRNPRTLARTLRALEALIAELDARMQELVAAEDTLRTAATHLRTVVGFGPLLSASMAHAITRHPFKKADAFIAYIGYDPRVRDSGQWRGRRFLSKRGPAELRRLLFTAAMSACKTKLWQPFYQRYRARGLSTTAALVILARKLARVAFSIVKHNVDFRPELVKIACAQP

SEQ ID NO: 403248 - protein, 401 aa, unidentified
MNMNAVGIDVSKRKSTVAILRPGGEIVKKPFDVPHLSSDFRSLTRLIQDLDGETRIVMECTGHYYEPIARRLSQAGFFVSAVNPHIIRNFQGHDNPLRKVKTDKADSVKIARYTLDSWGNLKQYTLMDELRSQLKTMNRQFSFYTKHKTAMKNNLIGLIDQTYPGANTYFNSPCQKWVDFVDTYWHVDCVRKMSLTAFINHYQKWCHRRRYIFSKSKAEEIYGKAKELVPVLPKDNFTKRIIKQAIAQLNTTSKTVEELRNLMNETASKLPEYPVVMAMEGVGPSLGPQLMAEIGDVMRFTHKGAITAFAGVDPGVNASGEYSQKSVHASKHGSPVLRKTLFQIMEVLIKNKPDDAVYLFMDKKRAQGKPYYVYMTAGANKFLRIYYGRVKEYLLNLSELN

SEQ ID NO: 403249 - protein, 454 aa, unidentified
MKKAKRVPQPKAQAALQIVFPNAAGLDIGANEIMVAIPPDREGVTVRGFGTYTPDLAALADWLKEAGVTQVAMESTGVYWIPIFELLEERGFEVIVVNARHIKHPPGRKSDVMDCQWIQQLHAHGMLRGSFRPEAEMCILRAYLRHRDNLLEDRAKHIQYMEKALLQMNLQLGQVLSDLTGETGLAILHAIVGGEHDPLVLASMRHGNCKHSPEDLIKALSGHYRKEHLFVLKQALEIFESFSQRLQECDQEIERWLEDIQPELPDDFPPLPPDPKPNSHSKNAPSYDARALLYPLAGVDLMAIPGMNAILLQKILSEVGLDMSRFPTAKHFCSWLGLAPHNAISGGRILYSHTLKNHNRAGQCFRLAARAVSRGKTVYSEFYRHIRARSGAKEANVATAHKIARTFYYMLQRGQPLLAPDLQTYLQVQREKDIRRLQARAAKFGFRLQPAEVS

SEQ ID NO: 403250 - protein, 346 aa, unidentified
MMIIGCDFHPSWQQVSWLDTETGETDERKLVHATGDGKTFYQQLAAPALIGMEATGNSQWFIELVQDLGHEIWIGDAAQIRASYVRKQKTDKRDAAHILKLVVEGRFPRLWTPDREQRDLRQLVLHRHKLVMIRSRVKNELQHLSLNKGMQKKRALWSQAGQKLLRELPLKPWAACRREDLLGLLAMLDEQIGKLDGAVQQSAEENPAAKLLMTQPGVGPNTALAFVLTIGDVSRFRRGKQVASYLGLIPREESSGGRQKLGAISKQGNRLVRSLLVEAAQIAVRYDPQFRREYLHRCHQKPKGVAKVAAARKLGVRLYWMLRTQTAYPEIVRIESSPRVPLVGAS

SEQ ID NO: 403251 - protein, 402 aa, unidentified
MNAVGIDVSKGKSMVAIMRPFGEIVSAPFEIKHTASDIHSLVELINSVEGESRIVMEHTGRYYEVLAHQLSKANLFVSAINPKLIKDFDNDSLRKVKSDKADAVKIARYALDKWQNLKQYNVMDELRNQLKTMNRQFGFYMKHKTAMKNNLIGILDQTYPGVNTYFDSPARSDGSQKWVDFASTYWHVDCVRKMSLNAFIDHYQNWCKRKKYNFSQSKAEEIYGKAKELVPVLPKDAITKLIIKQAVDQLNSASTTVESLRTLMNETASKLPEYPVVMAMKGVGTSLGPQLIAEIGDVSRFTHKSAITAFAGVDPGVNESGSYEQKSVPTSKRGSSDLRKTLFQVMDVLIKTHPQDDPVYQFLDKKRAQGKPYYVYMTAGANKFLRIYYGRVKEYLSSLPES

SEQ ID NO: 403252 - protein, 338 aa, unidentified
MKITTIGLDIAKLVFHAVAVNKAGKLVRKKMLKRKEVLGFFAKLEPCLVAIEACGGAHYWNREITALGHQVKLIPPQYVIPYRQGNKNDYNDALAIAEASQRPNMRFVPAKSIEQQDVQMLHRVRERLTQQTTALVNQVRGMLAEYGIVLAKGKTAFRSQLPDILEDGENALTAKGRAIFHGLYNEFVELENRLKGCEKQVLQENADNPICQRLGTVLGVGPVTATAFYAAVGEGKAFHNGRHFSAWCGLVPRQHSSGGKDNLLGISKRGNAYLRTLFIHGARSILRHCEHKTDKLSLWAKALVERRGFNRACVAVANKLARIAWVIAAKEETYRPAT

SEQ ID NO: 403253 - protein, 457 aa, unidentified
MKKQDNYLAMPIVHQQVAGIDIGSQFHVVAIGDDPKQHVQQFGVSTKELFRLAQWLTEHQVKHVALEATGGYERALVNVLQEVGFEVLVTSGANTKNYRRFKSDTSDAIHIRTLHSLGLLPPIFLPDEFSTLIRPLVRLRKSLVEDAADYIRRIQKALRAGNVRLDTVLTDTNSVSGLRIITAICQGQEDPIKLAELVDSKCKKKPAEIIELLRGNWNGAMRFEVRSNYRLYLNLQAEIAELDKELDGHFTDHTKGLEQPQAVADPTVGRQKLRQSRNTPRLPIEQYAHKLLGVDLSNIPGLGRDALLTFMAEVGESITKFHSAKAFAKWLGFTPNNKASGGKVLSKKTLKNKSTLPNTFRMVANSLGNMKKPNPMTAFFQRIAYRAGRIKAITATARKLAVVVYKMLTTGEAYDPGRLVRDMAQVKQQQIRQMKKKLVKFGITSADLGLFTNLKAA

SEQ ID NO: 403254 - protein, 408 aa, unidentified
MERYYLGVDWADEFHQVWVSDPEGNKVIEKKVVESVEGFSEFGRWLDERRMQQIELWASIEKPHGRIVDFLLDHGVVVYPVNPKAVDRAQDRFRMSQSKSDAFDAYVLAEFVRTDHAHLRALEPNSERAEELKLLTRDQYRLVRQKTRLVNQLNRTLKEYYVRPLEVFSDLESNIALDFLQQYPTPQALATLSRRQWNRFAKREHHLGEDRCKELWEKLNPPQLEVPEHVVRAKARLLAVLVVQLKTLRDAVESYQERVKSFFASMPAAKLVHGLPGAKTGTIVATLWAELGDAKSRWESFRHLQSEAGVVPVTKASGKSRVVQFRFSCNKLMRHAAYWLAFVSLNRSEWANRYYRDQRAKGHSHPQALRALGAKWLKIIFVMWRDHKPYDENYHLANITRQKMRQAA

SEQ ID NO: 403255 - protein, 391 aa, unidentified
MIYVGIDVAKDKHDCFITSSDGGALFNAFTIPNNREGFETLFQRIKSVSDDLSKVKAGLEATGHYSYNLLGFLLGKGLATFVINPLHTSLYRKSLSLRKTKTDKVDSRTIASMLMSDVGLKPCSHTSYHNEELKSLTRYRFGKVKERAKLKASVSRLVCILFPELEKLVPDLHMASVYAMLSEFPGASHIASAHLTRLCNLLSGASKGRYGKDDAITFRNAARSSIGSHMPAKSLELKHTIKLIRELDAEIDEIEAEIRRVMDTIGTPILSIPGIGCRMGAMIIAEIGDFKRFDSADRILAYAGMSPSTYQSGQLENCHSHMEKRGSKYLRYALFNAAKYVCLWDESFAAYLAKKRAEGKHYNVAISHAAKKLVRLIYAMERSGQQYSKAA

SEQ ID NO: 403256 - protein, 416 aa, unidentified
MYQYNIITMLPVEEFPRIIERGCGLDVHQRTVVASIKGKDIVERTQTFGTFTEELEELIGFLQNEGVTHIAMESTGVYWKPVYYVLEEYFEVLLVNARHIKNVPGHKTDKKDSEWIAKLLLSGLLKGSFVPREDIRELRVLHRHRRKLIGERTAEKNRLQNILEDANIKLGSVVSDVFGVSGMAIISAIAAGEKDPDKLANLAKGSLAGKKDELKKALYGRITEHHIFMLRLILDSIEHINKQILLIEIRIDKYLAPMLADVELLMTIPGVSKQVATGILAEVGNDMGHFASHKHFASWAGVCPGNNESAGKKYSSKITHGNKYLKTTLVEAAWAVSHSKDCLMASIHKAITTRRGSKKANIAIGHKILTAAYFVLRDKTPYLPSNQNKEIEQQRRLKRIERLEKQLADLKSVYRN

SEQ ID NO: 403257 - protein, 389 aa, unidentified
MNKYIGFDIDSNKTIACVVQKGKKDRYNTLKTDIEQMRKFLREQRRPGEKLHLTFEISGEAGYRHDQLIDFVDDITVSNPTKMTWIYRTARKNDRIDARKQAVLLSIGEVPKVHIPSKEIRQWTVTIQHRRKIVNRITGVKNRIRALLKANGFTKPAVRGSWWKLSNRAWMRQLTEVIGITSEQLWRMSLTDMLEELELLESQLKRFTRYLDGYLENQAGGKLLMSIPGVGPRTAEAVLAYTDDIKRFGRGKRYCAYFGLTPRLDESGSVRRLGHISKQGPSVVRWLVVEAAWRAIKKSPALRQSHERVMSGQKGRKKIATVAVARKLLSIMRAMQMTGELFNEELVCRQCGFDRPVVRASTEDVRLSSVEALSRMSLSNPLVKVTKSA

SEQ ID NO: 403258 - protein, 417 aa, unidentified
MADEIMAEETIRWFAGIDWGSATHQACLLDEAGTVVGERAFAHGGAGLAALCDWLVSLAGDPGSVAVAIEVPHGPVVDALLDRGFAVYAINPKQLDRLRDRISVAGAKDDRRDARVAAAGLRTDPHLFRRVLAGDPSVIELREWSRLADELQQERVRLSNRIRQQLWRYYPQLLEVSDDVTAEWVLDLWTLAPTPTKAARLREATLARLLHEHRIRRVDAERVLAILRQRAITVAEGVTEAAVLHLRSLVARLRLANREFHQAERKLNELCATLRESPPAAEGAPHDAAILSSLPGVGTVTLATLLSEAAGPISRRDYAALRTLSGVAPVTKRSGKSCLVTMRYAAQVRLRNAVFHWARVAVLNDPKCRTRYAALRARGHSYGRALRSVADRLLGMACVLLQRQVLFDPDYGSSAAA

SEQ ID NO: 403259 - protein, 359 aa, unidentified
MIYVGIDIHKHKCHSALMNENGRILDELTFQNTAQGLSTFIERIQPLGEAKAVLESTGNLWIKAYEALEAATIQTTLSNPLKTRAIAEARIKTDKIDARTLAHLLRTDLVAASYVPNKETRARRSLLRHRATLIKTRTEIKNRIHNLLDKYDLNSEFSDIFGKHGLEWLRNLQLPTIDRTILNSDLTLLDSLETQIQNMNIEIAKLAYNQEDVKLLMTMPGIDYYSAMIISSEIGDVKRFSTAEKLASWAGLAPSIHQSGSQTKRGHITKQGSRMLRWILVQSAQISHRSDPRFQHMYQRIAARRGNNKATVAVAREMLTVAYYMLTRREEYRGMDMERYNAGYRDILHKLGVVDFCWG

SEQ ID NO: 403260 - protein, 376 aa, unidentified
MNRIIYVGMDVHKDTYSLCSFDSKQSYVFSELTVKAETSSVLSYLKNVEKHFVNDDVLFVCGYEAGPTGFSLCRDLQKKDISCVVMAPSSLATSPDAKKRKTDKIDARQLALHLAHNSYKAVHVITPEMEAIKELTRTRASALKAQKRAKQNLLSFLLRKGMVYPFGGRARYWTQQFFSWLKTLEFSNPVERYSFEEYLSEVNHQISRIKRLDDKIAELAEDPLIKDDVKKLCCFSGISTLTAVSFISEIGDFNRFQKAVYFSNYLGLCPGIHKSGLSSQSLGITKTGNKNLRRLLIESAQSMSHSLICGKKSLRLLARQKDMDPLIVAYADKAVERIKRKRSSMIFRGVHINKATTAAAREMACFIWGMMTNNIS

SEQ ID NO: 403261 - protein, 455 aa, unidentified
MAKKGKKNTPSPENMPILHPHAAGSDVGAEEHWGCVPADRDAQPVQTFSAFTCDLHRLADWRTACRITTVVMESTGVYWIPLFQILEVRGFEVALVNARHVKNVPGRPKTDRFDCRWLHKLHTYGLLAPSFRPPEDICQLRSLLRHRDNLLRMTVKHIQHMQQSLDQMNLHLHHVMSDVTGVTGMRILRAIVAGERDPQTFAQYRDYRLQSNEDTIAKALEGDYRADHVCTLTQSLALYDFTQQHIAACDQEIERVLATFDSLVAPEEHPFPPPTTPHRRPQRNEPAFDLRTHLYRITGVDLTQVPGLQAPTSHIVLAEVGLTRHKWPTDKHFASWLGLWPDNQISGGKVLSTGSRRVQNRASRALRMAAQSLRTSPSYLGTFFRRMRSKLGPAKATTATAHKLAKIIYHMLKEKAPYRARSAEDYLHKDHERQLRQLRKQAQYLGFDVVPQTNH

SEQ ID NO: 403262 - protein, 350 aa, unidentified
MKIKHPIIVGIDTHKATHVAVAINTQGTRLAALSIPTNPKGYVELERWSRSLGQVLAYGIEGTGSYGAGLSRYLLAQDHTVVEVTRPNRQLRYTQGKSDSLDAEGAARSVLSGQATALPKTQTGSSEMIRHMKIARDTAAKSRSQAMVTLKTLIINAPADLRETLDQIKGKVGLIRHIAAFRPGDIIDTLASAKASMRALARRWLWLHEEIIAHDKELERLVMKRAPDLMASHGIATLTIAEMLILVGDDPTRIRSEAALAKFCGVCPIPASTGKTHRFRLNRGGNRQANAALYRVAIVRMRSHEPTLAYVKKRTKDGESKSEIIRCLKHYIVREIYNQLCVPKSAEKAA

SEQ ID NO: 403263 - protein, 344 aa, unidentified
MKIAVLGIDLGKNVCSVVGLDASGAVVLRRRVRRDTLIDLVAKLPACIVGMEACCGAHHLGRLFATQGHNIRLMSPEYVRPYVKAQKNDDRDAEGIAEAATRPTMRFVEVKTEAQLDMQTLHRSRERLVGERTALINQLRAVLLERGIVVPQGKRKFEQHLVAMMNEHDGEGLSARMRMLVADTRAQWRELDRRIAAFDAEFARWAKENEDARRLATIPGVGVTISTALIAAIGKAETFEHARDLAAWLGLVPRQATTGGKPRLMGISKRGNKYLRTLLIHGARAALPHLAEKGTTLGRWAKNLLSRVHQNVAVVALANKLARICWAVLRSGEKFAAKEATLTV

SEQ ID NO: 403264 - protein, 314 aa, unidentified
MNASPTCIGIDVSKAHLDCACRPRADVVRVTNDLAGIAVLIERIQRRAPALMVLEATGNVQMEVVGALAAAGLPGAVVNPRQVRDCAKATGQLAKTDTSDAQVLAHVAEAVQPEVRPRPDEATHHRKLLLTRRRQRLEMLKAEQQRLTTASGIIHDHLKRSVGYLKHRVADTEEARATAIRTSPVWREQEQLLRSVPGVGTVTITTLLACLPEVGHVSGTQMSKLVGVAPLNQDSGQWRGARRVWGGRAPVRAVLYMATLVATRRNPVIGDFYQRLLARGKCKKVALTACMRKLLTILNAIVKSKRPWCAEIGG

SEQ ID NO: 403265 - protein, 369 aa, unidentified
MGDRITYVGLDVHKADIVVAVAEGGLRGEVREYGRIVNRPAALERLARKLGHDGVKLRFCYEAGPCGYGIQRQLSALGHECVVVAPSLIPKRAGDRIKTDRRDAANLARLDRAGELRPVWVPDAGHEAMRDLVRARLDAVQALRRARQQLSGFLLRQGCHYGRPAWTKLHRRWLAALKFEQPVHHVVLEDYIAAVEAAEVRCDRLTAQIEVMLPDWSLAPLVAALQTMRGIALVNAASLAAELGDLSRFANPRQLMAYLGLVPSEHSSGVSIKRGGLTKTGNGTARRLLIEAAWCYRFPARVSRELRLRQEAQPIPIREIAWKGQLRLCARYRKLGRTGKPATVVTAAIARELAGFVWAIARQVAIPAG

SEQ ID NO: 403266 - protein, 360 aa, unidentified
MRNAEIHANSLLEVRRMYNAVGIDVSKGKSTVAVLQPGGTVIRKTFDVSHTSQNLNELADYLSSLDGTTKIVMECTGRYHEPMVKALSEAGLFISIVNPHLIKNFGNNSLRKVKSDPADARKIARYTLDNWTELRQYSGMDNTRTQLKTLNSQFSFFMKQKVAAKANLIALLDNTYPGVNKLFDSPTREDGSEKWVDYAYSFWHADCVRKIGLKAFTERYMSFCKKHHYIFQQDRPEKLFNASKELVAVFPKEKTYKLLIQQSIQQLNLASEHVERFRREMNELASTLPEYSTVMGIYGVGKTYGPQLIAEIGDVSRFTHREALTAFAGVDPGVDESGQHKSKSNRASKVGSARQHCFRL

SEQ ID NO: 403267 - protein, 333 aa, unidentified
MPAAKMIVGVDVGKEKLDICYPDGKKETVRNIKSCRTKVIKRAARLNAIVCFEATGSYEEPLAEECLARGVRAVRLDAWGARRFAESQGRIEKTDKIDCEMIRDYAVSLKDEKLHFIKPRSEAQKRLKKNVSVRRNLMKARAIVYNQLEHIRDRDSRRHLESSIAKLDGEIARIEAECDRAIADDERMKHLSDRFLKVKSIGPCLVRAVLAYCPDIGDFNPKSIAKMCGSAPIDNESCTIRHKAKPKRGRPDLKKALYMAAVSASRYNHVLRAFYQRLVAKGKARRLALTAVARRIAILLNNIARYPDFVPAQDPEDIAKAESRKRGRPRKGT

SEQ ID NO: 403268 - protein, 321 aa, unidentified
MPEDKVYVGIDVAKASMDMAVHQSQQRWSFSNDDEGISKAVCCLRELAPALIVMEATGGIELPLAAALAAAGLPVAVVNPRQVRDFARATGKLAKTDAIDAQVIAHFAAALKPTPHPLPGAQAQEFDAILTRRRQVVEMLTAERNRLSSAPSKAVREHIKAHIGWLERELANINSDLGRRVRQSPVWREKDALLRSVPGVGPVLSFTFLADLPELGALDRKQIAALVGVAPLNHDSGALRGKRAIWGGRATVRAVLYMSALAATRYNPVIRAFYRRLCAAGKEKKVALTACMRKLLTILNAIVKHQTPWKYGDSPIMGPCH

SEQ ID NO: 403269 - protein, 408 aa, unidentified
MESTGISFEQAVRVGCGIDVHQAVIVATISKGQENYETKEFSAFTSSLTDLREWCKRAGVTHVAMESTGVYWKPVFNILEEDFEIILVNARHVKNVPGHKTDKKDSKWISKLLLAGLLKGSFIPPRDIRELRDLVRYKKKQIAHVSSEKNRMIKILEDANIKISSVLSDVHGASGSKIIHDIIDGKTDVDELIKHIHGKVKASREDIRKALEGRLTAHHRFMLKIIRKSIEEKEGIIKELEDQIDVATAQYAVEVELLQTIDGVGKDSAIGIISEIGVNMEQFPNEHHLSSWSGMSPGNNESAGKKKSTRAIKGNKYLKSLLVECGWGATRKKDGYLKRKYKSLVARRGKKKALVAVGHKIIIAAYHVLKKKEKYKEPPLHNSEERNKKQIAKHLAQLKALGYDLIAA

SEQ ID NO: 403270 - protein, 348 aa, unidentified
MKNIIIGIDFSKETFDATVLDLSKTNGVLSASIDGMHQKFQNGKLGFRQLLRWVKTSTRQRPSKDWMFCGEQTGKYSHGLCDFLSSNGLDMWCEAPLRIKRCMGIARSKNDSLDSLRIAEYAYRYQDKMSAYKPVSKAIAQLKELFLARLKFVEQRKALYVRNNTCTEYSKGSDAEKMVAELSQKLIEQFDESIKKLDKEMQAIIDSDEEILETFENISSIKGISLINASAFIIYTNNFKDFGADPRRIASYWGVAVFAQDSGTSVHHPARTSPMCSKMLKSLLSEAAVAAKTYNPGIKQYYDRLIAKGKHKGVALNNVKNKLVHILTALAVNKTKYMEGYESFRKAS

SEQ ID NO: 403271 - protein, 314 aa, unidentified
MKNKEKQVEFEQVIERGCGIDVHKSVVVATIRGEGINEETRTYDGFTASLESLRDWLKENNITHVAMESTGVYWKPVYNILEEDFEILLVNARHIKNVPGKKTDKRDSAWIAKLLLSGLLKGSFVPPRHIRDLRDLTRYKRKVIEQISSEKNRVHKLLEDANIKLSSVVSNLSGATATKIIDAMISGQEDIQELVKLRHGKMQCTVEELAASLKGKLRPHHRFMLQTYKDSIKSKEAIIEKLDQQIDTLLKESELLLDAELLATIPGVGKEGASYILAEIGDNMEQFPSAEHLASWAGMSPGSNESAGKKKVHE

SEQ ID NO: 403272 - protein, 344 aa, unidentified
MLYVGLDLSRKRLDWQALEREGERVGIGAVPPDRGGLAKLAQRLGEAPVLAVIESMSGARFVHDQLELAGWDVRIADAVKARGLAPLACKTDTIDCWVLAELARLGLVPEIWLPDPAVRAERERARFRQHLVKHRSSLKNRVHAILFQHGVPNPLSDLFGAAGRDLLERLALPEPWTSTVKASLALIDSLDEQIDACERELRALGADHPYIPLLLTCPGIGWILAFTIASEIGDIHRFATPRKLAGYTGLCPRVEQSGERDRRGPLRKNGPNHLRWALVEAAHTALRHPLYSPVLARKRAQHGNKRGTKIAAIDVARRLSEAIWHMLTTNQPFAPAGAPASLAA

SEQ ID NO: 403273 - protein, 430 aa, unidentified
MCCFFDTKTRKHSFLNAATERNYLNTLFKKHKVDLVVMEACGPSGWINDLAISHGLKTLVCSTNEDAWKWSNVKRKTDKDDALKLARMAAMNELKAVHMPSETHREFRSLVKYRKTLDCRINKMKCTIRAWFVNHGIEIDTGEKAWNTGRERINSFRKPLTDCQPDELWKGELDLELNQLDSLTTILDGVVKKLESIGKTDPRIARVQTIPGVGPRTAELLVACIDDAKRFDNGRQVSQYFGLVPRQYQSGETDRNGRITKRGNPLARTILVECAWSSLRYNPWAKHVYDRICGKQKNRKKKAAIALARKIAVLAWALLRDEKDWEPKRMIEVTESYGRIPLGLQEKLLEMPKKECRHKRKNRRISEERAAKRAAVEQAAQTPKRSPVRSSAASPAKRKPKTITPKGKPTNTKAKPTANPRRTRKLETAG

SEQ ID NO: 403274 - protein, 389 aa, unidentified
MVLDETGRRIGLLRVDHTPDGLTKLNAFLESITGTDQKEQMACIVETNHGLLIASLLEAGWPVYPVNPRTVDRHRAPSGAKTDSIDAYLLAKTGRADLVDLHRLTPDSELVQELKGLTRDQDALIQMQTRLVNQLTASLKACYPVALQLFAKVRQHSTLSFLQTYPTPQAAMAASVEQITEVLKNAGHTTAEKVAPTIFQRLHQPHLTANAITTRTKSRLMLALVAQLLPLVEQITEYDKEIERLFLTHEDTAVFSSLPRAGKRLAPRLLAEIGDERTRYADAASLQALAGTSPVLFQSGNYAKAHRRLGCIKPLRNALHQFAWQSTQQEGWARDYYQRKRAEGKSHTVAVRALANVWARIIFAMVDKHEPYDSATFEAAQRLHARRVA

SEQ ID NO: 403275 - protein, 477 aa, unidentified
MIVAQPAALNRKQRKALARRLRVEDPGLEVMHPHAAGIDVGNSAHYVAVRPDRDPDSVRRFECFTADLHRLADWLQQCGVTTVAMQSTGVYWIPLYEILDARGLEVYLVNARHTKNLPGRKSDVQESQWLLKLHTYGLLRNSFHPPVEIRIVRTYWRQRGDHVHAISTCIQRMQKALTQMNIQLANVISDLSGWTGQRIVRAILAGERDPVTLAALSHPGIHATQDTIAKSLEGTWQPDLLFVLQQEVVMYDAYQQRIAECDQALERHLKGVADKMADTLPDAESHAPSREKRHSGPKRRRKAGSHAPQFDLGRELHRISGVDLTRIDGIDVGVAQTVISEVGLDMTRWNTEAHFASWLGLCPDNRITGGQVIRKGTRHVVNRAATALRLAATTLLRSQSYLGAQYRRLRARLGAPKAITAMAHKLARLVYRMLKWGHEYVDKGLQYYEERHREQQVQLLKKRAAKLGLQIIEPDAA

SEQ ID NO: 403276 - protein, 332 aa, unidentified
MYLGIDVHKRYAQVAVMDEAGKIVEEVRVENANLDDLAQRYAGAQAVLEATSNYYHIHDTLSEHLDVTVAHPKKINQIADTDKKTDRVDAKELARMLRLNSVPESYVPTEEVREARALVRGRQTLVENRTKYANKVHGLLSDHGITEDVKPLTVEGRESLRGLSIPTPFDALLESYLDLIESLTEEIQKLDETIEQRAGSLKETQLLMTIPGVSYYTALTIYAELGGIDRFDGDKEVVSYVGLNPVIRESGDSRIEGGISKRGSGRVRWLLVQAANTAVHTSNDEYLSRFYDRLASRKNSQKAIVAAARKMLVSIYHMLDRGEAYDPPGVTA

SEQ ID NO: 403277 - protein, 328 aa, unidentified
MNSICISTDELLLPVLGLDIAKASVQAELRIKGRKVRFGFANNAKGFAQLARILEQQDAPKIWAGLEATGPYSQALALWLHAQGHRVSLLNPRRVKQYAQSAGRRNKTDRLDAAILADFVCAMKPALWQPPTLEVAQLQALVRRREELCVMLQAEKNRLEGVASNVRPSLERIIATLSAEKTRLEKLITQQIHSHHQLCRDHQLLCTIKGIGSLTAAILLAEMARPGQVERARQAAAHAGLAPRREESGSSIRRNRGLGKEGNRYLRKALYMPALVAIKYNAPLSHFASRLRSAGKPKMSVVCAVMRKLIHIAFGVLKHQKPFNPSLA

SEQ ID NO: 403278 - protein, 354 aa, unidentified
MIIIGVDFHPEFQQIALVDKDTGEFQEKRLAHRDEAEKFYRAVTAAGQQVRVGMEASGHARWFERLLAELQIELWIGDAAEIRTKRVRKQKTDRQDARLILQLLLEDRFPQIWVPSWENRDLRQLLWHRHRMVQARTRIMNQLQAVALNEGLHCKKRLWREHGREQLESFQLAPWASRRRRDLLELLDRLNPTIAELSQAIEQEVEKCPEARRLMTYPGVGPLTALAFVLIIGDAERFQCGKQVASYLGLVPLEDSSGNRRRLGHITKQGSSMMRFLLVEAAQVTARSLPQWRSKYVHLMMRRGRKTAKVALARRLAVHLYWMMRQGWDYQQWVKFGSHAGQPGHRDGVQSNTE

SEQ ID NO: 403279 - protein, 370 aa, unidentified
MSVRRILAKTIDTDLEYEAIGIDLAKNCVSVALLTTDGEVVCIDRLDYSELEKSAQVLCPTTFAMEPCTEMNYLVQKLEAWGHRCLVIGGKNVQNYVENHFSGQKTDLNDAQALAFLAQDTQLRTIKAKDVEQQKYASLTTLREQYIKQYRQTIVSLKGICQAWGLNISKGISGKARLKDLIENHAAFPEELKESLVDMVTHAQTAQKALNKITKTLEELAKSDKVCQLIQTIPGLGSICSCRLRATVGDIKRFKSPKDFPAYYGLVPRSIATGHNERKGKITHRGDRTMRSLMVQAAGSLVNMATKGKLKSKQLTKWILKKQKEKMPWGKLVCAVAAKLLRIVRAVLISNKPYNSKIAGVAKCSLPKGS

SEQ ID NO: 403280 - protein, 342 aa, unidentified
MTFVGCDLHTRTQQVAVLDTRTGEVSECQLAHDGTAVEEFYAALPRPVTVGIESTGYALWFHTLMQRLGHTLLVGDAAKIRAMVVRKTKTDRRDALHMLDLLRHDRFPTIWVPDPATRDLRALLTHRMRLVRIRTMVKNGLHAIALNYRLARGSKLLRQAGLAQLHALALPPHTAQRRDQSLELLAGLTKQIRELDDAITTAALAHPDALRLITHPGVGALTALATIVVLGPVARFHDSKHVVSYVGLAPAVNASAGTYHLGRITKQGSPLLRFVLGQAAAHAARMDPDLKRTYGALVHRRGRPKAKVAVARKLLVRLFIMLRDQIDYDEFRRRGRTAPAAA

SEQ ID NO: 403281 - protein, 521 aa, unidentified
MPRPRNARSTQPRKAFVLQKPNGQLVPRVQAVGPEHFGIVAIDCAKARSRYFLADFYGRTLLEPTTLPHDRGHFQAAVDRVRQAMQQHDLKDLVVAIERTGEYHRPVQHAFRQAGFETRLVHPFTSKQYRQPADPGNKTDDTDLAAICRATTHGFGLLEPTWPEDYVTIQLLRRHRRDLVDKNTILQCQIREVLHAAMPGYAECFCHLWDDSPAPLLFARHTTSAEAVRQADLAGLQQIAVQAGLRCRAETFHKILAWARQAPPDAGHTLDRRRILVSLDDDRLTKTRHILELERELAHRVVHTPYVLLLAIPGINIVTVADLAGELGPIPLYLNANAITGRAGLMPSRYQSDQVDCANGPLRRRGNRRLRAVLMQTADNLVQCNHHFKARAEQWTRAGKDPRWVRVKVAKIFSRLAFALVAGRQLFPHPCCQPRHYILSKLLTFHSEHRTDPLALRQDLEAAVEQLPLKNRAAEAEPLQEALDALGRRRGPQPLAEIIPLVLARLAARVVQSTPSESAGP

SEQ ID NO: 403282 - protein, 479 aa, unidentified
MAQPIVKPIQRVSTQDRIFLTRVSPSLLGRVRNIKMEITYSHCAGLDVHKKLVVACCLWPTESGKLSKETRSFGTTTQELLSLSSWLSSLEITHIAMESTGEYWKPIHNILESSFGVIVVNAQHIKNVPGRKTDVKDAEWIAELTRHGLLRGSFIPPLPQRDLRDLTRQRTTLVRERASVVNRLQKVLEWANIKLACVVTDITGVSARSMLKALAEGQNDAKVLATYAKGRLVPKQIELEKALQGQVREHHRFLIASHLTHLEFLEEQIAVFDHQIGQSIDAQSSCEDDFDDDKGLSEVVSPDNSEVSLKPLCWRKAVELLDSIPGVARSTAELLMAEIGSDMSRFKSAAHLAKWAKLCPGNYESAGQRLGGSTGQSNTWLRSALVQAANAAVRCKNSYLNAVYRHLVARRGHKKAIVAVAHRILIALYHMLTKHEPYRDLGVNYLDTRQQDRLLQRLCHRATALGYQVQLTPIPQPIS

SEQ ID NO: 403283 - protein, 392 aa, unidentified
MVCVGIDVAKDKHDCFIINSEGEVLADVFTVANNRDGFETLLWKIHTCTNPADEIKVGLEATGHYSYNILGFLLEKGLHTFLLNPLHTNLYRKSLSLRKTKTDRIDARTIASMLMSDVELKSYTNTAYHNEELKSLTRYRFDRIQMRAELKRSVSRLITILFPELESLVPTLHMASVYAVLSEFPGASQIASSNLTRLKTVLLSASRNHYDREKAVEIREAARRSIGSVIPAKSLELQHTLRLIRELDKEINEIEAEIKAIIDDMAPPILTIPGIGYRMGAMILAEIGDFSRFDSPDKLLAYAGFSPSTYQSGKLNATGTHAHMEKRGSRYLRYALFNAAQCVCKWEPSFKAYLNKKRAEGKHYFVAVSHAVKKLVRLVFALQTSGRVFQPV

SEQ ID NO: 403284 - protein, 353 aa, unidentified
MAKQTSNHTSATYAGLDVSLKETAICVVDDNGTILKERMVPTDPQLIAKFLHKNAPDLQLFGIESGATSAWLWREFRHMGLPVVCLDSRHAHRVLSMKRNKNDRNDARGLADLIRTGWYREARVRSMDAQFVRSILLSRQQLLQSRRSIENQMRGTLKTLGAMIKSTKGRGFMQRVVTLRADQEWLGPVLDPLLAAHSSNVEQLTVITATILKTARQDQDVRRMMTVPGVGPMTALAFKAAIDDPKRFSSSSKVGPYPGLTPRQYQSGESEWIGGIGRASDPLLRSYLYEAASVLMRRVRRPCPMKEWAVRLADRLGWKRACVAIARKLAVVLHAIWVDGTEFEWPAAEPTSS

SEQ ID NO: 403285 - protein, 315 aa, unidentified
MSKHNIVCAGIDTGKNKLDVALAGSDKEACFANNPHGHAGLVAWLRRHQVERVGIEASGGYERAVVAELRRNGLVVIVFQPIQVRAYAKFHLWRAKNDKIDADLIAACTAATEKIHAPPDPRLLALADHQTVIDQIIDDIAKLKNRRESCRDERFRRLWKEEIARLKKMESAELKGLVAAIRQHDDLAQRLDLIASVDGVGLPTAVAILVRLPEIGRLSREEIAALAGLAPYDDDSGERSGDRHIAGGRERLRKTLYNATLAAAFHWNAQLIAFKDRLLAAGKLHKVMRVACARKLLIFINAVVARGTPWVSIPA

SEQ ID NO: 403286 - protein, 344 aa, unidentified
MSKFNLICIDLAKNVFQVGQFFHQKLQSNKAVSRKELLSILTTSPRCKVVMESCGGAHYWARKARSVGHEVVILDPRFVKAFRIGQKTDANDVIAIAAASFSPNVRPCKSLTQAQQSLQSIERMRALAEKQKRQLANQIRGLLLEFGIVIKQSECAFRQAIPEILEDSDNGLTAGLRQCIAQCYELFKAQSTLKETLNELLTGLVKQDEQCERLLALEGVGPITAVGLLISLSDTTHFTSGRNAAANIGVTPRQHSSGGKVRIGHIAKYRGEMILRSHLFLGARAVISQLKHREPKTKKEQWLKALVERRGVKCAAIALANKTVRTAYAMLKKGTRYEPSLLAN

SEQ ID NO: 403287 - protein, 355 aa, unidentified
MESVKYIGLDVHQSTISVAVLDAEGKLRMQSVIATKATAVLELVKGLRGVLHVTFEEGTYSAWLYDVVVRQVARVVVCNPRKNALLKSGNKSDQIDARKLAELLRAGLLSPVYHGEQSTRTLQQLVASYSALTEDTGRAMRRIKALYRSQAIACAGQKPLGKRHRGEWLARLTDSGQRRRAEWLYQELDAVQVLRREARQAVMVECHKNPAARLLRSMPFFGPLRAAVLIARVQTPHRFRTKRQFWTYCGLGLETRSSADYVEKDGQILRRRKPVYIRGLNWNYSHELKNVFKSAATTASAMDGPFRAFYEMRVANGMLPAMARLTLARKMAAIALILWKKGETFAAEHLKLQAA

SEQ ID NO: 403288 - protein, 416 aa, unidentified
MNTWHQLTHYAGFDWARDHHDLVIVDPQGQIVAEFRIPHTLAGWQDFRQKVSAYPALGIVIETNQGAAIDQLLQIDLTVYPIHPVAAQRYRERKAPSGNKIDRLDAWSMADALRLDGRQWKALQPLDPLTQQLRLLCRDEISLIEQPTALINQLQQALSEYYPAALEAFEDWTRPSTWKFVIEFPTPQILLKRKRSRWEKFLHKHKLWRPDTAEKPLETFARAQAFCGSPAVTAAKSLLAVSLARLLGLLQGQLDEYRTQIEKLFEQHPDSGLFGSLPGAARFLAPRLLGEITADPERFDEPQALQCLAGTSPVSYQSGQIHKVQVRHQCHKLLRHVVHLWADCARHAAPWAQTYYQKKRQEGMSHACALRCLGQRLLKILWKIIQTRSPYNADVHTKNQLAHGSWVLQLMSPKPA

SEQ ID NO: 403289 - protein, 454 aa, unidentified
MTMAKKAKILKKDKERELLIVNPDAAGIDISSTEYQVCVPEYRDKDFNRRFDSFTCDLHAIARWLKQCNIKTIAMEATGIYWIQIFLILQDYGFDVILVNAKHIKNIAGKKTDVVDASWIQILHSYGLLEASFQPDNYTRQLRNITRHRENLVRTAARAAQHMQKALEMMNVKVHKVISDILGKSGISIINAILSGERNASKLSLYADSRVKASREEIIKSLEANWSNDQLFILKQAYENYTFIKQQIDDCDKEIQTCLNSFPNNNKVSDEALIRSKKRKGRKNDLNFDGENLIYKAFGVNLTRVPGMSNLTVLKLLSELGSDFTNKFSDHKRFSSWANVVPNNKISGGRILKSFVPKKKNHVGNILRMAASTLRKSNSALGNYFRKIQSRQGYAQAVVATAHKLARIIYTLVSKQIEYNDYLVLDISKQALIKKLNYHKRSITKIESDILLYT

SEQ ID NO: 403290 - protein, 393 aa, unidentified
MIGGIDSHKDTIHVAVITGLGVDVADREFTTTQAGYHEAIDWLRTQDCLDVVGVEGTSSYGLGVTTALREAGARVIEVNRTRVAERRRKGKSDRLDAYRAARGVLSGEASTIAKSDTIEPLRAVHNARKSAVKAKRVAWQQISATLINAPAPLRDRYRGLAEDKAVQQLIAARPARGTEPAVAGIMVALKVLARRHRALSAEIDELGDYLAETTTAINPGLAALQGVGPVVAAQLLITAGDNSDRLRSEASFAALCGTAPVQVSSGRVTRHRLSRGGDRQANAALHHIVTNRLRHDPRTRDYRDARLAKGSTKAAAMRALKRAVAREVFRALRGRCPVPDYSDLRPARQARNLTLAAVAVELKVWPSALSQLELGQRVDNDLVARYRNWLTAA

SEQ ID NO: 403291 - protein, 402 aa, unidentified
MDCFVALLLAMTSKNLNVAPRSRGAISPEFCKNRFASLITEGAGNAGRSMHPQPRVRNKKAHEHSHHGHTGNHPAFPAQWFYGFAGIDVSLEYSSVCVVDASGKVVREAKVVSEPEALIGWFGSLGLRLARIGLEAGPLSQWLYAAMKQAGLAVELLETRHVSDAFKAMPVKSDRNDARKIAQLMRLGWFRPVHCKSIAAQEIRAMLTARKLLQSKLLDLENSLRGILRGFGLKVGKTTRTNFAGRIEELVKGHPNLQTIGQALLRARAVLLAEFNGFEKRVRAMSRLHDKARLLMSTPAVGPIVSLTFACAIDDPSRFTSSKQAGPHFGLTPKKYQSGETDYTGRISKHGCSELKSWAMRIARRAGTNKAKVALARKLAVIMLRMLKDNVPFNPAAKAATA

SEQ ID NO: 403292 - protein, 408 aa, unidentified
MDSAFRFFAGIDWGSEKHRVCLMNRDGQVMAERWIEHSGDSLAELAAWLRQHASDSPSLLAAAIEIPRGAIVETLLEHGFTVFSINPKQLDRFRDRYSPAGAKDDRRDAFVLADALRTDMHCFRAVKLDEPAMIRLRELSRLDDELAQEQNRAVNRLREQFHRFFPQLLQLSEGADEPWLWALFELAPSPLGAARLTEAKVARLLQQHRIRRLTAAQVRAVLKTKPLTLAPGAAEAAAEHALLLLPRLRLLHQQRADLGRRIKAMLDELATPAEDKHEHRDAAILLSLPGLGRKIAATMLSEASQAIADRDYHALRCYSGAAPITRQSGKKKIVLMRRGINQRLRNALYHWARVSVVFDPQSKKRYAAMRACGHSHGRALRGMADRWLKTLTSMLTTGTLYDAQRRAA

SEQ ID NO: 403293 - protein, 361 aa, unidentified
MTGTMTWVGFDVHARSTHGAAIDTMTGELSRVRFGPGIEGPLAWLSDLAGPVRACYEAGPTGFGLYRAATAAGIGMQVIAPGKTPRGPSDRVKTDRKDAELLARLLLAGSLTRVVVPSPEVEAARELTRSHDACRRDLMNARHRVSKMLLRHGRVYPKSTTWTAEHRRWLSAQQFDEPTSDLVFADLIASVDGLTSRKAAIALRLSDLATDERWWPTVARLRAFRGLDTLTALSLHLELGADWKRFETAPALSAWLGLTPTLSQSGESSHQGQITKTGSILARRLLVESAWHYGREPRIGATLANRQAGQPDHILAISNRAQQRLHKVNRSMKARGKPHNVTVVACARQLACFLWAAATAD

SEQ ID NO: 403294 - protein, 354 aa, unidentified
MFVAGIDAHTRYVIIVVVNKAGERVLGPTRVTVAEPERLLAVLAPYRPLDAVVETSSSWPWLEDVLTPAGVRFVLAHAKRLRAIAEAHHKADAIDAELLARMHLAGLIPQVYPTPSSQREWATLIRHRTVLVRQRTALVNRIHAQLHTRGLSVARGHLLTRAGRQWLRDVARLRVGPEQWRLIRSHLRLIAALRPLVHALDRRTAQVAATLPEAQLLQTIPGIGPHRALLICAEVLPIARFRTPGHLASYAGLVPCTGQTGLRPVWHGPIPAGANRWLRGALVRAVVSHRQHAPNSWLSAYYRTQMARVGWPVARVATARKLARALHAMLRTTTRWTSAPSRGELHLPHAAPTA

SEQ ID NO: 403295 - protein, 379 aa, unidentified
MKKHSTLFIGLDTHKDSIAVAYATDSRTEPVTYLGSIGTQHYAIRKMVRQFESRNPGCQLQFVYEADPCGYWLYRLLSSWDYPCFVVAPSLIPKKPGQQVKTDKRDCMQLAQLLRNGDIDPIYVPEPEDEAIRDLSRARETAMWDLKNAKSQLKAFLLRHDIRYAGTANWSAAHIRWLSELVMPTPAQNTVFREMLYTIVERHKRLERLDNELTYQVRRWRFYPLVKAVQALRGVQLLVATSVVAELGDLQRFDNPRKLMAYVGLTPSERSSGNRRRVGPLTCAGNKRARRMLIEAAHAYRYPAKTSRILHQRQEDLPKAIVEKAWDAQVRLCRRYRSLMQRGKHRNVVVAAIARELVGHIWAIAHEVVIAKPDPRLML

SEQ ID NO: 403296 - protein, 322 aa, unidentified
MAMLSFGGIDVSKDRLDVMVLPEEQCSSVNNDAAGWAELVEQLRGSSIAAIGIEASGGYERGVMRALLAADLPVRQVNPFKLRQFARASGVLAKNDPLDARLIASFVAIMPTRPAQRPAPAAERLVEMLAVRRQLSAEKVAAENASRLLEDAMLQRLSRRRIARLAADIDLLDRHLVETVGTDAALAHRYQLLTSMPGVGVVLACTLLALLPELGRMNRKQVAALVGVAPYAFESGTLKGRRCIWGGRAHVRQVLYMGAMSACNWNLTFKTFHDRLKAAGKLPKVAIVAVMRKIITTLNAMVRDDVVWADRLNGRHNVPTAR

SEQ ID NO: 403297 - protein, 428 aa, unidentified
MNQTELSRVKEFRQLKNEIQASDTYLIVGIDVAKERHHAFFGTATGKTLLKKLIFNNTSAGFSELIARAEALRAQTGLSEIVFGLEPTSNYHKPLGRYLISKGCHVVLVGGKAVKNNRELLDERWDKHDTKDAANVADLVSRGKCFYYDTPSREIEELRELHSLRARLKKEEHSLSLRIRNNLLAKHFPELDSFYSACERETLAIVRWCLNPQKIAAMPFDQFFKRVATNGRGIAQKLRLQKIHRLAHESIGCPVGCAVELQAALLVEKIKQVREQIAEVEQVIQQLCAQFPAYEYLLSIPGFGPYVASKVLATIADPWRFDTAKQVIRTAGYDLCADRSGKRSDQAVPVISKKGNSQLRYALYQAAMIASSRHRFFIAYFARMLQDRERERGIKTKMRVKLAAKMLVIAWTLMKKGEPFNPEYLNVQ

SEQ ID NO: 403298 - protein, 316 aa, unidentified
MKHYAGLDLSMETTQVCIVDENGRKVVSEKVESSPEAIAMVLERYSPIARAVIETGRMSPAICIGLRELGIPVVCIDARQAHQSLKAMKANKTDPHDAAGLAQLARTGFYKEVHVKSPAAHGVRSVITARSHLVEARVRLDNTIRGLCATFGYRPGAGQGKAFLERVMQAAHIPGLGEAIASLLSVRAELVEQIKEMDRRLRLIASQSQACEILMTIPGVGVQTSTAFAAAVDEAGRFRQSRDAGAYFGLVPRRHQSGELDWTGRITKQGDGTVRKLLYEAANSILTRSRETFALKTWATKIALSRVSTNGTDLRL

SEQ ID NO: 403299 - protein, 380 aa, unidentified
MSNRSCLAVKKRKGANEMSKTETMPRIYVGADLHKQQFTVCAINEKTGETVEGVFKTDSTGYDDFCQLMHRLEEEQECSIEIAVEATGNARYFKNKMEAEGFGVVVVNTSKFKVITMSTKKTDSNDAYTLAYYLSKDMLPESHLCDQTSEEIRRMLKTRSILVSSMVKIKNQIHGMLLGYGIETKTAQFQSKKKRQELLNDLEDHDYSQFTASSLKVTFDILDEICDQVKRIESQIQEMTKENEAVELLMTMPGVGFVGATTIAAYTNDIERFEGDFKRFASYLGIVPSVHNSADTVRMGKITKRGPQELRTAFVQVAMGIIRQPQNTGDWKLIQDYKLMKTSKGSGRAIIALTRKVARIIFAMLNNREAFNPQLVVKCE

SEQ ID NO: 403300 - protein, 345 aa, unidentified
MSIVGGLDIHRKQLTFDYLDQATGEVKSGRIAPADREHLAVWLRRFDGGGQVAFAAEACTGWRYVVECLQAAGVAAQLAEPADTAAARGRKRRAKTDRADSRLLRQLLEADRVPQCWIPPQQVLEHRALLELYHDLRREHTAWIQRIHAVCFHQGTTHLGAGAVSTEAGRARLRQAADGQLSAAGQLQVTTYLQMLQALEVHIAGVRRRLLAAAGHLRGPKTLTERLYGVGPVTALALTCWLGGAGRFSSSRKAVRFAGLDVTVYSSDGKRSPGRLSRQGPPVLRWCLYEAGKQHSRTRAPDHAYYTRVKDRVDGKRAAISEARKIARQACHILTELGDDAFAPV

SEQ ID NO: 403301 - protein, 528 aa, unidentified
MIILPSEDVMGQPVMVGLDLGGSFHQVQVTSESGERLGRSFRIRRGRRGLEALLAGVRRVAGEAVEPIFSVEATRNYWQEMVHPLQRLGHTVYLISPSTSAALRSFIRDHSKTDCIDADALARVPQVHPRLHPRQLCEPRAEAILRLVRLSWSLRAQIADRKKRILDRADMVYPGYGQVFRQRYGVTSLLFVRRYLNPAKVRRLGARRLGRLLMAASWGKLREGQLQRLWQLIENAPDLAIDYDELQFAVTIDLDLLDVEERAQATIRERVAELYAELDPEARLTSIPGLGDFFGAAVTAFIGDVHRFRSAGEIVALAGLCPRQHSTAGRDRPHQPLTKHGDPTIRGCLYYAAGIARQYDPELQTFYTRLRERGKHHNVAQCALAAKLLRRCVALLREGRPYQIERLKEIQRLQDEEGKTVRRSVFEVAERLKDESGSASPGRRAYAHTSDTAMESADQAPVTRRGFLRPTGSARRAKQRLEQMTEGIAEADSQITDDPSDRPSNGPVSGERPVYEKGAEAAPISKLY

SEQ ID NO: 403302 - protein, 343 aa, unidentified
MGEVSTIGLDIAKSVFQVHGVDSCGEVVICKRVRRSKLLEFFAAVPRCLIGIEACPSAHYWGRELQTLGHKVRLIPPKYVKAYLKRNKNDANDAAAICEAVTRPSMRFVPTKSEQQQCGLMLHRSRQLLVRQRTMLSNAIRGHLAELGVVSAKGRNGMAELLRIIANEGSNCIPATARLSLEVLARQYAAIAAEIGTIEKHIHAWHRSCEASQRLEEIPGIGPIIATALVAEVGDWKAFSSGRNLAAWIGLVPKQHSTGGKDRLGGISKQGNRYLRWLLVAGAMAVIRYARRHGTKRSWLVRLMERRPPKVAAVALANKIARMAWALMVRGERFTEAKLLPAT

SEQ ID NO: 403303 - protein, 452 aa, unidentified
MPARKDELMHFNKLLQILDGSSYLSVGLDVGADFTWMSIALPNGSFPWKPFKIIHHDPYSRELAVAKIKEAQELYSLKSRCFLESTGIYHIPLLCFLRDKGLDCSVINPIITKNSTNINIRKLHNDKFDSKKAALVGLNASLKTSIIPDEDIADLRNLVRDYYYFKDLQSSVVLKLNAELKVSFPAYLKVFSKVTTQSSLKLLGAYPLAKDMLAAPEEELVGIIRSTARFGETYALSRYEAIPEAAKDAAIFGRALPSHAVRIRLYIESYQTYQKHLDTLLLALHEAVDKLHGTPVYDRICLLQSLHGVGFLSAVVLMAEMGDFDLFSSPKKLYAYFGLDPAVKQSGKLNGDKVHMSKRGSSLARRVLHMVALNNLKVDKGTKTPVNPVIYNYYTGKCANKKKNVAVGAVMHKICNIIFAMLRDNKPFEIIPPEVHCKQYVLNHTASVINAA

SEQ ID NO: 403304 - protein, 425 aa, unidentified
MRSIALDVHRDFCEVAIKDAEGLRLAGRVKTKPEELELFAQSLAPDDQVALEASEPALAIARILEPHVGRVVIANTRKLRAIAESKVKTDKLDASTLCELLAAGYLPAVWSPDEFTRALRRRLQRRAKLVRSRTRAKNECHAVLARNLKGKPPMSDVCGMKGRHWLAALQLPADESETVACCLREVDFLDHEIGLIERELANQALDSDEIRRLMTVPGVSLVSAATFVAVVGDAHRFSSPKKLVSYVGLDPRVRQSGETPARHGRISKQGSPEARHMLCEAAWVAIRTPGPLRAFYERVRARRGAQVALVATARKLSVLFWHLLTEEQDYAFERPTLTRRKLRGLELKVKDGRRSWPSGHAVGTKQDREREREFAEQVETAYRRLVADWQPKAPRSGAGATRGRASSKPSSGKQRGRASVPNPAL

SEQ ID NO: 403305 - protein, 307 aa, unidentified
MFVGIDVAKDRLDVHVRPAGESFVISRDDEGIEELAKRLSAMVPTLVVLEATGGFETVVAAGLAAADLPVAVVNPRQIRDFARATARLAKTDALDAAVIAHFAEAVNPPVRRLADPQQRLLGELMARRRQLIEMMVAEGNRRRLLTARRTLKTVDRVLATLKAQLEEIDHDIDIAVRGTPAWREAEDLLISVPGIGHKIARTLLAEMPELGRLDRRQIAALTGVAPFNRDSGTRRGRRAISGGRIVVRSALYMSVLVAIRRKLPLAQTYHRLRASGKPAKVAICACMRKLVTILNAILRDKKPWATA

SEQ ID NO: 403306 - protein, 376 aa, unidentified
MRNRAYRSTAVKQIVLTEVISRLAEGPLVCGLDVGKETVLCVVRDSRGYFERPWKVLNPTELPDLVQHLRTLAQTRPVQVALESTGTYGDALRQALGDAGLEVRRVSGKAASDYAEIFDGVPSAHDGKDAAVVAELAALGKSSAWPLRALPAWQAQMKVEVTWLDTQQEILQMWVGQLEALLARHWPEVTKFFALPSSTLLKTLAHYGGPSALAADAQGMEQLSRWGGRFLKPEKIQAVFNSASKTAGVRLNAATSDLIQRVAREALDTKAELRATRRRLKELAKNDPVIQAQAPVVGELTACVLRVSVGDPRDYSCGAAYRKAMGLNLKERSSGKYQGQLKITKRGSSRARRWLYFAGLRAIQKSSLTQLPQRLT

SEQ ID NO: 403307 - protein, 358 aa, unidentified
MFVAVAEGSPVAPGAAKPVPELGAPSVGSVIPNGRKGRVASPHAQGREANQMFVGIDVSKDRLDVHLRPSGDAFAVVRDSDGVETLAARLAALSPMLIVLEATGGFETVVAAGLAAAGLPLAVVNPRQIRDFARATGRLAKTDPIDAAVIAHFAEAVRPEVRPVASEEARALGELVARRRQLIEMMTAERNRRRQLTTKRLIKGVDRVLATLQAQLSEVEIDIDDAIRGSPAWREKEDLLTSVPGIGPNIARTLIAELPELGSLGRHQIAALVGVAPFNRDSGSMRGRRCIAGGRTTVRSALYMSILVTIRRSLPLASTYHRLRAAGKPAKVAIVACMRKLITILNAILRDKQPWQTA

SEQ ID NO: 403308 - protein, 436 aa, unidentified
MLKTMTKDRKPTFSRTVIIDSPLYVAIDVAKYYHKAMIFDLDKNIVEPPFGFDISKEGFNKLIEKITVNSKKYKTDSIVVGMEATGHYHETLLEHLRTKGFKVLLFNPYATFKTRALDIDYVKTDEIDLKAIGQAMILGKGREASNEEAVYKELRLLTRFRRAKNHARSVLKNQMLRDLDRLWPGLMKEPHNTKGLFTNLWQSKIARELLKLGLLPQQIADMASKELVALFKKQGAKFVGPIWAGKIIKHASGVMHCGGMEAEVHQHILNTNLKVLEDMDKLIEALDNKTAVLLDKTPGVYLLSIQGVSFVRIAEFIAEIGNPYKYRDPGEWVKLAGLNSSRYQSGKVDRKNNPITKVGNSYLRATLFSIARDISRWEPFFIALRDKFCTKGKHIQVAYGAVANKFLRIAFYLMLRKQNFDPNYEKEKEKMSQNNH

SEQ ID NO: 403309 - protein, 379 aa, unidentified
MKTNSTACGVTASVSGTTQQPGDNLAAPESVCAVVGIDLGDRHSKYCVLDVEGTSIGDGIVATTPAALRLLFSGKGRMRIAVEVGTHSPWVSRLLEELGHEVIVANPRKLRLITESDAKNDHADAALLARLAYAGPDLLSPVEHRSASVQNDLAVVRARDATVTARARMVTTVRGIVKSTGARLKVCSTGAFASKALDDCPEPLRLALLPLLRLIQQMTAEIRLYDRIVTQKAQKAYPETAAILTIPGVGALTALTLVLLLNNDKRRVSRSRDLGSYFGLCPRQRDSGQHVSQLGITKAGDNLMRKLAVQCAHFMLGRFGKDSALRRWGLSLALRGGKNAKKRAVVAVARKLVILMHRLWSTQETFDATRGLRAEPQAA

SEQ ID NO: 403310 - protein, 338 aa, unidentified
MQTGQTAQTYTLFVGVDIAATTAAVAIQRPGAKARQSFIIDQTPEGYTSLLHTLQRTGHAPCQVLVVMEATGSYWISLATRLVHEGFGVSVINPAQAHHFAKALLKRAKTDVIDAQTLAQLAMVLQPEPWTPPPQIYYALQQRLAQRDDLLHLRQQVRNQLHALVQHPEVIAEVRARMDQLLATFEAQLTEVEREIATALTQDAAWAAAAARLQSIKGVGWVTAAWTLVTTLNLTSCDTVDSLTAYAGLAPMPRQSGSSVWHRPAIGHTGNGRLRTAFYMATLSAAQHNPVIKAFYTRLREIGKPEKVARCAAARKLLHIAWAVVKKDQHFDPYYARG

SEQ ID NO: 403311 - protein, 375 aa, unidentified
MKEKLRYLGLDVHAETIAVAVAESDGEVRSLGTIPNRAESIRKLIKKLGPLDKLRACYEAGPTGYVVYWQLTELGIECEVVAPTLVPVKAGDRVKTDRRDAEKLARCYRSGDLTAVWIPDEGSEALRDLVRAREAAKQDQLRARHRLGKFLLRSGRRPPSGVKPWTRAYLIWVAQLRFTQIAQESTRLDYLHEVEHMRERVARLEQAITEALKLASPELQQVVNDLQALRGIADISAVTIAAELGQVSRFASARQLMGYCGVVPSEDSSGKRTRRGGITKTGNAHMRRIVVEAAWSYRRPPAIWYGLRRRQESISEEAKEIAWKAQHRLHKRYVKLGAAGKDQRKIATAVARELLGFIWAIGTRAETIVRQQAAV

SEQ ID NO: 403312 - protein, 339 aa, unidentified
MRRILTFNPNGCLGLGARIDARMGMSESKVEVFVGIDVCKSTLDVRIEPPGEAFQVDNDDAGIRALCTHLSELVPTLIVMEATGGLETRAAGELAARGLCVTVVNARQVRDFAKATGQLAKTDRIDAGVVCSFARAIRPAARPMKEALTAELDDLVTRRRQLVEMRVQETLRLQSASKVQAQSLKAHIVWLNKRIKSIETDLGTRLRSSDAWRVKDDLLLSIPGVGEITSRSMLSRCPEIGQLNRREIAKLVGIAPLNSDSGKYRGQRHIWGGRADVRSVLYMAAVSAKRCNPLIKALAERLKRAGKAPKVVIVACMRKLLTIMNAMIRSNTPWNPKIA

SEQ ID NO: 403313 - protein, 430 aa, unidentified
MHNKNYISVGIDVGSAFSFMTILAPDETVILKPFKITHNNKDSLERAVSEIKKAEELYSLESRIFLESTGIYHFPLFCYLVDCGFNASIINPIITHSTKNGNIRKVKNDKIDSKGIAKLGLSKDIPVSQFPAKLVLELRSLTRKYYDLTDERSAHINKLKGDLHTVFPQYLDVFCDVTGKTSTMILRQYGTPDKILRGHKKTMIEKISKASRKGLAKASERYEKLCAAANAAKTFGCQIDSIYFNIFLTLDLVEKLDSALDSILNRIRQLITFNKNEKFIQQIKLLNTIPGVGFLTAVTIMCEIGDFSAFRNPKQLFAYFGLDPEVNESGKFVGTQLHMSKRGSRIVCRAIFAVALASIRTKRNGEGINPYLRKYYELKSGQKPKMVAIGAVMHKVCNIVFAVLRDEKAFELRSPEEHCKQYQRPALAAA

SEQ ID NO: 403314 - protein, 421 aa, unidentified
MDKNDDSRLAGFRQLKREIRGSTRHLVVGIDIAKERHHAFFGTPSGRTLLHRLVFDNNKEGFEKLCFQAEALKTQKGLADLVFGVEPTADYHKPLGEYLIQKGHTVVLVAGTAVKKNRELLDGRWDKNDTKDAANVADLITQGKCLFYDLPSMDLRELRSLLSLKRRLKKSEQGYKVRIRNHLIAQYFPEMDDYFTYKEGPHIVRRCLDPKKLAGLDFQEFARMVPSGNGKQKERLGDIYAKASSSIGCSAHPSVGFEASILLDGLKGLRLTMEETDKRIAEVCMRFPEYPFLLSIPGFGPDVSAQVLGALDDPYRFENHRQVLKMAGLDLSASQSGKRTATTPVISKRGKADLRYGLYHSAVVASTRNPHFMRYFTDKVKGRGKEKGITTKMRTKLAAKLLVIAWTLMKKKEVFDPDCMK

SEQ ID NO: 403315 - protein, 330 aa, unidentified
MKSGSNCNTPTDVVYVGIDVSKDTLAVNASEAFAATIPNKKKDIYKMVRTVRKAVGRDRAIVFVFEDTGRYSLPLLLELDKLGEKAHVANAARVRYFAKAVGVGAKTDPVDADVIRRYAEKIAPDPTPIPSDSLLLLKELFRTRALLVKVNSMIRSLIGATTGKLCGEILRDVVRLIERRIEKLDEEMVRTISSNDEMREMSDALAGIVGVGKTTAAAMLAGVPEIGTLGRRRAASILGLAPFVRQSGKWQGKACTGGGRSDARRCLYMPALSAAKRNPVLKSFYERLVARGKPKNVALAAVMRKLVVHMESVAAATREKHKREKQVSAI

SEQ ID NO: 403316 - protein, 443 aa, unidentified
MPHSRALTRGDRRRNERLARLRSIVRREYAVVAVDLASAKQAAVVTDHDSMVLGRRMFTGDAWVIDDILDWAGPIAAQAGFAGVVLGCEPTGHRWKPLLDRARARGVELVCVNPMLVHRGREEEDFTRDRSDFKDATIIAKKVTELRCYQPYVLEGHWCRLRHLGARRADQLVAAGSARQRLRDLLECAWPAVLATAADPLDASTWRAAMAVSTHPDQIRAMGYDAFAAAVRDQLPRWGATRRNLRILGAIWAAALDPGGVATERAAACERAAYAVADWRHALDQITDVQDRMVEVLDALGLSELVTSITGLSVVGAAAILAEAGDPARFDCARTWVKHAGLCPRANESGNFHGATALSRRGRPGLRLAAWRALWGALRHNPVYTARYLHLTTRAGNPLRPGQARAAIAAALLRQLFVVVTRRVVWDPAIAAGTVREVARQAA

SEQ ID NO: 403317 - protein, 453 aa, unidentified
MEKENEISMEVINRHAAGIDIGSRSHWVAVGQKEDEVCEFGVFNEDLYSISQWFKEKNIKTVAMESTGTYWQALYAILLSEGFEVLLCNGKFTKNIKGKKTDIKDCQWIQKLHTLGLLSGSFLPDKQTEQLRTYCRQRALLLDSAASASKKMQKYLRLLNLRLDVVVNDICGLTGLSIIKSICEGEKDPKKLASLRHYNCRKSEKEIAKALETNGRQDYLFGLRQELDMYEMFQRKITECDVEIKKLLDKIIEENDSKRQHHIDSKPHKKVNKNSPENIDLNLKSYQYFEGVDLMAIEGMSYSTVLTIMSEVGLEGIKQFKSAKHFASWLRLAPNNKISGGKILSSKVPKGSNRLKIALRNAANAIGNLKDSTPLRDFFQRINFRKGRVSAISATARKLAVIIWNMVVKGTQYFNPKEYLYLDQKRKLGLVKRIQKQITKFALTNAELGIVSN

SEQ ID NO: 403318 - protein, 339 aa, unidentified
MELYAGLDLHSRNTYIGIMDKAFNRVFKKRVPNHLEHIIHTLDPFRDQIKGFVVESTYNWYWLVDGLMDAGYSSAHLANPAAIKQYEGLKHSDDQHDAFFLAQLLILGILPQGYIYPKKNRPVRDLARKRMFLVQHKTAHILSLQSLIARCCAMKVRANDMRHLTAKELEMWLEEEYLVLSAQANLDSINFLKQKIKQLEKAIIQKVTLNKAFKQLLTIPGIGNILAMTIMLEVGDINRFPKVGNFTSYCRCVPSRRLSDGKSKGHGNRKNGNRYLSWAFTEAVHLGRRYNERFRRYYNRKVAQANTSLATKALGNKLARICYYIMRDQVPFREELFCQ

SEQ ID NO: 403319 - protein, 312 aa, unidentified
MQNDTIGVDVSKDHLDAHRLADGASRRFANDKRGHRALIKWLAETPLYRVVFEPTGPYHDAFERALGASGVPFVKVNPRQARRFAEAIGSLAKTDRLDAAMLARMGAMLELKARPPRSEALLELKELHLAREALVKDRTAAKNRGKVLAAPLLKRHNAQRLEQIKRQITAIEAAILEQIRADLDLAQRFAILTTIPGVSAITAFALLIEMPELGALEPGQAASLAGLAPVARQSGRWTGRAFIRGGRASVRQAVYMPALVATRFNPDMKAKYKQLINAGKPAKVALTAVMRKLILLANALLKANRRWAPKIA

SEQ ID NO: 403320 - protein, 329 aa, unidentified
MYYVGIDISKRFIDVCLLVDGIKGKRKTKALSNDPNSAQALAQWLILQKCDPSQAHIIMEATGVYHEHLADGLHQSDILVSVINPHRVREFAKGMGILTKTDKVDAYVLACYGCLKQPENWLPPPQEIRKLKALLQHRDSLLNDKQRIENRLSALKSTTAPEEILTSLESIERNLKDELARIERLIAEHIDKHLRLKNDLKLLKSIDGVGEQIGWNMLAIIRGNNFRSAEQVAAYLGVIPVERRSGTSVCGRARLSKIGPPGIRAKLYMGAIAAISWNSHVRGLYERLRLKGKAKMVAIGAAMRKLVHLCYGVLHTQQPYDKNHGAVAG

SEQ ID NO: 403321 - protein, 351 aa, unidentified
MKKIFIGIDFSKEKFDATLIKAEGLKECAPSVHEVFDNKTSGFRSLVKWVKAQSESASVDSWLFCGENTGGYSIGLSNHLYASGYDMWLECAYKIKHSAGIQRVKNDKADSRAIAEYAMRNYDKMILCKPQSASLTCLREVFLYRHSLVRQKVALQVRRDEKRLTQEKSDARAFMSFTSKHLITEVNKAIAKCDQKIKDIIAADDELREIFDIITSMPGIGVQNATCLMVYTDNFQKFEMNARKIGCYYGIAPFGRQSGTSVNSRPQVSPFANRMIKSLLSQAALAAIKFDVNVYNYYQRLKERGKHPLLIHNNIKNKMLHALVAMVRDRVKYNPDYVYRTNKEIAYSAKC

SEQ ID NO: 403322 - protein, 388 aa, unidentified
MFFLGIDVGKNTHVASLLDEKAKVIFKAHSFANTLDAAEALLVKLEPYKDSLEIGMEATGHYWLSLYSFLTEHNFIVHVINPIQTDGWRKGIEIRKRKTDVIDSVLIADLIRYGDFLETSLADEDILSLRNLTRFRAYLVNSVSDLKRKAIAILDQIFPEYASVFSNVFGQTSKELLKSLSLPSDYENLSATKIEEVLSNITQKKKASETISTLSDKASHSFGISFCKDSFAFQLKLIIEQICFIEEQIASVELEIEQLMSKLGTNIKTIPGVGNVIGAVILGEIGDIERFDNPSKLVAYAGLDASVSQSGEYEASSGKLSKRGSPYLRKALYMAAQRAEFCDPVFQAYYEKKRNEGKHHLVATNAVARKLCHTIYAILKKDIPYEIQ

SEQ ID NO: 403323 - protein, 351 aa, unidentified
MFIIGVDYHPSFQQIAFLDQETGECGERRLNHSDGEAEKFYRELKQRGVSVRVGMEATGYSRWFERLLAELGIEVWIGDAAEINRKRVRKQKTDRLDAELLLKLLLENRFPKIWVPNPENRDLRQLLWHRHRLVQMRTRIMNQLQAVAMNEGYRWKKKLFSQQGRALLEKLSLGPWASRRRKELLELLDQLDPKVAELTAAVGQEAKKRPEVVLLMTHPGVGPITGVAYVLVIGTPERFPCGKQIGSYIGLIPSEDSSAGRQRLGHISKQGNALLRYLLGEASQAAVRTNADWRRRYMHLAMRRQKSIAKVAMARKLGVRLYWMWRNGWDYSQLVEFGSHAGKLGIRHGVK

SEQ ID NO: 403324 - protein, 320 aa, unidentified
MMAQNDLVVAGIDVAKDKVDVCIRSLSLRRAFASTAEGRRELASWLRRKKVGKAVMEASGGYEREWAKALRDARIEVRIVDPKRVRSFARSAGRLAKNDAIDAEMIAWFAETFDEAKGQAYDAAREKLVQIVHARQGLLDLQTSLQNRGEHTAPEVVQKMQGRLLKKIALELAGLEAAIAAMIKATAHFAELAEIIESVPGLGEITAAGLIAAMPELGQVSNKIAAALLGTAPYDDDSGRRRGERHIKGGRRRVRNLFYMACLGAATRHNPMLKAFYQRLLAKGKEKKVALVACMRKLIVILNTMIARGEKWDASRYALS

SEQ ID NO: 403325 - protein, 346 aa, unidentified
MNTAAIASIGIDLGKTVFHLVAVDCHAGVIVRKKFSRTQLLAYTANLPWSLIGMEACSGAHFLAAKLRDQGHEVKLIPAQFVKPYRKSNKNDFIDAEAIAEAVTRRNMRFVPIKTDDQLDLQALHRVRERLVRRRTALINQIRGFLLERGLVFAQRPANLRRQLPLVLEDADAHLTPYFRRLLNDLWQEWKQVQANIASLDEEMEQISSADAACELLRTIPGVGPVVATAVVAAIGNGAAFGNGREFAAWLGLVPRQYSTGGRTQLFGISKRGNAYLRRMFIHGARAVLWRVKYDIGVLREWVSQLQSRTAKNVAVVALANKLARIAWAVLSSGERYRLKPAAMTA

SEQ ID NO: 403326 - protein, 427 aa, unidentified
MNGNEAIRYEKFCQFKAEIRSSGDYLIVGIDVAKDRHHAFFGTAAGRTLLRRLIFDNNQAGFKQLIARASQIQIEYGLGRVVYGLEPTGNYHKPLSNWLQEQDQMLVLVSSKSISDNRQTLDGRWDKNDTKDSANVADLIAQGKCQFFEKPDTRLVQLRNLLSLRRRLKKVEHSVRMQIRNGLVCKYFPELDRHWGSGLTENLAIVRWCLDPHKITAMGYEEFVKRVTRRDRGIRQHKRLERIYEAAEVSIGCPMDEAANFEAHLLVERLEKIKERIGQTESEIKDLCDSFPDYRRLLSIPGFGPYVSSIVLARIGDPHRFIGRRQVIRLGGLDLNANRSGKRSNAAVPVISKRGNSELRYALYQAAQIATYHSDRFRALFTRSLEGRENERGIKTKMRVKIAAKMLVIAWTLMKNNMDFDPLLIKA

SEQ ID NO: 403327 - protein, 347 aa, unidentified
MTFTAGFVTGGIDTHLDIHVASALDHLGGVLGTASFPTTSAGYRDLLGWLRQHGPIDRVGVEGTGSYGAGLAQHLQANDVTVVEVSRPSRQVRRRHGKSDVIDAIAAARAVLAGEATTVPKSHDGAVEALRTLKLLQRSARKARVVALNQLHNLVVTAPDELRSRLRDLDRKNLLATCMAFRIRAEDDSLAAIIRFSLRELAHRVTHLDDQLKRTTLRITRLTQALAPQLLEIKGVGPDVAATLLVTIGDNPERMRHEKSFASLCGTSPIQASSGKRNRHRLNRGGDRQANAALWRVAIVRMGADQRTRDYVARRISEGRNKPEIIRCLKRYIAREVFNAITTTRRD

SEQ ID NO: 403328 - protein, 363 aa, unidentified
MKKICKQQLAMKTTKDKPGMKTGLDLGDRYSHYCLLNGECEVVEEGRIQSTESAFRRHFEGEPRLRIALECGTHSPWISRLLKGLGHQVIVANARKIPAITGSESKNDRNDAELLARFAAHDPKLLSPVQHRSLQRQQDLNLIQVRSTLVRARTMMANALRGLVKSAGGRLPACSTESLPIRAKMAIPPALTAVALPLLQQIALLSRQIDAMDGQIEKLAKKYPEIAVLRSVPGVGPVVAAAYVLTLNRPDAASNRSAGAFLGLRPGQSQSRESDPQKRISKTGDSYLRSLLVQSAQYILGRFGPDSALRRWGLKLASSGGKRGKKRAIVAVARKLAVLLHSMWCSGEHFQPFPQTATAATLA

SEQ ID NO: 403329 - protein, 391 aa, unidentified
MRKPKSKIVNDLSRCLDPLDMDTTLIAVIEMSQSSWLVGGIVPGVERQVLKKLAVDQGALLSALSRWRAEAEKNGHRITRMTVAFEAGYDGFWLARWLAARGIEAHVIHASSVPVTREHRRAKTDRLDTALLQRGFLGWLRGERGHCKMVAVPTLAVEDAKRPSRERETLVGEATRIISRVKAAFVRLGIRGFNPKLKAAAARLETLRTPDGEPIPPNTAAELKRDLERHQLVKKQISELEQTRLDVLKQAPEKGPHAMVLLLARVIGIGVETADMLVREVLSRNMRDRRAVGRYAGLTGAPDESGSKRREKGLARSGNARVRRGMIQLAWRFLRFQQDSALARWYRQRSAEAPSMRKTLIVALARKLLIALWQLVRDGVVPEGVRLRAAA

SEQ ID NO: 403330 - protein, 355 aa, unidentified
MKYYASTTEYNCGIDLHARQMYVCVMDRQGKKLVHCNVTNNDFNFFLKLVEPYKHDLTVCCECMFGWYWLADACQGAGLTFVLAHALYVKAIHGGKNKNDRVDSEKLTHLLRSNLIPPAYVYPAEKRPLRALLRQRIFYVWRRAELLARIHSHQLAHNRIPAKQTRRHRDPWKEQLLAAEAHPLRRMALENDLAMIEHYDDQLAAMEQHLMRLTKDQHGRDYELLQTVPGIGRSLGLTILYEIGDIERFPTVKDFLSYCRLVKGTVASAGKIKGLRGAKLGNPYLRWAFGEAAVIAKRDHFRIRPLAQRLEQQMGGNKFKAHTVVAIKLARAVYFMLKNKTVFDPERLVAALAKK

SEQ ID NO: 403331 - protein, 312 aa, unidentified
MILSTIGIDISKDSLEVCRLPGGESARFDNNGSGHQQLIRWLAQTPIARIVFEPTGAYHRTLEQTLTAAGLPLAKVNPRQARRFAEAAGKLAKTDRADAAMLARMGMALAPQSRPPTSRMLSQLKELHLARQALIKDRTAAKNREKILTLPLLKRQNQNRQRQIEAQIAAIEAEIEARIAADPALAERLAILESIPGIAKVTACALLIDMPELGTLDGKQAASLAGLAPITRQSGRWTGRAFIRGGRASLRQALYMPALVATRFNPQLKAKYHQLITAGKPTKVALTAIMRKLIVLANALLRQRRNWAENPA

SEQ ID NO: 403332 - protein, 395 aa, unidentified
MILVGIDIGKNSHYYTIVRKEDGEILSEPSKITNDLKGFDQLVSCFRKYRKTDILIGMEDTGHYHFPLLKHLLDNGYTVALINPVITDLTRKANGEISKTDKLDTLTICDVLCSNRKDRKPYRISKVQRFDLYEQRCLTRHHHNLKEELNVYTNRLQKCIDIVFPEFNSLFSSKYGIVYMNVLKTYASAESIARADIRSLRKCFEFCGRGKRISLTAEKLKAAAKDSIGISSVSEVIQIKHLIAQIELINEQLEEIDKKIEEFSRQTNSPILSIPGISHFSGTSILSELGDIDNFTNHRQIIKYAGVAPLTYESSQFKAQHTKISKKGSKYFRKTLYQIILPVIQQNKVFKDYYALKISQGKSHRCAQGHCVRKLLRVIFHLLKTGQQFDPSILC

SEQ ID NO: 403333 - protein, 440 aa, unidentified
MGSYAGVDWASEKHDVRVADAAGEKLLAATFAHDEQGLRSLCRQLVRLEVELVAIERPDGLLVERLLDAGLRVLALHPNQVAAARDRFRVSGGKSDGFDAFVLCELARTDNHRFRVLEPDSDQTKALRALTRGREDLVGMRTALTNQLRAELERFWPGPLGLFTDLHGRISLAFLERYPSPADARGLGEARLAGFLVRERYSGRQKPAELLAKLRRAAAARVGELELSTRRQLVLGLVAMIKSLNAQIKELERQLARTLGEHPDGEIFRSLFRDPRSVICAAELLAEIGDCRGRYPSRDSLAADAGQAAVAIESGKRKAACFRWGCNKRLRAAFATLADSTRHWHPWAQDVYAAALARGHDHPRALRTLGRAWCRVVWQCWQKRTPYDPARHRALQQHITVTIPTASGPVVDQLATESMAAGLFATNAPTSRQQQVTAAQ

SEQ ID NO: 403334 - protein, 352 aa, unidentified
MQYVGIDWAYRRAAWCAREQAGAITGEGFVPADEDGLGRLVLELGAEVRACVEMMSGAAWVRDRLVAAGWRVEVADARKVKNIAPLACKSDRVDARVLAELCRRDLVPALWLPSLDERALRERLRRRLHLVRLRSSAKNRIFGLLTQWGLRISSDRLREPDGLELLAARGVPAVWRRSVAEALCLVELLDERIAPLDRELSPLARADRRVQLLNTIPGIGPLLGLTIASEIGDVARFAGPRKLIGYAGLAPKVHQSGQSARNGELSKAGPRNLRWAAVEAAQGAWRETNPWHRLYRDVKRRNADKPNPAKAAVARKVLIACWHVLSRNQPFKPSRPHGGHPVPASSSASLAA

SEQ ID NO: 403335 - protein, 393 aa, unidentified
MICVGIDVASDKHDCAIMDSSTGEVCEVFVFENNRVGFGELMSKIVLFSEKNDFSDIQIGLESTGHYSNNLVNFLHEKRLSVKVFNPLLVQRLRKAESLRRTKTDKADAKFLACLLIRDDSKSYKKSLPEIEELKTLTRHRFRLVKEQTKHKQHISRLISIVFPEIKTAFCSTSLATVRELFLQFPSAQAIAHTDIRKLTNLLWSVSKHRFGRDKAEEIRNLAKQSVGTNNRGTALELQQHLQSVQFLKQQIQVVEAEIKSIMIELNSPVISVPGISYTLGAMILAEIGDIKNFRNPAKLLAFAGLEPSLYQSGKFTADRTPMVKHGSSYLRYAIVQGATSARRYAPEFRAYYDKKIAQNKHYLVAISHVAKKLTRVIFSLLKHQQDYVPQIA

SEQ ID NO: 403336 - protein, 391 aa, unidentified
MFYVGIDIAKKNHEASIINSTGKLLDKSISFSNSQAGCAKLVSLLDKFEADSSNVIIGMEATGHYWVSLYSYLIDLGFTVYVINPIQSDAFRKMYIRQTKNDSKDSFIIAQIMRFGEFSSTSLADEDIMALRQLSRYRLALVDECSDWKRKCIALLDQVFPEYSKLFSDTFGVTSREILSKYPTPEDMLSIDTDTLVELLSKASKGRFGISKANEIQESASNTFGVSFAKNAFAFQIKQIIAQINFIEDQLEELEIEISTLLHRTNSVITTITGIGDVLGAIIIGEIGDISRFESAPQLVAYAGLDVAVKQSGDFIGTQTKISKRGSPYLRRAIWLAATVAAFKDPALSVYYQSLKSRGKHHLTAVGAVARKMCNIIFAVLRDNKPYVPHI

SEQ ID NO: 403337 - protein, 313 aa, unidentified
MSQNNHAILYVGLDVAKASLQLDLAGQSHALTNDTKGLAQLLKMLRHHPGTHVICEATGGYEQPAVRALQAAQILVSIVEAGRVRHFAKAKGLRAKTDPIDAAVLSEYGRTFQPAATTPPTAHQSRLAELSQRRQQLIQTLVAETHRADHYLDRFCLQQARQLRRVLEKQIAACEIAIAELIASDAKLQNKAQRLETITGVGAITAATVLAELPELGTISDAAASALAGVAPYNRDSGQQTSPRHIAGGRKAIRCALYMATLSAVRYDPILKAFYTRLRAAGKKPKVALVACMRKLIVLMNRLLKNPNFQLAN

SEQ ID NO: 403338 - protein, 380 aa, unidentified
MRSAQIQLTTHVTGMLAVALELSKKRWKVAISDGRRDNPSLHTVDGPTPAERIQAVVNKVRQQMQQWGLDETCPISVVFEAGQDGLWIAHAMRKLGYQALPIDPASIPVPRKSRRAKTDRLDAIKLVNSLLGWLRGEKDRMRVLHIPTPEEEDQRQLVRSRGDLLRDVCRFRDRITKLLSSVGCWAVVDPLSDVWLEPGALRDYDGKPLKPGLLTRLRHDREEFLLAVRLKQQVEMDMRESLPEPQKEQIRHLQQLKGIGEVGATRLVLELFWRHFDNRREVGACVGLVPQPFDSGESRVDQGISKQGNRRVRALLVEMAWCWLRYQPNSELSRWFVLRTQGGGKRGRRVMIVAVARKLVIALWRLLELGEIPAGAVCKP

SEQ ID NO: 403339 - protein, 421 aa, unidentified
MHRLTDDIPFTAYIGIDWADTKHDACLQAAGSEQREFARFSHQVDRIEAWAHSMHQRFGGPIAVVLELSKGPIVYALQKYEFFVLFPVNPSMLAKYREAFTPSRAKDDPTDAELALDLLMRHPERFKALRPQSIEMRTLMSLVEQRRRLVADKIRFTNRLRSTLKQYYPQTLEWFDHIDTPIFCDFISRWPTLLQVKRARRSTLERFFHAHNMRFAHVLEARLKSIKAATALTLDEAVVTPHRLQALVLVEQLRVTLQAIQRFDEEIAALASRHADYALFSALPGAGPQLAPRLLVAFGEQRERFRNAAEVQKYSGVAPVTERSGKKHWVHWRWRCSTFLRQTFVEWAAQTVNKSFWAGAYYRQQKAKGASHQAALRALAFKWIRILFRCWQDRRPYDESVYLSALQKRGSPLLKNLTCQI

SEQ ID NO: 403340 - protein, 400 aa, unidentified
MDDIDDVGVFLGLDVGKSAHHGHGLTPAGKKVFDKPLPNSEPKLRAVFDKLAAKFGTVLVIVDQPASIGALPLTVARDAGCKVAYLPGLSMRRIADLYPGEAKTDAKDAAVIADAARTMPHTLRSLELTDEITAELTVLVGFDQDLAAEATRTSNRIRGLLTQFHPSLERVLGPRLDHQAVTWLLERYGSPAALRKAGQHRLTEVIRPKAPRMATRLIDEIFDALDEQTVVVPGTGTLDVVIPSLARSLAAVHEQRRGLETQIGQLLEAHPLSRVLTSMPGVAVRTAATLLVTVGDGTSFPTAAHLASYAGLAPTTKSSGTSIHGEHAPRGGNRQLKRAMFLSAFAALHDPASRTYYDRCRARGKTHTQALLRLARHRISVLFAMLRDGTFYEPRTPRLA

SEQ ID NO: 403341 - protein, 355 aa, unidentified
MDNVKYIGMDVHKAAISIAVLNSSGKLVMESTIETKAITILDFLKGLRGSLHVTLEEGTWAAWLYDRIKPQVTELVVCNPRRNALLKEGSKSDRMDARKLAELLRSNMVRAVYHGEHGVRTLQELSRSYLTISTDLIRVMTRVKAIYRSWGIPCRGKQVYAERYRAQWLGQIQQAGVRRRAEFYYQQFDALRSLRQQVRRELLAEAQQHDAWKLLRGIPFIGPIRAALLIALMQTPHRFRTKRQLWTYSGLGIETHSSAEQRFVQGELRRAKKPPSIRGLNRNHNHELKNVFKSAATVAASQAGPFKEFYDALLAKGIRPEMARLTLARKMAAITLLVWKKGVRFDAQHLKPQTA

SEQ ID NO: 403342 - protein, 376 aa, unidentified
MSSPFEIHHVEKDMEDLDNLLSKLDGEIRIVMEATGIYHLPVVTFLHDKGYFVSVVNPFAMKKYAKDNSIRGAKTDRLDSIMIANYGIEKWFKLQRYEGTEETYAELKLLGRRYRYYMELHVKALQELTHVLDYVLPGIKKMFNSWNEANGKDKLSDFVERFWHFDLITSMSLEKFTEEYIAWAKEKKYHRSRSKAEAVYELASSGIPTLSSSTPSTKMLVQEAVSVLRAVDSSLSLILTRMQELAKSLPEYSVVREMGGVGNVLAVKLIAEIGDVRKLHNAKALIAWAGIDPPPYESGQFIGSKRRITKRGSSTLRKVGYEVMRVLKSHSAPKDDAVYNYILKKESEGKSKKHAKIAGLNKFLRIYYARVMEVYQ

SEQ ID NO: 403343 - protein, 426 aa, unidentified
MFVESDDDEQIIERVAALDIGKAEIVCCIRLPATDGGKRRVQEVSTHSTMVPSLCELANRLVELGVQRVVMEATSDYWRPPFYLFEAHGLDPWLVNAKDVKHLPGRPKTDRLDAVWLCKVAERQMLRPSFVPPADIRRLRDLTRYRADLVEVRTAEKNRVEKLLEDACIKLSVVASDIFGVSGRAMMAALIAGQRDPQVLAAMARARMRVKIPRLEEAFAGLPLGTFDDHHRFLLSRMLARIDAVSADIAAVEAEIGDHLAPFADAVARLDEIPGVGPDVAAVIIAEIGLDMSRFPTPGHLASWAKFAPGINSSAGKTKGNGSTGHGDRYLARVLGEAAVNAGRTDTFLGARYRRLARRRGKKKAIVAVGRSILVIIWHLLADPDTRFHELGADHYDRHVNTLAKRRNHIRQLEALGYKVTLEPAA

SEQ ID NO: 403344 - protein, 343 aa, unidentified
MKLTRVGVDLAKNVFQLHGVDRAERPIWCKRLKRNRWIKEIEENVEPGVEIGMEACGGAHHWARLLQSKGYRVRLIAPQFVKPYVKSNKTDANDAQAVCEAMSRPSMRYVAVKTIEQQDIQAVHRVRASLISERCAKANQLRGLAYEYGLVAPREIAALRLAVPAWLEDASNGLTVRLRALLSGLYADLRALDERVRELDKEIRVIGRENEAVGRVQQLRGIGPLIASALVAMIGDARQFKNGRHVAVALGLTPRQHSSGSKERVLGISKRGDSYVRTLLIHGARSALRTAPGKNDRMSRWALALAKRSHVNVAVTALANKMARVAWAMLRHGTTYEPNGLAA

SEQ ID NO: 403345 - protein, 349 aa, unidentified
MRYFQPPADTRFYAGVDLHARSLFLVVLDQTGQTRLARNLPAAPAPFQKAIAPFRDGLVVGCECMHCWYWLADTCRADSIAFVLGHAWGMKAVHGSKSKCDRKDAEALAHLLKGGNFPLAYAYPKERRGLRDLLRARLRLVRQRAELYGHIHTARRQLNLPPVSNDVKYKSKRASALADIDDDCVRRRVEADLSLLEPLDTTIRHLEKDIEVAARQHYSTEMAALQSTPGVGIVIALTILLEIDTIARFDSRQQFCSYARLCGARQESGGKTVGTGNAKQGNAWLKWAFSEAAVLSAQKDERIGKYLDKLSSRLGKAKALSALAHKLGRAFYHMLRKKEVFNIDQFLRH

SEQ ID NO: 403346 - protein, 342 aa, unidentified
MERVYVGLDLGSSSFQQVGLNEGGVIKEQRELRTSEANLIKAFADLEGELHVHLEAGELAPWAVSIITPLVQRVVCSHPQTNAWIAKDADKSDRLDAFKLADLLRLNRFKEVHYPPQQSRREFKTLVQHYDELTQQQARLKTKIKARLRMQGVIVRGEQLFSATGRKAVLAAVKSVAVRTAISQLYAVLDQSLESQTEARLLMRRAAQAFPEIRIFETAPGVGPIGACRFSAYIHTPQRFSSTRKLWKYCRLSVSHRSSNGKPLRRPRLDHNGCGRLKDVSRKAFDAALRSKTDNAFKRAYQRALANTHDATHARLTVQRKIVSTLRAMWINQTPYREELMR

SEQ ID NO: 403347 - protein, 346 aa, unidentified
MNQIIRIGMDTSKHIFQLHGVDAAEQPVLRKRLRRKQVLAFFAKLPPTVIGMEACGASHYWARELGRLGHEVKLIAPQHVKPYVTRNKNDGRDAEGTCEAMSRPTMRFVPVKTAEQQAALMLAGIREQLIARRTQLSNTIRGYAAEFGLVAAKGLDKIEPLLAQIAQEEDLPALARELFATEGREYARLQAELKAIEARLMAWHRANACSRRLAQIPGVGPIGATTLVMKTPDPRAFASGRHFAAWLGLTPKDHSTAGKTRLGKITRAGDEVLRRLLVAGATAVIQQVRRGRGRPSPWLLAVLKRKPPKLAAVALANKIARIAWKLMTTGESYDGARMPGASAIAA

SEQ ID NO: 403348 - protein, 330 aa, unidentified
MMVTAPLLPVVGLDVSKATLAVCYQVNELVKHLEVRNNKVGFQQLVKACGAHCRFVMEATGTYNLALAYYLHEQGGEVAVLNPLVIKRFIQMHLSKGKSDRKDAQWLLRYGQQQPVKVWQPDETVLVECRQLEQVNEQLLKQKTMVSNSLEALQRQPVISKLALKRLRQMLKTLTQQVALAEAELLALLEQGFAAQMTLLCSIPGIGRKTAGLLLLFAGGFTHFDNYRQVIALAGLSPREHTSGTSIRGKVRITKMGGGLIRGKLFMCSFSAKKMNAACAALFDRLVAKGKNKKLALIAVCNKLLKQAFAIVKSGVPYQADFSSKLALTA

SEQ ID NO: 403349 - protein, 342 aa, unidentified
MYYVGVDYHLEIAVACITDASGKEWKLLELPSTPEGMDVLIDVMKGKKFRVLGEAFTYSIDLNNYLIGRGVTSDLVRPSDLTVITKSNKKTDSHDARAIAWYLRLMDKGEIDLKPSLILKDEQRALRDLCRLREDVSNSIGMTNQRIRSHMRINSEYLPVETFGDHPDLRTQKVQHYIITEFGDDFTLQELLRQQAFYVERSKAIDGELSKFPYDAGSVELLVTIPGIGELSAVELMSMIVDISRFPSNDAMRSYFGMAPKVRNSGETICHGHLTKQGDPMMRKVLERIVASHMRWCKESKVTEKYRSVRTHAAGGVAMMAAANKMLDIIYSVLTNRRPFRA

SEQ ID NO: 403350 - protein, 414 aa, unidentified
MDVLHERCAALDIGKKDLKACVRAPSPSGRRSRRQETRTFATTTNALLELRDWLLAEKVTLVVMEATGDYWRGAFYLLEDCLNVILVNAAHAKGLPGRKTDVADAAWLCQLGECGLLKASFVPPEPVRHLRDLTRYRSTLAAELGREAQRLEKELEDAGIKLSAVATDILGVSGRAMLDALIEGERDVHTLAQMAKARMRPKIPALVEALTGNFGEHHAFLCRLHLARIDQLKAAIAELSTRIEEEMRPFARQLELLESIPGVGRTTAEVLIAETGGDMSRFRTAGHLASWAGVCPGHHESAGKHKSGRRRHGNRWLGAALGTAAMAASRTRDTTYLGARYMRLMPRLGKKKALVALEHSTLTAVWHMLTQDTAFHDLGGDYYAKHDPERALRRITRQANALGLTVRFEPIEAA

SEQ ID NO: 403351 - protein, 315 aa, unidentified
MAQAVSVISYGADVDSRYLQINRHGDSTVEKVENTPRAIRAWLKSITIPARLAVEATGAFHLELVDQAHKAGLTVFVVNPRAIRQYREGVSQRAKNDRCDARLIARFVDREHDELRPYAPLSARQRRAWQLLKRRATLVKSRQQIQQTLAGMTDLRGPLGQTLSRLDTLISLIEKQIEGLLKELGLWELVECCESVKGIGTVTAMALVIAFDRGEFKSADAFVAYLGMDVRVRDFGKFTGQRKLTKKGDGECRRLIYNAAMTAGRYDFKPHLDRFKSRGMKSTQAYVALARKLIRIAYALMKNREQFDPNQLRIA

SEQ ID NO: 403352 - protein, 439 aa, unidentified
MIHTTQKEETEFAAFLGIDWADQTHAWALQIPTHSGVEHGEVAHTPEALEAWAAELAHPFGGRPIAVAVEQSRGALLFQLTKYAHLVLFPVHPATLASYRKGFRPSGAKSDPSDADLVVDLLVHHREKLRRLNPDSEETRTLQFLVEGRRKFVDDKTRYSNRLTAYLKIYFPQAMDWFFEVSSQIAGDFLECWPTLRQAQKARAETLRRFFKQHNSSKSDSIERRVEEIRNAVPAIQDAAVIDSCSTAVLAWVRMLRELRETIAVYDQKIESLARQHPEFAIVDSLPGVGPVLAPRLIAALGTQRDRYRSASELQSYSGIAPVLASSGKQHWVHWRWACPKFLRQTFHEWALHSLPYSAWAKAYYDQQRGKGKPRNTVLRALAFKWIRILFRCWKDRKPYCEEIYRQALHRRKQMTTSSPVQLQWKTCAGFSKIAGLTS

SEQ ID NO: 403353 - protein, 405 aa, unidentified
MGMVFVGHDWAEAHHDVHVEDAQGKRLAKARLAGGVEGVARFHELVAPFVEDPSEVVIATETDRGLFVGAMVAAGYTVLAVNPMSTSRYRERLSTSGAKSDPGDAFALAELARTDRHNHRPIAGDSDLAEVVKVLARAHQGMVWSRQRQLNQLRSTLREFYPAVLAAFDELGSADALAVLAMAPTPTLGRRLSQSKIAAALRRAGRQRRVEERAAEIQAVLRAPQLEAPTVIADAMGTSAQALVAVIVELTTQISHLEAELADRFEQHPDAKIIRSLPGLGMILSARVLGEFGDDPNRYADAKSRKNYAGTSPITKASGTRKVVLARYARNKHLADACYLWAFSSLTASPGARAFYDHHRAAGDTHHRALRALGNRLVGILHGCLRHGTPYDENLAWGHRHQQAA

SEQ ID NO: 403354 - protein, 406 aa, unidentified
MAVMIGIDPHKGSHTAVAVTAAEEPLGKVRVRACPAQARQLVAWAAAWPERIWAVEGAPGLGRLLAQQLIAAGERVLDVQPKLAARVRLLQTENTGKSDPNDALSVAVAALRSKAQRPVLADDHATVLKVWAKRHRDLSRAHNQVACRLHAVLCDLVPGGIANEITVSRAARILGQITPAGPAAKARRELAAELLADIRHLDAQRREVKKKLAAAVKASGTSVTEIFGAGPVIAATVIGDVVTVARFPSRDHFAAYNGTAPVEVSSGNKKIYRLSLRGNRRLNHAIHMAAITQIRHKHSDGRAYYDRKIAEGKTHKEALRCLKRRISDALYARLRADARNAAAACVKDPGGQPGNHSVSRAAGSHPAHRLFGQATPGPQTSLRPAAALTPAMPPSGPPANKTRRPT

SEQ ID NO: 403355 - protein, 388 aa, unidentified
MGVIIGMDPHKRSATIEVIDEQAVVLAAGTYGTDKAGYGQMLAAGRKFAGRVWAVEGCNGIGRHLAHRLVHDGETVVDVPPKLSAQVRVFATGNGRKTDQVDAHSVALAALRAPGLVQVQVEEDLVVLGMLADRRDELGRARTQVINRLHRLLLELLPGGAKKFLSARQARTALAAVRPRDLAGKTRRRLAAELISELETIDRKTRALDKELTELVTARGSTLMDLNGIGPSGAARLLADVGDIHRFASRDRFASWDGTAPLDASSGSQSRHRLSRAGNRRINRVLHIMAVVQLRNQTKGRAYYDARRAGGMPSMMAMRALKRRLSNVVFARMLADQKRREAGPGGQSGTPADSSVTGPDPPDTGPSDKPHPGPATPHPKRQPSHALT

SEQ ID NO: 403356 - protein, 350 aa, unidentified
MMLIGVDYHPSFQTIAFFVEETGECGEQELNHSDGQAERFYRDLKQRGICVRVGMEATGYARWFERLLAELGFELWIGDPAEIKAKRVKKQKFDREDARLLVRLLRENNFPQIWVPGPENRDLRQLLWHRHRLVQMRTRIMNQLQALAMNEGYRWKKKLFSERRAQFEKLALGPWASRRRQELLELLDRMNPTIEELTAAVEWEARQRPEAIRLMTHPGVGPLTALAYVLIIGTPTRFQCGKQIGTYVGMIPREDSSARKQRLGHISKQGSSLLRFLLVEAAQSAARSNPEWKRRYVYLTMRRHRSIAKVAIGRRLAVRLYWMWRNGCDYSPSLEFGSYVGQLGSGYGVK

SEQ ID NO: 403357 - protein, 442 aa, unidentified
MRSYQALQAKRLFIRGKYIVGIDPAKAKHQATVIDPDGIQLGKSFTFKTDHLGYTEVLWKKIGKVLEKINPEDVVFAIERSCNLWLTLSDYLYREGYKVLLISPVVTRRSRPFINQDFSRTDPKDALLVASSARDGYFNFYQKYTPEIEAMHRLSIVYDKLRKNCIQQQHRIRSIVEAVFPEFFEVLNLDTKSGLYILERYLTPQDFMGMDIDKEARALAALSNRVHGQESLEKLRMLAHQSIGCQRQGEEIIADRLMLNSWLSILKPIQQAMDNILHELIPLAEQSPSFEILCSLKGVSKKMAALFIAEVRDPHLFDHYKKVEKMAGVNLRLSQSGNTAGPRHISHMGNNRLRWVLYKMTEETAKYIPEVRIKFLKRQLKKVCYKKNLMAATPQMLKLIMALIKENRPYEYRKEALEEMKRLEEKYEQLKKQTQRKKRQAA

SEQ ID NO: 403358 - protein, 343 aa, unidentified
MQVTTVGLDLAKRIFQVHGVDAAGKVVIRRRLQRSEIAAFFADLPACLVGIEACATAHHWARLIGASGHQVRLIPPSYVKPYVRRSKTDAADAEAICEAVGRPSMRFVPVKSAHQQAALLHHRARDLLVRQRTMLINAIRGHLGEFGIIAPAGRHRVADLVNLLQGADDAEVPALAREALQSLFAELSALEIRIKAVEAVIMREHRSNAVSRRLTTIPGIGPITASALAGTIADPFAFKSGRELAAWIGLVPRQHSSGGKQKMGRVSKQGDRYLRRLLTVGATAVMRRLPGKTDGLSLWVRALLDRRPFRLVSLALANKMARIAWAIMVRPETYKASAMTAAA

SEQ ID NO: 403359 - protein, 423 aa, unidentified
MDVIHDRVAGLDVHKDTVVACVRVMSGAKVERTCRTFGTTTVALGQLRDWLDGNGCTEVAMEATGVYWKPVWNILSDGRFELTLANAAHIKAVPGRKTDMNEAMWIADLVACGLIRPSYVPGERQAELRSLLRTRKQLCREQASHVQRIQKTLEEANIKLASVISDILGVNGRRLIEAMIAGVRNPHRLAGLADRRLKASPKQLYDALHGRLTDHHRFLLRLHLGQYDTLGTAIGQIDRQVDTAVATLDAEAAAGQASFRALIALLSTIPGVSTLAATTILAEIGRDMSRFLSAGHLLAWAGLCPGQNESAGKRKSARRRKGAPWLKTMLVQCAWAAKRKKDSYYQAQFYRLSARRGPQKAICAVAAAILTAIYHMLKDGTVHHDLGANHFDRRPAQVRVKHLVAHLTKLGYQVQLQPLPEAA

SEQ ID NO: 403360 - protein, 366 aa, unidentified
MSSITYVGLDVHKRTIAVAMLCPTTGEVNQWEVTHEPTALRRFIRKLKAYAPLRCVYEAGPTGYGLQRQLQAAGIECMIAAPSLIPVRHGDRIKTDHRDARKLAELHSAGLLTAVHPPTEDEEAVRDLCRCREDAQLDLVRARHRLGKFLLRRSLSFHAGYLWSQQHRYWLHGLKFERPADQIVFQDYLLALEQQEARVAALDEQLATAAEQEPYRTPVAHLRCFRGIDTVTALCLTAELHDVRRFTTAPSLMAYLGLVPCEYSSGDHRRRGGITKTGNRHLRRLLIETAWHYRHKPTVGVKLAKRRRGQPAAVIARADRAQQRLCRQYRLMTGKGKHHNTIVVAIARMLIGYVWETLREAQPSEA

SEQ ID NO: 403361 - protein, 401 aa, unidentified
MTRLWAGLDAGKTHHYCVVIDEDGTRLLSRKVANVEDEILGLLADVTALADDGEVVWATDLNQGGAALLIAVLAANGQGLLYIPGRTVHHAARTYRGDGKTDAKDAGIIADQARMRRDLTPVRGADEAAVELRMLASHRADLVADRTRAINRMRATLLEYFPGLEAAFDYAQRKAAVLLLTEYQIPEQLRRAGVTRVTARLRKAGARLPEQVAQVAVDAAHAQHTVVPGQDAAAMIVRRLAGEVLRLREEVEEVESQLEARFRRHRHAESLLSMPGFGPLLAAEFIAYTGGTLAVFESADRLAGIAGVAPVPRDSGRVSGNLHRPKRYSRPLLRTCYLSAEAAARSHPESRVYYDRKRREGKNHKQAVLTLARRRINVIWALLRDDTTFHQQSPASTPIAA

SEQ ID NO: 403362 - protein, 294 aa, unidentified
MTSATIFVGIDIAKTDVVVAGRPDGPSWTACNDVEGITATVDRLRAVAPTLIVLEATGGYETPLVAALAAAGLPVVVANPRQVRDFAKATGQLAKTDRLDAQVLALFAERAHPTPRPLPDAALQALEALMTRRRPLLDMVTAERNRLEPASTPIRRNITEHLRWLARRVVAVDRDLDETIQKSPVWRAKEDLLRTVPGIGPVVSRTLLADLLELGPLNRKQIAALVGVAPLARDSGTLRGKRTVWGGRAPVRAVLYMGALVATRRHPVLRAFYRRLIEAGKPKKVALVANSSRS

SEQ ID NO: 403363 - protein, 334 aa, unidentified
MENIALIGIDLGKNSFHIHCQDRRGKAVYRKKFTRPKLIEFLATCPATTIAMEACGGSHFMARKLEELGHSPKLISPQFVRPFVKSNKNDFVDAEAICEAASRPSMRFVQPRTESQQAMRALHRVRESLVQDKVKTTNQMHAFLLEFGISVPRGAAVISRLSTILEDNSLPLYLSQLLLKLQQHYHYLVEQIKDLESQLKRKLDEDEVGQRLLSIPCVGTLTASTISTEIGDGKQYASSRDFAAATGLVPRQYSTGGRTTLLGISKRGNKKIPTLLVQCARVFIQKLEHQSGKLADWVRDLLCRKSNFVVTCALANKLARIAWALTARQQTYVA

SEQ ID NO: 403364 - protein, 427 aa, unidentified
MHHRAAGIDIGSRKVFVGLEDSPVRWFETFTGDLESLRDYLLEHKVSTVAMEATGVYWYVLYDILLDAGLDVWLVDGRQTRQLPGRKTDVKDCQWIQQLHSYGLLNRCYVSDGLLKELRSYQRLREDHIRSAAIHVQHMQKALISMNIRLPEVLSQVHGVSGMALIKAILNGERDKEKLVLLCHSKVREGKGEELRKALEGHYSPQGLFMLNQAVKAYEFYQEQILECDRQIDTVLQKINRDKKPLSGSGKRKPIRHNKPDIDGLGDHLLMIFDGRDATKLPGFTDYNWLQLYTEVGSDLSKWPSEKHFTSWLGLAPGQNNSGRKNKSKSKGKPCVGQIFKQIAHGLLNSKYIGWGVFARRLRGRKGPAIAIKATARKLAAQYWRLIVKGTEFVEKGMKAYENMLKQQKKRHLEKMAFELNMELVPA

SEQ ID NO: 403365 - protein, 426 aa, unidentified
MKSITQNAKIAAITEKTLIIGIDVGSETHFARAFDWRNYEYSKKPLEFSNTEEGFETFRTWIGNLAEKHGKTNVIPGMEPTGHYWFNLGKFLQDHGMKPVHVNPHHVKKSKELDDNNPSKNDRKDPKVIAALVNEGRYSYPYIPDGVYAEIRVLSGLRVQAQSEITRLKNRIARWFSIYFPNYKDVYRNVSAVSGQMILKTAPLPEDIVKLGAEGINRIWRDAKLRGVGLKRAKTLVTAAEHSIGSREAPDAARIEIQILLSDYERQTAREAELMAMITEKIMEVPYVDKLLEMRGIGLKTVVGFVAEVGDIRRFDNPKQIQKLAGYAIVNNESGKHKGESHISYRGRKRLRYVLYEAAVSVVGHSPEFRSIHDYYTTREKNPLKKMQSMIAISCKLIRIFYLILRTGKSYNPTRMMADIRRPAAA

SEQ ID NO: 403366 - protein, 345 aa, unidentified
MPIVGGLDIHRKQLTFDYLDTVTGQVLRGQVAPADREHLRAWLGRFAGRGDVAFALEGCTGWRYVAEELAMAGVAAHVAEPADTAFARGRKRHAKTDRTDSRHLRQLLAGGRLPGCWIPPERVLECRALLETYHDLRREHTAWVQRVHAVFFHQGAPRLSEGALRGPQGLAAVRAASAACLSPAGQLQVAVALEMTAVLEERLDELRRRLLDAARHLAGARVLAARLYGVGPVTALALTCWLGGAGRFSSSRKAVRFAGLDITVYSSDGKRSPGRLSRQGPPVLRWAVYEAGKAHARASAPDHACYAQVQDRKNSKRAALSEARKIIRQACHILAELGDDALAAA

SEQ ID NO: 403367 - protein, 416 aa, unidentified
MKSTMITAVGIDISKNKSTVAVRRPGGEIVIRPFEVRHTSSDLKRLTAKLKQLGGDIRVVMEHTGNYWRPVALTLKKAGFFVSVVNAMLIHDFSDNSIRKLKTDRADALKIANYALTFWDELPPFNDEEEIRLLLKTQSRMCERITTTVTALRNGLIDLTDQTFAGINQAFDRAAKSAEGHEKWVDFFQHYWHRDCVCKFSLEAFTESYRRWCRQKNYKFRTDTAHKVYALAKECIATLPKCESTKVLITQACKSLNAVCEAKLASQHEMQRLASLLPEYDIVMGMEGAGPITGPALIAEIGDVRRFKNKKALVAFAGVDAPPFQSGTFEAKSRHVSKRGSPHLRRTLFIISSVILQLSHEDNPVFCFMDKKRSEGKHFYVYMVAGAAKFLRIYYATVTGHFKASKYINSLPAIAG

SEQ ID NO: 403368 - protein, 413 aa, unidentified
MEDILTCCMGLDIHKDTIVACLLIGDRETKPEKEIRTFSTLIPDMLKLRAWVEETNCQHIAMESTGIYWTPIYETLEDCFDSEITLLVVNARHIKNVPGKKTDMKDAEWIATLLRAGLLSGSFIPDKEVRELRHLTRYRKSVVRDASAQKNRIEKFLQSSGFRLSSFISDIFGASGRNIMNHLTIHGSIDLVALDACLKSKTRKKIDTIMIAVNGTLSPHQQNVLRMMLTHLEVLEKHRKEVELAIEESVEQFSEAMFFLCSIPGIDVTASSSIIAEIGTDMSRFPTAEHICSWAGLAPGSNESAGKRKSSSVTKGNPYIKSMLCEVAWVVAGKRNTYLSNWYWRIKQNRGAKRAVIALARKLLVMIYTMLKSQQPFDDTRFEQRKQQCQEKRTSKLIKELNRLGYQIQAIPN

SEQ ID NO: 403369 - protein, 411 aa, unidentified
MRVHHNVCCGIDVHKKSVTACLMWGPADKEPEFEIRRFGTMTRDLQKLAEWLKQAGCEAATMESTGSYWKPVWNVLEGQIPRLILANAQHVRALPGEKTDRKDGKRLAELTRHGQVRPSYVPPRAILELRDLTRYRSKLLSAGSSERNRIQKVLEDANIKLGSVLSDVFGLSGQKMLQQLVTKDTVDIANVLQLAHWKLKPKMEAIEQSLEGKLTDHHRFLVKASLEHMRFIEEQLKRLDEEIQRRLQPYQEEYALLQTIPGIKETGAARILAEIGADMSPFPDGDHLSSWGGVCPGNNESAGKKFQSKIRKGNVHLLSALTQCAWAATKKKDCHFRNKYYRLKSRRGSQRAIVAVDHAMLKCIYVVLSQRKPYEEPKPVSLTDAQKQRKASSLCRQLRALGYDVKIQKTA

SEQ ID NO: 403370 - protein, 418 aa, unidentified
MNEEESARDMRRYVALDIHKHYCVIAAVDREGRVALHAVRVEHPELEEWVKKKLQPSDHVVFESTTNAWHVYDLLEPLVERVVVANPIKVKQIASARVKTDVRDTLILARLLAANLVPDVWVPPAEVREMRQLLSQRRQLVETHTQIVNRMHSVAHRHHLKHERGKRFNEKNTVWQKDKQLSKTEQFQLELEMENRAYTEKQIDRIGKEVAKMSHQKPWAEGMTYLMQLPGFGVITAMTVLAAIGEIERFGSAKHLASYSGLTGGVDQSGTHFVQKGITKEGRRELRWAMVEVAQRAVKSDPRWTRKFQELHKRMHRNQAIVAVARQLLELVWYVLTRRQAYRHFSQERIAYKYLTWAWQMKDEERDGLTRQQFARYYLMRLGIGHELTRIALDPKHPRRLASEAEVLALRPELQKIE

SEQ ID NO: 403371 - protein, 403 aa, unidentified
MDVTYERCCGMDVHKKTVVACVVTPESQSTRTFSTMTSGLLEMADWLAEQRVTHVAMESTGVYWKPVYNLLEDDFEVMVVNARHIKTVPGRKTDVKDAEWIASLLRHGLLRASFIPDRPQRELRELTRYRRSMIEERSRVVNRIQKVLEGGNVKLSSVATDILGVSGRAMLDAMVRGVDDPEQLAQLARGRLRNKQHALEQALAALMSDHQRMMLRSQLSHLDFLDIQIDKLSQEVAERMAPLVEQINLLDEIPGVGRRIAEEVLAEIGTDMSRFPSASHLASWAGLCPGNNESAGKRGSGRTRHGNNWLTKALVQAAWSAARSKDTYMAAQYRRLAARRGSKRAILALAHSLIVSIYHMLERGTRYVELGGNYFDSRAHHYVVDSAVRRIERLGYKVTVQAA

SEQ ID NO: 403372 - protein, 377 aa, unidentified
MKRVKFVGLDVHAETIAVAVAEQNGEVRSLGVIANREDSVRKLVRKLEAVEELRFCYEAGPTGYVLYWQLTRLGVQCEVMAPTLVPVKAGDRVKTDRRDALKLARNYRAGELTAVWVPDAAHEALRDVVRAREAAKKDQLRARHRLNKFLLRHGRRPPMGVKPWTMKYLEWVKREVHFEQMAQEATLLDYLNEVEHAAARIARLDGAIEEAVKVAPSKMRAVIEALQALRGIAQVSAVTVVAELGELSRFSRATQLMSYGGIVASENSSGERTRRGNITKAGNAHLRRVVVEAAWNYQHRPAVGATLRKRQEQVSEEVKEIAWKAQQRLHGRYRKLLAKGKNKGVVVTAVGRELLGFIWAIGTKVEAARKESLQRVA

SEQ ID NO: 403373 - protein, 368 aa, unidentified
MSDIIRIGVDTSKSVFQLHGVDAAERPVLRKKLRRRDFLSFFAQLPPTKVGLEACGGSHYWARELMALEHEPKLLPAQHVRPYVRRNKNDKQDADAVCEAMSRPRMSFVRIKSAEEQAAQMLMTTRQRLIDYRTQLINTIRGHAAEFGLTAAKGPAHVEPLLARLAKDVTVPGLAKELFAIHGQEYDRLKIELREIEAKLKAWHRGNEMSRRLAEVDAIGPIGGCLLVIKAADPQTFHCARNFAAWIGLTPKDHSTAGKMRLGVITRAGDEALRRTLVVGATSVIKQVRNGKAHPSPWLRDLVARKPPKLAAVALANKVARIAWKLMVSGERYDAARAGIVSPTARVAPCSRRQGRCAPPAAVACGQP

SEQ ID NO: 403374 - protein, 360 aa, unidentified
MAKSIKAEKNVVLVMVAIGLDLADMWSDWLGLDESGAVVRRARVRTTEPELRRVFGEIKPTKIAVEVGTHSAWVSRVLSSLGHTVVVANARRVALISKNKRKNNRIDAEFLARLLRSDEQLLFPIRHREASSQADLATLRSRDVLVGCRTKLINHVRGVCKTFGTKLPKCSAESFVVRCSERVPEVLRKALNPILEQITGLTVQLKAYDRDISAMIKRYPEAERLMQIKGVGELTALAYYLTVEDPHRIVRSRSAGAYFGLVPGSDDSGEKHEPQRITKEGDRFCRRLLVTSGQYILGPFGPDSDLRRHGLAIAARGGKNAKKRAVVAVARKLSVVLHRLWVSGEDYIPLFNASRASMAA

SEQ ID NO: 403375 - protein, 408 aa, unidentified
MEVHHPRCAGLDVHKDTVVAAVRLLREREVFREVRTFGTTTSELLALADWLAENECTHAAMESTGVYWKPVWHVLESSVALVLANAAEIRNLPGRKTDVSDATWIADLLAHGLIRGSFVPPTPVQELRDLTRTRKQLVREVAQHTQRIQKTLEDANIKLTSVISDVLGKSGRAMIEALIAGETNPARLVDLAQSRLKTPRKKLVEALRGSVRDHHRFLLKLHLGQVDALKASVRDVEARLGEALEPFRRSVELLTTIPGISDAAARVIVSEIGFDMSRFPTSGHLISWAGLCPRNDESAGKRRSTRIRDGAPWLKTTLVQASWAAVRVKASYLQAMFLRLKSRRGPMKAIVAVAASILTAAYHMLRDSVPYRDLTAKHFDRKDNDKLAKRLIKRLEGLGLHVEIQKAA

SEQ ID NO: 403376 - protein, 343 aa, unidentified
MKMITTVGLDLAKSVFQVHGIDAKGGIVVRKRLTRSRVLDFFSKLEPCRVGMEACGTAHHWAREIGALGHDVRLMPPQYVKPYVKTQKNDMADAEAICEAVSRPTMRFVPVKTVEQQSLMVMHGVRDQLISISTKLINAIRGNLAEFGIVGAKGRLGVEKIIEVLRDLDDTRIPELARRCLKPLVEELKRVRQELLKMDREVMKVHRANGLSKRLETIPGVGPVIATRVASEISGPSYFRSGRDFSAWIGLVPKQHSSGGRDRLGHITKTGHRQLRRLIVAGALSVIRRAKQLGFTRHPWLVRLLERKPTMIAAIALANKICRMIWALMRSGDQFKAEKLLAA

SEQ ID NO: 403377 - protein, 380 aa, unidentified
MPEAVIGLDVGKSSHWACVATRDGEILLSAPVANREDDLDSLFGRFPDALVVVDQSRNIGALALARARAAGMSAAYLPGLAAHGAARLFAGDAKTDERDAMVIAKTALGIPDALLPVGDPGPTIAAARALAAQRNFLTCENTRNKNRLRSILLESCPAFEALVDLSDGCQLRLMASLGGAWSVADAGPRRAAALTRGAARGKIEALVRSTASSTRPDASVVAAEDRAVKLLARRISENSAEIEAITAEISALLEGDDTYRCLLTVPGIGPKTASELAISIDIEDFPSHDRLASYCGLAPRNRQSGTSISSVTASRQGNKRLKNLLIFSCNCLTRTEGRWGDYYTRCRERGMSHGKALKALARKRLKVIYAVMRDRVPYAA

SEQ ID NO: 403378 - protein, 348 aa, unidentified
MVVAAIDIGKCVLQVASLDEGSGESVEARLTADRESLHGWVDGFGGRLVTVAIEATTGWKWICNELAGRGVEVRLVDPGEAAARKSSRRRAKTDRLDARFLLSLLVSGTLPEAWRPPPEIQQLRALTRVRKALVDERTANAERVQALLLHEGWPCQRGRLLTACGRKWLQGLQLEPTMRLLLDTQLGLIDAIERQLQPLDQELRRQAQSDPRLQALQSLYGVGPIVACHLLAEIGQASGFRRARQVVRLAGLDPVVLQSGQTKRRGRLAKAGPPLLRWALVEAAQHAARPQSPDHQRWQRMQARRGSKIAALTIARTIAGRSYRLLYQLEQAGREQTAPQPTALRKAA

SEQ ID NO: 403379 - protein, 377 aa, unidentified
MKKISIGIDISMDDFYACIKVRTQTGATKIKGTHSFKNTENGFKEFLIWALKAKEDDCSLIFVMEATGVYYENLAHFLYTNKQSVAVILANKVKNYIKSLNIKTKTDKTDSKSIAGFGIERELVTWQPMSPVYKNLRDLCRELLSIKKDLQRSKCQLHAMNKSHEKLESILALKLEQIRFYEKAIAIIKKEIKNSVNKDDALKEKIRKVQTIPGLGFITIVILACETNGFALFDNIRQLVSYAGLDVTFKESGNYKGKTRISKRGNSRIRQALFMPSMSATRANEPIKNLYERICDRNPDIKRKGIVAGMRKLLILTYTLWKKDEEYDLKYQWNKEPSSNDAAMPFFGQVITKKKAEQNCSALDRPRFNELTEAFFC

SEQ ID NO: 403380 - protein, 338 aa, unidentified
MDRQYVGIDFHRRRSVIVRLDSNGERLGVHRIVNDPFELSRVIALCGEAPQVVIEATYGWYWAVDLLQDLGAMVHLANPNALNWGDRRVKNDEIDAHDLADMLRLGRMPRAWIAPPAIRELRERVRYRAKLVKLRTGLKAQVHAVMAKEGVLPRVSDMFGPAGTRQLDALELGAPFAHRVASLRELIGVYDREIATLERDIHAHLKAHRGYQAVQAINGIGKVSAAVLVAEIGDITRFATPAHLCSWCGLTPKHRESDTKTRRGRISKQGSALIRATLIEGISRYHGGSALDAQYQRIAKRRGRNKARVALARKVLTLVYYGLRDGEIRCLAPVEAAA

SEQ ID NO: 403381 - protein, 456 aa, unidentified
MQIMYHRCCGIDVHKKMIVACLLIITAQGVHKEIQTFSTMVSDLFRLREWLKAQRCEAVAMESTGVYWKCIWNVLEGEMELLLCNAQHIKAVPGRKTDIKDAEWIADLLQHGLLRASFVPARPQRELRDLTRYRSSLAADRARLVNRIQKTLEDTNIKLASVATDITGKSGRAILEAMLHGEHNPEILAELAQGRMKEKREQLAQALQGTLTDHHRFLLASQLRQLDFLTLQVREIDREIAHRLGLQSDPDDPEPADSIGSLPAKEEIPDPPETSESGPPPCVQPDSPQPLKSAEAIRILDEVPGINVRVGAIVVAELGLEMARFPDEAHLASWVGLCPAAKISANKRLSTKTGKGNRWLRQALIEAANAAARSKGTFLGAYYQRLRKRMGHKKAIVALAHRILVIIYHLLTEQQSYRELGPDHVDEQAAEIARRRALRTLEQLGYEVTLQSAEVA

SEQ ID NO: 403382 - protein, 395 aa, unidentified
MFIVGIDVAKRSHEVCMITSDGQTVQRPFSIRNNCTGYNLMLEKIRKHTNIKSQIVFAMESTAHYWLALFTRLRKDGYHVILLNPIQTSAMRDMFIRKIKTDAKDSFIIAELIRFGRYAESNVAQDRLLALKELCRNRFYLVDMAGDLKRKLIALIDRVFPEYEAQFDTIFCKSSVAVLKKYPTPQKLSNAHLDKLTELLWNSSNGHFGEWKARELKELARNSFGVEDCDGAYSTLILLMLDQIQSLSGKADALEKEISRLFQSFDTTVTTIPGVGPIIGAVILSEVGDISRFSSADKLAAYIGVDPSVNQSGEFQAAHAHMSKRGSPYLRRCIWMASQVAVQRDPMFRAYYEKKAAEGLKYMTIIGHVTRKMTAVIFAILRDHKVYEPILPTAA

SEQ ID NO: 403383 - protein, 349 aa, unidentified
MDKDNMTIIGCDLGDRTSHLCLLDREGAVLRRTKIASTQKAFDKFFAGLESCLVVLEVGGHSRWSSALIRELGHRCLVANPRHVRLIYGGTHKNDRLDAEALARLGRLDPTLLRPVEHRSQEAQTQLSTLKARDALVRNRTRLIASVRGIAKSAGMRLVACDADYFTRKVTLPPTLQPALGAMLQNIEELTAHIKQYDKQIAQLCAQHPETLLFQSVPGVGPITALAYALTLERPERFCSSRDAAAFVGLVPKQRQSGRHDPQLGITKAGDRLLRRLLVQCAHCILGARGQDSDLRRFGLRLAAQGGKRAKKRAVVAVARKLAVLLHRLWVSGELYEPLRLTPDQSCAA

SEQ ID NO: 403384 - protein, 385 aa, unidentified
MWYVGLDWADTHHDVEVLDEAGKRVGVRRFVHNHEGLNELKAFLLGIAASPEELACIVETNHGLLITFLLEAGIPVYPVNPKSANQLRKAAGAKTDQIDAHLLAKLGRLDLAELRRMAPDSPTVQELKTLTRDQDALIQTQTRLVNQLTACLKEYYPAALHLFAKLQQRSTLVFLQAYPTPQAAQAASVEELIATLRTGKHTNPTQVAPKIVEELHRPQLVANEVIVRAKSRLMLSLVKQLLVVIEEIASYDKAIRPLFLSHPDQELWSSLPRAGKRLAPRLLAEWGEDRSRYADATSVQTLAGTAPVPFQSGNYAKAHKRFACVKPLRNVLHQFAWQSTRQEAWALAYYQRKRAEGKTHSMAVRALANVWVRIVRHVGAYGIPA

SEQ ID NO: 403385 - protein, 325 aa, unidentified
MEKIVIGIDVSKLTLDICIQYNGSNHYENILNTEEAIKAFFRKLNKKHEIIIGMENTGRFNAILYRVLMHYSYAIYVINPFHLKRSIGLVRGKNDKVDSERIALVLSKNYMDLQQWKPNSHAIEKIKLLNAERKHRVKIRAGLLAQSQDELFLSSSIDKGILRLNTKLIDVLTKQISEIENKIYQLIFKDEELNNHYDRIRSIPGVGKVLAFNMLIKTDGFTNIHSPRQMACYAGIAPFDFQSGTSIRRKPKVSSMADKDLKKLLHLAAMSAIRLKNDLAVYYHRKVEEGKNKMSVLNAVRNKIIHRIYALIKNQTIYKNSLLLS

SEQ ID NO: 403386 - protein, 320 aa, unidentified
MTTLFVGIDVSQASLEVSLLPSEEAFRVPNNPAGHRQLLETLLALAARPADIRAVLESTGGLELPAAIALEAAGIEVAIIKPERARYFAKAHGQLAKTDAIDAGILARFIRDVPVPILPLPPEELRHFRDLLDRRHQLIEMRTMEANRLGTTTFPPARKSLQKHIAWIDREIKGVEAELDRRVAANPQWAEIDRILQSIPGIGPQVARLLIGHLPELGDGNRKVIGHLVGLAPLADDSGTTEGPRHIVGGRWQVRNGLYMAAVVAIRHNPVGKALYQRLRERGKSAKTALIAVAHKLLTIANAMVANKTVWRHSNVAISS

SEQ ID NO: 403387 - protein, 413 aa, unidentified
MDVLHSRCCGLDVHKSSISACVLLREAGRVQKHQRRFGAMTQELQELAERLRQFGVTQVAMESSGVYWKPVWNILEGQFTVVLANAQHIKNVPGRKTDQKDAEWIAQLLQYGLLRASYIPCEIIRDLRDLTRMRASLSQEASRISSRIQKVLEDANVKLASVATNVLGKSGRAMLEDIITGEDDPEHLASLALGHLRVKIPQLRLALQGKIRSHHRFLLRRLLDQIQFLEHEIALLDERLEDIGRQRPDLAQAVARWDTIPGIDQVAAWALLAEIGNNMAQFPTADHLASWAALCPGNHESAGKRLRGTTRQGSTWLCRMACQCAWAAARTKNTYLSSQFRRLAARRGKKRAIIAVAHTLIVIGYHLQKNQSNYEDLGGDYFDRIHSDGLKRYLVKRLQQLGHKVTLEPMEAA

SEQ ID NO: 403388 - protein, 354 aa, unidentified
MCSSITDYSGQDLFIGIDTHLSQWKITVRTRNLALRTLSINPDPKDLATFLRRNYAGARYFSVYEAGFCGFWIHRRLVEYNIANIVVNPADVPTSHKEKDQKSDKVDSRKLARELAQNSLTPVYVPSEGEQHLRSLCRVRFKTVQNMTRVRNRIMAHLHVNGITPPPRWETARWSARFIVWLETIEFSHPSGKDCLELYVEELKEHRQRLLKIIHLLRRYAAQEQLRPLFDLLCSVPGIGFVTAITFFTELIDMARFPTLNHLASFVGLVPSVSSSDDRMSERGLTGRKNSYLRHLIIESAWVAVRKDPMLSAKFENLSRVMKKQEAIVRIARKLLSRIRFVWMKRQSYVVGID

SEQ ID NO: 403389 - protein, 394 aa, unidentified
MRFYNRQHRYYCGIDLHVKTMYLCILDAAGQVLVHRNVKANPEAFLEAIAPYRDDLVVAAECMFTWYWLAHLCAAEGIAFVLGHALAMKAIHGGKAKNDKIDSHKIAVLLRGGLLPQAYVYPAAMRSTRDLLRRRLHLVRKRGQLLAHIQNTRAQYNLPAFERRLAYPANRDGVADHFPDPRVRKSIEVDLALLDQYDALISDLELTLVREAKRHDADAFHRLRSVPGIGKVLALTILYEIHDITRFDRVQEFASYARLVKCAHQSAGKTIGTGGAKMGNVHLKWAFSEAAVLFLRHTREGKRLLARLTKQHGKGKALSILAHKIGRAVFYMLSRGTVFSMEKFLATSRGRERASQTSNSSHVGTELAEIAPHACAAKCHEPSIMSQGSGSERV

SEQ ID NO: 403390 - protein, 316 aa, unidentified
MNKVICGVDVSKGWLDARIEPIGVVARFPNDAAGIAELLAFCRAHGVDLVVMEASGGYERVCGRALRAAGIEVRTVDPKRVRHFAKSAGRLAKNDEIDAEMIAWFAETFPQAPTTLGDAAREELDQMVTARQGLLRLKMQTTNFGEHAQPPAVRKAHQAVLKSLDRQIAKLEAAIAITIRQTPHLAEQAEIIESVPGLAIGVAAGLMAFMPELGRVDDKAAAALLGVAPYDDDSGKHSGRRFIKGGRQKLRNLLYMPVMGASTLHNPVLKACYRRLIAKGKPAKVALVACMRKLIIILNTMIARGERWDPTKHAVA

SEQ ID NO: 403391 - protein, 324 aa, unidentified
MTEPALGIDSSKLKFNVCLINTQGKLKHKVFPNNPAGCEQLNEWLTKQGIDSVHACLEATGTYSERVALSLYQAGHTVSVVNPAAVKAFAQSRLSRTKTDRVDPELIARFCLAQQPPRWTPQPEEVRALQALVRRLESLIEMRVAEENRRTSGITVALVRQSVEEHLSYLNEQLKRTESLIRNHINKHPTLKQQSALLDSIPGIAETTAALLLAEMTDITQYRSARQVAAYAGLVPRERQSGTSLRGRARLSKIGNARLRKALYFPAITALRCSPFFKAWAKGLQERGKCKMTVICAVMRKLLHVAYGVLKNGKPFDPEWVKSA

SEQ ID NO: 403392 - protein, 465 aa, unidentified
MRRCHGKKADARARAKERQFEVINPDAAGIDVGASEMWVCVPGECDRERVRKFGTDTVELEAIAAWLQERGVKTVAMESTGVYWIPLYQVLENHGLEACLVNARHVKNVPGRRKTDRLDCQWLQKLHACGLLSNSFRPTPEICRLRSCLRHRATLVQEQATHIQRMQKALREMNVQLDAAVSDVTGVSGLRILDAIVGGQHDPKALAELADRRVRKSPEQIARCLQGDYRPEHLFVLRQSLAAYRFFVEQMRDCDREVERYNAQLEQAFGRAQTALPEAPPDQAAKRKKGNVPEYDVRTHLYRLAGVDLTLIPGIGELTAQGLLSETGLDMSHWASEKEFASWLDLCPSPKISGGRVIGPGRRHAANRAAQWFRQAASTLKNSHCWLGSFYRRIRVRHGGGVAVKATAHKLALIYYNVLATRTEYRPIDPQQYEARLRERVIRNLQRRARQLGMELVPAESTAAI

SEQ ID NO: 403393 - protein, 354 aa, unidentified
MPHNTSRLEAVATIGIDIGKNTFHLIGLDRNGAIVLRQKLSRRQIEARLANTPPCLIGMEACVGAHHLGRQLKAYGHDARLMPAQYVRPYSKGQKNDFRDAEAIAEAVLRPTMKFVAIKTVEQLDLQALHRVRERLVCQRTSVINQIRAFLLERGIAVRQGPSALRSEIPIVLSMTDKLSPRMIQMIEDLCADWRYLDERIETVSDEIKTLSEQDDGAKRLMTVPGIGPIISTATVAAIGNGDAFSKGRDFGAWLGLVPRQMSTGGRTVLGPISKRGNRYLRMLFVQAAHAVLLHPQCWERHGLKSWIAAAARRLNRFKLAIALANKLARIAWGVLHGGRSFEVRSMKPAAQCL

SEQ ID NO: 403394 - protein, 411 aa, unidentified
MEAAVITAVGIDVSKSKSTVAVRRPGGEIVLRPFEVCHTNSDLKKLTSTLKKLGGDIRIVMEHTSTYWRPIALTLKEAGFFVSVVNAMLIHDFSDNTIRKLKTDRADALKIANYALTFWDTLPPFNSEEETRLLLKMQSRANERITATATALRNGLIALADQTFAGVNIAFAPNTKNANGHEKWVDFFLRYWHKDCVCQYSMEAFTESYRGWCKRKNYKFRTDTAHKIYLLAQEGVATLPKCESTKMLITQACKSLNAVCEAKQSTQLEMQRLAAMLPEYEVVMQMEGAGPVTGPALMAEIGDVRRFKNKKALVAFAGIDAPPFQSGAFESKSRHVSKRGSPHLRRTIFIISNIILTCSNPENAVYCFMDKKRSEGKHYYVYTVAGSAKFLRIYYARVTEFLRSQPSPDVC

SEQ ID NO: 403395 - protein, 402 aa, unidentified
MNAVGIDVSKGKSMVAIMRPFGEVVASPFEVTHTDSELSELAKTLRSLHGETKVVMEYTGSYYLPIAYALHEAGLFVSAVHAKLIHDYGNNTIRKVKTDKADSVKIANYGISHWMELSRYWPEEDVRLMLKVYSRQYAKYIKMKTMLVNNFIALTDSTFPGVNMLFSSPPRKSDGHEKWMDFAFKFWHCECVCGVSEKVFTERYRKWCKRAGYNFNEDKAFDIYVSACGHICVVPMNDSTKQLVMLSINQINAVAESIAVVAREMKRLAELLPEYPVVSQFYGVGDILGPQIMAEIGDVIRFRSKGALVCFAGLEPPEYQSGKFESTERSISKTGSPHLRRVLFQVMDCILKRSPQGDPIYQFLDRKRAEGKHYYSYMTAGCAKFLRIYYARVNEYLNKTNL

SEQ ID NO: 403396 - protein, 343 aa, unidentified
MQIHSVGIDLGKTTFHLVALSGSGKVLLRKKFTQRQLITFTANMQCSLIGMEACAGAHFLSRTLREQGHDVKLIPAQFVRPFVKSNKNDFLDAEAIAEAVDRQNMRFVPIKTDDQLDLQAIHRVRDRLIARRTSVINQLRAFLLERGMTFAKTPFKLRVAMPDILENADANLTPRMRNLVSLLWSEWKDLEQQIVGMNEEIEQIASSDPACQRLRQIPGIGPLVATAIVAAIGNGAAFHKGREFSSWLGLVPRQHSTGGKARLFGISKRGNRYLRKLLVHGARSAVLRVKRERSPFGPWLDTLETRAPINVVVTAAANKLARIAWAVLSSGQDYRAPVNSMAA

SEQ ID NO: 403397 - protein, 355 aa, unidentified
MAADEIAVIGGIDTHTDVHQVAVIDGIGRHLATEQFETGPDGYRGLLDWLRSHGEVLAVGIEGTGAYGAEIARFLTASDITVVEVDRPDRKARRDNGKSDAVDAYAAATAVLSGRAGGTPKARNGIVEAIRALRVVRRSAVKARTQTINQIRTLIVTAPSEVREKLRGLSARELVDTLARSRPAGELHDPALAVRVALRRLARRHQALDEEIKEADKEIGPLVAKAAPRLIALPGVGPETAGQLLATAGDNPDRLRSEAAFAHLCGVAPVPASSGRTNRHRLNRGGDRQANNALHTVVLVRMKYDQRTKDYVARRTAEGMTKKDIVRCLKRFVAREIYRHLPHVIHHPNPLPQTA

SEQ ID NO: 403398 - protein, 346 aa, unidentified
MFTRDAISIAVLNSSGKLVMESIIETKAITILEFVHGLRGSLYLTFEEGTWAAWLYDLLKPHVTKLVVCDPRRNDYLKQGSKSDRIDARKRAELLRSNLLRPVYHGEHGVRPLKELARSYLTITKDQARVMTRVKAVYRSWAIPCAGKQVYGQRHRLEWLGKIQEAGVRRRAEFYYVQLDALRSLRLVVRRELLLESRKHGASKLLSQIPSIGPIRAALLIALLQTPDRFRTKRQLWAYSGLAIETHDSAENQYVNGQLQRSRKQASIRGLNQNHNHDLKNLFKSASAVAAAKAGPFQKFYDAQIGKGIKPEMARLTLARKIAAIILIVWKKGVSFDARYLNPQTA

SEQ ID NO: 403399 - protein, 461 aa, unidentified
MRIIGLDLALTAEHKALIADAQGQPLAPILRLRTTARDLTRLFQRAREGTTADEPVLLVMEPTGMAWFPVSVFAQRYQVTAHLVNSQQVADLRRYYKKHAKSDRIDVRVLVKLPVVSPEKLYPLILPNADLFACQRGCKELDHLMTLSTAIQNRIQAIDGFAWPGLDAVLSEPFSPLARWFREHWYPPHQVIAAGAPALEQAWQLESAARTITAPEAWATALVRLAQHTLDLYGTDSPYLDYAYLQAEVTREQAFLAVVEAHHHTLQLQTVRPLYRQVHPSRHLETLKGVGQDGAAVYLSFIADPNRFADHSHFRSWTGMIPDSKQSGEREAKGLHISQAGPDLIKKFAYLGAETARQWDPQIAAIYYDQMVKHGKHHNQAICACATHLLDRIWTILKEDRPYELRDVDGTPVTVEQARAIIAERYPVPKEVRQRNNQCTRRARVERRVERKEERESRASQ

SEQ ID NO: 403400 - protein, 341 aa, unidentified
MTCTTVGVDIAKNVFQVHYIDAETGEIVNKPIRRAKFLEHFVNRAPCLIGMEACSGAHHWARQLTKMGHQVKLMPAAFVKAFNIRNKNDAADARAIWLAVQQPSKPIAVKTEMQQAMLALHRTREQLVKSRTMQINSLRGLLTEYGEVMGKGRAALDKAIPDVLARVSERLPVALIDTLREQWNGLTKLDDQIAGIERRMREWVKEDRAVKAISDIPGVGILTATAAVSMMGDAKVFRSGREFAAWAGLVPKQTGSGGKVNLHGISKRGDTYLRTLLIHGARSVLTHAKEPSPWVEQISKRRPANVVTVALANKMARTIWAVLAHDRPYQSGYLSAKPPQR

SEQ ID NO: 403401 - protein, 394 aa, unidentified
MKLVGIDVGKNSHHFCVMDKETGEFNVTPSSFPNNKEGFDFLINSLKPYSKKSILIGMEDTGHYHVALLKFLLSNGYTVALINPKTTDLTRKMEGGITKNDKLDTITICDVLDTPERKKQYRITKVDRFDLYEQRQLTRHHHNLKEELNVYCNRLQKSIDLVFPEFNTLFSSKYGIVYMNLLKTFGSAEAIASTDIRTIRKFFEIKGKGNRISLTPEKLKECAKNSIGISSEVETIQIKHLVSQITLIKEQIAEIDKKIEEFSITNNSPILSIPGISHFSGTSILAELGDIGNYSKPSQIIKFAGVAPYHYESSQYNAQHTAITKKGSKYLRKTLYQIILTVINNNPVFKKYYLLKISQGKGHRCAQGHCIRKLLRIIYHLLETGQSFDPALLR

SEQ ID NO: 403402 - protein, 353 aa, unidentified
MSSLTDLREVVDVVIGVDTHVHTHAAAIVEARTGGVLDEITVEATADGYAELVKFADEHAALRAWAIEGTGGHGAGLTRHLERGEEVVIELDRPERAKRRHGAKSDPLDAIRAAREALSRPRLGGPRAGGDRQALSVLLAARRSAVNAATDAERQLFSLVIAAPEQIRARFRGQKLPAMLKTAAGLRVHPSWDVETTTTVTVLRSLARRARALAEEAAEHKKALRIIVRSWRPDLLEQHGIGPIVAATVLCAWSHPGRIHSEAAFAMLAGVAPIPATSGQVTNRHRLNRYGDRQLNRALHTIALSRTRYDETTRRYVARRTAQGKTTREIRRCLKRYIARDLYRLLEHRPIMA

SEQ ID NO: 403403 - protein, 422 aa, unidentified
MLGIGIDWAEEFHDVALGTVEKGVIEQFRIEHGPAGVRALVERALRLEPDPAEIRVVLETRHGLLVEALLDAGFTVVPVNPDLVARRRGPARKKDDAEDARICCLLALDRHAGLKALVPHGELGGELRAIARDDERAARDQRRLLNRLRADLQTTYPAALALAGADLGAPTVLRLLERWPTQPELAQASRAELVAFARSGRHGWPEKFADRVAAALAAPALPTRDYLVRAKAAGIRLAAVQLLALHEARRGWEQRMAELLLGGRRTGRDHTVTEPDPGNAFPGGVIYLSFPGLGDRLAARVAGEIGEHIDQYDCPNALQCYAGQAPVTRRSGKSDFVVARRLAHNRYLGAAVHQWAFCSLQQSGWAREFYDQKIASGKSHHAALRALGNRWLEILWHCLTKGVLYNEATHVANRNRALARAA

SEQ ID NO: 403404 - protein, 367 aa, unidentified
MIYCGIDWAENAHDVALVDDSGQLLAKRHITDDAVGYKILLDLLGEYGDSEDKPIPVAIETSRGLLVAVLRTGTRKVFAINPMSAARYRDRHSVSRKKSDPGDALVLANILRTDMHAHRPLPQDSDVARAIAVLARAQQDATWNRQQIANQLRSLPREYYPSVLEAFAKWANGLCRPEARELLKAAPTPARAARLTRTQLQAALKRAGRKRGIEEEADRLRDVFRAEWVHQPPLVEDALGKQMLALLIQLEAACTAADDLAKAVEEEFPRHPDAEILVSFPGLGVQLGTRVLAEIGDDRTRFADARGLKAYAGSSPITRASGKKSAITRRWVKNDRLNHAGYLWAFSALRGSPGAMTHYRRRRGQGD

SEQ ID NO: 403405 - protein, 361 aa, unidentified
MNGTMTWVGLDVHARSTHAAAIDSLSGELHRARFGAGTEEVVEWLGDLDAPVRAAYEAGPTGFGLMRAASSAGIDIQVVAPSKTPRAPGDRVKTDRKDAELLARLLLAGQLRAVAVPPEWLEAIRHLARTREQVRHDLMRARHRVSKLLLLHGRVYPGKTAWNQAHQRWLAQQTFEHEATELAFIDLLAAVDGLTARRDALDERLSRLAQDERLWPTVARLRAFRGIDTLTALMLHLELGGDWRRFASPRKLSSWLGLTPSLAQSGESESQGAITKTGSGVARRLLVESAWHYARAPRIGATLANRQAGQPDHVLQIAWRAQHRLHRVGKRLRERGKPGNVATVAVARELAGFLWAAATAP

SEQ ID NO: 403406 - protein, 345 aa, unidentified
MQTMYYIGLDVHKRTISYCVKDGSGAIHAEGAIPATRFDLDRWMKTLPQPWTAAMEATVFTGWIYDHLQPHAAALKVAHPLMLRAIAAAKKKNDRIDASKICDCLRCDFLPECYMASTAIRERRRTLRYRNLLVRQLVQMKNKISGLLMEAGVSYNKQRLHRAGYFRELLATNPGIDEGLCSLLRLCRETVVRLQKTESALVRSLERDSLLMDRVERLMTVPAVGPITALTWALEVGDAQRFSSIKKAISYCGLCGAENSSANTVQRTPLSKQRNKHLQTTLIEAAKMAPRYSPNLAMLYDKEKQKGNANRATLAVARKLVAYLMAVDRGQRNFQVAETSNCIAA

SEQ ID NO: 403407 - protein, 363 aa, unidentified
MADSTTKTVGVDLAKQVFAICETNHSGHVIRRLELRRDAFCQYLSQLPAASVVAMEACSGAHHWARLCQRNDLVPKIIAAQFVTPFRKSARNKNDRNDAEAIATAARQGNMRFVAVKDVDQQARLCWHRVREGYKVESLAIANRLRGLLAEFGLAIARSDSALQRALADDLLRIQLPDTLLPLLDDLYAHWQQVKQRITAIDRRIAAHAKVDTRSVRAQQLIGVGPLTADALVASIGNGHEFANGRQLAAWLGLTPTQHSSGGKARLGGISCRGDNYLRTLLIQGARSCLQQAKLANPQTATAEQIWITSLASRLPFGKVLVAIANKHARQLWAMLRRGEDYDSEAWLQHPMVQRSRKKAIAA

SEQ ID NO: 403408 - protein, 315 aa, unidentified
MVEQVVVGIDVSKAKLDVALLPGGEQFTVSNDRHGIGELLRRVRPLAPSRVVLEATGKLEQLAVSELAAAGLPVVVINPAQVRHYAKARGKWAKTDPIDARLIAEFARDLEPELRPLPDAQTQALAALCQRRNQLLEMEQMEKSRLQRAPRANQKSIKAMLRFVRRQVEQVEHQIEHSIRQSPLWQAKRELLESMPAIGKVNSSTLLARLPELGQFTRQKICALVGVAPYNDDSGQWHGRRHIAGGRAGVRQVLYMATLSAVRCNPALRDYYQRLLGRGVEPKAALIAVLRKMLTILNAMVRDNTPWRPPCPTPT

SEQ ID NO: 403409 - protein, 342 aa, unidentified
MDYYAGIDVSLEYSSVCVVDVTGKIAREGKVASEPEALVTWLRCLGLRLERIGLEAGPLSQWLYMAMKKAGLAMELLETRHVRDALKAMPVKSDRNDARGIAQLMRLGWFRPVHCKSIGAQETRAVLTARKLIQSKLQDVENSLRGILRGFGVKVGQTTQQRFAGRIRALVAGHSSLETIAEALLSVHAVLLREFKAFEKQVRLIARGDAKARLLMSTPAVGPIVALSYASAIDDPARFKSSKRLGPHFGLTPKKYQSGQTDVTGRISKIGDASVRTALYEAAHIMLIKPIKGCSQLKSWAMRIARRSGMKKAKVALARKLAVILHRMLVSGTPFNAAAAAA

SEQ ID NO: 403410 - protein, 331 aa, unidentified
MEKNLFIGIDVSKLTLDATALFPDNGHCHSQFKNTKAGFGQLARWAAKLCPGPDHGLILGFEDTGVYSVGLGRFLSEKGLRFVSENAYRIRRSMGIVRGKDDQADPLMIARYLKRNLDELTFGQAAPCLLLELGQLSSQRERLLKEKSAHKTRIKELKVLEGCLDMRFLLKVEKEMVALLDKKLKEVQAEINRRIAERQELREKKELLCTVPGVGEQTANQMLVLTRGFTRFPCWRKFSCYAGLAPFRYSSGTSVKGRTKVSKIANKKIKALLTMGALTSIKAGNEYRKYYERKTAEGKHPMAVLNAIKNKIVSRMFAVIQRNTPYVCLQV

SEQ ID NO: 403411 - protein, 401 aa, unidentified
MRFFVGIDWATQAHAVCVLDDTGHIHWQDSVRHTAEGLAELLGHLRRFGRRGPVRIALERPSGLLVDTLLAAGFEVTPVHPNALKASRPRYSAAGGKSDPGDAFILADVLRTDGHRFQPLRPPSDDTRALRALVRGRDDLVAQRVALANQLRALLERFWPGAAAIFADVDSPIALACLTRYPTPQSAAHLGEKRLARFLRQHAYCGRRPVTDLLARLRQAPPSQVGEAEAEASAEVVRALVAVLSPLLAHLQQLSAAIDAALPQHPDGPLVQSLPRSGTVNAAQILAELGDDRARFASDEQLAAEAGLAPVTHASGKHRAVAFRWACNKRLRRALTTFADNSRHASRWAALVYQRARARGCRHQHAVRILARAWVRILWRCWQDRAPYDVTRHRAAQAIAA

SEQ ID NO: 403412 - protein, 391 aa, unidentified
MDRQRTVAGLDVHKDSIYLCVMGHDEAIIFQKTYGTLTPGLRQMCADMVAHGVTEAAMESTATYWVPVWNALCDSMSLKLVNPYFIKQLPGRKSDVKDAQWIAECLLKNLIKGSFVPDGIVQDMRKYNRRIFDLNDDMVYNTNKLDAALQRCGFRLSNYVTKVKGKSYRSCIAAIINGTTDQAELVKLVHGKTVNKHGRDVIMAAVTADFHQADIDLIRQYKEMIDIIERQIKDCQSALTALCRKHFPTQYERLQTIPGVKERAATAIIAETGADMSHFQKSTNLVGWCGLRPRNDESNRKIKSNKITHGNKFLRNILIEIAWTASRTRNCFFSNFSYVQCTVRRKTKMKVQVAPQPKAERRCKTLNISDIRCFLHLRGKAKRSIHTNPAG

SEQ ID NO: 403413 - protein, 389 aa, unidentified
MFFLGIDIGKNSHVASLIDDKKKVIFKAFSFSNSTEGASSLIKKLEPFCDSLDIAMEATGHYWINLFSFLLQKNFSVHLINPIQTDGWRNSTEIRKRKNDTIDSILIADLLRYGDFIESSLSNEDYLSLKNLTRFRSYLISSTGDLKRKTIALLDQVFPEYEKCFSNVFGKTSKEILLSFTTPQEFENISSSKLSKALENITMKKFAKKKIEELSEKTKTTIGVKFCLDSFSLQIKMLIEQISFIETQVESIEEEISTIMTKLNSPITTIPGIGPVIGTTILGELGDISRFSNASKIVAYAGLDSVVSQSGNYEAKSMSISKRGSSYLRKVLFQAALIAEFCDPVFSDYYQKKIAQGKYHLVATNAVARKLCYTIFAVLTKNEAYKIQQ

SEQ ID NO: 403414 - protein, 382 aa, unidentified
MAGDPTRAGIRTLFAAIELSKKNWLVALWSPAVDRVSLHRLPAGDAKALLACLERAKASAEEALGQEVEIMSCFEAGYDGFWLHRVLTSAGITNLVVDPASIQVDRRARRVKTDRIDAQALLRFLMAHHRGELRVWSVVRVPTPDEEDAKRTHRERQNLIKERGRHVNRIKGLCAQQGIFDYEPMRSDRRERLGCLITGDGRAMPPRLLAELRRELDRLEFVIGQIKAVEAERDAVEPCSGDPTPGPQADRLARLRRIVSIGPETAAVLGCEVLYRRFENRRQLAAYVGLAPSPHMSGGLRVEQGLSKAGNPRARTALVELAWLWLRYQPGSALSEWFVRRVGKQRGRIRRIMVVALARKLLVALWRYLETGLVPSGAVLRR

SEQ ID NO: 403415 - protein, 344 aa, unidentified
MHHFAIDLGSMESQICVRTPDGEIALERKVATRSLKSYLEKQPPSRVVVETCAEAFRVADMALELGHEVRVVPATLVRSLGVGARRIKTDRRDAQVLSEVSCRIDLPSVHVPTHVARQRRSMCGMRDELVASRTALINCVRGWARTQLLKIASGVVATFSKRVREVALKLPEGLPEYVERLLQTIETLTKQIVAADAELQKIADEDALCQRLQTVPGVGPVTSIRFAAALDDCSRFASAHAVQSYLGLTPGENSSSQRQQRTGITKAGPAAVRRVLVQAAWTLRRTRPHDPICLWALEIEKRRGRFVATVAVARKLAGVLYALWRDGSKYEPTHQSKRPNAPST

SEQ ID NO: 403416 - protein, 315 aa, unidentified
MFIGIDVSKAVLDGAVHPSSEGWQAANDPGEIEALLHRLQALSPELSVVEATGGYENAGVAALGAEGVPLVVVNPRQVRDFAKATGKLAKTDRIDARILALFAERVRPEVRELKSEAAQALEALLARRRQILEMTQAERNRLEHARGAVRKDLLEPIRYLEKRLGKVDKVDKELEERVQQSPLWKAKEELLRSVPGVGPVVSRTLIAELPELGRLTHKEIASLVGVAPFSRDSGTLRGKRIVWGGRTSVRAALYMAAVVGVRRNAALKRFYERLRSTGKPAKVARVACMRKLLTILNSMVRNCTRWNPDLVPQCA

SEQ ID NO: 403417 - protein, 417 aa, unidentified
MNTMKLQPFAAFVGIDWADTKHDVCIQSADSLRREFAVIPHKVEEIDEWAQSLHRRFPGPIAIAVELSKGPIVYALQKYDYFVIFPINPSTLAKYREAFQPSRAKDDPTDAELALDLILRHPERFEPLQPQSVEMRESAELVEQRRRLVSDRVRLTNRLRSTLKQYYPQTLEWFNRIDTKLFCGFIERWPTLMQVKRARTTTLTTFFRAGNTRNPALLETRLASIRSSQHLTLDEAVIAPNKLRVLMLVGMLRVILDAIKSYDQTIAELASEHDDYYLFSSLPGAGPSLAPRLLVAFGEQRNRFKSAAELQKYSGIAPVTERSGTKHWVHWRWRCPNFVRQTFVEWAAQTINKSYWAGEYYYQQRKKGSAHQSALRALAFKWIRILYRCWQTRTQYDEAKYLKALQRRGSPLVAKAA

SEQ ID NO: 403418 - protein, 405 aa, unidentified
MIFAGVDWAETHHDVHLCDEQGRKLASGRLAEGVEGIARFHELAAAYAGEPGEVVIGIETDRGLFVSALAAAGYLVFAVNPMSVARYRDRHSVSGAKSDPGDAKVLAGLVRTDRHNHRPVAADSDQVLAVRALARGHQSMIWARRRQANQLRSALREFYPAALAAFDDLTSGDAIAVLRAAPQPAQGAALSRTQITAALRRGGRTRRLPERAAAVQAALRSPQLPPAPALAGAMGATVAAMAAVIGEMNTQITVLEQELSAGFEAHPDAQVVRSLPGPGIILGARVLGEFGDAPDRYPDAKSRKNYAGTSPITRASGARRAVLARHARNKRLADAIYLWAFASLTASPGARACYDARRAAGDTHHQALRTLGNRLVGILHGCLATRTPYSEHTAWAHRTHLTPAA

SEQ ID NO: 403419 - protein, 347 aa, unidentified
MKYYAGIDVSLNSSNVCVVDASGKIVREGKVASEPVTLITWLGSLGVNLERIGLEAGPLSQWLYGALREAGLAVELLETRHVKTALSTMPVKTDRNDARGIAQLMRLGWFRPVHCKSMAAQEVRALLTARKLVQSKLYDIEMSLRGILRGFGLKVGPTTSPSFAARINHLVDGQTSLEVVAAALLSLHAVALREFKSLEKSVRQISRADARVRLLMSTPGVGPLVALTYVAAIDDPARFPSSKSVGAHFGLTPKKYQSGETDVSGRISKMGDGSVRTALYEAAHVILTRPIKGGALKSWAMKLARRAGMMKAKVALARKLAVVLHRMWVDAIKFDADKASGCVRVAA

SEQ ID NO: 403420 - protein, 440 aa, unidentified
MTVLERNEQQPVTVGIDAAVVADHQIAIRGPGIREDFRASPTLAGMARLTERLAPHAGSLVVVEPTAGTWLPLTMAVTDAGCRIGFVQNRDSAQLRKAITGRTKTDVVDADMLARCETVLNIEDAPIPPAGQIGLRRALSRRHRMTVDAHRAECRLWALAIWAMPDVWRSAGGHAVAQPLLGRWPDLRAIGRARLASITEIVAAHSRDKNPERRAERIRTAAQGWHEFWLGRLDLDDLAWEIAEMCDDIDIADARQREATTHALDRWKRYWPDDVLTSVLGVGPICAATTRAWWGDGQHLRSAKAAGAFIGLNPSNWESGLSVSPSRSITKEGPAVMRLAYYQAANVARRRDPQLAAHYRKLMCERGHTHIQANCAVARKLAARTWAVLQTGQPYEPRDLDGNPINEATAVRLALELEVPADARRRNRATNPRRGRLDQH

SEQ ID NO: 403421 - protein, 454 aa, unidentified
MGQTTSKKGGRDQRLSTVNANAAGIDVGSQFHVVAVPGDRDEEAVRTFQSFTGDLHRLAEWLVACQISTVAMESTGVYWIPLYEVLAARGIAVVVANARDVKHVPGRKTDVNDAQWLQQLHAYGLLRGSFHPPADIATLRAYLRQRERLLDYAAAHIQHMQKALVQMNLQLHHVVADITGKTGMRIIRAILDGVRDPLTLASYRDARCKAAAETIAQALAGNYRPEHLFALRQAVALYDAYQHHVAECDQHLEAVLARLCAPEPPAHPLPAPRHTTRQPNAPSFDVRAALYAMLGVDLTQIHGIGPALALKLVSECGTDLSKWPTAKHFTSWLCLAPGSKISGGKVLSTRTRRSKNRTSALLRLAAVNVGKTDSALGAFYRRLAMRVGKAKAVTATARKLAILFYNTLRFGMDYSDPGASDYEARHRVRVLHNLSRRAKQLGYTLEPASVAGVS

SEQ ID NO: 403422 - protein, 339 aa, unidentified
MMNFSNHLLNRKSKVMKNIIIGIDISSKTLDICIKNEAVSYFSIENKVPVIKRFFKKYSEENVIIAMENTGRYNWNLFEVLEKFDFKVYVISALHIKKSIGLVRGKNDKIDALRICNFIEKNYQENRQWKPSSCSVKKIKILLTERASRIKIKKQLTVQQHDYKLMKNIGLDKQLKDLNIKLLRDIDAQIKIIENDIENIIQNQESLSQQQKLIKSVPGVGQVLSWTLLSKTEGFTVITDPRKMACYTGVVPFDFQSGTSLKRRPGVSMLADKGLKTLLHLAAMSAIRSDNDLRKYYIRKVAEGKNKMSVLNAVRNKIIHRVFAVIKNQIPYQKDLVLS

SEQ ID NO: 403423 - protein, 345 aa, unidentified
MNATTVAVDLAKNTFELAVADAGWKLMDKARLTRSQFARWFDNRSVRLVVMEACGSAHYWARTLRARGIEVRLLPAQYVRAYVKRNKTDAADAAALLEAARASDIKPVTVKSVEQQALQALHRMRSAWMASRTGRINMLRGFCREFGLEVPVGAVRGLAQMARFIADDHSGIPAILRTPMRLVLEEVRLMEARIESLERELAALARQSAACHALASVPGIGLLTSTAMVAAVGDPRSFDSGRRYASFFGLTPREYSSGTSRYLGRISKRGNRYIRMLLTHGARSVLRAATVARRMGRSVDRLRTWALAVQERTNHNKATCALANKLARIAWAVWVKHEKYQATAA

SEQ ID NO: 403424 - protein, 357 aa, unidentified
MEDSGNLNFNNSNFFIGLDVHKKDWCVTIRSNGMELKKFSMNPSSDELWRYLIKNYPGGNYLAAYEAGFCGFTHCRRMNELGIKCIVVNASDIPTGQFERVQKTDPRDSRKIARELENNSLKSIYLPARDFEELRSLVRLRHKLTKHQTMIKNRIKGTLYYYGINIPLRFQTNSRWSMGFIQWLKEIKLTTEAGNFTLQENIRTLIEVRTHIKDILLKIREELKKEEHAKYVEALISVPGIAFLSAAVIYTEIMDIKRFGNFDELANYAGLIPALHSSGETEYTKGITKRRNGYLRGALTECAWMAVRKDPALTLKFSELTKRMNKQKAIIRIAKKLLSRIRYVWFNKCEYVYSLVS

SEQ ID NO: 403425 - protein, 330 aa, unidentified
MDIAKNVFHARGQGVFSKRLSRAKLLGFFAAQPPCLVALEACGGAHHWARELMPLGHEVRLIPLAYVKPFVKRHKNDAVDAEAICEAAQRPTMRFVAVKSEEQQASALLFRTRDLLVRQRAQLINALTGHLTEYGWVAPKGPSPMAMLGDLLEDEMGSLLPPAAVAMFRVMLDLLADLDDRIAELDREIARRAREDETARRLMTIPGIGPITATALIALAPVAETFAKGRDFAAWLGLAPLQRSTGGKQKLGAISKMGERTLRRLLIIGSSAVVHQASRRGAPKGSWLEQMLARKPRMLVTVALANKMARIVWALLAKGGSYRALAVATA

SEQ ID NO: 403426 - protein, 343 aa, unidentified
MELYVGLDVSLKETSICVVDGDGKIFFEGTVISEPKAIAALIRAKAAGAVRIGLETGPTTTWLWHELRALGLPVICIDARHAKAALSLQINKSDRNDAFGLARIMQAGWYKEVQVKSIECHEIRAGLNSRALLVKIKRDLSNQIRGVLKNLGLIVGKAYGNVFARRVEELVADHPHLRQAVGPLLSIRERVIREIADFDRQLLAKARASEACRRSMTVPGIGPITALAFLSAIDEPARFARSRSVGAYLGLTPRRHASGEMDWTGRISKCGDRMVRTYLFEAAGVLLTRVPQWCALKAWGHRLWKRIGFKKAKIAVARKLAVILHRMWRDGTDFQWSTKEATA

SEQ ID NO: 403427 - protein, 451 aa, unidentified
MTATNSRRAGSAAQITVVHHHAAAIDIGAQFHVVAVGPERDPQPVRSFRSFTKELHDLANWLKQVGITTVAMESTGVYWIPAFEILEAHGFEVVLVNARDAKNVPGRKTDVSDAQWLQKLHAYGLLRASFRPRHDVATLRSYLRQRERLLEYAAAHIQHMQKALMQMNLQLHHVVKDVTGATGMKIIRAIVAGERNAGELARHRDVRCKASIETIRDALIGNYKAEHVFELTQALSLYDFYQTQVAQCDERIERTLRQLQTGAEPPAAPLPAARYRTRQPNGFSFDVRAALYAMLGVDLTQIHGLGPYVALKLVAECGNDMSRWPTAKHFTSWLCLAPGNKISGGKILSSKTRRSSSKAAAALRLAAVAIGKTDTALGGFYRRLSARIGNAKAVTATARKIAVLFYNTLRYGIEYVDPGAAYYEERYRQRVLNNLTRRAESLGYVLQAKPA

SEQ ID NO: 403428 - protein, 413 aa, unidentified
MEVLYPRCAGLDVHKATVVAAVRLAAGGKVAREVRTFATTTAGLLELAEWLAESGCTHVVMEATGVYWKPVWHILAEGGFALVLANAAQVRNVPGRKTDVNDAAWLAELLAHGLVRASFVPDGPTAELRSLLRTRKQLAREKASHTLRLQKALEDANVKLDGVVTDLLGKSGRAMLEALVAGESDPGRLAALAHPRLAATPERLREALRGRVTRHRRFLLRLHLDQVDALDAAIERVDREVEEHLAPFRAAVELLASIPGVGALAARVIVAEIGLDMGRFPTAGHLVSWAGLCPRSDESAGKRRSTRLRKGAPWLKTTLVQCAWAASRKKASYLQAQYHRLRARRGPRKAACAVAASILTAAYHMLKDGTAYADLGPDHFDRRSREVQARRLVRRLADLGYAVELAPLEPAPA

SEQ ID NO: 403429 - protein, 306 aa, unidentified
MPEAGRFVGIDVAKAELEVVERPSGARWTVPNDVAGWGQLREQLAAARPTLVVLEATAGYELGVVASLAAAGLPVVVLNPRQVRDFAKAIGRLAKTDALDAAVLAHFADVVRPPVRPLTEPVTEALEAWLTRRRQLVDMLTAEEQRRARAPQAIQRQIDAHVQWLRRQLEVVEKDLTDTLRASPVWREKDELLRSVPGVGPIMAELGRLNRKQIAALVGVAPINRDSGTHRGRRAIWGGRAHVRATLYMATLTAIRCNPVIRTFFGRLVAAGKLKKVALTACMRKLLTILNAMMAARTAWKPGIVA

SEQ ID NO: 403430 - protein, 341 aa, unidentified
MKKFIRIAVDLGKTYFQVHCLESEGGRSISRKLKRSKMLEFFLQVERCRVGMEACGSAHYWARELVAMGHEVVLIPPAYIKPYVKRGKNDAVDAAAICEAMCRPDMRFVPIKSADQQAVLMLHKTREMFVKQRTMSVNALRGHLAEFGIVVAKGIGRVDELLALAQSDATLPQVAKSAVAGLAQHLEGLDQSIEAVEDEIARAHGQNPTSCLLDEIPGIGTLIASVIAASVPDPGVFKSGRDFAASLGLTPRQNSSGGKEKLGAITKQGNRYIRKMLVTGSTSVLRVAGKRKGALADWINALRARKPERVVAVALANKLARICWAIMTTGESFRVDTYVKA

SEQ ID NO: 403431 - protein, 384 aa, unidentified
MYKHNILFIGLDTHKVSTEVAHVEDQRGAKPVHYGKINTTKAAITKLARQYQSKYPHATLHFVYEAGPCGYWIYRLLTSLGHCCYVVAPSLIPKKPGERVKTDKRDALKLAKLLKDEELTPIYVPESEDEAIRDLSRARETAMADLKDAKYQLKALFLRNNITCKVNDNWSLQHLRWLTELILPHPSQQIVLQEMIQTITERIGREKRLANELFHQVKQWRFYPVVKALQAVRGIRLLIATGIVAELGDLRRFDHPRKLMAYLGLVPSEHSSSDKRKLGGITKCGNGRARRLLVQGAHTYKHKANISTELQKRQEGLPKEITDIAWQAQLRLCRRYSRLMSRGKHRNVVVIAIAREMAAYIWAIAREVVISSVNPRLRISRVPA

SEQ ID NO: 403432 - protein, 348 aa, unidentified
MRNQPRGAAVYGIDLGKTWFHVVGLDASGRPIHRLKLGRATIFQFFANATPALIGMEACPGSQWLARKLQALGHTVRIIPAQFVRPFVKSNKNDTVDAEAIAEAVGRPTMRFVQVKETEQVDLQALHRARDLAVNTRTRLICQIRAFCLEYGVAIRTGVGLFRIDLPKALADEHNDLTPAMRHLVHDLWDQLQQLEERIRATTREIESIAHRSDVARRLTTVPGIGPISATAIVAAVGDGKQFRRARDLSAWLGLVPAQYSTGGKAHLLGISKRGNAYVRRLLIHGARSCLLHLDRSRDRLGAWLTDLQRRMPVNKVVVALANKLARVAWVILTHPGALYQRRDPQFA

SEQ ID NO: 403433 - protein, 431 aa, unidentified
MKYKQSKKQNQRITQITDATLVVGADIAKETHVARGIDFRGIELGKECVFSNNRPGLIKLVQWMKELQRQHAKADVIFGIEPTGHYWFPLAEFLQHEGIKVVVVNPHHVNKSKELEDNSPTKNDYKDAKVIADLIRNGKYTEPKFPKSVYADLRILMNLREKVMGNFGQVQRRIQNWLDRFFPEYQQVFKDWEGKASFITLSEFPTPQEIVSLGAYTILKRWKQDVKRAVGMKRAEKLVQTAKNSIGLTEGLTAAKMELKALLEQYDLFSRQLEDIMQQVELLLEQVPGSEEMLTVPGVGVVTLAGFLAEVGDLRGYDHSQQIIRLAGFNLKENSSGKKKGKSTITKRGRSRLRALLFRAVMPMVAKNAEFKVLHHYYTKRANNPLKKKQSIVALCGKLIRVLFTLGTKQIGYNPIDVLGPVRQSQLQMAA

SEQ ID NO: 403434 - protein, 405 aa, unidentified
MPQQLDDLSRSLTPLEQDSTIVAVIEMSQASWLVAGIVPGIERHPLKKLEPSEVELLRLLMRWRAEATQNGRTITRIAVAFEAGRDGFWLARWLRARGIEAYVIHPASVAVSREHRRAKTDRLDTGLLKRVFLGWLRGEPDHCHMVAIPTLAEEDAKRPNREREGLVRERTRLVNRMKSCLVRFGVRTFKPTLRNAPDRLATLRTPEGVPLPPNTLLELRRDMARLRFVMDQIKEVEEARAQGLNQAPPDKTHVMVRLLARVIGIGLETADMLVQEVLARTWRDRRAVARYAGLTGSPDESGSRRREKGLAKAGNARVRRGMIQLAWRFLLFQKESALAQWYRARTADARGSTRKTLIVALARKLLIALWRMVTTGEVPAGVVLRAAGRAPRGGVGVPVLGRARG

SEQ ID NO: 403435 - protein, 448 aa, unidentified
MIEGNEEEGYSPFLRLFIPTTNKEETTMNRVRAKRVRGVGEGTLIVAVDIGAANNTGYCTTLDGRSTKSFRFDNTKEGFEKFWWMAVASKNRFGCDEVLVGYESTGPYAEPLVHYLAKKQVKIVQVNPMHTKKMKEVNDNSPLKTDNKDPRVIADIIRLGRALTIVVPEGDAASLRRLNNARERHVGEQTALLNQLQQLVFLIFPEFKTVLKNMKSKTAQYILKRYTTAERIGTLSKEALGEEMRKQSMGKFGIKEAESLIGLARETVGIKEGLGGIFLDIRHILMQLEAEGRFLSEIEVKMRATLERIPCSVRLLSIKGLGIVSVVGLIGEVGDFSKFSTQSEIMKLAGLDLYEISSGRRKGQRRISKRGRSLLRKILFYAAIQMIRKNGIMYEYYARLTGRGMERMKALIAVSRKLLRIIHAIVRDNRDYVEQYHASERRVIKMAA

SEQ ID NO: 403436 - protein, 389 aa, unidentified
MEIRAVNNLPSAATHDDAVRCLLAIELSKKSWIVAVNTPVSDKISRHTLKACDGKELLDLCERIRTRVARETKKRVEIVSCYEAGYDGFWLHRLLEAHGIRNYVIDPASLQVDRRARRAKSDGIDVEKLVRSLMAYLRGEPKVWSVVRVPSAAEEDDRRLHRERGRLINERIQHVNRIKGLLAIHGIYNYQPLRRDRTQQLERLRTADGRTLSPRLKAEILRELQRLELVIGMIETIEAERDAIASTKTETEHTSGKKIQDLVKIKSIGPEFATTLVGEVFYRSFDNRKQLASYVGLTPAHFQSGAMCRDQGISKAGNAKARTVMVELAWLWLRHQPDSRLSVWFRERVGKLKGRIRRITIVAVARKLLIALWRYLETGLVPTGAALKV

SEQ ID NO: 403437 - protein, 408 aa, unidentified
MSEVDRVDVFGGVDTHRDVHVAAAVDTAGRVLGSAPFAADKAGYEQLGNWLGSHGQIVRVGVEGTGSYGAGLTRHLLSVGVEVAEVKRPNRQLRRRWGKTDATDAQAAARAALNGQASGTPKSGDGPVEGIRMLSVARRSAIKARTQAINQLHALVVTAADQVKDHLVGLSPKARVKMCAAFRPGTADTTTRYAKQALRLLARRYQNLTSEIKELDTEIRRLCAHANPALLATPGIGPDIAAALLITAGDNPERMATEASFAALCGVSPVQASSGRIVRHRLNRGGNRQANQALWRIATIRTARDQRTIAYVKRRQAEGKTRREIIRCLKRYIAREIYHLLTNPPPTPSGAHLRCLRHNTQTTLAQAATALHSHATRISRLERGLDHNHHLATQYQTWLTTLKPDLQI

SEQ ID NO: 403438 - protein, 457 aa, unidentified
MSNKLRIKKKSKKFKASDLPVELKHVNLDAAGIDVGSDRHMVAVPVGRDEVSVREFGAFTTDLEALADWLEKCGVTTIAMESTGVYWIPLFEILERRGFEVKLVDARKTKNVSGRKSDVLDCQWLQTLHTYGLLTAAFRPADEICVLRGYIRQKEMLVQSSSMHIQHMQKALQQMNLLLHNVVSDITGVTGMTILKAIIAGERDPKVLAGYRNQRCRNSAHTIAKSLVGNYREEHVFALTQAVELYEFYQAKINDCEMAIARFLATQVPQTEDEPPPSQKNIPPRQRIRAGVDLRSRLFKLTGVDLFSIPGLGADTLLTILAEVGFDMSPWKSEKNFASWLALCSGTKISGGKVLDRKSKRSANRAAQAFRLAASSLARSDTALGAFYRRIKARIGAPQAITATAHKIAVTFYSLLKHRTTYVEIGQQAYEQKFKERRFKAMQKQALAMGYQLIPAG

SEQ ID NO: 403439 - protein, 358 aa, unidentified
MLYCTSVGLDVHARSIKAAAFIPETGEMIEVSCAYDPETIIRWIKTMPTPVRCVYESGPTGFDLLRKLRASGIECVIGAVSKMLRPSGDKIWNDKRAATFLARMLAVGNIVEVYVPSEDDEAARDLARAREDVRQELTRAKQHLSKFLLRKGIVYNEGKTAWTKMHRKWLDRLNLPTDTERLVLSEYLMSVEEAERKRDRLDAAIADLAATDRWKELVSRFCLLRGISVLTAFSIAAEICDFQRFKNASAFYSFLGLIPSLNESGESSSRGPITKTGNIHVRKLLIESAWHHKRKYYPASQYYPADIRPNILAAAKKANIRLYDRATYLANRNLNSCKANVAVARELAGFLWALANMG

SEQ ID NO: 403440 - protein, 354 aa, unidentified
MLKYSVGLDVSSADIHACFSVIDSQQKVKVISSKVINNNTKGFEILVTWIEKNRKLKELPLVIGMEATGIYHEECAYYLHDKSYAVSVILPNYAKKFLQASGLKSKNDKIDAKGLAQMFAERSFRLWQPLGKFYYQLRGLTRQQESLQEIKTGIKNQLESANRGAFKNKDVIKQLNETIKFLEKQVVEIEKKILALLKSNNEIKKQVENVLTIKGVGIMTLAILLAETNGFLLFTNTRQLVSFSGYDIVENQSGRHRGKTKISKKGNGHIRRALFFPAFTAVSNKCKPLLDLYNRTFENHKIKMKSYVAVQKKLLVLVYTLWKKNVAFTENYLMENTKEEEQASASLGSLAQAE

SEQ ID NO: 403441 - protein, 315 aa, unidentified
MTTSSGKFVGIDVAKDNLDIAVLGEKKASQVGNDEVGISKLIKKLETLEPELIVVEATGGYQRAVVLGLYEAGLPVAVVNPSRVRQYARASGLLAKTDKLDAFNLAEFGKQMKPRRFEAKSESGRYVSALLVRRRQLEEMLKAEKSRLRTVPAEMRGSVERMIEMLKEEIKRLEKELDQFMKEHAEWQEQEQILTSAKGVGRITATTLLAELPELGKLDRKKIAALVGLAPMNSDSGKKRGYRKTKGGRMEVRNVLYMSTLTATRYNPLIQAQYQQLLKRGKVKKVALTACMRKFLTILNAMMRDRVPFRQTVLA

SEQ ID NO: 403442 - protein, 371 aa, unidentified
MSQPIRCVGLDVSKERISVAVAEPDGSVVEYGDIPNDPGSVRRLVDKLSRDALVKTAYEAGPTGYPLHRQLTGLGIENKVVAPSLIPRRSGDRVKTDQRDAVQLARLLRSGDLTPVWVPDEAHEALRDLVRARDDARTDGLRAKHHLSKFLLRQGVIAPVRVGRAWSAKHQAWLNTLTFRDRAAQITFDDYLACVRAAIERVRRLDAALLECGASSPHAELLRALQAVRGIGFLTAITIVAEAGDLHRFRSATAFMAYVGLVPSEHSSGGSRRRGHITKTGNRLLRHVLGEAAHHARLQPSVSEALRERQRGLPQEVVQISWRCQQRLHHKYRHLGGRIGRQRAIIAVARELAGFLWAIGQELQPVAGAAA

SEQ ID NO: 403443 - protein, 316 aa, unidentified
MDSKEKFIGIDVSKDTLEIAVTPTGERMTFAQTEDGLALMVDFIQSFAPRLVVLEATGGLERAAIGILGAKGLPAVVVNPRQVRDFAKAKGILAKTDKIDAGVIAAFADAIRPEIRPLKTEETQELEALLTRRRQIVEMLTAEKERLYTAPQCTKKAIRAHIQWLQKCRDKLAKDLDGRIQKSPLWRAKDEILQSAKGAGPVLSQTLLAKVPELGSLNRKKIAKLVGVAPLNRDSGKFRGRRSVWGGRAEVRSVLYMATVSAIRSNPVIRAFHDRLIKAGKLPKVAITACMRKLLTILNAMVKNQTPWHLAELKNT

SEQ ID NO: 403444 - protein, 347 aa, unidentified
MKYYKTTTKYNCGIDLHARQMYICVMDREGNILVHKNIKGNDFSFFLQLVAPYIHDLTVVCECCFNWYWLADACCDADIEFVLGHALYMKHIHGGKNKNDKIDSQKLAHLLRSNLIPPSYVYPKERRPVRGLLRQRMSYVWERATLLGHLSMNQTAEGCVPVAKGGHNRDVWQERILSQYTDPLHQLAVECDMDLIRSYDRRIEIIDQKLAELARRNHGRDFSLLKTVPGIGRVLALTILFEIDTIDRFPSVKNFCSYSRLVKGSVASAGKVKGLCGGKMGNAYLRWAFGEAAVLCKRNHPLLTPYAHLLESKHGKFKGNAIMANKLGRAVYFMLQKGTVFDAELIV

SEQ ID NO: 403445 - protein, 355 aa, unidentified
MDNAKYIGMDVHTESISIAVLNSTGKLVMESVIETKALTVIQFVQGLRGDLHVTLEEGTWAAWLYDLLRPHVNQVLVCDPRQNAFLKVGNKSDKIDARKLAELLRANLLRPVYHGEHGVRTLKELSRSYIAISGDLARVMTRLKAVYRSWAIPCVGKQIYAPRCRAEWLGKLSEAGVRRRAEIYYEQFDALRSLRQQVRCELLAESAKHKAWKLLCQIPSIGPIRAAQLIAILQTPHRFRGKRQLWAYGGLAIETHSSADHRYVEGQLRAAKKQVSLRGLNRNHNHELKNIFKGAAIIAATKPGPLQDFYAALVAKGMRPEMARLTLARKIAAIILIVWKKGVSFDAEHLKPQTA

SEQ ID NO: 403446 - protein, 414 aa, unidentified
MEPVYRSLAGIDVHKKMLAVVIRRQSDEHIEYRKRKFGTTRTEIEHLSAWLQSERVSEVVMESTAQYWRPVWYGLEPHFGLHLTHPLKTRAPRGRKWDFRDAQRLGDRWCSGDLEESFIPGAEQRSWRWLTRTRVDLKDKITVVRNQVEGLLEQGGIKLTAVASDVFGVSGWAMLEMIAQGVTDVEVLVGQARGVLRRKEAQLKEALAGRLEPVYRLLLKQYMDQVRLLRRQVEEINQALAEAMKEHLPALHRLSQIPGVDLYAAQELLSEIGPRAAAFASAERFASWVGVCPGNQESAGVCYSHRSAKGNRYLRRLLCQIAWAAVHTKETFFAGLFARLKPRIEGKGAVWAVAHRIAKVIWLVLHKQVDYQEKGPAPPNERTLVRKFKRMLKEFGRLGLDVRALLDQQLPTPA

SEQ ID NO: 403447 - protein, 324 aa, unidentified
MLAALTIPNSVAGVERLLGWLTEHDARDAVIGIENAAGYGRLLCAALAAAGCEILNVPAWRTHRDRHEQGRGKSDPGDAVAIAHVVLRKREQLGPALEPELIRALALLEGLRRQSVYNRTQAIQRLRAIWTQVDPEGEARVIHCQRQRELRKLTRIAFGAGIAEQAAARCIRELAREIERLNARIATLEHELEQLLRECGNPFADLAGAGATVAVALIAHSGDVRRFKDKGAYARFCGVAPIRCGSGQTADHHRFDRGGNRQLNAALHRIAVVQARVDPRAQAFLTRKRAEGKTTREARRALKRHLANVVYRRLHAWAENALPA

SEQ ID NO: 403448 - protein, 299 aa, unidentified
MLADQLDYVIGVDPHRDRHALAIVEVRSGGVLLEASIEADSAGYASALSLADKHAPGRRGFAVEGTGSYGAGLARFLADHGETVFEVGRLQRERRSGGKTDALDAVRAAQSVLGKKRPALPRAKGKREALRALMAARDGAVTAKTAALSQLRDLLVTAPEPLRAELRPLSRARLLARLTATRPDLRQDPELRGTHLALKTVARRIRQLATEERELGHEIEKLTHDLAPQLLAEPGIGPLSAAQTVLSWSHPGRIHSEAAFARLAGSAPIPASSGQTIRYRLDRGGDRQLNRALHQIIVT

SEQ ID NO: 403449 - protein, 349 aa, unidentified
MTTQRLSYVGQSVYVGVDVHKDTYAVTCVCNKQIVKTATAKADPAGLTASLSQWFPGARLYTAYEAGFSAFVLHRALTKAGIMNIVVNPASIAVAANDKVKTDRRDSKKLALDLSDGRLQGIYVPTEDEELARLLPRTRAQIVEHRATIARQIKAKLHQFGLIAPASRRLISNRYWREIDAWPLPPDLRVSLTFLAEQWRFATRQLIEMRRLLREQAKAHPAIEQVYRSVPGIGEVVARTLATELGDMTRFANERALFSYTGLTPSEYSSGPSVRRGHISRQGSSRVRHLLIDTAWRALPRDAVLKEIFDRIAATRGKKRAIVAIARRLTGRIRACFRQGTTYAVGTYA

SEQ ID NO: 403450 - protein, 406 aa, unidentified
MIVTSPKQFTMILKFSVGIDVSSKKLDACISTIDGFQTVKVKSSCSVTNSKSGFTKLDQWLKKWTTKEAIPMSICMESTGVYHENLAYHLSDLGYRISIILPTKAKRYLQSIGLKSKNDKIDAKGLAQMGAEQNLAQWIRPSDAYVTLRSLTRQYQSIQESITAERNKLHAEAHSACCSKAVIKQLKSHILFLEKQKKEMERSIGEVVKKDATLKQKMENVCGVRGLSILSVATVIAETNGFELFENYKQVVSFAGYDVVENQSGTHRGKTRISKKGNPRIRRILHMPSLTAIGSEGTVFKNLYERVFERTGIKMKGIVAVQKKLLLTIYYLWKKNEPYDSNYRYRTSRKDDIQEEEQELSSRHGFCEAEKNSQTKRLATQGKHPVSDHSLLPLDKNESKKLINLG

SEQ ID NO: 403451 - protein, 405 aa, unidentified
MEVVHERCCGLDVHKASLTACVLSSQKREIRSFGTMTDELLRLAEWLRQEGVTHVAMESTGVYWKPVHNILEQGTLELLVVNARHVKAVPGRKTDVKDAEWLADLLRHGLLRASFIPDRAQRELREVRYRRGLIDQRGDVARRIQKVLEGANIKLGDVASDVLGVSGMAMLKALVAGEADPIALAALAQKGLKRKRSQLERALLGSVGAHQRYLLRHQLNQVEFLDRQIADLSQEIEARMRPFEVAIAHIDAVWGLGRRSAEAILAEIGTDMSRFPSEKHISSWARLCPGNDESAGKRRSGWTGKGNRWVKSALVEAAWSAVRNKNTYYAALYHRLSQRRGKKRAIVAVAHSLLVTIYFMLRDGTVFQDLGANYFDRRDREHIARRSVRRLESLGYHVTLTEGAA

SEQ ID NO: 403452 - protein, 407 aa, unidentified
MDKLFVGIDVGSRDNAVYIMMPDGSKHSSFPVQNNLGGAQTISKRVVAALAEHGMTDVIIGMEATSVYGDNLMCFLREDGALARFDRKLHVLNPKQVKKFKDVHPDLPKNDPVDAFVIADNLRFGRIATPVYLDDYRYKALQKLTRARFYAVENLTREKMRFTNYLFMKCSGLAQEKVFSNNYGTTALAVFEVFESPDDIVNMDIESLTAFIAEQGKNRFPNPDEVAKAVQAAARGSYRLPKTVNDTVHQVMSISISSMRAMQAQIKALEKEIARQFENIPNTLISIPGFGPVLSAGIIAEVGDINRFDSHAGLAKYAGLAWNQYQSGIFEGQNSRLIKSGNRYLKYYLYEAAFSIVRCDTEYKQFYDLKYNEVNKYQHKRALALTARKLVRLVFRLLKDNRLYIPA

SEQ ID NO: 403453 - protein, 340 aa, unidentified
MTANKQFFIGIDVSKPWFDASVMVIENHIKQPIITRRFENTKEGIKAFEKRLKTLKVTFDNNTLLVMENTGYYHRLIWSFCSRTSLPIHIGNAAHIKWSFGIARGKNDTIDSIRLCQYACKEADTLKATPPLDSDLLLLKDLITARAKLVLQFNAIKTYIKELKSVSDTAIKMLMEKAHKDAIAGIKKSIKSIEDQIHKIITANQGIYKNYRLLITVPSIGHFTAAYMICCTNNFAGKITGKQLACYAGVVPFEHSSGISVKGKQRVHKMANKDLKKMLHLCAMVAIQFYPEFTTYYKRKKAEGKHSISILNAIRNKLVLRAVAVINNQRPYVDNMNKAA

SEQ ID NO: 403454 - protein, 423 aa, unidentified
MPYKVAGIDVHKRMLAVVVADVAIGGEYEFERRQFGSSPEQLRLLAEWLIEDKVQEAVMESTAQYWKPVWQTLERHWKTECQKWDDAGPKSGSLHLAQAQSNRGPGGRKKDFVDAERLVKRLVAQELILSFVPDTVQRLWRTVSRRKYQLTCARVRLQNQLEALLEEAHLKLSSLVSDLLGASARRMLKALAEGETNPAKLAALADRRLHATQQQLCDALGASKELNKVYRRLLKMALEELQLMEEQMDQLDHEIADLLSAHQDAVRRLAEVPGLGVDSAHQIIAEVGATAATFRSEKCLASWIGVCPGEEESAGVSASNRSPKGNRFMRRLLNQAANAAVKVKGSIFEIVFRRLLPRLGYQQAIWAIAHRLSRLIWKILHQGVRYDERGPAVSQRSKTARTAKMIRELRNLGYRVEPASNPA

SEQ ID NO: 403455 - protein, 344 aa, unidentified
MAQVTTAQVTTVGIDIAKNVVCIHGVDAHGHVVVKKRLARQKVLPFMAQLPPCLLGMEASGGAHYWAREFTQLGHTVKLMSPQFVKPYVQSQKNDPNDAAGICEAVERPRMRGVPVKSITQQDVQALHRIRERQIKARTALINQIRGLLMEYGIVIPQRASQVRHKLPLVLEDAENGLTATAREWLHALAEELQALDQRIAATDQQIERVFEADEACQRLAQLPGIGPLTATALVAAVGDATEFKNGRQFAAWLGLVPRQHSTGGKTTLLGMTKRGNCYLRTLLIHGARAVLRVVDRKTDARSRWLQGVKARRGMNCASVAQANKTARVAWALLAKGDRYRHAA

SEQ ID NO: 403456 - protein, 350 aa, unidentified
MEYIAFDSHKRYTFASVEEHTGTILRDARIEHQRGAVKEFLSAWKAGTPVAIETIGNWYWIVDEIEKAGMVPQLVHARRAKMMLASVNKTDKLDCHGLNRLQRTGTLPTVWIPPAQIRDLRDLPRTRMVLSKERTRLKNRIHATLAKYAISIEGTSDLFGKRGREELKKSLDLLPPHSRFSVERLLETLELVQKQIDLLEERMKETFSTNRELQILQTLPGVGFILAVVILLEVGDMSRFPDASRFAGYSGTTPRVSSSGGKTRYGQLRPDVNRYLKWAFIEAGNVVCLFHRRQPYRHVSRLYLRIRQRKGHQKAVGAVARHLAEATYWTLKKGETYREPQKKTVSSTKG

SEQ ID NO: 403457 - protein, 349 aa, unidentified
MNATIVAVDLAKSIFEIAAADADWRIAQRSRLPRSKFFGFFMQLEPCQVVMEACGSAHYWARRISALGHTVRLLPAHYVKAYVRRNKTDRADAAALLEAARCADIRQVPVKTVDAQQIQSLHRLRSQWMSTRQRYVNTLRGILREFGFAIPLGVNVAKDRIGTALADPESEVPPALRATLAEMLQEIRLLEQKILGIEHQLHALTRDDMRVQQLRQIPGIGALTSTALRAIVGDIQRFPSGRHFASWLGLTPNERSSAEKRRLGKISKQGDVYLRTLIVHGARSALLGAHRAERSGHPLDHLRRWALDCERQRGHNKATVALANRLARIVWATWTHERPFDGNWSTQAA

SEQ ID NO: 403458 - protein, 341 aa, unidentified
MNVTTIGIDLAKTVFSIHGTDHHGKVVVRKRLNRPKLLPFVAQLPPCLIGMEACSGAHYWAREMTKLGHEVRIIAPRFVAPYRKSSKNDDNDAEAICEAVGRPNMRFVPIKTEDQQATLCLHRIRRGLTKERTAQINQIRGLLAEFGLIIPQGRYAARRRVPEILEDAENGLPMLARRLLNNINQRILQLDEEILAYDREIEAMARRDEKAKRLMAIPGIGPQTATALLASAPDPRQFKSGRHFAAWLGLVPRQYSTGGKVRLGRITKRGDKYLRTLLIHGTRAVIAKLPDKNDRLSGWTRELVDRRGYKRAAVALAAKNARIIWALLMNQTEFKSQPVEG

SEQ ID NO: 403459 - protein, 344 aa, unidentified
MYFIGVDHHKQVSVMTVLNEDGQELKTGRIPNLKRPVERFLEDCRPFTAVLEAGRSSYVMADLLRELGGEVKIANALQVKAIAHARIKTDKRDSRTLAHLLRANLIPEVYQREEWNRRAQRVIRMRAYWVCKQTEVKNKTRVLLAQQREEVRLEVEKRESGLFSSKGLEFLAGLPLENREKEVLEDLLQGYEEIQAHIKKSDGLVNAVYGELEEAARIDTVPGFAKTLSVLVAVEIADISRFSRAAALHSYAGVIPSTYSSGERTYHGHITKQGSRWLRWAALEAVYPAIKKDLVLRTLYSRLARKKGPNVAKIAVARRLLTIIYRMLTERRDYIPDVMKQSAA

SEQ ID NO: 403460 - protein, 379 aa, unidentified
MYRILKIGMDVHTTNYTLCALESKFGEEDVVLANITVGPDHKNVLDFIRRIKEKMDPKSKDKIDVECGYEAGCLGYSLYQLLTACKLKCTILAPTTMHSEKGPRIKTDRRDAKLIAQCLSNGGYHAVHIPTAEDNAVKEYIRMRDDHKIALKKLKQQTNALCIRFGFYYDGTKWTGMHLKWLRALTLPELIRETLNEYLATYEELTTKIARFDQRIQEIAGQERYREKVMKLECFLGIKTHTALSLVVETGDFIRFRKGNVYAAYLGLAPGEHSSAESGGRLGITKAGNSHLRCLLIEATGGICKGQIGKKSKDLIARQTGNSAEVIAYADKANTRLRSKYYRLTRHGKKRNVAVAAVARELACFVWGMMTDNIHGNAA

SEQ ID NO: 403461 - protein, 439 aa, unidentified
MRKRELTVMHPNAAGIDIGSANHYAAVAPDQSKEPVKEFGCFTEDIEAMADWLIECGVDVVAMESTGVYWIAPYEILESRGLIVYLVNARHVRHVSGRKSDVLDCQWLQQLMSFGLLSGAFRPVGEICALRAISRQRDTLLNEQARQVQRMQKALTQMNVQLTNVIADIVGKTGQDIIRAIVAGERDPHKLAKLRNYRIHASAETIAKSLEGNWREEHVFCLSQALSLFDAYQALIVAVDAKLEEMIKPMRQHQEALAANKNKGRGKNAPTFDARNALYQWVGVDLTRIGGIDVSTALKVLVEIGPDLSKFENAKRFASWLGLCPGTKISGGKKLSSASKRIPNRVAQALKLAAQGLHRSHCALGAYYRRMAARMGVGKAITATAHKLARLIFAMLTKGGEYVERSQEQYENQMHKRTVAYLKRKAAAFGFTMQPINAV

SEQ ID NO: 403462 - protein, 391 aa, unidentified
MIFVGIDVAKDKHDCFILNSEGTVLADVFTIANNRIGFETLLSRIQSCSQGESKIKVGLEATGHYSYNLLGFLLNNGLPTYVLNPLHTNLYRKSLSLRKTKTDKVDARVIASMLMSCVDLKPYTSTLYQNEELKSMTRYRFDKVSQRAKLKSSVSRLVIILFPELEKLVPTLHMKSVYALLSEFPSAKHIARAHLTRLTNLLYEASKGRYGKDKAIQIRDAAKHSVGSVMPAKSLELKHTIKLIGELTDEIDEIDMEIKKIVDESGTTLLTVPGISYSTAAVILAEVGDFSNFATPDKVLAFAGMSPSTYQSGQLTNCYAHMEKRGSKYLRYALYNAAKYVCKWDKTFSEYLSKKRSEGKHYNVALSHAVKKLVRLIFALEKSHLPYQPAA

SEQ ID NO: 403463 - protein, 443 aa, unidentified
MSKKRNSHLRGEHGQAFADLIRGIPSEQILCVSLDISKYFHVVMMHNGLGEIVKPAFEIDFYQSGFDQLCQAVDQAKTETQAQVILVGMEPTSHYFENLARHLLQQSQPITLINSFAVKQNRDQQLMHREKTDPIDCGAIGDLLRRGEGTPYRPAQGVYLQLQQLDRVRLSKVKIESMLKNQIIAHLDRIFPGLVILGKSARERFIPLFQVDFWKCQTRQHLIRVCPNPHQLVSTSPDELVQIFRAQNYRLGCKTAAKIIARAQQALLPEPELVDIRCELLQHDLHLLEAVQVHIAALDQRLTDLVAQTPFQVWVSLKGLSVIQAASLAAAIGDPANYSHAGQVFRRSGLVSGRNDSGNRQRKGKGNHILKIGDVYLRRALMNAVTTLLLHQPVLGRYYRRLRRSKSTGVARVATARKATGILWATLRDQYPVSLITCKGTIM

SEQ ID NO: 403464 - protein, 364 aa, unidentified
MADSITWVGMDDSAKTINLAIFKGQEVNPREELVIVNDSTGLGRMAKKLKTLSGEVRCVYEAGINGYYLQRFLAKHGISCDIAAPSLTPRRAGNRVKTDKLDAKAIARLYRAGELTCIVIPQKEQESLRDLVRAREDALEDQQRARHRLARFLMRRGWRYRDGKNWSQGHLRWVKSLRFEDDRDQMVLDEYRLALAEQTERLDKLNEKIEEVAMQPAYEKRVRYLMALKGVRVLTAMTIIAEALDLRRFTDAPAFMAAIGVVPSENSSGSVERKGRITKTGNSHIRRVMIESAWTYQHSSASSETVRKRRQGLPAEVMEIARQCDKRLHQKFRRMAGRGKERQKIAVAVSRELAGFVWAIGKVA

SEQ ID NO: 403465 - protein, 354 aa, unidentified
MEHYVGLDVGLEETSICVVDRDGNSVRETKVATEPEAIRSALKEFADRLSRIGVEASSLGIWLHRELHSSGLPTIVVEARHMRVSLSTMRNKTDRNDARGIAQMMRLGWFRAVHVKNVEMQKMRTLLSNRKLLKRKLVDIENHIRGALRAYGLLVGAVSRGRYEERVRELIERTDFVFSTIIETMLDGRRAIFDGYGRLHKVLLQVVQHDPVSRRLMTVPGVGPVAALSFKVGVDDPLRFTRSRTVGAHFGLTPRRHQSGTSIDYEGRITKQRDVNVREALCEAAASLLLRVRKWSALRAWGLRIAKRSSMLCAIVAVARKLAGILHRMWISETDFQIGFGAKVTQRLKLKPAR

SEQ ID NO: 403466 - protein, 427 aa, unidentified
MPYRIAGIDVHKKMLAVVVADVEVDGDFRFERQKTGTTPLDLHRLADWLVEREVEEVVMESTAQYWRPVWEALEQHWRPRRRARDSAPRLAGTLHLAQAQSNRGPGGRKKDFPDAERLMKRLVAQELTLSFVPDAEQRLWRTVMGRKYQVTRNRVQLQNRLEALLEEAHIKVSSVVSDLLGVSARRMLQALADGETDPAALAQLAAPRLRATPEQLCDAFHASATLHPVYRRLLTLTLEELRMIEDHLGQLDQQMADLLTAHHDAVQRLAEVPGLGVDSAQQIIAEVGATAATFPSSKHLASWMGACPGNEESAGVNYNHRCPKGNRQMRRVLNQAANAAVKAKGTIFALVYRRLVPRLGHAQAIGAITHRLCRLIWKILHQRVRYEERGPAVSAEAKKVRARKMIRELRSLGYRVEPLQAPSTNPA

SEQ ID NO: 403467 - protein, 323 aa, unidentified
MSVFVGVDVAKKSFDIAAPLPNGKMRTKAKLSNDPGGFKQFCDWLERHAEPGAWILMEATGTYHEALAEHCHNQGYRVCILNPAVIAKFADVELRRVKTDKADAKVIAAYGQQKAASLRQWEPEPPAQRRLRALVRRLDDLKEMRQMEQNRLDVAQDAVQQSIQDVIGHITEELEKTRKAIEQTIDDDPDLRKRRDLITSIDGLGDTTATLLLAELGDPLKYQSPSAIVAFSGLNPVVQQSGEFIGQSPISRTGASRLRAGLWMSGTVSIRHNPVVKALAERLNSRHKAYKQIVCAAMRKLLHLVYGVVKSGIPFDPKIALAG

SEQ ID NO: 403468 - protein, 412 aa, unidentified
MHYYVGIDIAKGFHVACVVNQDDKVIKKSLKFNNDVSGFDKLLLLLNSIDEVSSFTIGMEATGIFFENLYLYLIEKGFNVILLNPYQTNRFREMESMKKVKNDNIDALMIAALIKSGRYSKAYVSQDTYQSIKSLYRHKNSLLEEIKKHKRQISTLLAVVFPEMEQVIKDPFNVTGLALLEKYPTAKHYEYASVDRILKTFRGIKGNNFNEQKAQKLLELAKSSIYQGNGVDERAYVIKSHIRVIKLLQEELKELENEMLKLFHQAPQLDSDKEQEVMDIIDNLRTIPGVSDKTIFALISECGDLSRFKNNSHFIGYLGLYPTLEQSGNKLVYGSIAKRGAKLAKKALYQASIAAIRHNVELNKLFRDKVSQGRAKKEAVVIVARKLAQIILAIYKNNVAYNPKRVFMALNS

SEQ ID NO: 403469 - protein, 402 aa, unidentified
MKRDGKLFAGLDWASKTHMVCVVDDAGKIKVRFEIPNSGKSFTGLVKRLTKLGVEGVAIERCDGPLVEALLDAGLPVVVITPRQVKGLRSRYTGSGAKSDAGDAYLLADVLRTDGHRLAALTQDSDATVVLRALSRTRKQLVEARVGLVNQLQALLERVFPGAIGLFARLDSDVAIAFLRRYPTSHAATTLTPARLNAFLHRIAYCGRKPVAELFARVHQAPAAGLRPPQADGHAVCVLGLLRAIETVRREERELQAEIIERLDAHADAHIFTSLPRAGHGVRAAALLAEIGDVRSRFPDEESLAALAGVAPVTRASGKIHSVGFRWACDPTPCASSPAPGSASSGAAGKTTPPTTHNSTEAPHDSPPEVDLGNLIAGPGPRGSRTSWRARGWRPARRRCAP

SEQ ID NO: 403470 - protein, 324 aa, unidentified
MHTTNSSLQHFFGIDVAKAELVVHCFDERAVHALPNTAKDIARWLDALPEHSAVAVESTGSFYLGVARACVARGIPVYVLNAQRVRHYAKGVGRGAKTDRLDAQVISRYLAHEHSKLHPWTPLPESLAQLSALLTLRDTLVRALQSIRQSCKALGYVPDDMQLHLRSGEAQARRLERQATKIAQAHAPWRELLRRLRTVPGIGPLNGLALLLALHRHPLTRVDAFIALTGLDPRPCDSGQRRGRRALSKCGDALLRKLLHTAAMAAVGNPLFAPDYQRLQNRGLSKTAALVVIARKLARIAWGIFRSGKDFDPEILRARAGAAT

SEQ ID NO: 403471 - protein, 400 aa, unidentified
MLSIGIDVSKGKSTVCGMKPGGEIVYTPFEVQHTREGMLELVSLLRSSGEEVRAVLESTGSYHCPVVAALLENGIFVSVVNSLRMKRFCSQSIRRVKTDQIDAMQIALYGLAYWQELQPTRLPENTYRELQLLARQYYQMTSLLIKAKVDFNALCDQVLPGMQELMSDHAGRHKLSDFVLRYCHTTHILEMGETRFRKDYCKWAEKKGYRNCERMAALIFATAQNGIPVLPNAPSTQIVITEAIRVLHTVEASRDAILTQMQALAKTLPEYSLVREMPCIGDTLAPRLIAEIGDVRRFHSKRALIAYAGIDAPPYQSGKFCANNRHISKRGNRYLRKTGYEVMQSYVMHKPANDPIFTFIEKKRGEGKSGKLAMVAGLNKFLRVYYGKVTELYRSLPAIE

SEQ ID NO: 403472 - protein, 382 aa, unidentified
MSQTASRWNSTSWGSGLFMALELGWSKWRLAFGSAMDQKAWQMTIAARDVMALTRAIGKARQRLGLPSDCPVFSCYEAGRDGFWIHRLLLKMQIHNIVVDSSSIEVARRARRAKTDRLDAAKLLSMLQRHHAGEKKLWSIVHVPTPEQEDGRHLQRQIRTLKKEQTRQLNRIRGLLANQGVAVRANRGGLLEPLDSIRIWDGSPLPVGLRRRLEVEIARHAFIHRQLLDLELERDARIRQSQDRAAQIARHLMRLRGIAQVGAETYSREFSWRGFTNRRQVGSLIGLTPTPHQSGDSSREQGISHAGNRHMRGIAIDLAWLWLRQQPHSELTLWFNRRFAHASPRLRKIGIVALARKLTIALWRYADFAEIPKGALLKSKAI

SEQ ID NO: 403473 - protein, 413 aa, unidentified
MDVLHGRCCGLDVHKSSISACILLREAGRVQKHQRRFGAMTQDLRELAEWLRQFGVTQVAMESSGVYWKPVWNILEREFTIVLANAQHIKNVPGRKTDQKDAEWIAQLLQYGLLRPSYVPREIIRDLRDLTRMRASLSQEASRLSSRIQKVLEDANVKLASVATNVLGKSGRAMLEDVIIEKDDPEHLASLALGHLRVKIPQLKLALEGNIRSHHRFLLRRLLDQVQYVEHEIALLDQRLEDIGCQRPELAQAVARWDTIPGVDRVAAWALLAEIGDNMAQFPTAEQLASWAALCPGNHESAGKRLRGTTRQGGPWLRRMACQCAWAAARTKNTYLSSQFRRLAARRGKKRAIIAVAHTLIVIAYHLQKNQSNYDDLGGSYFDRIHSDGLKRYLVKRLQQLGLKVTLEPMEAA

SEQ ID NO: 403474 - protein, 340 aa, unidentified
MNQYYIGIDLHSNNLHLAMKDQDGKRRLHKKLPCDLNQVLEFLRPYREAIRTIAVESTYNWYWLVDGLREHDYPVLLANPAQIHQYQGLKQSKDIDDAYWLAEMARLDILPTGYLYDPKLRSVRDLLRRRMLLVHQRTGLILSFKGLHARTHGHAPKLAEVKRLAPEEAAAGFEREGDQLAARVQVTLLEHFDEQIALIEREVLRRVKATPLFQRLQSIPGIGKIPGMTIALETGDITRFPSPGDFASYCRTVESKRWSNQKVKGRNNGKCGNRHLAWAFVEAAHCSRRFDERCAAFFEKKKRQRNTAVATKALGCKLAKAAWWIMKEGTAYDAGRMFGH

SEQ ID NO: 403475 - protein, 330 aa, unidentified
MKVPHIIGADLSKKSIDFASHQLKTHLKVENNSSGYLDLTGWFKQQKINISKVMIVMENTGLYSYQLEQFLHEKHIAFTKVSGLAIKKSMGLVRGKSDKQDAYRIAEYGFEKIDRLVVAKPADKLLQGLQRLHSTRERLVKNRASMLNAVKEYQHGYKLKKTDIIIATQLRVIKTLGQEILKLEHEIDAIVDQEKAVKENCQLLQSIKGVGKVLAVATIIKTGNFKQFTNARKFACFCGTAPFENTSGTSIRGKTRVSKLRDKGMKKLLDLSAKSAIQHDKELREYYIRRTANGKSKMSTINVVRNKILYRMFAVIKRQTPFVENYLLVA

SEQ ID NO: 403476 - protein, 342 aa, unidentified
MDHFAGLDVSVKETSVCIVDDTGKIIREVKVVSEPDALLTVLKNPAYHFKRIGLEAGPLSQWLCSALAEAELPVVCVETRHMQAVLKAQINKTDRNDARGIAQMMRVGLYHPVHVKTLRSQKLRMLLTHRKLLQSKAIAIENDLRGTLRNFGLKVGMVGKAKFEARIKELVENLPDLAVLVEPLLVVRRALREQTVILHRRLLAIVRDDEVCRRLMTTPGVGPVVALTYRATVDVPARFRKSKSVGAVFGLTCAKYQSGEIDRSGRISRCGDEMMRVMLYEAAQSMLRSKKWSWLKAWAMQIARRRGMKKAIVALARRLAVILHRIWVDGTEFRWTREAAAA

SEQ ID NO: 403477 - protein, 411 aa, unidentified
MYYVGIDIAKSFHVVSIIDDNETKVINKPFRINNDLKGFEKLLTILDSVTLNKDDFLIGLEATGIYGENLLEFLKSKGYSVKLLNPFQTSRYREQITMKKVKNDNIDSLVIALFLKDGKYSSGYVTDDEYQSLRTLYRNRASIQADMKEVKKRILTQITVTFPEFESFINPFTISGLALLEKYPTAHHYKHSSVDRIMKVFTHIQGNNFNRDKALRLLELSRESIYSGKAKDARAIAIRSTIRLLKMYLSEIDIIEAEIVALLDKKGINSQTLDELPTKNSLIENLKTIPGVSEKTIAAVISECGDLTRFPSIPKFIGYLGLFPTENSSGNSKSVGHLSKRGSSLVKHALYLSATSCLIHNKQMKQLYDTKRSQGKSKKESLVAVSRKLATIIYSIFKYNTPYNPNRVFAN

SEQ ID NO: 403478 - protein, 331 aa, unidentified
MVFNYYLGIDISKATLDAALIIKERDIVGQTKVSNNSQGFKELVAWVKKKGAKVSETIICAEHTGIYGYDLQEWLDDNGIAFSFVSALEIKKSLGIRRGKNDAVDAVRIAEYAYLKRETITLTHKPLKGIFTLKSLLGERKHYVRLKSSLLARKDALNQYESHESRERRNKAIELLLKNIDALEKQIKSVIDEDPEISRNYELISSVKGIGLVNAVNTIVYTNNFTSFQTARQYACYCGIAPFEHKSGTSVKGRTMVSTIGCHQLKAELSIAARSAIINDPWLRKYYKRKMEEKGNLTSAHGIVLNAIKFKLVVRMFSVIKSGVPYKILAY

SEQ ID NO: 403479 - protein, 449 aa, unidentified
MKSLPVINPNAAAVDVGSEQLHLSIAGDAPVVFGTFTDEVYRLRDYLKAQGVTSVALEATGVYWLYAYAVLEAGGLEVVVVNGRHVRNLPGRKTDMADCQWLATLHAHGLLRGGFVPPAAIRRLQDYQRLRADHIIGAGSQVQKMQQALERMNIKFHDVISDLDGVSGLKVVRAILAGEREPQALLLLCDPQIQKKKGDRVLRSLQGTWAPEHLFALGQGLAAWEFYQKLLGECDQQVDGVLRELAGPEPPAPGPGVPAETPGKKAGKNAPQIEQLHRLLLRLCGGRDVTAIAGIGDYLLLQLLAETGPDLQAWPSEKHFAAWLGLAPGSRQSGKRKGSVKVQRNRAGRLFCAGARSLVQSVDKALGGFYRRLAARKGGLVAMKALARKLAGLYYRVLRYGLAYAEQGLRVYEQKYAESQRRLLVKLAAKQGFKLVSLQREAHPTAVSV

SEQ ID NO: 403480 - protein, 409 aa, unidentified
MELLYARCAGLDVHAATVVACVRIAAGGTVTYAYRTVSTSTRGLLDLAEWLTAQGCTHVVLEATGVYWKPVWHILEDHFTLTLANPMHVRNIPGRKSDTNDAKWLADLHAMGLIRSSFVPPPPVQELRDLTRTRKQLVREVARHTQRLQKTLEDANIKLTEAISDILGTSGRTVVRALIAGETDPERLATLTTGRLKASPAQLAEVLHGRVTPHHRFMLKLHLTQVEALQAAVADVEARIGDALAPFRAAVTLLTTMPGLRDTAAAVIIAEIGDDMRAFPTAGHLVSWAGLCPRLDESAGKRRSTRTRHGAPWLKTTLVQTAWAAARKKDSYFHAQFLRLKSRRGPKKAILAVAASMLTDVYYMLRDGVEFHDLGSQYFTVQDKQQIAKRLLRRLRDLGVEVEVKSQAA

SEQ ID NO: 403481 - protein, 346 aa, unidentified
MVETTTIGLDVAKRFFQVHGVSADGKVTIKRQLRRSEVLGFFGGLERCTVGLEACGGSHFWAREIRALGHDVRLIPPAYVKPYVKRGKTDAVDAEAICEAVARPTMRFVPIKTADSQAALMVLKTRDLLVRQRTQAINAVRGHLAEIGIVAAKGLAKVATLIAIVRDGNDQRLPPAARMALNLFADQIEMLTERVDTLGREIAAEVRRDNTMRRLATIPGIGPITAATIQASVPDPGAFKSGRHFAAWIGLTPKMHSSGGKDHLGKISKMGNPTLRSLLVVGATAVLQHARRGATISPWLTALLARRPAKVAAIALANKMARIVWALLTKGGTFIRKNRAAEPAAA

SEQ ID NO: 403482 - protein, 429 aa, unidentified
MQNESTPGARGPVFCGVDTHADSHWLCVLDWRGRKVLSRQFPADAAGYEALAGAIAAAGEPACVAMEGTSSYGAGLTRHLASLGMPVREALSPARMQRRRPGQGKCDEADAERAARAAMSGSRLGTPKSQDGWVDGVRCMLAARSGAVKARTSAINTARSLLTTAPEGLRSRFRGMGGPRLMEELPSVRAEGALGAALGALADLWAAARDAALDMERAIEASLEENCPALLAMYGCGPVSAAKLAVAAGDNPGRLRSEASFAAICGACPIPASSGKTVRHRLNRGGDRQANSALHEIARQRVMRDPETAEYAERARGRGKSDREVMRCLKRYVAREAYRALMHPHEIRRPEDASELVAARRAAKVSQVRAASILGTSEKYISMLERGQRELKPIRRAYEAWVEAGLPLDWDRQAFEAERKMDSKKHLAK

SEQ ID NO: 403483 - protein, 363 aa, unidentified
MVVLIGADVHKNSHTFVAVDAAGKQIGQITVRATHAGHEKAYRWARKSFIEQDRRWGLEDCRHLTGLLERDLLAHGEPVVRVPAKLMARQRAAARTRGKSDPIDALAVARALAREDDLPAAFTDERAREVKLVLARREDLVAERTRVINRLRWHLHELDPELDPAPRALTHRPAQERVRELIEASEGIVAEIAGMVLADLERLCSSISELDARLRGMVRDLEPELLEIPGCAELSAAKIIAETAGIERFATESKFAMFAGCAPIPVWSGKTEGRVRLNRGGNRQLNCAIHRIAITQTRLEGPGKEYYERLRADGKTVMEALRCMKNQIARRIWRTLTRAHAEALTTTPIPLNPTPTTCLPHAA

SEQ ID NO: 403484 - protein, 341 aa, unidentified
MTEVSTIGLDLAKNVFQAHAASASGAILFRKKLRRDQVLAFFATQPRCLVAMEACASAHYWAREIAKLGHAVRLIAPTYVKPFVKRQKNNATDAEAICEAAQRPTMRFVAVKSEAKQASAVVFRTRDLLVGQRTQIINAIRGHLAEYGLIAPQGPSHVDQLIAQIEDPSSGIPDPARSCLAVLVETLRALQGKIAALDTEIAARAKRDDGARRLMSIPGIGPLIATAIEALAPPVETFRSGRDFAAWVGLTPLQRSTGAQERLGKISRMGERTLRRLLIIGASGVVRWARRKGVPAGSWLARMLARKPPMLVIVALANKMARIAWALIAKGGSYRAPAVAA

SEQ ID NO: 403485 - protein, 313 aa, unidentified
MTDTTIGIDISKDHLDACRWPADETCRVSNDAAGHRKLLRWIGADLAADLALVAFEATGAYHGALERALHKAAIPCAKLNPARVRRFAEAIGTRAKTDRVDARLIARMAAMVEPAPQAPKPPGHAPLHELQLARTSLVRARTAARNRARHLTLPLLRRQHADRLRCIRRDLAAIDAAIAALIAADPEIARKAAILCSIPGISKVSAAAILADLPEIGTLEPAAVASLAGVAPITRESGEWKGQAKVGGGRRDLRRALYMPALAAARFNPNLEAVYERLRARGKPGKLALTAVMRKLILLANLLVHENRLWEPR

SEQ ID NO: 403486 - protein, 338 aa, unidentified
MTIVMGLDQHRAQITADWIDTDTGEVSRSRISPAHRAGVRRFCERFRGQELEVALEATTGWRFVVEELRRMGAAVHLAEPAETASRRGNKQRAKSDRADARHLRELLMINRVPESWIAPDHILDLRSRVRLRHTLSHQRGEWQQRIQAVLYHHGCPQRRDLMTAEGLSWLAAQPLPTGAREQVTVALGMIDALDAQLAPLDKQLRGYARRQPGCKALMGQFGVGELTAVTILAELGDAGRFSSSREAVRFAGLDITVHQSDQRRAPGHLSRQGPPALRWALFEAAQSAARAGSPDREYFTQAAERLGANRACLSVARKLLKRSYHTLRELGDEALEPA

SEQ ID NO: 403487 - protein, 335 aa, unidentified
MEFKHYVGIDVSKSTLDFAVCSNGEIISRHHCENNKKGIVQVLKEMRKLTGFGMTSSVFCMEYTGIYNNHLLDYLLASKSSIWMEPALRIKQSQGMTRGKSDVIDAARIAEYAYTFRNKMRLWTPARAEVKKLSLLITMRDRLVNSIKELSVPVKENAAFVSKDFKDLEGRIMEKSIKAMQKALESVEKEIDQLIKADAQLKQMFDLMTSVTGVGPVVAMNMLVVTEEFKKFDEPNKFSCYSGIVPFEHTSGSSIRGRARVSHLANKKMKTLLHLAAMAAINSKGELREYYNRKIAAGKNKMSVINAIRNKIIHRIFAVIKRQTPYQKNYLNPIA

SEQ ID NO: 403488 - protein, 392 aa, unidentified
MYIVGIDIGKNHHEASIVSPEGKQIGRSLRFATTHKGADSLMSFIFKNIGNSPCVFGMEATGHYWYPIYSFLKAKGYTIYVINPIQSDSLRKMYIRQTKNDSIDSFLIAEVIRFGQFGTTSMADENILAMRQLCRYRDSVISSRTEIKLRIGTIMEQIFPEYEKQFSSLWVSTSMGILEKYLTPENIENAPIDELFEIIKDKSHNRLTRAKAISIKEAAADTFGIKIAQDAFSFQLKQLIDRMNFLDKQIEALDCQILEYYEKFDCYLHTIPGIGMIAAATILAEIGDINRFKSSSALVAFAGIDPTVRQSGEFSSTHNHMSKRGSPYLRHAIFLAATTCSFHNSPLNAYYKKKRDQGKHHLTATGAVARKLTTVIYAVLRDSKPYEPKKFC

SEQ ID NO: 403489 - protein, 341 aa, unidentified
MSLIKVVGIDLAKLVFSIHGVDEHSKCKLRKTIKRNNLLAEVAKLPLCIIGMEACSGAHYWAREFTKLGHDVRIMACKFVIPYRQNEKNDANDAEAICEAVTRPKTRFVSIKSEEQQAVLCLHRIRQGAIKDRTARINRLRGLLAEFGIIMPKGRYSAQSAIPGILEDGENNLPFIARELLNDLWQSIKGLNDEILKYDRKLHALANQMKDAKRLMSIPGIGEITATAVVATVNDAKHFDTSRSFAAWIGLVPRQYSTGGVARLGHISKRGEKHIRTSLIHGARAVIANCKNKTDRTSLWIKDLVERRGFKRATVALAAKNARLIWALLHSEKEYQVDYVK

SEQ ID NO: 403490 - protein, 370 aa, unidentified
MSQPFDASKSLATLEQDNTVIAVIEMSQSKWLVAAVVPGVKRQPLKKLQADEEALLKLLYRWRTEAGQTGREIKRVVVAYEAGRDGFWLARWLRTRGVEAYVIHPASIAVSREHRRAKTDRLDTELLMRAFLGWLCGEKRHCSMAAVPAAEEQDARRPNRERENLVTERTRIANQMKAILARFGIRSFKPTLRKAAEKLDGLRTAEGTPLLENTRAELSRHLARLRVVREQIRAIEQERLHKLAAAPAEENGPHVMVRLIARVFGVGVETADMLVNEVFARHLRDRKAVARYAGLTGSPEESGKRRRERGLARAGNARVRRGMIQLAWCFIRFQKDSALAKWFDARTADGRGSTRKTMIVAVARKLLIAL

SEQ ID NO: 403491 - protein, 596 aa, unidentified
MLPQPAPAPQPPRRVGVGIDTSRYGHYAAFLRDDLQPAAPELQFAESAAGYALLRQRLECIAQRHPPAHFVVRLDAAGQYAENLLHFLHRLATPPADPLAPAARLALTISCGDPQRNKNYRAAVFGPQKSDPVAARAAARFALTERPGRDRPLSLPLRTLRQVAGRLQAVVRQRTRLINQFPHLLALTFPELALQTRDLAAGWVLELVHRYPTAVCLAGASLADLLDVPYLPDAQAGPLLEHARASVASLGGAATEELVRDHVRQLRDAGARQKRLEKLLVSAYQTLPRDNHLATIPGIGDVTAAVLTAFVLDIDRFATPGQLVAYFGVLPIEASSGVDREGQARGPRRYVMSRRGNDLVRRYLWMAALSAVRYNPAVRALYARVVAKHPGRKAIAIGHAMRKLLHLAFAIWKSGRPFDPGHYPWQAPGHVETRGQDKGTEGEAGGKGPAEGDQAAGHRPDTQPARQVVTAACADSVAGAVPFGEATAIDFAHLQRQLPIARALDQLGLSDRLRGRGPQRRCACPLHRGDARGRSFRVNLEENVFQCFDRQCGRKGDVIDLWAAAHGYALREAALDLVRTFGLEPTPRSGTEKRNG

SEQ ID NO: 403492 - protein, 382 aa, unidentified
MRLYTQQHPFYCGIDLHARTMYVCILDQAGETLLHRNMTATPEALLKAIAPYRDQIVLAAECMFTWYWLADLCADHGIPFVLGHALSMKAIHGGKAKNDKIDAHKIAVLLRGGMLPQAYVYPAEMRATRDLLRRRMHLARKRGELLAHVHNTNSQYNLPAIGKKIAYKSNRDGVAERFADPAVQKSIAVDLALITYDDALLRDVERTIVNIAKHHDAHTLYLLQTVPGIGKILSLVLLYDIHQIDRFPRVQDFASSCRLVKCAKESAGKRSGTSGTTIGNAHLKWAFSEAAVLFLRDNPAGQKFLTRLEKKHSKGKALTILAHTLARAVYDMLQHKTAFDMPTFLNSSGRGVGKLDASRDNHGMTLTIHALQGTKDCVSERR

SEQ ID NO: 403493 - protein, 355 aa, unidentified
MQSNKISFKGQNIYVGIDVHLKTWHVTTLTESGYKYSFAQHSDAKELFDRLNKKFPEAHFKSAYETGFCGFSVHYALTAQGFENIVVNPADIPTTGKEKAMKTDAVDSEKIAWSLKRGELTGIYIKDKCYMDDTNLIRLRQRFIRDLSRQKNRTKHLLYTQGVVYPERFSKKGTHWSRNFIKWLREDVELLSEEKRTLMLLCNQVEHIRKDILAITREIRRLSTADKYKENFSLLSSVPGFGLITSMSILTEYDNNLMRFPNERKFVAILGLIPTCHDSGEKKVNGVKTFRGNKQLGPLIIEASWVAIHRDYQLGCYYTNCCQSMNPQKAIIKVARKLACKAYAVMKKKKAYVLS

SEQ ID NO: 403494 - protein, 465 aa, unidentified
MPKPTPLFVGLDVHKDSIAVAYAQGHCADPPVFVGSIGTRQADLDKLIRRLHTKTSQLVFAYEAGPSGYGLHRYLTGKGLDCTVVAPSLIPKKPGDRVKNDRRDAVEIARLLRSGDLTSVYVPGGEDEALRDVCRARDAARVTLKAAKLRLNSLLLRLGLHYVGRADWNDAHRRYLAKVVCPTAAQQIVFQEFLRAVDEQMNRLRRIEAELLELAPTWRLYPVVQALQALRGVQWIVAITVVAEVGDLTRFDHPRQLAAYVGLVPSEYSSGHVRHLGGITKAGNGRARRALIEAAWAYRYNAKVSAHIQRRLDQVPQPIQDIGWKAQVRLCKRFRRLTARGKHPNVAVTAIARDLVAFMWAIAKEVPVKGLTRGRSALRAAVGCSRVLCRALRCWGPFHRRPPPCFRALPQERVDERLIRNPGLLSEPLEVPDRWGVQADRHTALQTLGIGIGASVVEVVFLPHG

SEQ ID NO: 403495 - protein, 284 aa, unidentified
MECYIGLDVSQRLTAICVVDAKGKIVVEGKSSTRPNDIHGWLVARDVQISSIVRIGIEAGAMSAWLYIELTKLGLPLICLEAFQAHRFLKTYRNKTDKNDARGLAQLVRIGGEFIRPVIVRARSSQEDRTLLTLRQQLVQQRIGLENNITGSLKPFGLLVPRGNVNSKTFRERVMAALVKANELGLTLSDGIMPSLDLYEDLCKHLAILTRRVEAVSRDNPVCRRLMTAPGVGPIIALSFVTAVDNPLRFSNNEDIGAYFGLTPKQYQSGETDYQGSISRLGNP

SEQ ID NO: 403496 - protein, 373 aa, unidentified
MSNSVIYVGVDVHKDTNSICMYDPEDSSFFAEARLDAGTENICKYLKKQTKDFALEGKEFIIGYEAGPTGFGLQRGLAKKGYTCYIMAPTTIKKASGERTKTDRKDARMLAITLATDAYKSVHVPEEEDESAKELTRTRTALKKHLKRAKQNLLSFLLRQNKSYPFPGNYWTQKFTAWLDSLVFTDKRLQYSLETYRQEIRDLNNKIEQMDSFIEEIATSERFKEKVDKLVCFSGIDTQTALSFVCEIGDFNRFATPEQFSSFLGLVPGQESSGKTVRYTGITKTGNSRLRLLLIEATKAIKRSNPYNKSKRIKERQAGQSPEVIAYADKGTKRIKAKMKNMEGNGKNANVSTAAGARELSCFIWGMMTGNIA

SEQ ID NO: 403497 - protein, 406 aa, unidentified
MEIRPIYKRVIGLDVHQNKISACALIEQPDGTVTVEHREFGGYKRDRRALADWGRDMAPDVVVMESTGIYWKSPYAALEQAGLRARVVNARHVKQVPGRKTDVADAQWLATLARAGLLRASFIPPADIRHLRLIARQRQKLGGMLASEKNRLHKLLADAGIRLNVLVSDIHGQAGRAMVKALIAGQPMPAILDCAGRLRATRAELFEALQPEELSAKHRFVLREVMAHIEYLEATMSRFEQTLLEGLDAWQPQLVLLQTLPGIDQMGAAMLLVEIGTDMQSFGSAERLASWVGICPGNNESAGKRKSGRSRKGNAWVRRLLCEFAQAAARSRCALKDKFAALSIRKGHKKSIVALAHKMLRIIHAMLTNGTPYQDRTVDYEALVVQRNAPRWIKMLAKHGYLPTAG

SEQ ID NO: 403498 - protein, 329 aa, unidentified
MSNLLKKVIGVDVGSKFLTLSFLDDEKGEQVLNLPNNERSILSFLSKISPSDYCFVIEATGNYSSRLLHFSIGKGFESSLINCMSVKHFARMKNIITKTDAEDAKLIRNYGEMFRPEFYIPKTQDIEYLDQEIKLLNDLEEEKRRYAVKLKALRFHPVLNPSTEKHYEKRLKQLEKEIKEVEARLPQLQDEEFTKTKNLLQSVSGIGEKTSLQLMTATSGFKNFHSSKSLVKYFGLAPRIYQSGKKSYSPGKCRTSKTYIRSILYVCSWTAIKHNQKCKELYLRLLEKGKAKKLALIAVCNKLLRICFSVVKNKTAFQQDFQNKLKILT

SEQ ID NO: 403499 - protein, 350 aa, unidentified
MPRKLNATAVTIGIDPGKNTLHLIGLDARGAIVLREKVARDRIVARLANVPPCLIGIEAGMGTHYVTRGLLAVGHDVRQVPPVYAKPFRQTHKNDFRDAHAIAEAVQRPTTRCVPVKTDEQLDLQALHRVRYRLVGQRTAVINQIRSFLLEHGITVRQRLHWLRHALPDILAQRTDVLSPRMVRILEDLAQDWRRLDERIESVTGEIEALSKSTEACRHLMTIPGIGPIISSAVVAAIGNGTAFTRGRDFAAWLGLVPKQMSTGDRTILGRITKRGNRYLRMLFMQAARVVLVWPRNWMKHSFGPWLAAAAQRLHHNVLATALANKLARIAWSVLAQDRIYEARVSAGAA

SEQ ID NO: 403500 - protein, 342 aa, unidentified
MRYIGLDVHKDNITACVLSDAGKVVFEKDFKKTDGTCDCLAELFDHVGKSGFCVLMETGTYAYPPYRFFRDRGCDVDCVHAQGLKMITQTDKKTDKKDAMTIARMLRLWKRHDIDLQIAYMPTREQCELKDLCRYREEISKKIGDETRRIKSQMSRNCQVLPEGMDSFQIKRNRRYVLEKYGTDVTLSRRMKALEQLFEERDIVQKQVESCLPDDPNVKLLEHIPGVGRQTAVQLMSMIVDIGRFEDSEKFCAYFGLVPRVRDSGGKEHHGRMTKNGDKMMRMLMERVTEAHVRNCDSFITDYYKRLCPQMGTKKALITTSRKMLMTVFAVLKKQQEFRTRP

SEQ ID NO: 403501 - protein, 392 aa, unidentified
MTCFIGLDLSKFKHDCFIMDEHGEVVRNAFSFNNDREGFNTLLNVLNDLDPFQEKRIGFESTGHYGSNLKLFLEANGYSFMEFNPLLVNRFFKSESLRKTKTDKADAQKIALYLYSRDYKPNPNSSYHLQCLKSLTRLRESLVDERSLQLVRLTNIMDKMFPEFKPLFAKQGLKAASAMYLLENYGSPSRMANMTLASYHKMVSKLRRTISYAKFCKIKELAKSTVGNENDILSFELEVCLELFKELDQKVLQLDKKICFELSLLNTHIPSIKGIGDVLAAGILAEFESIDKFDNPAQLAAFAGIEPSENQSGTHDGGGRMVKHGSPHLRRYLIQAANNMLVHNPILYEYYLKKRSEGKSHNVAISHVARRLTRIIFYLEKKDVDFNIEKMR

SEQ ID NO: 403502 - protein, 427 aa, unidentified
MAYRIAGIDVHKKMLAVVVSDVEVEGEYQFERRRVKTSPDELRGLAAWLLEQDVEEVVMEATAQYWRPVWETLERYWKPRRQQREGARPTAGALHLAHAQSNRGPGGRKKDFPDAERLVKRLVAQELTLSFVPAPEQRLWRTVMRRKYQVTRNRVQLHNRLESLLEEAHIKLSSLVSDLLGTSARRMLQALADGETDPATLAALADSRLRATSDQLRNALDACADLHPVYRRLLTLTLEELQLIEEHLGQLDQQMATLLSQHHEAVHRLAEVPGLGVDSAQQIIAEVGATAATFPSAKHLASWVGACPGEEESAGVNYSHRSPKGNRPMRRLLNQAANAAVKTKGSLFELVYRRLVPRLGHPQAIGAIAHRLCRLIWKILHQRIQYEERGPAINKQGQQARARRMIRELRSLGYRVELLSTPSSNPA

SEQ ID NO: 403503 - protein, 346 aa, unidentified
MRIIGCDFHPSWQQIAWLDSETGETGEQKLVHASGDAQQFYEQLPAPSLIGMEATGNSQWFIELVEDLGHQIWIGDAAQIRASYVRKQKTDKRDAAHLLKLVVEGRFPRLWTADREQRDLRQLVLHRHKLVMIRSRVKNELQHLSLNKGMQKKRTLWSQAGQKMLRELPLKPWAACRRADLLGLLAMLDQQIGRLDHAVQKAAEDHAQARLLMTQPGVGPNTALAFVLTIGDVQRFRRGKQVASYLGLIPREESSGGRQKLGAISKQGNRLLRSLLVEAAQIAVRYDPQFRREYLHRCRQKPKGVAKVAAARKLAVRLYWMLRTQVGYPEIVRIESSPRVPLVGAS

SEQ ID NO: 403504 - protein, 337 aa, unidentified
MNAQAICVVGIDVSKRKLDIAMLANSKIKSKVFDNTPVGHHELNQWLLERGAGQQHTHICMEATGPYSEAVAIALVESGWCVSVVNPARIKGFAQGELARNKTDRADASLLARFCAAMRPSLWTPPSAEWRELRGWVDRLQALKEMHQQESNRLEAHVASGQAFLVEEVQIHLDWLMQQIGALEQNIDDHINRHPELKHDAELLHSIPGIGNTTVAKVLAYAGNVRRFANAKALAAFIGVTPRQRLSGTSVKGRTMMSRTGHADLRRALYMPGLVARRHNPVLRAFGDRLSATGLAPKAVVGAVMRKLAHLIYGVIKSGQPFDASFSVHRLDFQDGI

SEQ ID NO: 403505 - protein, 399 aa, unidentified
MIHVGVDIAKYRHAAAAVNDAGEVVMQPRFLANDAAGFASFSGALRKLGGPEAVAVGMEATGHYWKVFRHACAGHGYRTDVINPLITSREASADVRGRKSDKTEALAIAHVLRKGGYSPAPAAQPATDTLKALARHRRALVERCSDAKLRLVAALDVAFPGLEKLLGDLFSVSSLAVIRAFPSSRLAAGADIRTLASVFRKASGGRLGQEAAGEFRKAARRSLSLTMDTGGGEFVIPQIVDEIRAASARIDAVEKRMLEEPRPVVATLLGSIKGAGRIQPLVIAAEIGDISRFAGPDMEKRLLAYSGCDPRVRESGKWKGTTRMSKRGSPTLRNALYLMAGTIRLHTPCFNAIYKRHIGKGKHHCVAISHVINKILDVLCGMYRTNTLFAPPKTEVMPC

SEQ ID NO: 403506 - protein, 340 aa, unidentified
MAILAGFDVHRAQITFDALNTETGEVLTGRMRSDREAVGEWVGRFAGERVEVAVEACTGWLFVYEALADAGVVVHLAEPAEASALRGKKRRAKTDRADARWLRTLLVEGRLPEAWIPPAHVREWRTQTRLRKTLIDERTCWVQRIQATLFHHGIVDVPDQLLRTNGRAFLNTLKLPPAALQRITVALAIIDEIERQLIPLERELARLARRQLGCQALMDQYGVGPITATTILCELGDVSRLSASRKAVRCSGLDIGVYRSDRRSRAGRITRQGSPALRWALYEAAQNACKPASPDHADYLALKARGLTHTRASLTIARKLARRSYHILHELGPDALAPTT

SEQ ID NO: 403507 - protein, 391 aa, unidentified
MDEAWAGVDAGKEFHWAHVLDVSGRQLLSRKVENDEADILRLIVEALSLAEEVHWAVDQPGGGAALLLALLWERGQKVLYVPGLSVDRARDTYRGESKTDARDARVIADQARMRPDLGELRPGEQELSELQLLLARRRDLITDRSRTITRLREALLSLFPALERALDLNSKGPLILLTHYQSPAQLRRAGHKRVAAYLRNRGVKGSSSVAHRALSAAGSQSVTLPAQEVASHIVAELAGEILALKERIESIDEELQKRFFARPEARILISLPGMGPILGAEFLVAVGDISAFESADRLAAYAGLVPAARDSGKRIGNHRRMRGGNKVLKRVFYQSAFASLRSAPESRVFYDRKRAEGKRHTQALIALARRRVNVMWAMLRDGTTFETRSAA

SEQ ID NO: 403508 - protein, 366 aa, unidentified
MKKSSTMAMERIQIFKEHQLTIGVDLGDRTSHYCILNEAGEVILESKLPTTPKGIEEVFSRIARSRIALETGTHSPWVSRQLTQLGHEAIVAHARNVRLIGDSSRKDDQLDARTLARLARIDPALLGPVRHRSAKAQIHLTVIRARAALVGARTALVNAVRGLTKSYGERLRSCGSEQMNREIAKGLSQELRDVLEPLLAEIESLTERIAEYDRRVEQIAKEIYPQVAVLRQVKGVGPLIALTFVLTLDDPHRFRRSRDVGCFVGLRPGRRNSGMSEPQLHISKEGGRYLRTLLVQGAHYILGPFGQDSDLRRWGLTLAERGGKNAKKRAVVAVARKLAVLLHKLWVSGEVYEPLRNNRKAMSAVA

SEQ ID NO: 403509 - protein, 415 aa, unidentified
MPNLQPPEGTMQRISVGIDIAKEIHWVTAIDADGVVRIDRKLLNTPTDIASLADQLAALAGPGGEPAGEPGGSTIRVGLDVIGGIAGLVEAMLAAAGFSLLHVPGLAVNRARQGTVGGENKSDPRDARTIAEQVRSRADLRRIEPATEIDLEIRLLVGRRRDLVHAQTQRVARMRDMLVSIFPGLEACLDLTTKGPLHLLTKFVTPAELRNAGKKRLVRHLQAAGGLPNVEALADRALAVAAEQAIAVPAERMTARLIRELAAEALASRARLIELDRELEALLERHPDAALIRSLPGMGVVLCAELIAEAGNLSRFRSADALASAAGMAPILRQSGRSRFLRRPNGGNKGLKRVFYQSAFCSLGHDDSRAFYDRKRREGKRHHQAVIALARRRVNVLWAAVQNRTPFQTGFKLAA

SEQ ID NO: 403510 - protein, 295 aa, unidentified
MGEVSTIGLDIAKSVFQVHGVDGAGAVVMRKRIGRAKVLEFFGGLSPCLVGIEACPSAHHWSRELQALGHTVRLLPPSYVKAYLKRSKNDANDAAAICEAVTRPSMRFVPTKSEQQQSGLMLHRSRQLLVRQRTMLSNAIRGHLAELGIISAKGRNGTTELLKVIANTEDDRIPPAARFCLAVLARQYVAITAEIGSIDKHIHVWHRSCAESRRLEEIPGIGPIVATALVAEIGDWRQFRSGRNLAAWIGFGAEAALDRRQGEARQHHQAGQSLLAMAAGRRRHGGHSICAAAWH

SEQ ID NO: 403511 - protein, 347 aa, unidentified
MDASYDGRQVVGIDLHRRRSVIVRMTEDGRKLETVRITNSPAALRREIAKAGPHPRVVVEATYGWYWAADVLEEAGAEVHLAHPLGVKAFTYRRVKNDERDAADLADLLRMGRLPEAWLAPPEIRELRELTRYRHKLVGLRTSCRDQVHAVLAKLGIPVTCTDIFGTWGNTWLDGLDLPQPYAGKVASLRQLNGELSGEITLLEQVIGDLLAGHEGYRAIQALPGIGPVLGAVIVAEIGDIRRFRRPEQLCSWAGLTPRHRESDTKVSRGHVTKQGSRMLRWAVCEAIQRQPADTRPRQVKDGIIARRGAEAKNTAKVAAARELITLVFYGMRDGHIRRAARPGQAA

SEQ ID NO: 403512 - protein, 333 aa, unidentified
MDVVIERACCMDVHKDNITACIVTPEGKEIQTFSTKTVFLLQLVDWIKQHSCTHVAMESTSVYWKPIVNLLEAEDIEFLVVNAQHMKAVPGHKTDVKDAEWIAKLLRHGLLKASYIPDRNQRELRELVRYRRSIIEERARQHNRIQKVLEGANIKLGSVVSDVLGVSARDMLDAIADGEEDPEKLANFARRTMKKKKEELELALKGYINSHQRLMLKTILGHIDFLTEQIEMLDKEVAERVSAHQEDVARLDSIPGIATRMAEQILSEIGTDVKKQFPTAAHMCSWAGLVPGQNESAGKRKSVKTKKGNKYLRSALTEAAHSVRGSKNYLGAL

SEQ ID NO: 403513 - protein, 337 aa, unidentified
MGLYCGIDLHSNNHVVTVIDEGDRRLYERRLSNDLAITKAALEPFRGQLVAVAVESTFNWYWLVDGLMDAGYEVRLVHTAAVIQYNGLKHTDDEHDAFWLAHLMRLGILPTGYIYPKRERGLRDLARQRMRLVQHRTSHVTSVQNQVWRSTAVRLRSHTIKGEGKQPWPELTDPDLALSVAAGRAAIDALTAQIERLEEQLLKRVGLSPQFQMLKTVSGIGPILALTIALEIGDIRRFPGVGEFASYCRCVDSRRLSNEKKKGEANRKNGNPYLAWAFMEAAHFAIRYLPAAQRFYERKRRQRNALLAVKALAHKLARACYYILRDQVPFAPDRLFV

SEQ ID NO: 403514 - protein, 372 aa, unidentified
MDQPSRLFIGLDVSKLKISVAVAEGERGGEVRLFGDIPSDPASVSSIVQKLAKRGAKLHFCYEAGPTGYELYRQLTEMGHDCVVAAPALIPKRPGDRVKTNRRDAVSLARLHRAGELTAVWVPDRGHEAMRDLVRAREAAQEAQKRARQQLQSFLLRHGRIYSGRSSWSLAHMRWISTLKFEHPAHFIVLKEYCQAIEDAEVRLKRLTDLISETVKSWTMAPVVEAYQALRGVSLIAAVVFVAEIGDIRRFENPRQLMAFLGLVPSESSTGEHVKRGGITKAGNSRARRMLVEGAWAYRFPARVSRTKQAQLEGLPRTVREIAWKGQLRLCSRYRNMILAGKHKAIAITAIAREMAAFLWAIGQEVQPAHHA

SEQ ID NO: 403515 - protein, 457 aa, unidentified
MKKRNKEQNAKRTKKDQKIFQMINPNAAGIDIGSEEHWVAVPEDRDEQPVRKFGCFTSDLYALCDWLKKCHIETVAMESTGVYWIPLFQILESRGFAVKLVNARHAKNVPGRKTDVEDCQWLQQLHTFGLLSGSFRPEDSICVLRSYCRQRENLIQHAAAHIQHMQKALIQMNLQLHKVISDISGLTGMRIIKSILAGERDPITLAKMRDPRIKRSAETIAKALEGDYRQEHLFALKQAVEAYEVYQRQIQDCDQEMEAYLAKLDSKVDDNTLPLSEGKSRNRRGNAPHFDLRSHLYRITGVDFTQIHGLDASSVYSIVTEVGLDPNAFPSVKRFTNWLALCPNNRITGGKVKSSKTRKVKSRAADAFRLAAMSLTNSASALGGYFRRMRSRLGPPEAITATAHKLARIFYHLWRTGEAYQDPGQHYYEQKYKERVLANMKKRAKELGHEISLIPAT

SEQ ID NO: 403516 - protein, 319 aa, unidentified
MEPEQTCYAGIDVSKGRLDAVLRPSGEYLGADNDERGIGSLVARLSEARPALIVLEATGGLEQPVVVALALVGLPVAVVNPRQVRDFAKAVGRLAKTDKIDAAVLAHFAEAVRPEPRPLADERARELSALVLRRRQILDMITAEGNRARTAPKAVRRRIEAHLRWLRKELERANGDLERAVRESPVWREKDDLLRSVPGVGPTLSATLLAELPELERLDRRKLAALVGVAPLNRDSGTLRGIRTVWGGRSSVRKTLYMATLSATRYNPAIREFYGRLVAAGKPKKVALTACMRKLLAIVGAVLRNRSPWDEGRFVLRAK

SEQ ID NO: 403517 - protein, 335 aa, unidentified
MIKENYIYVGIDLHKETHTAVMIDCYNQKLGEITFPNRPADFPKLVAKVKKCNTDGKTIVFGLENAYGYGRALAVWLIDKGYLVKDVNTAISHRQAKHRGAMYRKSDSDDAEAIALATLNMLDKLPDAYPNDAYWSLGQLVHRRDNIMKQRTRLVNQLHEQLCIAYPSYKQFFNDISRPTALYFWEHYPSRKYLKGKSVEDLRAELVPVSHNKCSTRTCEKILDAIAGDKVKNNAYQDARDMVTLSIVSDLQHYDKQLAEVDKMLEQMYKMLGCTLTTIPGVNVITAVKILAEIGDIKRFANANKLAQFAGIAPLHLSSSGKGKDVATKQGNRRL

SEQ ID NO: 403518 - protein, 449 aa, unidentified
MSERSGLSRGDRNRNARLARLRALLPASNAIVGIDLADVKQAIVVTDHDSKVLARKKVLCKAWQLGEVLDWAVARAKAAGFASVTVACEPTGHRWRVLDQLAAQRGLNLVCVQPLLVWRAREAEDLTWDKSDPKDAVIIARLAAQLCCYEPERTSEAYARLRHLGARRNQLTTAATTGVQQLRDLLECVWPAVLDAAGAPFRSATWCAALAVVLDRCDGDLKRVRRLGAARFLAAVRAELPRWNASRPRFRIVTAVFDALTDPTGVIVHRPGALQRTAMILHDWHTARARLAEAEAAMVTVIDELDLTNLVTSIPGLSAVGAAAILAETGDLTRFPSPRSVVKHAGLCPRDNASGHHHGKTTISGRGRAELRLAAWRAVWAAMLNNTVLKGRFAYLTTRPANRLAPLQARAACAAALLRWLHVVVTRRVTWNPAIASGIVDTTPQARAA

SEQ ID NO: 403519 - protein, 406 aa, unidentified
MQGPVITVDVSKGSCHYQPYVSNGHPMRKPKVLHDTVEGFQSLSDLIDTMKDRYECETIPVIFEATGVYHRCLQKYLDDHQIPYYIISPLMSASYRKTTPNSNKTDDLDCSHIAKAYYGECNLFPYDKPSKSFHNLRELNRYYECELNHLRMRKNTFRKYLDIVYPRLDKCFKGHSSLYDEIPMEVIKQYPHPSLLLKHKEETIVKKIEKKTSHNASFIQNIVHEMYECSMHCYSGADVTDVESMILPELVDDLQSQKERCDEILKQLVSEAQKTPYFTSIVSIVGIGDNLAARIIAELGDMSRFSCRRAITAYAGLNPKIRQSGDMDGIHLAISKKGNKHLRCLMYLAVSCNYRLKKCDVLYEFNQKKRQQSFSPLKPKAATIATAHKLLLIIYALCTNGTVYHS

SEQ ID NO: 403520 - protein, 350 aa, unidentified
MQTIYIGVDFHARQQTICYLTTDSGELLFHHLKHEDKALVRAFYAQFRGHVIVGLEASGYSPWFERLLEELGCEVWLGHATEIRRRARWRHKNDRRDAELILDLMVHNEFPRLYLPPLQSREVLRMLRYRQKLIKMRTIGKNSLQALALQSGLAKGPHLFTKTGLQELRSTTMSPAMQWQREQWLQLLEPLNERLLETMRWLQQQSQADQRISRLRTHPGVGLLTALCLVHSLEPVRRFANTRKVTAYAGLDPVERSSAERQRFLGISKGGSRVLRFLLVEAAHTALRKEADLKRFYQRLAQRHGRPKAKVAVSRKLLIRAYIMLRDEIDYAEFQRRAVAARPVLPAHGL

SEQ ID NO: 403521 - protein, 343 aa, unidentified
MKVTTIGIDLAKNVFQVHGVDERGKTVLKKQLKRDQVVAFFANLTPCLIGMEACGSAHHWARKLETLGHTVKLMAPQFVKPYVKTNKNDAADAEAICEAVSRPTMRFVPVKNGEQQAVLALHRARQGFVKTRTAQANQIRGLLAEYGIVIPQGIGHIAKRLPEILEDGENDLPGVFRQLMQRLGDHLKELDRQVGELEVQIQSWHRENEASKKLATIPGIGPITASALVASIGDAKSFENARQLAAWLGLVPRQNSSGGKQVLLGISKRGDTYLRTLLIHGARAVIRVAENKAGHAESWLARLMGRRNKNVAAVALANKNARTVWALLAHGRDYQADYEPAAA

SEQ ID NO: 403522 - protein, 454 aa, unidentified
MQKQDSYDYFVGIDCAQNKHDFAMKNNQDKFLIKKGHFSNTLQGYEKFLNTVLSKCLNKDKILFGMEVTGIYGTNLYERLKSDGYHVVMISPDSVKNYRDYKRLNKTDKIDSACIAELLLNGDAQIVHVEKNGYTDLKAYIRRRNALKVTCTQETNRFLAKVCLYFPDLLKVFPSGRATLKAIFSIYPTPYSIIEADFDELVSVLQKASKNKFGVDKANELIHAARNSIVVRKSISDGELYNIHSLIDSIDSLESEIRNLEKIIDSKAEEFPAYHVLLTLTGCGKITAATIVAEIGDISRFHKASQIVSLAGLYGDNSKSGSSVNKRGKISKKGSRYLRHAIYMVAEFARRNNPIFKAYFTRKKNGDRTKHTLAVNAVANKLCKVIYSLMKNQSTYIIQYRDLAKLSESTQNEFFQNAETDFSAKTRRKKYLYEDEYGELHEFVFKSLKTALIE

SEQ ID NO: 403523 - protein, 416 aa, unidentified
MRSLKKHIYRTKKINAIDWIQMKEQLQGSPVVFAIDVAKEKQYALLANADSSVSELLSWNHPEQTREVLTHLENLACPLTAVMESTGTYGDALRYQFRCSGFEVNQISAKRVSDARELYDGVPSLHDAKSATVIMRLHREGLSIPWRESDDAERELDALRREYDLHQSQYQRNKNRLEAYLSRHWPEVLPLLPLDSVTLESLLIEYGSPEQIAKNTEEAAKNMHLWSKNQLKNEKIAVVIQSAVNTLGQPCIDAERRYLQALTAEMRHSRQQQKEVKDILEATVKADTGLSKLASVIGLITTAVLLSCRLDPRNFRNARCFQKALGLNLKEKSSGRDVGRLKITKRGCSMARRYLYFAALRLINNDPVVKAWYQKKFDARAKNKTVIALMRKLAKALWHVARGERFDATKLLSVTA

SEQ ID NO: 403524 - protein, 387 aa, unidentified
MTKNKGRVVGLDVHPDSFAGAVVQGSDPASAVVSSTSTRVELEQLEHWALRHTSTEDTLVLEASGNAFAVAARLRAIGREVEILDSHRAGKVGKVYCATDRVDAVKIARIYLSALSPIVWQPDQKTLERREIFSAYQAVVKESTRAKQQLRSMLNEHCVRLQKGFRLCHPNAITRLLALRGWTPARKMLLQQLHGSLLAARARRALLPRHMAQEIVAEEALLRLTRLCGINLVTLYGVVAAVGDVRRFSHSKKLVAYLGLNPSVSQSGNFEGGGALKRHGRGALRALLIQSGKKLLEVTNPLQKWGLAVAARRGRNKAAVAVARKLCVALWHVMQGHLIGAIDRLDTLHTKLYKLATELGLRAIKNQGYESKEAFVQKKLYVLRSYA

SEQ ID NO: 403525 - protein, 343 aa, unidentified
MGEVSTIGLDIAKSVFQIHGVGAGGAVVIRKRISRAKLLEFFASLPACLVGIEACPTAHYWGRRLQALGHTVKLMPPSYVKAYLKRSKNDANDAAAICEAVTRPSMRFVATKSEQQQCGLMLHRSRQLLVCQRTMLSNAIRGHMAELGVVSAKGRNGTAALLKIIADEHDDRIPAAARFSLDVLARQYAVVRAEIVAIEKRIHAWHRSCKESRRLEEIPGVGPIVATALVAEVGDWKEFTSGRSLAAWIGLVPRQHSTGGKERLGRISKQGNRHLRWLLVAGAMAVIRYARQHGTKRPWLARLMDRRPIKVAAVALANKIARMAWAMMVRGERFKEPKLLPAA

SEQ ID NO: 403526 - protein, 343 aa, unidentified
MKIHSVGIDLGKTTFHLVALSAAGKVLLRKKFTQKQLITFTANMQTSLIGMEACSGAHFLGRVLREQGHDVKLIPAQFVKPFVKSNKNDFLDAEAIAEAVDRQNMRFVPIKTDDQLDLQALHRVRDRLIARRTSVINQLRAFLLERGMTFAKTPAKLKLAMPEILENADTNLTPRMRNLVSLLWNEWKDLEQQIVSMNAEVEQIASSDPACQRLRKIPGIGPLVATAIVAAIGNGAAFHKGREFASWIGLVPRQHSTGGKARLFGISKRGNSYLRKILVHGARSAVLRVKRERAPFGAWLDALELRAPINVVITAAANKLARIAWAVLSSGQEYRPTVSPMAT

SEQ ID NO: 403527 - protein, 350 aa, unidentified
MTIIGCDYHPGFQQIAFVDTETGDYGEQRLEHSEGAEKFYRDLAAQGKQVRVGMEASGHARWFERLLAELNFELWIGDASEIARKRERKQKTDRQDAQHILQLLMENRFPKIWVPSGENRDLRQLLWHRHRMVQMRTRIMNQLQAVALNEGLRCKKRLWRQHGREQLESFRLAPWASRRREDLLQLLDRLNPTITDLTQVIEQEVEKCPEARRLRTHPGVGALTALAFVLIIGRTERFQCGKQIAAYLGLVPLEDSSGNRRRLGHITKQGSSMLRFLLVEAAQVTARSIPEWRSKYFHLAMRRGRKIAKVAMARRLAIALYWMWRKGWNYEQSRKFGSHAGKLGTGDGVQ

SEQ ID NO: 403528 - protein, 357 aa, unidentified
MGKSIRNLSTVTRVGLDLAKRVFQVHAVEAKGEIVVARKLTRSQLIPFFAELPPCVVAMEACASAHHWGRALIELGHEVRLIPPAHVKPYVRRNKSDQVDAAAIYEAMSRPGQRFVPVRSIDNQAELMRHRARELLAGQRTAALNALRGHLAEIGLIAPQGAQHAYGLKRMAADGFNENGEIVVPDCVRGALRSLVGQIDALDEAIGAIDRELAASVKADETAKRLMTIPGVGPVTASAIVATIQDAGAFASGREFAAFLGLTPRQNSTGGKTRLGRITKMGDRYLRKLLVVGACATLRHRRGHNDALRLWASGMLERKTVKYKFNLTAVALANKVARIVFVLMTRGGQYDDRPVAA

SEQ ID NO: 403529 - protein, 310 aa, unidentified
MIIHPGYVGIDISKAHLDIFDASRGRQQRCANAAKDIASLIRSWKRQPPFILFEATGHYDALLRRTLAKAQIPFARVNPARARDFARAAGYLAKTDSIDAKMLAAMAQCLHPEPAQPVDIDRERLARLHKRRDQLVAMRQQERTRASECACPDTNADISRHLTWLDREIDTIEVRIETLIAAATNLAAAADLMRSVPGVGPVTAAALLALLPELGARSPKTIAALAGLAPFNVDSGQCRGLRRISGGRKRVRDALYMAAVAASRSKSRFATFYKTLRNAGKPPKLAFIALARKILTTLNAILRDQIAFQP

SEQ ID NO: 403530 - protein, 396 aa, unidentified
MESAVYVGLDIGKSGHYAVAVDASGEPIYQSAVPNDEAALRKLVTWAKEHQAKVVVDQPGGAAALVLKLCWVSEVPIGYLHGLAMARAREFYAGESKTDPKDAFVLADVARAHPSRVVWLEPSSEALAHLGLLCGYDADLRSDANRLTNRLRALLVSHWPALERALGKRLDTRGVLAVVQQYPSGPAVKNAGVAQLTAALKAQRVHRAEAYARELHQAALAQTVTITGSATAAGLIRELAVQLAAILARRDELDKEIEQSFFGLPEAAILHSLPGIGPRLGARIAVEIGCISRFRTPGHLAAYAGLGPTPWKSGTSINANRPSRFGNHRLKNAFFVAAFASLRHPPSRTYYDRKRAQGKRHTQAVLCLARRRVDVLHAMLSQGIPYRSPAPLAAAA

SEQ ID NO: 403531 - protein, 348 aa, unidentified
MSAESMHYVGLDVHERRSSLHILDDHGKRVKALEVRGGWPRVMDEVTRSVPRPFAVCYEASCGYGYLYERLAPLAARVAVAHPGQLRLIYRSKRKNDRVDAAKLAKLLYLDLVPRVHVPTADVRAWRALITYRHKLMDKRVGVKNQVRALLRGLGVADVPAGKRLWARKGIAWLKALPLADAADALRRDLSVGELDDVNARIRRVDKELGRRAAAHPGVTLLRTIPGVGVRTAEAVVAWVDDVARFARNRQVGTYFGLVPCQDASAGANRLGHITRDGPPAVRKLLCEAAWQAVRRSPALRASFERVMRGDPDRKKVALVATAHRLARAMAAMLRTGEAWRETAATPG

SEQ ID NO: 403532 - protein, 387 aa, unidentified
MQKPHDNSKASPAAFMQDNTLIAVIELSLSNWLVAGLIPGVSREPLKKLEPNPEDLLKLLHGWRDEAIKAGRPITRIAVAYETGRDSFWLARWLRERGIDAHVIHATSVAVSREHRRAKTDRLDTAMLKRGFLGWLRGERGHCTVAIVPTMEEEDAKRPHREREGLVHEQTRVVNRMKSALIQFGVRNFNPKLRKARVKLETVRTPEGKSLPPNTIAAVRRDMERLKIIKEQIKAIEQARLQQFEQKPEALANRMVYLLVRIYGLGWETADLLVHELLSRTLRDRKAVARYAGLTGSPDESGSKRREKGLSRSGNARVRKIMIQLAWRMVKFQPDSALVQWFKQRTENAKGSRKPMIVALARKLIIALWRYANDGVIPEGFRLHSAA

SEQ ID NO: 403533 - protein, 456 aa, unidentified
MPGSTSTRGRSSGQLNTINPNAAGRDVGSTFQVVAVPADRDEQSVRTFRTFSGDLHRLADWLKEAGITTVAMESTSVYWIPVFEILEARGFEVLLVNARDVKHVPGRKTDVQDAQWLQQLHQYGLLRGSFRPRDGVVRLRAYLRHRERLVEYAASHIQHMQKALMQMNVQLHHVVSDITGATGMRIIRAIVSGNHAPERLAEFRDVRCAASEATIGAALTGNYRAEHVFALRHALELWDFHQAKIAECDAEIERVLRTLNEVRATPAEPLPAVRHAKAKNEPEFDTRPALYTLLGADLTQIHGFGAYTVLRLVAECGDDMRKWPTAKHFTSWLSLAPRNKISGGRLLSSKTRRSSNRAATLLRIAAVNVGRTQTALGAFYRRLAARIGKAKAVTATARKLAILFYQALRFGMTYVDPGASYYEERYRQRVIQHLQHRARHFGFALVADPSASGGVS

SEQ ID NO: 403534 - protein, 405 aa, unidentified
MPRNMQYERAFGLDLSKKTFHGCILDGPDLGSRHFFTGKMGPQGKAKLAGRLCKGDLVLMEAGTASFSLARFLLENTEAEVVVLNPAKLYNIFNSTLKTDKADSEKIVRIARNMPRDEWPTVSIPTREEQAERSAVSLEVFLAQEITMLVNRLYALFNSMGHPFIKKSELKTEESRLALANRLLCEDGLAIEQAIMLSDQIGNVTDQLEQCKQRLRDICLSHPREALSLFSIPGIGLMTAASQIAFLGDGSRFNSPDSYVNYVGLSERRFDSGTKVSKGHISHMGNKCIRRNIIQAAWVASTKTKSNPLSEKYEYLRLRGKSKPVAAVAVAKKMIQLSYILVKSNGIYEFTKQQGLAAFRRRLQYHKLAGLLEYLPDSTRKQMEEIDRTKRKEAAATTSNPKKFA

SEQ ID NO: 403535 - protein, 352 aa, unidentified
MRKYYVGLDVHKLTIVIAVLDAHGKIITRTVIETSTEAVRDFFRNLGGEIHLTFEEGNHASWLYDIVEPLVRRVVVCNPKHNRIEGSRSDRVDAVRLAELLRLNALKPVYHGEHGTRTLKHLMRCYECLVKDITRVKNRLKALYNSQAIKQRGRELYHASKRQSWLEKLPNQGQRTRAELFFQQLDELKVIKRAAQKAMVAESKRHPAYRVLSQVAELGPVRIAQIIPTVETPWRFRTKRPFWHYSGLAVVTRSTADHELEDGRVRKRKKQIIQTRGLNEDYNRRIKSIFKSAATHACHCGAYREYYEGLLKTGMREEMARLAVARKLSATVLAVWKSGESFDAGRILRKAV

SEQ ID NO: 403536 - protein, 315 aa, unidentified
MTGIICGVDVSSASLVARMGRDGAQAVFPNTAEGIAALAAFCQAHQVEGVAMEATGGYEQQPFILLSAHGLPVAILNPRAVRRFAEGMGLTEKTDAIDAGLIAWFAEVKRSTPCPPPSPHQQHRRALVTRLRQLTQLRTAQRNQRRLITDPAVLAAIDELLTLVERQTRTIEEEIATLIAADPLRTQLDREFRSIKGVATRTVAPLMAEMPEIGTLSNKSIAKLAGLAPLARDSGKHQGKQQVRGGRAAVREILFVVASVAGRYEPDFIAFHQRLTVQGKPPKVVRIALAHKLLVRLNAKAREVRHHMKVLRTPL

SEQ ID NO: 403537 - protein, 348 aa, unidentified
MRFYTKSHKHYCGIDLHSKKMFVCILDDDGTVVLHRNINSSPDDFLRVIAPFRENLVVGVECMFAWYWLADLCSREKIEFVLGHALYMKAINGGKVKNDKIDSHKIAGLLRGGMFPMAYVYPPEMRATRDLLRRRCFLVRRRADLFGHVRSTAIQYNLPEIEATLKYEGSRSSVPDHFPDPEVKKIVQIDLAMIDAYDDVIGALEWELEKTSRRQDRRTLMLLSSIHGVGKILSMVLLYEIHDINRFETVQDFASYCRLVKCPHESAGKKKGTGGAKIGNAHLKWAFSEMAVSFLRHNPPGKQLVERLAQKHGKGKALSILAHKLARAIYYMLKDGVPFNRDKFLATA

SEQ ID NO: 403538 - protein, 425 aa, unidentified
MKNINYIGMDVHKEKIVIAEARKKGEAEIIGEFNNNDSGIKKMVKIFKEKNKEEEVQICYEAGPCGYAIKRILDKEGLNCQIVAPSLIPVKVGNRIKTDKRDAKKLARYFRAGELTFIHVPNEEKEAVRDLVRCRQSILETARRIKQEISHFLLRHALVYSGKCTWTESHRTWLKDLKLEEIQQITIEQYINTLTLVEIQLKEITKKIEEVAMSKEYKDKVAALSGYRGISTLTAMVIISEIVDFRRFSNAKELMCYLGLVPSEYSSGGKESKGRITKCGNKHVRRALIESAWHYALKPTISKKMEKKLADIPNEQRIAPIKALKRLSKRFYHLVLKGKPRQKAIVAVARELSGFLWHSMVELETKQELGNKFEQKTVMQTVKQIVPQLQSEIASDRDILFKYQNGEIYSRGASLKPLSKFAHSG

SEQ ID NO: 403539 - protein, 390 aa, unidentified
MQALCPRPDEHIAVRTDLNAIFVSLELSRSTWIITSLAPGGGEKMSKHSVPSGDVAALLARLSQLQEKARARTGRIFPIIVIQEAGLDGFWIHRVLQQEGIESHVVDPASIATSRRRRRAKTDRIDGEAQVRALLAYKRGEPRVCAMVQAPTPQEEDRRRISRERETLTAERVRHVNRIKGLLFAQGIGDYEPLHRNRRERLEALITGDGRPLPECLKAQIRRELDRLELLIEQVKAVEAERDAVLARAQASPGVPAPAALLLALKGIGPEAAATLWSEGLFRTFSNRKQVAAYAGLAPTPWQSGSVHRDQGVSKAGNPRLRTIMIQIAWLWLRHQPQSALAVWFRERIKRTGGRLGKTMIVALARKLLVALWKYATAGVLIEGAILKPA

SEQ ID NO: 403540 - protein, 392 aa, unidentified
MWAGADIGREHHHVAVVDGDGERVFSRRVANDGTALLAAIGDVLGLAEEVVWAIDLHSSESVLLLTLLLDHGQKVVYLPGMIVNRAAEGYRGAGKTDAKDALIIADQARMRRDLTVLDGDDDLVVELRMLVARRKDLAADRTRAVNRLHDQLLAICPALQRALDLTTKGPLTLLTGFQTPAALRAIGVDGLTDWLKDRKVRNAAALAAKAVAAARSQHTALPAERTAALLAAQLAQGVITLNEQLKELDQLIEDRFHHHPSAEVITSMPGIGVLLGAEFIAATGKPSRFATADQLASFAGVTPQPRDSGRISGNLHRPQRYSRPLQRVFYTSALLSIQSCPESRRFYDRKRAEGKHHIQAVLALARRRVNVLWALLRDNRTYQPTPPLTLAA

SEQ ID NO: 403541 - protein, 407 aa, unidentified
MNSVGIDVSKGKSTVSIMRPFGEVVASPFDVAHSIGELGELANALRGLKGETKVVMECTGSYYQPIAYALNEAGLFVSAVHAKLIHDYGNNSIRKVKTDKADSIKIANYGLSHWLELPRFVPEEDIRIMLKTFSRQYSKYGKVKTMLKNNFIALTDRTFPGVNELFTSPPRKSDGHEKWIDFSAKFWHCECVCGLTPKAFADRYQKWCKKEGYRFSPEKADDIYTSACGHCSVMPKNESAKLLVTQAINQITSISENTAIIAREMKLLAESLPEYPVVSQLYGFGDILGPQLMAEIGDITRFRSKGALVAYAGLEAPPYQSGKFESADRSISKKGSPHLRKTLFQIMQVYLQNAPADDPVSQFIDRKRAEGKHYYSYMTAASAKLLRIYYARVNEFLNKTSSELDVA

SEQ ID NO: 403542 - protein, 372 aa, unidentified
MTSEHAAFIGLDTSKLKISVAIAEGERNGEVRFLGDISSEPTSVAALVKKLAKRGVKLQFCYEAGPTGYGLYRQIVELGHECSVVAPSLVPKRAGDRVKTNRRDAISLARLHRAGELTPVWVPDEAHEAIRDLVRARDAAFEAQKQARQQLNSFLLRHGRYYTGRKAWTRAHGRWLASQAFDHPAHQILLAEYCQAVEDAGVRLDRLNKLIGETSASWSMAPVVAAYQAMRGVAFMTAVTLVVEIGDVRRFDSPRQLMAYLGLVPTESSTGERVRRGGITKAGNARARRALIEGAWTYRYPARISPTINARLAGLPKSVCAIAWKGQVRLCTRYRRLIGAGKAKTVAVTAIAREMAAFIWAIGQEVAPLGKP

SEQ ID NO: 403543 - protein, 368 aa, unidentified
MLSIGIDVSKGKSTVCGMKPGGEIVYAPFEVQHTREGMSELVSLLHNSGEEVRAVLESTGSYHCPVVAALLENGIFVSVVNSLRMKRFCSQSIRKVKTDRIDAMQIALYGLAYWQELQPTRLPEDTYRELQLLARQYYQMTSLLIKAKVDFNAICDQVLPGMQELMSDHAGRHKLSDFVLRYCHTTHILEMGETRFRKDYCKWAEKKGYRNCERMAALIFATAQNGIPVLPNAPSTQIVITEAIRVLHTVEASRDAILTQMQALAKTLPEYSLVREMPCIGDTLAPRLVAEIGDVRRFRSKRALIAYAGIDAPPYQSGKFCANNRHISKRGNRYLRKTGYEVMQSYVMHKPANDPICRLCFAILFFCR

SEQ ID NO: 403544 - protein, 342 aa, unidentified
MEKIATIGLDIAKSVFQVHGVGADGKVLIRRQVTRARMLPFFAKLPRCLVGIEACNNSHYWARELTALGHDVKLMPAQYVKPYVKRGKNDAADAEAICEAVTRPTMRFVAVKSPEQQSLMMLHRVRLMLNRQRTQISNAIRAHISEFGVVAPVGRLGVDRLLDVVADASDDRVPEDARLCLQMLAAQLEVVKQQILENDRRVLASARRTELGRRLMDIPGVGPLLASAFVASVADPTMFRTGRDLAAWIGLVPKQNSSGGKDRLGSITRAGNRYLRQMLVVGAMAVIRYAQRHGTRRPWLVQLLARRPTKVAAVALANKNARMVWALMTSGERYREPKPVVA

SEQ ID NO: 403545 - protein, 349 aa, unidentified
MSHKLNAGIAVIGIDIGKNSFHVVGLDRRGAIVLRQKWSRGQVETRLANLPPCLIGMEACVGAHNLSRRLTSLGHDARLMPAKYVRPYSRGQKNDFRDAEAIAEAVQRPTMKFVATKTAEQLDLQALHRVRERLVSQRTGIINQIRAFLLERGVAVRQGLRFLRAELPRILATPCDALSPSMMRVIEDLAGDWRRLDERIEGLSSEIEVLARRDVGCERLMSVPGIGPIISSAMVAAIGAGDAFSKGRDFAAWLGLVPKQISTGDRTILGKISKRGNRYLRVLFVQAAWVVLIKPKSWDRHGLKPWLEAAKKRLHHNVLAIALANKLARIAWSVLARGRAFEASRIQVA

SEQ ID NO: 403546 - protein, 380 aa, unidentified
MMLIGVDPHKSTHTATAVEPGTNREVASIRIDATLREYRRMLTWAARWPQRRWAIENAEGLGRHLASWLLARGEHVVDVPSTATARVRQLSRGGGRKNDRIDAAAAACVAALQGDARPLAAEGIADALAVLDERRVNLAQARVRAVNQLHALLRALLAGGAPTDLSAANAAALLRTVRPSGEVERVRKAVAGDLISEIRSLDTRLKASAKTIACLVEKSGSTLTQTVGIGPIIAGRLIGRTGRPSRFFNSAAYANYTGAAPVEVASADKARHRLSRGGDRQLNSALYTVAMTQIRMSGSLGNTYYKTKIAEGKTPREARRCLKRRLADHVWRVMTSDERHHVAIPSLPYSHPACRCRVNPDPLVPGGFEDSSQHCPAKRQ

SEQ ID NO: 403547 - protein, 444 aa, unidentified
MGLKKEVIEFEVVNFHGAGIDIGSREIYVSIDGVQVVSFKTFTEDYVRCCRYLKEKGIVSVAMEATGVYWMSLYEMLESFGIHVCLVHPREVQQVKGRKSDVKDSQWIQRLYAAGLLRESIVAEGLLKELRMLVRERGDLIEMGSTYVNKMQKYLELMNIKLRNVISQIHGESGLKIIRAILNGERDEEKLLLLCHSSIKKNKGEDVKKALHGNYNSRYLFMLGENLRLWEEHQLSIKAIETQIEDLLIEMGKNNRDIVVDSPSKPSRHHNPEIEDLHTKLVQIYDGTNLSSISGINDYTMLRLLAEIGTDLSRFPTEKQFVSWLGLSPKNKQSGKMKKRIKSSEDNCAGKIFRQSAQALSTSKNNAIGAFIRRLKGRKGSPVAIKAGARKLAIAFYNAIIRGMDYVEEGAVRYNELLLQRERKTLLFLAKKHNLQLIGCQYVP

SEQ ID NO: 403548 - protein, 416 aa, unidentified
MKCFVGIDVSSEKLDSCFLDDEKNILCQTSYVNDTLGATALKKQILQLHQIYDFDKVVIGMEATSMYSYHPAMNFHQDEQLQEIQAITTIENPHRIKQYAKMFDTDKTDTIDAFMIADYLRNQHYTTSPVKEEKYMALQRLTRARYQTVCQLVEVKQHFIENLSYKCNTLKKELRDAPGSTTVFSAAIMDLFTQDLSMDDLAQLPLDDLADWLQKKGRGRFKDPQGLAKTIQKAIRTSYRLDKAVNQSVDIVLSVFVREIRGLEKAIKDFDKAIEDLVQTIPEYQCLTSIPGVGKVYAAGLLAEIGQIERFKDQANLAKYAGLFWKKHESGKHSRENTPLTKKGNRYFRYYLVEAANSVRHYLPEYQMYYRKKYQETPKHQHKRAIVLTARKFVRLVDTLLRNHQLYTPPRSVIEK

SEQ ID NO: 403549 - protein, 373 aa, unidentified
MPKYSTAFGMDVHLRSTTVCALDADTGEAVTRRFPGNPWGEIAGWMDGFPGPSLAAYESGYLGFAPQRGLAGLGVECVVAAVSKVPRSAADFSSKNDRNDAARMAKAILSHDISPVWVPSPEIEGLRDLAGAHDAATARLAAAKQRLLAFLARRGYAYGGTTPAGNPRKYWTYDFLRWLDKVRPADDGGIRALAALRSEVETAAETRDDLLAEYRAAVAAGPLSAEVEALQSIKGCGFALAAAFASEVGDFSRFRSGRQVTSYFGLAPKQRSSADSVRLGGISGAGNALVRRLAVEGSWSYVQASHQPKLMPKGSGVPLEVRMHGRKGSERLLRRREEMLARGMPQAKANAATAAELVRWLWALGAMCREGAE

SEQ ID NO: 403550 - protein, 381 aa, unidentified
MRNVCGLDVHKDNVFVCIDKEKGEKIQFKTGILTKDLDALRDTLVANDVTEIAMESTSVYWMPIWRVLENDFKLYLVNPYAIKQLPGRKSDIKDAEWIATCLRKELIRGSYVPDSTIQQLRQYNRRIFDINKQSVYIQNKIDAALQRCNIRIGNYISNVRAKSYCQIVDMLSEGKTSPELLIVKVHKRTVNKWGRETILAALEGVVNKTDCRILKQLKEELDMLRKHKIECLVMLREICMENYKEQLLDIQTIPGIGEQGAMQIIAETGVDMKAFITAAMLVGWAGLKPRNDESNGKFKSRSTTHGNKYLRKILIECAWGASRTQGCFFNKFSYHQTMVRKKNRQKVQVAIARKILVVIWNILEKGVVYNDVLEKNKTKDK

SEQ ID NO: 403551 - protein, 343 aa, unidentified
MDHFAGLDVSVKDTSVCIVDGAGKIVREVKVASEPDDLLQVLRNPAYCFKRIGLEAGPLSQWLFSALAEADLPVICVETRHMRAVLKAQINKTDRNDARGIAQMMRVGLYRPVHVKTLRSQKLRMLLTHRKLLQAKAIAVENDLRATLRNFGLKVGVVGAVKFEARVKELVDNFPDLVTLVESLLVVRRVLREQISILHRRVLGAVRNDEVCRRLMTVPGVGPVVALTYRTTVDVPARFRKSKSVGAAFGLTPARDQSGESDRPGAISRCGDEMMRTTLYEAAQVMLLRSAKWSWLKAWAMKIARHRGMKKAIVALARRLAVIMHRIWIDGTEFRWTREAVAA

SEQ ID NO: 403552 - protein, 343 aa, unidentified
MKLSRVGVDLAKNVYQLHGIDRSGKTMLKRRLKRHQWFRVLLDKTDPDCVIGMEACAGAHHWARQLQARGYTVKLIPPQFVKPYVKSNKNDARDAEAICEAMSRPNMRFVTVKNIEQQDIQATHRIRAELSTQRTAKANQIRGLVAEYGLVAAKQLSSLRAAIPCWLEDAENGLTGDFRCLLHGLWDDLLMLDDRVDGMDKTIQRLAENNEDCMRLQQLRGVGPMISTAIVATVGDARQYQKSRQMAAAIGITPKQHSSGDKHRLLGISKRGDVYLRTLMIHGARAVVARATNKDDRLSRWVTNLATRKHPNVAAVALANKTARMAWAMLRHETDYDPDFALS

SEQ ID NO: 403553 - protein, 315 aa, unidentified
MIIGIDVSKSSFDSAWAVSGKANHKVYDYSDKGIAELLSDTPETGHYVMEATGVYHSKLALTLYEAGRAVTVVNPLVIKRFCQMQLSRVKSDKADAEKIRQYGEQTDLALWKPSADEIDALRQAHGWLDDLIRDRTRLLNRQEAHQHQAKPNNFVTRQMKETYTRLTNQIVLCEGQLSVIVKKCFPELYEHLVSIPSIGKKTAVELIVITEAFSKFAEVKRLSAYAGISPTTYSSGSSIRGKGAIAKMGNGRIRQLLYLCSLTAMRSNKDCKALYERMKEAGKPGKVIQVAIAHKLLRQAFAVATKGVYYTEKTV

SEQ ID NO: 403554 - protein, 375 aa, unidentified
MEHHSEAFVALDTAKLRNAVAIADAGRNGEIRYLGEFDNTEAATRKLVAKLASKHARLTFCYEAGPTGYGLYRLIKSIGHDCIVVAPSLIPSKPGDRVKTNRRDAVNLVKLLRAGELTAVWVPDERHEAMRDLVRARDAAVKDYRIKRQNVSSLLLRLGRHYPGKKTWGRTHINWLTGLKLEHREQRIAFEEMLLAVRQVRERIERLEQAMREAVADWTLAPVIEAVQAMRGIDMVGAIAFLAELGDLSRFENPRQLMAYLGLTPSERSTGESVKRGGITKAGNTRARRLLIEAAWSYRFPPRVSKDMQTRIGAAPRTAREIAWKAQMRLCGRFRTLTRKGKRPTIVVTAIARELSAFIWAINREVVGSHATANQ

SEQ ID NO: 403555 - protein, 315 aa, unidentified
MSEITVEKFVGIDVSKNTLDICIEPAGEVLHVEYNDTGIRQVVKRLVKLAPTLIIAEATGGLEMRLAGELAAKSLPVAIINPRQARDFAKATGQLAKTDLVDAAILAAFARAIRPVVRPIKDADIRDLDDLVTRRRQLVEMRVQEMLRLGTASKVQKKSLAAHITWLDKRITDLDDDLTKRLRASDAWRAKDDLLRGIPGVGAVTSLTMLAKCPELGKLNRREIAALTGVAPLAKDSGKHRGKRFIWGGRADVRAVLYMATVSAIRFNSRIKAFADRLKQAGKPSKVVIVACMRKLLTIMNAMLKNNTPWTSQNA

SEQ ID NO: 403556 - protein, 337 aa, unidentified
MYYTGIDLHRKTSFFTTIDKEGQIVNKANLANDAEQIMAYMSRLGADSRIVIESTASWYWLYDLLTEAGYEVLISNPVKTKAIASARIKNDKLDSHMLAQLLRADLVARVHASSRKTRRLKELLRHRSKLVRDSVRMKNRIHAIMAKNNLNAPASDLFGKKGLAFLQQVDLPDDHRQHVQTYLSLYQTIKEQVRILTAQVTQQVKGSDNAKLLMTIPGVGPITAMYMVAEIEDVSRFASYRHLASYAGLVPSLDASADKQRLGRITKQGSPHLRTALVEAAQAATRTKSRLNVFFRKRIVRAGYQKAIVATAHKIIQYAYFILRDQTPYRESPKAVA

SEQ ID NO: 403557 - protein, 471 aa, unidentified
MKPKPQEKTSKDSCRPKPGHWNKMNRKQRRETMRKIQSDDLSLEVVHPDSAGIDIGNESHYVAVPPTRDSQPVRRFGCTTAELKEMAQWLKQCAIRTVAMQSTGVYWIAVYDILEAAGFEVYLVNARETKNLPGRKSDVQESQWLMKLHTYGLLRNSFRPSQEIRTMRTYWRQRNDLVQAAGRHIQRIQKALTQMNIQLANVLSDVSGMTGQAIINAILAGERDPHKLAEFRDPRVKASKHEIARSLEGNWQEDLLFVLKQEQDGYEFCQKQMLECDRQVEQYLQQREDRSKGTPLPEEKRKGRLKKKKGNAPVFDLRGELFRMTGADLTQIDSIDIMTATTILSEVGWDMGKWETEDHFVSWLRLCPDNRISGKNRVSIALKMAASTLRRSNTYLGAQFRRFRTKLGSPIAIKAMAAKLARLVYRMLRYGMKYVDQGAKFYETQHRILQIKQLKWKAAKLGFQVVQAPAA

SEQ ID NO: 403558 - protein, 351 aa, unidentified
MWIIGVDYHPSVQQIAFVNTDTGECGERRLSHSDREAEKFYRGLKAEGCKVRVGMEATGYARWFERLLAELGFELWIGDPAKIKAKRVRKQKTDRLDAELLLQLLLEDRFPRVWVPSPENRDLRQLLWHRHRLVQMRTRITNQLQAVAMNEGVRRKKALWSKPGRAQLESLPLAPWAARRRQDLLELLDRLNPTIEELSAAVEQQVKHRPEVLRLMTHPGVGPITALAFVLIIDSAERFACGKQIASYVGLIPGEDSSSDRRRLGHITKQGNSLLRFLLVEAAQAVVRRDPDWRRRYTHLAMRRDKRIAKVAMARKLAVGLYWMMRKEWNYEQLKKFGSYAGESEHGHGVQ

SEQ ID NO: 403559 - protein, 356 aa, unidentified
MDNATHLGLDVHKDSIAVAILRPGQHTPDERMIPNTPEALRALVSKRGAKGHLVACYEAGPSGYDTYRLLTSLGVPCDVIAPILIPRRAGRRVKTDRIDARNLARLHRAGELTAIRVPTSEEEAIRDLVRVREDLKDDRRRTMHRMKSFLLRQGRRYPAKTKGWTDKFDKWIHAQHFTEPAAEAAFRHYAGSLDARRVELRAIDAEIADACTRPPLEPAVTKLRCFRGIDSLSAVTIAAEVCDFHRFATATQFMAFTGLVPSEHSSGSSEHRGSITKTGNAHLRRVLVEAAWSYRHRPGIGIELRRRARGNPPRSPPTPGPPSAGCALGSASSPHAGTTTWRWWRWPGSWPGSSGG

SEQ ID NO: 403560 - protein, 429 aa, unidentified
MKIIYPRVCGIDVHKKFIVAVICISESVEPVYLKKRFSTFHNDLIRFRDWLIQNDCQNVCMESTGKYYIPVYNILESHISNIVVANPKWVRAVKGEKDDDKDAKWIADLFKLGIVKSSFIPQKDFRILRKLTRYKYKLVNMRSSEKNRYQNALTSGNCKLDMVFTDVFGKSASNIIDLILSDNPYTDEDILSKVHKNCKASPDMILNSINGTDLTPVQKSRIELVNNHIKQLSSNIQRLDKLIDLMIEPYEDYISFLCQIPGVSRNSAITILSEIGVDMNQFTSTRRLTSWAGLTPSSNQSAGKKKSVRISRAGVYLKPCLVEVAHAAVKDTNHPYYANKFNKISKRRGKKRAYIAIARKILVAAYHMLLTGEIWNPADLAEVETPVEQRIKYVKNNLKSDIKQLLDIGLTVEELTLMIQQNANNIATQ

SEQ ID NO: 403561 - protein, 438 aa, unidentified
MEKVTIGVDPHKLSATIEVVDVYEKLLGSGRFTTDQAGYIAMRTYAKTWPDRVWAVEGANGAGRPLAQRLLEAGEHVVDVPAKLAARVRLFDTGHNRKTDALDAHSIAIVAVRTDTLRVLKVDGELEALRMLTDRREALTRRRVQTVNRLQALLAELLPGQRKKDITSLQAKAMLATVRPRDIAGKTRRRIAAEELADLVAVEAKIKRATAELKTMVTARGSTLMDIHGVGPVVAARILADVGDVTRFADRNRFASWTGTAPLDASSGEQNRHRLSRAGNRRMNHMIHIAAVTQLRLDTQGRTYYRRKRAAGKKPMEAMRCLKRRISDAVYRQLVADAQRAVLSLGAGEAGPGGHCGATQSSGAVDLPPHIDTSDQPLPGPAEPTVLPPSRRQNNHAAPAASPPHRRVGAVKVERPTGRTTLTATSAGAPSKATRPRP

SEQ ID NO: 403562 - protein, 455 aa, unidentified
MKESVYLGIDVSKGYADFVLLNSKQEYAEPLFQLDDNASGHQQLTLILKKYCSKNPDVEIYCGLESTGGYERNWYNFLFTLCPDLPLKIALLNPVVIKGMSKTALNRTITDEVSAFNIGLYLMSFRNKITFHKENPDKDNPFKSGRSVYTYQKMLNKQKVQLNNQLEKLLYQYFPEALVYCRHGVPKWLLNTLSKYPSAETIQKAGVEKLRKIQGIGNDKATKIIEKARLNKQTLHPNIAFVIKNTCHEILHKETMIDQSKSRIEQMYKDHPMVKLLCTISGIGYSSAIAILFEIEDIHRFETVKKIAAYFGLNPEFKQSGDGTWGNHLSKKGRKLMRSVLYMVCLSSIRYDPTIKKMYSDIRSKGKCHLFAMGVLMHKMLRVIFGVLKSNTPYDVAIDEKNRLKVSEKQADLQQFKKQQTIENMKKRRRFQQQQLDQMPISNRKAKKIKELETP

SEQ ID NO: 403563 - protein, 362 aa, unidentified
MTNTTFLGLDVHAATIAIAVLGDGHEKPGIREIPNDPATIRKVIKQIGKGRSLRCCYEAGPCGYVVQRQLAGMGIDCQVIAPSLIPQKPGDRVKTDRRDATKLARLLRSGDLTPITVPTEDQEAVRDLVRAREAARRARTDARHRLAKFLLRQGHRHHACNWTGQFWKWVNGVTFTHPALTKTLQHYTDMVLHLDQQIEALDSDIEEIATREPFRDMVAKLSCLRGISTLAAMVILSEVYDLRRFTTARQFMAFLGVVPSEHSSGQKQRRGGITKTGNGRVRRILVEAAWAYRHYPKVTTRQRKMFASQPVAIVDVCRKANLRLTRRFQRLEARGKKSPVAMTAIARELAGFVWAVARADTA

SEQ ID NO: 403564 - protein, 343 aa, unidentified
MQTTEADKLYAGADLHGNNVFLSLIDGGGREVYRRRVKANLTAVNEALDPYWPRIEAMGVESTFNWYWLVDGLQAQGRDVRLGNPAKMTPYEGIKNTDDHTDARWLAEQLRIGVFPSSYIYPRAIRGVRDALRRRQLFVRQRIQAMLSLEGLMVRYGLEAPGTYALKKWTLREIEATGLEPFVQLQLRTLLGALQDSERRVKEIEATVKTFLQPIAPFGRIQQVPGIGEILGMTIVLESGDFARFANAGCYASYCRTVQSRRESNGKKKGENNRRNGNPHLAWAFIEAATFAPRFEPQIQSWCDRKKRQRNSVVARKALACKLAKAVWHVMNGKDFDMRMLFG

SEQ ID NO: 403565 - protein, 428 aa, unidentified
MRRISNRVAGLDVHRDSVTACVEIFDGVEVSVIKERFSTTVKGVRGLGEWLADADVELVVMESTGVYWKPVFYGLEGRFDDMWLVNAHHVKNVPGRKTDMSDAEWLADVAAHGMVRASMVPEPEIRALRELTRYRKTQIVARGVEMQRLEKVLQDAGIKLTSVASKVWSKSSRAMIEMLISGQVDPEVLAELAKGRMRPKIPALVEALEGRWGRQHSVVAKAIIAHIDFLDTTIDELSDEIVEATRPFDELVRLWSTIPGVSTRTAEMMVAEIGADMGRFPSAKHLAAWAGLAPASHESAGKRRPAGTRQGSRHLQGALVEAARAAARTKGTFLSERYKRIARRRGPNKAAVAIAHSMLVAAYHMAITGEIYRDLGSGYYDNRKDPSQSEPARQGTPSSRIHRQPHPRCLTQPAPQINLPPPPPLTPD

SEQ ID NO: 403566 - protein, 376 aa, unidentified
MREKLRFLGLDVHAETIAVAIAEPDGEVRSLGTIANREDSIRKLIRKLGPAENLRACYEAGPTGFVLYWQLSQLGVACAVIAPTLVPKKPGDRVKTDRRDALKLARSHRSGDLTAVWVPDEDSEALRDLVRQREAAKQDQLRARHRLTKFLLRTGQRPPLGLKAWTERWMRWLAQVRYTQPAQEVTRLDCMNEVEHMAARVKRLEEAILEVVKLAPEPMQELIRGLQALRGVAHISAVTIASELGNITSRFESARKLMGYCGVFPSEDSSGKRIRRGGITKCGNAHLRRIVVESAWCYRHLPRVGEKLRKRHQGVPAEITEIAWKAQNRLHKRYMKLTMAGKDQRKVMTAVARELLGFIWAIGIKTEAACKQPMAA

SEQ ID NO: 403567 - protein, 313 aa, unidentified
MKQSFVGIDVSKNSLDVHVLPEDVSYSFAYEPQKVKALIRKLKQLKPALIVMEATGGYEISLAVQLSAAKLNIAVVNPRQVRDYARAIGKLAKTDQVDAYVIARFAQDVKPEAREQLTLKELQLKELVMRRQQLIDMRTAEKNRLTRAHTPQILQEIQEHISELNARINAIDEQLHNDIKNNPSWNQKLEIIASVPGIGANTAHSILFCLPELGKLNRRQIAALVGVAPMNRDSGMMRGKRSIVGGRAVVRKMLHMPTLSAVTRWNKRLKTFYCHLRDQGKKHSVALTACMRKLVIMLNVMVKNNQVYDPKFC

SEQ ID NO: 403568 - protein, 336 aa, unidentified
MKSWSVTILSETSVLKKMNQGADPNALHRFLTSHYPEAEYYSVYEAGFCGFWIHDRLTELGIHNIVVNPADVPTMSSEKLRKTDAVDSRKLAVSLRAKQLKGIYTPDSEALEIRSLIRLKNSITKDMTRQKNRIKSQLRYLGIEIPTEYLEPHSNWSKRFLNWLKEVEMRTPSGRQTLDILIMQFEALRKQKAEMTRRLRALSHTERFDEMLRLLMTVPGIGQTTGLALMAEIVDITRFDNAEQLAAYVGMIPMCHSSGEHEGVGDITLRKHAILRSNVIEAAWVAIRKDEAMQLCYLNNCKRMVPSKAIVKVARKLVNRIYFVLKRHQPYVNAVA

SEQ ID NO: 403569 - protein, 449 aa, unidentified
MGSSTSHREEKALQVVHPHAAGIDIGSREHYVAVGSDPASVRTFGCATADLFEMGRWLKACGVTTVAMESTGVYWVPVARILEEDFGIAVVLVDPRYVRSVPGRKSDVKDCQWLRRLHVYGLLTGVFRSPTEIEPLKAYYRHRKSLVESCAQQVHRMQKALEVMNVQLHKVLSDITGLTGMRILRAIVDGERDPVILARHRHPSVQSPVEEIAKALGGKFLVEQVFVLQQALEAYDFSHRQIAACDGKIEAYMRTLKPRAGRESPTETTSAPRARRKNQAHFELRAELSRITGVDLTRIPGIDALTSQTVIAEVGIDVSAFPTEKHFVSWLALCPNHAITGGRVRRRKSRPSANRVATALRIAAQTLHKSKTALGAFYRRMRARLGAPKAITAAARKLAATVYRMLKYGEAFVERGQDAYEKQYQDRTLANLRRSAKHLGFQLVAESVS

SEQ ID NO: 403570 - protein, 414 aa, unidentified
MEARLERGCGLDVHQATVVACLLVIRKSGKIQKQLRSFGTTTRELLELREWLSSEHCNHVAMESTGVYWKPIYAVLEGDDLEIVVANALHIKKVPGRKTDVKDAEWIADLLCHGLLRPSFVPPAPIRELRDLTRYRRKLVESRTAERNRLLKLLESANIKVASVATDVFGLSGQRMLDALIEGKASLPEMADLAIGRLRNKIPQLELALEGKLQEHHRFLLRLQRSRLEAVESDLSILEQRIQQQLQPYAAQLALLREIPGVDLTLAAIIIAELGVDMTVFHSPSQLSSWAGVCPGNNESAGKRKSSRVPKSNMYLKTALVEAANAAARAKGTYLRDKFYRLKARRGYKRASMAIAHKILVAIYHMFSEDVHYNDLGDLYLDKLNNHQVTRTLVHRLERLGYTVTLTPQQQKAA

SEQ ID NO: 403571 - protein, 323 aa, unidentified
MNHPALYIGIDVCKDHLDTIRFDHKPTRIPNTAKSINALIKRVKATGQTTLLCCEATGGYEQKLLHAVTDAGLCIARVNPERVRHLAKSDGVFAKTDALDAALIKRFAEQKKPRPYKRPAACVERLQNLLNRRCQLLDFHTQENNRLQQTHDLEIKRLIKSHLAHLKRQLALLDAKLRHLSASEPELRSRHDRLLPVIGLGPVTILSLLGYLPELGQYTGRQLTSLVGLAPWARDSGDTRASRCIRGGRSHARKSLYMAALVASRHNPILAAFYQRLVGRGKPPKLALTAVMRKLLCLANRLLSDPGFVLTPSVPQRPPSSRT

SEQ ID NO: 403572 - protein, 255 aa, unidentified
MVSILGKHSFHIHCQDKSGKALLRKKVARTKLIEFLAGCTSASVVMEASASAHFMARRLADLVHEAKLISPQFVRPFVKSNRNDFVDAKAICEAASRPSMRFVQPRTGDRQAMRALHRTRESLLRDKVKKNNKMHAFLLEFGSSMPIGAAVIKQLSTVLAENELPHYLAQLLMRLHAHYLYLVEQITGPETALEQELSCDETGQRLQAISGVVPVTASVLPSQPGDGKQHACSRDFAASVGLVPRQYSTAEKIRF

SEQ ID NO: 403573 - protein, 351 aa, unidentified
MQSKSQIRSIGIDLGKTTFHLVALGSRCQVVVRKKFSRSQLLVYTANLPSSLIGMEAGVGSHFLGRALREQGHEVRLMPAQFVRPFVKSNKNDYRDAEAIAEAVERENMRFVPIKTEDQLDLQALHRVRERLVSRRTSVINQIRAFLLERGISFAKGPARLRREIPEILENADEKLSTRMRRLLDFLWQEWKHRQLQIESLSEDLEKIANSDAACARLQQIPGVGPLVATAVVSAIGNGAAFHKGREFAAWLGLVPGQWSTGGKAKLLGISKRGNPYLRKMFIHGARAAVLRVQREGSYLGQWMGGLESRAARNVVIVATANKLARISWAVLSSGENYRPRPALAVARSTK

SEQ ID NO: 403574 - protein, 366 aa, unidentified
MLVWQSKINNNWFGFQELLKRLQEYSEPQIVFEATGVYSKRLSRFLEENGYRYTMLNPLAAKKQLDGLRTRKTDKNDAVNLADTQFIFERRLTYYQKPVYRDLMDLSRFYEQINSDLVTEKNRLHKSLQMTFPELEGILDKPSGKLYWHIVATMPHPDLLNNMTVEELATQLKESGAHISVTRATIIAKKLFTLGQASFPGSVVEAPDVDETRYHSEQVARLDTKKTEIIAKMVKLAKPLPEFEVLMSIPGFAEKTVVRLIGELGDIRRFGSSNKLNAFVGIDLRHYESGNFIATDHISKRGDHIARAILFRAIANIVSAGRYQPSRVNDYIANIKRNFLRSTAKPWAQRKLPSLQWVAYYVRFTT

SEQ ID NO: 403575 - protein, 363 aa, unidentified
MTDGICFAGLDVHARKTAAAAVQLGSGEVFKAQLPGSAAAAIEWLQSLPGPVRAVYEAGPTGFGLARAARSAGVEVMVCSPGAIPRQPGDRIKTDTRDALKLARLHAAGQLRPVVVPAPELEALRDLVRAREDLRGDLMGARHRISKLLLRRGLVFDGPGQTWSARHLTWLSKVRFEQPLVELVFGEYLAHHEVLLARRDRLDGLLGEQSLQGSWAPLVARLRCLRGIDTLTAVGLVAEIGDVTAFKHPKQLASYLGLVPSEQSSGERRRQGSITKAGSSHARRLLVEAAWHYRRPPRVSLTLKRRQAGQPAAAIDAAWRAQIRLHRRWAHLDAARAKKRTTVAVAVARELACFVWEVAQQPD

SEQ ID NO: 403576 - protein, 370 aa, unidentified
MSVYVGIDVHRKRSQVAVVTEDGTVVLNKNVVNGSTPFLQLIGDLPSGTPVAFEAAFGWSWLAELLEDYGFEAHLVHPLRCKAIASARLKNDKVDAATLAQLLRADLLPEAWIAPLQVRQLRALLRHRTGLVRLRTQLQNRIHAVVADFGYDRSGSYLSGPGRGWLAGLELPAISRELVTDYLAVIDGLAPLTDRIDGELRQHAKADPRVKTLTTLPGVGQFTALVMLAEIGGITRFGSARKLASWAGLTPTVRGSDLHVRHGHISKQGSAWLRWVLNQAAQTAKRSPEFAATYDAIAKRRGKKIATIAISRKLLTRAWHLLAAAQAAAPATPEASTATVAHPQTGRVTKPRASSHLRHEPATGRARSSD

SEQ ID NO: 403577 - protein, 356 aa, unidentified
MRKGNRKSAKGKGVVVTAADRVFVGLDVHKRQIHAAVRVNGQEVGTHVLPARPAAVAKFLARYGAGLKHVVYEAGPTGYGLARHLRSAGVAVDVIAPSKTPQAPGDGAKSDRLDCRDLARLDEAGLLRPVAVPTEEEEADRQVIRLRDQAVQNRRRVRQRIKSFLLMHSLPEPRGLEHWSAAGVAALGTMEVRNGRLRFCLDVLLEELANADETLAKIDHEMKEMAEEPRHAAAVKALTDHVGVGRTTALQFETEMYRPERFSNERQVSAMLGLAPRVRQSGERRREGPLLKAGRGRLRTLLVEAAWVWIQHDPEARKVYQRLVRNTGSPQKAIVGMARRLGLDLWRGLVKARAAA

SEQ ID NO: 403578 - protein, 390 aa, unidentified
MQVISNRRETSGAIRNDLGAIFVSMELSRSTWLITSLSPGGGEKMSRHTLPAGDIGALLARFSELGQKALMRTERSFPIIVIQEAGLDGFWIHRVLESEGIESHVVDPASIATSRRRRRAKTDRIDGEALLRALLAYKRGEPRVCAMVKAPAPEEEDRRRLCRERKVLIAERVKHVNRIKGLLFSQGVSGYEPRRRDRRRRLDELRTGDGRPLPKHLKAQISRELDRLELLLEQIKAAEIERDALLAAQQVAAPASAAMLLDIKGIGPEFAAILWSEGLFRHFDNRRQIASFAGLAPTPWRSGSVDREQGVSKAGNPRLRSTLIQLAWLWLRHQPQSVLALWFEERVRRNGGRLKKTTIVALARKLLVALWKYVTAGVVIEGAVMKAARR

SEQ ID NO: 403579 - protein, 401 aa, unidentified
MPSLRENSQRIKRFRELKATLRTDRTRLLVGIDVAQAEHVVHLRHAHTRVVVPTLTIPNTTRGFTQLWARIQQAQRSTGCREIVCGLEPTGTYHRALAAFLETQGADVVLISSSVAAWNRRTQDGTWDKNDRKDAANCADLLEQGKILFASQPTGPLAELRQLVRLLRRARTELASCKARWRTTLRPSLAPMGEPLPSRLWAELPAVLQAWEPVAPGRPAVPKGRLPLGLATACTDLDAQVTAVQARITTIEAACTPLAERLHAYALLRTIPGIGPTVGAILVAEIGDVAWFTTCSQLRKLAGLDIVRVQTGQYAGQWRISKCGRGLLRWALYQAAGGLARTTPGRARLAALKAKRHGDRFAGFKAMVELAAKQLRLVWGVWRSGRPYDPTRAGGVQRQRR

SEQ ID NO: 403580 - protein, 334 aa, unidentified
MEEITTLGIDLAKRVFALHGVDGQGRVVLRRTVRREQLMQTVARLPRCLIGMEACAGAHDWARRFGELGHEVKLMAAKFVIPYRKNGKNDGNDAEAICEAVNRSNMRFVPVKSAEQQAVLALHRTRQGFVTERTAVINRIRALLTEFGVVLPQRAEVVRRQASGGAEGLPVLARRMIEDLREHLVVLDERITAYDREIEALAKLSEPTRRLMTIRGIGPLTAQAIVATVGDARDFESGRQFAAWLGLTPQQHSSGGKSRLGHITKRGDAYLRGLLVQGARSALHTAARHTDRLSRWSMSLQGRRGYRRAQVAIAAKNARIAWALLSKNEELRPA

SEQ ID NO: 403581 - protein, 325 aa, unidentified
MTESRRIANDRDTFLELLGDPAGGETHVALEATYGWEWLAELLEEAGYDLHLAHPLRTRAIAAARVKTDAIDARTLAQLLRCGMLPEAYVAPRELRDLRELLRHRATLTRMRSAVKNRVHAILAKHGIIHQHSDLFGKGGREFLAALELRDAPRRRLDSLMALICDFDREIADTTREIEQRAREDDRVDVLCQIRGVGRYTALLIIAEIGDVTRFPSARHLCSWAGLAPTVRSSDGKARLGHISRQGSPALRWALVEAAQKITTGSGPLREKFERIAKRRGRKIAKVAIAREILTLSYYGLRDGEIRCLARRSRASAKEKMAAVA

SEQ ID NO: 403582 - protein, 433 aa, unidentified
MGRESVLPPGLDNMEGRSGRRRQPTDKDRPQSRSVGCAGGKTANQSYTRRGPAVTKNSTVVDSIKYVGLDVHKETIAVAVADSGTAEPRVLGIIPNDFDALRSLVKKLGAPSQLRICYEAGPCGYVIQRFLQRMKIDCVIVAPSLIPRKPGDRVKTDRRDASKLARLLRSGELTPTWIPDEQHEALRDLVRAREDAVVDRLRARNRLTKFLLRLGIKSPAGVKAWSVPYRKWLDVLACEQPAQRVVFAEYRQSLEEIQQRITRFEREIETLAQTSAHAPTIAALQAMRGAKLITAATIVSELGDITRFRSPRQLMAYGGMVSSEHSSGGKVRRGSITKAGNAHLRRVIIEMAWHYRHAPGVSGDLRKRQRTAPAAACTIAWNAQQRLNKRYRHLLARGKTSHQTAVAVGRELLGFIWAIASVVKATSDQPAAA

SEQ ID NO: 403583 - protein, 369 aa, unidentified
MADHTLFVGLDVHKRTIAVATAPDTAGTSCTYYGTIANTPDALRRLCKKLAAAGAELHFAYEAGPCGYVVQRRLSRLGHRCDVVAPTLIPRKAGDRVKNDRRDAMTLAQNLRAGHLVEVWVPDEAHEAMRDLVRMRALAKRDQRRARQQLQSFLLRHGRSYSGSSWSKAHRGWLADLSFAHPAQHLVLQEHVQRIERADELCERVNQAIVDLLPAWTLAPVVEALQALRGVSVVNAATLVGEIGGFGRFDHPRQLMAYLGLVPSEHSSGQTIRRGPITKSGNTLARTCLVEAAWTYRFPARVSRIIQGRSGHLPEPIRATAWKAQVRLTRRYRRLMAAGKVAPKVITAIARELLGFIWAIARMVEPKTA

SEQ ID NO: 403584 - protein, 381 aa, unidentified
MKIIGCDFHPSFQKIAMLDTETGELIQRQLSHADGEAKRFYESLSGEVQVGVETSGNMLWFERLLAKLGQKLLIGDATAIRAASPRLQKCDARDARNLLQLLEENRFPAIWVPSLAERDLRQLLKHRHTLVQVRTRAKNQLQHIAMNQGLQKKSKLWTKAGQEQLKKLELEPWTQRRRDDLLQILADFDTRIEELNTSVKAAAERCPQAVLLMSHPGVGPLVSLGTVLTLGDVSRFARGKNVASYLGLIPREDSSGGRRRLGSITKQGNSFMRFLLVQAGMGAAKGDAELGRAYKRLRHKKHHGVAKVAIARKLVVRLYWMLRTNTRYPEVVRMQGSSSHSVAEAKADALSGRPASRQEGSERPGKAGLNKARPSKERPNK

SEQ ID NO: 403585 - protein, 322 aa, unidentified
MSDKAEQVLGIDIAKMKLDVCLLINGKALMKKFDNELKGFKLLQGWLRSLRIERAHACLEATGSYGEAVAEFLHEQGHRVSVVNPLRINGFAKSDLKRNKTDQADARTIAEFCLAKDPEDWHPMPPEIKQLQALTRRIEALERMLGVETNRLEMAPDAVRPSIERMIETLREEIENVQRLIKDHINNNPDLKRQSNLLQTIPGIGEKTARLLLGEIEFHSFESARALAAFVGVTPRRFQSGSSINRTRLSKLGNGRVRKALYFPAIVAVQCNQIVKLFAQRLSDNGKTPMQVVGAAMRKLLHIAFGVIKNNRPFDPDSAFSA

SEQ ID NO: 403586 - protein, 349 aa, unidentified
MIAEGLDFVVGVDTHLDEHVLAIIAAPSGALVAQRSMPASARGYAAALRFAANKGSGARVWAVEGTGSYGAGLARFLADRGEVVLEISRTPRAERRLRGKDDSLDASRIARAALASETLALPRSGERREALRLLLVARRSAVDVRREAIGQLRGVIVTAPDELREQLRGLPVGRLLERCSRLRRSRAASADELATRLVLRSLARRIEAATLEAAELKRELLGHVRILAPALLDEPGVGPIVAAQLIVAWPHPGRLRSEAAFARLAGVAPVPASSGKTTRHRLSRGGDRQLNRALHTVVLHRRQHDAGTKDYIARRIAEGKTRRDATRLLKRYLARHLYRVLEQQTPLVT

SEQ ID NO: 403587 - protein, 345 aa, unidentified
MPTVDILAIDLGKYSFQICATTNEGEIVFNRKCSRRKLSELLAKQPCCVVAMEACATSHNWGRLAKSYGHKVKLIPPIYVKPFVKRSKNDAADAAAIATAVRQPDMRFVALKSADQQSHAMLFKSHQTLTRQRSQLMITMRGHLAEYGIVVPRGNSAFLAFEEQLEVGFEAVPDLVLETVRLYYHHIHKLTESIIALERQMAAVAKLNDNTRRLRTMPGIGPINAIAFLAFAPPMESFKRGRDFSAWLGLVPKQHSTGGKTKLGRVSKMGQSDLRRLLICGATACIRWAKAKGIDPNSWLGNLIARKPAKMVAVALANKMARIMWAMIINERDYEGGLVKYLEAK

SEQ ID NO: 403588 - protein, 363 aa, unidentified
MQREKRRYVGIDLGKREYTMAILGKNKKMSIHKGKTSIQGRKVLYTLLERDDKVALEAGNLAFIVAREIGQQVGSEVRVLNSGKLVIIWNAPTKTDKEDAMKLAHLIEEQRDEKLPIVPLPSEKEMERRETIANYGRKMRERTSAINRLHSLFVKQGHTEVVRKNLAAAGRRREAVQILTGQIREDAEDIVQHLELHDKRITELKKKIQCEAKGDEDMKVLQTIAGVGPIVAYAYVAHVGDGSRFSKGAQVSNYLGFVPRLDYSGTIQRQGHISKRGNGYLRGLLVQAAWVMIRSRRGGSLQERFRYLTAFQGKSKKKTIVSIGRRMAELMYTVLRNKSTYEVRPWKGPSNDPGGMAGQAMSA

SEQ ID NO: 403589 - protein, 404 aa, unidentified
MRSIGMDVHRSFAQIAVVEDGLCRDEGRIGVKPEDLREWATTLEPDDEIALEATTNSDAIATMLRPLVAKVVVSNPRKTRAIAEAKVKTDKVDARILAQLLAADFLPETWVADDRTRTRRRLVARRTHLVKQRTRLKNQVHGILSRNLVPTCPHADLFSGVGRKWLFAQDLPADEWRSVEALLRQLDFHGDELADVERDIAIDAIDDPVVARLMTIPGVDVTVAVSVVAAVGDFSRFASPDRLVSYLGLNPKVRQSGDGPAIHGRITKAGRSQARGMLVEAAFSASRAPGPLRAFYKRIKDRRGFQVATVATARKLTVMCWHLVTKDENYAFARPSLNAHKRRKLELAAGATSRRGPTAGPSHNYHLKQLRDAEKVIVEQQERAYEVMVAHWQPQNPKKYAAKR

SEQ ID NO: 403590 - protein, 366 aa, unidentified
MKKSSTVATKRKQIFKQPELTIGLDLGDRSSHYCILDEAGNVTLEHQLPTTPKGMHQVFRRIPRSRIALETGTHSPWVSRQLIALGHEVIVAHARNVRLIGESSRKDDQLDARTLARLARIDPGLLGPVRHRSAQAQIHLTVIRARAVLVSTRTALVNAARGLTKSYGERLKKCGTEQMNRDSSRGLSQELRDALDPLLREIESLNERIGEYDRRIEQIAREVHPEVALLKQVKGVGTLIALTYVLTLDDPHRFRRSRDAGCYLGLRPGRRNSGQSEPQLHISKEGDRYLRTLMVQGAHYILGPFGQDSDLRRWGLKLAERGGKNAKKRAVVAVARKLAVLLHKLWVSGEVYEPLRNNHQVESAVA

SEQ ID NO: 403591 - protein, 409 aa, unidentified
MELLIARCAGLDVHQATVVATVRVPDELSGRQSVTETFGTMTADLLALRAWLQAYGVTHVALESTGVYWKPVYYVLEDAFTLLLINMQELKRVPGRKTDVKDSAWLAQLLECGLLKSSFVPPPPIRELRDLTRYRVQQVRDRAQEVNRLCKVLEDAGLKLTSVVTDVMGASGRAMLRALVEGTTDPTVLADLARGRLRQKLPELRRALHGRFRPHHAFLIEQIFAKIDFLDETLDRLTAEIDRRVSPFAPMLAVLDTIPGVDRIGAISILAETGGDMSRFPSAGHLCSWGAMCPGQNESAGKRRSGKTRKGNRYLRRTLIQAALGAMRKNGSALQARYHRVKRHRGHKKAVVAVGHQILEIAYYVIRDGVSYDELGADYFNRRHAERAVRRHVRQLEALGFHVTIEKAA

SEQ ID NO: 403592 - protein, 317 aa, unidentified
MNFVGIDVSKSQLDIAVRPGNKSWSVVNAEADIIKVVETLNALSPKVIVIEATGGMEMPLAAALSQARLPVVVVNPRQVRDFAKAVGRLAKTDRIDAEILAHFGEAVKPDVRLLKDEDTQTLAALVTRRRQVIEMLTAEKNRLGISPKVVHKDIQQHISWLQGRLEDIDRHLDSAIRKSPVWREKDDLLRSVPGVGQVLSVSLITGLPELGTLSRRQIAALVGVAPLNCDSGLFRGKRTVWGGRAHLRSVLYMATLSASRVNPAISCFYRRLIEAGKKPKVALTACMRKLLCILNAIIKKRIPWQAEYSTCPIPNIP

SEQ ID NO: 403593 - protein, 350 aa, unidentified
MVVVGADVHKRTHTFVAVDEVGRKVGEKTVTAVTAGHAEAVMWAREHFGDDVVWAIEDCRHLSARLERDLFGFGQNVVRVPPKMMAQVRASARTRGKSDPIDALAVARAFLREPDLPVASHDEVSRELKLLVDRREVLVAQRTAMINRLRWRIHELDPERAPVARSLDLAKHRVILGDWLNTLDGLLAELASDELADITRLTEQINALAKRIGEHVRAVAPVLLAMPGCGELTATKLVGETAGVTRFKSEAAFARHSGVAPVPVWSGNTHGRVRMTRSGNRQLNAALHRIAVTQIRLDGLGQSYYRHRLAQGDSAPEALRCLKRRLARVVFRHLHTDHNNRQKPCQLAAA

SEQ ID NO: 403594 - protein, 327 aa, unidentified
MEQPILGIDVAKETLDVALWNGGRMVTRQFENTLSGQQLLAGWLDKQGARGAHVCLEATGQYGDGVSEYLYQQGYCVSVVNPARIKHYGNSKLRRNKTDKADAQLIAEYCLREKPALWTPPPASFKDLQALVRHLDDLQGSRLQASNSLSSGVRTPFVVEQLHAQIAFLDTQIEQTKQAIQQHIDCFPELKHAQDLLVSIPGIGRLTAAKLLGEIRNILAFEDARQLAAYAGLTPRIFISGSSVHKKSRLSKTGNANLRKILYMPAISAKHWNPIVKQFCERLLQSGLRSMEVIGAAMHKLLHLVYGVLKTGRPFDPDYLVKVQVTS

SEQ ID NO: 403595 - protein, 459 aa, unidentified
MSTKKPTGKGSVNKRVDWRALEIVHPDAGGIDVGGSEHWVAVSPDRDPEPVRRFGCFTADLREMGRWLVEKGVRSVAMQSTGVYWMPVFEVLEQQGLEVYLVNAQHTKNVPGRKSDIQECQWLLKLHAFGLLNNSFQPTDEIRIARTLWRQRGNLVAEASSVIQRMQKVLTEMNVQLSNVLSDLSGMSGMKIIGAILEGERDPWKLASLVEPEVKATPADIAKSLEGNWREELLFVLRQQVELYRIYQEKISACDLQLRRHLKSLGSKVDLKTQPIGPRPKGKKNSKNAPGFDLRTELYRITGIDWTQINGMDVLTAQTVIAEAGVDLSAFPSEKQFTSWLGLCPTNEQSGGKILNRRTRKVVNRATVAFRNAALTLLRSQSYLGAQYRRLRTRLGAPKAITAMARKLACLFYRLIKHGQPYVDKGTEYYDAKYREQQIRSLAKRAQKLGLQLVIPKAV

SEQ ID NO: 403596 - protein, 343 aa, unidentified
MQERINLLAIDLAKEVFQVEGINDHGKPILKKRLMRDELLLFTAQLPACRIAMEACGGSHYWSRKFAEQGHTPCLLAAKLVKPFKKTSQKNDQHDAHAIGEAAQRPSMRYVGAKTVNQQDLQSLHRARALLVKQRTASVNQCRGIAMEYGVVMPDGINKFREHFPVVIEADNELTPVARELLGTVKDMISKLDVEITKIERKIKSVGSESRDYNRLIEVPGVGPMTASLFLASVGDVNAFKNGRHLAAWAGLVPRQHSSGGHTKLMGITKAGDQDLRVMLVHGARALIRATRIKSGADPQSQWILKLLEKKGWNVTAIAVANRNCRIMWHLVKHQEEYKQKPA

SEQ ID NO: 403597 - protein, 354 aa, unidentified
MLIIGADYHPGFQQIAFVDTETGELQERRLQHREEAEKFYRDLAAQGMKVRVGMEASGHARWFERLLSELQFELWIGDAAEISARRVRKQKTDRQDAQLILKLMLKDDFPQIWVPSWENRDLRQLLWHRHRMVQARTRMMNQLQAVALNEGLRCKKKLWREAGREQLESFPLAPWASQRRRDLLEMLDHLNPTIAKLTQAIEEEVKRYPAAQRLRTHPGVGPLTALAFVLIIGKADRFQCGKQIASYLGLVPLEKSSGNQRRLGHITKQGNSLLRFLLVEAAQVTVRSLPEWRGKYCHLTMRRGRKIAKVAMARKLAVRLYWMLRKEWDYEQLTKFGSHAGKPGHRYGVKQNTE

SEQ ID NO: 403598 - protein, 356 aa, unidentified
MARTNVSSVQQFVKGFEAHPFFIGLDVHKRSYHVALRRLDGKTVTLVCPADPSGLLGVIQRLCIQVGSVVYEAGPTGFSLARTLRAAGIQTLMAAPSRIPRAVTAGAKTDRLDCIRLADYAAKGLVRAIAVPTPEQEAKRGLQRRRHDIVDSRRRCKQRIKSFLLFLGLPEPKPSIRWRRGTAEALRALSMDPHARLTLESLLRELAFYDEELREVDEQLRQMGRQQERLMDCLQSVPGVGDVVATTFMVELFDPERFQSAEEVASYLGLAPMVRHSGEKTPSGRLRPAGQTRLRSLLIEAAWMWRQYDPYARTLYNRFFGRMGIAQKAIAAVARKLAIILWRLYVEGRPYRPAII

SEQ ID NO: 403599 - protein, 356 aa, unidentified
MNKGSKLNFSGQAIYLGLDVHKKSWSVSIFTEHGEYKTFSQPPEAEALIQYLQRHFPGAQYHSVYEAGYCGFWIHDQLREKGIENIVANPADIPTRDKERRSKRDRIDCRKLARGLRGGQIEGIYTPARWKLEDRSLIRTRLSMGRKQVRCKNQIKSMLLFYGVAIPEQREMGHWSRRFIQWIEGIRMERTSGDLALKLHLEELCHLRQILAKLNRSIVALARTEVYRSWISLLKTIPGISTLTAMIVLTELYEVTRFRSIDQLCSYVGLIPDTQSSGEKEHVGGITRRHHSSLRWLLIEASWIAVRKDPAMMEAFNEYCKRMRKTKAIIKIARKLLNRIRYVLKNQAEYVTGVIE

SEQ ID NO: 403600 - protein, 370 aa, unidentified
MLDTTTFIGLDVHARSIKAVSLDVMTGEVRAATFGYDAGAVAEWVRSMDPRARCVYESGVTGFDLQKRLSGLGVDCVVGAVSKMIKPSADRRRKNDRNDAEFLARMLSVGNVVEVWVPDDECEAARDLTRALEDARDDLSRSKQRLSKFLLRHGLVFDERTPTGRRKGNWTRAHWSWIESIRFAERADNDVLAYYVDAVRRAAEEKARLEGLVEAEARKPRWRKRVDSLRCLKGVDTASAADLVFEAGEFSRFRNARSFAAWVGLTPSEHSSGESDRRGAITKAGNKHLRKTLVEAAWHYLTCSGRPKDLARGQAPDRGARRHAAKGVRRLVERREALLARGVHGNKANVATARELACWVWAVGLMAEEA

SEQ ID NO: 403601 - protein, 313 aa, unidentified
MYKYIGIDISKATLDLYDGAKSHKVSNDLTGFKEVCKLSAKKKNLCLIFEPTGIYSHALVSYCQKHNIKAIIVGSKEARDYARSIKQRSKTDKIDAMVLYRYHTQIEKDTITVPSLDTHVRKITQRRNAYDKYRHAMAQMHNLIEATSKRDKALIRSLQKQINSLQRAADKLLEEIEILLLEKQEHKDVLSHLQTIPGIGKKSALALLLEFLRYPEARSNEMVALMGLDPVLKDSGVFKGKSRISKQGGKHLRQTLYMATVVSIQHNDRLKLFYERLVSHGKPKKLALLAAMRKLLRIAFAVVKNNEPYRALV

SEQ ID NO: 403602 - protein, 354 aa, unidentified
MKVLKQVLGIDVAQDELVVALAQLKEDLTTETKEFQVFINSEKGFKSLLKWVDEKKSCDVEVFFVMESTGVYHERFAYFLHNKGEKVVIVLPNKISNFMRTLDIKTITDKSCSIAIAQFGLSRKLEEWQPSNKVYKELQQLSREKNQVISERVVCMNQLHAEKAEALPNLKTIKRLKTRISLLEKQEKEINADMLKEVENSNEATEGMNYLSSIPGVGKATAIAVLAETNGFELIRNKKQLTSYAGLDIREKQSGTSVKGKARISKKGNRNLRKTLHFPAMTAVKLNQEHRELFHRIVNKTGIKMKGLVAVQRKLLELMYILYKTKTFYEVNFEENRAKTQKDIHPTEADSGSL

SEQ ID NO: 403603 - protein, 333 aa, unidentified
MQSIGIDMAKDTFHAAFDDHKVLKFENTPAGIEEFMTTLEDDDFPITDTRIGVEATGVYHLLFAVTLREHSWDVVVINPLESHRMITQGLRTVKTDRLDALKIRTMTAMGKGYLFTDTKDVLALKALVVERQALVEMRKMTKQRRDVHRLKEAATGFAFYDSFTTVLEALSEEIKHIERSMRGYETETQELLRSIPGVGSTTAAILVAFIGDIHRFATPEKLVAYIGLDCRVYQSGTSVHGKGYISKRGNGYLRHMLFNAAFVARRHNPDLKIYHEQSRTKDAGRQALLQCAVCGGTKARAPHLCRLETRHAFVRRSQTKTSGEFSPAVDKVT

SEQ ID NO: 403604 - protein, 325 aa, unidentified
MILGIDIAKEKFDVALHQDGTLIASGQFDNKPAGFKKLNKWLKKKADKSVWACLEATGRYGDALALYLYDQGYQVSMVNPARIKKYAESKLQRNKTDKLDARVIADFCWTQHPTLWTPPPPEKRHLQELVRRRNALVNERTREKNRLKSGLESDLVRTSIQDHLDFLNQQIAKLEKQIQSHIDQHPSLKRDRELLTSIDGIADKTAAIILGELPDIDRFDHSGQAVAYAGLSPQQHQSGSSVYKKTRLTKTGNQRLKSALYFPALSAIRHNPVIINQAQRLGKKGKENMLIVGAAMRKLLQLAYGVLKSGLPFDPNYATKSQVAS

SEQ ID NO: 403605 - protein, 470 aa, unidentified
MNTTPTSSKQRRGVRSVSKTKVPLPPQLKRVNLDAAGIDIGAEEHWAAVPPGRDTEGQDVRRFGAFTGELCALADWLKQCGIQTVAMESTGVYWIPLYELLVERGFEVLLVDARQAKNVPGRKTDVLDCQWLQELHTYGLLRGAFRPVDQVCILRSYLRQRSMLVSYASHHIQHMQKALEQMNLKLSHVVSDITGLTGMGIIKAILSGERDPVKLAKLRDPRCKSSEATVARALEGHYREEHLFTLQQAVELVEFYQQQTTACDRQIEACLQQFEEKSSETPVTTRRHKRRRGIAFDARSYLYRMTGIDLTQIDSIEANTALTVISEIGLDMSRWPTEKHFGSWLGLAPGSKVSGGKRLSGRTKPSANRAAAALRLAAQSLNQSQSALGAYFRRLKARLGAPKALTAAAYKLARIVYRMLKYGAGYVDQGEAAYEERYRDRLLRNLKRRAAELGFQLTAIELNSGQAALT

SEQ ID NO: 403606 - protein, 310 aa, unidentified
MEDIIVGIDVSKDRLDVAVRPAGKAFVVERSAAGLEGLVARLRELAPYLVALEATGGYETIVAAALAGAALPVVIVNPAQVRDFAKALGRRAKTDPIDAAVIAHFAEATKPEPRPLPDEATQLLADLVARRRQIVEMIGAERQREKRVRIAHLRKSIARLIKALEKELASLDADIDDAVRGSPAWRAKEDLLASVPGIGPIIARTLIAELPELGQLGRKQIAALAGLAPFTRQSGQWRGRSFIAGGRTTVRTALFMGAMVAKQHNPILKAFFDRLLAAGKPKMVALIAVARKLLTILNAILRDNRPWQNA

SEQ ID NO: 403607 - protein, 363 aa, unidentified
MNYIGVDLHKKSITICVLNANLKVLARKTVLCDQTDEIVAFFRQFRPFKVVVEATASYLWFVELVEPLAEEVVLANPKKLRVIAESTKKTDRLDAQVLAEFLARDQIPRAYMPTPRQRQHRRLVRHRQYLRQRMTSVRCKIRHILSDYNADRKDLFSTQCGPAYFKEIALSDADRFVIKQLWSEWQDHQSRLLALTKKIKAFIVKAPNREKETRAILKTAPGVGFVTAEVIVSEVGDVSRFRNAKQICAYAGLVPVVRQTGGKKSKDLRITKEGSGLLRWALVESAWRLVKTSPKWSAFFSQLRKRSGSKRAIVAVARKLLCVLYAMLKTSTPYKIVATQTKAPRPTRRRLVRKSSAKETVTT

SEQ ID NO: 403608 - protein, 452 aa, unidentified
MEEKEISMEIVNPQAAGIDIGSRSHWVAVGQKEGDIREFGVFNQDLFEMAEWLKERQVKNIAMESTGNYWQNLYAVLLSKGFNVILCNGKFTKNIKGKKTDIKDCQWIQRLHSLGLLSTSFLPDGKTEQLRTYCRQRSNLMYLAASTSKKMQKNLRLLNLRLDVVVKDICGLTGLSIIRSICAGETDPQKLASLRHSNCRKSQAEIANALQSNGRKDYLFALGQELDTYDHLQQKIAECDKMIAQTLNEIIENDNNKKQHRLEPKSYKRPQKNTPKNIDLNLQSYQMFEGTDFLAIEGISFSTVLSLMSEIGVEGIRKFPTAKHFTSWLRLAPNNKISGGKILSSKVPKGSNRLKIALRSAANAIGNLKESTPLRDFFHRINFRKGRVAAISATARKLAVIMWNMVVKRIPYLNPHEYLYLDQKRKLGIVKRIKKQIAKFELTVEDLNLIPT

SEQ ID NO: 403609 - protein, 460 aa, unidentified
MNRKRSKSRVDRTMPMMHPNAAAIDVGATLHMAAVRADRATEPVRSFGTFTTDLHRLVDWFTECGVETVVMESTSVYWIPIFELLDARGFTVFLVNARDAKHVPGRKTDVSDAQWLQRLHSYGLLRASFRPKGQIAELRAYMRQRERLLEYAASHIQHMQKALTEMNLQLHHVVADITGSTGLRIIRAILAGERDPEVLACLRHYSCQSSAETIAKALAGSYRTEHLFALEQALALYDAYHEKASACDVRIEAVLKELCIHRGRGIGSVAPAPRRRHRTDQANALAFDVRAALFALLGKDITTIDGLGPYLSLKLVAECGDDLSSWPSAKHFTSWLGLAPSNKVSGGKMLSSRTRRSGGRAAALLRLAAVTVGRTDTALGAFYRRLSSRIGKAKAVTATARKVAVLFYNAVRHGMEYVDPGASSYETRYRTRVVNNLHRRAKAFGFVLQPLEPKAGAVVS

SEQ ID NO: 403610 - protein, 401 aa, unidentified
MKYVLVLDVAKGKSMFMLSSNVGEVLLEPTEYSHNKTDFELINSYINKSNIKDNLTVIMEATSIYHKAPERFFKENNYHVIVFNPLIGKEITNTIRKTKTDKQDCIKLTNLFWKGSIPDRNYTEDEIYTRLNELSRQYYHLDEGLTRHKNRYKELLHLCFPEFEHCFKDGKIYDLTALNFIKEFPHAYIIKDKRVDALAYNMANTNNRHLNYYKRKAITIKEYAQNSYPGVNQNSNDVDNLKQLVEIIINLTSQKDTVKNQMIELAKQTKNYNVIVSLFGIGELSASLIIAELKDITRFNNIKQINASCGLDPTIVQSGKSINYHGPISKRGNKYARKILFNCSRNIVTLSAKCDKDNPIYVYYQKKKQEGKHYYACLTACSTKLIRIIYALCMNNSQTQN

SEQ ID NO: 403611 - protein, 343 aa, unidentified
MRHYAGLDVSVKETSVCIIDESGKVCRETKVPSHPEDLARALHDRAWCLERVGLEAGPLSQWLFSGLAATGLPVVCIETRHTKAFLQAQVNKSDRNDARGIAQMMRVNLFRPVHVKTLTSQKRRALLTARKLLQEKALAVDNDIRGLLRNFGLKVGPIGASRFETRTRELVDGMAELAEIIDPLLEARRKLRELFAVLHRKLLVIVRDDTVCRRLMTVPGIGPVVSMAFTATIDVPARFKSSKAVGAALGLTPILNQSGESKRLGRVSLCGDGMTRTLLYEAAQVMLTRTTKWSWLKAWAMKVAARRGIQKAIVALARRLAVILHRIWVSGTDFRWTREVQST

SEQ ID NO: 403612 - protein, 304 aa, unidentified
MNKEKVYCGVDVSKKHLDAFNGKTARRFDNTCEGATALMNWAGSAHYVFESTGGYERMAAWMVMAASGTASIVNPSRVRHFALGMGQIAKTDPIDARMIRDFASHTDPKPSEKPSATQRRLTALVDRRVHLSDMHTAEKNRLGTADEPEMVRLIKQHLKWLEKQLEKIEAKIKDTLAEDATMTQKAKCIQSIKGLGIVNAVTLLAHLPEIGTLSRREIASLAGLAPFNRDSGGKSGRRHVCGGRRRLRSCLYMAAMNARTYNPVLREFYQRLVNENHRPKMVALTAVMRKLLIAANSAVKNAEI

SEQ ID NO: 403613 - protein, 412 aa, unidentified
MKIVYPRCAGIDIHKESMTVCMIVDRQDASAPEYQKRKLATHQEGVRELKNWLEKYQVTDVGMESTGVYWKPVWNALEGKWGLHLCNPQHVRVIPASKTDIRDGTRTAELLAYGKLPESFIPPVWQRELRDLTRLRARFTQESTRTGNRIRKVLEDAQIKLDSVASDTLGMSGRLILNALVEGETDANKLAELVVGKLKKKKKELRQALQGKFQDHHRFQIRLLMEDLKECEDKIFQLDRRIEKYLEPYEETVRRVDAIPGVDRIGAAVILAEIGPDMSPWEDSGKLASWSCLCPGNNESGGKRLSGRTRKGNRWLRRAFCQMAWASTHKKGSYMKTQYRRLSGRRGKKRGLLAVAHTILIVVYHLLKDPKLEYRELGEDYFDRRDAEQTKKQLLKRLDKLGYNVTLTPKTE

SEQ ID NO: 403614 - protein, 367 aa, unidentified
MGVPTMAKVRTFVGLDVHAAKVVAVFVDGESGELCSRRLSGRTGEIVEFCAGLPGPARVAYEAGPTGFTLARALGDAGIECVIAAPGKIERPSQDRVKTDRRDAERLMRLLMVGGLHPVRVPSTEEEALRDLVRAREDVRGDLMRARHRLSKLLLRHDITFAGPGVNWGTKHREWLGRLELADRGAQVTLLDYLGAIDALLVRRGTLESMIGELVPCSPWAQTVARLRCLRGIDTLSAVGLCAEIGDWERFQRAGQLMSFLGVVPSESSSGEQRRQGAITKSGSRHARRLLVEAAWHYRRAPAKGLTLKRRQDGQSPHVIALSWKAQQRLHRTWRRLDSERGKRRTIVAVAVARELAGFCWAVANAD

SEQ ID NO: 403615 - protein, 332 aa, unidentified
MDIVYLSIIHQNKNAMSTVSFEQVILRGCGLDVHKDVVVATISGEGLSTETRSYKTFSSSLTELKEWLLSNGITHAAMESTGVYWKPVYKILECPQMKVWVVNARHIKYVPGHKTDKKDSAWICKLLLAGLLKPSYIPEREQRELRDLTRYRNKLIQHVSSNKNRIVRILEDCNIKLSSVMSHLDGVVATKLIDILIDKGHVTMDDIACVYHKRLEASPELLYQACEGFIEPHHTYMLQTIRKDIEQTESILSDLTSRIKEVLSPYENVIDLLRKIPGLDRKTVEDLIAEIGVDMEVFPTEKHLASWAGICPGNNESAGKKKVEEPLMATNS

SEQ ID NO: 403616 - protein, 416 aa, unidentified
MKIVRPICCGMDVHKNIIVATIGITNKKTRITEYIQETFSTLNPDLLNLKQWLINHKCFDACMESTGKYWIPIFNILEDEINIYLTHPKYVKAIKGKKTDKKDSKWICDLFKHDLIKFSFIPPKEIRALREISRYRYKLVGMRSSERNRYQNCMTVSNIGIGSVFSDPFGKSAQAIMKEVLESDIIEDEKILKCIHGSCKNKDKILDSIKHCNIETDQRFKMNESMIHMEELQVHIDNCEIEIMKRAAPMFDQFMHITQLPGISTLSAILIISEIGIDMKQFESDKQLTCWAGLAPANNESANKKKSVRISKAGQYLKPLLVQCALGAIKDKEGYFGIKYSRIKKRRGHKKAIIAIARMMLVSIYHMILTGEIFNPSDYESFRNPKPPIKQQDLTEESAIEFLKKSGFDVSKLTKQ

SEQ ID NO: 403617 - protein, 343 aa, unidentified
MKHIGLDVDSTTTHICVFSDRGREIKRAATPTREADLVAFMLSVPGPKQVALEESQMADFVTRILTPHVTKVIRCLPQHNRLISESEQKCDEQDARNLAELLYLGKLKAVHHAPWDYRQLREGVRAYWTASRDLARAKSRLKAFYLFNGVHCVGDKAYSRRYRSSFYKEIDNRSGNRELLQQLYAHVDFCRGRKAAHIKILRGLAKVFQKDVSFLKSYPGIGFIGACTLVSYLENGWRLKNKRKLWQYCGIGIRRHESAGTGHRGASRKGNRYVKNAIMTATASIAARRNLDNALTRMWRAGVQAGITPERMKRNLARKVAVLVQRSLRFKEEYNDARVVTTQ

SEQ ID NO: 403618 - protein, 363 aa, unidentified
MEETKRRYVGIDLGKREYTMAIIGRNGKMSIHQGKTSDQGRQALYRLLERTDRVALEAGNLAFIMAREIQERVGSEVRVLNSAKLPFIWDAPTKTDKEDAMKLAHLVEERRDEKLPIVPLPSEKEIERRKTLASYNREMRNRTRHINTLHAIFVHQGHTTIVKKNLATAEKRREAVKILTGLEREEAEWILKYLELHDQRIKELSGKIRKEAKNDEDMKKLQTIPGVGPVVAYAFAAHVGDGSRFSTGAQVSNYIGFVPRLDYSGTIQHNGHITKHGNGYLRGLLVQAAWSAVRSKTGGALQERYKYKTAGQGTSKKKTIVSIGRRLAETMYSVLRNKTEYEPRQWKGVKDKAAVLVEQAMSA

SEQ ID NO: 403619 - protein, 336 aa, unidentified
MQKLDVNKATFFGIDAHPTTHTVYASNRFEEEKGILTFENTKAGIRQFLSWLPTIDQNQDNSIIGIEGGGNSRHSLIANLLQNYQNIYEVNPLYTKQRRTFGTKADKSDPRDARLIAEVLTRKLSELPRITQHDLSANMLVLKKTVWFYEQTTAQGVSIQNQLHQLKREIVLSLDPTEKETLRMIITELEKQLKNVRKTQRKCQKQLTVLLEKQGGNLTTIKGIKTILASKIVAHCGGIERFANLDSFIQYAGIAPREKSSGKTRRHTKSKTGSRKLNHAFYLAAMVQLRWNPKAKEYFEKKLKEGKTKKHALKCLMKRTACIVYGMLKSGEDYQG

SEQ ID NO: 403620 - protein, 391 aa, unidentified
MNKAWVGVDVGKEFHWAQVLDASGRQLLSRKVENDEADILELIDEALSSAEKVVWAVDQPGGSAALLLGLLWERNQRVLYVPGLSVDRARDTYRGESKTDARDARVIADQARMRPDLEELEAGEQEIAELQLLLARRRDLITDQSRIITRLREALLSLFPALERALDLNGKGPLILLTHYQTPAQLRRVGHKRVATYLRNRSVKGSDKVAYKALSAARSQSVSLPAQEVASRIVAELAAEVLALKERIESIDEEIGRRFFARPGARILISLPGMGPILGAEFLVCVGDISAFESADRLAAYAGLVPAARDSGKRVGNHRRMRGGNKTLKRVFYQSAFASLRGSPESRTFYDRKRAEGKRHTQALIALARRRVNVVWAMLRDGTTYETRSAA

SEQ ID NO: 403621 - protein, 372 aa, unidentified
MDKGTSFVGMDTSKGSLRVAALYEGREVFGEWEVVHEAAAVRRMVRKVQREAGGPVLFCYEAGPCGYVLQRQIKALGSDCIVVAPSLIPVKPGERIKTDRRDARKLAELLRAGLLTEVHPPRVEEEAVRDLVRCREDVVEDLARCRHRLAKMLLRRGYLWRSGRQWTTAHRGWMRALVWDHQADRVVFEDYLLGLEQAESRLLNLNKELETAAQTEPYRLLAGVLGCYRGIGTVTAMTILTELHGIERFTSPRQLMAYLGLVPSEFSSAERVFRGSITKAGNAHLRRVLAEAAHQYRHRPWVGPLLRRRREGQPAFAIAQADKAQQRLHRRFRRLLLRGKPYGTIIIAIARELVGFLWATLQQAQTSQRKAA

SEQ ID NO: 403622 - protein, 452 aa, unidentified
MEQDVISMEIINAHAAGIDVGSRSHWVAVGQQESDVREFGVFNEDLFSMASWLKEKQIKTIAMESTGTYWQNLYAVLIAQGFHVILCNGKFTKNIKGKKTDIKDCQWIQKLHSLGLLSSSFLPDEQTEQLRTYCRHRSNLLDLAASTSKKMQKYLRLLNLRLDVVVKDVCGLTGLAIIRAICEGEKNPQKLAALRHYNCRKSEEEIAKALQSNGREDYLFALRQELDTYDHLQIKIEQCDQKIEQMLNQIIGGDDNKKQHHIDSKPHKRINKNTPKNIDLNLKSYQMFEGTDLLAIEGMSYATVLSLMSEIGIEGIKKFPTAKHFTSWLRLAPNNKVSGGKILSSKVPKGSNRLKIALRNAANAIGNLKESTPLRDFFQRINFKKGRVSAISATARKLAVIIWNMVVKNIPYVNPEGYLFLDQKRKLGMIKRIQKQIDKFGLTDNDVKFSTT

SEQ ID NO: 403623 - protein, 412 aa, unidentified
MTATNQFAAHVGLDWADKKHDVCVQFNNGERVFHVIEHTAEALDVWLTELHQKVKGRIAIALELKKGPVVYALQKYPFITVFPVHALSLARYRQAFSPSGAKDDPQDAELALELMLRYPQKIKAIEPDNADIRLLQQLVEQRRQLVEDKRRFVNRLINTLKQYYPQPLEWFSHRGSLLLCELIMRWPSLQQLKRARRDTIRNFLNARGGRAMALTEQRVANIDNAIPLTTDSSVIEANALMATALATQIKVVSEIIKTYDERIETLFDTLPDAGLFKSLPGMGPCMGPRMLAALGDNRDRFNSAEEIQNYAGIAPVTERSGQKSWVHWRWQCAKFVRQTFVEWAAKTVNSSYWARLYYQGQREKGKSHQSAIRALAFKWIRIIFRCWKTRTRYDEAKYLLALEARKSPLLKP

SEQ ID NO: 403624 - protein, 420 aa, unidentified
MSNPLTTLYIGIDVSKDSNVVCCLSFEGKKLFSGSFKNNNDESQNLQSKIVEIQKKNSLDSIQIVLESTGVYSFHIGLFLSSSELLNAVNTTVFVVNPKMTKNYSKSYIDMTKSDPSDSFMLADFARCGRTKMLKPFRGKQRLALQRLTRYRKHLVDLLCQEKMYVLNNIFIKFSEFNNKSHDFKTFSDSFSTTAIEILTNYFSPETIASTPVDKLADSLRKYSKNKFSDPEAIASKLQSAARASYRLDKIMYEPINACIASSFCLIRAYEKQIKDVEEQIGSLIKGLDNQNEYNSLISIPGIGPVYASGILAEIGSISDFNSDDALANFAGLTWKKTQSGSFDASDTPMQKNGNSYLRYYLIEATQNIISNIPSYKEYFDKKKSEVTTHACPRARVLTARKVLRLIYSLVSQNKLYQPK

SEQ ID NO: 403625 - protein, 355 aa, unidentified
MLATQNRPARKTIVVAGVDTHKDTHHAAVLDLNGRVLGDREFPVNTTGYKTLLDWVAGFGVLDRIGVELTGSYGAGLTRYLTNANVSVLEVNTTDRATRARQGKDDAIDAIAAAQKVLSGMASAIPKDTTGATETVRMLKLARDSAVKARTKTLNQIKDLRITIPAELREQLDGLTLKAIAKKARAFRPDRTRLTDPVQGAKVALQLLGDRVHTLTAEIKVADKDIRALVTALAPTLLGRPGIGIHTTAQFLVTIGANIDRITDDAAFARICGAAPIPVSSGKTHRMRLHRGGDRQANSALHIIIVGRFKHHQPTKDYLARKLAEGKSKRDVIRALKRYVARDVFNTLKTDLNRT

SEQ ID NO: 403626 - protein, 404 aa, unidentified
MKGPIVSIDVSKGKSDYQAFKNLNVKYAGSRSIKHTKEGFDEIVNLVREMEKKLETEVCVVYEATGVYHRVLKKVLEDNNIKQFIINPLLSAKTRKNDSLRCPKTDKLDPKSIAKTYYSHSLHNSHKQETIYHELRELSRYYEDILVHIRKDKVAFRAQLDIVFPGYDTLFDDLYGPVALAVIEKYPHPEMLQKKKINTVSKVIQSKTCHRQAVSDTMADKAIEYSKTIYSGCDKDDIEVLILQRFIKKLNEDMAEAERTIGEMIKLAQELPDFSIIKSIPGIGDNLAARMIAELGDMTRFKKKNELVAFAGLDPRISESGKNDGDHMHITKKGNKRLRCLLYLAVTCSIRLKRDDNSIKDFYIKKKQQSNPMCSKAAKTACASKLVRIIYSMCKTGELYQYNK

SEQ ID NO: 403627 - protein, 389 aa, unidentified
MKYVGIDLHKKTISACVVVKENGKKKVAARKRLECQDEAGIAAWFREWGKFEVVVEATASYEWFVKLVEPMAQRVLLAHPKKLRIIAESKRKSDRLDAQVLAEFLADDAIPLAYRPGPRVREHRTLVRYRHYTQRRITSVKNKLRHILAAYNADVPHLFTAAGQEHLAAVKLSAADRFVADELYSELCQHQARQAQASRELRRFAAQASLAEREARAVLDSIPNVGPVTMDIVLAELGDWRRFRSQADVVAYGGLAPGYRESAGKSKQLGITKEGSRLLRWAMIELAWRMVRTSRKWGGHFTRLEVRLGPKKAIVAIARRLLTVIFTLLRSGQKYSLALETPPPASCRSNSPRDTIPSDPACLRGQPRQASSLGAGVDYGGPLSVPGSE

SEQ ID NO: 403628 - protein, 345 aa, unidentified
MEIHTIGIDLGKTVFHLVALNRSGEVVVRKKCSRNQVLRFTSNLRVFLIGMEACGGAHFLGRALREQGHDVRLMPAQYVKPYVKTNKNDYIDAEAIAEAVGRPSMRFVPIKTDDQLDLQSLHRVRERWVGRRTAVINQIRGLLLERGITIRKGRHHIEVSLPGILEDPENKLSGALRVLLAQLQLEMQYLQRQIEESDKLIVRIAGDLEACRRLVAIPGIGPLTATATVAAIGNGAAFKKGRGFAAWLGVVPGEHSTGGKQKLTGTSRRGNRYLRKLFVQGAHSVLLQKTKQATGLSTWLASLTSRKRAQVATVALANKMARMAWAVLTKGEPYRPPLLPQAIGA

SEQ ID NO: 403629 - protein, 465 aa, unidentified
MKKESNQRMKDKRLKGHLDCVNLFAAGIDIGSTSHFVAVPQELDARFVREFSCFTKDLIRLADWLDQLGIQTVAMESTGIYWIPIYEMLEERGLEVLLVNAHHVKNVPGRKSDVQDCQWIQQLHTHGLLRGCFRTPEKGIALRAYMRQRETLVRKASEPIQHMQKALRQMNLLLDNVVTDITGKTGMGIINAILGGEHDPVKLAKLRDGRCKHNEETIAASLEGHYRKEHLFSLQQAVEIYNFYQQQIFACDAVIENELASLESKGNQTGTPATSKKRKNKSSLNFDVHSELYRLTGVDLTSIDGMNENSVLKVLAETGTDMSHWQTEKHFSSWLGLSPNNKITGGKVLSSKTKPTANRAAAAFRMSAYTLHGSNSALGAFYRRQRTRLGAPKAITATAHKLARTFYSMLKNGTEYVDHGKEYYERQYENRVLKNLKKRATSLGFKLVPNIDQGDMNKDLAISAN

SEQ ID NO: 403630 - protein, 361 aa, unidentified
MAKVRSWAGLDVHARSVLAVTMDAETGELRCQRLTAQTANVLGFLAALPGPTRVAYEAGPTGYGLARALHAAGIGCTVAAPGKIERPAQDKVKTDLRDAERVLRLLMIDALVAVRVPTVEEEAIRDLVRAREDVRGDLMRWRQRLSKLLLRHGIVYEDTGSTWTQRHRAWIRAQDLGGGAQVTLLDHLGAIDTLELRRGALEQSIGELVPASPYADTVARLRCLRGIDTLSAVGLAAEIGDLTRFDRPGKLMSYLGLVPSENSSGETRRQGRITKTGSKHARRLLVEASWHYKKTPARGVTLQRRQEGQPATVVAISWQAQQRLHRVWRRLCEERGKRSTIVAVAVARELAGFCWALARTD

SEQ ID NO: 403631 - protein, 342 aa, unidentified
MQITTIGLDIAKNVFQVHGIDAAEKVVVRKQLRRSQVLVFFKALAPCLVGMEACATSHYWARELTKLGHEVRLMPAKDVKAYVKRNKNDAADAEAICEAVRRPTMRFVQVKSTEQQGRLMLHRTRDLLMRQRTQLINAMRAHMAELGIVAAQGREGIKALLRIIASERDARLPVDAHASLVVLAAGLQAVQTMIASIERRIIIQHRSDEASKRLKTIPGIGIVGATAIAATIPDPKVFRSGRDFAAWIGLVPRQDSTGGKQKLGPISKQGDQYLRRILVVGAHAVLKLARQQPEKYPWLTRLLARKPFRVVAVALANRMARIAWALLANGGTYRVPVLAAAA

SEQ ID NO: 403632 - protein, 462 aa, unidentified
MAERHDDESRTGRARPLEGLPVVRAQVAGIDLGSQRHGVCAPALTGNGREVADFGATTPELQRLLQWLKVRQVESVAMESTGVYWIAPQEVLEAGGLEVLLVDTRQLARVPGRSKKTDPTDGEWIQRLHSCGLLTGAFRPPEQVSMLRTLVRDKANLGAEAGDGVRRMQKSLDQMNVRVHRAVSDLDGVTGLAMVRAIVAGERDARKLAQLRDRRCQKSEAEIAEQLSGHGREDHLFSLRQSLKMYEATPERIAAYEQEILRKLAEMTPGERAGQSAPALKNPHKANSIRKRGEEPRRQAWYRMSGVDATQIDAIGVGTIEVVLSEYGPDLSRFPTEKQFISHATLAPRVARSGGKALKKKKRHSASTRVAAALRMAALALRHSPTALGAYYRSLARRIGGDVAVFATARKLATLIYRLLRWGQPYVDEGAQASEEPYRQQRIRSLAARAKEFGYQLVLATT

SEQ ID NO: 403633 - protein, 423 aa, unidentified
MIEGSGREVADFGATTPELIRMAQWLKARKVESVAMESTGVYWIAPHEVLEAEGLEVLLVDTRQLARVPGRNKKSDPLDCEWIQRLHSCGLLMGSFRPKEAVCMLRTLVRDKGNLVAEACDWLRRMQKSLDQMNVRVHRAVSDIDGATGMAILRAIVAGERDARKLAKLRDRRCHKSEEEIAEQLSGHWREDHLFSLRQGLKMYDGIQERITDYEKEILRKLGEMEREEYRKQAVPPLNNPQKAKLIRKRGEEPMRQALYRMSGVDLTGIDAIGVETVQLVLSEYGPDLSRFATEKQFVSHVTLAPHKPTSGGKPVKKQKKRGGASSRVAAGLRMAALSLRHSETALGAYYRHIARRKAGDVAVFATARKLATLIYRLLRWGQPYVDEGAAAYEKRHQQARIKSLTAAAKDLGYQLTPTPNLV

SEQ ID NO: 403634 - protein, 402 aa, unidentified
MASIGADVNRPMEPPMRKPLNDLSRSLTTLDANHTLIAVIEMGQKSWLVAGIVPGVERQPLKKLDTDEDALLKLLDRWRMEAEKAGHKIKRITVAFEAGRDGFWLARWLRARGIEAHVIHASSVAVSREHRRAKTDRLDTELLKRAFLGWLRGERDHCKTVAIPTIKDEDAKRPNRERDSLVGEQSRIVNRMKAALARLGIRDFNPKLKKAAERLSGLRTPEDQPIPPNTLAELYRDMERRRLVTDQIRQIEDARLRRLKQAPKDGPNIMVRLLARVIGVGIETADMLVQEVLSRNLRDRRAVARYAGLTGSPDESGSKRREKGLARSGNARVRRGMIQLAWRFLNFQKDSALAKWFQARTANARGSRKKMIVALARKLLIALWHFVRDGVMPEGVILRPAQ

SEQ ID NO: 403635 - protein, 393 aa, unidentified
MKQRKNAGSEPTIDTESSNSIFISGLPACLNPDPDSRLTSIVKVIRLSSSPFFLKSVKDKSMENFYFIGVDVSKKKLDFCVMFEGKVVHEEETANHQGAIIALLHQLEEEYGITGGQMLVCAEHTGQYTFPLACACKAVECKLWLENPAEIKYSSGVQRGKNDKVDAKRIAIYAKRFQDRVQYFERPTEDIERLKQLESERTLYVTDLAKYKGQMKDQKDYMPRKLYERKMKRLQALMDDLEEAIQAITDEMDEVVASCPVLSRQRELLMSIDGVGRVVATNMIITTEAFTRFDDPRKFNCYAGVAPFSYSSGSSQHSKARVSHRADKVMKKLLHLAAVAVTHRVGGELKKYYERKVAEGKNKMSVINALRAKIVARMFAVIKRNEKYKPILS

SEQ ID NO: 403636 - protein, 320 aa, unidentified
MMAQNDRVVVGIDVAKDKVDACIRSPSQRQTFPSSAEGRRKLIAWLRKHKVDKAVMEASGGYERDWAKALRTACFEVWIVDPKRVRNFARSAGRLAKNDVIDAEMIAWFAETFKQAPTQTHDVAREELAALVKARKAVIDLKTRLQSRNEHAVPGAVQKAHARVLKGLDAEIAKLEDAIVVTVKATPAFAARAEIIESVPGLAETASAVLLAGLPELGTVRQEIAAALLGAAPYDDDSGKRRGERHIKGGRRWVRNALYMPCLGAATQSNPVLKAFYQRLIARGKEPKVALIACMRKLVVILNTMIARGEKWDPSRYALR

SEQ ID NO: 403637 - protein, 337 aa, unidentified
MRYIGVDLHKNSFYVSYLEESGAVSHREYRMKQLAEFKQGLCTDDVVAVEATGNSRHFVKQIAGLVKAVEVVNPSAFRVIKDSVKKTDKHDSELLALFLSKGLLPQVRQKAELQAQLKSLAQTRDKLVKLRTTLKNKIHNILNAHGIITKREAFSSKRSLRKVLEFDLPQTAQLELEVIVEQIEHLNEGIAKIDREIEERGSRLKGFENITSIAGIGKKSGAILLSIIGDIHDFEDEKKLSAYFGLVPRVSQSNETHHQGRITKRGSKLGRTTLVQCCLISIRYSPYLRRFYDKIKAKKGAGKAIVATARKLLSIIYHTLKNNWVFEDFSNFVIKET

SEQ ID NO: 403638 - protein, 453 aa, unidentified
MSAPKRKRQKKRDLVVIHPHAAGIDVGSKFHVVAVPGSCDPEPVRSFRSFTGDLHRLADWLQQVGITSVAMESTSVYWIPVFEILEERGFEVILVNARDAKQVPGRKTDFNDAQWLQQLHEYGLLRASFRPRQQIVALRSYVRQRERLLEFCAAQIQHMQKALMEMNLQLHHVVTDITGETGMKIIRAIVAGQRNPEELAKYRDPRCRQPTEVLREALEGNYQDEHVFELTQALQLYDFCQLRVADCDARIESSLRTLHTTTEPSVQRPARGKSKSKRHNGFSFDVQPALHAVLGLDVTRIDGIGPYVALKLVAECGTDMSRWPSAKHFTSWLCLSPGNKISGGKVLSSRTRRSSSRAAAALRLAATTVGRTQTALGAFYRRLSGRIGKAKAVTATARKLAVLFYNALRHGMDYADPGATYYEERYRQRILDNLRRRAQDLGYVLQECNMGAA

SEQ ID NO: 403639 - protein, 347 aa, unidentified
MRFYTQQHRYYCGIDLHAKRMYICILNGEGEIVYHQNGAANPQHFLRAIAAYRDDLVVAVECMFTWYWLADLCAREHIPFVLGHALYMKAIHGGKAKNDKIDAHKIAALLRGGLIPQAYVYPPEMRATRDLLRRRCHFMRKRAELLAHIQNTTSQYNLSPLGRKIAYKANRQGVPEHFAEAEVRKSVEVDLSLIDHYDKLLTDVELTIARTAKIHAPHNFHRLRTVPGIGKILALVILYEIHDITRFPSVGDFISYCRLVKCAKLSDGKPSGYSGSKIGNAHLKWAFSEAATLFLRANPMGQALFSRLCQQHGKAKALSILAHRLGRAVYHMLRREQAFDLQKFCST

SEQ ID NO: 403640 - protein, 475 aa, unidentified
MSKSDQDQQSATTDKSGLKVAKSKRASQQKQAEHPVFQPNAAGIDIGAREIYVAVPADRDAHPVRKCETFTSDLHQMAEWLVHCGITTAAMESTGVYWIPVYDVLEKHGIQPCLVNPRNMKNVPGKRTDFHECQWIQHLHSMGLLHSGFRPDGEVCAVRSLMRHRNDLVEMASQHVQHMQKALTQMNVQFQHVISDITGLTGLAILDAIVAGERDPAVLAKLRDPRVKASEETLRKSLEGNWRGEHILVLKQRLSLYRSYRDQINDCDKEIEKLVAAFEPKVDPDEKPLPEDRKRRRKRKSGNPDFDMRTEAYKLFGVDLTQIPGLMMLVFMLFSEVGRDMSRWPTAAHFVSWLGLCPDNDISGGKVLWRGARRTKSRAGTLFRLAAHSLHRDQTPLGDYLRRMKAKLGPAAATTATAHKIAIIFYTMVNKQVEYDASLWAHRDAVREKRLEARLHKQAAQRGYKLVPLEEKAAA

SEQ ID NO: 403641 - protein, 387 aa, unidentified
MPQPNDLSRSLVALDQDSTLIAVIEMGQASWLVAGIVPGVNRHPLKKIATDQDQLMQVLRRWKNEAETAGRVIKRIAVAYEAGRDGFWLARWLRARGIEAYVIHPSSVPVSREHRRAKTDRLDTELLKRAFLGWLRGEPDHCSMAAIPTLTEEDAKRPGRERESLVGERTRITNRIKGALARLGIRNFKPMLRNAPKLLETLRTPEGATLPPNTLAELRRDMARLSFVKQQIKEVETGRIERLQRAPGERGNAMVHLLTRVVGVGVETADMLVREVFSRDLRDRRAVARYAGLTGAPDESGKKRRERGLAKSGNARVRRGMLQLAWGFLVHQPDSVLVEWYRARTADARGATRKTMIVALARKLLIALWRLATTGEVPEGLGLRAAA

SEQ ID NO: 403642 - protein, 378 aa, unidentified
MTNQMDVNNTCCVALELSQSSWVTAFSPPNGGRTAVNKIGAGDADRLVSLLRAQQAKAEREASQVLEVVVCYEVGYDGFWLARLLKSRGIRTIVFDPASFLMPRRGRLAKTDRLDAEGMTRTLRTWLSGDKSVAREVSVPTVEEEDAKRIERERKHLVEQRTRVVGRIKGLLALHGIRLGSKGIGRKLRERIPSLVTGDGRPLPPFLRRDIERMLQHHEFICAQIAEVENDRQRALSEPSTFPHSDKVRRLAQLGGVGETTATVLIAEVYHRTFETRRHVASFIGLAPSPYASGDVSRDRGINKAGTKLARQTLVELAWLWLRYQPQSKLTRWWHERFAGKGMRGRKVGIVALARKLAIALWRFVEDGVVPEGALLKS

SEQ ID NO: 403643 - protein, 348 aa, unidentified
MRGAVHMQITTIGLDVAKNVFQVHGIDASEKVVVRKQLRRSQVLAFFKVLAPCLVGMEACATAHYWARELTKLGHQVRLMPAKDVKAYVKRNKNDAADAEAICEAVRRPTMRFVQVKSVEQQGQLMLHRTRDLLMRQRTQVINALRAHLAELGIVAAQGREGIKELLKIIASEADARLPVDAHSSLVVLAAGLQALQTLIGSIEKRLMVQHRSSEASQRLETIPGIGVTGATAIAATVTDPKVFRSGRDFAAWIGIVPREDSTGGKHKLGPISKRGDRYLRRILVVGAHAVLKQARRRPEKYPWLTQLLARKPFRVVAVALANKMARIAWALLAKGGTYQMPALAAAV

SEQ ID NO: 403644 - protein, 398 aa, unidentified
MNGVVAGIDWAAELHVCCVIDAAGGVLDRFEVTHDAMALRAMTARLTRVGVTAVAIERGDGPVVEVLLDGGLAVFVVPSRQIKGLRSRYGSAGNKDDRFDAYVLADTLRTDGHRWKPLREDHADTRALRALCRARKDLVETRVAVLNQLRCNLELALPGAIGLFSKPDSPITLAFLRRFPTAAKVAWLSPARLAGWLRSVGYTGGISAAVLHARLVEAAPGLPGAEGDARGDITLSLVDIVEMLNTKITALEAQINTVFRAHPDQMIFASLPRAGMVRAATLLGEIGDCRERFPTDSALAALAGASPSTRQSGKREQAVFRWACNKKLRAAVMDFANGSRAADPWAADIYRRAIERGCRHPHAVRILARAWIRVIWRCWQDGVPFDPARHGARQRIAA

SEQ ID NO: 403645 - protein, 368 aa, unidentified
MTNHFIFVGCDSHDKTLVTRIAQNREKSEKKTFSASQAGRRKFVEELRRRSKQAGGAKIVVAYEASGNGFILSDELKKAGMECHVVAPSKIERSSKQKRNKNDDRDAERLLEILRGHYLGGNKLPSVWVPDLQTRDDREIVAGRQDLSDKQSKIKTQVKTLLKRHGLEKPEGIGAGWTKGYRRWLEGLTEDSRTGLGVRTRLKSLLRQLEFVEEEMERADEGMKELANMARWKPIVDALMKEKGVALKAAMKYATDIGDFGRFRRGRQVGAYFGLTPSSAESGETDDRKGHITHQGPASSRKILCQAAWSRVRHDKQEREVYMRIVAKNPKKKKIALVASTRRLSVRLWHIGRQAQLKMQSVPTGSLE

SEQ ID NO: 403646 - protein, 348 aa, unidentified
MQLLKCGVGIDMAMQKFDVCLSVIDTEQRVTIKATRKFENNPKGFVNFLGWVKKHHKQAIPIVFLVEASGVYHEQLAWYLFDQNQSISVILPNKAKRYKEALGFKSKTDKLDAQALAQMVCEQRLKLWQPASKNLYQLRTITRQIERISNHITSFQNQLHALEHGMYREKTVEKMIAKNLALLEKQKEKLVSIVETMIKEDTVLNKHYEQIGIIKGFGLLSFAVLIAETDGFALIENQSQLVSYAGYDVIENESGKHKGKTKISKKGNGHIRRALHMPAFNVVRYEQKPFVSFYNRVYENSKIKMKAYTAVQKKLLVLVYSLWKKNEKYQPNYVSKISKEKELEPSFG

SEQ ID NO: 403647 - protein, 348 aa, unidentified
MALTIVETRAVTGGVDTHADVHVAAALDPIGGLLGVGEFPATPAGYAGLLGWLRGFGTVCLVGIEGTGSYGAGLARHMATAGVRVVEVDRSDRQDRRRQGKSDPLDAVSAARAAQSGRARGAPKGRDGQVEAIRALMVAKRTARSERTQTINQARALVLTGPDDLRTRFSRHTPAGLVAQLAALRPRPGDVVGYATRISLRELGRRAQFLDSQLERLDELIVPLVTARAPGLLALHGVGPDTAALLLIAAGDHPGRLRSEAAWAHLCAAAPIPASSGKVTRHRLNPGGDRQANHALWRIVITRMGSHPPTRAYVERRSAGGLSKTEIIRCLKRYAAREVYPHLRPGAG

SEQ ID NO: 403648 - protein, 478 aa, unidentified
MPQARSAAASAVGLHVVPQLAHEPLYVGIDVGKLQHVAGFVSPTLLTRYQRFENCPTLTFAQSREGFRALVDRVQAYVPLTQVYALLEVTGHYHKALVQYLHELDIPVYLMHVQKRQVGLLKSDKRDALGLANHLYNTLEKGVQSADPLQAVRRLAPPTAAAAQLYGMIHHREELVRERTQRKNQLTSICDELFPEFTQVCKNPNSASALALRTAFPTPAALATASASALVAARSGHYPSTTNLLTLQQLAADSIGTKDVARVRGLAFEQQQLIAELTLLEQHIVALEAEIAQVLVTSREGRILMSIPGIGPMQAATIIAAIGSIANFDRPAQLKAYCGWAPTLRQSGKTLDHAKLTPRGVRALKQVLFLAAWGAIRGGDNEFARLYERLVPRKCAFDERKGEYIGKNKVVGRVAGQLVTVLFTLLKRDQEVVAQAKGSPLLPEPLGYDPALHRRHRAGLYTAPGAVPPGKLVRLPMP

SEQ ID NO: 403649 - protein, 419 aa, unidentified
MRVHRNCCGLDVHKKMIAACLIREDGEGNSVTEKRLFGSMTRELHELAQWLCSAQVTAVAMEATGVYWMPVWNVLEPYGLQLLLINPEHYKAVRGKKTDLKDGTRIAELLQDGRLEGSYVPPVTIRVLRDLTRYRIKLVQYQSSIANRIQKLLEQCNIKLASVASDALGVSAMAMLRALAQGETDAVRMAGMAKKQLRKKIPQLQLALEGCVLPHHRLLLTEMIEDLDHVGAKITRIEDTIERHMRPFQEAVNRWLTVPGIKHRLAWTLVAEVGPTVEAFPSAADIVSWAGICPGNNQTAGKRKTGTTRAGNPWLRRALCEAAWAASRSKGTYLQAQFRRLAALRGPKRALIAVANSILTAGYYMLQRATTYQELGPDYFDRRNKVRATHRLVKRLEALGHRVILEPHFTAYPLKASSS

SEQ ID NO: 403650 - protein, 413 aa, unidentified
MDAIVERCAGLDVHLDTVVACVLYGKLDIKPKKEVKTFSTTTKGLLELLDFINQKECTHVAMESTGIYWKPVWNILESGAFDLIVANAKKIKNVPGRKTDVKDAEWIASLLRCGLIEKSFVPLERIRDLRDLTRLRKELLGEVNRNKNRIHKVLQDANIKISSVLSDVFGETGKSILNQIIGNQCITEEFIYSLYEGRGKSKLKSTPMEMYEALNGKIRGHHVILLGMHNSNIVFLEKQINELEKEIDILLQKERDSLELLETIPGISKISASSIIAEIGTSMDVFKTEKHISSWAGLCPKNNESAGKKKRSGIKSWNNWLRSMLCECAWSATKKKDSRFKNKYWSMVPRMGRKKALIAIANMMLRLIYHLLKTKSTYKELEIQYFIDKDKRREDRIIKELKSKGYLVEKDSL

SEQ ID NO: 403651 - protein, 370 aa, unidentified
MDVHTTNYTLCAMEPIIGEDDRVFATIKVTPDYKNILMFIENLKLKLGLNDEYDIQCGYEAGCLGYSLYNQLTAAGIKCVILAPTTMLTPQGVRIKTDMRDAYMIAQCLSYGGYHAVYIPTEDDDSVKEYLRMRNDHKLALKKIKQQINAFCIRHGFCYDGTKWTLSHLKWLKKLEITNGLHRETLDEYMASYEEQEAKIERYDKRIGEIAEQTRYHDKVKKLGCFLGIKTHTALSLIVETGDFERFAKGNQYASYLGLAPGENSSSDNIHRLGITKAGNSHLRQLLIEASGGICKGAVGHKSKELRARQNGNTAEVIAYADKANTRLRSRYYKFIRHGKKRNVAVAAIARELACFVWGMMTDNIEMKAA

SEQ ID NO: 403652 - protein, 358 aa, unidentified
MDQQHQPKQHYAGLDVSLDATSICVLDAKGAVVWRGKCASTPEAIRDALRQHAPALVRAGLETGQLSNWLTHGLRRLGVPVVCLDARHAKAALKLQLNKTDANDALGLAQIVRTGWYREVAVKGMDAQTLRLLLVARAQLVSQRQALANTVRGLLKTFGLRIARGSGGLFAPRVREAAKGNDALLAIVEPMLLAWQALREQAAILDRQILARARDDATARRLMTVPGVGVVVALAYMAVIDDPARFRRSSSVGAYVGLTPKRHQSGEEDWSGHISRCGDDLLRTYLFEAATVLLHRHPRACALRDWGLALAKRVGMRRAKVAVARKIAVLLHTLRRRGEDFRWPKLAVAPPASTATAA

SEQ ID NO: 403653 - protein, 341 aa, unidentified
MQAIRFGIDLAKSVLQVHGVDASGQVVVQRQLRRGQVLKFFAKQPPALIGMEACGSAHYWARELSKLGHEVKLMPASYVKAYVRRNKNDARDAEGCCEAVSRPTMRFVPIKTVEQQGQRALHRGRDLLVRQRTQAGNAIRAMLYEMGLIGSKGRLGIGALIERIEAGGADIPPGLLIPLKSLARQWRGLDAEIAALDRELVTQARANPVACRLMKIPNVGPVTAHAVIAAVGDGRQFASARDFTAWVGLTRHNHDTGGKTKLTGHISKAGDRSLRRLLVLGASAGLRHVRAKPDKGSPWIRGVLARRPVKVAVVAQAAKTARIVWAVLAKGQEYRAEKQAA

SEQ ID NO: 403654 - protein, 355 aa, unidentified
MSQEKYIGMDVHAATISAAVKNAEGKLLIECVLETKAGTILEFIQGLRGTLALTFEEGTLAAWLHDLLKPHVSRLVVCDPRKNALMRDGNQNDRMDARNLAELLRTNQVHAVYHGKHGTRALKELGRSYLTLTKDSTRVMNRIKSVYRSWAIPCAGTSVYSRRHRAEWLAKLVEPGVRIRAEHLYEQLNSLEPVRQAARHELLRESRKHAAVKLLRQVPSIGPIRSALLVALLQTPHRFRTKRQLWAYSGFAVQTYDSGEYRFVRGKLHRNRERITVRGLNHNHNHDLKNLLKGAAISAIERPGPLQDFYAALVEKGMRPSMARLTLARKIAAITLTMWKKGASFDPKQLQRQAA

SEQ ID NO: 403655 - protein, 405 aa, unidentified
MGEDRFAGIDWASQEHAVCVNDADGRIVEGRRYRHDERGLRAMCNRLIELGVLLVAVERPDGLLIERLLDCGLHVIAIHPNQVAAMRPRFSNAGGKSDSFDAFVLAELARTDSHRFRVLVPDSDATKALRALTRAREDLVDTRVALANELRAQLECFWPGAAAIFAEIDSPIALAFLKRYPSPADARGLGEQRLERFLARNHYCGRRPVHQLLARLRGAADGRAGTLQSEARRQIVLGLVAALEPLVTQITQLTSEIRSALHDHTDGETFSSLFRDPKTAICPATILAEMGDCRPRYPTVAALAGDSGQAPVAVESGKSKRARFRWACDHRLRDAIATLADTSRHTNPWAADLYDRARARGCTHPHAIRILGRAWCAVIWCMWQDHSTYDPARHGALQRLTAQQG

SEQ ID NO: 403656 - protein, 422 aa, unidentified
MHEERRWFVGIDWASQEHVVTLCDAQGNKIGEREFVHGGTGLSDMIAWLLKASGGAPGEIHVAIETPHGPIVEALLERGFNVYSINPKQLDRFRDRFTVSEAKDDSLDAYVLADSLRTDMHLFRQLIVSEPLIVELREWSRIDEELKAERVRLANRLRNQLWRYYPQMLELADDLSGEWVLDLWEAAQTPEKAARVREATVARILKSHRIRRFDAAHVISELRKPALSVAQGTTEAATAHIRLVVAQLRLLNRQLADAGLQLDRLCKKLAEPIAGDEGENVPGQRQEHRDVTILDSLPGVGRTVLVAMLAEAPDALQRRDYHALRNLCGSAPVTRRSGKSCLVMRRRACNRRLRNAAFYWAQTASQCDPTSRAKYKALRARGHGHARALRSVVDRLLYVACAMLENRTLFDPSFGEKKATAA

SEQ ID NO: 403657 - protein, 352 aa, unidentified
MSDKPVVGVDVSKEWLDLCCRGEIVRIANSAAAIAAWLDRVRPALVAVEPTGGYERVLLAALRERDIPALRVHPNRLAAFRRSRGIAAKTDRIDAALILAFVTDLLARQGVRPDIAERDGLRELAARRRQLIAALHAERCRLDVAALAPLVLGVRHSLEVIIAALRHSLQAIEDAIAQTIAQDPHLAELNKLLQTIFGVGPVVAATLIAELPELGLLSGKQIAALVGLAPRTRQSRKTRWRESIGHGRPGVRRALFNAARSAIAHPSPFKNFYDRLVETNGRPGKVALVAVMRKILVTANAVARDRQPWRPATQAQPTAQLTDPLNPKAAPPNAMQHSPGLMPADNQPTLAQ

SEQ ID NO: 403658 - protein, 455 aa, unidentified
MRKPQVIPDEDHEVVCERVAAVDVAKASGVVCLRTPDPQRPGRFVNRIWEDVPATRARIAELGGELLRCRVQMVTLESTSDYWRIWYYVLEGLGLAVQLVSASQAKNLKGRPKTDRLDAMWLARLTQWGMLRPSFVPPAAIRRVRDFTRARTDLVRERTRVLQRLEKLLEDAMVKITSVVTDGLKAKSSVAMVAALVAGERDPRTIADLAKGSLRGKRDQLAEALDGMFDSHHGVIAGMLLDQVAFLDQRITAMEDQAIAALAQVEESWGVDATGETGPGCGTTPDSPVLAAAHRLAEIPGVSVWLAIVIIAEIGLNMAVFPTPAHLVSWLGLCRSAAQSGTRHGKGRQKKGNSYARGAAGQAALAARGTATFLGERYRRIARRRGGAVAQVAVARSIMIIVWHLLNDPAARYRDLGPDWHARRTNRDKKIRTHIQGLKALGVTVAITDDEPQAA

SEQ ID NO: 403659 - protein, 482 aa, unidentified
MKKRTIYTNQSQELLRLFEQVGNSAKVMCVPIDYAKKDHVVMFCNGYGDIVRKPFSVKNSAEGLKYLIDQVTRSCRHRRIRKEHVFFGGEDANSYAENFANALRSKGWLVAHVNAHDAKKQRQNLQASTDRLDLMGIATMLLNRRANCSPAQTGIYRNLRTLVRHRKKLVVMKTEVRNRVHAVVDRLFPGFLSEKKTSITPFSNSSLYLMENSFSAQQIRRRKHSTLVNILKRYGTAAPEGAAAKLRTYAAQVLTTQNQYAATLQLSLAHHIKLYRCLLDNTEQLEKEIALPLAQSQGAFLTSIKGIGIVLAAGVTAEIGSPFEQKPLNNLTSYSGIIPRVKQSGGPNAQAHTGRVSKRSNHLLKDSVVQSAFHIGHFGPKELSLDYKRRKAAGQHADFGMGRRFLRMAMSLMKTSQIYLPPPLRNDQVRAEERAGYYLSVWPQLRDKWNKVDALKVAFAKHNPLGQWRHIVQELYGIKLKL

SEQ ID NO: 403660 - protein, 347 aa, unidentified
MLIIGCDLHTRTQQIAMLDTETGELVERRLEHENGEAKRFYEGLKEPALVGIETTGYTRWFAEMLAELGHELVVGEAGKIRAQRPRKQKHDRGDAQHLLELLVRGDFPRVWLPSPEERDVRVLVEHRHQLVELRTRAKNGLQAMALSYGLRRRGRLWSERGQEELKKLPLREGMERRREDLLRLLGQLNTWVKELDQRIEQEAARREDAQRLMTHPGVGAQTALATVLVLGPVERFPDARHLTSYLGLIPEEDSSAGRQRFGHLTKQGNRLMRFLLVEAAQTASRYDARLRRAYRRLAFRKGAAIAKVAVARKLAIRLFIMLRDQIDYAEFCRRGSHAGMLGDVALA

SEQ ID NO: 403661 - protein, 338 aa, unidentified
MYYTGIDLHKFTSYLTTVDSSGAIVKQENLKNVGHNFIQYFSSIPGEHKATVESTMTWYWLNDLLTSINIPLVLAHAKYVKAIAYAKVKTDKVDSHTLAQLLRMNFIPVAHKISIENRLLRDALRARLKIVQRHTSVTNSMQLLLAKYNFDSPTELSGIPKFQYEQLTEVEELLSEQMLDLEKQLYPFLIPNDDIQRLLWIPGIGKMNAFTILLEIDNINRFPDVKNFFSYCRLVPSARNSGGKSKQRSSKDGNKYLKVAFSDAAVHAVHYYPVIRKYQNSLLRKKNKQIAKTIIAKEIAEIVYHVLKNKVDFNNKFKGQELEHKKSLQWPRVVNPYA

SEQ ID NO: 403662 - protein, 394 aa, unidentified
MKKRYASVACGGMDVHYRFSDVTWRDGLGHVVRRERLDHRDRSRLRAHVAAWPKTASIVMEASFGWGWLSDEIEAAGLQVHLSNCYKVERMREARGGVKTNRKDADLLSLLPQEATTWWEVWRPPPQVRDRREWMRHRAGLVAAQTTVKNRIHALCHRHGIFYEFSDLFGGEGRRFLAEMGRDGRHAGGTLAAGALETLRGNLRLLMHLRSELATVAWHLRGLLNRDDLVRRLDGIPGFGLILSHTVAAEVGRFERFRNAKALASYACLAPRADETGEARPGRAPLGRHLGSRGNLTLKWAFIEAAHAAVRHGGKWRAIWDRATKNGKKDRNRGYIKVARALATVVWVIGSHGVRYQERPPGRPGSRKAARRRQEDSRPGTGQPFHPMAQAPRA

SEQ ID NO: 403663 - protein, 420 aa, unidentified
MNDIIAGIDVHKRVLMVVVGTVCGAAAEDGSEPREPIRFVQRRFGTTTSELLHLGAWLQQHGVQEAVMESTAQYWKPVWLALERHFRLSLAQAWSNRAPRGKKTDFKDAQRLVRRHAAGELTLSFVPDAEQRQMRTVTRRRTQLTRDRVRIQNQLESLLEETRIKLSSVVTDLLGSSGLRILTALGQGETDPAKLAAMGDARLQCAPAELADALTGSVSEIHRRLLQQHLAHLALIDAQMEELSLLAADAMRQHSEAVIRLVKIPGIRVLSAQQIVAEAGPQASAFPSAAQFSSWIGVCPGREESAGENHSSHCAKGNTYLRRVLCQAAQAAVRTKNSYFQLKFQRLMPKLGYAKAIWAMARHISVVIWKILHDGAQYEERGLPTTPQAAKRRAQRLAKQLRALGYSIELKPLSPEAVVA

SEQ ID NO: 403664 - protein, 347 aa, unidentified
MEHYVGIDVSLEKSSVCVIDHTGKILRETKVASDPDALAAFLAGLGHRVTLVGLEAGPLSQWLFAGLRTAGIEAVLMETRQVKGALKAMPVKTDRRDAEGIAHLLRMGWFRPVHCKSASAQQGRALLAARKLLLGKMLDIELGLRGVLRGFGLKMGKVNRGRFAARARELVAGNPMLEHVAHAMLTARETLRAEMTALDRRARAHARENATCRLLMTAPGVGVLTALTFKSAVDDPGRFRSSKMVGALFGLTPSKHQSGERDVTGAITRAGDGMARSTLYAAATALLTRTKAFSSLKSWGLAVARRRGRKRATVAVARKLAVILHRMWVDGSTFRFGGAAAPDAAAG

SEQ ID NO: 403665 - protein, 338 aa, unidentified
MNNIINQQQIQLGIDVGKVDLFCHLIDQDESFSAEFKNTAPGIKRLTAWVHKIANKKTIHTCMEATGHYTRLVSYTLTESFNGQLYVVNPRQIKAFGNRRLRRNKSDKADAKLIAQFLIAEQNELTEFVPKTIDEQAIQEISNQKEYYVREIVKFKTQIQSRDTTFCKKSIERIIKALEKESQKLEDQLNKLIQKDTQKQINKELLLTTPGLADRTVNLLIAQLPQIDQFSSPRQLAAWIGVTPKHYESGTSGRKYTPITKMGSASLRCGLFLPSMSAMTHNPVIKAFADRLRENGKKGKVIVIACVRKMIHIIYAILKKQEAFNPEFNASNLVKKAA

SEQ ID NO: 403666 - protein, 426 aa, unidentified
MTGIGENTLAQPVKPPLRERCACLAKLVKNRLTLTGEAIRSNDYRKDTTVKAPSTRPAAVLGLDVGKSSHWACLIDRDGEVLASAPVRNREAELDALFASAPAGTLVVVDQFRNIGSLAVRRARAAGLGVAYLPGLAASRAAGLFAGEAKTDERDAAVIARTALGVPDSLSGIPGRGEALEAARALSSQRDHVVACATRDKNRLRAVLLESCPALEAAVDLSDRRWLELLAGFGGAWGIARSGAGGPRAEAAGEAAAASTAPPPALVEAENRQVRFLAARISEALDEAGALEAETAALLEGDETYACLLTVPGIGPRTAAQLAVSVDIGRFPDHDHLASYCGIAPRVRSSGTSVRSVRASRRGDARLKSLLIFSCNSLVRSSGRYGEYYRACRARGMGHGRALKAVARKRLRAIYAVMRDRVPYRE

SEQ ID NO: 403667 - protein, 343 aa, unidentified
MQTITTVGLDIAKSVFQVHGVDADGQVVVRRQLKRRYVLAFFQKLPPCLVGIEACASAHHWSRELQALGHTVKLMPPAYVKPYVKRHKNDAADAEAICEAVTRANMRFVATKTPEQQSCLTLHRTRHLLMRQQTSVINALRSHLAEFGIVAPVGRNGVEQLLGVVADLNDKRLPEIARACVAALGAQLRVLKVQILEFDRMIRAWHRSSEASQRLDQVPGVGPVLATALVASVADPRAFRSGRDFSAWIGLVPKQNSSGGKERLGNISKRGDRYLRSLFTTGALAVIRYAKIHGTKHRPWLTALLARRPTKVAAIALANKLARMAWAMMAKGERYKEPVALAA

SEQ ID NO: 403668 - protein, 343 aa, unidentified
MEYFAGIDVSLEQSSVCVVDGTGKIVREAKVASEPEALVGFFRGLETGVTRIGLEAGPLSQWLYAGLTTAGFEVVLLETRHVKAALSAMVIKTDRKDARGIAQLLRMGWFRPVHAKSPAAQEVRALLVARKLLQTKLLDVEFSIRGILRGFGLKIGEVSKGRFAARVRELAAGHAMLERITEPMLRAREALRTEYARLHGEMLAIVKPDPVCRRLMTVPGVGALVAITFKSAVDNPGRFARSRVLGAHFGLTPRKYQSGETDVTGAISRVGDAMVRMALYEAAHIMLSRVTRFSSLKRWALDVVRRRGLKRAKVALARKLATVLHRMWVDGTSFRWGKQAASV

SEQ ID NO: 403669 - protein, 405 aa, unidentified
MESNVLKACGLDVHQASVTACIIRQGLPRQVKTFGTTTIELLSLKLWLQQHEITHIAMESTGVFWKPVLNVLGEDFSIILANARHIKNVPGRKTDVKDCEWICQLLRAGLLQPSFIPPVCIRELRDMMRYQKKLQHQATQQKNRIHKLLQEANIKITAVLSDIFGATGMRILRSLAQGLTDPEVLSKYLLKNKRLIPKINKAKEALTGCFSVRHQFLLQSLLRYHDFLDSEINKIEQQTDIMIEPFKTEYELLQTIPGVKGKAAKTIIAEIGIDMSIFRSAQHLCSWAGLCPGNNESAGKKKNARITHGNTYLKALLIECAWSSVLVRNTYLRSKFYLLCSRMGSKKAQVAIAHKILIACWHILKYKVAYKDLGEVYLSKDKQERITNHYIKKLQQLGYQVQLAS

SEQ ID NO: 403670 - protein, 387 aa, unidentified
MTVLTVTNLPAATHGETMRCLFAIELSRMSWVIAFNTPLSEKISRRTLIGCKWKRLLELIEEVRARVSRETGRAVEVISCYEAGYDGFWLHRQLSAHGIRNYVIDPASLQVDRRARRVKTDRIDTERLLRSLMAYLRGEPKVWSVVRVPSVAEEDARRLHRERDRLVSERVQHVNRIKGLCALQGIYDYNPLRPQAMAGLEQLRTAQGGALPPRLKSEIKRELQRLELVVEMIATLEAERNAIVENEASTHVNAKKIQNLHKLKAIGPEFAAVLVGEIFHRDFNNRRQLASYVGFAPSPFQSGNVAHDQGISKAGNRKGRTTGIELAWLWLRYQPDSDLSVWFRTRVGTTKGRIRRIAIVALARKLLVALWRYLETGVVPRGAVLKG

SEQ ID NO: 403671 - protein, 356 aa, unidentified
MNYLKDIDNFVKDKMVFCGIDIHKEQWNLCYFCDGEVVEKLPIQGEFAQLKGHTENKYGNAASVQFVYEAGFSGFWLHRKLNDSGYECVITPPSRIPTNPDKVKTDKKDSEKLARYLAGGLLKKVYVPPPSIEADRQLLRLRAGDKKKLTRVKNQINSLLHLHGLKWSPENGCHWTKRFVAWLEELEFSEQNYRFILDQYLEEYRFLRAQIACITRRIRELSKNSAYQKYFQYLTACKGIGLITAMTFLLELGDIVRFPDSIRFSSYIGLTPSQHSSGQHVRLGHITHEGNAHLRRILIESAWTVIRHDPFLREKYDRIKARGTNGKKAIVAVARSLAVRLRKCLLNDEPYIIGLC

SEQ ID NO: 403672 - protein, 366 aa, unidentified
MKKTSTVRVNGNMIFKGHKLTIGVDLGDRWSCYCVLDEAGEILLEQKVATTPEAMKQIFEKIPRSLIAMETGTHSPWVSRLLTELGHKVIVAHAQKVQLITKSSRKDDRHDARTLARLARIDPELLGPVRHRSAKAQIHLTVIRARAELVSARTALVNAARGLTKSYGERLPKCGTEQVSRELAAKLSVELREVLEPLLKEIESLNERIKEYDARMEKIARESYPQVALLKQVKGVGTQISLTYVLTLDDPHRFAKSREVGCFLGLKPGRRDSGESQPQMHISKEGDRYLRTMLVQGAHYILGPFGEDSDLRRWGLRLAERGGKNAKKRAVVAVARKLAVLLHRLWVSGEVYEPLRNSHKAMRAVA

SEQ ID NO: 403673 - protein, 334 aa, unidentified
MYEACAGLDVHKRTVVGCASVPGANGQRQKERRTFSPMTPDLVRLRQWLTDLGVTHVAMESTASYWKPVYNVLEGQLEVLVVNAQHLKTVPGRKTALKDAEWIADLLQQGLLRPSFVPPAPQRELRELTRYRMSLREERARLINRLQKTLEDATLQLASVVSDGMGSSARDMLTAVLAGAGDPTVLAELARGRMRSKRELLTQALQADLKPHHRFLLSEQLADSDAVEQAIDRLSREIAVRVHPYEQQLQRLSTLPGIKRRLAEVLLAEMGPDVCRFPDARHLASWAGLCPGNNKSAGKRLSGRTRKGRPWLRSALVEAAPAAIHAKDCYLAAQ

SEQ ID NO: 403674 - protein, 382 aa, unidentified
MTKNISTTTVMKPTISVDVTTAQSQPAADGAALVTSRYQAVVGLDVGDRQSHYCVLDLDGGVVAEGEVKTTEASLRVLFEGKGRMRVALEAGTHSPWISRLLIALGHEVLVANPRKLRLIAESDSKHDRADARLLARLAHVGPALLSPIHTRSAQTQLDLTVIRAREVAIQTRTKIVNAVRGMVKSTGHRLPASPTLTFARKATEACPEALQSALLPLIRLVEILTADIAAYDRLVIETARAYPETQAIQTIHGVGALTAVAFVLVLNNDRSRFKRSRDVGCYLGLRPKQRDSGMRSPELGITKAGDPLMRRLATQSAQYILGPFGQDSALRRWGLSLASRGAKNAKKRAVVAVARKLVVLMHRLWITQQSYDPMRGIRVAA

SEQ ID NO: 403675 - protein, 339 aa, unidentified
MTILTIGIDLAKNVFAVQGVGESGKPELKRPAVPRAKLLPLVASLPPCTIGMEACSGAHHWARQFAAFGHTIRLMAPKFVTPYRQSGRRSKNDAADAAAICEAVQRPNMLFVPVKSEEQQQRLMVHRARQGFIEARTATINRIRGLLGEFGIVLPLKASTVRREAARHLEELPGYANLVIGDLLSEITRLDERVSAYDRHIREMARGKDNPAQQLMRLCGIGEASATAIVAMIGNGRDFRCGRQFAAWLGLVPSQYSSGGKTRLGRITKAGDAYLRGLLVMGARSVLAAAKNKTDRLSVWALELEKRRGYWKAVVAIAAKNARMAWAVLAKGEAFKMPA

SEQ ID NO: 403676 - protein, 385 aa, unidentified
MVSPIKYSVGADVSKSDIYVAMLLQNNDLKTVVKGTRKFANTSDGFNQFEHWIHSHKKFDIPVHITMEATGNYHENLAFHFSSERFIVNVVLPNKAKKYLQSLGCKSKNDKIDARGLAQMGAEQPLMQWKPFSESIYSLRALTRYCEQLSAHRTTYKNQLEALSYGMYQVEDVKKQLLELINAVEKQISETKKKIETVVKQDKKIWDRMEKILPIRGVGIYSLATIVAETNGFEMFENERQLCSYAGYDIVENQSGKRSGKTRISKKGNSHIRRILHLPAFNVVRYGEKKFVQIYERIMSRHTKKMVAYVAIQRKLLALIYALWKKNEAYNKDYHWTFGNVESQVLFPVGSERAGQKSSPNNIEATQDERSYNVSSEVLFPVQQK

SEQ ID NO: 403677 - protein, 342 aa, unidentified
MSYLGVDLHTNSFTVCRRTQQGKNSIRTFQISRISDFRKTLRKRDLLAVEATGNTAWFVSQIRDRVKKVTVVNPFQFEVVRRSVKKTDKNDSKTLALFLSKDMLPEARMKTKENAQLHSLATTRDKLVKQRTALINKVHNVLNSYGIKFKKESLGSEKGLKSVWAYDWDVIVRIELEVLVEQIRSLNKSIKTLDKEMSDHGQKLKGHKSLTSIKGIADRSATVLLSVIGDVNDFADENKLASYFGIVPRVSDSNETVRHGRITKHGSKLGRTTLVQCTLVAKRYSPYLRRYYERIKSHRGSGKAIIATARKFLAIIYNTLKNEWIFEDFPNFVLASSCVKKQ

SEQ ID NO: 403678 - protein, 341 aa, unidentified
MNSSKNVVGIDIAKRVFQLHSIDMETGEIVSLQLKREKFLEHFANRQPCLIGMEACGGAQHWARKLTAMGHQVKLLPGKAVKGFVTGNKNDRHDARAIWTAVQQPHVKAVAIKTEEQQAILALHRMRSQLVKFRTAQINGLRGLLTEYGEVMPQGKAGVRKGITEALARLEDRLPAMVIDTLREQWARIEKLDSEIATIEQRIKLWLKSDDACKRIAEIPGVGPLTATAAVAIMGDAKAFKSGREFAAFVGLVPRQTGTGGRIKLLGISKRGDTYLRTLLIHGARSVLTHAKEPGPWVTELRQRRPLNVAIVAQANKMARTIWAILAHERTYQREFVSQPV

SEQ ID NO: 403679 - protein, 399 aa, unidentified
MLYIGIDIHKRSHEVVILDDGGKPLGKSFKIGNSHQDLTHLLERIAKVNPNTEPLRFGMEATGHYWLALHSHLRAAGQEVVILNPLRTHAYRARSLRPVKNDRIDARCIADLIRTEVKSDYPLTDEALLGLRQLTRLRVELVDMVSDQKRRLLTLLDQTFPEFEGLFGEKYCKSALGLLQTYPTPADMVAAGLDALTELLEQYSYKYYGRAKAEEILCAAQRSFGVPFGQYANGIQIRLLAGQVIYLEAQQKALDRDIANCLKAIPNCLTTISGIGNILAAALLGEIGDIRRFHNAKALVAYAGLDPSVVQSGEFTAKKAHLSKRGSTHLRRAVWLAASAATRNDPAFRELLKRKIAEGKAYHVALGAVANKLLHVIYAVLRDNKPYYPLKVAASSAAA

SEQ ID NO: 403680 - protein, 384 aa, unidentified
MTKHNILFIGLDTHKTFTEVAYIEDQRGAKSIHLGKILSNKAAFKKLARQLQSKYPDATLHFVYEAGPCGYWIYRLLTSLHHCCYVIAPSLIPKKPGERIKTDKRDALKLAKLLKSEDLTPIYVPEPEDEAVRDLSRARETAMKDLKDAKYQLKALLLRNNINSKVKDNWSLQHLRWLAELVLPHPCQQIVLQEAVSTITERLKRLKRLDNELTHQVKNWRYYPVVKAVQAMRGVRLLVATGVIAELGDLTRFDHPRKLMSYLGLVPSEHSSGGKRRLGAITKCGNSRARRLLVEGAHSYKHNANISKEMQLRQEGLSKEVIDMAWQAQLRLCRRYNRLMHKGKHRNVIVTAIAREMIAYIWAISREVVLPVVDVKLRLARMPA

SEQ ID NO: 403681 - protein, 371 aa, unidentified
MKKSIMFVGLDVHKNSIEIAFAEGGRDDEVRSFGKVSGNLEALDKVIRKLVSKGCELNFAYEAGPCGYEIYRHLNSKGFDCTVVAPSMIPKQSGNRIKNDRRDAQMLARLHRAGELTKAYVPCVEDEAMRDLTRAREDAKGLEKRAKQRILAFLLRQGYRYSGRSPWSRAHFRWIATLKMPHPAQQIVLQEYLETLSECRQRVAHLTEQIQALLPQWRLSPVVRALQSLRGVSLIVAATTVAEVGDLTRFDSPVELMSYLGLVPSEHSSGGKTRRGSITKTGNGHVRRVLIEAAWAYRLPARVSLKLQQRQEGLSQNICAISWKAQLRLCARYKRLLAKGKATQLITTVIARELCAFMWAIAMAVKAPETV

SEQ ID NO: 403682 - protein, 343 aa, unidentified
MQIRSVGIDLGKTTFHVVALNAAGKVLLRKKFTQKQLITFTANMQTSLIGMEACSGAHFLGRVLREQGHDVKLIPAQFVKPFVKSNKNDFLDAEAIAEAVDRQNMRFVPIKTDDQLDLQAMHRVRDRLVARRTSVINQLRAFLLERGMVFAKTPFKLKQAMPEVFENADANLTPRMRNLVSLLWSEWKDLEQQIGAMNEEVEQIASSDPACQRLRQVPGIGPLVATAIVAAIGNGAAFHKGREFSSWLGLVPRQHSTGGKARLFGISKRGNSYLRKLLVHGARSAVLRVKRERSPFGPWLNALERRAPVKVVITAAANKLARIAWAVLSSGQDYRAVPDAMTA

SEQ ID NO: 403683 - protein, 355 aa, unidentified
MTASYDYHIGVDYHKSYSHLVVQDSAGKTLRSGRVKNDRQSLGGFLERYRENSHAVVEATRNWMVIYDWLDDICDDVVLAHPLKVKAIADAKIKTDKIDATVLAHLLRADLVPEAWAPSEKSRDLRVALRERMFYVRLRTMTKNRIVTVFDRYPEQTAQLKKLGDLFGKAGRIQLAQVNVSEIDRIQIDRGLAFIGDIDGRIKQSEATIRTMTKANGNVRLLKTIPGIGEFFARLIDAEIDDISRFRNAKKLAAYAGLVPSTYSSGGKTFHGKIIKQGNKWLRWAFVEAVTPAIVTDAQLRAQYEHLKFRGVNKARVAVARKLLTIAFQILRDQRAYEPRGASPTEGASTISRLS

SEQ ID NO: 403684 - protein, 412 aa, unidentified
MEVVYACCCGLDVHAKTVVACLVTKGRKEIRTFATMTDELLQLGDWLSSAGCTHVAIESTGVYWKPVFNILESLLKVILVNARHIKAVPGRKTDVRDCEWLADLLRHGLLKASFIPPREIRELRELLRYRQTVVTEHTAVANRITKLIESANIKLGQVASEVLGLSGRLMLRALAAGETNAETLAELAQGKLKSKKAELRRALEGCLTQVQRWVLTELLTRVEELEAALTRVETRIGEEVAACPDPFVPEAVELLESIPGVGKRTAQTIVAEIGVEMSRFPSAKHLASWAGVCPGNHESAGKRKNGQPTKGNKSVRTILVEAAWAATRAKGTFLQAKYHRLVKRMPKQKALGAIAHRLLVISYHLLSRRVPYAELGTAPLDQQQVARQRRRLVEQLIGLGVKVTINEGEAVA

SEQ ID NO: 403685 - protein, 378 aa, unidentified
MQKETGMKKNNSKAKEVKRADQPWKGPITIGMDLGDRTSRYCVLDGTGEVVKEGSVATTIAGMKALYGPMKKCRIAMEVGAQSPWVSRLLKTMGHEVIVANPRQLKVITESSRKDDKVDAEMLARLARVDPKLLRPIRHRGEEAQLDLMTIRARAALVEARTGLVNAARGFSKSVGERLASCDTDQMGVEKLAALPVSLQTVLKPLVEQVSSLTASIKKYDKELEQIAKVKYPETRLLTQVGGVGTLIALTFVLTVEDKDRFEHSRDVGCYVGLRPKRGDSGESQPQLRITKEGDMYLRSMLVQGAHHILSERSEDSDLKRWGLRLAERGGKNAKKRAIVAVARKLGILLHVLWVTGEVYEPLRNSQAAERQSRKKAA

SEQ ID NO: 403686 - protein, 426 aa, unidentified
MMKLKYSICCGLDVHKNVIVATIVTTNKDGISEYLQKSFSTINSDIQRFHNWLIENNCYHVCMESTGKYWIPIFNYLENDIDVCLTHPKYVKAIKGKKTDKKDSKWIADLYKFDLVRCSFIPPKDFRQLRELSRYRFKLVCMKSSEKNRIQNCMTISNVGIASVLSDPFGKTATEIISYLLEHTADSMDEKAVRKLIKKGAKSKSDEIIEAIKGYTIETDQAKKLELARGHLEYLDDMITQTEVELYVRIKPYYEFVEFVSTMPGMTELSSTIVLAETGVDMDIFDDAKHLCSWCGLSPANNESAGKKKSVRIAKAGDYLKPMMVQCALAAIKSKKQPYFAIKYGRIKKRRGHKKAIIAIARMMMVCIYHMVSEKKPFTPTDYEELMDPQNHVESVVLNENNVFAYLESLGYDLSLIHISEPTRPY

SEQ ID NO: 403687 - protein, 338 aa, unidentified
MDLYTGIDLHSNNGFYGILNEKGERIFQKKLPNDLPRVLKTLEPFKKDINVIAVESTYNWYWLVDGLMDEGYPIELANPAGMTQYNGLKHADDKSDAFFLAELLRLHILPKGYIYPREERAVRDMLRRRMLLVQQRTTHILSFQSMISRQTGSGMSCRTIKALKEEDIQDYLNDEYLILIGETNISVIRHLTEKIRRFEKEVQKRVKIKPEYEKIQTVPGIGKILVLTIMLETGPISRYAGAGNYASYCRTVKAIHTSNNKKKRNLNKKNGNKYLGWAYVEAANFMRRWCPEAKRYHQKKMARSKQVVATKSLASKISKACYYIMRDQVDFDVKKMFG

SEQ ID NO: 403688 - protein, 348 aa, unidentified
MAQKQIATIGIDLGKNTFHLIGLDVRGTIVLRQRMTRAQVIKSLMNVAPCLIGMEACSGAHHLGRELEKLGHHVRLMPAQYVKPYLKGHKNDYRDAEAIAEAVQRPTMRFVPLKSPEQLDLQALHRVRSRLITQRTSVINQIRGFLLERGIPVRQGAAALRSTLPAILSSRTEVLSPQVVRLIEDLCQDWHRLDERVTVITSEIEAIVEQNEHCRRLMSAPGVGPITSSAMIAAIGTGAAFRKGRDFAAWLGLVPKQISTGDRTILGRITKRGNSYLRTLFIQGARAVLLRRQTWPRHGFGPWLESAGKRLHPNVLVVALAAKLARIAWTLLARGRDYDARLLLTRAA

SEQ ID NO: 403689 - protein, 305 aa, unidentified
MTDHNIGVDISKSHLDVFRLEDKMAKRFDNSVAGFRALIRWLGKVPVARVVFEPTGAYHKAFEVALGTTLPLVKVNPLQARRFAEAHGTRAKTDAVDARMLALMGAAFNLEPQVPQSKETRDLRDLHVARAGLVKDRTRLRNRAVTQDLSVLKRQTKARLKLVEQQIAELDVEIVKLIEARESTARTCDILCSMPGVGAVSAAAMLTLMPELGTLDRKQAASLAGLAPITRKSGQWQGKSFIGSGRKPLRDALYMPALAAMRWNPDLKAKYEQMRAAGKPAKVAIVAIMRKLIEVANALGSGLIV

SEQ ID NO: 403690 - protein, 343 aa, unidentified
MDYFAGLDVSVKETSVCIVDDAGKIVREARVASEPEALLQVLTNAIYRFKRVGLEAGPLSQWLYSVLAEAGLPVICVETRHMRAMLKAQINKTDRNDARGLAQMMRVGLYRPVHVKTLRSQKLRVLLTHRKLLQSKAIAIENDLRATLRNFGLKVGMIGPVKYEMRIRELVENLPDLAVLVEPLLIVRRVIREQLGILHRRLLVIVRDDDVCRRLMTIPGVGPVVALTYRATVDVPARFRNSKAVGAVFGLTPAKYQSGENDRTGAISRCGDEMMRMMLYEAAQSMLVRSAKWSWLKAWAMKIARHRGMKKAIVALARRLAVIMHRVWVDGTAFRWTREIAPA

SEQ ID NO: 403691 - protein, 353 aa, unidentified
MTQTITYRVGFDVAKTVFQVHGVKNEPGEAVAIARRLRRAQVEPFFAKLPSSLIGMEACGSAHYWARLARKHGHEVRLMPPAYVKAYLKRNKTDAHDAAAICEAVARPTMRFVAVKSEADQATLMLHRLRASFVEKRTAAANQLRAAFAEFGITAAVGAGGFKELLQLIESKAESFALLPQALRLVLCELAWQWQSCEAAVRRMDVEIAAGVKTSERAKRLTEVPTIGPVGASAIDALLPDPQLFRSGRDFAAWIGLTPREDSTGKTIKRGPITKKGDGYLRRLLVLGATSYLARVRRGQTKGASAWVLKMAAHPKRKLAAVALANKTARVAWAMLAKGEDYRAPAAAALQAA

SEQ ID NO: 403692 - protein, 258 aa, unidentified
MVNVGIDVGKANLDIFIYEKNIHFQVSNDVSGIKQILNRLAYYQIKRLVMEATGRYEFNLAEAAFRKGLPVCIVQPLAVRRYAGAIGQLAKTDRIDAQLIAEFAAIIQPRVTPQKSRSLIRIEDLLARRRQIMGMRTQELNRFKIMGKFFEVSCKRMIRCFDQEINRMEHQLDRLVSKQAVWAEKRSLLLSAPGVGNTLTYTLLADLPEIGSLSNKQISSLVGVAPINRDSGAYRGKRRIKGGRAGVRTTLYGLPRVQ

SEQ ID NO: 403693 - protein, 370 aa, unidentified
MPLQNAVDTKLFIGIDIHKKSWSVSIRTESFDHKTFSMPPDPDVLYEYVAAHFPSHEISATYEAGCCGFSAARYFLNLGWQVTVVNPADVPKMDKQNYQKTDKIDSRNLCKQLQNNNLKAIHIPTEEQEQFRSLLRQRTNITKELRRVKSHIKGMLLFHGITIPPEFDNVNWTIEFKKWLLELKWTSTCGKESMESKLRTLNFFHSEYLNGGNLLRAHCRKHISLDYYLLTSIPGIGGFLAAAILSECGDLRRFDNEKQFSSYIGVVPGIFNSGGSESNLGVTPRANTILRPYIIESAWIAIRKDPEIQAYYKSHFGKNPKCIIVKVAHKMAKRILSVIKSGKRYQINKNITLDTKIKLPEDTEVMEDEI

SEQ ID NO: 403694 - protein, 345 aa, unidentified
MKIVGCDFHTRYQQIAMLDEETGELMERRLEHENGEARAFYATLVGGVRVGIEATGHTRWFERMLADLGHELWIGDAAQIRAAMVRKQKTDARDAAHVLEMLLSGRFPRIWRPTMAERDLRQLVWHRQKLVGMRVAVSNQLHALAMGEGVCRKKKLFTKKGRAELESLALDAWASRRRQELLRMLDGLDASLKELDQAVAEQAEQNPAAVRLMAHPGVGPVTSLAFVLTLGPVERFERSKQVVSYLGLNPREHSSGGKQRLGAISKQGNPMMRSLLVEAGHTAARLDAELKQDYQRLKLRRGSGVAKVAIARKLAVRMYWMLRRPAGCAQQVRMQDSPWATLVKE

SEQ ID NO: 403695 - protein, 446 aa, unidentified
MKQPTKSATTKDSSAIAANDTPAPTQHVATPPDDSPRILVGIDWADGEHVYVMRDPQGQLHRGTVQQSPEAIAQLLAEWQRSYPDTRVDVCLETSRGPLINALLEHPRVHLYPVNPNALANYRKAFAHGGGKSDPVDAGLILQFLESHRERLRPLQPNAPLTRELAALCEDRRGLVEQRVKLAQRLTSLLKAYFPAILLMKPAKIYADFVVRLLLKYPTLAAARAAGRTRLRKLFFATGTKDKIEQRLDVLLAAMPLSTDEVLLRSSARHARAICGQLASLNQSIRAYDRAIEELVAQHQDYAVVQALPCGATTKARIIAALGDDRTRYGSAEELAAATGIAPLTTQSGRQRHVSSRWACSKFLRQTFHEFAGLSITKSPWAKAYYQQQQDRGKSSQMARRALAFKWIRIIYRCWQTGESYDEARYVARLQTTQSPLAERLAASKI

SEQ ID NO: 403696 - protein, 419 aa, unidentified
MNNGNTKKVKRINEETLLVTIDMGKINHTGYYRFPDGAEGKTFEFSNSKNGFEEMWQRVCHAKRSRNLTGIVVGFESTGPYAEPLLHFLRKRDVGLVQVNPFHTKRLKELQGNSPSKTDQKDPKVIADIIELGHALSVIIPEGTAAQLRRLTQARERGMQRRSMLMSQVQDLVFLIFPEFMPVMKDMTIKSTQYLLKHYCRPEDVVQAGVTLLTQNLKEVSKGKLGQQRAQALYQAAEASIGLREGQESMVIEIKELISAIESIESYVKELETHMSKHLKDIPYSRFILSIKGIGEITAAGLIGEVGDFRGYRTISELIKHAGLDLFEISSGKHKGIRRISKRGRPLLRKLLFFASINVVRKGGILHQPYLQHLDKGMPKIKALIAISRKLLSIIFALVRDHSVYIAQYSETQQLKEAA

SEQ ID NO: 403697 - protein, 412 aa, unidentified
MDIVHERAAGLDISKRDVKVCVRVPGPRAGTYSSTVTTWGATTHAILELREFLEREHVTTVVMEATSDYWKPFYYLFEESLPVMLVNAKAARNIPGHKTDVSDAAWLAQLAAHGLLRASFVPPEPIRELRDLTRARALATRDRAREILRLEKFLESSGIKLSSVVSDLTGVSSRDMLEALIDGERNPNVLAGMARGTMRSKIPALVDALTGRFKPHHAFIARLHLDQIDAHTRMIEALTARIEEAMEPFRDARDALATIPGVSLRVAEVIIAETGADMTVFETPARLASWAGVCPSANESAGRIKSAHILPGNRYLKGALGIAALSAARSKNTYLAARYHRITARSGRNKALVAVEHSILTAAWHMLANGECYTDPGADHFTRINPSRAKNTAIKQLNSLGYDVTITPVTAA

SEQ ID NO: 403698 - protein, 399 aa, unidentified
MAQPTLWAGIDAGKAAHHCVAINADGQRVLSRRVVNDEGALRDLIRAVKALADGGAVRWAIDLNSGGAAVLITLLLDDHQELLYIPGRVVHHASGAYRGDGKTDAKDAAIIADQSRMRRDLHPLRHRDKTAADLRILCARRNDLAADRNRAINRLRAQLLEYFPALERAFDYAHRKAALILLTAYQTPDGLRRMGMARLEKWLRDRHAYHAGDLAARAIAAANAQRITIIGQQVAASVVARLAQTVLDLNAELVDVDAMIEAKFEQHRLAGIITSMPGFGSLLGAELLAATNGDLASFNTADRLAGIAGLAPVPRDSGRISGNLKRPRRYDRRLLRVFYLAANNSIKTCPESRNYYDRKRSEGKRHSQTILCLARRRLNVLWAMQRDNTSYQPGLPRAA

SEQ ID NO: 403699 - protein, 434 aa, unidentified
MTKHQPTPSDAALVAIDIAKYRHEVLIECPGLSRRRRLTILNTRAEHDRLVEALSALDCPVIAGFEATGNYHRALVWRLIEAGIELRLISSVALARTREALHNGWDKNDPKDAQVILHMLRIGLTQHYHDPLVEGLNDIQELSKTHEMVSKAKTSVLHRIQTHYLPLYFPEIDRFRHNSRSEWFFAFLDRFPTPASITALDKDAFIKAAWDVVGRKVSKARLLADIHETARASVALPVALETPAIAMFRMIIAEARGLIRRRDEIERMAHALLQDHPDYRRLRQIPGIGPINALTILAEAGDLRRFGHHRQFLKFCGLDLATHQSGQFRGQTRLSKFGNARLRRALWMAAQIAIRQRENSFRDKFERYIARDRDNADLRRKALVAVTAKMARVVHAVIKSGTDYRPFFEGAVPSGRTPLRPGREGVPPIIGATL

SEQ ID NO: 403700 - protein, 357 aa, unidentified
MREYIAFDSHKRYTIMERENQQTSIARQRRIEHAPGAICAALRECELGTPVAIEATGNWYWIISEIEQAGLRPLLVHPRKAKLMMGLINKTDQLDVHGLNRLQRNGTLPTVWIPPAELRDLRELTRVRMVLAAQRTRLKNRISATLAKYGLAVTDASDPYCQKARPQLVGLLGQLPLHTQWAARTLLAQLDFIEGQIREQEQRLKQLIEATPEMRLLMSLPGVGVILSAVIWLEIGTGERFASAERLASYAGTTPRVHASGGVVRYGRLRPDVNRYLKWAFVEAGNSVAVNHARCPQRHVSELYRRLKARKGHAKAIGAVARHLAEATFYVLSGHEPYQDPTICTGRSKGGVSAALS

SEQ ID NO: 403701 - protein, 404 aa, unidentified
MNAVGIDVSKGKSTVAVLRPLGEIVKKPYDVAHTRRGLEGLVGLIQSLEGESKVVLESTGRYSEPVIKTLCEAGIFVCVVNAKLIHDYGGDTIRRVKTDKVDSLKIAEYCLCKWNRLERHNPEDELRKTLKIYNRQLAGYIKIKAMLKNNFIALTDQVFPGVNKLFTSQARDSDGHEKWVDFVARFWHCECVSSISVQAFSETYLKWCRKHGYNHSESKVRQVHQAASEIFATLPKNDFTKTLVKQAVAQLNSICETIAAIKSEMTKLAKMLPEYDTVMAMHGVGKTLAPQLIAEIGDIRRYPRRTSLARFAGIEPPENQSGVYNQHSRRISKQGSPHLRKSLFQVMCCVLQLGHTDEPVYEFLDRKRKEGKPYKVYMIAGVNKFLRIYYARVKECMDNLDNIG

SEQ ID NO: 403702 - protein, 346 aa, unidentified
MTVIGIDAHKRTHTLVAVDSGGRKLGQETIAANSSGHAEAMQWATIRFGNDLTWAVEDNRSVTGLLERELLAGGPWRVVRCPPHLMARSRVSARERGKSDPIDALAVARAVLREPNLPVAFYDPVSWELKLLVDRREDLVGQRVAVMNRLFWRLHQIDPARQEPKKLQFAVRRRALTEYLREQPGLQAELAGEEVADLCRFSENIDALTARIIRRVNDLGSTLPTLPGCAELTAAKLISEAANVDRFPNESAFARYAGLAPIPEWSGSTSGRLRVCRSGNRQINTAIHRIAVVQLRLDCAGRLYYQRRRAAGDSGATAVRCLKRRLGRVVFNRLRDDYARRVSPTS

SEQ ID NO: 403703 - protein, 429 aa, unidentified
MPNSASLAPNIVAWVGLDWADQAHAVCLQEAGASPVEHSELQHTPEALQLWVAELRSRFPQGQVAIALEQSRGSVFYALMTYDFLVLYPIPPKALADYRQALYPSGSKGDPTDARLLLEFLRKHPERFRPWVADDAPTREIALLVQHRRKLVDDRTALTHRLQALLKGYFPQALEWAGDLTSPLAWDFVSQFQSLEEAQKASRWKVLKVYRAHTRRTPEQLEQLLDQIRTARPLTTDRAVIESSALMVRAQVDQLRALAAGLERLEEKLQELFAAHPDHDIFNSFPGAGKALAPRLLAAWGSDRQRYETAQDMECLSGSAPVTAQSGKKRWVHWRLACPKFLRQTFHEFAGHSILWSPWARVYYQQMRKRGADHHPAVRSLAFKWIRIFYRCWKDHTLYDEARYQQALERHGSPLAAALRQLPNQEARA

SEQ ID NO: 403704 - protein, 406 aa, unidentified
MEEKRTRYIGLDVHKHYLVALGVDADLNVVLPLRRVELSNLESWMKKNLTKQDEVVLEMTTNTWQLYDELIEYAGSVIVVHPPHVGLITRSQVMTDKIAASILARLLAKGLLVGIWVPPQAVRELRGLVAQRQKMTRLATQAKNRLHAVIQRHHLKPPAGNPFAKANNSWWQGLALGKLEKMNLQSDLETLQFAEQQEVRIEKEMTGIAAENEEIGRLLHISGFGVITAMTVYAAIGDIRRFPEAKKLVGYSGLGARVHDSGMTSRSGKITKAGRRDLRVALVEAANVVAGSNPHWKAELARLEPRLGRNRAIVAIARKLLVTVWHVLQGKTDKHTEPEAVAQKMLKFAYAVGKANRAGKTAAQFARERLDGLKMGESLSSIPWGAKKPIPLPPSGLKEGSGVPNR

SEQ ID NO: 403705 - protein, 335 aa, unidentified
MDSSGKLIMECILETKAATILEFIAGLRGTLAVTFEEGTSAAWLHDLLKPHVARVVVCDPRKNALLKDGSKSDRIDARKLAELLRGNQLHPVYHGEHGVRTLKELGRSYLTLTQDVSRVMTRIKALYRGWAIPCSGVTVYAPRYREEWLAKIPHPGVRLRAERLYQQLDLLQPVRQEARRDLLSESRKHPAVKLLRQIPAIGPIRAALLVALLQTPHRFRTKRQLWAYSGFAVQTHDSGEYRYVRGKLQRNRERITVRGLNHNHNHDLKNLFKGAALSASTRPGPLCDFYAALVEKGMRPTMARLTLARKMAAITLTIWKKGVEFDAKQLNRQAA

SEQ ID NO: 403706 - protein, 347 aa, unidentified
MSFIGVDLHQNSFTVCRRKTDGAESFETLTLSAADLERFCLSLDADDELAVEATGNSAWFRDCVLPCVGRVVVVNPSQFKVIRKSVKKTDRNDAAALALFLAKDMLPETRVRTQGENELASLTQTRDLLVKQRTRLLNKIHALHVRKGLKLRKESLGSKRALASIDLALFSACEVIEIEVLREQALSLTASLARLDREIEGVASTFKGYAGLTSIKGVGPRSAAVLLSTIGNVHDFESADKLAAYFGIVPRVSQSNETDNRGRITKRGNKLARTTLVQCSLIAMRYSSYLKTYYDRIRQRRGTGKAIIATARKLLAIIYDTLKNGWVFDDFTRFSRRDPLIPAGQTS

SEQ ID NO: 403707 - protein, 397 aa, unidentified
MNAKYYVGIDLGSRFHQVAVVDQQSGVVRPSFRIGRGRRGVELLLRTLGVPGSSLVVSIEATANYWWELVGALTQQGSQVYLISPKKGHDLRRFYALHTKTDVTDSEALARMPLVDPSLVPVWVAPPATASLLRLCRLRWKLRCRIADVKRRLTMFTELVMPGLDEVMPVRYSHSARLFMRRYLSAPHARRVGRRRMHAVLLRSSWGKFTEQKSEQLWECIDNAPELGWDPDDLQLEASVQLDELETLEAKVTELDERIAELYGEVDPEQRLLSIPGLGEFLGAAITAHVGDVSRFPSAKHLISYAGLDPRVYHTAGHSAPGQMISKHGSPFLRAWAYLGATNARHHDEALKSYHDRLRARQKQPNVALCATAARLLERVYDVMAERRSTTVTVAGD

SEQ ID NO: 403708 - protein, 382 aa, unidentified
MKEAITGVRRFVAMDVHADSIAAAIAEKDQAARDLGAIPNREESVRRLVKKLNEGGAWTACYEAGPTGYTLYWQLTRLGIPCMVIAPTLVPIKAGDRVKTDRRDARRLACSFRAGELTAVWVPDAPHEALRDLVRAREAGKQDQLRARHRLGKYLLRHGKRPPKEMRAWTESYLQWIKTKVCFDQRCQQVTLEDYLNEVDHAGARIARLEKAIDEAVEQAPETMRELIRALQALRGVAKVGAVTVVAEVGTLSRFEHPRQLMGYSGVVSREHSSGGKIRRGGITKTGNAHLRRIIVEAAWSQRYKPVLSPAMRKRQESVSAEVQELASKARHRLHQRYMHLLGRGKNKQEVVTAVAREMLGFIWAIGVSVQRAQVLKGKGAT

SEQ ID NO: 403709 - protein, 381 aa, unidentified
MTTTVTHNGHDTTPARVLFVAFELSEKTWKLGFTTGHGQKPRERSFAAGHQARLLQEMAQAKRRFGLPETAPVVSCYEAGREGFWLHRFLEAQGITNSVVDSSSIEVNRRKRRAKSDGLDVRKLLSMLMRFHQGERDVWRVVHVPSGEAEDQRHLHRDLETLKQERASTTARIKGLLSSQGLRLTTLNKLPEQLDVLRLWDGAPIPSGLRHRLLRVYAHHQFLSEQIAALEAERRALLETAHEASLEKIRQLMQLKGIGINGAWLLVMEFFGWRDFKNRREVGGLAGVTPTPYQSGESAREQGITKAGNRHVRWMTTELAWSWLRYQPESALSGWFRERFGSGGKRLRRIGIVAVARKLLIALWRFLKSGVLPEGAILKEA

SEQ ID NO: 403710 - protein, 371 aa, unidentified
MPQSNTLYVGMDVHKDSIAVAYVSQEHPAEVIYCGAIGTRQCDSDPLIRKMQSKSKHLVFVYEAGPCGYWLYRYFTQKGHVCWVVAPSLIPKKPGDRVKTNRRDAMQLARLMRSGDLTPVYVPQVADEAIRDLSRAREDALRDRKTAKHRLKAFLLLRHDIRYTGQATWGPAHLRWLSAVVCPTPAQPIVFQEYVRAVTDHSERLARLEQELQDCVQTWRLRPVVDALQALRGVQFTVAVTIVAELGDLTRVDKPSQLMRYLGLTPSEYATRDYRHQGAITKTGNAHARRALIEGAWAYRYPATVSRHLPVRLAKVPKAIQEISWKAQVRLCKRYRQLSARSKHANRVVVAIARERSAFMWAMAHQVPVIS

SEQ ID NO: 403711 - protein, 374 aa, unidentified
MERIYIGVDFHARQQTICYLKTETGELVTTELKHQDKEAVRAFYEQFAGPVIVGLEASGYSPWFERLLEELGCEVWLGHATEIRRRARWRQKNDRRDAELILDLMLHNEFPRLHRPAGQSREVMRMLRYRQKLIKIRTMSKNSLQALALQAGVARRSHLFTREGKQELRAALMSPAMQWQREHWLQLLQPLNQQVLESMVWLKAQSKGDLAVARLRTHPGIGLLTSLCLAHTLPPVDRFRNTRKVAAYAGFDPVERSSAERKRFLGISKAGSRLLRHLMVEAAHLAVRKDEDLKCFYQRLAERRGRPKAKVAAARKLLIRAYIMLRDEIDYAEFRRRAVAARLARLGHGPKVPEVVIGQPASTECQEQLSRTRK

SEQ ID NO: 403712 - protein, 330 aa, unidentified
MVHIGVDVSKERLDVFVPAQKEGMRPTAKELVNGVAGFRELRDLARKARATVCVEPTGGYELELIAFLHRFGVPVAYADALRVRQFAKAEGCLSKNDLIDAALISRFADKIGVRILEERDVEAVELKRRAKFRQTMSDSRTAMIGRLETEVDPDMKALLKDQIRSMDRLIAKAERLCLATVRRNDRMNTLCERFTQVGGVGAITAISILAGLPEIGTLPDGKLNRLVGISPEENQSGSRDRLRRIWGGRQEVRNALYMAATASLLWNSILGAYYRKKRAEGHPHKWAMVPTMRKLLSLLNRIARDPGFTPKPEPESTKRNAIATRKGKAA

SEQ ID NO: 403713 - protein, 413 aa, unidentified
MKVFCGIDWASDHHDVAIVDGDGKLLGKARITDDAAGLQQLLDLLAEHSDSPSERIPVAIETSRGLLVACLRSTGRPVYAINPMAAARYRERHTVARKKSDHLDAMVLANILRTDADAHRQLPADSELVQAVAVLARAQQDAVWDRTQAGNKLRSHLREYFPGYLATVQPITGGFNAPLARTLLAAAPTPGQAARLTRTQLKAVLKRAGRQRGIDAEVERLHAALRIPQMHQLPLVEKAMGRQALSLLSKFEAACTAADELAEASIELFEQHPDAAIITSFPGLGALSGARVLAEVGDDRTRFADAKSLKAYAGSAPVTRASGKSHAVIVRRVKNQRLAAVGYVWAFASLTASPGARAHYDRRRKAGDRHTSAQRNLYNRLLGCLHHCLATNTPYSETTAFPVPPKLELAIAA

SEQ ID NO: 403714 - protein, 329 aa, unidentified
MLNCIGIDVSKSTLNVHISKNSQDFQINNMLGDLKKLYSKLKKIYKKEIEEIIFIFEPTGSYSELLRKFCADKQIKCFIINPKQFSNYAKALGEEVKNDEVDAKVLAQAITLAKPHQIKIPAYDVDVEQIKELMSFYKFTTKQTAQLKGHLESLVSKDGDKFSIKELKKSIAASKEREKRIIAQVHQMIQSNPTYKKAYENITSIVGVGQIGGIALLHLFIKYPEANQRQITSLAGLNPIYKQSGSSLQTLYKISKSGSVFYRGALFMGVMTAIRYDENFKTFYDRLKANGKHTTQAQIAVMRKMIIVAHSLYKNDTKYVKKGTDNVLV

SEQ ID NO: 403715 - protein, 410 aa, unidentified
MDVVYTRCCGIDIHKKIAVACVIVSRTKGPASKEIRTFGTMTDDLLALADWLAAEGVTHVAMESTGVYWKAPFNLLEGQFKVLLANAQHIKTVPGRKTDVKDAEWIADLLRHGLLRASFVPDRPQRELRELTRYRTALVRERASEANRLQKTLEGANIKLGDVATNVLGRSAREMLEGLVAGRADPGTLAQFARGRMREKIPQLERALAGHFAAHQRFMVAQQLAHIDYLDDAIQPVSAEVAQRLAPFEPILERLDGIPGVGRRTAEILLAEIGTDMSRFPSAGHLASWAGMCPGHHESAGKQHIGKTRKGNPWLRSALIEAAAAAGKTKDTYLAAQYRRLLRRRGRNKAAVAVGHSLLVIVWHLLQHDCPYVDLGSTYFDDRDRVATEHRLVHRLEQLGYSVQLQRSAA

SEQ ID NO: 403716 - protein, 366 aa, unidentified
MKREKKAATRHVGIDLGKRAYEAAIVGEGGKVTKSNGKTTVAGRQWLYNKLRAGDKVALEAGNMAFIMAKEIEAAVGCRVYVLNPSHLALIYGSMKKTDKEDALKLAHILEDCKEERLPVVPVPTDKEMKRRKILACYRRGQQSRNRDINRLHGLFVAQGITTKVRADLSTNEAREESIKELAGIERQEAEYLVECLKLHDRQIQALEEAIKEESAGDEQIQRLQGVPGVGPMVAFAFVSYVSAERFENPSQVSNYFGLVPRVYMSGDVVKYGKITKRGNSYARALLVQAAWALIRAKAGGKLKERYEYMTEEKAISKKKAIVAIARRIAELLYTLMRDGTKHEPRPFIREKKAAEGIAARLAKSA

SEQ ID NO: 403717 - protein, 410 aa, unidentified
MEVLHPHCAGLDVHKDTVVAGVRHMANGTVKREVRTFKTTTKDLMALSEWLSTEGCTHIAMEATGIYWKPVWHVLGDGEFELVLANAAHVKNVPGRKTDVNDATWLADLMAHGLIRGSFVPNAHTQELRALLRTRKQFVRERSSHIQRLQKTLEDANIKLDSALSDVMGMSGRAMIEALIAGESDPDTLAGLAHRRVKAPPEELREALRGRVTKHHRFLLQLHLQQVDAIDAAISEIDREVDANVEPFRTAITILITIPGVSDLSARVIMAEIGNDMSRFPTAGHLISWAGLCPKNDESAGKRRSTRMRKGAPWLKTTLIQCAWAGARKKASYLQAQFHRLRARRGSKKAIGAVAASILTAAYHMLAHGTLYQDLGPDHFDRRAKATQTRRLVTRLHNLGYAVQITPLAA

SEQ ID NO: 403718 - protein, 371 aa, unidentified
MEPTPDIMNKCLHTELSSVEETRAQFNGSKEAIKLGIDVHQAFYVVVEQEGGSTPKPPQRMSKEAFLGWAAKLRRKHPGRAIHAVYEACGFGFGLQRQLTALAIGCQVVCPQKLDERNQRVKTDGRDAKALCLKLDRYVEGNREALAVVRVPTPEEEQLRALHRQREQLVRTRKQLEAHGRSLMVNHGLEAVSKWWKARAFAQLEVPAWLKTLLSHTQPLLLALEKQIRALTLQLEKSANPGQARGLGAMSSVIIDREVGDWHRFKNRRQVGSYTGLCPSEYSSGKTRVQSGVTKHGNPRLRAALVETAWRLVRFQPEYRAVVKWRHLLGKGALATGAARKKAIVAVARQLAVDLWRLRTGRVRPEALGLI

SEQ ID NO: 403719 - protein, 401 aa, unidentified
MVSDFMKGRYNLMKIFVGIDIAKLNHFAAAISSDGEILIEPFKFTNDADGFQLLVSKLESFDKNSIIIGLESTAHYGDNLVRYLVAEFYQVCVLNPIKTCQMRKNNVRKTKTDKVDTFVIAKTLMMQDDLRFITFFDLDMMDLKALGRFRQKTIKQRTRLKIQLTTYVDQVFPEIQYFFKSGLHQNAVYALLKEAPSPKEIASMHMTHLANLLKVNSHGHFTKEQAKELRVLAQKSVGANDSAISIQITQTIQQIELLDSQLDKIEAEMTDIMKFNDSVIMTIPGIGYINGGMILGEIGDIHRFSNPNKLLAFAGLDPSVYQSGNFQAKTTRMSKRGSRVLRYALVNAAWNVVKNNATFKAYYDAKKAEGRSHYNALGHCAGKLVRVIWKMLTDEVEFNLE

SEQ ID NO: 403720 - protein, 435 aa, unidentified
MAKVEKLNQNAAGIDIGSEQFFASTDGETVKVFETFTSSIETLISYLGEQGIETIAMEATGVLWVPLYDMLEHAGFEVYLVNGAHARNVPGQKSDPFDCRWLQQLHTFGLLRASFIPEDQIRLLRNCMRLRSDHIQSASGYILQMQKAFELMNIKLHEVIDQLQGASGMRIIKAILSGERNAEKLLALCHTTIRKNKKEKVLKALQGNYKKEYLFLLQQALDCYEFFQIKIQDCDRQIEVYLKEVTANLPEVESTVAKPARHNDIQVANFHNMLVKLTGGKNATELSGISDKTFFELVTETGTDLARIWPTKKHFTSWAGLAPRKNQSGKVNKTKKRFNPKTRVGQIFRTIALSVSNSKHLALKGFYNRIKSRHGAKVAMKALARKIAELYYNFMTKGMQYVEQGIEQYERNYRERVIKNLNKRALEFGFALTPC

SEQ ID NO: 403721 - protein, 316 aa, unidentified
MNYLGIDVSKKKIDCCLIVGDKYLHRVLKNDQSGFEKLRDWLKKYTDKPVYACLEATGIYSEHIADWLHDEGHSVALVNPLSIKKFAEMQLLAVKTDKQDAKTIAKYCQMAQPTLYAPPPKSERQLKALTRQVEYLKEMVVANQNRFQVSQDVTAPIIADTIAHLRQQISQVEQQIQTHIKQSPDLKDKADLLKSVRGIGTATIPHLITLFGFKAFSTAKAAIKYVGLNPIIKQSGEKKTRFIAISKQGDKTIHTALYMPVVRAFTLPEWQPFVNRLKSAGKTGKQIVCAIMRKLLVYCFTVLKNGRPYDPQIQAA

SEQ ID NO: 403722 - protein, 344 aa, unidentified
MKKNLFFIGLDIAKADFAASIYQTPDQPIVTKEAIPNDLKGFEMLLLWLKDHHIDKTNCRICMEATGVYSQAIAYYLLFQGFPVSVEPPLKVKRAFDPVGHKTDPVDSKQIAEYAYRFQDELTSWKPRDEILEKIRQLLSVREQFTKQKVALDNSLQAYSKQKVQVKLIKKAHQETLNQLKKQIARIDKELANLIKQDPEIFQRANNLDSIPGCGMLLAAHLLVITENFTKIQNSKRLAAFIGIVPYQNQSGTSVFKRAKIRHFGPGPSRKLLRLAAQSVATHNATFRSYYLRKLDQGKAKPLVLNNIANKLLKVACTIIRNNTRYIKDYRSIHPMYLKSLKSA

SEQ ID NO: 403723 - protein, 343 aa, unidentified
MDHFAGLDVSVKETSICIVDDTGRIVREVKVASEPEALLQELAKPGYHFKRIGLEAGPLSQWLFSALAEAGLPVICVETRHMRAVLKAQINKTDRNDARGMAQMMRVGLYRPVHVKTLRSQKLRMLLTHRKLLQSKAIAIDNDLRGTLRNFGLKVGMVGTVKFEGRIKELVENLPDLAVLVEPMLVVRRVLREQIGILHRRLLAIVRDDEVCRRLMTVPGVGPVVALTYRATVDVPARFRYSKAVGAVFGLTPAQHQSGESDRPGGISRCGDEMMRVMLYEAAQIMLTRTNKWSWLKAWAMKIARHRGMKKAIVALARRLAVIMHRIWVDGTEFRWTREVAAA

SEQ ID NO: 403724 - protein, 356 aa, unidentified
MDYAAIDLHKKESRIRILTEAGEVVDYRIATTREALTAVFGERAALRVLLEASTESDWVATHIESLGHEAIVADPNYAPMYGMRDRRVKTDARDTAALADACRQGTYRAVHRRSAAQRHQQWALTVRDQLVRTRTRAINASRAIVRGVGARLPPGSREHFVARLVGVELPEAVQTTLAPLCALITHTTQARGAIDQQLATHAAGDAVCRRLLTAPGIGPVTAVAFVAALDTPTRFRHASQVAQYLGLVPREYSSGERQRRGHVLRSAHPRVQMLLVQAAWRVLRSTAPAAQPLRHWGLSVAKRRGRRIAAVAVARRLARLLWAMWRDETVFRVPVTRCPMEEQDATRPLGHPMTVR

SEQ ID NO: 403725 - protein, 411 aa, unidentified
MDLLHARCAGLDVHKESVVACVRLVQDDEIKRIVRSFGTTTGQLFELAQFLAEHCVTQVAMEATGVYWRPVWHILEPEGLELVLGNAAHIRNVPGRKSDTNDAVWLADLVAHGLIRPSFVPPAPVEQLRMLTRTRKQLVREAAQHTQRIHKVLEDCNLKLTSVLTDVMGKTGRAIVEALIQGHSDPQTLAELAVGSLRTKRAELVEALRGRTTAHHRFVLKLHLGLYDAVQAAIAAIDQQVEEQLHPFRQAADLLETMPGIGRIAAEVILAEIGPDMERFPTAGHLRSWAGLCPRMDESAGKKRCTRIRKGAPWLKTTLVQAAWAAVRTKNSYYKSLYGSVKRSSGSANKAIVAVAAAMLTSAYYMLKRGEPYRELGPDYRDRRDKARVANRLIRRVQALGFQVQLVPQAA

SEQ ID NO: 403726 - protein, 347 aa, unidentified
MRFYTQQHQHYCGIDLHARSLYLCILNQAGEVLLHRNLRATPEAFLKAITPYREDLVVAVECMFTWYWLADLCRAEGIAFVLGHALYMKAIHGGKAKNDRIDARKIAVLLRGGMLPEAYVYPPEMRATRDLLRRRLHFTRKRAELLTHIENTNSQYNLPAFGKKLTYRGNRTGVADRFDEASVQKTIAVDLELIAFYDDLLRELEAFILRTATGHDAHTLYRLRTVPGIGKILSLVLLYEIHDITRFARPQELASYARLVKCAKESAGKVRGHGGTKIGNAHLKWAFSEAAVGFLRKNPAGKAYYERLVHKHGKGKALTVLAHKLARAVYHIWKHDQVFDQEKFLTT

SEQ ID NO: 403727 - protein, 349 aa, unidentified
MLHVGLDLSRRRVDVCLISDQGELVDHFAAPADRDGLYGFARRVAVYDEPVRGVVESMNGAGFVRDELVLRGWEVLVADAQKVEGLAPLACKTDKIDSRVLAELSLRDLVPAIWLPTPELRKERERSRWRLHLVKHRSILKNRVRLTLIAFGHQVPMADLFGIAGRQLLRELDIPEPWRGHVDASVVLIDDLELRISEIESELRRTGADHRYLPLLMTAPGIGWITGFTIAAEIGDIGRFSSPVKLTGYTGLCPRVKQSGDSDQRGPVSKHGPRYLRWGLMEAAIAASSHPLYKERYQRTKRRLGRQRGAKVAQIELARKLTESIWYMLTRNQPFKPFAPAGAIFALTA

SEQ ID NO: 403728 - protein, 367 aa, unidentified
MKKVSTVAVKQSRKTSEQKLTVGLDLGDRSSWYCVLDESGAVVLEQRLSTTPKAIGEVFGGMPRSRIALETGMHSPWVSRLLSKSGHEVMVAHARNVRLIGESRRKDDRLDAQTLARLARIDPQLLCPVKHRSARAQADLTVIRARAGLVRARTALVNTARGLAKSYGERLRGCNAGNMNPEKAEGLSPELQAALKPLLAGIESLSEQIRESNERIERLAEEGYPQVALLKQVKGVGTLIALTFLLTLEDPHRFAKSRDVGCYLGLQPGRRNSGQSEPQMHISKEGDPYLRTLLVQGAHHILGPFGADCDLRRWGLKLAERGGRNGKKRAIVATARKLAVLLHHLWVSGEVYEPLHNNQRRAMETAA

SEQ ID NO: 403729 - protein, 450 aa, unidentified
MGNASGVSRGDRNRNARLARLRSLVPVTNAIVGIDLADAKQMVVVTDHDSKVLARKTFRCRAWDLGAALGWAAERAAAKGFSGVTVACEPTGHRWRVLGQLAADRSMPFVCVQPMLSSWARRSEDLTSDKTDEKDAVLIARLTAQLRCYVPEPVDETWGRLRHLGARREQVIVEMVSQIQQMRALLECVWPAALDTAKQPFRSKTWVAAMSAICERDGGDLDRTRRLGPARFEQAVRREILKRGGQKPSLRIARRLFAALTDPTGVIAHRPGALERVAFLLVDWHTAGDKLTDTEARMISVLGELKLTALATSIPGLSPVGAAAILAETGDPNRFASGRALVKHAGLAPREKLSGTFVGRTKLTGAGRPGLRLAAWRAVWGTQRGNTVYAARYRHLTSREQNKLTATQAQTVIAAAILRQLHAVITTGQAWDPDIATHGTGHRKQMPIAA

SEQ ID NO: 403730 - protein, 393 aa, unidentified
MHSCLAIDVAKGKSMVTLVSSSGEVLIDPYEVNHSINDFTNLLNRINKFKLDNISVIMESTGIYHRPIERFFLENNFKVFVINPIYGKMQKRNLRKTKTDKEDCFNLVNLFMSNTFKENIKPDQLYLDLNALSRQYFALDELCVNIKNRYRNLLYLCFPEYEEVFKGNMVYSSVALEFIESYPHADIISNTRIDKLQNFFKKHEYKSWKSKPIKIKETALKSYPSVNMNDELVSNLSQMARLVNEYQKAIDIIKYKIVFLAKKSKYFEPINSIYGIGEFTTSIIIAELNDINRFNNIKELTAYCGLDPSIKQSGKSVNVHGPISKSGNKYMRKILYIACSNIITIVGRTKVENDIEIYYRKKRNEGKHHYAAIVACTTKLLRKILALCKQLDK

SEQ ID NO: 403731 - protein, 324 aa, unidentified
MIDGILGIDVCKNTLDVSISSYTKVRTKSFTNSPDGWRHLLDWLIAQKIQRVHACLESTGRYSLGIACALYEADHVVSIINPAQIRDFVRTKLGRNKTDGVDASHIREYCELFKPSPWAPPSEAHRRLGELQTIRSGIIAGLTEWKNRRNSGIVDAEAQALADATISHFTSQLGAVDKAIALTIDNDCDLQSKRDLLLSISGVGETLAGVVLAELPGPDVLRSSAEVVAYAGLNPRRHQSGTCIDRATRISKIGNAVLRAALYMPALSAMRYNPAIMALVTRLKSRGRLKPKQIVVAAMRKLLVLCFGVLKTGKPFDPAIAMGC

SEQ ID NO: 403732 - protein, 355 aa, unidentified
MDSKKYIGMDVHKESISIAVRNAAGKIVMECVIETKASMVLQFIDGLRGDLQVTFEEGTSAAWLYDLLKPHVRKLVVCDPRKNASMREGNQNDKIDARRLADLLRLNHLSPVYHGEHGLRSLKELVRSYLTITKDLVRVMSRVKAIYRSWAIPCTGKQVYAPRHRTEWLGKIREPGVRRRAEFYYQQLDALRTVRQQVRRELLAEGKKHPAWKRLCQIPAIGPIRSAVLLGILQTPHRFRSKRQLWTYSGFGIETQSSADHRSVDGQLERVKKQSSIRGLNRNCNHDLKNLFKGAAIVASSKPGPLQEFYSALLSKGLRPEMARLTLARKIATIVLIVWKRGVCFDAQHLKPQTA

SEQ ID NO: 403733 - protein, 352 aa, unidentified
MAKNEFDELMSVGVDIGKDVFHLVGFDHDGQLVLRKKVKRLALVATFERLPRCIVGMEACLSAHFVSRALRELGFEPRIIPAIYVKPFNKGQKNDYNDAEAIAEAALRPNLKTVSEKTQDQLDLQALHRVRARLVSRRTATMNQIRAFLIEQGITVRRSVAALRTSLPAILENRSDELSLRMRRLITGLQHDWIWLDERIKMITSEIKAVSETEESCRRLMTIPGIGPLISTAMVAAIGKGEAYDRGRDFAAWLGLVPRQHSTGGRTVLGRITKRGSRYLRMLFVQAAQVIMMRPKNWPKFSFGAWLEAASTRMSHNKLGVALANKLARIAWSVLNSGKDFDWKERETVTAI

SEQ ID NO: 403734 - protein, 407 aa, unidentified
MPKFVLSCDVAKGKSTFGLFGFEDGSLKTIKRPRNYEHNLDGLMAMYNDFELKDREDVLVMMESTLVYQTPLVVFFKSHGLENVVVENPLLIARKSFGLTKTKTDNLDCFRIADYAFRQQWEKPVQVSKEQQEARTLSRYIDSLLSQATVVQNKIRLYLVAVFPEIEKIAGKSLFSAGFLSLLKTCPHPQTISRKTIDGIVTAMAGNTKRCASYQELARKIKEASKTSLSSVKEDSAECLILADIVSFYQSLSDRIRTMRQKLSELVRNHSLYSVLTSFKGIGDGIASSLTAELWDIEKYSNDKKLFASTGMAPGKEESGASINKDLSIGKKGNAHVRKWLFVAVQSIITQASMGRGDERIYAYYEKKHNNDKKHYYAAVVACCHKLLKQVYHRYMVLLKTNELIVY

SEQ ID NO: 403735 - protein, 414 aa, unidentified
MEPQISFNQVVSRGCGIDVHQKVVVATIGGEGLTKATREFGTFTRSLTELKDWLLENGVTHVAMESTGVYWKPVYHVLEPTTLKVWIVNARHIKYVPGHKTDKQDSAWICKLLLAGLLKPSYIPAKEQRELRDLTRFRTKMIQDVASEKNRIVRILEDCNIKLSSVLSNTQGVVATKLIDKLCEEGTITMSDIEEVYHKRLEASKEDLYEACQGLIDKHHIYLLGLIRQDIASTEAVIKNLNGRIKEVLSGYDNVLENLKAIPGLSTKTVEDLVAEIGLDMSVFPTEKHLASWAGMCPGNNESAGKKKSGRTTHGNKQVKAVITEAAWAATRTKNTFYSARYHRVAARRGKKRALIAVGHSILKSVYHVINGMEGYKELGADYVTQRVEKRRKLYLKKELEKLGYAVQLIQPVP

SEQ ID NO: 403736 - protein, 420 aa, unidentified
MSFKIFRKNCCGLDVHKTWIYACIGITDTNGMTDYKQTRFSSFSKGLKELSGWLAKYHCTEVCMESTGKYWIPVFNVLEKADVSVILSHPKYTKPQKGNKTDRKDAKWICDLFMCDMVKPSFIPPADIRHLRDLVRYRFKLICMITGEKNRAQNCLTVSNLKLDDVFSDVFGKSSRSITEYILEHPGDLFDVTPFVDRRCKTPIEEIQAAVDGAVSPEQAVKLRQCLNHIDELEKHLEEIEQEILRLSDKYQAALDLIRTVPGFDKNPMTAIQILSEIGGDMSVFPSAKHLVSWAGCCPRNDQSSKKIKSTRISRAGSYFKPVLVQVANGLLRSKKHPEITDRYKRIKARRGHKKAIIAICRMLLTAIWHILSDLKPYTAEGFRESRPVNESKILTTSQALNLLKQRGYIIKDALAPAMN

SEQ ID NO: 403737 - protein, 413 aa, unidentified
MLKIVYPICCGMDVHKSFLVACIATTNSQGVTTYTSKRFSTFTGDLRRCAAWLAEHDCEDVCMESTGKYWIPIYNILEPTCKIVLAHPKYVKAIRGKKTDKKDAKWIADIFKHDLVSGSFIPPADIRQLRDLMRYRWKLTNFTTGEKNRAQNCLTVSNIKLDDVFSDVFGKAASAITTRLLEYPAEKITDVSVFRTKGMKASDEEVLAAVDGELCVEQAEKLRIIRSHMNSLDLCKANLESLILSVAEKYLPQLDLVMTVPGIQSFAAIGIISEIGVDMSVFPTSKHLCSWAGLTPQNNESAGKKKTTRIGRAGAYIKPLLVQCALCAIRKKCNPEIRRRYENLKKRRGHKKAIIAIARMLLTAIYNILKKNEPYNPELYAHINTPPKQRTVSVEEAIFILQRQGYLVTPSAT

SEQ ID NO: 403738 - protein, 320 aa, unidentified
MQTRMPVGIDIASGKFDVAVWKGDTSYKTKVFPNTPKGFIALKKWLEPFGCCHICMEATGAYSEPLATFLHDEGYDVSVENPARIRRFGQAELSRNKTDKDDARMIARYCKLHGPSLWQPAPLNERRLKALVKRLTNLQEMRQMEENRLEVSDAVVQPSIRVVIAALDAQIDETKRAINDHIDNDPGLKKNRELLESIPGIAGVLSSTMLAYLGDMSRFSSSKALVAWVGLNPMRQESGEWKGKSRISKMGNSAMRKALYMPAIVAMKWNPAVSALKKRLDAGKKTGKVVVCAAMKKLLQLAYGVLKSGRPFDAEICLAR

SEQ ID NO: 403739 - protein, 346 aa, unidentified
MKNYAGLDVSLKEISICIVDQDGKVVAHGTTPADPEGVAGWLKNRSLKPESIVHESGQLSTWLQRGLVHLKLPAICIDARKAHKSLSARLNKSDASDAEGLAQLARTGWFTPVHVRSQDSDRLRALVGARERLIRLRKDLEGHVRGVLKTFGIRMRAVSQGQQRQDFRDQLAAAGETDPVLRTIADGFIAAHSTLCKATADLDRALKAMSKSHPVARRLMTIPGVGPIVSLSFVAFVDDPCRFGRTSDVGAFLGLTPRRHQSGEMDWSGRVSKCGDTAMRSLLFEAATSVIRQVKRFSTLKSWAVRLAARRGFRKAAVATARKIAVLMLTLWKSETDFKWTKEAAA

SEQ ID NO: 403740 - protein, 330 aa, unidentified
MSATAWLGLDIAKETFAACLLLEKRSAQGEFANTPAGFRQLDHWLKKHKVGQGHACLEATGRYSEGLAEHLHAGGHTVSVINPARLKAFGQATLVRTKTDQTDAALLAEFCRRQQPEPWTPPDPETRALRALVRRRESLLNVRQQEANRLSSGEDDPWVVTSLQTVLKCLDEQLAQVEQAITDHLAAHAQLQQRVELVDSIQGIGRTTAAALLAEIDFGAYPSARQVAAQAGLTPRQRQSGTSVHGKPRLSKQGASQLRKILYFPAISAMQHNPVVTAFAKRLAERGKAKMAIVCACMRKLLHLVYGVLKTGLPFDPNYHSPRAKQPQPA

SEQ ID NO: 403741 - protein, 432 aa, unidentified
MNMSKTYRSVPVKRVEVEKVLAAHAGEFVEAGFDIGKRWVWTTIRFRDGTCLRPWRAGNPLEIGSLVDLLKQAGERVKLRVAMESSGTYGDPLRQALSDAGLDVHRVSSKASHDWAEAFDGVPSQHDGKDAGVVAELCAMGKSVAWPLQRATELEQELAYWVDQLDAAHRVQQVWIGRLESRLARHWPELGQERKLSAPTILKALRHWGSPAALGADPQAAATLSRFSHRLLDQVGIDRLVQEAKQSVGVRMNAWDQRRVREDAEGALLAHRQKRAARRRLHELARRHELIPALGEVVGIPTACVLWVCVGDPRHYGSGGAYRKAMGLNLAERSSGMYQGQLRISKRGKSLPRRFLYFAALRYVCKQPVKQWYLEKKRRDGDEGMRGVVAVMRKLPLALHAAARGEAFDAARLFKSIVNEVNNSNMRQVTRR

SEQ ID NO: 403742 - protein, 350 aa, unidentified
MSTHITIGMDLGDRDHFVIVLDAAGNEINCTRLINTKVALKRFFQPYSGATVAIEAGTHSPWISRLLEELSCQVYVGNPYKLRVIWDSTDKSDERDARMLAMIARLEPRLLWPIRHRDENAHNDLEVIKAREMLVQSRTKLTNHVRSAIKGIGERLPSCSTASFATRAADLIPLALQPALMPLLKTIAQMTDTIRALDKQIKALSLERYPQTRCLQQVQGVGPLTALAFVLTIETPERFVKSRMVGPYLGLTPRRDQSGAIDKQLRITKAGNVYLRKLLVNCAHYIIGPFGADSDLRRHGLAIAARGGKNARKRAAVAVARKLAVLLHRLWISEQEYIPLHTRRKVEMVA

SEQ ID NO: 403743 - protein, 381 aa, unidentified
MSETRTFRTMSRSLEAMADWLVESGVTLAGMESTATYWKPVFYALEDRMGTWLLNAAHLKAVPGRKSDVKDAEWIAQLLEHGLVAPSFVPVPEIRRLRNLTRYRVQLMGDRTRDAVRLERLLEDASIKLSAVASSVTTLSAREMLAQLVAGNTDAVAMADLAHGKMRRKLPDLAEALTGHFDAHHALLVGAMLHRLEHVETALTELDAMIAAAMQPWSHQLELLQTIPGVGLKTAQVIIAETGGDMSRFPTAAHLAAWAGVAPAMHESAGKRRPAGSRKGNKWLASMLVEAASSVSRSKSTYLAAQYAQIASRRGRKRAALAVAHSMLVSAYYMLERDEPYREVGNDWFDQRHADAHTRRLVAQLKRLGHTVVLDPADSPA

SEQ ID NO: 403744 - protein, 354 aa, unidentified
MATTSKQNNVALASVGIDIGKEVFHLVGFDLEGKIVLRRKIRRLALVTELEKLPPCIVGMEACLSAHFVSRTLRKLGHEPRIIPAIYVKPFVKGQKNDYNDAEAIAEAALRPNLKFVAEKTQDQLDLQALHRVRSRLVSRRTATINQIRAFLIEQGITVRTGAHALRNSLFAILENRRDEISRRMNDLIVGLNADWQELDERIEAITGEIEMISKSEENCQRLMSVPGIGPIISTAMVAAIGTGDAFGRGRDFGAWLGLVPRQYSTGGKTVLGRISKRGSKYLRTLFIQAAHVILMRPNNWQKFSFGPWLTEAATRLHRNKLATALANKLARIAWSVLANQKDFDTNRDEVTAI

SEQ ID NO: 403745 - protein, 318 aa, unidentified
MLNESFVGIDVSKDWLDVGWEPAQQTERLVHDEVAMVGLCERLAQERPCLIVLEATGGLETHLASALAAAGLPVAVVNPRQVRDYARACGRLAKTDRIDALVLAAFARAIRPQVRAPRDDETLELGALLARRRQLIDMRVQEKLRLERASPVQRDSIKEHIAWLTERIARLDTDLTHRLRSSSLWRDQEDLLKAIPGVGTITRVTLIALLPELGKLNRREIAALVGLAPFNRDSGQHRGERVIWGGRAQVRRVLYMASVAAIRSNPVIRAFYQRLRAQGKPGKVALVVCMRKLLTIMNAMLKHNTPWNPNDLDLEHSC

SEQ ID NO: 403746 - protein, 329 aa, unidentified
MYNVGIDVGSKELVMVIRHKGKNQKARSFKNTHEGHAQIIKTLTSKKGEVGVCLEATGIYHFDLAVALSRSNTVEVMVVNPKASRHFADALMTRSKTDQVDANILAQFAETMPFVSWQVPDDKVLELRAFSRRLAALTKLKTQTKSQLHALESSVSVPAIILEETQATIEFLELQIHRLKEHALTLIGSEETLQRSLEITTSIKGIAETSAIQLLGELLILPKDMNNRQWVAFAGLDPRRYQSGTSVSKKPRISKAGNSYLRQALYMPALCAAHRDPHVNAYYQHLIEDQGLKKMQAVCAVMRKLLHAIHAMLKNESHFDSTRFFNMAA

SEQ ID NO: 403747 - protein, 421 aa, unidentified
MEDERNWFVGVDWASETHHVRVSDARGRKLGARAFAHSGEGLAAMAAWILEVTGAPPEAVFVAIEVPYGPVVESLMERGFRVHAINPKQLDRFRDRFSPAGAKDDTRDAEVLGDALRTDPRCFRALQPLDPVVVELREASRMAEDLKQERNRLGNRVRELLWRFYPQMLGLTDDVAAPWFLDLWRLIPIPEKATRVREVTVDRLLKRHRIRRLSAADVLEALRRPAILLAPGTVSAAVSHREAIAKRLDLVNRQMLAVDERLDRLTQSLAGAQERAGGQRPEPCDVTILRSLPGVGRIVLATLLAEAVEALRRDDRALRCLAGVAPVTKRSGKSRIVLMRQAAHVRLRNAVYHWARVAVQHDPRSQAKYAALRARGHGHGRALRSVADRLIGVACAMLKAKTIFDPNLASQRAPNLGKPTC

SEQ ID NO: 403748 - protein, 408 aa, unidentified
MGRAAEVMAPSSSTRTDGDCPVAQVNDLSRSLTAFDPISTLVVVVEMSKASWLVSGVVPGIERQPLKKLEPDATALLRLIERWRNEARRAGRPISRIALAYEAGRDGFWLARWLTTRGIEAHVIHSASVAVSRERKRAKTDRLDAAMLMRVFLGWLRGERGHCGMVAIPTMEEEAARRPSRERESLVNERSRITNRMKSALARLGIRGFKPHLRKAPERLAGLRTAEGTGLPTNVIEEFRRDMARLALVREQISSIEKTRAERLDRAPDTGPHAMVRLLARVIGIGIETADMLVREILSRKLRDRRAVARYAGLTGSPDESGLKRREKGLAKAGNARVRRGLIQLAWRFLMFQKDSALARWYRTRTEGPSGARKTTMIVALARKLLIALWRLVTTGEVPDGVELRPAA

SEQ ID NO: 403749 - protein, 410 aa, unidentified
MLNSLLVGIDVSLNDNKVRILHPDGTSLSKFVVSNSVPGAKTLSQRVTVIAEKNSFDSIVIGLESTSVYGDPLVYFLKQDTCVNRFNTKIHVLNPTQVNKFKLMYPDLPKTDDIDAWVIAEHLRFGRINKEVYMDDRYKALQKLTRARFHTVQNLAREKNWFLNNLFLKFSTLAQEQIFSNRFGSTSSSIIEEFFSVDEISYIPIEELAEFINKKGKGHFKNPDEIAAAVQKAARSSYRLPKTVTDSVNQVLAVSFQAMRAYKEQLKVFDKAIEEQIKLIPNTLTSIKGIGPVYSAGIVAEIGDILRFKDQAALAKFAGIAWTKHQSGNFTAAHTQLIKFGNRYLRYYIMEATNKVRLHDHELKRFYDLKYSQTPKTPHKRALALTARKFVRLVYALLHDNRLYTPPKGD

SEQ ID NO: 403750 - protein, 356 aa, unidentified
MEKIGNVKDAPSVEEVILGVDTHLELHVAVALDQLGRRLGEITVPTSTRGYARLLRWAEGFGTVGCVGIEGTSSYGVGLARYLHSAEIPIVEVERPKRHHLRRNGKSDSIDAEAAARAVLAGEAAGEPKSGDGQVGMIRALRSACQSAVKARSQAANQLQALLVTAPEELRHSLRKLPTKALVTTCARFRPIKEPDNVRTATKIALRSVARRHEALSEEIAKLDERLDRLVARTSPGLISLPAIGTHHAATLLCVAGDNPRRLASEASFASLCGVSPIEASSGKVVRHRLNRGGNRDANRALHMVCVVRMGSDRRTQQYVARRTAEGKSKREIIRCLKRYTAREVYRVLVQPTATS

SEQ ID NO: 403751 - protein, 318 aa, unidentified
MSQTHVGIDVSKHQLDVALWGRPEEDDCLANDPQDIEALCRRLSRLAPDRIVVEATGGLERPLALALQAAGLPVAVVNPRQARDFGRASGRLAKTDRMDTRLLAEMAALMRPPVRPLPDADRQALRELVVRRRQLTAMCAQEQNHLASADPSLHAHIQAHLDWLLAALESLNQEIQARLQSHATWSGQAELLRSVPGVGPAAAAVLVAELPELGHLSRRQVAALVGVAPLNRDSGQLRGQRHIGGGRATVRNVLYMATLSAVRWNPAIRTFYERLCQRGKAKKVALVAAMRKLLVMLNAMMRDQVPWQAKPAPAAVHS

SEQ ID NO: 403752 - protein, 412 aa, unidentified
METVVERPAALDVHKAQVTACVRVPAAEGRGREQHVAEFATTVAGLLTLHDWLGAHRVTQVAMEATGVFWKPVWAILEDEFELLLVNARHVKQVPGRKTDVSDAAWLCQLAEAGLLRASFVPPKPIRALRNLTRYRKTQIQERAREANRLHKALEDTGIKLDCVATDILGKSGRLMLDALIEGTTDPEVLADLAKGRLRAKIPALRDALTGRFDHLHAVWIGAILNHIDFLDEQIMSLTETIGEQITPFAAAVELLCTIPGVQRRTAEVIIAEIGLDMSVFPDPKHLASWAGMCPGNHQSAGRRRSGKTRNGSKWLDWSLEEAAMAAIRTKDVYLAAQYARLKPRRGHKKALGAVKHSILVSCWHMLTTGELYRDLGSDYFRTRDPERQTRRLVKQLEALGHHVTLQEAVPA

SEQ ID NO: 403753 - protein, 350 aa, unidentified
MVVMLGVDVHKDTHTVVGADELGRQVGERTVRATDAGHRQLLGWARRQFPSGRVWAVEDCRHVSTRLERALLSAGERVVRVPPKLMAGARDSARTRGKSDPIDAPAVARAALREPGLPVAEHDEVSRELRLLVDHREDLVAERTRMQNRVRWHLHELDPELDVPARGLDRLIVLDRLTGWLSGQPATVVTRLARELLADIRALTARINALQAEITTVVRRIAPALLALPGAGALTAAKILGETANVTRFRSEACFAMHAGAAPIPASSGRTNRHRLARGGNRQLNAALHRIAVTQIRLDGLGRAYYQRRRENGDTTMEALRALKRRLARVVFNLLKDQQATLPDLLPAAA

SEQ ID NO: 403754 - protein, 297 aa, unidentified
MSQSRTLFIGMDVHKDTIAVAYVAQDHGAEGTSLGTIGTRQCDIEQLIRKMPSQATHLIFGYEAGPCGSWLSRYLRKKDDDCWGVAPSRIPKKAGARVKTDRSDARQLARLARSGDRTVVYVPQVQDEAMRDRTRARAAAISALQDAQCRLKAFVLRHDSRSTGRANWGPAHLRWLSEVVCPTPTPHIVLQAYGRAVQEHTECLQRLEHALHEHVQAWRVSPVVEALQALRGVPCTVAVTLRAAMGALTRCDTPRELRQFLGLPPSEYSAGAQRRQGAIPTAGNTHARRVLVEGAWA

SEQ ID NO: 403755 - protein, 320 aa, unidentified
MAPEVVDVIIGVDVCKERLDLFEYHSERSYWINNDAAAIKAWLDGFAGRLKLALEPTNRYHLGLAEAAYARGHEVYLIDPYRLSHYRAGLGRRAKTDAQDAQLLARFLERELGELRPWEPMIPGQQRFWQLLKRRAALVRCKVQLNQSLVGLGVLQEDAEALVQQCEQMIRKLDRALLKQAQELGWAEWIERCQAIPGVGPLTAMALVASWQRGQFRSVDAFVAFLGLDVRVKQSGRWQGRCKLTKKGDGEVRRLLYNAAMQGRRSSQWAPYYLRLRERGMSSTAALVALSRKLARVSFALLRTDARFVPAAPEIACVST

SEQ ID NO: 403756 - protein, 393 aa, unidentified
MFFVGIDIAKNSHEVTVIDNSGNTLVKPFKFKNSSQGFDKLLSAIYSVSDNISDFEFGMEATGHYWLNLYTKLIDLNASVHVINPVQSDALRGLYIRQTKNDKIDAFIIAELIRFGRYSETSLSDSDLLSLRELTRQRYYLVDCISDAKRKVISFIDKVFPEYQNVFSDIFGTTSIELLSTYTSPDVIADLDTTLFSEFLKSVSHGRFGKSKAEELQSLAKNSFGSFLFVDSSTLAIRQFIQQIKLLEEQIEELDNFIAEKFSAFDNQLTSIIGVGTTLAASFLAEIGDINRFEDSSKLAAFAGIDPSVKQSGEFNGTRCKMSKRGSPYLRRTFWLAAVSGIRFNPAFKAVYDKKRLQGKPHAVAISVVMRKLCNIIFAVLKTNEPYKIILPN

SEQ ID NO: 403757 - protein, 342 aa, unidentified
MSEVTIIGIDLAKRVFQLHGARRDGSVVFRKKLSRGQLLAFVAQQPRCVVAMEACATAHGWGREFEKLGHDVRLIPPVYVKPFVKRQKNDAADAEAIVEAALRPTMRFVAVKTEAQQARAMLFRTRQMFVGQRTQMINALRGHLAEHGLVAATGTAQLKRLANAIEDSDTALPAEVRELGQMYLSQIEGLNARVAELDQKMRRAAKEADLARRAQTMPGVGPITALALETFAPDLGTFRRGRDFAAWLGLVPKQHSTGGKARLGKTSKMGQRDIRTLLVSGAMAVLQAAERFGTPNNGWLVRILVRKPRMVVAIALANKMARGLWAMMTKQEDYRNPAATMA

SEQ ID NO: 403758 - protein, 361 aa, unidentified
MDKITRVGVDLAKRVYQVHAVDRTDRPVLARPMSPQRFEQWAATLPAGCVVAMESCSGAHHLARRLRLMGLDARLIAAHFITPFRVQGASGKNDANDAAAICEAASRARTRCVPVKTPEQQGWQGIHRLREGYKEERTACINRMRGLLSEFGLVFPQSPDALRRVLSDVLEDASNELPGVMRLGLQRSQAHWRMLDDEIAWCDQQVKLHVSQDSAASRAAQLHGVGELTASALVAAIGDMSQFKSARQFSAWLGLVPSQNSSGGKHRLGRITKRGDDYLRTLLIQGAKSALLAASKRSDRISQWLLQLRERVGWQKALVALANKNARILWAVLTREVDYDSEHVPPVPPCKQPVLKAPLPA

SEQ ID NO: 403759 - protein, 343 aa, unidentified
MHSISTIGLDIAKSVFQVHGVDAAGQVVLRRQLKRRHVLAFFQKLPPCLVGIEACASSHHWSRELQALGHTVRLMPPAYVKPYVKRQKNDTTDAEAICEAVSRPNMRFVPTKSPEQQSCLMLHRARHLFIRQQTAVINSIRAYLAEFGIVAPVGRKGVEQLLEVVADPADHRLPEVARACLTALGSQLRALKAQILEFDRRIIAWHRSHATSKRLDAIPGVGPALATALVASIADPKAFRSGRDFSAWVGLVPKQNSSGGKDKLGSISKQGDRYLRSLFTAGALAVIRYAKIHGTGHRPWLTGLLARRPTKVAAIALANKIARMAWAMMARGERYREPIALAA

SEQ ID NO: 403760 - protein, 324 aa, unidentified
MTTHAYLGIDIAKRTFDAALLQDGRARHHHFLNSAAGFAQLETWLRDHATGPVHAGLEATSRYGDALALFLHQRGVRVSVINPARTHAFAKSELARTKTDKADAALIARFLAAHQPPAWTPPAPEQRQLQDLTRRLEALQAMRQQERNRLELAEPASLLRDSLEAHLRHLEEQLDQLQASCRTHLQAHPPLQPRCRLLQTIPGIGETTALKLLAELPTAQQCPRARQAAAYAGLCPRQRQSGSSVHGKTRLSKTGNARLRKALYLPAVSAMRFNPILREFAQRLLERGKPKMAVVGAVMRKLLHQAYGVLKHNQPFNPNWVPAA

SEQ ID NO: 403761 - protein, 350 aa, unidentified
MSKKLESTIAVIGIDIGKNSFHIVGHDERGAIVLRQKWSRGQMEARFANIPPCLVGMEACVGAHHLSRKLNSLGHSARLMPAKYVRPYSKGQKNDFRDAEAIAEAVQRPTMKFVATKTADQLDLQALHRVRERLVSQRTGIINQIRAFLLERGIAVRQGQRFLRAELPRILATPPEVLSPRIVRMIEDLAGDWRRLDERVEGLSNEIEAIARQDAGCERLMSVPGIGPIISSAMVAAIGTGDVFTKGRDFAAWLGLVPKQISTGDRTILGKISRRGNRYLRVLFVQAAWVVLVKVKPTRWGYGLKRWIEAAKKRLHHNVLAIALANKLARIAWSVLARGRAFEASELPAV

SEQ ID NO: 403762 - protein, 387 aa, unidentified
MFYCGIDIAKRKHAVSLLNDQGQTLKAVFTIANTRPGFDHLLAELQTLQGSVTVGLEATGHYWLALYDELTRTGYPVIVLNPLQVAAYRKSGIRKIKSDATDAVWIADYIRIANLPPTEQNLPVMLQLRELSRFRFRLTEQVGNSKRKLLTVLDRVFPEYEHLFSSVFLKASRAILKEAVSAQEFADFDLQELTDLLAQASRGRFSQDQAEKIQEQARQSVGVGFLTNAVHLEMHCLLAQLDLLDEQRSQVDQTIAALMQQVPQYITSIPGIGPVTGAAILAEIGDIQRFETVDKLVAYAGIDATVYQTGQFEASEAHMSKRGSPYLRHALWCAATAALLHDPSLQQYYQKKRNEGKHHGTALGAVCHKLLARIFVVLKEQRAYVIR

SEQ ID NO: 403763 - protein, 428 aa, unidentified
MNCNTQNTKIASITEKTLIVGIDVGSETHYARAFDWRNFEFTRKPLIFSNTQAGFLTFKAWIEEIQEKNGKTAVIPGMEPTGHYWFALGKFLQDNGMKPVHVNPHHVKKSKELDDNNPNKNDRKDPKTIAALVNEGRFSYPYIPTGIYAEMRSLSNLRFQTQEEVTRIKNRIARWFAIYFPEYKDVYRDLKAVSGRMILKAAPLPEDIGKLGVEGVNQIWRDAKLRGAGMKRAKTLVSAAEHSVGSKEAPEAARMELKNLLDDMDVYTSRLEELLQKLEGKLKEIPYIDKLLEIKGIGMVTVSGFIAEVGDIRRFDNPKQLQKLAGYAIVANDSGKHNGESRISYRGRKRLRYVLYEAAISLVGKNAGFREIHGYYRTRKENPLKKMQSVVAVACKVIRVFYTILTKGVDYDAARLLGDIKHPQMQTA

SEQ ID NO: 403764 - protein, 310 aa, unidentified
MENAIVGIDVSKDQLDVAVGPSKEAFSVPRNSGGLDNLVRRLLALSPKLVVMEATGGFETIVAAALAAAGLPVAVVNPQRIRAFAKAMGRLAKTDPLDAEMIALYGEAAKLEAQKIPDEASRMLGELVARRRQLVEMMGGERNRRRSLTNSRLLRGVDRILKALQKELSDLERDIDESVRGTPAWREKDELLQSFPGIGPKLSSLLIADLPELGTLTRRKIAALVGVAPMADDSGKYRGRRRINGGRTHVRNGLYMAAMVAARRNPVIAEFHQRLIAAGKLPKQALIACARKVLIILNAILRDNRPWQSA

SEQ ID NO: 403765 - protein, 347 aa, unidentified
MRFYTKQHQFYCGIDLHARTMYLCILNQDGEILVHRNMPAGPEPFLKAVAPYRTDLVVCVECIFTWYWLADLCAREGIPFVLGHALYMKAIHGGKAKNDKIDAQKIAVLLRGGMLPQAYVYPAAMRATRDLLRRRMHLMRKRAELLAHIQNTNSQYNLPEIGKKIAYKANRVGVAERFPEPAVQKSIEVDLALISHYDELLRDVELAIGSTAKHHNANMLYLLRTVPGIGEILSLVLLYEIHDIQRFPRVQDFVSYCRLVKCAKESAGKRYGTSGTKIGNASLKWAFSEAAVLFLRSNAAGQKYLARLEKKHGKGKALTVLAHKLARAVYYMLKRRTAFNMQTFLQG

SEQ ID NO: 403766 - protein, 425 aa, unidentified
MNSNTNEKINQVSENTLVIGIDIAKHKHFACAVDDRGRELQKSFPIFQSRIGFEAFYERLLALKAIHEKQEILVGFEPTGHYWMNLAAFLMNYGIPFVMVNPMHVNRSKELDDNLQTKNDQKDALVIARLMRDGRFSYPRLLTGVEAELRNGATLRTKIQEDLNALQNRLIRWLDRFFPEFTQVFKNFGKMAYAALEMTPLPSDIKGKSPEELLFLYRQVEGMKSPQLPKAKQLVEAAENSIGLTEGLVMARYEIATLLSQIKLMQAQLDELTIQLTELAKQMTDYDYIASVPGIGDITIVDLLSEVGSLTQYQHPRQLIKLAGLTLRENSSGKQKGQKRISKRGRRKLRALLFRVMMPLIKHNRAFKQLHEYYTTRTFNPLRKKQSIVVLCGKLLKILHALCKKKRLFNEQQMMNDFATLKATA

SEQ ID NO: 403767 - protein, 404 aa, unidentified
MWYVGLDWADTHHDVVVLDEAGRRIASRRFAHSHAGLNELKQFLLGIAASPDQLACIVETSHGLLIAFLLESGIPVYPVNPKTTHRLRKAAGAKTDQIDAYLLAKTGRFDLAELRRLEPDSDTVQELKTLTRDQDALIQTQTRLVNQLTACLKEYYPVALQLFAKVQQRSTLLFLQAYPTPQAAQAASLEAITATLRAGKHTNSRRVAPEIVGELRRPQLVASEVIVRAKSRLMLSLVKQLLVVVEEIASYDKAISTLFLTHNDQELWSSLPGAGKRLAPRLLAEWGDDRGRYVDATSVQALAGTAPVPFQSGNFAKAHTRFACCKPLRNTLYQFAWQSTRQEAWARQYYQRKRAEGKTHSMAVRALANVWVRIIYRMWVDKTKYQTATFEAAKRGHAPRQHVA

SEQ ID NO: 403768 - protein, 317 aa, unidentified
MRSIGMDVHRDFSEVAIAEDGAVRRAGRIATTPEAVELFAQSLAPDDEVAIEATANALAIARIIEPHVRRVVLANPKAVRETSRRAKTDKIDAKVLAQLLAVGFLDRVWAPDEAARTRRRLISRRGAMVRLRTREKNQIHAVLQRQLVRRPPVSDLFGIKGRAWLAERAEELPLDERLTVGAGLRQIDFTEVELAELDKILAADALSDPDAMRLMTLPGVSAVTAIALLAAIGDISRFKTPRHLVGYLGLDPRVRQSGNEPARHGRISKQGPGDVRGLLVEAAWHAARTAGPLRAFHQRLAARRGRTSRPSPSRASW

SEQ ID NO: 403769 - protein, 582 aa, unidentified
MRPLCSLCLGGESLLAIAHHRVGLPVEGRAFRVMKLCSSIVDPESKLSYAPVVGREGRLIIGALCPSQSLVSGVSVFNIGDVFIRQSECDPVKEMAAVSAPLRPQLLDQSPVAKTRKRDQIISHPQKQSQRTTQNNVSNLPQHLQHININAAGIDIGSDRHLVAVPEGRDTVSVREFGTFTADLQAIADWLEQCGVTTVAMESTGVYWIPLYEILEQRGFEVYLVDARRVKNVSGRKSDVLDCQWVQELHTYGLLAKAFRPAEEVCVLRGYLRQKEMLVQTAAMHIQHMQKALQQMNLLLHNVVSDITGATGMKILKAIIAGERNAQVLAKERDPRCRNSTETIAKSLVGNYRPEHLFALRQAVELYEIYQTKIADCEAAIVAYLEQQDHRTEDEPPSPPKPISARDRMRGGTDVRAKLYKMTAVDLFAIPGLAADTLLTLASEVGLDISPWQSEKHFTSWLALCPGTRRSGRRVLSSKTRPSANRAAQAFRMAAATQARAKTALGAFYRRIRARSGGREAITATAHKIARIFYSMLKNGTAYVEIGQAAYEQKFKERRLRSLKQQATAFGYQLTPIAAGSF

SEQ ID NO: 403770 - protein, 325 aa, unidentified
MSSYQITVGVDIAKRKFDAVRLENGKYKHKTFDNSVDGFATLITWLLTFGEIKPLICMEATGAYSIPLAEFLVNSGHSVSVVNPAKIKAFAKSELSRLKTDKADAKLIARYALEKQPSLWTPPPPTMIELQALLRRIEHLLEIRQMEQNRLDTANPVIIESIKTLLTLLDEQLESTRKQIRQLIDQDPVLKHRAKLLESIPGVGSASIAHLLLALSEHHGFTHAKQAAAYAGLEPRISESGDWTGKTRLSKTGDALLRKALYMPALVAWRHNPAIHVFCERLKTNGKNGKAIACAAMRKLVHIAFAILKSNKPFDPLYKTKLALA

SEQ ID NO: 403771 - protein, 414 aa, unidentified
MEVLYPRCCGLDVHKSSITACALLREQGRIRTERRRFTTMTQELKSLAAWLRQLQVTHVAIESTGVYWKPVWNVLEGHFTIVLANAQHVKNVPGRKTDAKDSEWIAELLQHGLLRSSYVPPEIIRDLRDLTRGRATLSQEASRLASRIQKVLEDANIKLSSVASNTLGKSGRAMLDALVAGQIDPEQLADLALGHLRAKIPQLRLALEGKIREHHRFLLKRLLHQLRFIESEIDLLDQRLEGLGQQDPTLAAAVARWTTVPGVDRVAAGSLAAEIGIAMEQFPTAAHLASWAGLCPGNGESGGKRLSGKTRKGSPWLGRMACQCAWAAARTKNTYLSAQFRRLAAKRGRKRAIIAVAHSILAIAYYLQKKRCDYRDLGSGYFDRLHADGLKRYLVRRLEALGHKVTIEAVGNAA

SEQ ID NO: 403772 - protein, 418 aa, unidentified
MNEQKIELAAFVGIDWADQEHAVCWRAADEVAVHHETLQQEPGALAAWAAGLQQRFGGRPVGVCLEQSRGPLIYALSAYPGLVLYPVNPKSLARYREALSPSRAKDDPSDAALLCQFLALHRDQLRPWQADDLATRQLRLLLENREKLVDQRTALTHQLRALLKGYFPQALDWAGDLLRPIAWAFLLKWPSLEALQKATAKQLLAFYYAHGVRRGDLISQVPGQVRTATPLVQDAALIETSALLAQALCRQLQALQPFIDRHDAQIKELFDRHPDRDLFRGVPGAGPVMAPRLLAAFGSDRTRFSDAADVQQLAGIAPVTERSGKSCWVHWRWAASSFLRQSFHEHALHSLARSVWAKAYYQQQRKRGKGHQAAVRALAFKWIRVLYACWRDRRPYDEAAYLAALSRRNSPLASLCTT

SEQ ID NO: 403773 - protein, 370 aa, unidentified
MDVHTTNYTLCAMEPIIGEDDRVFATIKVTPDYKNVLLFIENLKMKLGLDDEYDIQCGYEAGCLGYSLYNQLTAAGVKCVILAPTTMLTPQGVRIKTDMRDAYMIAQCLSYGGYHAVYIPTEDDDSVKEYLRMRNDHKLALKKIKQQINAFCIRHGFCYDGTKWTLAHLKWLKKLEITNALYRETLNEYMASYEEQEAKIERYDKRIEEIAEQTKYHDKVKKLGCFLGIKKHTALSLIVETGDFERFAKGNQYASYLGLAPGENSSSDSIHRLGITKAGNSHLRQLLIEASGGICKGAVGHKSKELRARQNGNKAEIIAYADKANTRLRSRYYKFIRHGKKRNVAVAATARELACFVWGMMTDNIEMKAA

SEQ ID NO: 403774 - protein, 381 aa, unidentified
MQSIKTWVGVDVSAKTLAAKRRRKNEDKEEAREFSNDAAGHRELLKWIGRGARLCMEATGMYHLQLALVLVAARVEVMVINPRVAKDFGRALMNRSKTDRVDASTLLEYVWRMEFVAWKAPRAAVLELRELGRRLSELVHAGAEEKNRVHAKKVAAISSTVIRDVQAHVVQIEKRVKQIEKAAAMVIRGDAGLSEQFAILTKIPGVARRSAILLLTELAVLDPGMTVKQIVGHAGLDPREYESGSSVQKPTRISKLGNARLRAILFMPTLTAIRHDRGARLFFAQLMARGKKKMQAIVAVMRKLLHGIWIVLQRRMTFDSSILFAASLAKAESSDSAVAANQPEPRQDHPKGRSEAKELRQQLDPVSAPATRSRRRRSKAA

SEQ ID NO: 403775 - protein, 341 aa, unidentified
MKQEMNVLGIDIAKRVFHAVGMDDRGNVVVRKRLSRHDLMPFIAKVPPVLIGMEACGGAHYWARRFRAHGHEVKLMAPQFVKPYVKSNKNDMRDAEGIAEAVTRPTMRFVPMKDVDQQDLQALHRIRDRLMGARTALVNEVHGLLHEYGIVIPKGVAKFRQAVVSKLESEKAKLTSLSQAMFWQLVDEFAGLEKQLASYQEKLEALATTHPECQRLMTIPGIGPLTATALVAAVSDASAFKNGRQFAAWLGLVPRQHSTGGKERLLGISKRGDSYLRKLLVHGARTTIRWVGRKTDRRSQWIRHLVERRGKNRAAVAVAHKNARIVWALLTSHQDYQLATG

SEQ ID NO: 403776 - protein, 310 aa, unidentified
MEQVFVGIDVAKDRLDVHVRPSDEAFAVARDGEGLAVLVERLGGLAPQIVVVEATGGFEVTVAAALAAAAIPLAVVNPRQIRDFARAMGQLAKTDALDARAIARFAEAIKPEPRPVPDEQARELGELVQRRRQIVEMMAMERNRRRQLTQRRLIKGVDRLLAMLQKELTELEQDLDDIIRGTPAWREAEDLLKSVKGVGDIVARTLIADLPELGTMGRKQIAALVGIAPLNRDSGTLRGRRTIWGGRAKVRAALYMAALVASRRNPRLAAFYRRLVAAGKPKKLALTALMRKLLTILNAILRDRRPWKNA

SEQ ID NO: 403777 - protein, 401 aa, unidentified
MIDVSEIGVFLGLDVGKGEHHATAVTPAGKKALDKRLPNSEPKLREVFGKLQAKHGTVLVVVDQPASIGALPLAVARDMGCPVAYLPGLTMRRIADLYPGEAKTDARDAFIIADAARIMPHTLRSVDIADETIAELEIIVGFDDDLAGEANRISNRLRGLLTQIHPHLERVLGPRIQHPAVLTLLERFGSPAQIRKAGRRRLITLIRPKAPRMAERLVEEIFTALDEQTVVVPGTDAAALIVPSLAGSLTSVLDQRKLLATRIEELLVNHPLSKVLTSMPGIGVRTGARILIDVGDGSSFPSAAHLATYAGLAPATRSSGSSIRGEQPSRRGNKQLKWAFFLSAFAALADPASRAYYDKKINQGKHHTQALLCLARRRADVLFAMLRDSTFYEPRPATAVT

SEQ ID NO: 403778 - protein, 429 aa, unidentified
MNNDKNRLSVFKNIRSSVRGSENFLVVGIDVAKNSHHAFFGTPNGKTIWKNLVFDNSKEGFDKLLNLVTDLRNQHGFSKSVFGVEPTASYHKPLAEHLVRQGEHVVYVSNVAVKKNRALLDGRWDKNDKKDAANVADLVGQGRCLYYDIPEESLRELRSLIAFRSRIKKQEHAQRMRLRNNLFAQFFPELDRLYIRNGQPDDMVMAIAEHCLDPREIASMEFAAFLKLVTKRKIRIEQEDRLRAIWEAAKDSAGCLVHEAARWEAKSLVMQLKSTRETVKDIELRMKTIAEKFPEYACLLSIPGFGPIVSAMVLSAIGDPSRFESRKQVLRLAGLDLSAARSGETSANAIPVISKQGKAALRYALVQAAMVASTSNPIIRHYFSRCLKGREFERGIKLKMKVKLAAKMLVIAWTLMKRRETYNPSCFSG

SEQ ID NO: 403779 - protein, 388 aa, unidentified
MNVGADKSEPLTAIHTDLGAIFVSLELSRSSWLITSLSPGGGEKMSKHSVPGGDFAGLMERFAQLQEKARLRTGQSFRIIVIQEAGLDGFWIHRALQNEGIESHVVDAASIATSRRRRRAKTDKIDGETLVRALLAYKRGEPRVCAMVKAPTPGEEDRRQLCRERKALTAERVRHVNRIKGLLFSQGISGYQPLRRDRRQRLEELQTGDGRAFPQHLKALVNRELDRLELLLKQIKTVEAARDALLAVGQTAKPAPAAMLLDIRGIGPEFAAILWSEGLFRHFENRRQIAAYAGLAPTPWQSGAVDREQGVSKAGNPRLRTTLIQLAWLWLRNQPRSALSLWFHERVSRNGGRLRKTTIVALARKLLVALWKYVTAGVVIEGVTMKVA

SEQ ID NO: 403780 - protein, 411 aa, unidentified
MQVIYDRCAGIDVHKKTVVVCVLLTQADGTVQKQTRTFATMTADLLALDEWLRCLQVEHLALESTGVYWHPIWTILEEGRHILLANPQHLKAVPGRKTDVKDAEWLADLHRHGLLKASFIPPQPVRALRELTRYRKTLVQERAQQVNRLQKVLEGANIKLASVATDVLGKSGREMVEALVGGEQDAQALSELARGRLRGKLPALRLALEGRVQPHHRFLLGRILAHIDFLEESLEEVQREIEERLAPFEEAVTLAQSVIGIQATAAAAIVAEIGIEMHRFPSDKHLASWAGISPGNHQSGGKRLSGATTSGNPYLRAVLGEVAWAIAHTKDNYLSAFYHRVARRRGKQKAIIALAHKVLVILYHILREKKPYADLGADYFDTLDTSRIQRHHVRRLEQLGYVVTLTPGEVA

SEQ ID NO: 403781 - protein, 286 aa, unidentified
MAIVMGLDQHRAQITADWLDTETGEVSRRRISPAHRAGVREFCEQFRGQQLEVALEATTGWRFVAEEFRRAGAVVRLAEPAETAARRGNKKRAKSDRADARHVRELLMIGRLPESWIPPDHLLDLRARVRLRHTLSHQRGEWQQRIQAVLYHHGCPQRSNLMTSEGRSWLAAQPLTPAAREQITIALRVIDAFDRQLGPLDGQLRAYARRQRGCKALMGQFGVGELTAVTIVAELGDAGRFSSSRDAVRYAGLDITVHQSDQRRAAGQLSRQGPPALRWALFVEAV

SEQ ID NO: 403782 - protein, 402 aa, unidentified
MDGATPARVAGLDWASRLHMVCVLDPDGQVRARFQVPHTGKDLRGLTRRLAKLAVGRVAIERPDGPVVQALLAAGFQVVVIASRQVKHLRARYGSAGNKDDRFDAYVLADVLRTDGHRLHPLRPDSPETAGLRAVSPARKQLVDQLANQLRANLEVAFPGAAGLFAEVDSPIALRFLAQFPSAERAAWLTQARLGGFLRRVGYCGRVPTAELYQRLVHAPAGLQGSHGDACAAVTLSLVATLRAVRAQIEELDGEILERLAAHADGHIFTSLPRSGRVRAAALLAEIGDCRQRFPDPTALECLSGAAPSTRQSGTHTTVTFRFACDKKLRQAVMDFAGDSRHANPWAAHLYNQARARGHRHPHAVRILARAWLRVIWRCWQDGTAYDPARHGAYQRLIAKEA

SEQ ID NO: 403783 - protein, 413 aa, unidentified
MHIYSHGGTSMYNAVGIDVSKGKSTVAVLQPGGTIVKKTFEVEHSISGLKELRDYILSLDGDTKAVLECTGRYHEPILHSLSDAGIFVSAVNPHLIKNFGNNSIRKVKSDPADAKKIARYTLDNWAELQEYSSMDTTRTQLKTLNAQLDFFTKQKASAKTNLISLLDMTYPGVNELFSSPARSDGSEKWVDYAASFWHVDCVRKIGLKSFAERYKAFCKREGYNYSESRAKELFEGSKELVAVFPKERSYKDLIEMSIKQLRTITESTVCIKNEMNELAATLPEYSTVMAMCGVGKTLGPQLIAEIGDVSRFSHREAITAYAGVDPGVDASGKRVNRSNRASKCGSSRLRKTLFLVMSVLLKTKPDDAVYRFLAKKRSEGKPYNVYMTAGANKFLRIYYGKVKVALAAQAKSE

SEQ ID NO: 403784 - protein, 373 aa, unidentified
MPKYSTAFGMDVHLRSATVCALDADTGEAVTRRFPGNPWGEIAGWMDGFPGPSLAAYESGYLGFAPQRELAGLGVECVVAAVSKIPRSAADSASKNDRNDAARMAKAILAHDISPVWVPSPEVEGIRDLAGAYDGATARLATAKQRLLAFLAKRGFVYGGTTPAGNPRKYWTYDFLRWLDKVRPEDDGGVRTLAALRNEVEAAAEARADLLSEYRAAVDASPIAAEAAALQSIKGCAFALAAAFSAEVGDFTRFRSGRQVTAYFGLAPSQRSSGDSVRLGGISGAGNALVRKLAVEGSWCYAAARHQPKLMPRDTGVPLEIRMHGRKGSERLLRRREEMLARGVPAAKANAATAAELVRWLWALGMMCREGAE

SEQ ID NO: 403785 - protein, 407 aa, unidentified
MLEVKVEQCAGIDVGKKIIEVCVLIGPANRKPAGEVRRFGSNVGDLEALRAWLKEKACTEVVMESTGSYWKPVFNILEGHLQVILANPEQVKALRGKKTDRTDCRWLAGLLRHGLVQPSFIPPRDIRELRDLTRGRRTLLQNGTPERNRVQKVLEDANVKIGNVLSDVFGMSGQAMLEALLENKLNAEQVADLARGSLRRKIPQIVEALEGHRMSDHHRLLIRQSLKHMQFIEEMIEELDQQIHEKLAPYQKQVELACTVPGIRSDAAAGILAEIGMDMSENGPFSSCHHLTSWAGVCPGNNSSAGKRKSGKIRKGNRWLKATLTQTAWAGSNKKNSAFQFRYQRLKTRRGVKRATIAVAHAQLIALYWVLRSGVPYQQQRQDLEQQQRESLIRHHLHRLAQLGYTA

SEQ ID NO: 403786 - protein, 345 aa, unidentified
MQPMYYIGLDVHKRTISYCVKDASGAIHAAGMIPATRLDLDRWMKTLPQPWTLAMEATMFTGWIYDHLKPHAAALKVAHPLMLRAIAAAKKKNDRIDANKICDCLRCDFLPECYMAPTAIRERRRTLRYRNLLVRQMVQMKIKISSLLMEAGVSYNKQRLHKAGYFRELLATNPDINDGLRSLLRVCRETVVRLSKTESALARSLEQDSLLRDRVERLMTIPAVGPITALTWALEVGDVKRFSSIRKAISYCGLCGAEKSSGNTIQRTPLSKQRNKHLQTTLIEAAKMAPRYSPHLALLYDREKQRGNANRATLAVARKLVAYLVAVDRRQKDFLVMETENQTAA

SEQ ID NO: 403787 - protein, 370 aa, unidentified
MLDTTTFVGLDVHARSIKAVSLDVMTGEVRCATFGYDAGAVAEWVRSVDPKARCVYESGVTGFDLQKRLSGLGVDCVVGAVSKMIKPSADRRRKNDRNDAEFLARMLSVGNVVEVWVPDDECEAARDLTRALEDARDDLSRAKQRLSKFLLRHGLAFDERTPTGRRKGNWTRAHWSWIESIRFAEGADNDVLAYYVDAVRRAAEEKARLEGLVEAEARKPRWRRRVDSLRCLKGVDTASAADLVFEAGEFSRFRNARSFAAWVGLTPSEHSSGESDRRGAITKAGNKHLRKALVEAAWHYLTCSGRPKGLARGQAPDRGARRHAAKGVRRLVERREALLARGVHGNKANVATARELACWVWAVGLMAEEA

SEQ ID NO: 403788 - protein, 405 aa, unidentified
MNEHLLVGIDVGCHSHQVAIAQSNGTYLKEFGISHNASGFQSLFSEITHYESTLKCPVIIGMEGFNGYARPLDQLIQQKGYTLYNINNLKLARFKELFSGPAKTDVIDARKIVEFMRIAPSFQEQRRAITEIKPGNGVNQTLKRLTRRRRQLVNEKISIQNRMQADLQSVAPGLVDLVKNVDSRWYLHFLIARPSLRSLATMRKESLLKIKGVGKKYAAVIASWQKEAHFSTDVDLVSSMIIADARRILELMEAIATIEQALEPLCEQSDLAVTIGSIPGFGPISSAELAGEIDDLSRFPSEKSLALYLGMAPLDNSSGKKEGCKVAQSVNTRTKAAMMVAVAHHSWQVEESKRYYEKKRSEGKKHNQAIRSLGRHLVRVIWSLIKENRYYEIREKNERNILKMA

SEQ ID NO: 403789 - protein, 313 aa, unidentified
MAIFVGIDVSQEHLDVAVWEERTTTRYANTVAGQQALCAVLTPRQPQLVVLEATGGMQDGCARILAAAGLPVAVVNPQMTHHFGRSCGQRAKTDAIDAQLLARYAAVVQPPARPLPAPHLVELDGLRARRRQLVEDLARDKTRLGQAIPLVRPSLERHIDWLEQELRDVEQQLQQRIAADEELSAVQDALETIPGIGVHTAQTLIAALPELGTLSGKQIAALAGLAPFARASGHWRGQQHCTGGRVAVKTALYQAAVSASRWHPRLAPWAQRLKDAGKGAKVRLVAVARRLLVIANAVVRDLLAARAAAATAA

SEQ ID NO: 403790 - protein, 352 aa, unidentified
MQIIAFDSHKRYTWASVETMDGRRLCEERICHHKGAISEFLSRWNKGSSVALETIGNWYWLVDEIELAQMRPHLVHARKAKLMMGAVNKTDKLDARGLNMLQRTGTLPTVWIPPGELRDKRELCRTRMVFAAERTRIKNRVHSVLAKYGLQEELGGASDIFGKSGRVKLAVCIEQLPKQTRYTVKSLLSALDVVCRQIEALERRMHAVYKQTEEVKLLMTMPGVGFILAVVIWQEIGDVSRFRGPEQLASYAGTCPRIHSSGDKSRYGPLRNDVNHYLKWAFSEAGNSVAVNRACLSGRHVGRLYNRLRVRRGHAKAVGAVARHLAEASYWILSRKEGYKEREVFAVSSTVA

SEQ ID NO: 403791 - protein, 346 aa, unidentified
MLYAGLDLSRQRLDVHVLDEEGRTVDVLAVHPDADALRTLAGRVLRHGQEVSAAIESMTGSRFVHDTLERFGWDVAIADAVKAKGIAPLAAKTDKIDAHVLAELARRDLVPEIWLPDPTIRAERERARFRLHLVHHRSALKCRIHATLMTFGHTVPVADLFGTSGRQILAGFDLPEPWATTLATSLAMIDELDERIDECGRELARLGANHPYIPLLLTVPGVGPLLAYTIASEIGDIGRFASPKKLTGYTGLCPIVRQSGNRDVRGPLAKNGPKYLRWALVEAATHAARDVRYRDRYERNKKRLGRQRGAKVARIDIARQLAEAIWHVLTKKESFAPAGPAMPLVA

SEQ ID NO: 403792 - protein, 412 aa, unidentified
MEVVYAVCAGLDVHKDSVKACVRRSGPNKSRTSEVQTFGTTTRELLRMTEWFTTCGCTHVAMESTGVYWKPVYNLLEGSFEVILVNAAHIKQVPGRKTDVKDCEWIAQLLEHGLLRASFIPPKPIRELRDLTRHRKTLIQERARTANRVQKILEGANVKLASVASDVLGVSGRAILEALIGGERNSVALATLTRGRLRATRDKLEEALTGRFTEHHGFLLKQLLAQVDFLTARITECDERIEMLCRPFAEKIERLKQMAGVGQRAAEQLVSELGVDMGQFPSHRHAASWTGICPGNHESAGKRKSGKTRKGNRWLRCLLIECAWAASRTKTSYFGAQFRHLARRRGAKKAAVAVGHSLLVATYHILRDDVDYHDLGADHFDRLNHNRLMTYHVQRLQQLGYQVNLESQTDAA

SEQ ID NO: 403793 - protein, 332 aa, unidentified
MSAVVCGLDIHKESTYATVLDSNGQVLVQRKMPNEDIPRFLEPIHPDKLAMEASTYIIPLYRKLTEQGYDVTVSHPKKTRYIAEARIKSDRVDSKALAELLRLDSLPESYIPPREIAVIREKVRHRAFLVRQVTKLKVKIRDALAYEGVKPPTGYGLFTVKGVEWLHGLGMEPVDCYLRLIEPLKSEVKVLSSKLKHEAGHDPEVRLLMTVPGVGYYVALLVKTEIGDVSRFSSGDHLASYAGLVPSTRSSGGVERHGGITRQGSRWLRWAMVEAAMVHVRVDSPVTRFYHGVAERRGRKAALVAAARKLTTVCYSVLVHGRPYYNPLDAQA

SEQ ID NO: 403794 - protein, 458 aa, unidentified
MKQKSKRTKGIEEARPFEGLSRVNEKAAGVDIGATEIVACVSGGEEIQLVKAFGNYTVDLHAICEWFRKHGVKTVAMESTGVYWIPLFEELERQGFECLLISSRSLRKVSGQKTDVEDAQWIQTLHSYGLLKGSFRPEGDLVGLRTLLRHRAQLVEHRAPHIQHMQKALLQMNIQLSQAVTDVMGMTGQMIIRAIVAGLRDPEQLASFRDPGCKHSAEEIAKALTGTWREEHLYVLKQSLELYDFYTEKIEACDTEISRQYGMTRPDWVGGELPLVPDKKRHAHSKNAPKDAREIREHLYRINGVDLSLVDGFGVSLAQTVTMEVGSNVGEKFPTEKHFSAWLGVAPKHDISGGKVLNNKTLKTKNRAGQAFRMAAQAVKKADCPFGALYRRLRTRLGPAQATVATAHAIARTVYKMLKYKVEYDPLSVNEYQQKYEEQQVKYMKKKAAKLGYQLVPA

SEQ ID NO: 403795 - protein, 342 aa, unidentified
MDYFAGLDVSVKDTSVCIVDDTGRITREVKVASEPDALLQVLRNPAYRFKRIGLEAGPLSQWLFSALAEADLPVICVETRPMRAVLKAQINKTDRNDARGIAQMMRVGLYRPVLVKTLRSQKLRMLLTHRKLLQSKAIAVENDLRATLRNFGLKVGMVGTAKFEARIKELVENVADLAVLVEPLLVVRRALREQIGVLHRSVLAIVRDDEVCRRLMTVPGVGPVVALTYRATVDVPARFRRSKSVGAVFGLTCSRDQSGERDRPGAISRCGDEMMRAMFYEAAQSMLRSRKWSWLKAWAMQIARRRGIKRAIVALARRLAVIMHRIWVDSTEFRWTREATAA

SEQ ID NO: 403796 - protein, 422 aa, unidentified
MAINERCLMNNSSRKDRPVLPNGRHVVGMDIGQKIHAAAGVTAAGQDFGRLISFDNTRAGVDRLEQLVLKPLGGPATILIGMEATGHYWMPLFFELQRRGYDAIVINPIQTRGKFRSRIRKTKTDKLDARSIARLVLSGEATAARIPSESVFELRLLTRHRWRLTNLCGDLQRFSYSLIERIFPEYVDVFCKPLLPTGCALINELGLSPHVLAGQPEHVAALIARASRNRVSHTTIRTLLTRASQSIGIGMAERVIVDQLRSVIALLDTIESQIAALDEELARRVEKLHSPLLSLGLRAPLVATLHAESDPIADFRRPWQYAAYAGLDPSTYDSGNFKGSHAHISKRGSPYLRHALFLAACALYRRQRDLQRLYQRSRKAGHHHTDALVIVAHKLARIIWRLLTDNRPFRAKAPKPALTTPP

SEQ ID NO: 403797 - protein, 433 aa, unidentified
MEEVTDEPLYRDRVCGIDIGKAELYATIRVPSDTRPQRRMSETRSFATTRRGVLALADWLRCWQVPAAVMEATSTYWMGPFFRLEAEGFECVLADAKQVKNLPGRPKRDPSDSSWLAQCFERGAVRPCFVATKEFRVIRLHTRYRRDLINERTREKNRAEKLLETAAIKLSSVITDLHGVTGRDIMQHLIAGERDPKVLAQLARTRARAKITELQHALEGAEFFTGHHARLLKTMLERIGQIDAQISDLTAVTEELLAPYEEQLQQAESMPGWGRRSAEDAVAETGTDMTRFATGGHLVSWAGRAPLDKQSGKRKGQARHKKGNTYLGGVLGETAVCAGRTQTREGARYRKLARSRGKNKACVAVGNTQLKVYHKLLSSPGMRYEDLGPDYYQRRAQTRRNIDYHVRELQALGLEVTLCRLPEPGQAATTPAA

SEQ ID NO: 403798 - protein, 408 aa, unidentified
MGRAAEVVAPSSSIRIDGGCPVAQVNDLSRSLTAFDLISTLVVVVEMSKASWLVSGAVPGVERQPLKKLEPDATALLRLIERWRNEAVRAGRPISRIALAYEAGRDGFWLARWLIARGIEAHVIHSASVAVSRERKRAKTDRLDAAMLMRVFLGWLRGERGHCGMVAIPTMEEEDARRPSRERESLINERSRITNRMKSALARLGVRGFKPHLRKAPERLAGLRTAEGTGLPANIIEEFRRDMARLALVREQINSIEKTRAERLKRAPDTGPHAMVRLLARVIGIGIETADMLVREILSRKLRDRRAVARYAGLTGSPDESGLKRREKGLPKAGNARVRRGLIQLAWRFLTFQKDSALARWYRTRTEGPSGARKTTMIVALARKLLIALWRLVTTGEVPDGVELRPAG

SEQ ID NO: 403799 - protein, 329 aa, unidentified
MSALVCGLDVHRDSTYATILDCEGKIVSQRRMSNEAVLSYLSGYRVDRIGMESSSQVAPLYRTLTKNGYAVSVSHPKKTRYIAEAKIKSDRVDSKAIAELVRLDALPKAYMPDQETAILREKIRRRAFLVRERVRLRVKIKSILTYEGIKPQIDHGLFTERGVEWLHSLALEPVESYLRIIKPLNNEIKQLSKHLKELAENDDDIRLLMTIPGVGYYTALLVKSEIGDINRFSDGDRLCNYGGLVPSTHASGGMVRHGSITKEGSRWLRWVMVEAAMTHVHKYDTAITKAYHRIVERRGRQVATVAAARKLLLCCYAVLKNKHPYYDQA

SEQ ID NO: 403800 - protein, 346 aa, unidentified
MTIVETRAITGGVDTHADVHVAAALDPVGGLLGVEEFPVSPAGYARLLGWLGGFGTVALVGIEGTGSYGAGLARYLACAGVRVVEVDRSDRQDRRRQGKSDPLDAVSAARAAQSGRARGAPKGRDGAVEAIRALMVAKRSAAGERTRTINQARALILTGPDDLRARFARHTPAALVAEIASLRPRLGDAAGYATRIALRELGRRAVFLDGQLERLDELIVALVTARAPGLLALYGVGPSTAALLLIAAGDHPGRLRSEAAWAHLCAAAPIPASSGKVTRHRLNPGGDRQANHALWRIVFTRMGSHPATRAYVERRTKEGKSKTEIIRCLKRYVARQVYPHLRPAGD

SEQ ID NO: 403801 - protein, 337 aa, unidentified
METYVGLDVSQKATAVCVVDRDGSVVWRGTVASNPDAIADTIKQQAPETKRVGMETGPLAVWFYHGLRERNVPVDCIHARHVHAALATQLNKTDSNDAHGIAQLTRSGWYRAVEIKSIASHEVRLLLGARSQLISMRTSLYNQIRGVLKTFGVVLPPGTRSTFERLVEERTPSTSLIRGVIGILLDSWRHIDGQVRETDRALQRIARASDVCRRLMTVPGVGVTTAVAFAAAVDNPERFRRVGDIGPYLGLTPKKYQSGEVDHNGGISKTGCRLTRHMLFEAASALILRHKRDCALRRWAQSLIARIGLRKALVATARKLATLLLSMWRSGKEFNPG

SEQ ID NO: 403802 - protein, 331 aa, unidentified
MKTNSDTTPKLYIGLDVHKEQTSVAVADPGAQGEIRSHGNIVTCLPSIEKLLRRLTKAKGITLSEIHVCYEAGGCGMWIARALKKFKVQCTVVAPSLIPSKAGDQVKTDKKDAIKLVRLLRAGELTAVHVPDEADEAIRDLCRARVDAVDDLRRAKNRLSGLLRRLGHRYAGAATWSEAHMRYLRDLKMPYPSHSFILEEIIQQIGELQERIARIEHQMELQCAGWTRKPLVDAIMALRGFKIIASMIVVSEIGDFIRFTHPKQLMSYLGLTPGEYSSGGKQKQGAITKCGNSHLRWLMVECATHYRLDPKVSVNLSKRQEGQPRWVKDFS

SEQ ID NO: 403803 - protein, 415 aa, unidentified
MDVVHPRCCGLDVHKRLVVACVLISGTPGRPRREVRTFGTLTDELRALADWLAAEGVTHVAREATGSYWKPIWNLLEGSFDLLLANAQHIKAVPGRKTDVQDAEWIAALLRHGLLRPSFVPDRAQRELRVLTRYRTSLVQERPAEASRLQKTLEGANLKLGDVASDVLGRSARALLERIVAGRSDPAALAQLAQGRLREKIPQLERALAGRVAVHQRFLLAQQLAHLDYLEEAIERVSAEVAGRLRPCAAALERLDSIPGVGRRTAQILLAEIGPDLGRFPTAGHLASWAGRCPGHDESAGKRRSGKTRTGSPWLRQALVEAAQAAGRTKGTYLGVQYHRLAARRGKKKAVVAVGHSILVTAYHLLAREQDYADLGPDYFERRDRAAVERRSVQRLEALGDRVTLEPLLPASPAA

SEQ ID NO: 403804 - protein, 344 aa, unidentified
MEHFAGIDVSLKQSSVCVVDGAGNIVREAKVVSEPEALIGFFRGLGSGLTRIGLEAGPLSQWLYAGLVAAGFEVVLLETRHVKAALSAMVIKTDRKDARGIAQLLRMGWFRPVHAKSPGSQEVRALLVARKLLQTKLLDVEFSIRGILRGFGLKMGEVSKGRFAARVRELAAGHAMLERITEPMLRAREALRTEYARLHGEMLAIVKPDPVCRRLMTVPGVGALVAITFKSAVDDPTRFARSRVLGAHFGLTPRKYQSGETDVTGAISRVGDAMVRTALYEAAHIMLGRVTRFSSLKRWALDVAKRRGLKRAKVALARKLATVLHRMWVDGTTFHWGKQAVAAV

SEQ ID NO: 403805 - protein, 384 aa, unidentified
MGKTIRYVGLDQHAATIAVAVAEAGRHGEVRSLGTIANRPEAIRKLVAKLGTAETLRFCYEAGPCGYGLYWQLVQLGAQCEVIAPTLIPTKPGERVKTDRLDAEKLARCHRSGDLTAVWVPTPEHEALRDLVRAREAAKEDQLRARNRLGKFLLRHGRYRPDKSVAWGTKHMAWLKTMKFQQRAQEMTFVDYLSEVEHAKERIARLERAILDAIAQAPASMRAVVSALESLRGVKTLTAVTIVAEIGQFSRFAAAPQLMGYSGLVPSEHSTGGPGKARRGGITKTGNAHVRRVLVEAAWAYRHRPNIAGDLAKRQKLAGEEAKAIAWKAQHRLHARYWKLSAAGKPMPKVVTAIARELLGFMWAIGAQVERAHQQSTQERKVAA

SEQ ID NO: 403806 - protein, 408 aa, unidentified
MGRAAEAMAPSSSTRTDGGCPVAQVNDLSRSLTAFDPISTLVVVVEMSKASWLVSGVVPGVERQPLKKLEPDSTALLRLIERWRNEAMHSGRPISRIALAYEAGRDGFWLARWLIARGIEPHVIHSASVAVSRERKRAKTDRLDAAMLMRVFLGWLRGERGHCGMVVIPTMEEEAARRPSRERENLVNERSRITNRMKSALARLGIRGFKPHLRKAPERLAGLRTAEGTGLPANVIEEFRRDMARLALVREQISSIEKTRAKRLERAPDTGPHAMVRLLARVIGIGIETADMLVREILSRKLRDRRAVARYAGLTGSPDESGLKRREKGLAKAGNARVRRGLIQLAWRFLMFQKDSALARWYRTRTEGPSGARKTTMIVALARKLLIALWRLVTTGEVPDGVELRPAA

SEQ ID NO: 403807 - protein, 359 aa, unidentified
MARTSLWIGLDVGADETTVCATDDSGAVLFELPVASTAAALHAALKSYKRRIKLIGLESCSFGIGLHRSLSKFGYPVAMFEARQASKFLAIRKNKTDKNDARGLADIARLGRGSVSEVRVKAPESQRLRSTLVTRQKLVQLRTATEANMRSLFRLNGGKLKGSYSAATLRMNVSEELRRLRRSEKIDLSEEIEPLLALSVAMRGYIEDLDQKLTKRAEEDPVCRRFLEIPGVGPITALTFYSAVDDPRRFRRNADVGAYFGLVPKVRQSGQTLTRNRITKTGDTLTRTYLTSAAQHHLKAADSSLALWGTELSERLRKPGVYVALARKLALTMLAIWKSGDRYDPYYATSATKPELVEP

SEQ ID NO: 403808 - protein, 419 aa, unidentified
MIETINWETITHYAGFDWAKDHHDVVIVDQQGKIVKDLTFEHTAEGWAKWKELVAAYPHLAVAIETNQGAAIEQLLESGVVVYPVNPKSAERYRDRKAPSGTKTDFLDAWSLADALRVDGHGWRALKPLDPLIQELRLLCRDEVDLIGKRTELVNQLQAALHEYYPAALQAFEDWTATPSWNFVQQFPTPQLLHQAGRRKWEKFLHVHRLYRPELNEKRLAIFAKAHEFCGPPAVTRAKSRLALALVKLLYALENQLEDYRKEIRRLFNEHPDHELFGSLPGAGEKLAPRLLSELGSDRSLFKSAQALQCYVGTAPVSFESGQVRQVYVRFMCNKSFRHAVHLWADLSRKFCSWAQVYYQQLRARGKSHATALRCLGQRWLKILWKMWQTKTSYDPDFHMANQLKHGSWVLTVKPSKSK

SEQ ID NO: 403809 - protein, 456 aa, unidentified
MISLEKVVLVRTPECDKDREWEIGVKNVLPTDKIMSKRRKKVCGIDVHKRFLVASILDDQGNCETRRYDQDLDEFISLRNWITDSHCESVAMESTAEYWRPVYGILNPTINVTVGNAYHMKGIPGKKTDTLDSQWIAELELNNLITPSRVFTGELYELRNLTRTRNKLVNNATVYKNKIIHQLDVCSIRLCTVLTDVFSKTGYAILKGIVENKTQEEITKTLPAKTRKNASLFFEQIPSHIPDSAIFLIDTLLKVYDNLQIEIDRIEERMKFYLRGHERQLKIMMSVPGIGFIISSNLLAEIGDINDFPTSDKLAKWAGITPSVYQSANTNHTGPITKQGSKFLRWALIEAAHSAVKRPGKLNDYFNSLLPSKGYKKAIVAVARKILRIVWHLLINDEMYVDSIPRVKNIRIPKLPEKIEKIGISKILQLLSRGADLIVQEEGKEIMRINGSNQLT

SEQ ID NO: 403810 - protein, 452 aa, unidentified
MVAVMEPQEIDDEEHEQVLERVAAVDVAKASGMVCTRVPHQSRPGKRRTRVWPVDATTNAVLELADHLVAEGVEKVTLESTSHYWRIWFYLLESAELDVQLVRAQDVKQAPGRPKSDKLDAVWLAKLTERGMLRPSFVPPAEIRRLRDYTRLRADLTCERTRHYSRLEKLLEDALIKVSAVASSLAAKSVRDMLEALIGGERDPKILASLARGRMRAKHDRLVQALAGRFDDHHGELARLLLDQIDTLSAQIGRLTTRTGELIAAIPPAQGIDADGTTGPAAGHGKNAPVLPAVDRLDEVTGIGRGGAQAIIAEIGLHMSVFPTAAHLVSWAKISPQTIQSGTRSRAGHTGKGNPYLRGLLGEAAAAAGKTDTFLGERYRRLVKRRGKLKALVAIARSILVIVWHLLDDPAARYHDLGAGYYASRVDKNRKMRHHVRQLEALGYTVTLTQAA

SEQ ID NO: 403811 - protein, 416 aa, unidentified
MNTQSIPSFTAFIGIDWADREHDFCLQAAGSDQREFGTMDHSPEAIAKWAYSLRDRFGGPIAVCLELAKGPLVSALLRYEFLVLFPVHPSTLAKYREAFVPSGAKDDPTDAEIALDILLRHPDKLKHIKLQSVAMRTLATLVEERRSLVNNVTGITNRLTSALKEYYPQVLDWFEHRDTLIFCDFLEHWPTLKHVKRARKATLESFFRQHNANRAYLVEQRIQGIRTATALTEDQAVIRPNQMLVQTLVEQLRVLLQAIDRFDAEIDTVTKSLPDYDLFAALPGAGHIQAPRLLVAFGEDRDLYANAAEIQRYAGIAPVVERSGKKCWIHWRFACPTFLRQTFVEWAKSTITRSYWAGAYYQQQRKKGCSHQVAVRALAFKWIRILYRCWKTRTPYDESVYLKALKRRGSPLLSNG

SEQ ID NO: 403812 - protein, 342 aa, unidentified
MEHYAGIDVSLEYSAVCVVDGSGKIVREGKPASEPAALIGWFGSLGLELTRIGLEAGPLSQWLYAAMKQAGLAVELLETRHVHDAFKAMPVKSDRNDARGIAQLMRLGWFRPVHCKSMNAQEVRAVLTARKLVQTKLLDVENSLRGILRGFGLKVGKTTARSFAGRIQELVEGHPNLETIGEALLSVRAVLLREFNAFEKRVRAMARLNARTRLLMSTPAVGPIVALTYSSAIDDPARFKSSKQAGSHFGLTPKKHQSGETDRSGRVSKIGDASVREALYQAAHVMLTKPTKGCSELKGWAMRIARRAGMRKAKVALARKLAVILHRMLANGTPFNPAAAAA

SEQ ID NO: 403813 - protein, 316 aa, unidentified
MDQTKPRIVGVDVSKHHLDVAVHDACEVARYANTAEGVSLLLEALGDVAPGLVVAEATGGYEIGLVRACQAALIPVAVVNPRQIRAFARAKGTLAKTDGIDARIIAEFGCVLRPRPLPQVATGRQAFGELVARRRQLVEMAIAEKNRLEHATSAVRLSIEEILCVFKSQLAGVDAAIALAIDADAELSHRRAILTSVPGVGELTAAVILAELPELGSIGSKQAAALTGVAPINHDSGTHRGQRHIGGGRPGVRCALYMATLSAIRCEPSLKAFYQRLRQAGKKPKVAIVAAMRKLVTLLNVLLQHNQLWRPQQHGC

SEQ ID NO: 403814 - protein, 361 aa, unidentified
MAKMNLSRISSFVLDFEKSIFWMGIDVHKKSYSIALRRADGETLTWTSPASPTLIVDQIKQWGIHVGTVAYEAGPTGFSLARTLRAAGVNVIVAAPSRIPRPVTAGAKCDRLDCIKLSEYAAKGMLKAIAVPSVEDEARRVLLRRRHKVVDAVRRCKQRIKSQLLYLGIKAPKEISRWSNASAFALSKLSMHPCARSALESLLRELAFFQEELRQLETELMCAVKDRVNRTTMSCLKSVPGVGSVVAASFALELFRPERFDHADQVSSYLGLAPMIRQSGQSRSSGRLVPVGQSRLRSLLIEAAWSWKSKDAYAASLYKRFVGRMGIAQKAICAVARKLAIILWRLMVEQRAYQPKPALMQ

SEQ ID NO: 403815 - protein, 353 aa, unidentified
MTGTKYIGMDVHKESISIAVRNDAGKLVMECVIETKANVILDFIHGLRGELHVTFEEGTWATWLYDLLKPHVTKLVVCDPRKNSRQGNKNDRIDARELADRLYMNKLSSVYHGGAGVRTLKELARSYLTISKDLGRVMSRVKAIYRSWGIPCAGKQVYAPRHRAEWLAKITEVGVLRRAEFYYQQLDALRVLRQAVRRDLLAESQKHKASKLLRQIPSIGPIRAALLIALIQTPHRFRTKRPFWKYSGFAIEMHSSADYRSVKGGLQKSKKQISVRGLNRDCNHDLKNLFKSAATIASVKPGPFQEFYAALVAKGMRPEMARLTLARKIATIVLIVWKRGVSFDAQYLKPQTA

SEQ ID NO: 403816 - protein, 323 aa, unidentified
MTDAVLGIDVSKNTFDTNLGAGTKARSKSFANSPSGWHHLIAWLGEHKIGQVHACLEATGRHGLGIALALHEAGHVVSIVNPAQIRDFARTKLGRNKTDQVDAVHIREYAELFKPRPWTPPSPAMRRLCELQTIRAGAVAGLTEWKNRRGSGIMDDLALSLAKTTIQHFTSQLEAVDQAIAETIDNDVELSAKRDLLVSINGVGEALAGIVLAELPGPDILGSSAAVTAYAGLNPQQHQSGISVNRPVRISKIGNAVLRTAFVHAGFVGDALQPSGRCFGRSAQGSGPPQGKADCDRCHAQASGALLRRAEDRQGIRPGDGDG

SEQ ID NO: 403817 - protein, 455 aa, unidentified
MSKSNRTDTPLRAARAQISNPEITVHAMYRSAIGIDVHLNLLVCCHQKQVAGHREQSESRDFNTDRASIDAFAAWCRECNPDIILMESTGSLWQSPYEALERAGFTSEQLALINARDAKAAAGRKTDRKDASRLASLARTGNFKKSFVPEKAFRLQRVISRDLQKNRNDISRTSNRFGKSLNLTGCRPTTVFSDIRGGKAASLILMAKLRDDPHLFDVIKQNSRRLRASPEQIMQALNFEIEPMMKEQILALRKKIDQLEEYDRSTFERLRQLQAPYEKDIQLLITITGIQERSARMIYAELCPDLKEHFPTSEQFASWLGICPGDNTSAGKQKSGKCPKGNKHLRRTLIEAARGLVVGGTAALKEKFQVLKMRRGYRRAMVAFAHLLARIIYSVLTHQKGFEPYLSTAFRDALIERAKNGVKQLLKLKGTKYVIADGLVVETKTGAILGAVVSS

SEQ ID NO: 403818 - protein, 317 aa, unidentified
MIEEEKSYIGIDISKALLDVYVLPCKKYMRFQNNSTGIRKMREKLKLFSNVSIVMEATGGYEKAVAQSLQMGGWSVSIVNPRPIRDFAKSLGKLAKTDRIDAEIIALFAEKIQPKETIVYNENQQQITELNARRRQIIDMITMEKNRLDKASDELKKSIQRIIKALEKELQAINEALEKSIQNDTDCAGKNRLLKSIKGVGSIVAAGMIADLPELGNVNAKQISALAGLAPYNRDSGTWRGKRTIWGGRASVRTMLYMATLVAIRHNPQIKCFYERLCSVGKLKKVAITACMHKLLIIMNAMIKHGELWRMAAIVEI

SEQ ID NO: 403819 - protein, 411 aa, unidentified
MEPILERCAGLDVHQETVVACVMYGPLNGRPAKELRTFPTTTKGLMQLADWLSERDCRDVAMESTGVYWKPVWNILETEFRLTLGNAQRIKNIPGRKTDAKDAEWICQLMRCGMIPGSYVPPREIREARDLTRRRRKMVQALTSEKNRVHKVLQDANIKLTTPVTDLFGVSGRALLQSLIDGEVLMEEQLLDVVKGKLRKKIPQIVEALNGRVTAHHRKMLERIMKHVVFLEEEIADLEMDIKNALKPYQKELDLLDTIPGINQDAAADILAEIGPNMDAFPTDHHLASWATLCPGQNESAGKKRGAKTGKGNKYLKATVNQASNANVRSKDTRLYLFYQRIKRRSGHSQAIVAVSHLIIRIIYYMLKTGTPYQELGDRFESKKNQPSLNSLIRRIQKLGYDVQISERAPA

SEQ ID NO: 403820 - protein, 392 aa, unidentified
MDSPPPRHHSATVAFEEANGSEGETMKKHSSKNDSLSSTDVELCTTISVDLAKQVFQLAGEDAAGRVIYEDRIKSRQSFHDFLLKLPATVTVLMECGPGAQAWARLLQAKGNAVRILPAQRVAEHRSGAKNDRNDAHAILRAGRDISIASIPIKSTTALAIQALHRIRRGNIKRHTALGNQIRGLLLEHGVSMPQGDTAISNHVPRALEDASLPLPDLLRELLDELLTDWLSLGQRIAGLSKRLETTAQEDQVAQRLITIRGVGPIIATAIVAKQTEPSRFASGRMYSAFFGIVPDEHSSGNKVRLGKMSKRGDGYIRSLMIQGAHAVLTQLRPDSDEPDDRRLLRWLSRLGRKEAAIRLANRNLRIIWALLQSDQVYQRKPNNNAKTAVSH

SEQ ID NO: 403821 - protein, 355 aa, unidentified
MMNDKQVKVYGGIDTHADTHHLAVIDQAGRRLADAQIPTTATGYQAALRFLGSWPGLVSVGIECTGSYGAAVTRAVREAGITVFEVNRPNRFDRRLHGKSDPFDAYSAAEAVLGGRASAAPKGGDGLVESLRVLRTSRSSALQARTATINQIKGMLITAPEDLRTRYKGLSTPKLIAALAASRPTATPVTAAEATAYSLRLLARRWQALTGQIEDLAGHLQRLLDDHAPDLMRVFGCGRDTVAQLLITAGDNPDRLRSEAAFAALAGVCPIPASSGKTKRHRLNRAGDRQANSALYHIVMVRLRYNQETRDYVARRTAEGKTKMEIIRCLKRYLVRQLYPLIVETLHPRKEVAVA

SEQ ID NO: 403822 - protein, 404 aa, unidentified
MLEVAWVGVDVGKAHHWVVAADPQGRVVLSRRVANDQQEITRVVAELDKLAGRLVWTVDLTTAEAALLLAVLFSGGQTVRYLSGRAVNHAAASYRGEGKTDARDAHVIADQARMRRDLPVLRPGDDLVAELGLLVAQRADLVGDRTRTLNRLRQHLTAVCPALERVAEPASQGGWLVLLARYQRPAAIRRAGVRRLSGLLAAQGVRAGTAQQLAEAAVAAARTQSLRLAGEEVAAELVAALARQATDLGLRIATLDRQIASRFGRHRLAKVICSMPGFGFRLGAELLVAIGDLDQVDSADRLAAYAGLAPVANDSGKRTGRRRRPVRYNRALRRAMYLAALVAIRCDPAARAYYQRKRAEGKRPIQATICLARRRTNVLWALLREGRTWQPEPPAKPHNQPQAA

SEQ ID NO: 403823 - protein, 387 aa, unidentified
MIAHYIDEKFQKEFTIQNNKNGYNYLLNYLNRVNQPKLIFESTGIYSRAMVRFCRVNQINYIELNPLEAKFKTSSLRSWKTDQSDAHKLAQIAPFLNDSDSLNNTNDDIYFELRERARFHLEFENEQNRLKVEIIEILHQTFPGLEKLFKNRYSMIALNIAEIFTHPDFVQQNDMESIISTILKSTDKGLSQRKAESYGETLFKLANDSYPNVNSSSFLVKKAQLLIQKLKKSIGQLSQLDKEMIQLAQELDCFEIICSIPGIGDLTAAMIIGELGDISRFKSNKQLNAFVGIDIKRYQSGGTHYRDTINKRGNKKARRLLFLVIMNIIRGQHRYNNHIVDYYYKLRKQPNEKSHKTAIVACINRLLKTFHYLIMKHKLYDYEMSPH

SEQ ID NO: 403824 - protein, 411 aa, unidentified
MDKIYDICCGIDVHKKLIVVCFKKGNKQEIREFGATTREILELADWLKDSGCQIAAMESTGSYWKPLYNILEASELKAIVVNAQHMKAVPGRKTDVKDAEWIADLVQHGLLKASFIPNKDQRELRELVSYRKSLVGERTRELNRLQKMLEGANIKISGTVKDINGKSARNILEFILTGEAFDEAKYDEMYRNKTISHNLKASKEQIIADLNGVMSPLQRRMMKELLVHLDELNLHIKNLDDEIDNFMKPDEKDASISLQSIPGIGSTSAQAVVSVIGTDMERFPNAAHLASWAGLCPGDNQSAAKRKSGKTRKGNSLLRTTLITCAHSAVLNKESYFYAQFMRISAHRGKKRAYVAVAHSMLIAIYHMLKYGVAFEDLGADYYNQFNKERKINAYLKKLKALGWEAPAVAV

SEQ ID NO: 403825 - protein, 351 aa, unidentified
MLLIGVDYHPSFQTIAFFVEETGECGEQELNHSEGQAEKFYRDLKQQGICVRVGMEATGYSRWFERLLAELGFELWIGDPAEIKAKRVKKQKFDREDARLLLRLLRENNFPQIWVPDPENRDLRQLLWHRHRLVQMRTRIMNQLHALAMNEGYRWKKKLFSEQGRGQLEKLALGPWASRRRQELLELLDRMNPTIAELTAAVEREARKRPEAMRLMTHPGVGPLTALAFVLIIGTPTRFQRGKQIGTYVGMIPCEESSARKQRLGHITKQGSSLLRFLLVEAAQAAARIHPDWRRRYMHLAMRRHKSIAKIAMGRRLAVRLYWMWRNGCGYSPLLEFGSYAGQLGTRNGVK

SEQ ID NO: 403826 - protein, 374 aa, unidentified
MHDATAMTTPAATTTSMTTTTTTTTILALDLGKFKSVACRYDAATGAHAFETIATTPPAVHDLLVEAAPQLLVIEACGVCGWIADLAESLSIEVRVANVLGEAWKWKRVKRKTDRDDALKLAKLAATDQLPTVHIPKLTVRQHRSLIRYRHALIDRRTGIKNTIRSLLDAQGLSLPGRSRGWTIQSINDLKALSRPLSECDAANLWRGQLASELAMFEQVTALIKQADRKLDALAATDERMTRLRTIPQVGARLAELVVTTLDDARRFKTAKQVSAYAGLVPRQYQSGQMNRLGRITGQGPGLLRRVLVQVAWGLQRRPETRGHAVFERLCHGQRTRRKQAVVALARRILCWCWALLRDGTTWDDTRATAAACS

SEQ ID NO: 403827 - protein, 292 aa, unidentified
MATYYIGADVHTNNTELAVEQRGRIVARYSVPTTIPAISTVLGSLEGRKIFAMEEGPMAGWLYRNLNQEVETFVVSEPRHNKLIAGEGDKDDKIDAGKLAILLRGNYLKSVHHTSDDHRAHLKHWINLYHDRIRDAVRDINKIRACCRMHGVRIPRKVVRNPIRRHQWLSGLDNPVLKAQLHMFWIGYDATKEQIELAKKQFSSYARKYPIIKSWCDLPGVGMIRATTIFAYLDTPWRFKNRAKLHKYCGVGLVRASSGTDKKGRPKPARLKLRGRSTDGSRMRSSGLPPVP

SEQ ID NO: 403828 - protein, 356 aa, unidentified
MAIQVLKQSVGIDMSKDSLLVCFCRQESDRPFVVRWSKQFTSDRRGLSQLNQRLQREASACGAPLYILLEPTGVYHEEVAYMLHEHGFWVSMVLPNRSKHFAKSLDHKGKSDESDAQMLARMALERQMPKWVPPSATMLEIRRLCRERQALLDDKTAVGNRLHALEWSHKPDGEMLKRALKHLKFIAGQVKEVEQQIKKRIDGDPDLKCRIEAVCSIKGVGSITAATVVGETNGFALFKNKAQLVSYAGYDVVKEQSGTSLDTPGKISKKGSSYLRKALHFPAITAVKHDPLFNKMFNRVMDKTKVKMKGYVAVQRKLLVLIYTIYKSGQKFDPNYVSIKKPNLTQTKQAGTSAPA

SEQ ID NO: 403829 - protein, 341 aa, unidentified
MSEVSTVGIDLAKSVFQAHGEDASGGVVFRKKLRRDQVLPFFSTLPRCVVAMEACASAHYWARELAALGHDTKLIPPAYVKPFVKRQKNDMADAEAICEAAQRPTMRFVQGKSAEAQASAVVFRTRDLLVRQRTQLINALRGHLTEFGYIVRQGVGHVGKLIKVVGDPTSDIPAQARPVLVVIAQGLEALQMQIALLDREIASRAKADPVAKRLMTIPGVGPVIATALVALAPAASTFRRGRDFAAWLGLVPRQHSSGGKERLGRTTKMGERSLRRLLIIGASSVTKVAARNPDKAGAWLAGMLARKPRMLITVALANKMARTVWALMAHGGSYKAPAAAA

SEQ ID NO: 403830 - protein, 412 aa, unidentified
METVVERPSALDVHKEQVTACVRVPGKGRSREQHVAEFPTTVAGLLTLRDWLAAFGVEQVVMEATGVFWKPVWAILEDEFDCVLVNARHVKQVPGRKTDVKDAEWLCQLAEAGLLRASFVPPKPIRALRNLTRYRKTQIQERAREANRLHKALEDTGIKLDCVATDILGKSGRAMLDALVSGTRDPEILAELAKGRLRAKIAALKEALEGRFDHLHAVWIGAILAHLDFLDEQIANLTEAIGEQIAPFEKAVELLCTIHGVQRRTAEVIIAEIGVDMSIFPTAKQLASWAGQCPGNDQSAGRRRSGKTRKGSKWLDWALEEAAMAAIRTNDSYLAAQYARLRPRRGHKKALGAVKHSILCICWHMLSTGELYTDLGGDYFRKRDPERITKRLIAQLESLGHKVILEELAQAA

SEQ ID NO: 403831 - protein, 402 aa, unidentified
MNAVGIDVSKGKSMVSIMRPFGEVVASPFEVIHTDSELSKLASSIKSLNGETKVIMEYTGSYYQPIAYALHKAGLFVSAVHAKLIHDYGNNTIRKVKTDKADAIKIANYGLDNWLKLPEYIPEDNIRQMLKAYSRQYTKYNKLKIMLKNNFIAVTDQTFPGVNELFTSPPRKSDGHEKWMDFAFKFWHCECVCGLTPKAFTERYQKWCKRAGYNFSEDKALGIYASARGHVGVVPMNDTSKQLVTLAIAQINAVAETLATVAGEMSRLAKLLPEQPIVSEFYGVGDVLGPQLMAEIGDVYRFRSKGSLVCFAGLEAPPFQSGKFESGNRSISKKGSPHLRKTLFQVMDCYLKHAPADEPVFQFLDRKRAEGKHYYSYMTAGSAKFLRIYYARVKEYLNKFDA

SEQ ID NO: 403832 - protein, 338 aa, unidentified
MALYCGIDLHSRNCWLAILDTRLKVVEEAKVGNDLEELLQVLEPYREDLVGVAVESTFNWYWLVDGLEDAGHRVHLTNTWAVKQYEGLKYTDDRHDARWLAHLLSLGILPEGYIYPKEERPARDLLRRRSFLVRKRTSFMLAMRGAFECRTGLRVNSNDLKNWTTKDVEAHVDDPAAAFGVTCLLEPMRALSSQIKKIESEVLARGRVRPEFAPLETVWGIGKILGLTIMYEVGDISRFRRVGNFTSYCRLVNTARLSAGKRKGSGNRKNGNPYLSWAYSEAAHHAVRHHPEAQKYFQRKRAKTNGIIAIRALAHKLARASYHVMRDHVDFDPERLFA

SEQ ID NO: 403833 - protein, 344 aa, unidentified
MQIRSVGIDLGKTTFHLVALGATGKVLVKKKFTQKQLLTFTANMQISLIGLEACSGAHFLGRALKQQGHDVRLIAAQFVKPFVKSNKNDFVDAEAIAEAVERKNMRFVPIKTDDQLDLQAIHRVRDRLVSRRTAVINQIRAFLLERGMVFAQKPAKLKAAMADVLENAENALTPMMRNLIGMLWDEWKTVEEQIDELTDRLEQIAASDAGCCRIRQIPGIGPIVATAIVAAIGNGAAFRKGRDFAAWLGLVPRQYSTGGKAKLLGISKRGNIYLRKVLIHGARAAAMRIKRDRFPIGAWMNALEARAPRNVLVVAMANKLARIAWAVLSTGEEYRPGVIAAVAA

SEQ ID NO: 403834 - protein, 348 aa, unidentified
MEKMNLFVGLDVHAETTTGTIKDSEGNSVRVLKVETSREGFKKLFAGFSKKQLTVVFEATRNWHYYAELIEPNCSKLVMAHPLKVRAIASARIKTDAIDSNTLCDLLRANLIPESFMAPLDVVEFRELLRYRARLSRDCGKLKTRAKNILSREGKTCEFDEVTGKRARLWLNNLLLNKLNREQLNYTVKLIDTYNIELKKIDVILEQEQYKYPEIELLKTIPGIGTYSALLIMMEIADFTRFPTPDKLAAYAGLVPSTYQSSQVQYNGRITKRGNKILRWILVQCTHASLKSRKSHKLKTFYLRIQRKKGAQKAITATARKMLTTIWHLIQKNEVYAYRDNSVRIKGL

SEQ ID NO: 403835 - protein, 392 aa, unidentified
MYIVGIDIGKNHHEASIVSPEGKQIGRSLRFATTHKGADSLMRFIFKNIGNSPCVFGMEATGHYWYPIYSFLKAKGYTICVINPIQSDSLRKMYIRQTKNDSIDSFLIAEVIRFGQFGTTSMADENILAMRQLCRYRDSVISSRTEIKLRIGTIMEQIFPEYEKQFSSLWVSTSMGILEKYLTPENIENAPIDELFEIIKDKSHNRLTKAKAISIKEAAADTFGIKIAQDAFSFQLKQLIDRMNFLDKQIEALDCQILEYYEKFDCYLHTIPGIGMIAAATILAEIGDINRFKSSSALVAFAGIDPTVRQSGEFSSTHNHMSKRGSPYLRHAIFLAATTCSFHNSPLNAYYKKKRDQGKHHLTATGAVARKLTTVIYAVLRDSKPYEPKKFC

SEQ ID NO: 403836 - protein, 351 aa, unidentified
MAMLADLADAVIGVDTHTDTHTACLLDRLGRQLAVITIAADPAGCRALMAWADENAPGTRLAWAIEGARSHGLGLTRHLLQHGQMVIEAGRPARASKRPGGKSDPADAARAARDALAASRLAQPRCDGPREALRILLTARAQATTARTAAVNTFKALILGAPDNLRQQLRGLSTPRQASRCRTLRACGSQPVAEQVLRAELRRLAAHIKGWDRELRANKRQLRQLVEQVMPALLEQPGVGPMSAAQLLVSWSHPGRCRSEAAFAALAGVSPLQASSGRITRHRLNHFGDRQLNRALHVIVNWRMLHDQRTHAYLTRRAAEKTGPELRRCLKRYAARQLFRLMEAQPPLDNP

SEQ ID NO: 403837 - protein, 349 aa, unidentified
MRFYTNNHAHYCGIDLHAKTMYLCIFNRDGQILLHKNMRSSPEAFLAAVEPFREDLVVAVECIFTWYWLADLCRTEGIEFVLGHALYMKAIHGGKAKNDKVDAFKIATLLRGGSLPMGYAYPPEMRATRDLLRRRQHLVRRRGSLLAHIQNTHHQYNLPTPGAKIAYKANRVGVADVFDELDARKSMEVDFMLIENYDTTIRDIENHLVRRAKQHDSQGYHRLRTVPGIGKILALTILYEIHDVSRFPKVQNFLSYSRLVKCDHTSAGKKLGTGGAKIGNVHLKWAFSEAAVLFLRCNPEGQKLQRRLAGRHGKSKALSILAAKLGRAVYLMLSQDRAFDMARFLARTN

SEQ ID NO: 403838 - protein, 386 aa, unidentified
MGKSITSSVYVGLDVHKDSIDIAVAEAGRDGEVRHVGSIGGDLVALDKALRKLISRGAPLHIVYEAGPCGFVIWRHLSAQGLHCEVVAPSSIPKRSGDRVKTDRRDAILLARLARAGELTAVRVPDVADEAVRDLVRAREDAVREQRSARHRLKALLLRNGIGYAGKSAWTAAHLRWLATLKMAHATQQIGFQEYLHAITEATARIVRLEQAMRDALPEWTLRPLVQALQALRGVQLIASMTLVAELQDFVRFANPRQLMSYVGLVPGEYSSGPKRRQGSITKAGNSAARRMLVEVAWHYQHSPRVSPIIAKRQDQLPKEITDIAWKAQLRLNAKFKRLTARRVMKTKAVVAVARELAGFVWAIGRQVQTSGWQGIEIEAATAAAH

SEQ ID NO: 403839 - protein, 342 aa, unidentified
MDQYAGIDVSLECSSVCVVDASGMILREARVASEPEALIAWFRWSGFELERIGLEAGPLSQWLFAAMRQAGLAVELLETRHVRKAFEAMPVKSDRNDARGIAQLMRLGWFRPVHCKSMSAQETRTLLTARKLVQSKLQDVENSLRGILRGFGLKVGKTTGLGFAGRIEELVAGHPHLQVFTRALLSVRAVLRSEFAAFEKQTRKMAQSDARTRLLMSTPAVGPIVALTYVSAIDDPARFTSSKQAGAHFGLTPKKYQSGETDYTGRISKIGDSSVRTALYEAAHIMLTKPLKGCTQLKSWAMRIARRAGMRKAKVALARRLAVIMHRMLADGTPFNPAAAAT

SEQ ID NO: 403840 - protein, 455 aa, unidentified
MAKRRKKAPPRGLAPVPVLEANAAGVDIGATEIYIAVPVDRDSRPVRRFTTFTEDLIAAADWLERCGVRTVAMESTGVYWIPLFQMLESRGLKVCLVNARHVKNVPGRKTDVSDCQWLQYLHAVGLLRASFRPEPAVCAVRSLMRYRESLVEMATVHLQHMQKALDQMNLQLHHVISDLSGTTGMAILDAILAGERDPRKLAALRDPRIKADAKTIARSLAGDYRREHLFTLRQSVVAYRHYQEQMAACDVEIEQMLGEFSSPAEGGGGPLPPSAKYRQKPRRNELRFDLRGHLYRIFGVDLTEVPGINALTAHTLLSEVGRDLSAFRNVAAFASWMGLCPDNRVSGGKVLSSRTRRVNNRLAKALRLAAQSLFRSQSWLGHYYRRMRARLGAPKAITAAAHKLARILFHLLTTSQPYDESVFAQQEIQNNQRMHRKLQQQAKSYGFQLVEITQP

SEQ ID NO: 403841 - protein, 347 aa, unidentified
MKTYAGIDLHSSNNFTGIINEQDQRVYRKRLPNRLDAILAALEPFKDSLEGVVVESTFNWYWLVDGLMEHGYKLHLANPSAIKQYEGLKHTDDKWDSFWLAHMLRLNILPEGYIYPKEERPVRDLLRRRLLFVKHRTAHILSLQSMISRNLGIQMSCRAIKSFDEEAPETLFDSPYLLLAARSNIAVIHFLRERIKLIEKAVKSHIKLRDEFKYLLTVPGIGDILALTIMLEVGDINRFAKVGDYSSYCRCVKAERLSNGKKKDENNRKNGNRYLSWAYVEAANFTRRFCPYAQAFYQRKMAKTNGIVAIKALSNKLARASYYIMRDQVPYDPKKLFSCHIALHRGP

SEQ ID NO: 403842 - protein, 388 aa, unidentified
MQVAADRTDASTAIQTDLPAIFASLELSRSTWLITSLSPGAGEKMSKHSIRAGNVAGLLVRLAQLKEKARGRTGRDFPIIAIQEAGLDGFWIHRVLQSEGIESHVVDAASILTSRRRRRAKTDGIDGETLVRTLLAYKRGEPRVCAMVKAPTPEEEDRRRICRERKTLVGERVEHVNRIKGLLFAQGVSDYEPLKRNRRARLEELKTGDGRPLPAHLKAQISRELDRLELVLPQLKAVEAERDTLLKPVSEGCPTPAAMLAQLKGMGPEFTAILWSEGLFRSFSNRRQLAAYAGLAPTPWQSGSVAHEQGVSKAGNPRLRTTMIQLAWLWLRHQPTSALSVWFQERVQSNGGKMRKTTIVALARKLLVALWKYSISGVVIEGAVMKTI

SEQ ID NO: 403843 - protein, 358 aa, unidentified
MAVTGGTRRIVGGVDTHKDLHVAAVVDEQDRVIGTRSFATTRQGYRQMLAWMRSFGELQRIGIESTGSYGAGLLRFMQQAKVAVLEVTTPDKQDRRRRGKNDDLDAQNAAHAAFAGQRTVTPRSRDGMIESLRILMACRKTAVSARRVALQMIHNTIVCAPDGLRDQLRSLTRMQLVRTLASWRPDLTAYRDVDSAYRIGLKSLARRYLELHDEIADLDVMIAAIVDELAANLVARNSIGHIGAAQLLLTAGDNPERLRSEASFASLCGVSPVPASSGKTVRHRINRGGDRAANSALHIIAIGRLRTDQRTKDYVARRIAEGHSKLDAIRALKRYLAREVFTLITQRRKEINATRIAA

SEQ ID NO: 403844 - protein, 344 aa, unidentified
MEYYVGLDVSLRSCAMCIVDNKGKVYLERELPCEVEDIADCVAAFEHPIERVGFEAGAMSQHLFFGLQSKGFEVVCMEARQVSAALSAMRNKTDKTDAKGIAQILRTGWFSPVHMKSREAHGLRALLSTRKALLKKTLDLANEVRGLLKIFGVRLPRTVKHGSFDGLVRPMIEMDDVLAHAIIPLLDARAVLFQHYLELDRRVKRAASQDEVCMRMMTVPGVGPIAALTFKAAVDDPNRFKRSRTVAAHFGLTPRRFQSGEHDNPGRISKAGDRDVRATLYAAANALLMRTMAGSQIKSWGMRLMRTKGRRRAVVAVARKLAVLLHRMWIDGSEFRQEKVGGTA

SEQ ID NO: 403845 - protein, 302 aa, unidentified
MNGIGIDVCKAMLDVAVHRGPFERFHNTPAGHRKLLSWLATQKAGQVVLEASGGYEQQILDALFDAGHQVVRADAYRCQAFAAATGLPAKTDRLDATNLACMAATLELRAYQPMEPWRRKLREFVRARQQLVDLTTSAQNQLEQGTDTSLRRLLQANITQMKKNCVRLEKHIAEQVRQQPQLEAMRSFKGVGAILQAVIASYLPELGTLDGKAIAKLVGVAPIAHDSGTTRGIRRIGGGRIEVRNVLYMACLSAIQYEPRIREFYRSLRARGKPGKVAVVAAMRKMLVILNARARDALAGEA

SEQ ID NO: 403846 - protein, 316 aa, unidentified
MDHNNVAYGVDVSKAKLVIAQYDVATLVEVDNRAESITAWLAGLPKGAMIAMEATGIYHRLPAYLAHAAGIRVYVLNPQTRKHYAQAIGQRGKTDNCDARMIARYVVHEQAKLRRWQPPARAAGRLSQLLERRHTIVVVRQTLAQSLCGVPMLKATRQSLLASFERTVGRLDILIRHEMARLPGAAALYERLKCIIGIGPVVAAQLVAVFSTLNFARTSAFIAYTGLDPRPDDSGNRHGRRRLSKHGPPLLRCLLYNAGMAAANSKVFKPVYKQLRERGLQTTEAIVILARKIARIAFALYKSGNVFDAQKHLKMA

SEQ ID NO: 403847 - protein, 337 aa, unidentified
MSIVFVGIDLAKNVFALHGVDDAGKAWLVRPSVRRDQLVEMIAKLPPCTIGMEACSGAHHWARQFMAFGHTVRLMAPQFVVPYRMSGKRGKNDKADAAAICEAVQRPNMRFVPVKTELAQARLAVHTVRQGLVAGRTATINRLRGVLSEFGQVMPLKAKTVRLEAAARAEGLPQWAQTACMDLLAEIRRLDERIDAYEQHIRLMAQADDRSKRLMGMPGIGPTTASALLAAIGNGHDFDNGRQVAAWLGLVPGQYSSGGKNRLGHITKAGDSYLRTLLILGARAVLAAANGKNDRISRWAQALAERRGYWKAVVAIAAKNARMAWAMLAKGEAFKPI

SEQ ID NO: 403848 - protein, 363 aa, unidentified
MKEYIAFDSHKRYTLAEREEVESGRAVQHRIEHRRGAIRDYLKEGEAGTAVAVEATGNWYWIVDEIEQAGKSPRLVHPRKAKLMMGMINKTDKLDVHGMNRLQRNKSLPTVWIPPAELRDLRELTRARMVFSQQRARLKNRLHATLSKYGLMLEGVSDLFGQAGRKVLKRLMEELPNQTAWASRMVLEQLDLVEKHLEEQENRLKDLLKVTPEMKWLSSLPGVGLILSGVMALEIGEVERFGDAERLASYAGTTPRVISSGGKTRYGSLRPDVNRYLKWAYMEAANVVSIHHHRWSKGSGPNRHAGRLYERIKERKGHAKAIGAVARHLAESSWHVLRRKESYRPPGVPARGLCQQGVSAVSS

SEQ ID NO: 403849 - protein, 358 aa, unidentified
MFFAGIDAHTRYVVVVLINRMGERVLGPTRVKVGQPERLVALLAPYRPLDAIMETSSSWPWLHEVLTGAGVHFVLAHARRLRAIAEANYKRDDIDAELLARMRLAGLIPEVYPTPFAQREWATLLRHRTTLVTQRTALVNRIHAQLHQRGLHLERGRLLTRAGRQWLRTEAWPALGLEQRALVRSHLRVIAGLRPLIRALDRHIAQVAATIPQAHLLGTVTGIGPHRALVICAEALPIARFRTAGHLASYAGLVPRSKQSGERPVRHGTIPAAANRWLRGALVRAVVAHVRYAPDSWLTRYYLAQKARLGWPTARVAAARKLARALHAMLRTNTGWTNDPSSNDPARGELVRSHAALR

SEQ ID NO: 403850 - protein, 412 aa, unidentified
MYYVGIDIAKITNVTSIINDKDVFIKKSFKFNNDEKGFKEFTNLLSSIDKNIDSFIIAMEATGLLFENLYLYLKGKGYNVILLNPYQTSKFREMDTMKKVKNDNIDAVMIASLIKSGRYSKAYVSEEVYASLRALHRHRASLEEELKKHKRQVSSLLAVVFPEFEQVVKNPFSVSGLALLEKYPTAKHYTYTSPQRILKVFRNIKGNNFNIQKAEKLLELAKSSIYSGNAYDERAFVIQSHIRAIKFLQKEIESIDNEMLKLFNASPSFTKEEEQEVIDIIDNLRTIPGVSDKTLFTIMGECGNLDRFKNINAFIGYLGLYPTLEQSGNKTSYGKLAKRGSKLAKKALYQAAVAAIRHNDEMKKLYCDKVSQGKAKKEALVIVARKLAAIILAIYKNNTPYNSKRVFNQNTA

SEQ ID NO: 403851 - protein, 343 aa, unidentified
MQAITTIGLDIAKSVFQVHGVDAKGNVVLRRQIKRRYVLAFFQKLPPCLVGIEACASAHHWSRELQALSHTVRLMPPAYVTPYVKRHKNDAIDAEAICEAVTRPNMRFVATKTREQQSCLTLHRTRHLLIRQQTSVINAIRAHLAEFGIVAPVGRNGVDQLLGIVADASDKRLPELARACVAALGTQLGTLKAQILQFDRLIMAWHRSSEASRRLDDIPGVGPTLATALVATVADPRAFRSGRNFSAWIGLVPKQHSSGGKDRLGSISKRGDRYLRFLFVAGALAVIRYAKIHGTKHRPWLTALLARRHTKVAAIALANKIARMTWAIMAKGEHYKEPVALAA

SEQ ID NO: 403852 - protein, 518 aa, unidentified
MTNTQRWARGCKLDNRRWLDTATGGMCVTGHSIGIDLSINGAHDCTVLDATGQLVQRFTFDSSSAGLQKLEQCVRATDPSYGAPVVIMEPTGLAWFLPCLCLRAEHPEVKVVRIKTSKVAALRRYLKQDAKSDRLDSLTLAKMPLVDPEKLYAVDLPPAAVQGLDRMTRQRARLVASLTGRKNRLQALVGGYLPGLMAVAGKPWEPVFRAMLAVSLNPFTLTDQGTTALRKSLQDKRSREALPEARLPRLRIACEQLTRLYRPIIEAGLLTEAFFDDVQDEVARELRLMDVEEQEVKELEAAIARRYQEIVPEDHLRTIKGLGAVTAPTILAAVGTPQRFHSQAAFRGWTGVVAHASQSADSDAKGLPMTKAGPRRVKLALYQAAEIARQWDPQLAKIYYDQMVHKGKPHYKAIGAVMSHLASRIHAVLSEQRDYVLRDTDGREVTPQEARAIILTRYRVPAEIRAERRTRKRRKPDVSTGSHRGGTKRSSRRSSTSSHLHSTRSQEPHQTGAVAITQ

SEQ ID NO: 403853 - protein, 365 aa, unidentified
MSYAYAQSKTPFTCGIDLHAKTLFATVINQQGKISARKELPCEKKDVLDFLMPFKGNLSIGAESTFNWYWLADICKEHQIPFYLGHALYMKHIHGSKQKNDSLDSRKIGNLLRTGFFPQAYAYPQAMRAVRDLLRHRLRLVRLRSGIHANIKNILYQAGVIDFPQTIVASRKHWPDILKNIADTATSARITSSLALLDTLDKQIVIQEKQAIALAQEQDKPSLTLLKTIPGVGNILAMTMLYETHTTERFKTPARYSSYARTVKVDHSSAGKITGINNHKIGNPYLAWAFAEVCFQAKKNNHEIKCYFDSLLTKHSKNNALSRMRHKFSVAVFYMLKNKVPFDLKRFCHTDKDDNSTAGLEKTKI

SEQ ID NO: 403854 - protein, 355 aa, unidentified
MLYLGIDQHARQLTISLRDEDGDVLQARQVSTEPDKIHAFFQHLTRERLSSDESFVAVVEVCGFNDWLIRMLRDYRCHKVILIQPEERKKQKTDRRDAAALSELLWVNRHRLLAGKPVRGLRQVDISSTTDQENRRLTTLRKDASRARTRLINKMKHILRRHNLQWEMPTKTFPTQPAIAWLKKLVLPEIDQLEMNHLLIDLEQAQQRMCELEEKLAQRCGTSEAATLLSSMPGVGHFTATALACRVGRVERFTRSRSLANYWGLTPGCRNSGENNQRLGSITKAGSSMARWLLSQVAYQALRKDAKLREWFKRIKRRRGSSIARVAVMRKLATIIWHMLTKKKTFAECRGLAAA

SEQ ID NO: 403855 - protein, 326 aa, unidentified
MMNKITKFYGVDISKDFFDVMDNHGSHRQFKNNPSGFDAFRKTIRAKSCCVMEATGVYHVQLADFLFRKGVFVSVVNPLVIKRFIQMNLRRIKTDKADAEMICRYAQQNNILPYKPEAVYVKECKIISENINLLLKSRTMFKNRLHAMGYKSDRHRNVLISPLKAIIRDLSKQVKKLEDELKQLIQKNEPDLYSRLQTIPGIGKSTAMHLIIMSDGFRKFENAKQYTCFIGLSPVENRSGTSVRGKRGISKQGNGKLRNLLFLCSFNACKSNKSCKELYERITAKGKSKKLALIAVANKLLKQSFAIAKSGLVYDQDYVSTKSVVN

SEQ ID NO: 403856 - protein, 338 aa, unidentified
MNITTVGLDLAKDVFQVHGADAHGRGVVNKRLKRAQVAEYFAKFPPCLIGMEACAGAHFWARKLAGFGHTVKLMAPQFVKPYVKRNKNDARDAEAICEAVTRPSMRFVAVKTVDQQAVLAIHQGREGLVKQRTALANQIRGLLGEFGIVLPKGRRILEGRLPGILADGDNGLPGMMRPMLTVLVAQLEQLSRHIAALEAQLLGWHRHNEASRRLERIPGVGMLTATAAVAKIGNAAVYANARQFAASLGMVPRQASSGGKERLLGISKQGDGALRRLLVHGARSVVRREADPRSWLGQLLIRRPKNVAVVALAQKNARTIWALLRYDRDYAPQGVCHA

SEQ ID NO: 403857 - protein, 348 aa, unidentified
MLADQLDYIVGVDPHRDSHALAVVHVVSGAVVFESTVIADSDGYGQALRLVDQHAPGRRAFAVEGTGSFGAGLTRFLTVRGERVLEVGRLRRERRSGGKTDALDAVRAARSVLIQQRPATPRAGGERQALQALVAAREGAVNAKRAGLCQLRDLLITTPEPLRSELRPLTRARLLQRLAATRPHSRHDAELRGSMLALRSIARRVLQLTAEERELAAEIETITRKLAPQLLEQPGVGPHAAAQLVLSWSHQGRISSEAAFARLAGAAPIPASSGQTIRYRLDRSGDRKLNRALHMILVTRKRSHPATIAYIQRRIQEGKTRREANRCLKRYLARSLYRLLEHGPPLAT

SEQ ID NO: 403858 - protein, 459 aa, unidentified
MKKSISKRKKSTPKVSIDQNWSVLNPNAAGIDLGSREHWVAVPPEREAQSVRCFGTTTPELEALAEWLKKCQVSHVAMEATGVYWIPVYQLLERKGFKVLLVNARQIKNVSGRKTDVEDCQWIQRLHTYGLLGGSFRPADAYCVVRSLVRYRDELIAGSTTQVQHLQKALLQMNVQLRGVLSDICGESGLAIIGAILQGQRDPLKMAALAHRRVKASREQLAQALVGDYRSEHLFVLQMAYELYQVYQQKISRCEQELAAALERLPDRVNLQERPLAAKPKGKKLDPDLRLNLYRKLGVDLTAIESIGTTVALTVATEVGPDLGAFPTERHFCSWLGLSPDHRITGGRILSSHTRRVANRLSDALRLAATSLEHSASALGAFYRRMKRKLGAPQAITATAHKLARIIYRLLTHGEAYVRQGLEEYEQKTKARALKAIQKTAATFGFKLVPQESLAKVVS

SEQ ID NO: 403859 - protein, 436 aa, unidentified
MKQSKLKKVFPNSAGIDIGSEKIFIGIEDKEVKSFSTFTDSYLKAIEYLIENDISTVAMEATGVYWFSFYDLLEESGIDVFLVNGRDVKNVPGRKSDVADCQWLQQLHSFGLLRPCFIPDDITRQLRTYTRLRLDHLSLAAQHIQHMQKSLILMNIKLSNVISQINGKSGMRILKAIISGNHNPYKLVELCEDSILRKKKDLVIASLKGNFRDEHIFSLKQAVDAYEFYQKQIHDCDLRIQELLERINRDRAVPDNMTKPKHVRHNEPQIDNLHEHLMKLTGGKDPAQVTGLSDKALLELISETGLDLSKWKTEKHFTSWLCLCPTKHQSGKSNKKWKKRGNTKAGQIFRNAAYSITNSKYSALSAFHNRIKAKKGSLVAIKATARKLAVLYYRVMTKGTLFVEQGLIAYQQKFKEQQIRRLQKQAKHLGLQLITP

SEQ ID NO: 403860 - protein, 483 aa, unidentified
MSPHRRLPFVDLPELTDIFIHPQVILLDMANKAKKIKTNKGLKLAIVNPNAAGIDVSSTEMQVCVPEDRDGDNNKCFGTFTCDLHEISAWLKVCKIDTVAMESTGVYWVPLYMRLVADGFDVLLGSAQAIKNFAEKKTDEVDAEWIMLLHSYGLLKASFQPCNYTREIRNLVRHRDNLLRSSAKEVQHMQKYMELMNIKLTNVISDILGVSGQAIITAINKGERDPKVLAALADPRCKSPREIIEKSLEANWDENLLFTLKQSFDLYHFMQKQMVQTEKKVEKIILKYKTSLPKEIVHQTPCKRSEKTEAVKNRIIIDIEQYAHEFYGVNIMRVPGISKGSTFRLVGELGHDFVDKFDTYKKFCNWMNVVPNNKISGGKLLSSKVPKRKNPVGQILRVAANSLKNEKSPMGNYFRKIRARKGHNHAIVATANKLGKIIYSMVKNQTEYDESLVQEDQEKILKRKLIRTQKELERIQKQLSECK

SEQ ID NO: 403861 - protein, 418 aa, unidentified
MTNPVLVGIDVHRKTNTVCVMDSQGRELTDRFTVDNNRPGTDEFVKRIAKSVSVSDGNFNSIHIAAEATGWYWFHFFVTLSQDAFLSQWQVNLYPVNPRLTKNFKKTYVDMDHTDTTDAFVVADRLRMGRDLPVPFQYDDVYWPLKLLVRYRYHVVHNLAREKAYCMSILYLKASEYTRIKPFSSIFGAASRAVLKEFSSMEEIAAIPFDELVEFIDSKGKRRFPDPTKNAGKLMKVARDSYLLPEAMQQPVHLILNLSFQHITFLERQLKRLDTAIAQRMESIPHTLDTIPGFGPVFSAGIIAEIGDIHRFDCDQAKVAKYAGFKWRKHQSADFKADESKLTRTGNRYLRYYFCEAANSVRMCDREYAAFYNRKFKEVRKHQHKRAIVLTARKLVRLVVRLLATNQPYQPRRCSATS

SEQ ID NO: 403862 - protein, 337 aa, unidentified
MAKEKAVRWVGVDVSARWVDGSRAAADEPVSARQFANTPAGHGELASWLTQGGRRARVVLEATGLYSLDLALRLQRTARIEVMVINPRASKEFAGAWGQRARTDASAAQGLREYAARMPFTPWTPPGPQALALRTIMRRVVALIEARVQERNRLHALSATEALPTVVRTDIRQHIRTLERRIARLEHEARALVEPAPALHAGFRHLCSVKGIGRRSALMILAEVAVLPGELTARQWVAHAGLDPRPIRSGTSVHPPVRMSKHGNVYMRRSLFMPALVAVRRNPAVQRFATELTARGKAPLQVLVAVMRKLLHAIYGMLKTDTDFDGEKFRRSAHAEG

SEQ ID NO: 403863 - protein, 429 aa, unidentified
MGNSAHYVAVRPERDPQPVRRFECFTADLRRLADWLQGCGVKTVAMPSTGVYWIPLYEILEERGFEVYLVNARHTKNLPGRKSDVQESQWLLKLHTYGLLNNSFQPPAEIRALRTYWRQRGEHVAGAATCIQRIQKALTQMNLQLANVISDISGLTGQAIVRAIIAGERDPRKLAQFRDPRIQASEEEIAKSLEGNWRPELLFVLQQELEMYDTYQRRMAECDSQLQKHLASMTDSVPPRSPQVEPEPKKEKRAKPAKNAPRFDLSRELQRVTGVDLTRIDGIDVMIAQTLLSEVGVDMSQWKTEAHFASWLGLCPDNRVSGDKVLRRGTRHVVNRAANALRQAANALIRSRSYLGAQYRRLRTKLGAPKAITAMAHRLARLVYRMLKYGQRYVDKGTEYYEQRYRNQQVQLLRKNATKLGFQITEARA

SEQ ID NO: 403864 - protein, 338 aa, unidentified
MTIYAGLDVSDKQTHACVVDAEGKVIRRDCVASDPEALAKWLKRHCANLTRVVLETGPLSTFLYHGLVERAVPVICICARHAKKALSARINKSDVNDAESLAQLARTGWFKAVHMKAGATHIDRAALKIRAQLVTSRNAMSNQLRGMLKLFGLRMGSVTTPNKRRERLAALFTQRPDLEAVFKPLIDCIETLDTQLASSSRLLDARAAADPVCARLMTVPGVGPMTALTFKASIEDPGRFVKGADAGAYAGLAPRRSQSGERDYNGRISKAGDPLLRHALYEAANSLLVRVKRSCALQTWGKKIAETKGPKRARIAVARKLAILLHKLWQSETEFCWN

SEQ ID NO: 403865 - protein, 445 aa, unidentified
MLPIIYKQVAGLDVHKKTVVATRMRVTTEDRGVSETRTFGTTTPDLLELHDWLCEWPCSHVALESTGDYWKPVYNVLEGTFKIVVVNANHVKHVPGRKTDVKDSEWLAELMMHGLLKASFVPARPQRALRMLTRYRTTLVQERARVVNRVHKLLEEANIKLGSVATNIQGVSARAMLAEIAAGQTDATQLADLARGRMRSKIPELEKALTGLVQPHHCFLLSRQLTHIEFLDEQIEELSAEIARQVEAMSSRSAPTGEEGNAGTGTEPPITEETKRPLTWNEAVALLDTIPGVDQRTAEVILAEIGLDMSQFPTAKHLATWAGLAPGNHQSGGKRYSGRTPKGNRPLCSIMVQGGWAAVRTQDSFLNARYHRLAARRGKKRAIVAIAHSMLVSAWYMLTYRQPYHELGGGYFDQRQKETKVNYLVRRLEKLTGGSVVLEFQPTPA

SEQ ID NO: 403866 - protein, 346 aa, unidentified
MEHSAIDLHKKDSQIRIVTGAGEVIDRRVPTRPEAFTRVFADRPRTRILIEASTESEWVARHLEAFGHDVVVADPNYAAMYGTRSRRIKTDDRDVAALTDACLRQTYRAIHRRSSARRAVQADLVVREALVQTRTRFVSLTRALTRAEGLRIRSGASHTFVSRLREVAVSGALDRTLGPMRAMLEVLDEELDRIDRELTDGAHEDGEIARLMTVPGIGPITATAFVSAIDDVSRFHTASQVTSYVGLVPREYSSGERTRGGRILRSAQPRVQRLLVQAAWSLWRSKGADSAALRAWADSLSLRRGKRIAVIALARRLARILFALWRDRRSFDATRIRDVRLRRASA

SEQ ID NO: 403867 - protein, 371 aa, unidentified
MKSILSVGMDVHKNSFSLCAYDGYTGEIVSESTFASDVKLVIKFIEALKSRYENDVEIKCGYEAGCLGYSLYKSLTARGVDCVILAPTTMQVSAKNKMVKNDRMDALNIAKNLASGSYKTVYIPDEEDVEIKEYIRMIHDFKKELQRVKQEICAFVLRHGYQYDGKSKWTIRYMNWIRELEMSEIQRETLNEYIAEMENLNDKIDRFMNRINEIYQSERYHEKVSKLRCFKGIETFAAMTIQVETADFERFPNAKAYASYTGLTTGEHSSGDKNNRIGITKQGNTVIRKTLVECAQALAKGNVYAKKSQRLKSRQKGMDVNIIVYADKATERLKKKYQKLIERNVPRNKAIVAIARELACFIWGMETGNIH

SEQ ID NO: 403868 - protein, 363 aa, unidentified
MTDATTRTEAERELSLRVITVGLDISDQFTSLCVLDSSGEVIEEARLRTKTAAFSQRFSSMSPCRVILEVGTHSPWISRLLSGFGHEVIVANPRRVRLIADSTRKNDRSDAETLARLGRIDPVLLSPIAHRPEQAQADLAVIRARHALVGARSSLINHIRGAVKSSGARLPACDAYMFHKKVLGAIPPELMPALGPVLAMIADLTAQIDGMDKTIAALIRDRYPEAQFLQQVPGVGPLISLTFVLSIGDPARFTKSRQLGPYLGLVPRQRESGDNSPQLGISKTGNAYLRQLLVNGSQYMLGYRGADTDLRRWGLQHAAVGGRSGRKRAVVAVARKLAILLHRLLVTGEVYVPIRSTEGASVG

SEQ ID NO: 403869 - protein, 394 aa, unidentified
MLYLAIDQHKHQMTINVRNEQGDVIQKGQISTNHADIDDFFVALVKKARKHRGYMAIVEVCSFNDWLLEKLKKTRCSEIVVIQPGKTAVHKTDKRDANALGELLWNNRNRLRGEQRPNGIRRIFPADPADAQVRQLANFRQHLIKQRTRGINKIKGIIDKHNLAQNAPTQDCNTKKYRQWLVTVQLPVIDRMEINMNIQSWELYDKQILEVESELVKRSEVKAADVFRLKAIPGISAMGAITLLSRIGDIKRFKNPDSLANYFGLTPGCHNSAGKHRVGGITKRGNAVARQVLNFAVNHVIRKDTDMKSWHKKIKSKRGTKTARVAVMRRLATIIWHILRWEKPYQFRYDPPVITPKKGDLRSPKEVFQGIGNDNPVRRRQRQTPLKCRGKTKA

SEQ ID NO: 403870 - protein, 361 aa, unidentified
MNATTVAVDLAKSVFQLAVADEHWRIIETQRLTRTQFERWFINRDVRLVIMEACGSAHHWARWLNGLGVEVRLLPAQYIRAYVKRNKTDAADAAALLEAARASDIRPVRVKSVEQQALQGMHRIRSLWMGTRTSRINALRGFCREFGIAIPVGARTGIEAISRVLADPGTAVPDLIRGTAKLLVEEIRLLEARIAQLERELAALARLSPACTTLLSIPGIGLLTATALVAATSGDVGHFKDARHFSSWFGLTPKEYSSGNSRYLGHISKKGDRYLRMLLTHGARSVLRAAKVAEGAGKQVCGVRRWALDVQGRSNHNKAACALANKLARICYATLRDKEPFGEQTVRLGKKINRESFVMPA

SEQ ID NO: 403871 - protein, 360 aa, unidentified
MADHSTMVPRMTIGMDIGDTYCQVCALDAQGEIVEEGRVRTNPEALGQRFGSATPMRIALEVGQHSPWISRLLSDAGHEVIVANPRKLRLIYENDRKNDRVDAQYLARLARLDPRLLSPLPHRGVQTQRDLQILKARDLLVTSRTRLINHVRGTVKVFGLRIPKTSSGSFTTKAGGHLPPEHHSAVQPLLDLIGALTVSIRHYDRQIAQLCEQNYPQTQLLRQVTGVGPLTALTYVLILEDPHRFRSSRSVGSYVGLTRKESRSGAHDPELRITKAGDRNLRRLLVQSAQYILGAFGPDTDLRRWGLVLAARGRKNAKKRAVVAVARKLAVLLHRLWITAEVYDPLRQAAKKPRARVRAA

SEQ ID NO: 403872 - protein, 341 aa, unidentified
MNVSKQVVCMGIDLGKNNFHIFAVNQAGKEVFRKQRTRSKLLPFLAQQPPCLIGLEACGGANYWSREIKKLGHEVNQMAPQFVKPYVKGNKNDYHDAEAICEAVSRPGMRFVSCKTIAQQDLQSLHRVRQSLVKSRTALSNQIRGLLAEYGLVISRGLSQVRKRVPEILEDADNDLSPLFRQLLARQLEFFRELDVQIGEMSDQIEQVCRQDEASRRLMTIPGLGAQTATAIVAAYGNAGHYRDARGFAASIGLVPRQHSTGGKPTLLGISKRGDQYIRTLLIHGARAVITHLGDKQDKRSRWLRHLVERRGVNRAAVALANKNARIAWALLQRGESYQAA

SEQ ID NO: 403873 - protein, 290 aa, unidentified
MITLGLDPHPASHTVMALDESGVSQGHLTVPNTEEGLMRLHEFSARFELRRWAVEGAGNHFISMFVGQLLSRGDRVFSISPSLTSQYRARRGRKKNDIIDAGNVARALLANPQLPELNVVEQQRTLQELTRTQRRLSEQLKATRGAQQELASESPVREVLQRLIETLASEVKKLEQRIREMVRKIMPSLLEIPGVGPVVAGVLLAETAGPKRFATADHFASYCGAAPVERGSGQNSRVQVNPGGNRRLNWALHIVAMVRLRTDGGRSRAFLDNVKSSGKTQRAALRVLKT

SEQ ID NO: 403874 - protein, 415 aa, unidentified
MALKIVYKICCGIDVHKTFVVACIASTNDKGVTSYESHRFSTYTSGLKTLLQWLLDRNCKDVCMESTGKYWIPVYNILESDCSIVLAHPKYVKAIRGKKTDKKDAKWIADLFKHDLVAGSFMPPADIRQLRDLMRYRFKLTCFKSSEKNRLQNCLTVSNIQLGNVVSDTFGKSAQAILDKLLENPADTSFDLEPLVYKSLKKKLPELRDAIDGYITPEQAGKLKVIKAHYENLESRKAELEELILALAAPYQQELTILQTAPGISSPFTAIGIISEIGTNMEAFPSAKHLCSWAGLTPTNNESAGKKKSVRVSKAGCYIKPLLVQCANAVVKSNKHPEIRNRYLRIKKRRGHKKAIIAIARMLLTALYHILKNGENYNAELYRKSDLPPVDREITVEQALMIARNQGYKIKSATA

SEQ ID NO: 403875 - protein, 337 aa, unidentified
MEQRYVGIDLHRRRSVIYTMDGEGQKLSCIRIANDPAALMAAVAPAGDDAHVVVEATYGWYWAVDLLRDNGFDVHLAHPSGNDWGKRRVKNDERDARDLADLLRLGRLAEAWIAPPELRELRELVRYRAKLVNLRSGLKTQVHAVMAKEGVLPNVVDMFGPGGGRQLDALALAEPYTLRIESLRDLVPVYDREIAMLERKIHQRLRHDQGYEAIQALSGVGRTIAAIFCAEIGDVSRFRSAEALCSWAGLTPRHRESDTKVVRGGITKMGSRLVRWAALEAVARYHGGSWLHADFCRIAERRGKKKARVAVARKLLTLVYYGLRDGEIRCLRDRRAA

SEQ ID NO: 403876 - protein, 353 aa, unidentified
MPKSSESRPERTYAGLDVSLKQTAICIVDEAGKIVWERMAATDPEVIANHLFRHAPGLERVGLESGATSAWLWRELRGRGLPAVCLDSRHAHRVLSMKRNKNDRNDGRGLADLVRMGWYREARVRSLDAQLVRSMLLSRQQLLEARRAIENQMRGALKALGAMTGSTKGRRFMPRVIQLRAEQDWLGPVLDPLLAAHAAIAKQLKAVSNSILAAAREDADVRRMMTVPGIGAMTALAYKAAIDDPKRFTSSVKVGPYLGLTPRQHQSGESEWIGGIGMTNDPLLRSYLYEAAGVLMTRVRRNCPLKDWALRLAKRIGWKRASIAVARKLAVILHAIWRDGTVFEWKTAEPLAA

SEQ ID NO: 403877 - protein, 339 aa, unidentified
MELYAGMDLHSSNTYVGILDGGFKRVFKKRVANDLGLILETFEPFRKDLQGIVVESTYNWYWLVDGLMDAGYRCVHLANPSAIQQYEGLKYSDDKHDAFWLAHLLALGILPEGYIYPKEDRPVRDLLRKRSFMVRQRTEHIHSLQSMIERHTARRLNGNEVKKLQSENLEEIFEHEYSTLAADADSCAIRFLTERIKQIEKAVLEKVKLKEPFKRLLTVPGIGEILALTIMLEVGDIGRFPKVGHFTSYAWCAPSGRISNGKKKGEGHRKNGNHYLGWAFVEACNFARRFYPKFRSYHQRKASKSHPFVATKAICNKLARICYYVMRDGVCFREEAIFC

SEQ ID NO: 403878 - protein, 324 aa, unidentified
MIDAILGIDVSKNTLDVSISSCTKVRTKSFANSSDGWHHLLDWLIAQKMQRVHACLESTGRYSLGIACSLYEAGHVVSIINPAQIRDFVRTKLGRNKTDGIDASRIREYCELFKPSPWAPPSEAHRRLGELQTIRAGIVAGLTEWKNRKNSGIVDTEAQALADATILHFTSQLGAVDKAIALTIDNDSDLRSKRDLLLSINGVGDTLAGVVLAELPGPDVLRSSGEVVAYAGLNPRQHQSGTSVDRATRISKIGNAVLRAALYMPALSAMRYNPAIVALVTRLKSRGRLKPKQIVVAAMRKLLVLCFGVLKTGKPFDPAIAMGC

SEQ ID NO: 403879 - protein, 391 aa, unidentified
MFLLGIDIAKLNHVASCIDSSTNEVIFSNFKFKNDFKGFSALLNKIKSFDAKNLIIGLESTSHYGENLINFLFRHDFKVALINPLQTSHLRKANIRDAKNDNLDSLNIAKSLLFTKLNFVSEKNIECFSLKKLTRFRSNLIKQRSKAKIQLTSLLDLLFPELQYLFKSKIHSKAIYSLLKKYPSTEEIVALKDDEISNLLYASSKGHFKKEKSIELKSLAKTTVGIKDTSISLHLIQLIELIELYTKQIKDIEIKITDTVNKLDTTLLSVPGISIIACAIILGETNNFENFSSSKKLLAFAGLDPKIRQSGNFNASSCRMSKKGSPYLRYALIFTAWNIVRHSEKFNKYYSLKRSQGKSHYNALGHVAHKLVRILFTLIKKNISYQEEKLE

SEQ ID NO: 403880 - protein, 338 aa, unidentified
MTIVNWARLFVGLDYHQDFVQVCVLDEAGKIVSNRRVENDWRKIIAAVPTGAAVQAALEACCGAADLADELLQAGWSVSLAHPGFVARMKQNPDKTDYSDARLLADLMRVGYLPKVWLAPAELRELRRLVRFRQQKVNERRNVKLRIRAILRDHRIKDLDGNPWTRKWLKCLAALAHIGPDTEWILQQHLTHLSRLNKEIRQVDRRLEERVADDAVVQKLRQQKGIGLVTSATMRAEIGRFDRFQTGKQLARFCGLSPRNCSSGNKQADAGLIKAGNPQLRAVIVEAVHRIMHHHPRWMKLAQQLKSRGKHNCLVVAAIANRYVRWLHHRMQPEALAA

SEQ ID NO: 403881 - protein, 341 aa, unidentified
MDISVLGIDLGKNSCSVVGLDATGKVVVRRRMRRETIVTYAAGLAPCIVAMEACCGAHHMGRALAAQGHTVRLMSPEYVRPYVKAQKNDDRDAEAIAEAATRPTMRFVELKTEEQLDMQTLHRIRDQLVGERTSLMNQIRSLLLERGHIVPQGRARLAARIGEMLEADEPVLGVRIHRLVADMRTRWAALDERIADLDAEFADAARTDERMRRLLTIPGIGALNATALVAAVGDARTFGRGRDLAAWLGLVPRQATTGGKPRLLGITKRGSRYLRKNLIQGARASLPTMSRSDTRLGAWLRGLLSRSHPNTVVVALAAKMARIVWALLRHERTYEIAARAA

SEQ ID NO: 403882 - protein, 330 aa, unidentified
MNFKWFVGVDISKKTLDATLFDKMALKRSPHIVVSNNLKGFKELLKWLNKQCLSCDELLICMEHTGVYGNDLAIFLSQKSIAYSMVSPLHIKRSLGLTRGKNDKVDSFLISRFCYLHREEIKISKLPLVTIQKLRGLINERERLVKMQTTEKQVLKELNVQNSETSIERVKTRLSYFVSDIDSIENEIKQIISADTEIRKNYILIRSVIGIGLVNAVLFIVYSNNFQGFTDARKYACYSGVAPFENSSGTSIRGKTKVSHLANKRIKANLSNGARSAVQNDPELRLYYNKKAQEGKKHGVIMNAVKFKLITRVFAVVNRGTPFVKMRKAG

SEQ ID NO: 403883 - protein, 410 aa, unidentified
MEVMFERVAGLDVGKDSVTVCVRTPGPRGGRRSETRTFKTMFGSLRVMRDWLMECGVTIAAMESTSTYWKPPFYCLEEVMVVWLLNAAHMKAVPGRKSDVRDSEWIAQLLEHGLLAPSFVPPPQIRRLRMLTRYRMQLMGDRTRETTRLELMLEDASIKLSTVASSLNTVSARAMLCALINGESDPLKLAELARGKMRRKIPDLAQALTGHFDAHHAQLAKSILHRLQLVEQALAELEAVLAEAFRPWAHQIELLQTIPGVGETVAQVIVAETGADMSRFPTAGHLAAWAGLAPAMHESAGRHTPAGKRHGNKWLTAMLVEAAGTAGRMQGKNYLAAQHARLTKRRGMGRAQVAVAHSMLVSAYWMLKRDEPYHDLGADWHSRRNNEAHTKRLIAQLEHLGHTVILDPAA

SEQ ID NO: 403884 - protein, 351 aa, unidentified
MSEKPISTVAVIGIDIGKNSFHVVGLDQRGAIVLRQKWSRGQVEARLANMSPCLIGMEACVGAHHLSRKLKALGHDARLMPAKYVRPYSKGQKNDFRDAEAIAEAVQRPTMKFVATKTAEQLDLQALHRVRERLVSQRTGVVNQIRAFLLERGVAVRQGLRFLRAELPRLLATPPDVLSPRMVRVIESLAEDWHRLDERIDHLSDEITALARQDAGCERLVSVPGIGPIISSAMVAAIGNGDAFSKGRDFAAWLGLVPKQISTGDRTILGKISKRGNRYLRVLFVQAAWVVLIKPQSWERHGLKPWIEAAKKRLHRNVLAIALANKLARIAWSVLARGRSFEARPAMASAA

SEQ ID NO: 403885 - protein, 367 aa, unidentified
MSSVALSSGLIHLGLDVSKNRIAVGILRSGEVSPDAEMIFNDEPSVRRLIGRFPDPCLLRACYEAGPTGFGLHRLLGSMRVACDVVAPALIPRVPGDRVKTDRRDCRRLARLHRAGELVAIRVPTEAEEAVRDLCRTRADLVSDRTRARHRLSKFLLRHNRIWRDGEAWTLAHERWLLGQRFDEPALAATYGHYRAGLTARDAELAAVEADLARWFDHGPFTDAVARLSAYRGVAHLGALTLASEVGDWRRFPAAPVFMGFTGLVPSEYSSGQSVHRGRITKAGNAHLRTQLIESAWAYQHGPNLGSVLRRRQQRAGPATAARSWAAQQRLCARFRRLSARKTSRNVVTVAVARELAGFLWAEMTTD

SEQ ID NO: 403886 - protein, 378 aa, unidentified
MPDVSSVAPEVVRKFVVFDVHKNSLVAGVLPPSGGAPEVERVENTERAVRRFVKRQGGPDGLAVAYEAGPGGFALYRLLSELGVACDIIAPSLVPVRAGDRVKTDRRDAKKLVRLYRAGELVFVRPPSVEQEGLRDLVRCRDDVGRARTAARHRVAKQLLRHGRVFREGKKSWTLRHRAWVRRQRLDDGLSQRALEHALAHLDSLDAQLAAIDAELEQIAGQAPWCDPVRWLTAFRGIGIRTALGLLAEIGDWKRFGHPRELMSYLGLTPSEYSSGDQQHRGHITKCGNEHARRLLIEAAWHYRHRPRRARTGPDVPPDVSARAWRAQVRLHHRHRTLTGHGKRSTVATVAVARELAGFLWAAMTHQPLRDRQEVAAA

SEQ ID NO: 403887 - protein, 338 aa, unidentified
MTFYCGIDLHSTNNYLGIYDQDDRAVFSKRLPNELGVVLQSLEPYKAELAGIAVESTYNWYWLVDGLMDQGYRVLLANPAANEQYNGLKYTDDRYDSRWLARMLGLGILKTGYIYPKEERPVRDLLRKRMRLVQHRTAHIVSVLNTITRNTGVSLSWSKIEAMTDGQVSKLLGDGLIEMAPRASLEVIKSLDQQISKIEKTAKAQARLRSEYKLLKTVWGVGTILGLTIMYETGEISRFSQVGDYSSYARCVGSVRISNGKKKGENNTKNGNRYLSWAFVEAANFASRFYPQAHKFIQRKRAKGNHTLAVKALGHKLARASYYVMRDQVEFDPKRLFG

SEQ ID NO: 403888 - protein, 413 aa, unidentified
MADNVKNSSVKVMIAIDIAKTSHDAVILWPSGRTKTFKLPNTLVGYQNLLHAAEAPAEDILVAFEPTADFHRNIAYWLRSQGALCHMVSSLACARAREMLFKSWDKNDKKDARVIMYLMQQGMMQPFYDPLVNEMLDIQELANTYYQISLARSRCQHSLFNHYLTLFFPEMERFFNSTRAVWFCRFLLKFPTPLSITRYKKTTFVQRAWEVVGRKVAKQRFLEEMYEVAEQSIALPVPLNSPAIATFKLQIRRYLKLTEQRQQIEEAADQLISHRDDYQRLRTLPGIGPIIALVIIAESGDLTRFCHYRQYLSFCGFNLSASQSGKQQGHYRLSKRGNARLRYAFWLAATVAIRQRENTFRQKYERYIRATPDDPDIKRKARVAVAVKLARVAHALIKTGSDYRGYYEFGCET

SEQ ID NO: 403889 - protein, 342 aa, unidentified
MNKVTIIGIDLAKRVFHAHGAAADGSVVFRKRLTRAQVLPFLAGRPRCVVAMEACASAHEWGRAIQELGHDVRLIPPTYVKPYVKRQKNDMADAEAIAEAGSRPTMRFVAVKTEEQQARSMVFRTRDLLVRQRTQLINALRGHLAEHGVVAPQGPAHLKTLAAAMDGAGRSLPQLVRDVGGIYLEQIEQLNRRIADLEKVLRREAQFGTETRRLQTMPGIGPITAMAVEAFAPPMATFKRGRDFAAWLGLVPVQHSTGGKQRLGRTSKMGQRDIRRLLIIGAMAVIQWASRREAEAGSWLHRMMERKPLMLVAVALANKMARSIWAMLTKKEDYRNPGNAAA

SEQ ID NO: 403890 - protein, 419 aa, unidentified
MSKIIERCAGIDIGKRFLLCCVLTGAANEEPESETRKVDTTVPELERLREWLHEENVSHVVMESTGSYWIPVFNLLEGHFTVVLVNPEEVKNRKGHKTDRKDAGHLADLLRHNHVRSSYIPPEPVRQLRDLTRRRIQLTQDASRERNRVQKLLEQANVKIASVLSDVFGVSGHNMLLALLAGQTTSKEIAQLARGTAKRKIPELINALEGNRMSDHLRFIIRSCLRHLACLEEELEELDTEIIRRMQAPPFQTAFALLQTVPGIGQLSAATILAETGADLAAFPTAEQMASWAGLCPGSRESAGIQKGRHTTHGNPYLRMTLVQCAWAAARKQDSVFRKRFQQLAPRRGEKRAIMAVAHSMLIILYCMLTTGAPFRAAEDAPKQRRRLRRAHHHLRCLRRLGLAVPIPPNLESAEALGG

SEQ ID NO: 403891 - protein, 338 aa, unidentified
MKLYGAIDLHSNNNVTVLIDEKDKVVYQKRLANDLPLVIEQLSPYASSMEGIVVESTYNWYWLVDGLMEKGHRVHLANTAAIQQYEGLKYTDDDSDARWLAHLFRLGVLPEGYIYPKEERAVRDLLRKRSQLVHHKTAHLLSIQNLYSRNTGASLSANRIKQLTSETVDARFSASDLALAIKANLSVMRSLETEITVLERVVKERIKLKPAYRYLLTVSGIGHILAFTIMLETGEIRRFPQVGNFVSYCRCVKSEKLSNGKRKGSGNTKNGNKYLSWAFVEAANFAIRYEPLVARFYQRKKAKRHRVVALKAVANKLARACYYVMRDEVPFDVARAFA

SEQ ID NO: 403892 - protein, 403 aa, unidentified
MAEVFAGLDWASRTHAVCVIDGRGAVCKQWEVAHDADGLRELLRSLRALHVTLIAIERPSGLLVDALVETGFEVVPIHPNAVKASRPRYRSHGGKSDASDAYLLADLLRTDGHRFKPLAAQSDEIRALRALVRGRDDLVATRVQLANQLRALLQSYWAGAAEVFADVDSPIALAFIQRYPTPEAASRLGPKRMAAFCAQHAYCGRRSADELLARLHQAPSITVGESEMDAKGELASSLARTLATLVDQIRLLSSRIEHHVAASDDGRILMSFPRAGRICAAQILAELGSVRERFDSDEHLAAEAGVAPVTYASGKHRAVVFRWACNHRLRRALTTLADNSRHASDWAAAIYANARGRGCDHPHAIRILSRAWLRVIWRAWIERKPYDPVAHGGLQTMLKTNRG

SEQ ID NO: 403893 - protein, 351 aa, unidentified
MHYIGVDYHKKYSYVVVKDRDGRVERRGTVNNTKEEFRQLLEPYQPGKAVLEATRNWGLIYDWLEEILDDVALVHPLKVRAIAEARIKTDKISADILCDLLRSNLLPEAYVPSKETREAKDILRQRMFFVRVQTMVKNRIHDILDRHPELLSQAPAVSDLFGASGMAWLKRVVLPGRDNQLLTPQLELLEVLKQKISESNGIVKDLARRDKRVKLLRSIPGLGPFFSVLVAKEIDDISRFRGDKKLCAYAGLVPSTYASGGKVFHGRITKTGNKWLRWTFIEAVQPAIRCDADLFAYHERIKMKKGANAAKVATARRLLTIAYRVLSQGRFYERRNRKARRDLAPAALASP

SEQ ID NO: 403894 - protein, 349 aa, unidentified
MRKVYAGIDLGCKTCAGAVRDSKGKLLDTCSFPTSAENLIDFVSNLKGEVRVLVEECELAGWVYRTLLPHVHSVEVSDPRHNAWIAKGKRKSDPVDAAKLAELLRGGFYRAVHHPEEEEMATFKIAVQHYDQMTKTTTRLQNQIRARFRQQGMVFEGKGIYGARGRQKAISMVESEAIAEILLQDFRLLDGAQEERARARALVTKLSRSFPVIKRLERIPGVATISASRFVAYVQNPHRFNTKGLVNFSQLAVTKRESGESLIGGEHLSKEGNGSMKALSRTVFNGVMRTRRMNGIKDYYLRSLRRTKNETHARLNTQRKILAVMNAVWRDETEYSDDLVTGNGAKRTL

SEQ ID NO: 403895 - protein, 346 aa, unidentified
MNTAAIASIGIDLGKTTFHLVALDCHAGVIVRKKFSRSQLLAYTANLPWSLIGMEACSGAHFLAAKLRALGHQVKLIPAQFVKPYVKSNKNDFVDAEAIAEAVTRHNMRFVPIKTDDQLDLQALHRVRDRLVRRRTALINQIRGFLLERGLVFAQRPANLRRQLPLVLEDADSNLTPRFRRLLADLWQEWKQVQLDIEALTEEMERISESDAACQRLREIPGVGPIVATAIVAAIGNGAAFGNGREFAAWLGLVPRQYSTGGRTQLFSISKRGNAYLRRMLIHGARAVLWRVKYDLGALREWTTQLQSRAAKNVVVVALANKLARIAWAVLSSGERYRLKPAAAAA

SEQ ID NO: 403896 - protein, 323 aa, unidentified
MSSKATKKRRSFIGIDVSKQLLEVGVYQSDYHFQCPNDPKKYSTLITELISLRPARIVLEATGGLERPLLQALQTIGLPVVVINPRQVRNFAKALGLLAKTDRLDARVLAHFAAAVQPPVSPIKTQQETELDALMGRRNQLTEMLTAEKNRRGSAATKTTRHDIEEHIEWLEERLKELDEKLKQQLECSAVWQRKDQILQIVKGIGFVTSMSLLADCPELGQLNRHQMAKLAGVAPLNRDSGKQRGTRHIYGGRAQVRCKLYMATLAAIRSNPVIKSFYKRLVDKGKLKKVAIIACMRKLLTIINVMVRDNKLWNVKAQPVAA

SEQ ID NO: 403897 - protein, 362 aa, unidentified
MSDGSTEHQRMTAGLDLGDKYTYLCLIDTENGEVIEEGRLRTTPQALRRRFDSEQEQLKIAIEVGTHSPWVSRLLKECGHEVLVANARKIRLIYGSGRKSDKLDAQKLARLARLDPELLYPIEHRGEDSQAHLALIHSREALVRSRTQLINHVRGTVKSFGARLPKCSAQSFHKKVTESLPAQLKETLQPVVATIASLTEKIRDYDRRIKELTEERYPETELLQQVQGIGALTSLTFVLTLEDPQRFRQSRSVGAYLGLVPDNDQSGDNDPQRRISDEGDEMLRRLLVSSAHHVLGPFAPDSDLKRHGEKIAQRGGKNAKKRAVVAVARKLAVLLHHLWSSGEVYEPLYNARGSGTQGEEVA

SEQ ID NO: 403898 - protein, 351 aa, unidentified
MPMLADLVDAVIGVDTHTDTHTAAAVDRLGAHLATIEVSADAAGYAQLTGWASKHAPGPRIAWAVEGCGSHGAGLARALAAAGYLVIEAGRPKKARRRGGKSDELDAIRAARQALAIPDPAQPRTGDTREALRILLATREHATKTRTATVNTLKALILTAPEDLRAQFRGRPTAAQARAALALRPRPGQPVSEQHLREALRQLARQITDLDAALKTSLKNLRSLVRAWMPALLAEPGIGPVSAAQLLVTWSHPGRFRTEAAFAALTATAPIPASSGRTARHRLNPYGDRNANRALHTIAISRLRYHQPTIAYAARRTTEGKTTREIRRCIKRYLARNLYRLMEHQPALDKP

SEQ ID NO: 403899 - protein, 336 aa, unidentified
MVQIYGIDLGMSSFDVSFLSESGSVRHLSGVKNTVHGISKFLLSLPSSAVLCAEHTGVYGDLLLRLCTLNRTCLCFVPGYQIKHSLGLQRGKSDPLDACRIREYAERFYDLLRPCFYPGEEMSELQELYRTRSLLVDSRKRLDTLNIGDNCKSSVSLAADHARRAVLAELNTQISGLDHEIEALIQNSSEFSRNYQILTSIVGVGPVTSCELIIKTENFRKLDTAKKCAAYAGIAPYPKESGKMKCGHKISPMGDKQLKTLLFLCARSAKEHNKEIRLYFLKKHKVEKKHFFVAMNNIANKLLRLIYSLIHKQQTYDRDYIQRDPRCVVISEVSKC

SEQ ID NO: 403900 - protein, 338 aa, unidentified
MFVAGLDVHLRYVTVAVLDSNGTVRLDVEVPTQTPEVLVTHLARFRPLHVVVETCPFWPWLYDLLVPRGITFHLAHAKALRAIATAPQKTDRVDARLLARMYLSGVLPEAYPRSADQRELLRLLRHRTTLVRFRTRLAGRIHSQLHQQRVQLPREQLLRQRTRLLVAQEWAPVLTPEQLAIVTQHFALIDALTPQLQALERRIDHVAQAHPIAPLLATVPGIGPYRSLLLATELAPLARFPTSAHVVSYAGLAPMTRSSGGHTWHGGIPRGANRWVRGALVSAIPSHVRCAPASPVTTAYVQWKARRGWRVARVAAARKLVRILYTMWRRQEPWRAAA

SEQ ID NO: 403901 - protein, 310 aa, unidentified
MDSITVGIDVSKDRLDIAVRPSGEVFAIERNPAGLEQLTLRLGALSPNLVALEASGGFETVVAAALAAARLPVVVVNPAQIRAFAKAIGQRAKTDPIDAAVIAHFAEATRPEPRPMPDEATRLLADLVARRRQILEMMVAERQREKRVTVPHLRKSIMRLLKVLERELTSVDTDINDAVRGSPAWREKEDLLASVPGVGPTIARTLIAELPELGQLSRRQVAALAGLAPFTRQSGQWRGKSFIGGGRTSVRTALFMGAMVAKKYNPVLRTFFNRLVAAGKPKMIALIAVARKLLTMLNAILRDRRPWQTA

SEQ ID NO: 403902 - protein, 310 aa, unidentified
MDCYIGIDVSKATLDIASLPDGENWTVTNDDPGLADLTPRLVALAPTLVVLEATGGFELLAAITLAKVGLPVAVVNPRQVRDFAKALGRLAKTDALDAGILADFAQRIRPEPRPLPDEAAQLLESLLTRRRQIVDMLTAEKNRLGFARGPVKRDIRQHIRWLEKRLADVDGDLQDAVRASPLYQAKADLLRSVPGVGQVTTLTLLATLPELGHLSRHQIAALVGVAPMNRDSGTMRGKRMVWGGRAPVRAVLYMATLVGLKHNPVLRRFYERLRAAGKPFKVAATACMRKLLTILNAMLQQHRRWDPQHA

SEQ ID NO: 403903 - protein, 409 aa, unidentified
MRIIGLDIHRAFAEAVAWDDGKLKRLGRVDMRRPLLEAFAKKLSKDDVVVVEATGNASSVAAVIAPHVKKVVIANPKQVRIIAHAKIKTDTIDASVLAQLYASGFLPEVWIPDEPTQALRRQVTRRNQIVRQRSRLKNIIQSILHSHLIPSCPHADLCGASGRAWLFHQVLPEDERLAVERHLREFDRLGEDLKVIERDLARSALGNEGVKRLMTIPGVDMVVALAIVAAIGDVGRFEQPQKLVSYLGLNPSVRQSGPGPAYHGRITKQGRGHARGMLVEAAWAAARAPGPLRAFFLRVRARRGQHVAAVATARKLAVIIWHLLRKGESYAWARPALHAKKLRDLELKAGYKAERGQRGAAHTYNVKSHRDQERRWVEQAETAYARFVAGWNPRGPKRARTGAANEGRQ

SEQ ID NO: 403904 - protein, 410 aa, unidentified
MIIIGDDWAEGHHDIEMMSPHGEVLTRFRVTEDVDGLEELLSEVHKYTTDDEVVVGIERDNGPWVTALRGYGFTVFAINPVQSARCRTRFSLAGAKSDIGDAHVLADMVRTDRQHLRQVAEDTLEAEGLKILTRTHKSLIWEHNRHLNRLRYNLIQYFPAALEAFPDLSSPESVELLTKAPTPSRAADLTITQIKAALRRAHRRSIDERAPKIRATLHAPGKLGLLGSLEAGHAAATVATLAVLATLTTQIEALKEQVTTAFADHPHAAIITSLPGMGPVLGARLLTENDDAADRYRSGKARRNFAGTSPITKASGKKTVVSRRYVHNDRLLDALTRQAFTAIRVSPGARAYYDRQRRRGVEHNAALRHVANRFVGILHGCLKSGVLYDESVAWGAPARVDAMTERVDAA

SEQ ID NO: 403905 - protein, 437 aa, unidentified
MTDTEETEHSAELVERVAAIDIAKASGMVCMRLPHPGRAGRRTQEVWNVPASTIGILELGDRLVCQGVTRVVMEATGAYWRPFFFLLEARGLECWLVNAREVKNVPGRPKTDKLDAVWLAKLTERGMLRPSFVPPKPVRQLRDLTRMRAVLIRERSRHKQRVEKILEDAHIKLSSVATDIFGVSGRSMIEALIAGERNPRVLADMARGCMVVKKAALTEALTGQFEDHHAFLCRTLLDTIDHLSGQIDAMTSRITEAVEELPCPGPRGGSQPGPGPDLVAKLVTIPGIGERTAQMLLAELGPDMTVFPTADHLVSWAKFAPRTVQSGGKNTSAPTGKGNPWIKGAIGEAALSASRSNTFLGARYKRIVKRRGRKRALVAVGHSLLVIIWHLLNDPETPYTDLGSAHHQHLIDPTRRTRDLVRQLKALGHDVTLTPAA

SEQ ID NO: 403906 - protein, 345 aa, unidentified
MEHFAGLDVSVKETAICVVDELGKGCREVKVTSHPEDLLGVLKDSAFRFKRIGLEAGPLSQWLFDGLAKADLPVVCIETRHTKAFLKAQVNKTDKSDARGMAQMMRVNLFRPVHVKTLASQQRRALLTGRKLLQEKAIAIENDIRGLVRNFGLKVGAVGVIKFENRIRELVDGMPDLADITDALLIARRKIREQYAKLHRKLLAIVRYDKVCARLMTIPGVGPVVSLAFSATIDIPARFTNSKAVGPALGLTPILNQSGESSRVGRISRCGDNMMRTLLYEAAQVMLARTTRWSWLKAWAMNVAGRRGLQKAIVALARRLAVIMHRIWSDGTEFRWTREKALPTT

SEQ ID NO: 403907 - protein, 453 aa, unidentified
MTKKGKNTFVDEQKEASFVRICHPNAAGIDVGSNKHYVAVPADRDKESVKSFAGFTQDLHQMAKWLLACKIDTVAMEATGSYWITLYCLLEEYGIEVYLVNPTQCKRMPGRKTDVYDCQWLQQLHSYGLLANSFHPTKQIRQLRSYMRQRDSLIKDAATQIHRMQKCLTQMNIKLHHVISELTGKSGMAILQAILSGERNAEFLANLCDGHIKASRENIVKSLEASYDEDQLVILAQCYRIYENYQNEIKTLDEIIKSQLDNFQTKANKEDKPKNSKPRNKQPKNAFGFDIEGSLYSITGVDVTNITGIRGQTALTILSETGTDMSKWPTAKHFVSWLGLSPNNKISGDKVISRKSRRIKSKASMAFRLAAQGVSQTKTALGAFYRRLRAKTGPGIANVATARKIAAMYYKMLKEGVSYVEQGEEKYLNLFRDKQIKYLSKKASQLGFALVQA

SEQ ID NO: 403908 - protein, 347 aa, unidentified
MSITMIGLDTAKSVFQVHGVNETGKVEIRRKLRRSELIPFFEKQEACTVVMEACGAAHHWARVLSSLGHEVKLIAPEAVRPFVKKGKKNDPADAAALCEAASRPAMMFVPVKTIEQQGILALHSARSLLVKQQTMLANAMRGLATEFGLTVPQGIGRLEELLALVDTDKTFPEKARQVFTRLFGQCCALAASISAFEEEIVAHARQDQTARRLATIPGVGPITASLIAATVVDIGLFKSARHFAAWLGLVPRQYSTGGKTRLGRITKTGNRDIRRLLVLGATSMVYRAPQWNSVVGMWTRGVLERRPVRLVTVALANKMARIAWALMTRKEVYRAKGRVAAATEAAV

SEQ ID NO: 403909 - protein, 341 aa, unidentified
MRKFIRIGVDLAKNVFQLHGIEREDGSPFQRKLTRVKFREFFSRLTPCRVGMEACGSAHYWARVLGAMGHEVVLIAPAYTKPYVKRGKNDAADAAAICEAMSRPEMRFVPVKSADQQAVLMLHKTRDLLVKQRTMAVNALRGHLHEFGLIAAKGIHRVQELVALALADEGLPEEAKEAVTLLAGQSEQLDMKIDALEKQIAKASGKNPMSRLLKEIPAIGPLISSAMAASRPDPNVFKSGSDFAASLGLTPSQHSSGGKERLGSITKKGNRYLRKMLVVGCTSVLRVAHKYKGALAEWIIAIKARKPERVAAVALANKLARICWAVLSTGESFRQELYTRA

SEQ ID NO: 403910 - protein, 346 aa, unidentified
MEHYAGIDVSWESASICVVDASGRIVREAKVASEPEVLIRWFGGLGIAVARIGLEAGPLSQWLYACMRDVGLPVELLETRHVRAAFKAMPVKTDRKDARGIAQLMRLGWFRPVHCKSLPAQEMRALLAARKLVQTKNHDVEMSLRGMLRGFGLKVGPTTPRTFPSRIRELVVGHATLSTIAEALLAARGALFEQWQKLEKRLRSLARQDRRVKLLMTAPGVGPIVGLTYASAIDDPGRFRSSKAVGAHFGLTPKKYQSGETDVTGRISKIGDSGVRTALYEAANVILTQPVKGSTLKSWGMRLAARAGMRKAKVALARKLAVVLHRMLASGTTFLADKAAPAAAHQ

SEQ ID NO: 403911 - protein, 431 aa, unidentified
MRSMPNVVRNCQAVPDLECGVVVGIDVSKGKMSFGGFRPTGRTEVSVVEQNAAGFRSLERFVDDLVAEGHQLWIAYEPTGPYSTCLREWLVASGRRLVQVNPYHVKRTKEVRDNSPKKDDWKDPSVIADLVWQGCYQEVLSLDGAYADLRAASAEWASLGKKRTAVRNEFQALLQVWFPELCCIFKDALCKSVRGIVRRYASVEALAGSRRSSLETTLRKASLGRTLNRVEAILLAAKSSVAPASGQEARHSAMLGLLDILDLVESRRERLTAEMVEFLKILPEAQSLLTAPGVGTITVAGLLGECGNIGAYRRYEQLEKFVGLNLYEVSSGKHKGRRRISKRGRSRARYLLCSIALLQTGSGGLFERYAKELKAKGKKTNEIRVAVARKLLRLLYAVARDQREFDPRQFFTGARAEDGLVIQQGTQAQAA

SEQ ID NO: 403912 - protein, 358 aa, unidentified
MNAIHYIGLDVHKKSISYCIKTAAGQIVKEGTVASERSVLRSWAASIQQPWHGAMEATIFSAWIYDTLKPYAERLEMGHPAKMKAITAGKKKSDTLDARTIADLVRCDLLPSCYVFSPDLRDLRRLMRYRHMMVQQSVRMHNKTAGLLMESGVPFHKTKLHGKKYFSNLVKSLEEVPESVKDLLCMSRGAKDMFEGVQQQLLRRLLADAGLQQRVERLSSIDGVGEITALTWALEVGDPHRFASIADAVSYCGLTAALHSSAGKQQRGPISKQRNAWLQTALIEAAKLAPRWNPQLAQLYGQQLKRGHANRATLQVARKLVAYLLAVDKSGQPFQVRTPPPKSIPTRKRARRHLASAA

SEQ ID NO: 403913 - protein, 381 aa, unidentified
MKTIKQTTPISNKQIEVKAEVIKLGIDIHKNEYVVVQQTDGQAPKPPQRFKPEAFLQWVANLLERTKRIVSCYEAGCFGYVLHRNLEAIGVENLVVRPRNWDEYGSKVKTDARDARELCSCLDRYLAGNVNALSVVRVPTEEQERSRSLSRQRETLAKEQKRMQNVGISNARYYGIELPMSWWKSCNFCKLEAELPQWLLAILRPIQSVLAVINAQLREVTAREERKANRKLPVGLGALTASVLDEEFRDYSRFTNRREVASFTGLCPGEHSSGTSRRQTSINKHGNPRIRHNLIEACWRLLQFQKDYKPILYWKERMCKEPFGASKKKKMIVAIARRFAIDWWRINTGQIQPEEVGLKVDYPSAYATKALREGRTSKIYA

SEQ ID NO: 403914 - protein, 316 aa, unidentified
MALQPGERKRPYEREVRNDAGGIARLQKWVQERGCELSQLTVVMEATGVYHERVAQAFHDAGCTVIVANPKRVRDYATGLGLLHKTDKVDARALARYGKEHGSELVSWSPPPEEVRILRSLYDRLSAVQEDLQREMNRRDQAVISEEPELVIDSLNSSITHLRKECERLKRAIEDHFDQHPGLKSQRELLQSIPSIGPVSGDLLLCVLLSHRFHSARQAAAFCGLIPKAHQSGSSVRKASRLTKQGDGRLRAKLYMAAVVATRHNPELRQVYRALLAAGKPKLCALGALMRRLVHIAFGVLKYETPYNPQLVLQSA

SEQ ID NO: 403915 - protein, 348 aa, unidentified
MDAAVITIGIDPHKASLTAVALDPTGRQLSTRRVTINAGAYKTLMNWAVRWPQRRFAVEGATGLGRGIAQLLAANGEDVVDVPATLSARARLLDTGGTRKTDLADAASVAHAAMRHKRLRPVVAEDHTTQLRLLAERRDDLAVERVRVLNRLHVLLRDLIPGGAPADLTAAKATVLMRGLRPLTATDACRRDLARDLLNDVRRLDRQLSANEAQTRQALAATRSTLTDIHGVGHIIAGTILGHVGDISRFPTADHLASYTGTSPLEASSGDRRRHRLNTTGNRRLNAAVHTIAVCQARDPGPGRVYYLRKIAEGKTPAEARRALKRRLTNILYRHILKDQQRRSTGTT

SEQ ID NO: 403916 - protein, 324 aa, unidentified
MVEVLSLPIVLWSEAMSIHVGIDTGKSMLDVGFYPDKRCERFANTAEGHRALLLALAPLDVPHIAIEATGGYERGIVDALAQAGYCVTRLASHRATAFARAMGSFAKSDALDAQVLARMAAHITPQPYEVPAAERAELAELVRCRLQMVSQRDDNKRRLLQTRLATAQRALRGMIEAASMQIRELDRCIATATKAADPASRLREVPGIGPVAEATLIAYLPELGRLTRQQIAALVGVAPYIDQSGCRNGARRVRAGRWIVRRAMYMAAWAAIRTKGSALGERYRALRARGKVAKVALVACMRCLITAINAMVRDQTGWRQPAAA

SEQ ID NO: 403917 - protein, 367 aa, unidentified
MSVVQNSTERNTRMDIKYIGMDVHKEAIAIAVMNGDGKLVMESILETKAITILEFIQGVRGDLHVTFEEGTWAAWLYDLLKPHVRELVVCDPRKNALMKEGNKSDKIDARKLADLLRGGYLSSVYHGENGLRTLKELARSYLTISKDLTRVMNRVKALYRSWGILCGGQQVYAPRHRAEWLNKIGEAGVRRRAEFFYQQLDALRELRQAVRKDLLAESRKQSATKLLRQVPSIGPIRTALLIALMQTPHRFRTKRQLWTYSGLAIETRDSAQYRYVAGQLQRSKKPQQLRGLNQNHNHDMKAIFKSAATMASSREGAFHDFYQGLLTKGMKPAMARLTLARKIAAITLTVWKKGAHFDAKQLKLQAA

SEQ ID NO: 403918 - protein, 399 aa, unidentified
MIYVGIDVAKDKHDCHIMRDDGVVLVDNFTFENSKAGFELFDSLVKQSKKRKEEVKIGLEYTGHYSQNILEHLKTQKYAVLPLNPLKVNMFRKSKSLRNTKTDKSDARYIAEVTAETEIEKRRHVVSDVHVLRSLTRYRYRVQKTMQITKNRYRRVLQLVFPEFEKHFNVNYRSAIELIGRYSSPREVLSADKGRLIKNLDKMSYGRYGKRADELIQAASTSIGSSNAGDAYELKRLAKMISFLEDELSLLEEKLRAILDKLKSPILTIPGIGVNTGATILAEIGNVKNFSSDAKLLAFVGCEPTIYQSGKFVLTRTSMVKKGSKYLRNAIFQATKSAYVTDPVMRAYVDKKRASGKHFFVALSHGMKKMVRILYAVLSSGKPYAPPTTIKTTEPCLTP

SEQ ID NO: 403919 - protein, 408 aa, unidentified
MEVIHPRCAGLDVHKDTVVACVRIASGDTVQQEVETFATHTKGLLELVDWLTSYGCSHVAMESTGVYWKPVWHVLEGNFELILANAMHLRNVPGRKTDVNDATWIADLLAHGLIRASFVPPAPIQELRDLTRTRKQLVREVAQHTLRIQKTLEDANLKITGLISDVLGLSGRAILEAIAAGEEDPERLADLAHRRLKAKRETLVEALRGHVTEHHRFLLRLHLRQIDALRGAIGEVEARLGEVLRPFRAAAELLTTMPGVSHTVAQVIIAEIGVDMTRFPSAGHLVSWAGLCPRMDESAGKRRSTRTRQGAPWLKTVLVQAAWATTRTQNSYLRAQFLRLKSRRGPKKAILAVAATMLTATYHMLREGLEYEDLGADHFDRRDKNKLAKRLIRRLEDLGLEVQVRAAA

SEQ ID NO: 403920 - protein, 361 aa, unidentified
MRIIGCDLHARQQTLAMLETTTGEVVNLTLMHEGNEVREFYSQLPRPVLVGIEATGSMQWFLNLMEELGIECRVGHPATIRAAEPRKQKHDRRDAELILKLLVENRFPAIWLPTKELLDLRALVLHRHQWVRIRTRIQNALQAIALANGLRRGPGLWSYDGQAKIAFLPLPPHASCRRSALQAMYRKMEEEIENLTKQIAEQAEQRTRARRLMTHPGVGPVTALATDIFLGDPGRFVDGKALASYVGIIPREYSSGGNQRLGRITKQGSPLLRFLWCEAGTHAVRKDPELQRFYRRKLVHKGLGRARVAVARKLGIRLWIMLRDEIDYEEFCRRGQKHQSGAACAGMLDVANGANSHRPVD

SEQ ID NO: 403921 - protein, 352 aa, unidentified
MKKTLFIGIDFAKANFVASALLGEDPDPVCLPKSFSNDDKGAKSLISWIVKLLPETCSLSDVLVCGEHTGSYSLLLPRRLFDAGIDCWLENAVCIKNGSGRIVREKSDSADATMIAEYARTFYQKRVRLFVPESPVLSELRECNDIRRRLVKEQAGLMCKRHNAEVRLKAKPGSKAIVMNIKILDRQLAYIKEQIAKVDRQMCSLIRADKKLTRINDIIVSINGVGPVTAIALIVLTSGFTTFFSKRSLACFLGIAPFRSESGTSIQHGSHRSRQADSYYSGLLYMVTVTAMNWNPEIALYRERLLKKGKSKLVIINNIKNKLITIIWAMVKNDTLYDPDHHLKVAQQYQTA

SEQ ID NO: 403922 - protein, 342 aa, unidentified
MKFYCGIDLSARDCHVCVIDEQLQVMVQQKVRNELPRICQLLEPYKGDLKIVVESTFNWYWLIDGLQGEGFDVVLAHTLGLYLITGAKVKTDRRDAYSLAKLLLAGVVPAAYIYPVETRPVRDLLRRRARLVQVRAGEYGSLRRLLLRQGILSSKQQEIKSATETELEQWFEHPLVRLHASQELRRIELYSQQIAELEKTILGLAQTNQSYQLLLQLPGVGQTIALTILYEVGELTRFADAKVFSSYCRVIPGIAQSGNVTRRGRASKQGNHYLKAAFSQAAVHAVRCYPKVRRYYERQLKRHQGRGRQMICYNIIAHKLAQAAFHVLKEQTEYRAELLFGR

SEQ ID NO: 403923 - protein, 427 aa, unidentified
MREKKVSQEPQFAAFVGIDWADRKHVWCLQEAGSAKRESGEREHQVESVETWVSELCQRFGHRPIATAVEQVKGALVFMLNKYECLHIFPVPSTMSASLRNALYPSGAKDDPRDADLLLELLLQHRDKLRRLSPDDEATRRVQNLVEERRKLVDEKTAQSNCLTGYLKIYFPQMLEWFEKLDMPLVCDLLERWPTLEELQKVPPEELRTFFRQHHCHREPMERRILAIGRAAPAIKDRPVIEAKSTEVKVIVQLMRSLLEGIAELDGKIEEATVVHPDFFIFESLPGAGAVLAPRLLAAFGSQRDRYDSADEVQTYSGIAPVTERSGKRKWVHFRWACPKFLRQSFHEWAGHSISQSGWARAYYQQQRDRGNDHHAAVRALAFKWLRILFRCWKDRIAYDETKYLAALVKRGSPLSHVVVAAAGTSF

SEQ ID NO: 403924 - protein, 341 aa, unidentified
MKQFIRIGVDLAKNYFQVHALAHEGGPAVTRKLKRSKMHEFFAQIEPCLIGMEACGSAHYWARELKTMGHEVLLMPPAYTKPYVKRGKNDAVDAEAICEAVSRPGMRFVPVKSAEQQATLMLHKTRELLVKQQTMSVNALRGHLSEFGIVVAKGIGRVGELLELAKSDTTLPEAAKATVKVLAQHLEGLNKSIDDLEKQIGRAHAQSEMSQLLSEVPGVGKIIASVIAASVPDPSVFKSGRDFAAWLGLTPRQNSSGGKQTLGGITKQGNRYIRKQLVLGATSLLNVVNKRKGALRDWIVALLAKKPARVVTVALANKLARILWAMMKTGEFFRAEMFAKA

SEQ ID NO: 403925 - protein, 394 aa, unidentified
MEVVYQRCAGLDVGKDEVVACTRVPAGAVGGGRRQEVRTYKTFSAGLAALGDWLGDQGVTQVVMEATGQYWKPVWYVLEERGFELLLVNARHVKILPGRKTDVGDAAWLCELLEHGLLRGSFVPPPVIRELRDLTRYRKRLIQTHTAEAQRIHKTLEDASIRLGSVASDVLGVSGRAMLRALLAGERDPAALAELARGRLRNKLPELREALRGRFDAHHALLLRLALEHVEQLERSIAALDAEVDRVIAPFARARDHLDTITGVGKRAAECIIAEIGVDMGVFPTAGHLASWAGRCPGNNVTGGKRRSGKPTKGNRWLGEILVECAWAAAHSRDTYLAAQFWRLARRIGKKKAAGAAELGGDFFVQRDADRARQRAVAQLQALGYHVTLKQAAA

SEQ ID NO: 403926 - protein, 323 aa, unidentified
MSSPSPETNIGIDISKETLEVAVHETNTHWTTKHEFTEFPKLIESLRSLTPARIIVEASGGLEHLLVSCLATAGLPVIVINPRQARDFARATGQLAKTDRLDTFVLARLGATLKPVVRPLKSAETQELEALVTRRAQLVEMLIAERLRLQQAQQQRRQSIIRDVKAHISWLQKRLNQCEHDLSQLLRSSPLWRETDERLQSMPGVGPITSLVLIAELPELGHLSNKQIVALCGLAPHARDSGKWHGKRTTRGGRARVRATLYMATLVATKHNLVIKTFYGRLLHAGKQKKVALTACMRKLLVILNAMFRNQTSWQPSRFVPGA

SEQ ID NO: 403927 - protein, 343 aa, unidentified
MDEVITIGVDLAKNVFQVHGVDAEGGVVVRRQLRRGQVLPFFKKQPPCLIGMEACATSHHWGREIEALGHSVRLMAPRYVKPYVKRNKNDMADAEAICEAVTRPTMRFVEIKTAEQQSVLMLHRTRHLFVRQRTMLINALRAHLAEFGIVAGVGRNGLDRLLKIIEDGADGRVPPSARDGLLALRDQLEMVKHRILDADRRILAWHRMSEVSQRLDDIPGVGPLIATALVASVPDPRAFKSGRDLAAWIGLVPRQNSTGGKERLGHISKAGNRYLRMLLVVGALSVIRRAKQVGYTRRPWLAELLERRSTKVAAIALANKNARTAWAMMAHGTCYKEPASQAV

SEQ ID NO: 403928 - protein, 468 aa, unidentified
MGRKNDNPRRRRQSKRRPPALLKRMQPHAAGIDCGSEEHYVAVPFDDDPEPVRSFRTFTADLHRLAAWLESCQIETVAMESTGVYWIPIYEILEEHGFQVLLVNARHVKNVPGRKSDVLDCQWIQELHSVGLLRGSFRPDAKITALRAYLRHRDKLIQTASSHVQRMQKALIQMNLLLHNVVSSITGVTGMRILRDIVAGVTDPVALAAHRDRRCRASKKDIAASLTGNYRAEHLFVLRQNLELYDMFQRQIHKCDEESEALLLTLAADEDDPAAPVPAPRTKRKPRDNEPRFDIRTPLYRLAGADVTQVHTIGPYTALRIIAEIGTDMTRWPTEKHFTSWLTLAPKNKISGGRLLSSRTQPSANKAAAIFRMCAMVAGHTSTALGAYYRRLAYRVGKPKAITATARKIAVLVYRVLKGDLDYRDPGADAYEAHYRSRTLKSLRKRVRQLGFDLVDRETGELLQGVVS

SEQ ID NO: 403929 - protein, 323 aa, unidentified
MQGKVSFEEDAMPVVYAGVDVSKEWLDVHLHPLGESRRFCNDKTGIRQLKRLLARHQPKSIVMEATGKFHRPAHRSLWLDGCAVAVVDPLRARMFARACGYLAKTDRLDARFLALLAESLRPPADTPPSPHVEALQELVNARSAAKCDITALQNRSKTATTALLRGELNRLLRRLEQHVERLDKEIERCVGEDPQLCRKAEILTSIPGIGRVTALALMAGMDELGSCSGKQAAMLAGLAPIANDSGARTGRRSIRAGRPAPRRALYMAALSARRYNPALARFADTLKAAGKPAKVILVAVMRKLLVLANCLLSQDRLWTPTPP

SEQ ID NO: 403930 - protein, 329 aa, unidentified
MFVGLDLHKNYLQAAVMDEQGRILSQERIPNKDESIEEFTEKRLKDSHAEIVIESSSTWYHVYELLSKNENCHVVLSNPVKTKAIASAKVKTDKVDALTLANLLRTGYIPESYIPPRHIMDLRELVRYRTSLVRMRVEAKNKIHAILLQTGTRIKERPFTIGFVEELRRLEDYRIDGYLNVISSLSQQIHTVSNTIKREAVEDESTRLLMTIPGVGYFSALLILSEIGDVNRFPDSHHLCSYAGLTPSTHSSGGVTYHGSITRSGSRYLRWILTECAKAHIRTRRDSQLTRFYTRLAKRSGGSKATVAAASKLLRIVYWVLKEKRPYHS

SEQ ID NO: 403931 - protein, 371 aa, unidentified
MKKGTTRYLGLDVHKATVTVALAEDGSQPVVYGTIANDPSSVRKLVRQLGREAKLVVADEAGPTGYALHRQLLELGAECTVVAPALIPRRPGDRVKTDTRDALTLARLLRSGDLTPVWVPGEEDEALRDLVRARFDAKADVLRAKHRLSKFLLRRGIQVPPGTKAWTARYQAWLNQLSFPQAAAQVVFDDYRATVRATEDRIRRLETELRSCAQDSRQAALIAALQTLRGIGFLSAVTIAAESGDIRRFANAPRYMSFTGLTSSEYSSGQSHHRGAITHAGNAYLRHVLVQAAHNARHAPNCSRELQQRQAGLPSDLVARAWRAQLRLHQRYRHLVGRLGRPKAVTAVARELAGFVWAVGQRMAEQEVSPA

SEQ ID NO: 403932 - protein, 423 aa, unidentified
MMKLKYSICCGLDVHKNVIVATIVTTNKDGISEYLQKSFSTINSDIQRFHNWLIENNCYHVCMESTGKYWIPIFNYLENDIDVCLTHPKYVKAIKGKKTDKKDSKWIADLYKFDLVRCSFIPPKDFRQLRELSRYRFKLVCMKSSEKNRIQNCMTISNVGIASVLSDPFGKTATEIISYLLEHTADSMDEKAVRKLIKKGAKSKSDEIIEAIKGYTIETDQAKKLELARGHLEYLDDMITQTEVKLYVRIKPYYEFVEFVSTMPGMTELSSTIVLAETGVDMDIFDDAKHLCSWCGLSPANNESAGKKKSVRIAKAGDYLKPMMVQCALAAIKSKKQPYFAIKYGRIKKRRGHKKAIIAIARMMMVCIYHMVSEKKPFTPTDYEELMDPQNHVESVVLNENNVFAYLESLGYDSSKLVKRNDN

SEQ ID NO: 403933 - protein, 347 aa, unidentified
MRFYTTQHPFYCGIDLHARTMYVCILNQAGETLVHRNMPATPEALLKAIAPYREQIVLAAECMFTWYWLADLCAEHGIPFILGHALSMKAMHGGKAKNDKIDAHKIAVLLRGGMLPQAYVYPAEMRATRDLLRRRMHLARKRGELLAHVQNTNSQYNLPAIGKKIAYKANRDGVAERFADPAVQKSIEVDLALIGYYDALLRDVELSIVKTAKHHDANTLYLLQTVPGIGKILSLVLLYEMHDIERFPRGQDFASYCRLVKCARESAGKRSGTSGNKIGNAHLKWAFSEAAVLFLRDNPAAQKFLARLEHKHSKGKALTILAHKLARAIYYMLKRQTAFDLDTFLRG

SEQ ID NO: 403934 - protein, 415 aa, unidentified
MASDWSEAVIFVGIDWAEQHHDVCVMSVDGQPLGRARVPEGIDGIARLHALVADHADDPGEVVVGIETDRGLLVTTLVAAGYQVYGINPRAVDRYRDRHAMSGAKSDGADAKVLADLVRTDRHNHRQVAGDSDLAEAIKVTARAHQNLVWARQRQVNQLRSALREYYPGALATFGTDLAHRDVVAVLVKAPTPELGRRLSTAQIAAALRRAGRVRNVDARAAAIRDGLRAPQLAAPDVVADAYGTSAKALISVIATLTAQIDELESALADRFEQHPDADILRSLPGLAVILGARVLGEFGDDPNRYADAKARKNYAGSSPITKQSGSRKLALARYVRNRRLADAITLWAFSSLQSSPGARMLYDRRRAAGDTHHKALRALSNRWVGIMHGCLRHRTPYDEHIAWGHLTDNLPTAA

SEQ ID NO: 403935 - protein, 412 aa, unidentified
MKRIRDRVAGLDVHRDTVVACCRIVDPSGEVEVSKQSFATTRKGLGELAAFLSGAAVSTVAMEATGVYWKPVYYALEGLFDELWLCNAQHVKNVPGRKSDLSDAEWLADVAAHGMVRPSFVPPPEIRELREITRYRKTQSDARAREIQRLEKVLQDAGIKLTSVASAVWSVSSREMIEALISGIRDPSVLAQMAKGTMRKKIDRLEEALSGHFGEHHAIVCRQIIDHIDFLDASIGALTAEVTTRLAPFESAVAIVTSLPGISRRTAEVIVAETGADMSRFPSPGQLCAWAGVAPASYESAGKRRPAGTRHGSQWLRRALVEAARSAARTKNSYYSAQYARIARRRGANKAAVAVANSMLFTIWHLLSTGQLFEDPGADYFERRHDPAVEAKRLARRIEALGFDVNLIEKAA

SEQ ID NO: 403936 - protein, 412 aa, unidentified
MQDILTCAMGLDVHRDIIVACLVKGAVDAEPEAETRTFSTLIPEMQKLRDWVIESECRNIAMESTGIYWQPIYEMLESCFDGEISILVVNARHMKNVPGRKTDMKDAQWIATLLRAGLLKGSFIPDKAFRELRHLTRYRKSVVHDITAQKNRIDKFLQSSGFRFTAFLSDTFGASGRNIIRHLIEHGSIDREALDKCLKTKTRNRIDEILVALNGSLSEHQRRFLNMVFRHLEDLEAHKHTIEDEITEEVLKHTDALNLLCSIPGIDVTATAAIVAEIGTDMSAFPDSQHICSWAGLSPGNNESAGKRKSVHINKGNPYLKSMLCETAWIMASHRKLYLSGWYWKVKQRKGAKRATIALARKVLSIIYTILKTGTPYSEECFEQRRQRCERKRANRMVNELQKLGYTVVAPD

SEQ ID NO: 403937 - protein, 414 aa, unidentified
MEGEINKSCGLDIHKHFLIATILSRSGEKQQQRFSRDEDGILNLKNWITSERCDVVACESTSDFWVPIYESLIDHLPVIVGNARDMKAFTHKKTDKIDSEIIAKLALNKMIQPSRIFPKRHREYRSYVRLRLTLVRKRTDIKNEAHAILSSEMLHLSSVLKDIFGKNGRTILSGISSGKNVDQIIESLTSNVRKKAVKIKEILNKEISQSAAIRLQICLNLIKHLDDEIKTLEREIFNYAYGKHNREMDLLMSVPGIGEIGAATLIAEIGDFRDFSSGDKLASWLGLVPNVYQSADKYHNGRITKRGSKVARWILTQIAQAAARKKNSRLKEFFNNKKNSIGHAKAIIALARKIATIIWHLITNDEMYEDETGYEKGEVQKRKIVETETFSVDERITIISGIIAIMGKKEGEST

SEQ ID NO: 403938 - protein, 411 aa, unidentified
MSEPDKISDHGYVVFCGLDVGKAVHHACALDPSGKRLHDKALPNDEAALVEVFEKLRVHGRVLVIVDQPASIGALPIAVARSLGIDLAYLPGLAMRRIADLHPGEGKTDARDAYVIADAARTMPHTLRRVGTDDDTLAELTVLAGYDDDLAAQSTRLTNRLRDALLHIHPALERLVGPRLERGGVLDLIVAAPTPQALRDLGVDGITAIMRPRSPRLAKTIPVKILAALDAQTVVVAGTPAFGRVIGGVAAQLRDVRAERDTLAAELEARLEAHPLAEVLTSMPGNGFRTALKILTIVGDGAAFPTAGHLAAYAGLAPVTRRSGSSIKGETRSQRGNHALKSALFLSAFASLADPTSRAYYDRKRAQGKRHNAALICLARRRVDVIYAMLRDRKPYQQPMPTEPDTSPAAA

SEQ ID NO: 403939 - protein, 422 aa, unidentified
MNYKQNEKINQVKESTLVVGIDIGSTTQYARAFDWRGIELGKVFTFSNSREGFEAFKAWMQHLQDKYRKSDVIVGIEPTGHYWFDLGAYLEDEGILLVMVNPYAVKQTKELDDNSQSKNDRKDPKVIAKLVTEGRYSAPYTPDGVYADLRIMVANRKRLIREMTQIKNRFARWFAIYFPEYTDVFGDYEAQSSMLLLKKVCTPEAIVELGAEKINQIWRDAKLRAVGMKRATTLCETAKRSIGLKKGSSAARYEMKLLLEDYEYKKAQLDAVMEEIEKLCRKIPESEQMLAIKGIGVITVAGFLAEVGDVRRFESPRQIQKLAGLSLRENSSGKHKGQTTISKRGRSKLRAVLFNAAIPLIAKNPEFKSLHEYYTTRANNPLKKKQSVIAISCKLIRVFYAILAKGVTYDAQKLISDIHRQP

SEQ ID NO: 403940 - protein, 346 aa, unidentified
MNQIIRIGMDTSKHFFQLHGVDAAEQPVLRRKLRRNQVLAFFAKLPPTVIGMEACGAAHYWARELRKLGHEVKLMAPQHVKAYVKRNKNDGRDAEGLCEAMSRPTMQFVPVKTEEQQAALMLAGVRQQLITRRTQLSNAIRGYAAEFGLTVAKGLDKIELLLAQVAQDETVPEIARELFAFHGKDYARLQIDLKAIEAKLMAWHRADATSRRLAQIPGIGPIGATALVMKVPDPRLFRSGRHFAAWIGLTPKDHSTAGKTRLGKITRAGDEMLRSVLVAGATAVIQQARRGRGRPSPWLVALLARKPPKLAAVALANKIARIAWKLMTTGESYDGARMPGALAVAA

SEQ ID NO: 403941 - protein, 458 aa, unidentified
MVRRNAPPGSNPVRPKPVKSRAALTITHPNAAGIDIGSASHFVAVPPERDDDPVREFPSFTVDLHAIADWLKACRVDTVAMESTGVYWIPLFEVLESRGFTVLLVNARHVKNVSGRKSDVLDCQWLQQLMTYGLLSGAFRPAQEVCVLRALWRQREMLLKSQARHVQHMQKALTQMNLQLANVISDVVGATGQKILRAIVAGERDGHRLAAMKDVRIRASIEEIAKSLQGTWRPEHLFALKQALAAFDFVGTQLSECDQEIEQQLQCLQAHEGAPAKGKKRTRARNAPKFDLRTQLFKMCGVDLTRIDGIDVTTALAVVSETGADLTRFASVKHFTCWLGLCPGTKITGGKVMSGKTKRCANRAAQALRLAAAALRTSQSALGAYFRRMCSRMDKPKAVTAAAHKLARLIYFMLTKGEEYTDQGQDYYEERYRERVVRQLTQRVAKLGLKIVPAEQPA

SEQ ID NO: 403942 - protein, 410 aa, unidentified
MTNQDHRVGGIDSHKDTIHVAVITAIGQPVTDREFPTTVAGYRRAVAWLIEHGPLSAVGVEGTSSYGIGITTELLAVGIRVVEVNRTRAAEKRKQGKTDPLDAYRAARSVLSGEASTEPKNPSIEPLRALTIARRSAVKSQQAAWRQIGSLLVTTRPALRDRFRDLPETKLIATLRDCRPDQIHDVDDADTLYALRTLARRYLALQDEITALEERMLRRATRANPTLMAIKGVGPAVGAQLLITAGDNPDRLRTSASFAALCGTAPIPVSSGRTDKHRLSRGGDRQANAALHHIVKVRMSYEQRTRAYRDTRLANGWTTKEVFRALNAPSHERSSTPWPAIPSRPTTPTYDPHATRRTSPSPPPHNTWAYGPPESANSNSGDAPTTNPPPATEPGSPPPETPPPQRLDTQ

SEQ ID NO: 403943 - protein, 383 aa, unidentified
MFESIVIFIGIDVHKESYSYCSYLPSTQAFLYENTSKANNSSAISYIKRVLKEAKKETGEEYKACIGYEAGPTGFGLKRGLEKAGYDCKIMAPTTIAEERGGNRVKTDKNDARKLSKALCWGAYKEVVPLTERQEATRSILRVRNSAMTKLKKAKQQLKSFLLAKGVHYPGKNDTWTGAYIRWLRSFKFDLEDDQYAFEYYVSEVFQYIQKVEELDKKIEEISNRNEYKETVSRLRCFAGIDTHTALSSLVEIGDYQRFKKAKSFSAFLGLCPGEHSSGEKVVITGITKAGNSVMRKLLVESANSIARSNVYAKSKRLKARQSGMSQDVIAYADMGSKRIKNKMIKLKAHGKNNNVAKAACARELACFIWGMVTDNIYGEIIA

SEQ ID NO: 403944 - protein, 343 aa, unidentified
MQTVTTIGLDIAKSVFQVHGADAAGNVIVRRQLKRRYVLPFFQKLPPCLIGIEACASSHHWSRELQAVGHTVRLMPPAYVRHYVKRQKNDAADAEAICEAVTRANMRFVATKTPEQQSCLMLHRTRHLFIRQQTAVINAIRAHLAEFGIVAPVGRNGVEQLLDVVADASDKRLPEIARACLLALGAQLRTLKVQILNFDRQIIAWHRSNEASKRLDEIPGVGPALATALVASVPDPRAFRSGRNFSAWIGLVPKQHSSGGKDKLGSISKQGDRYLRSLFTAGALAVIRYAKIHGTKHRPWLTALLARRPTKVAAIALANKIARMAWAMMARGDRYKQPVALAA

SEQ ID NO: 403945 - protein, 315 aa, unidentified
MLGNQSMPSNPQCVQNYLKNWIVQDLQVERVAVEMCCGAATFVDTLKAETQWNVQLAHAGFVSRMKQTRQKSDHGDAQVLADLARVDYVPQVWLAPEEIRQLRHLVRLRDQHVKYRTAAKLRIRALLREQRLRSPEKPWTTAWLFWLKNTDEIAAPTHFILMDHLETIEYHTKKIQKVEKFMTQVTQDDLVTQKLLRQPGVGPVTAWTLRAEIGDFDRFANGKQLANFCGVAPCNVSSGEKQSTSGLIRSGNRILRKTLIEAAHRLVRHEARWKTFYEHMVEEKKKPKCVVVAAIANRWMRCLFHEMKTPLTTAA

SEQ ID NO: 403946 - protein, 346 aa, unidentified
MNQIIRIGMDTSKHIFQLHGVDAAEQPVLRKRLRRKEVVTFFAGLAPTVIGIEACGAAHYWARELEQLGHEVKLIAPQLVKPYVTRNKNDGRDAEALCEAMSRPRMRFVPVKTAEQQTALMLAGMRERLIARRTQLSNAIRGYAAEFGLAAARGLDKIEPLLARISQDESLPALARELFAIQGRDYAQLQVELKAIEVRLLAWHRADACCRRLAQIPGVGPIGATTLVMKTPDPRAFLSGRHFAAWIGLTPKDHSTGGKTRLGKITRAGDEVLRSLLVAGATAVIQQVRRGRGHPSRWLLALLKRKPPKLAAVALANKIARIAWKLMTTGEDYDGARMSGVSAFAA

SEQ ID NO: 403947 - protein, 343 aa, unidentified
MQTVTTIGLDIAKSVFQVHGVDGAGQVVIRRQLKRRYVLAFFQKLSPCLVGVEACASSHHWSRELQALGHTVRLIPPAYVKPYVKRQKNDAADAEAICEAVTRANMRFVPTKTPEQQSGLVLHRARHLFIRQQTAVINSIRAHLAEFGIVAPVGRQGVEELLNVVADPNDKRVPEIARACLSAFGAQLRRIKEQILEFDRLIRVWHRSNEMSMRLDEAPGIGPVLATAVVATVADPKSFRSGRNFSAWIGIVPKQHSSGGKNRLGNISKQGDRYLRGLFVAGALSVIRYAKIHGIKHRPWLTALLARRPTKVAAIALANKIARMVWAMMVKGERYKEPVALAR

SEQ ID NO: 403948 - protein, 344 aa, unidentified
MEHFAGLDVSVKDTSVCIVDDTGKIVREVKVASEPAALLAVLKNPAYRFKRIGLEAGPLSQWLYSALAEAGLPVICVETRHMRAVLKAQINKTDRNDARGMAQMMRVGLYRPVHVKTLRSQKLRMLLTHRKLLQSKAIAIDNDLRGTLRNFGLKVGVVGTVRFEARIRKLVEDVPDLAALVEPLLVVRRTLREQFCILHRRLLAIVRDDEVCRCLMTAPGVGPVVSLTYRATVDVPARFRKSKSVGAVFGLTCAKYQSGEVDWDGRISRCGDEMMRVMLYEAAQSMMRSKKWSWLKAWAMQIARRRGMKKAIVALARRLAVIMHRMWVDGTEFRWTREQAAAAA

SEQ ID NO: 403949 - protein, 342 aa, unidentified
MFYAALDVSLRSVAVCIIDQDGKVRLERSVPSEVPDLIRCLGEFGEPIHQVGLEAGTLTQHLTYGLTEAGYDVVCMEARQVNAALSAMRNKTDKHDARGIAQILRAGWYSRVHVKSVESHHTRALLTCRKVMQRKCIDLENEIRGLLKVFGVKLPLRLSRGAFDLAVRDTIEADQALSHALLPMLQARQVLFDTFIELDRRVRKAAKEDAVCRRFMGVPGVGEITALSFKAAVDDPARFKHSRTVGAHFGLTPRRFQSGETDNPGRISHAGDADVRATLYAAANAMLMRSITWSSLKAWGVRLMKTKGRRRAIVALARKIAVVLHRMWVDGSDFRHGSEAAA

SEQ ID NO: 403950 - protein, 377 aa, unidentified
MTATIRPEFRSVGEATLYVAFELSAKEWKLAMTAGFGVVPWLRTVASGNLDGVERGIRQAKARWGLPADAAVVSCYEAGRDGFWIHRALTARGIANRVVDSASIEVSRRARRAKTDRLDALKLVTMLVRVVNGERGVWSEVRVPTVADEAARHVSRERTALTQERTRLINQVRSWLATWGCALPTRRPAGWWTHVRDWADAPLPAEVQARIARADARRVALEDQIAALDAARQAATAAAAADSAVRRLVRVKGLATTSAAVLLEEGLVWRRFRNRREVGGMLGFAPLPYQSGARAHDEGIRRAGNHRLQAVSVQLAWQWVRWQPASPITQWYRARWATGGRRLRRIGIVAVARRLMIALWRYATTGAVPTGAILKVA

SEQ ID NO: 403951 - protein, 347 aa, unidentified
MKLFIGLDLGLNKTAICAIDEDGSNVLQVTARSEPAEIIAKLSKLKGKITLVGLEACPLSEWIYGALQDAGFPVFCLETRHTQRFLSTRPNKTDRNDAHGIATMMRVGHFKPVHVKSRPSQFVRSLLIGRRQFMTAMLQIENTIRALLRTQGLKLGKVHRCQFSERVKELCAEEPMLLPAIEPLLAARDEMRAQMRKLNNALERASRADPICKLFQTIPGVGPLTALAFKATIDDPSRFKRSKLVPAHLGLTPRVYQSGEIDRSGHVSKSGDKLMRYLLVEAATSMMLVSKKWCSLKVWAMKVAKRSGTAKAIVALARRIAIVMHQMWVTGECFRFGNDDQPGAMAN

SEQ ID NO: 403952 - protein, 412 aa, unidentified
MRVIRKSCLGLDLHKKQITAHLRVHQGSDVEPLGLDRQFKTMPEDLERLRDWIREQKVTDVVMESTSVYWMHLYDLLEGMTQPAVVNAAHVKKVPGRKTDVSDAQWLAELHAHGLLRLSFVPPKEVRDLRGLTRYRVKLVATRTATRNRTIKLLETAGIKLSSVVSDSFGKTGRAILDGLATGEATPAELAARAKGSLRDKMPELERALQHPLSAHQRELLGMLLRAFDLTDALIAEVELKLSKRTESYSTIIAKLDLIPGINPLAAITLLAETGFDMSVYRNSGHLTALAGLAPGNAISSDKRRRISVRKGNHYLKRICVQIAWAASRKKDSFLRMRFLRLKSRIGQNKAIVAIARQVLVLVFHVLSTDQTYTDLGANFYDRHDQERTVERLTRRLGALGFVVALTTKTDA

SEQ ID NO: 403953 - protein, 373 aa, unidentified
MDEERTVCVGLDTHKAKIAVAVAEPGRLGEVRFQGEIANQPDAVRRLIERLGGKHGKLSICYEAGPCGYGLQRQITALGHDCTVVAPSLVPIRAGNRVKTNRRDAVTLARLHRAGELTAIWIPDPIHEAMRDLIRARTAAMETVRRSRQQLLGFLLRHDRVFTGRKTWSPAHRRWLAGLSFAHPAQQIVLQEQIDAIAEAEQRRDRLGEQIRELVSDWSMAPIVTALQAMRGIAFLSAVVLVAEIGDFRRFTNPRQLMAWLGLVPSEHSNGSKVERGGITKAGNSRARRVLVEGAWSYRFPARVTSLIQARLDDVPEEVRAIAWKAQLRLCARFRRLVAAGKNANLVTTAVAREMAAFAWAIASEIKPAGAAA

SEQ ID NO: 403954 - protein, 364 aa, unidentified
MAKPSLWIGLDIGADETIACGTDDHGTVLFEQSVATTPAALHALLKSDKRRIRLIGLESGSFGIRLHRSLLKLGYPIAMFEARQVSKFLSIRKNKTDKNDARGLADIARIGRGSVSEVRVKAPERQRLRSTLVTRQKLVQLRTAMEASMRSLFRLNGGKLKSCHSAAGLRRNVLEELKLLRRSEKIDLTEEIEPLLTLSCATRSYIEALDCRLSKQAQVDPICRRFLEIPGVGPITALAFVSAVDDPHRFRRNTDIGAYFGLVPRVRQSGQTIARMRITKMGDKLTRTYLTSAAQHHFKSADSALAQWAGNLSQRLKKRGVHVALARKLAVTMLSMWKSGEQYDPYHGVSREKLAGPYHECVTT

SEQ ID NO: 403955 - protein, 371 aa, unidentified
MEHTRFVGLDIHKERISIAVAESGRSCAVEYLGEISNDPVAIGRLCDRLERPSKTLAFCYEAGPCGYGVHRQLISLGHRCDVVAPSLIPTRPGDRVKTNRRDATMLARLHRAGELTPVWVPDADHEAMRDLIRLRSVVRQIVSRARQHLQGFLLRHGRKHGRGTAWRMAYRRWLSTLAFEHPAQQIAFQDYVDAVMDAERRLQRVEEQISCLLPEWNLRPVVDALQAMRGIALITAVVLVAEVGDFTRFANPRQLMAYFGLIPGEQSSGETIRRGGITKTGNAHARRALVEGAWAYRMKARIGRHKVDRIEALPKVVRDIAWRAQLRLCTRYRRLSARGKTANVVNVAIAREMVGFIWSIACTVQSAPKTA

SEQ ID NO: 403956 - protein, 372 aa, unidentified
MGHHTEAFVGIDTSKSRNAVAIADSGRGGEVRYLGEFPATEAAIRKLVAKLAAKCCHLTFCYEAGPTGYGLYRLLKSLGHDCLVVAPSLVPKKAGDRVKTNRRDALSLAKLLRAGELTAVWVPDERHEAMRDLSRARLAVKKDLQGKRQQISSLMLRLGRIYPGKTTWGPAHMRWLMEQKFEHREQRIAFEELLEGIRQESERMERLEDAIREVVPDWSLAEVVAALQAMRGIDLIAAVGVLAEIGDLSRFQNPRELMGYLGLVPTEDSTGDKVKRGGITKAGNGRARRILVEAAWSYRYPPRVSRDKQPKVEAAPRRAREIAWKAQTRLCGRFRSLERKGKRRTVIVTAIARELSAFIWAINRELLPPRQA

SEQ ID NO: 403957 - protein, 344 aa, unidentified
MDHFAGLDVSVKETSVCIVDDTGRIVREVKVASEPDALLQVLRNPAYHFKRIGLEAGPLSQWLFGALAEAELPVVCVETRHMQAVLKAQINKTDRNDARGIAQMMRVGLYRPVHVKTLRSQKLRMLLTHRKLLQSKAIAIENDLRATLRNFGLKVGMVGKVRFEERIKELVENLPDLAALVEPLLVVRRVLREQIVILHRRLLAIVRDDEVCRRLMTTPGVGPVVALTYRATVDVPARFRKSKAVGAVFGLTCSKYQSGEIDRSGRISRCGDEMMRVMLYEAAQSMLRSKKWSWLKAWAVQIARRRGMKKAIVALARRLAVILHRIWVDGTEFRWTREQATAAA

SEQ ID NO: 403958 - protein, 371 aa, unidentified
MPDVSSTAPVDVRVWVAIDQHKLSIVAATLPPSGGQPQVHRIETTERAIRRFIDRLGGPEGLAVCYEAGPGGFDLLRLLTRLGVACDVIAPSLIPVRAGDRVKTDRRDAKKLVKLYRAGELTYVQAPTPETEGLRDLLRCREDLRRARTAARHRVAKQLLRHGRIYRDGAKAWTKMHHAWVARQRLDDPLAHEALEQMLIHLDGLDRQLDALDGQLEQIAKTDRWDDQVVVLTRFRGISTRTALGLIAEIGDFARFSHPRELCSWLGIVPSEYSSGDQRHRGHITKAGNDHARRLLVEAAWHYRHRPRLPAKGPTPDQRAWQAQIRLHHRYRHLTERGKRSTVVNIAIARELVGFLWAAMTDQPTREEVAA

SEQ ID NO: 403959 - protein, 337 aa, unidentified
MAREYVGIDLHRRRSVIYRMDEMGERIDSVRVDNGPMEFAQAVSEAPVGSDVVIEATYGWYWAVDLLKEMGYEVHLANPHGNDWGHRRVKNDERDARDLADLLRLGRLAEAWIAPPLTRELRELVRFRLKLSNMRTGVKAQAHSVMAKNGVLPCRNDMWGAGGSAQLDALELPEAYTHRMAVLRDLVFTFDIEIDQLDRTIHGILKDDAGYHAVQAIYGVGRVFAAVFVAEIGDITRFESARALCSWAGLTPKHRESDTKVHRGRITKMGSRMVRWAAIEAVARYHGGAAFRDQFAAIAQRRGTNRANVAVARKVLTLVYYGLRDGEIRCLQEPEAA

SEQ ID NO: 403960 - protein, 399 aa, unidentified
MIENYDSVDVFIGVDVGKSEHHAVALDRTGKRLYDKALPNDEARLRAVIQKLKVRGQVLLVVDQPETVGALPVAVAYAEGILVGYLPGLAMRRIADLHAGEAKTDARDAAIIAEAARTLPHALRPLRREDEQIAELSMLCGFDDDIVGQMTATSNRLRGLLMQIHPALERVLGPHLDHPAVLDLLQKYPTPTALTAAGKVRVGNRLITLAPRMGRRLAEKIFQALSEQTVIVGGTHATRAVLPRLAEQLGTLHRQRAEIAVEVAELVDANPLQPIITSMPGVGVRTAARVITEISGKEFATAGHLASYAGLAPVTRRSGSSIRGEHPSRRGNKVLKRALFLSAFAALSDPVSRTYYDRKIAQGKRHNQALIALARRRCDVLYAMLRDGTLYQNKTPVKT

SEQ ID NO: 403961 - protein, 421 aa, unidentified
MTTHYDPSRERLLAAMDVAKRYNDVIVKWPDGRTRLFKVANTRADHDGLCDFLLAQGLRVQLALEPTADFHRPIAYRLAEAGVEVHLASSLSCARVREALYTSWDKHDRKDTRVLLYLLEQGLTQPFHDPLRAGYLDVQELSNSYHEIARARSRCLHSLINHSLALYFPEMERYLHSSRAEWFCQFLLAFPTPASIRALAPEAFVSAAWDLVGRKVAKRRLLEELYELAGHSIGLPIDPQGTAVMTYRLQLERYQALSRQREMLEATSEQLLGEHADYRRLRTLPGVGPVIALSILAESGDLRRFRHHRQYLKFCGFNLAASQSGEAQGRYRLAKRGNARLRYVFWLAATVAIRQRENSFRAKYERYIRTNPDDPDLRRKARTAVAVKMARVAHALVKQGTEYRGYFEAAVPGGGTFLTGP

SEQ ID NO: 403962 - protein, 336 aa, unidentified
MNEITRIAIDTSKSVFTLHGTDASGRAVLRRNLRRHDMVPFFTCRPPIEVVLEACGGSHHWGRLLAGLGHQVRLIPPQYVKPFVKRGKNDRNDAEAISEAAARPDMREVTVKSAEQQAKAMLLSVRELLVRQRTQLVNALRGHAAEFGHVGRLGREGVAKVLADVAEDAEVPTPAKDALALLGCEIGRLDARLAEVDARLVAQHKQTPTSKMLAEVPGIGPIGALSLVLRVDFTQFKSGRHFASWLGLTPREQSTGGKTRLGGISRAGDERLRQLLVLGATAVIRQAKPGKASAWLIALLARRPRKLAAVALANKMARIVWAMMTSGEAYRQPATA

SEQ ID NO: 403963 - protein, 376 aa, unidentified
MKQFNDIYVGLDVHKDTIAVAIVRGLRSKPTYFGEIPNTPAAITKLLHQLSPDGEVLNFCYEAGPCGYEVYHQLTKLGQSCSVVAPSLIPRMPGVRIKTDRRDAMSLAKLHADGSLTAVWVPDKEQEGIRDLSRAREDFKQTETKARQRLGAFLLRNGKIFTGKSKWTVAHWRWMETLTFETPMQHIVMQEYVEALKEASRRLLGIEKQILLAVRGWSLEPVLNSLLAMRGVNTITAVTLLAELGDITRFDNPKQLMSYLGLVPSEYSSGGKRQQGSITKTGNGHVRRVLVEAAWNYRFPARKSRTIEMRAEKTSDRVQAIAWEGQKRLCGRYQKLLSLGKLKQKVCTAVAREMVGFVWAIACEASGRVHGSRATA

SEQ ID NO: 403964 - protein, 344 aa, unidentified
MQVTTLGLDIAKTIFQVHGVDAAGQVVVRQRLARRRVLAFFEKLAPCLVGIEACSSSHYWARELIARGHEVRLMPAQYVKPYVKRGKNDAADAEAICEAVTRPTMRFVPVKTPEQQSVMMLHRVRLMLNRQRTQLSNSIRAHLSEFGIVASIGRRGIDQLLVIVADEEDPRVPADARLCLTMLAAQLTVVKEQILENDRRVRASARATGLGRRLMEVPGVGPLLASALTATIPDPAAFKTGRDLAAWIGLVPKQSSSGGKERLGSISKAGNRYLRQMLVAGAMAVIRYAERHGTRRPWLVQLMQRRSTKVAAVALANKTARIIWAMMMSGERYREPAATGAVAA

SEQ ID NO: 403965 - protein, 343 aa, unidentified
MHISSIGIDLGKTTFHLVALDEHSKVVIRKKFSRKQLLTYTANLQSSLIGVEACSGAHFIGARLHDQGHQVRLIPAQFVKPFVKSNKNDFIDAEAIAEAVSRQNMRFVPIKTDDQLDLQALHRVRDRLVHRRTAVINQIRGFLLERGITFAKGPANLRNRMPDIVEDADANLTPRMRTLLDRLWQEWKQLESGIETANYEIEQIASQDEACKRLRQIPGVGPLVSTATVAAIGNGAAFRKGREFAAWLGLVPRQYSTGGKARLYGISKRGNNYLRRMFIHGARAVLMRVKYDTAGLGQWVHQLEARTTRNKVIVALANKLARIAWAVLFKGEAYRHAAVCAQA

SEQ ID NO: 403966 - protein, 427 aa, unidentified
METDLSRVERFRQFKQEIRGNERYLIVGIDVAKDRHHAFLGTANGRTVLRRLAVENNRSGFEHLSAHVQFQMKKHGLDEVVVGVEPTSVYHKPLAEYLIERDFLVVYVTNAAIKQNRQLLDGRWDKNDTKDAANVADLVTQGKCHYYDLPNEVLRDVRALLGVRRRLKRQLHSARMRIRNNLVAQYFPELDTFWNKAEQENLAIVRWSLDPETIRRLSFKEFFHRVTSRSKGARQHERLRGIWEAASSSIGCRVGKTLEVETRILVEEVKRTREQIAEVEKSIKARLTGLTHYELLLSIPGFGPYICAVVLAAVGNPHRFENRSQLLRLAGLDLSANRSGKRSPTAVPVISKRGKADLRYALYQAALVASSFNHHVMAYYRNLLTGREREPGIRTKMRVKLAAKLLIIAWTLMKNKEPFNPDRLKTD

SEQ ID NO: 403967 - protein, 402 aa, unidentified
MNAVGIDVSKGKSMVAIMRPFGEIVSTPFEIKHTASDINSLVELINSVEGESRIVMEHTGRYYEVLAHQLSAANLFVSAINPKLIKDFDNDSLRKVKSDKADAVKIARYALDKWQNLKQYSVMDELRNQLKTMNRQFGFYMKHKTAMKNNLIGILDQTYPGVNTYFDSPARSDGSQKWVDFASTYWHVDCVRKMSLNAFIDHYQNWCKRKKYNFSQSKAEEIYGKAKELVPVLPKDAITKLIIKQAVDQLNSASTTVESLRTLMNETASKLPEYPVIMAMKGVGTSLGPQLMAEIGDVSRFTHKSAITAFAGVDPGVNESGTYEQKSVPTSKRGSADLRKTLFQVMDVLIKTHPEDDPVYQFLDKKRAQGKPYYVYMTAGANKFLRIYYGRVKEYLASLPES

SEQ ID NO: 403968 - protein, 375 aa, unidentified
MLRFRLMVETRSALSGLKHQKEKRSMDYFAGLDVSVKETSVCIVDDTGRIVREVKVASEPEALLQVLTNPAYRFKRIGLEAGPLSQWLFSVLTEASLPVTCVETRHMKAVLKAQINKTDRNDARGIAQMMRVGLYRPVHVKTLRSQKLRMLLTHRKLLQSKTIAIENDLRGTLRNFGLKVGMVGKVKFETRIKELIENVPDLAVLVEPLLIVRRVLREQIGILHRRLLAIVRDDDVCRRLMTTPGVGPVVALTYRATVDVPARFRNSKAVGRNSKAVGAVFGLTPSQHQSGEIDRIGSISKCGDAMMRTMLFEAAQAMLMRSAKWSWLKAWAMKIARHRGMKKAIVALARRLAVIMHRIWVDGTEFRWTREVAAA

SEQ ID NO: 403969 - protein, 385 aa, unidentified
MQTITTKPATAAEAILAIDLGKYKSVACLYGAADDVRFLSIPTSRDELTRLLAKHRPAVVLIEACLLSSWVHDLCVAQGVKCLVANTASEAWKFKHTKRKTDRDDAKRLAELYVLGQLPTVMVPAPQTRQRRALIEHRQKLVGRRVAVQNRIRAIFVSQGLPAPRGAAAWSKTGLAGMASQARPLAECDVLELWRGRLHLALTELEQVIDLQGQAERKLDDLAKGDANVQRLQTIPGVGPRTGEAVVAFLPEPKRFKSGKQVSSYGGFTPRQYQSSELDRRGRISKRGPATLRKLLVECAWCLLRYNAWARAVYHRLTHGGKARKKQAIVAVARKLLVRCWAMLRDGQSWHDPQTGPKPKLSPSKQRRQAEAQQRRQATQQAAPA

SEQ ID NO: 403970 - protein, 340 aa, unidentified
MNITTIGIDLAKSVFQVHGTDERGKAVLSKVVRRAHMMKFFTQMPPCLIGMEACGSAHFWARKLTELGHTVKLMAPQFVKPYVKTNKNDARDAEAICEAVGRANMRFVPIKNPEQQALLALHRARQGFVKARTAQGNQIRGLLAELGCAIPKGRTHVHGYVADILEDAENGLSGMSRELFARLLEHLRHLDAQVQALEAQIKAWHREDEASRRLEQIPGIGPLTASALVASIGDARTFKNGRQLSAWLGLVPRQHSSGGKATLLGISKRGDVYLRTLLIHGARSSLRHAKAGWGMALAQRRNPNLAAVALANKNARIVWALLAHGRCFQADYHDAARRAA

SEQ ID NO: 403971 - protein, 331 aa, unidentified
MKFKEFIGIDVSKLTFDFRIHSNQIASEFDNKNSGFSKMIKLIKENVSCEKDEILFALEHTGIYSLPISIFLSENKYHYVLLPGLEVKRSLGIQRGKNDKIDARRLAEYAYQKRDKINPSILPCKNILKIRRLLSLRDRLVKQRSGFLKDKGENARFLKRCENIVMFDVVDKMLKYFDGQIDKIESELSNIIKSDKLINKQYNLITSIKGVGKQTALYIITYTDCFTKFERWRNFASYSGTAPFPYRSGTSIKGKDKVSNLANKKIKSLLNMCARSAIKYNPEMKMYFQKRKAEGKNGMSTMNIIRNKLLSRIFAVINRNSLYVNTVKYVA

SEQ ID NO: 403972 - protein, 383 aa, unidentified
MTSSNIRYVGLDVHKRLVEACFVDQAGEVLLRRRFPLNRDTLELFASGTLRPTDQVALEATTNCWAVADVLRPCVARVVVSNPLATKAIAQAKVKTDKVDAYVLAQLLRCEFLPEVWPPDEATRLLRELTGRRAALVRQRTALRNRIHSVLAMRLIEAPTRLFTTAGLLWLRQLELDDQARLLVDSDLRQLEFLQKEIDALDAELAQRGYQNDSVKLLMTLPGVDVAVAEAMMAAWGDAKRFPDGDHAASFLGLVPSTKQSAAHCYHGPITKQGNSHARWMLIQAAQHLGQHPGPLGHFFRRLARRKNHNVAVVAGARKLAVIGWQMVVTGEPYRYAAPRTTETKLARLRVKATGQRRRSGPAKGHQVRGQAARRQPHHQAAA

SEQ ID NO: 403973 - protein, 366 aa, unidentified
MESYVGLDVHSKRSVFVIEAEDGRVVARGDIPTTPAGFRQLRQQHELAAETPVALETGTVAFYAARELARVGLRPVVIDAHEVRVKAHRPRQKSDRRDAFELCEGLRRGHYRAIVHVPPAPIGALRETLSRRRHFVAVRVAEVNAVKRLLRAAGLGHLSKSLGTDAAWEKLLAALATEPALRTYVAQHHALWRCAQEQIVALEETLAAQPATIAKVAARLQTVPGVGPIVSLTAVAVFSDVHRFPSAKHAASYAGLVPSTDQSGDRDTHGHITKRGSAALRIMLCEAAHHAQRPNHPLHPYFARLCAQRGYKMAVVALAHRLCRILFALLRDGADFDVAKLAVEEGVFRRTTVQRFRLKRATASRA

SEQ ID NO: 403974 - protein, 454 aa, unidentified
MKKKKAISYKKHQERKRNIAGKKIIGIDPAKEKHQITVIDEQGIQMGNSFSISVTHKGFNEDLWKKLGKILGKFTKEEVVFAIESSCDIWRVFAGYLHNRGYEVLLVSPLITYKTRSTINNDFSKTDPKDAYLVAENAQSGKYNQYMSYAPEINKLHNLCIAHDKLTKDRNRIILRLRALMEEVFPEYLKCVNVEIKTSLYLLGKYYLPEHFQKLDVDEEEWNVRRISNGKHNADTLRKIKEHAHKSIGAGKAGEEDGVRITLDAWISQLKLINDHMKTIGSKMIGLAKETEFFEVLVSVPGISDISATRLIGECRDLNLFEHYKQIEKMAGSNVRICDSGKYAGMRRLNKLGNKRLLKLIYIMTTQTARFMPEVRIKFLKRQIKKKSYRKNIFAASSILMRILMVLIKEKRTYEIREDKVQEMEKLELKYNPEKKDKTKSRKRNKKKTTKKAA

SEQ ID NO: 403975 - protein, 518 aa, unidentified
MRRCIGLDVDREFAQVAIWEDGLVRSAGQITTTPEAMRLFAQSLASSDEVALEATCNTHAIAKLLERQVARVVVSNPAKTRAIAEAKVKTDTVDAQVLAQLLAAGFLPSVWLPDDETHALRRQVARRAHIVRQRTRLKNGVHAILHRNLVARCPAADLFGCKGRAWLAEQELPRDEAQAVAALLRQLDFAGEELRLVDLELGRVGLERGEVARLMTIPGVDATVALSIVAAVGDFHRVSTPHKLVSYLGLNPRVRQSGGQPAQHGPITKHGRAHARGMLVESAWAASKTPGPLRAFYERVRARRGMQIAAVATARKLAVLCWHLVVKDEDYAFARPSLTDKKRRALELRAGLPSRRGQKGRAAAYSRKQVRRRENELAAQGEQAYRQLVADWQAKAPSTKRSAGAAAANGARLSRPSAGQAARQDSAPTPALRSGSTTPTPQASATPEDCRCPGPLESFIRGVDHSTDFRRKRQKWGHVLPGAKPCLGDHREPGPPLLVEALKAPGGRRRRRLRCRSA

SEQ ID NO: 403976 - protein, 506 aa, unidentified
MESDPCFSNVWMVTPLRNVHRSTTQSRPTSDHQRKDHVMSEVRLGIDVACRADHRASLADERGEFIWSSWKFRTTTADLERLWAKIPEDASVTVILEPTRNAWVPLSAWLQARGATVILVPPEQSADLRDYYNKHTKTDRLDSRVLARLPLLHPEGLRGIDNLGPAQSLRRAVRHRFSLVKRRSAASLRLDALVELLGPGWADALGSATASKTALVILEKYADPRALKRLGRARLAALLIRSSAGLWREDKADELLAMANETLALWSCGGIDFTELAHDIASEVRVLRQLDDEIAAADKRIAVLYDEADPKGIVRSAPGLGPVLSAAILGNAGDFNRFANLAGVRSFTGFVPKVDQSGLVAGHRGITKAGDAGLRQALYLAADHARHIDPTLAQRYYRLVMVEGKHHNSALCSVSAVLITRIAACWRKGELYELRDEDGEAITEAEGKAACTDRFKIDPKVRAARRRNTPAKVLKNRAAGRGRKESAQKVAPATDPPREEASENVA

SEQ ID NO: 403977 - protein, 407 aa, unidentified
MEVIIERACGMDVHKDSITACVMTPKGKEIQTFSTKTVFLLQLIDWIKEHGCTHVAMESTGVFWKPIVNLLEAENIEFLVVNAQHMKAVPGRKTDVKDAEWIAKLLRHGLLKASFIPDRNQRELRELVRYRRSIIEERARQHNRIQKVLEGVNIKLGSVVSDIMGVSSRDMIRAIADGEEDPEKLASFARRTMKKKKDELELALRGYINPHQRLMLKTILTHIDFLSEQIELLNLEVATRLSSHQEDIERLDSIPGIATRMAEQILAEVGTNVEKQFPSAAHLCSWAGLVPGHNESAGKRKSTNMKKGNKYLKSALIEAAHSVRGSKTYLGAMYRQTASRKGKKRAGISVAHVILRIAYYLLTRKEMYVDLGEDYFDKQKEQSIVRYSVRRLENLGYNVTIVEPDAS

SEQ ID NO: 403978 - protein, 412 aa, unidentified
MEVLHRCCCGLDVHKESVTACVLWAEGKGKKRKEKRQFGTMTRDLLALADWLQGCGVTHVAMESTGVYWKPVRNILEGQFEILLVNAQHIKAVPGRKTDQNDAEWIADLLQHGLVRSSFVPPTPIRELRDLTRYRVSLVHECNRIANRIQKVLEDGNIKLASVATDALGASGRAMLKGMLEGEEDSGKLAEMSRGLLRKKIPELQQALEGRLRSHHRFLLKELMEHLEFVESKIARLEQEIGEHLRPFEEAVERLCTIPGVDWVTASGLIAEIGVKMDQFGDAEHLSSWAGVCPGSHESAGKRKSGRTRKGSAWLRRCLCQAAWAVSTKRDNYLSALYRRLAARRGKKRAIIAVAHTLLQIAFYILRDRKCYQELGADYFDQLHPNRVKRYLVKRLERLGFQVSLAPAAQPA

SEQ ID NO: 403979 - protein, 388 aa, unidentified
MLAAADRTDASTAIQTDLPAIFASLELSRSAWLITSLSPGAGEKMSKHSIRAGDVAGLLMRLAQLKEKARGRTGRDFPIIAIQEAGLDGFWIHRVLQSEGIESHVVDAASILTSRRRRRAKTDGIDGETLVRTLLAYKRGEPRVCAMVKAPTPEEEDRRRICRERKTLVGERVEHVNRIKGLLFAQGVSEYEPLKRNRRARLEELKTGDGRPLPAHLKAQISRELDRLELVLPQLKAVEAERDALLKPVSEGCLAPAAMLAQLKGMGPEFTAILWSEGLFRSFSNRRQLAAYAGLAPTPWQSGSVAHEQGVSKAGNPRLRTTMIQLAWLWLRHQPTSALSVWFQQRVQSNGSKMRKTMIVALARKLLVALWRYSTSGVVIEGAVMKTI

SEQ ID NO: 403980 - protein, 386 aa, unidentified
MRKPNDLSRSLTVLKEDMTLIAVIEMSQSSWLIAGIVPGIERHPLKKLAVDESALLKLLNRWREQAEKVGHRIERIAIAFEAGRDGFWLARWLKARGIEAHIIHASSIAVSREHRRAKTDRLDTELLKRAFLGWLRGERDHCKMVAIPTLAQEDAKRPNRERESLVSEQSRIVNRMKAALARLGIRGFNPKLKTAVERLEGLCTPEDEPIPPNTLAELKRDMERRRLVRSQIRDIEKNRVERIDQAPSDGPHVMVRLLARVIGVGVETADMLVQEVLRRNLRDRRAVARYGGLTGSPDESGKKRREKGLARSGNARVRRGMIQLAWRFLMFQKDSALAQWFYARTKNAPQSRKTMIVALARKLLIALWRLVREGVVPEGVVLRPVS

SEQ ID NO: 403981 - protein, 357 aa, unidentified
MSKYIGCDAHRSYSTFVVVDENGRAGAPVRVEHEREEFRTFLRSLPAGSPVGVEASGGWYWLIEEMEQAGLEPHLAHALEAKQRMRGRNKTDPLDARGLAWLLYEKRFPEVWIPSGKLLDLRGLMRSRLALRAYQSGLKCRILAAINRYGLRGNESNAGDWFKGKGRVRLSVHVGGLPENTREATIQEWQLVDQLERHIEELQERIAEKIGKIGWVRLLETMPGVGKVLGATMYLEIGDVKRFPTASHLASSAGLVPRVYSSGGKTHYGSTPQDANRYLKWAFVEAANCTVMHKHRYGERHVGRLYERLKKAKGHGKAATAVARHLAEASWWILCKAQAYREPAPATMSSSENGSAR

SEQ ID NO: 403982 - protein, 330 aa, unidentified
MTLPVLGIDVSKKKFHVVLIGAAGRTPAHQFANRAAGFAQLTAWLQRQEVACVHACLEATGSYGEELARFLHQAGHRVSVVNPRQIRAFADSELARNKTDPLDAGLIARFCQAHRPPAWSPPPPEVAELEALVRRLDALEEMRQQEANRLDVARPAVQPSIAEHLDFLQQQIAKTQQAIRDHFDSHPDLRARRDLLISIPGIAEKTAAKLLAEIPQLEQFSQARQVAAFAGLNPRQYSSGCSVRGRSRLSKIGSPRVRQALYMPALVALRHNPVIRGLARRLALRGKQPMVIVGAAMRKLLHLAYGVLKSGVPFNPDYGSQNLLLSQDGI

SEQ ID NO: 403983 - protein, 323 aa, unidentified
MAVVVGVDIAKRSFDLAVLQSNGKYRTKGKLSNDPSGFAVFADWLQQHAEPGAWIVMEATGIYHEALAEHFHALGYRIAVLNPAQIARYAQSQLQRSKTDKLDAKLIATYGQRHEDSLRDWHPESVSIRTLRALTRRLEDLQSLRQMEFNRLEVSPEKVQDSIRAVLQRLDEQIAWTLEQIKRHIDDDPDLRGKRDLLVSIDGIADKTAALILAELGDIDRFANARAVTAFAGLNPRLQESGLARGHACLSRMGSVRLRSALYLPAVVALTYNPAIKAQAERLKARGKRGKQTVCAAMRKLLTIAYGVLKSGKPFDPALAIAH

SEQ ID NO: 403984 - protein, 456 aa, unidentified
MKKDVLALPVINPHAAGIDVGARGHFVAIDQITDHVKQFGVYTKDHMLLIEHLRAYGITTIAMESTGSYWQTLFNALQTAGFEVILVSGGQTKNVKGRKTDILDCMWIQKLHSLGLLSGSFLLSNYLQQLRTYYSHRQYLIEQTSKYTNKMQKALRLMNLRLDVVLNDITGHSGLAIIDAILAGERDPYQLAGLVSYRVKKSKEEIAAALHGQWRTDILFELRSCLSLYKTYETAILECDRQIESVLIAHTPVNHEAAQKPELQLKAMPKQLKKRSPTFNVQYIAFSYFRTDLYEIPGVSHTTVLCMLTNMGTDLSKFASAKQFASWLRLVPDNKISGGRIISRKTPSGKNTLAQALRQAANTIGNQKNHPLTPFFKRIAYRKGRIAAITATARKLAIIIWNMVTKQQSYKHFDYDHINQKNKHRQLKNIQQRLTKLNLNTEELKMLLQKASLSIT

SEQ ID NO: 403985 - protein, 338 aa, unidentified
MPLYGGIDLHANNSVIVILDDQDHVVYQKRLPNDLPSLLQQLSPYQASLQGVVVESTYNWYWLVDGLMERGYVVHLANTAAIQQYAGLKYTDDHSDARWLAHLLRLGVLPEGYIYPKEGRAVRDLLRKRSQLVQHKTTHLLSIQNLLTRNTGRAMSGNRIKQLTAADVDGLLPEPELALAVKSNLAVMRCLETQIATITQTVTQRVKLQAEFNALLTVSGIGQILALTIMLETGDIRRFPAVGNFASSCRCVGSQKLSNGKRKGSGNTKNGNKYLAWAFVEAAHFAVRYNPCIKRFYQRKQAKTNTVVATKAVAHKLARACFYIIRDQVPFDVSKAFQ

SEQ ID NO: 403986 - protein, 331 aa, unidentified
MNYRSFIGIDVSKLTFDVYVYDKKLKQQFTNNHSGYQSLCKWLKGNLKHDLKEAFICFEHTGLYSMNLAVFLQKSAVPYVIVPALEIKRSLGITRGKSDQVDAQRISEYAYMKREKLEPTVLPSSTIFKLKPLLALRDRLVVDRAGYQATYKEQKRVFATKEYTLLFATYQQLIKELTKKIALIESEMNNLLQTDEEMKQTFQLITGIKGIGPLTAAYLIVSTHNFSRFTSWRQFACYAGTAPFEYQSGTSIRGRSKVSPLANKQIKKLLFLSANNAARYDNELKEYYQRRLKEGKSKMSTLNIIKNKLIARTFAVVKRQTGYVDIRKFAA

SEQ ID NO: 403987 - protein, 345 aa, unidentified
MHIASIGIDLGKTTFHLVALGERNKILVRRKFSRSQLLAYTANLPASLIGLEACAGAHFMGAALREQGHQVRLIPAQFVKPYRKSNKNDFIDAEAIAEAVTKQNMRFVQIKTQEQLDGQAMHRVRDRLVQRRTALINEIRGFLLERGLTFAARPIYLRKNLPTVIEDAEQNLSSHLRWLLDRLWQEWKQTETEIEAITDEIERISNEDARCRQLRQIPGFGPLVSTATVAAIGTGSAFRRGRDFAAWVGVVPRQYSTGGKQKLYGISKRGNIYLRRMLIHGARSVLFRVKYDTGGFGQWVHRLAQRAPSNKVVVAIANKLARIAWAVLSSGQDYRHQPLQQLAAA

SEQ ID NO: 403988 - protein, 425 aa, unidentified
MSKDSVEIAAFIGLDWADQKHAVVMQEAGSDQRHRFELDHTPEALQNWIQSLRDRFGGRPVAIALEQKRGALIYALMHVEFLHLYPVNPVTAAKMREAFHSSGAKDDPRDADLLLDILISHRRHLRVWTPDDALTRSIQLLTEDRRHVVDERTALTNQLTAALKMYFPQALEWFGDLHTARACAFLQRWPSLQQLKQATPSSIRKFYKTQGYRGDEKREQLVGNIAKALPLIEDSAILLAGSMKVQTLVTQIPLLTEAIERYDQKVAALFERHDDSTLFGSFPGAGPALAPRLLAAFGSNRARFEFASEVQELSGIAPVTERSGVGLWIHWRLACSKFLRQTFQEFAGRSILQSDWARACYDLLRKRGKSHNAAVRALAYKWIRILFRCWKTRTPYDEAVYCNSLKSRRSPLAAELSAAGKTVLT

SEQ ID NO: 403989 - protein, 342 aa, unidentified
MPLYGGIDLHANNSVVVLLNDQDQVIYEKRLPNHLPAILEPLRLHPGEIEGVVVESTYNWYWLVDGLMEAGYRVHLANPAAIQQYSGLKYSNDHSDARWLAHLLRLGILPQGYIYPKAERAVRDLLRKRAHVVRQHTANVLSMQNILARNTGARFSLTRIHELTQQELQRLLTEEAQVLAVTSSLAVLDCLQQQINILEQSVQKRLRHTPSYEQLLTVAGIGPILAQTIALETGAISRFPSVGHYASYCRCVDSNKLSNGKRKGTGNVQNGHPYLAWASMEAAQFALRLQPAAQRFYQRKLAKSRNNTVLARKALAHQLARACYYLMRDLVPFEATKAFGGG

SEQ ID NO: 403990 - protein, 401 aa, unidentified
MKSLSGGIDIGSESHHVIIMDDTGEVLYDRKVAHEFSEFHKVIGEFKGIEEREQGVIAFAIEGKNGYGAPFDRILIENGFKLYNVDNLKLRRFRDVFGSEWRNDRRDAKMLAKMLRLKDHMDAQEEKAFIAVEKPSAVHEKLRILSRHQQSLIDEKVRIQSRLRKRLLEVCPDILEHGDTNSKKLLQLLKKYPDFSRYKKITLGALLKIETIGKKTAVSILEGLRNIQYVEELTGIYKALISSYCHRILELKEEIKMLDRELEEAGQKSAEVMQLKSIKGVGTKLSSRLAGEIGDIRRFNRESQLAVYCGVACIDDDSGKSKRTKAVYKANRICKATMIEIAGCTIRYVQESKTYYEKKRAEGKKHNHALRCLARQLIKVIFKMLTENREYIYKEELKKAA

SEQ ID NO: 403991 - protein, 353 aa, unidentified
MKQYIGCDAHARYSIFVSMDENGKAAAPTRVEHDELEMRRFLSTLPAGSPVALETSGNWYWLVRAMEEAGLDPRLAHALEVKKRMPGRNKTDGLDAKGLALLLRNDALPEVWIPPAKLLDLRDLMRTRLSVRQQGSLLKCRIQAALRRYGARDYGDRADLFAGKSRAKLSGSIARLPQETRLATLHEWELLDFLEAQIAALEERIRERIASVGWVRLLKSLPGIGTILGCTLYLEIGDVGRFATPEKLASYAGLVPTVHASGGKLWQGSIPRSANHFLKWAFVEAANVIVAHQKQWPQRHVVRLYQRLRASKCHGKAATAVARHLAESSWWILTKKQPYREPAPATLSSSKNG

SEQ ID NO: 403992 - protein, 420 aa, unidentified
MTQSEDSRIIKIVHPICCGMDVHKKSISACIIYPDENGEEKHEIKVFQTFTDSLMRLKDWLIECECPVVAMESTGIYWRPVHNVLEGTFQVVLTNARNMKNVPGRKTDIGDSRWIAGLLRHGLLQSSFIPPQEVRQWRDLTRLRKSYVQSEADYRKRTQKLFESANIKIDSVVSDLFGVTGRNLMQLLITDRKDLTVSDIATCTCGKLKGKEEPLLRSIQGFFTDHHRFLLKSLLETISNLEQQIAELDREISRSMVAQKSVLDRMKKAPGISDVAAADILAELGPTLESFPTDSALASWSGLCPGNNESAGKRKSGHSPVYKHHLKTIMLEVAWAAIKKKGSYFKEKYYRLKARRGARKAIMAIAHRILLGIYHVIKDGVEFRDLGEEYLKGKNRSQKFVLLRKQALALGYELVPQTVK

SEQ ID NO: 403993 - protein, 384 aa, unidentified
MSKDSIIFIGLDTHKSFIQVAVLQEHRGANPQHLGRIKSNKSALIKLARQLQSKYPKATLHFVYEAGPCGYWTYRLITSLGHCCYVVAPSLIPKKPGDRVKIDKRDAAKLAKLLKAEELTPIYVPEAEDEAIRDLSRARETAMKDLKDAKFQLKGFLLRNNIQATVNDNWSKKHLRWLTDLILPHHSQQIVLQEMIITINERIQRLQRLDNELLHQVKNWRYYPVVKAIQAMRGVRLLVALGTIAELGDLRRFDHPRKLMAYLGLVPTENSSGGKTRRGSLTKCGNSRARRLLVEGAHTYKHKANISVELQLRQEGLPKEIVDIAWQAQQRLCRRYQRLLQKGKHRNVVVVAIAREMIAYIWAIAREVVISDVDPRTRIARLPA

SEQ ID NO: 403994 - protein, 316 aa, unidentified
MSKAVCEITLGIDVSKDELVIFDWDTEQITRLVNQADEIKAWLGALYGPVRIAIEPTSNYHLEFVEQAHALDLSVYLINPRQLKHYRMAVNVRNKTDPDDAWLLARYLVHESNLLRPFKPQCARAQRLWALIKRRGVAVSARQKLQQSFSESQLPAKALFTEFEKVIARIDQRIQALIRALGWWADYQRCLSIPGIGPVNAAALTAVFHRGAFAGADAFIAFIGLDVRVRESGKFTGKRKLTKCGEAEIRRLLYCATQPARSYHLFDSYYQKQLEKGLSKIATKVILSRKLARIAFSLLANQTTFKKQEIAYSQAP

SEQ ID NO: 403995 - protein, 457 aa, unidentified
MRQKSKRTRGIEEAHPFSSLSRVNLQAAGVDIGAIEIVACVAGDENTQIVKAFGNYTVDLQALAQWMKAHQVRTVAMESTGVYWIPLFEELERQGFECLLISSRSLRRVAGRKSDISDAQWIQTLHSYGLLEGSFRPQAELVALRTLLRHRSQLVEHRSPHIQHMQKALLQMNVQLTQAVSDITGVTGQTIIRSILAGVRDPQTLASMREPGCKKSEEEIGKALTGTWREEHLFILKQSLAMYDFYTQQIHACDEEIDRLYGMTRPDWEAGEVQPLSWRKRNSHSKNIPHNSEAIRKHLKRISGVDLSVVDGFGVSLAQTVIMEVGTDMSKFPDEKHFCSWLGLAPKHEISGGKVLKNSTLKTKNRAGQAFRMAANSVKQADCVFGVMYRRLRARLGPAQATVATAHALARVVYRMLKFQVEYEPLHVNEYQKHYEEQQIKYMRKKAAKFGFQLVPA

SEQ ID NO: 403996 - protein, 345 aa, unidentified
MKILGCDLHTRYQQIAMLDEETGELVERRLEHGNGEAKEFYTHLAGPVRVGIEATGHTRWFEQLLAELGHELWMGDAARIRAAEVRKQKTDARDAALLLDLLLSGRFPRLWRPARQERDLRHLLWHRQKLVWMRNAVGNQLHALAMGEGLCRKKQLFTKKGRCELEALKLDAWASRQRQELLHLLDQLDASLAQFDQAVNEQAAANGDAVRLMTHPGVGPVTSLAFALIVGPAARFERSKQLVSYLGLNPCEHSSGGKQKLGAISKQGNPMLRGLLVEAGHTAARMDPELRQDYQRLRLRRGGSVAKVAIARKLAVRMYWMLRREVNYTQLVRTQGSSRATLVQQ

SEQ ID NO: 403997 - protein, 387 aa, unidentified
MSQAFDASKSLTALEQDSTIIAVIEMSQAKWLVAGVVPGVERQPLKRLAADEAALLKLLHRWRNEAGQAGCQIKRIVVAYEAGRDGFWLARWLRVRGVEAYIIHPASIAVSREHRRAKTDRLDTELLMRAFLGWLRGEKRHCSMVAIPTVEEEDARRPNRERGNLVTEQTRIVNQIKAVLTRFGIRTFRPTLRKAEEQLEGLRTAEGAPLLENTRAELRRYLARLRVVREQIRTIEQSRLGKLATTPEKGPHAMVRLIARVLGVGVETADMLVNEVFSRHWRDRKAIARYAGLTGSPDESGRRRRERGLARAGNTRVRCGMIQFAWRFLRFQKDSALAQWFAARTADRRASTRKTMIVALARKLLIALWRLATSGEVSDGIVLRPAS

SEQ ID NO: 403998 - protein, 354 aa, unidentified
MKRTTKYVGLDVHQATTVASVREESGRVIARTILPTEEPALVEFFGGMRGSIQVAFEEGTQAQWLHDLLSPQLDHVVVCDRRGQRRQGNHGDQVDADRLSDELRRGGLRAVYHGSAERLALKEFARTYQNLVEDSTRVMQRLKALFRARGIKTSGKHVYHPRERVEWLAKLPDRAVRFRAAALYAELDVLRELRPKAKAAMVAEARRDPAWPVLLGIPFFGPVRVSLLLAIMRTPWRFRTKRNLWAYCGLAVVTYSSSEYTLVDGRPRRRRRAPMTRGLNRNHNRVLKDIFKGAATAAATRPGPLQDFYLEMTARGMREELARVTLTRKLAALTLRLWKTGEHYDPAKLTMQAR

SEQ ID NO: 403999 - protein, 412 aa, unidentified
MEVIIERCCGIDVHKKTIVCCLMVGKPGQKPKITIKTFSTMTRDLLACKDWLESEGCTHVALESTGVYWKPVFNILEDSLEIILANARYIKNVPGRKTDVKDCEWIAQLLRHGLIKGSFIPPRPVRELRDLTRYRKKLIQQRASELNRIHKFLEDANIKLSSVVTDINGVSAQEMIYHLIKQDMTPQEMAELARGRLRKKITELEKALEGALKEHHRLILTLSIQMIASYDQAIDKLNAEIDERMKPYRTESERLQTIPGIKKTAAESIIAEIGVDMSRFPSDKHLSSWAGVSPGNNESAGKRHSGRCTQGNRWLKSTLTESAWAASKTKGTYLKARYQRLASRRGNKRACFAVGHTILIMAYHIIKEQCTYRELGSDYFDRLNEEHIIKRLTSRIQALGYKVDLEKLPAAA

SEQ ID NO: 404000 - protein, 317 aa, unidentified
MALQRTFVGIDVSKEWLDLWLAPLKRFERAGNDGAGWAAVIGLLKSLGIEAGIVVAFEATGGYEQGLRRALLEAGFDVRRLNPLRVRLYAKSLGRNAKNDRIDARVIARYAEAADTTPDILDPARERLAELVSHRRRLVDERVAVGNQTNTLHCVLLQAQNRKRLALIERQIDETDTLILEAVGQVPSLVAKVGLLKTLKGVKDITAIALVALLPELGRITRRAIAALVGLAPFDHDSGKFTGTRSIAGGRAAVRTALYMAARAAARSKSPLGDFYKRLIAAGKSPKVATVALMRKMLVTLNAMVRDNEAWKHAKPC

SEQ ID NO: 404001 - protein, 342 aa, unidentified
MKSTTIAVDVAKEVLEVAVSVRPGQVSEQRRLSRAAFVKFCADQPPATVLLEACGSAHYWGRRLQTLGHRVVLLPPHATRPYVFRNKTDRTDTRGLLEAYRNEDIHSVPVKSVSQQALTALHRLRSTWLATRTARLNTMRGLLREFGCVIPLGAHHVLPRAWDLLADPDSGLPDALRPALAKVCTEIRQLDDSIRLVENQLEALAHQTPAVARLRSIPGVGLITATALVAFVGDVQRFPSGRHFASYLGLTPREHSSGLIRRLGAISKRGDVYLRMLLIHGARAVLWAAKKRSTPDRLRTWALHLQKLHGHNKAAIALANKLARVVWAVWKHDVDFREVPAA

SEQ ID NO: 404002 - protein, 320 aa, unidentified
MSKPSEEGFVGIDVSKTQLDVAVGQAGETWSAGNNEIGIAQTVERLKALRPQLVVVESTGGLERRLLQTLQQAGIPFALVNPHRVREFAKSLGLWAKTDKIDARLLARFGAAIQPEPTHLPGEAEQLLSALIARRTQLIDFRTAELNRLASAHPAIQASIQLLLNQLAEQISLLDQQIQQLISQNEAFHNKDEILRSVPGIGPIASAILIADLPELGCLDRKKVAALVGVAPFNDDSGYRSGKRRTKGGRAAVRKVLYMAAISASRFNPVIKAFYEHLLKRGKLKKVALVACMRKLLTILNAMLCSHTPWRTNEFTLHRP

SEQ ID NO: 404003 - protein, 370 aa, unidentified
MGQSTPLFVGLDVHKDSIAVAHAQGQSADPPVFVGAIGTRHADLDKLIRRLQTKTSTLVFAYEAGPCGYTLHRDLTGQGFICHVVAPSLIPKKPGDRVKTDRRDAVELARLLRSGDLTAVYVPSVEDEALRDLCRARDAARVSGKDAKLRLKAFLLRLGRHYVGRATWNDAHRRYLEKVVCPTPAQQIVFQESVRAVDEQVDRLQRLEAELLERAPAWRLYPVVQALQALRGVQFLVAITVVAELGDLTRFDSPRQLAAFVGLIPSEYSSGGSRRQGGITKAGNGRARRALIEAAWAYRHPAKVSLHIQQRIDRLPKPLQDLGWKAQVRLCKRFRRLVARGKHPNVAVTAVARELIAFMWAIAKEVPLQA

SEQ ID NO: 404004 - protein, 430 aa, unidentified
MRLHACPDGQKRTLTKNTNSPTNKEPRAKRAKAQRPVQREAKEVLAELVEKLRGKLELKSTSASAAEAGPRGELSPNLDRLTVGLDLGDQRSHFCILGFEGETLSEGQLQTREAEVAEFFQALAPARVVMEVGTHSAWMQEIIAGEGHEVVVANPRLMEGSKRRKRKNDRIDAKKLARLGRVDPQSLHPIRHRSREVRQDLVVLRAREALVAARTELINATRGLVKSMGTRLPKCSSPSFGQKVKDVIPEKVREALLPLVQLADALSDCIQSYDQKIEELGSEKYGHTKLLRQVKGVGPITALAYVLTLENPEHFAKSREVGPYLGLVPKQEDSGESQPQLGISKTGDTMVRKLLVGSAHYILGPFGPDTDLRRYGLRLCERGGKNAKKRAAVAVARKLAVLLHRLWVSGEVYEPLGYAASRAIVQPAAA

SEQ ID NO: 404005 - protein, 474 aa, unidentified
MSKRELEKQRAQVRSRKAQRRKAIAKSKAERVVALPVIRPDTAGVDIGATEIYVAVSPHRDAEPVRSFGTFTSDLNAIADWLEACEVRNVAMESTGVYWIPLYQILMDRKFEVCLVNARHFHNVPGRKTDVCDCQWLQYLHAVGLLRGSFRPEQTICAVRTLLRHRQSLVQMGAEHVLHMQKALEQMNVKLGHVISDLTGVTGMRIIDAILGGQTDAQELAKLRDKRIKADEETIVKSLQGDYRKEHLITLEQSVAGYRFYQKQMTELDQKLEGFMEALPAKIDLREHPLPASKKRQKQHNAPHYDLRSHCYRAFGVDLTEIPGIAAPTAQVLLVEVGPDLAKFPSASSFAKWLTLCPNNDITGGKVQSSRTSKGKSRAALALRQAAQTLEQTDNYMGQFFRRMRAKSGRAEAITAVAHKLARIFFTMVRNGRPYDESALVKADAQHRARQEAKLHTHARAMGFQLVPMEAASV

SEQ ID NO: 404006 - protein, 344 aa, unidentified
MENYAGIDVSLELSSVCVVDAQGKILKEAKVTSEPDALVEFFETLGFAVKRIGLEAGPLSQWLHAGLKTAGFETVLLETRHVKAALSAMTVKTDRKDARGIAQLIRMGWFRAVHAKSIGAQEVRALLVARKQLLGRLIDVELSIRGILRGFGLKVGPVTRQNFEARIRELVAGQATLERIAIAMLSARSALKAEYGRLHKAVLAIVRDDAVCRRLMTVPGVGPLVAITYKSAIDDPHRIVKSKAAGALFGLTPKKYQSGEKDVTGGITLAGDEIVRTVLYEAANVLLSRITRFSKLKRWGMDVAKRRGSKRAKVALARKLAVILHRIWVDGTTYRWTDAGPIAA

SEQ ID NO: 404007 - protein, 347 aa, unidentified
MENIGIDVHKNQSQICFLTEGGELKQIRTRTERERFAAVLGERAKARILIEASTESEWVARCLEELGHEVIVADPNYAPMYAHRSRRVKTDRRDAEALAIACRLGAYRPAHRTSDEQRQVRALLSVRDALVRSRVRYIGLMRALLRRQGLRVRSGASSSFVVRVKEVELPVELQTVMAPLLTVMEGVNQQIESSNDEVEKIAKEDEVVKRLCTAPGVGVLTATAFVATVDQVERFGGAHQVENYVGLVPREWSSGEKQQRGAITKQGNGRTRWLLVEAAWTILHQAGSEGASLRGWARRIAVRRGKKVAVVALARRLAGILYAMWRDGTRYQEELVGRGQSRAEVEA

SEQ ID NO: 404008 - protein, 350 aa, unidentified
MKTMHPVIIGIDTHKATHVAVAIDTQGTRLATLSIPTNPKGYLELERWSQSLGKVQAFGIEGTGSYGAGLSRSLLAHGHNVIEVTRPNRQLRYTQGKTDSLDAEGAARSVLSGQATARPKTQTGSSEMIRHLKIARDTAVKSRSQAMITLKTLIINAPADLRDALNHIRGKIALIRHIAAFRPGGIDTPLASAKAALRALARRWLWLHEEIISHDKELERLVTERAPELMASHGIATLTVAEMLILVGDDPTRIRSEAAFAKLCGVCPIPASSGKTHRFRLNRGGNRQANAALYRVAIVRMRSHEPTLAYVKKRTKDGKSKSEIIRCLKRYIVREIYSQLCVPKSSQIKA

SEQ ID NO: 404009 - protein, 353 aa, unidentified
MTTMTDAPTRITAGADTHRDVHMVAALDHRGAELGVRPFSTDTAGYQEMLSWLEGLGQLERVGVEGTGTYGAGLTRFLHDHDVVVVEVTCADRQERRSHGKSDPVDAIAAARSAQSGKARALPKTRTGSVEAVRALRLVRRSATRDRTSAINQMRALVVTAPDDLRGAMRSLTIYKLVSTAARFRPADATTPEGATRFALRELARRVQSLDSEIERVNAVLGPLVAATAPGLVARHGIGTDTAATLLVTAGDNPQRLRSEASFAHLCGSSPIDASSGLITRKRLNPRGDRLANEALWRIVMVRMASEPRTRAYVLRRTLEGKSKREIIRCLKRYVAREVFSDLVNLVQPLDRQ

SEQ ID NO: 404010 - protein, 393 aa, unidentified
MKATVFVGIDVSKDSFDVSCVDEQEVIRWAFKFSMDRQGFGDFFKHLSQEQSPIIALESTGIYHVNLLTFLSKHSCDIKLVSPSLVKRFIESYSLRKTKTDAKDAHMIALYVRRNHNTLISYKPEARQCLTQLTRTREDIQQDIRKTKNHIKRLLILTFPELEQVVDVFLLSVRLLLKQYPSARIVRQRRARGVKKAFEAVLSQQGRKMKLTPELFIHLAKKSIASGDEKDEKALLYHLEHLAFLEKRMMDLEKRLIDEAYKRYQKPMAILTSFKGMGNILASQFLSEVGDIHRFQNYKKLIAYAGTDPVIKESGLAKSNGGISKRGSAHLRHVGFLIARCAILHDTRFNLYYKRKKSEGMSYKMAVIATWNKMAKIIHHLLTHEMYYVPDFV

SEQ ID NO: 404011 - protein, 316 aa, unidentified
MESQRPFVGIDVSAEHLDVGTMPASKTFSQPYTEDGIAYLVLHLKPLNPQIVLLEATGGYEIPVAYALYEAGLPVVIINPKAVRQFAKAIGILAKTDKLDAQVLALYAQKIQPPVRPLKDQEQLELTNLMTRRRQLQGMIVMEENRRRTCTAKVRGNVEKSLAHLRQLLKDLDRDIQDFIRRSPLWHEKAAILQKVIGIGPVVSSELLAHLPELGFIDRKKVAALVGVAPMNRDSGQWRGQRRIQGGRPAVRRALYMAALVASRHNPVIRDFYQRLRQAGKPPKVALTACMRKLLVILNAMLKNHAHCHQPLPLAA

SEQ ID NO: 404012 - protein, 414 aa, unidentified
MHVVHERCCGLDVHQKSVVACLITLDTQGKQDKQLRRFGTMTAELLALADWLTAAGCTHVAMESTGVYWKPVFNLFEGLFTLLVVNAQHIKHLPGRKTDMRDAEWIADLLQHGLLQPSFIPSAEQRALRDFTRHRSTLVEERARIVNRLQKVLEDTNIKLAAVASDITGKSARMMLEALLAGERDVNRLADLARGRMRSKRAQLEQALAGRMQPHHGFLIAEHLSHIDYLDEAIERLSGQIAARLTECEEEIALLDTVPGLSRRSAEVLVADAAPRAPGTDLSRFPSAAHLASWAGMCPGNHQSGGKRLSGKTRKGSRWLRQVLIEAAHAAARSKTTYLGAQYRRLAARRGTKKAIIALGHTILVMVYHVLTRREPYRDLGSNYFDEHDRQAVERRLVRRLEKLGLTVSIERAA

SEQ ID NO: 404013 - protein, 341 aa, unidentified
MNVKTIGIDLAKNVFQIHGVDEHGKRLFNKQLRRAQMASFFANIPPCLIGMEACASAHFWANKLISMGHNVKLMAPQFVKPYVKTNKHDAADAEAICEAVTRPNMRFVPVKTAEQQAVLALHRSRQSFIKQRTAQANQIRGLLAEFGIVVPRGIQQLQRRLPELVEDADNPLPVLFRTQLSLLQHHMAYLFDVIATLDKQIEQCYRQNALCQRIGKIPGIGPVTASALIATIGKANNFEKGRQLAAWLGLVPRQHSSGGKQVLLGISKRGDTYLRTLLIHGARAVLQSAKHKQDAVSSWANQLMARRNNNIASVALANKNARTVWALLAKEREYCAPIISA

SEQ ID NO: 404014 - protein, 356 aa, unidentified
MQTQVTKKIDFTGKNLFIGLDVHKKSWSVTIVVDGIEHRTFTQPPDTGALFYYLQRMLPGGSYNSAYEAGFCGYGIHRELNSLGIKNIVINAADIPTTQKDKLQKRDPIDSRKIARSLENGSLKGIHIFDRDLEELRSLNRTRFYLMRDLRRSKNRIKSFLQYYGESIPPEFDNNQWTLKFVSWLKQVQMKTVSGQDAFHHLINSYEHHREQLVTLSRQIRIRIREYDNELYSLLKTISGIGPLTSSALITELGDINRFHCIKNLSSYVGLIPRIRESGETVHVGGITFRCNTFLRTLLIESSWQAIRMDPAMMQYYHKHLVNNTGHKVIIKVARKLLNRISYVMKNRQPYLTGVA

SEQ ID NO: 404015 - protein, 315 aa, unidentified
MIQANTTTAGIDTSKAKLDIAVHGRTERWQVANALPGWRALAANLAEAGVTRVGIEATGGYERGVVEHLRAAGFTVLMLQPLQVKAFGRVHLRRAKNDALDAVLIAACAAALDPPEIAPDPRLSELADYLTFLEQIEEDIRRFKTRLEHIDEPALRRLVNSDIARLKVRKAAQIRDIAKRLRSHDDLAKRLKLVLSIPGIGERTALAIVIRMPELGRVSREEAAALAGLAPFDADSGKYRGQRKIAGGRSRLRRSLFAAALPAAFRWNKALVALYARLIAKGKVHNAALIACARKLLIYANTVVQRGTPWTEKAA

SEQ ID NO: 404016 - protein, 341 aa, unidentified
MSEVTMIGIDLAKRVFQLHGACANGTVVFRKKLTRIQLLAFMSQQSACVVAMEACATAHSWGREFEKLGHTVRLIAPNYVKPFVKRQKNDVADAEAIVEAASRPTMRFVELKSEAQQARAMLFRTRQMFVGQRTQTINALRGHLAEHGFVAPQGAIQVKRLADAVADETIGLPEDVRELAKVYLVQIENLSAQIAVLDRKMKSAAKEAEAARRAQTMPGVGPITALAIETFAPDLNCFRRGRDFAAWLGLVPKQTSTGGKPRLGKTSKMGQRDIRRLLISGAMAVLQAVERFGKPHNGWLISMLERKPRMLVAVALANKMARGLWAMVTKQEDYRNPATMA

SEQ ID NO: 404017 - protein, 450 aa, unidentified
MSPLALDVVTKTDKTPVLGRMLSKYVGRKTSSIENGITKARNHSRQRGNIMRVVFGIDVSKASSEVAILVNGEKVHGYTIPNDAIGFNRLLGDLKTVHQPEIVFEATGVYSRRLQAFFEDNSYAYIRLNPLESKKQLDSLRVRKTDKIDAEKLATSQFILNRKPSYVQEALYQELRDLSRFYQNLTEDIVCSKNRLHKVLQVTFPELENILSSPTGKQYWNLVMAFPCNSFVLELDDAALRAIIRQSTSKRISENRVTYLVDKLTKLANHSYCAVKKTSPVIEEVKYYAGELLRLSEYRQSVLEKMITLAQPLPEYEILLSIPGIAETTATSIIGELGDIRRFHSANQINAFIGIDLRHYESGDFLAKEHITKRGNPYARKILFKCIHNIASASHTNPCHIADFYEKRKRQSQVTSTKPHTIASIHRLIRTMYYLITHNKLYDYTSTQNR

SEQ ID NO: 404018 - protein, 343 aa, unidentified
MRTAIGIDTHKSSLAACAIDERGAARAEAMFTNDGAGHRQLRAWAAAVTPGARIGVEGSSVYGSALSRFLVAAGLDVREVPPHLSRYERVRTRRAGKSDPGDALAIARVAAREVDLPPVRMDDLSHDVGLLTDARDDVVADITRTRNRIHADLVRLVPGYEARAANLVAARHRRTAAGLLRRVPGVHAELARDRLRELERLIAKAAAFERRLADLVGDHPLVGLKGSGVLIAAKLIGEVGDVHRFRSVDAFAMLAGVAPIPASSGQTQRLRLNRGGNRQLNRALHSIALSQAWHHPPATAFIARKRVEGRTWREALRSLKRHLAGRLPPARRRDHSRGTDHLT

SEQ ID NO: 404019 - protein, 339 aa, unidentified
MAIVGGLDVHRGQITFDCLDSDSGQVQRGRIVPATRDRFRAWLRELPRPAVLAVEGCTGWRFVVEECREAGVEVQLAEPADTAAANGPEHRARTDRADAAKIRHLLAEDRLLQSWIPPTQVLEMRTLLRLYKDLRDEHTAWVQRIHAHLFHHGVPAPVGDLLALEMRARLTAGEGLSPAAHQAVQAALRTLDALEREMTVLRRQFTLFARRQPGCAALLEYYGVGPVTAVAIWAELGVARRFSSSRQAVRHAGLDITVYSSDSKRSPGRLARQGPPLLRWALFEAAKCAARPSAPDYAYYQQVKERCGGNRAALSVARKLIRRAHHTLRALGDKALAPA

SEQ ID NO: 404020 - protein, 417 aa, unidentified
MNTENYGALVTLDWGETEHAFATEVADSPAETGKMPATPETLHGWLEQIHKRTGGRPVAIALEGGKSAVVHALLEHPWLTIFPVHPATSDRFRKAFTPSGAKDDIPDALVLLTILKQHRSLLRPLKLDTPQTRKLAGLVAARRQAVDRRTRIACELASTLKTYFPQALELCGREPATDLMLDFLTRWPQLRSLKAARPATLRAFYAAHNSRHSEVVAGRLALIANARALTEDRAVIEPAMLEVKMLVDILRPLQKNIALIEEHIAEAFEAHPEAALFRGLPGAGPATAPRLLAAFGTDRDRLPEASSMQKCAGIAPVKQKSGHSLWIHWRWNAPKFLRQTFVEWAGQSVPKCAWAKAYYQQQRAAGKHHQATLRALAFKWIRILWRCWQDRVPYNEARYLASLQRKNSPLAARLAIT

SEQ ID NO: 404021 - protein, 422 aa, unidentified
MPADRDPEPVREFGAFTADLYRLADWLGACGIETVALESTGVYWIPVFQVLEARGFEVKLVDTHQLKRVPGRKTDVVDCQWLQQLHSFGLLAGAFRPDQQVCVLRSYTRQRAMLVSYAGQHVQHLQKALVQMNLQLALVLDDITGATGMRIIRAVLAGERDPERLAGLRHGQCKHSAATIAKALQGDWREEHLFALEQAVELIEAYQAKIAACDARIQAHLLTFADRSDGQSPPKGPAPRADRHDLSFDATAELFRLTGVDLTAIKGLQAHTVLKVLSETGLDMTKWPTAKHFGSWLGLAPNNRVSGGKVLSRRTTPTANRAAAALRVAAQSLHHSSSALGAFLRRKATHRGMPKAITATAYKLATILYTMLTKGTEFVDLGQDYYERAYQDRVLKALTRRARAFGYNLVKQDQTAFCPASG

SEQ ID NO: 404022 - protein, 360 aa, unidentified
MRNYVTNLDSIITRHGKNPDDIHVIVGLDIAKNVFQVHAVDLGTGELITKAIKRDQLKEFFANMSTALIGIEACGSSQYWDRELKQLGHVVRLLHPKSVKAFLQGSKSDANDAFAIYRAVQSPDIREVSVKSIELQSLDSLRVLRAGAVKEQTAAINRFRMILAEYGQAIQKSKKAFMRNASEALASLESSINGVTYHALELELQTIRDRDEKIEEYNRRIHEVVENNHLAKLLKSMPGVGDLIACAMAVALADPSVFRSGRDFAAFLGLVPGHTGSGGKVIMLGITKRGDRSIRSLLVNGAMTALRQKHRPDFVERLIKKGKTKKVIAVALAARMARALWAMASRQEKYKAKVLSISNP

SEQ ID NO: 404023 - protein, 391 aa, unidentified
MIYIGIDVAKDKHDCFITNSDSEVLFKAFTIFNNLDGFNDLYQKIESVMDDVTKVKVGLEATGHYSYNLLGYLIDKGLTTFVINPLHTNLYRKSLSLRQTKTDKVDARTIASMLMSDVNLKSYSDTSYHNEELKSLTRYRFDKVKERAKLKTSVSRLVCILFPELEKLVPTLHMASVYALLSEFPSAKHVATAHLTRLTNLLSKSSKGRYGKDTAITFRDSARASIGSNMPAKSLELKHTIKLIQELDSEIDEIENEIKIIMDEINSPILSIPGINYRMGAMIIAEIGDFNRFDSPDKILAYAGFSPSTYQSGQLDGAYAHMEKRGSRYLRYALYNATKYVCHWDPTFAAYLAKKRAEGKHYNVAISHAVKKLVRVIYHLEKTKQQYIKAA

SEQ ID NO: 404024 - protein, 371 aa, unidentified
MKQQSKSSNITVGLDLGDRRHRFCALDERGEVVEEGSICNERDSLRKLAGRYHGALGVMEAGAHSPWISRFLEALGWRVVVSNPRKVRAIYQHERKSDRRDALMLARIGRMDLALLYPVRHGTAEAQQDLLRIKLRDSLVRARVAVINSVRFTLKSLGYTVRNPSSARFHKVVMEEVPESVREMITPSVQALAELTARIKMLELEINTLAQMKYPQSAQLQQIPGVGPITALYFVLKIEDPNRFAHVRDVGAYAGLCPRRDQSGESDPQLRISKRGDAYLRRLLVSAAHYILGPFGPQSALRAYGLMLAADGTAQAKKRATVAVARKLAVLLLSLWKSQQPYQPFPGARLNGQQEDRRSGTIALHRMEATD

SEQ ID NO: 404025 - protein, 349 aa, unidentified
MIWIGVDAHKAVHEAIALGQEGVVGQRRLANTPEAWAALLEWAGQWPERIWAIEGAWYLGRGLAQYLAEQGERVHEVNGRWTARRRRGMRTPGKNDRLDARSVATLLREEAATLPRVYAEEDELASVQLWSRTQAELTKDLTRLINRLHELLLQCDPQYKDKLPALTTKAAIAALATYSAPGQGVLAREREALIHQTAAQLALLDEQDRELRRKLERASKSRFFPLRQVEGIGALIACAIVAEVGSPRPGFGEQQLAALGGLCPLGASSAGTVRHRLNRLGNRRLNMLFHQIVLTQARIYPPARTYLLRRKAEGRTAREARRALKRLIVRRVYQAWTACFETNLERVAA

SEQ ID NO: 404026 - protein, 419 aa, unidentified
MSLVQPTQTPAVLVAIDIAKLRHDVLSEAPGWKNRKRLILPNTAAEFGLFADYLHGLKHPVRVVFEATGNYHRPLAHFLKSEGFHLELIASLAVARTREAMHNSWDKNDPKDAQVLLHLLKTGVTQHYHDPLTNQIHDFQELSLTYAQISLEKTRTQHRLLTHYLPLYFPKIERYYHASRSEWLLVFLQVFPTPALIARLSMEDFVQQAWTVVGHKVSKQRLLEDIYRTAQSSIGIPVEMDSEAVAMFRVVLGEMIRLCQLRDQLEQRAACHLKDNADFRRLQQMPGIGPILALTILAEAGDLRRFNHHRQFLKFCGLDLSTQQSGQFRGTTKLSKYGNARLRCAFWMAATVAVRLRENSFRDKFERYLRRDPLSADRKRMAYVAVAAKMARVAHGIIKTGTEDLVDNDPAFHLVEISF

SEQ ID NO: 404027 - protein, 347 aa, unidentified
MAFIGVDLHTNSFTICRLHDDGREAFETFPLSASDLERFCLSVDADDEIAVEATGNTAWFCDEIRPCVGRIVVVNPRQFQVIRKSVNKTDKNDARALAFFLSKDMLPETRLKSTAEAELSSLTQTRDVLVKQRTMLLNKVHAMFVRRGCKLKKEGLASRKRLRELDLSQFTALEQVELDALRTQALNLTEALNALDKAIAAAGSALPGYEEISSIKGIGPRSAAILLSGIGDVSDFDTADKLAAYVGIVPKVSQSNDTDNRGGITKRGDKLMRTTLVQCTLVAIRYSGYLNAFYRRIKERRGSGKAIIATARKFLSIIYDTLKNGWIFEDFTKFKIKQNQCPAGQTS

SEQ ID NO: 404028 - protein, 485 aa, unidentified
MSETENNNHDDHSSSVIPEDNGIIVMPARAYGVGLDVHRSMAQISVMVRNEDSVLEFQKQFDTDILSLMEAREWVIEIITSKSSPKINVSSEELTYNIESTAMYHMPVIAVWGGKPSVINPAIARTGLRKTDKLDARNLCLQSMLGTWPPSYVAPERIQVLRMLVAERDSYSRLATRASNRINSNLLRFGDTSGREGSVTKNQTVRMHVESLLHGDEDLTGIHTLGIPEQARDMFLDEYEEYDRYMEKVRACDKQIITAVKDMEWETGSGKLKGNEMLHLLTTVPGIGEYTASIWLCRIVTPTRFPNAKAVTAYAGLDPSLKVSAGKVTSAVKRKGDKLLHAKLSLAASALLNRRSEPFGEWGYRIQLTSGRRAKAVTGIARRLAVSLYWVQKTGKPFTYEGYQIAREPEVVDMTIEELTNVNTAFRRYMKVLEKAGIHTTKEMVHEYYICRLHTVKGLGSKFFILVKEFINNQKPYRKHVKGKD

SEQ ID NO: 404029 - protein, 330 aa, unidentified
MSVFVGVDIAAKSFDLVSREAGKSSRVHQFSQTPQGHAKAIEQLRVLQPVLIVMEATGIYYLDLAVALADAGLPVAVINPKSFRHFAALKLTGSKTDAIDAALLAEYAERMEPKLWTPPSKERLALRDIGRQINRLTATRTQAKNRLHALQATRQTMPLLIEDEQEGIEWLTRRIQRLTQAAQALIAQDEALSRQLSHLLAAKGIGETSALAILAELSVLPADLKATQVSRYAGLDVRLTQSGSSVQRPARLSKAGNAYLRAALYMPAMSAAQHDPRAKAFYEALVSRGKKKIQAQCAVMRKYLTGLWACIQTDTAFDSTRLFSEEHMKS

SEQ ID NO: 404030 - protein, 315 aa, unidentified
MTESFVGIDVSQEQLDLHERPGERLQRYPNNADGIQAIVARMAELQPTRIVVEATGGLELPLVLALAERQLPVVQINPRQARDFAKACGRLAKTDVIDAATLAHFADAIRPPVRPFPSQEMQALREFLDRRQQLIGNRVMEQNRLGSTTLPAVRRDIEAHIRFLNRKIVDVEKQMKKLIDASDALRHKDDILQSVPGIGAQVSRTLLVRLPELGTLDRRRLSCLVGLAPVNWDSGAMKGSRHIRGGRATVRVALYQAAICAVRVNSSMKAFYARLRASGKKAKVALIAVARKLLVLVNALVAKDEKWRANSILPA

SEQ ID NO: 404031 - protein, 339 aa, unidentified
MKEVSTIGLDIAKQVFQVHAVDAEGGVVVRRALRRRHLLAWFAKLPPCLVGMEACATAHYWARELAKLGHEVRLIPPAYAKAYVRRNKNDPADAEAICEAVGRPSMRFVAVKSEGQQAAVGIHRVRELLMKQHTMLANHVRGLMGEFGVVAAKGRLGLSELLAILADGEDRRIPSPLREALLLIVATLRGIDRRLDAIDRRIVAAGREDATYRHLITAPGYGPILSSAMSAIVTNPAAFRRASDFAASLGIVPRQEGTGGKVWLGPISKRGNGYLRRLLVNGATALLNSKRAKEDPWLVRLLAAKPRKVVAVALANKMARIGWALMTRQEDYRNMPTVA

SEQ ID NO: 404032 - protein, 343 aa, unidentified
MKLSRVGVDLAKNVYQLHGVDRHGKTVWKRRLRRGQWLQALLQKAEPGCVIGMEACTGAHHWARALQSRGYTVRLIAPQFVKPYVKSNKNDANDAEAICEAMSRPTMRFVTVKSVEQQDIQATHRVRTELREQRTAKANQIRGLVAEYGLVAPQTLLALRRAIPCWLEDADNGLTDYFRSLLHGLWGDLVALDDRMTELDKQIKKLADSNEVTRRLQQLRGVGPLVATALVATVGTGEQFKKGKQMAAALGLTPRQCSSGDKQRLLGISKRGDVYLRTMLIHGARAVVSQAKHRDDRLSQWVTSIAKRKHPNVAAVALANKTARMAWAMLRNDANYDPDFAIG

SEQ ID NO: 404033 - protein, 344 aa, unidentified
MMTHFVGLDVSQKMTAICVVDNAGRRLWRGQCPTTPEQIAAMVRRHAGDDSRIGIETGAMTPWLVHELRALGLEVICLDARHARAALKMQINKTDQNDAEGLAQIVRTGWFRSVHVKSFDSHRARALLGARAQLVGMTTRLSNHIRGVLKTFGLLPGAMRGFRFDRKVEVLLEDRSDVAPIVRPMLVAWRQLREQISAFDKAIRVLVRSNSPCRLLMSVPGIGVLSALAYVSTVEDPARFSQSRSVGAHLGLTPRQYQSGDVDRSGRVSKCGDTLARTLLYEAAVVIMTRVKKASELKDWALAIAKRSGIGKARVALARKLSVILHSVWRSGKPFRWTEPAITG

SEQ ID NO: 404034 - protein, 465 aa, unidentified
MSKQQNQRKRAKGKKIPFKNIEELEQINLNAAGIDIGASEHWVSVPADRDEEHVRCFSCFTSDLHALADWLKKCGITTVAMESTGVYWIPVFQILETKGFEVKLVNAHFIKTVPGRKSDVLDCQWIQQLHTYGLLSGSFRPDDQVCVLRSYIRQRDNLIRSCSTHIQRMQKALSEMNLHLHRVLSDITGVTGLKIIQAIIAGEQDPKVLATYRDRRVKSTEADIKAALTGDYRPEHVFILSQELYLYQTYQAQIEKCDLAIQKCFGDFEDKTLDKPTLEITPKSKKKSRNAPNFDLRSHLYRISGVDFTSIDGLDVLTVQTILSEVGLDPKRFKSAKSFVSWLGLCPGSRISGGKVLSSKTRKVVNRAATAFRVAVLSLIRSQSAIGAFYRRKKAQLGAPKAITATAHKLARLFYHLWSTGELYQDPGADCYEHKHKQRMINNLKKAAQKLGCDLIVNPTAQEVS

SEQ ID NO: 404035 - protein, 357 aa, unidentified
MTTSKTKVLDFSGQTIFIGLDVHYKSWAVTLQSEEFEIKTFSQPSKAMILTNYLQEHYPGAKCKAVYEAGFCGFNIQRELALQGIDCEVIHPADVPTSDKEKRQKTDKIDSRKLARMCKNNDMKGIYVPDIELQEERNLLRARQKIVRDKTRVKNRVKSYLKFQGVEIEGFENRQWTKKYIEILRKTNFSTNAGNCAFSAYLDELEYLGQQEIKLDAQIKQLSQSERYRENLVLLSSVPSIGLISAMTFLTEIGDINRFEKFDDLCSYFGIVPNCHSSGEIEKVGYITKRGNQFLKSILIECAWVAVRKDPALLQCYKELLPRMNGNKAIIRIARRLLSRIRHVLMNKEKYRIGMMK

SEQ ID NO: 404036 - protein, 441 aa, unidentified
MHPYFSKESSHRFGEVVDPLSFRGAPQFGQPGEVNPMLTKLYAGIDISATDATLCCLDPDGKQLKPSQSFENNLTGAAQIVDTLVDFKAKEIHVGLESTSVYGAHLRDFLLTSPLLQDRCFVYEINPALVNGFKRSFPKKPKTDSVDAWLIAERIRFGHLRPFSEKRLTTQPLLQLTRYRLHLIELLTIEQNRACNLIFLKFSNYMKNSPFSNSFGKASLAVLGELFPDDLINMDLEQLVSFITQNGNNRLRDPQNMAKELKTIARNAYRLNPKMKDSVHLTLAMTIQNIEYFKNQVKRLDKLIARELKTIPQTLDTIPGIGPVFAAGITAEIGDISRFDNEASLAQYAGLTWSRYQSGNFDAEERRLTKTGNRYLRYYLVEAANSLRVHNEEYKAYYYAKYNEVNKHQHKRALVLTARKFVRLVFALLSKGQIYKQEVKL

SEQ ID NO: 404037 - protein, 341 aa, unidentified
MTEVSIVGVDLAKQVFQLHAAARDGSVIFRRKLSRSKFVELMAKLPRCVVAMEACATAHHWGRVLGAQGHEVRLIPPVYVKPFVKRQKNDAADAEAIVEAAQRPTMRTVAVKSVDQQARAMLFRTRELLIGQRTQLANALRGHLAEHGHLVPQGLGNVARFAAIIASAESDLPYLVRELARLYLDQIAHLSERIKTLEVQMADEAEKSAVADRLRRMPGIGPVTAMAIETFAPAMANFRRGRDFAAWLGLVPRQHSTGGKQRLGRTSKMGQRDIRRLLIVGAMSVVTWKGRNSSPGSWLARMLARKPRMLVAVALANKMARAIWAMITYERDYQEPAAALC

SEQ ID NO: 404038 - protein, 351 aa, unidentified
MSRKTDTVVACTIGIDTGKNTLHLIGLDDRGAIVLREKLTRGRIAARLANVPQCLIGIEAGMATHCVARELIALGHDVKQVPPVYAKPFRQGHKNDFRDAHAIAEAVQRPSTRCVPVKTDDQLDLQALHRVRSRLISERTAVINQIRGFLLEHGIAVRQGLRFLRQQLPDILARRIDVLSSRIIRIIEDLSGDWRRLDERIEHVTEEIEELAHGAESCRQLMTIPGIGPIIASAMVAAVGSGTAFAKGRDFAAWLGLVPKQMSTGDRTILGRISKRGNRYLRTLFMQGARVILLRPANWAKHSFGPWLTAAVKRLHHNVLATALANKLARIAWTVLAQRRNYESRVIIDAA

SEQ ID NO: 404039 - protein, 427 aa, unidentified
MNTSNPDDTQNEYAAFVAIDWADRKHVFCLQVAGQRKKETGTLEQKPEVIGPWVAKLRERFGGRPIAVAVEQSRGALIHALMSYDFIVLYPLHPTTVSKFREAFKSSGAKTDPLDADQILQILTKHLELLKPLHPDTEETRLLARLVEDRRKAVDLRTSHIQAWTAALKEYFPQALELVSGNLTSRLAGDFLTKWPTFEDFQQAKPSTIKSFYYGHNIRSPEVIQKVLDLAITAKPLTTDPAVVQSGSCLNQMYAQLIRALNPVIDDYDTRIEKAFAAHPETHLFNCLPGAGPALAPRLLTFFGTDRSRFEAAENVQSFTGIAPVTKSSGRSRVVFFRVACPHFDRQTFHEFARLSVAKSQWARNYLDFYTAKGKHFHTIIRALAFKWIRILWKCWKERTPYNEEKYMAALKRRGSIFATMHLQNKS

SEQ ID NO: 404040 - protein, 353 aa, unidentified
MEQFIGCDAHKRFSVFVAVNEKGQSGEALRVAHDRQLYRQFLARLPPHSSIAVEASGSYSWLIDEMERSGHRPKLCNPLEAKRRMGLTNKTDKLDARGLAILLRNGTLPEVWIPPSELRDQRELLRLRIFLVRLRTRVKNRIHGTLARYNVQVPGADLFGVTARLQLGARLPEVPEHSREAIEQELAMLDFLETQIESAERRLEAIMKVSVEADLLKTLPCVGKILSMVLMLEIGRVDRFPTAAHLASYAGLVPRVHSSGGHTRMGQVCGNVNRNLKWAFVEAGNLIVINQRRLAGSHVVRMYQRIKRAKNHQKAVVAVARHLAEAAWCVLTKQEVYREPHGPRQQALSSTHG

SEQ ID NO: 404041 - protein, 315 aa, unidentified
MIQMKNKVKYLGIDCAKASFDSNLEDSSMTQSWENTTEGVSSFISWIKQHCGKVVVIVESTGGYERLLLRSLYKKAIAVARVDALRARRFAQSEGLRAKTDPIDAGMLTRFGREKNPALWQPPARSVEVLRQLVSRRRQISDMIKQEKTRLEQAEEFARKDILSMISILEKRECRIEQHIEAHLQTDEQLYERYQKLMLPKGIGPVTAYTVLAFMPELDSITQKRASSLAGVAPYTQTSGTYTGKAKTAGGRKEIRRPLHMAAKSAIRFNPDIRKFYLSLINRGKEEKVAVVAVMHKLIILMHRITNDPEFILSS

SEQ ID NO: 404042 - protein, 324 aa, unidentified
MQGKEASEQETKVQSNVGIDISKCWLDAHVLPGGERLHVANNCAGIRQLKRWLSHYRIALVAIEATGKWHRHLHRSLVASAIPVAIVDPYRVRMFAKAQGILAKTDQLDARVLALFAAMMAPPVRPVAPQAMAELAELVVARGSAVEAQTALKNQFAAAESTFLKRQLDRRISRAGKDIAALDREILKRIKADTSLARRYAVLTSIPSFGFTVAATLIACLAEIGSTTAKQIGMLAGLAPIADQSGDREGTRVIWGGRPAVRRVLYLAALSASRFNADMKAFYKRLIDNGKPSKVALIAVARKLVVLANTLVSEDRTWQPRTPI

SEQ ID NO: 404043 - protein, 438 aa, unidentified
MAVYCGIDWAEGHHDIALVDDEGKLVGKRRINESVEGFAELVAMFAELGDSVEALIPVAIETPRGLLVAALRAAGRPIYPINPLAVARYRERTAVSGKKSDHIDAMALANILRTDAHLHRMLPDDSDLARSVTVLARAHQDAVWRRTKVVQELRARLREYYPGFLTAFGTGSGAGSGLSTTQLASADARAVLAIGPTPATGSKLSKARVETALRRGGRQRRIATVATTVLAALRIPQLRQEQLVEDAMGAEAIALLGVLNAICDSVDQLAAATAAAFSQHPDYEIITSFPGLADTSGAVVLGEIGDDRSRFADDRSLKAFAGSAPVTKASGKSRSVVRRRTKNNRLAAVGYSWAFTAAARPSPSRAHYLRRRDHGDGHPAALRHLFNKMLGQLHHCLATGQSFDPSKGYCQAVTQQPERSPLDRLGTSEVSSDPWSCG

SEQ ID NO: 404044 - protein, 401 aa, unidentified
MKQLYAGIDWASRIHAVGVVDDQGGIRARFQVPNTGKGFGGLIRRLLKLGVAGVAIERPDGPLVEAMLDAGLRVVVITPRQVKALRSRYGAAGAKSDATDALLLADVLRPDRHRLQPLLCDSDATIVLRALSRTRKDLQKARVALCNQLTAQLERCFPGAVGLFADLHSATAIAFLRRYPTSHAAAGLTQATLAAFLRRIHYCGHTPVAVLLERLKTAPLAAISPDQAAGRAVCVHALLDAIQACHSHERDLEAEIIERLEVHADQAVFTSLPKAGHGVRAAALLSEIGDVRARFPDEEALAALAGVAPVTRASGKLRSVGFRWACDKKLRAAVVDFADDSRHASPWAATIYAQALQRTRRHPQAVRILARAWIRVIWRIWQDHSTYDPTKHGGAVRLLTA

SEQ ID NO: 404045 - protein, 397 aa, unidentified
MIAVGIDVSKSKSTVAILNGDGSIRAKPFDVHHVADELQALVDYIKRTSEPPTILMEPTSHYHYPLLKAFTEAELPVCLINPYQMKKYGDTELRKAKTDKRDSLRIAQYALEKSYSLIPYTPQDQKYEDLRFLSRQYSQRISTLTVAKVQLLSLLDETMPGITTILPLKSRDLDNCVLLRFIKRFKSFDVIRKMGKTRFLDSYQVLVKKTKDRFAGSKGLAIYELVLNSVTTRGENPLSAMTQDQCVDLVSTSQKAADEINLQMRIIAETMPEYKVLRSMAGVGDRLGPIILGEIGDIRRFHSGKALNAYAGNDAPPYQSGQFESRNRHISKRGNPALRKACFEVMQALKLTKPQDDPVYLFLLKKEQEGKPYNVAKMAAVNKFLRIYYARAMELYK

SEQ ID NO: 404046 - protein, 437 aa, unidentified
MQEVEGEPLFCERAAGIDIGKQMVAVTIRVPSEAREGGRQQETREFGTTRRQLLALADWLRCWGVERAGMEATSDYWKPVLFLLEREGFDCLLYQASQVKALPGRPKTDKLDSVWLARITEQGSLAGSFVPPEEIRRLRTHTRYRRRLIQGRTAEKERCEKLLEDAHLKLSSVISDIHGVSGRAMLRAIIAGERRPEVLAEMALGRMRSKIGRLEEALDCSFFTPEHAFILEMMLGNIDHLTAQITVLDEKIAALCEPYERQVAQLDGIPGFGVTAAQDLIAEIGVDMSAFPTAGHLASCARVAPRARESGKRKGKSATGRGNPYIGGTLGETAVSVGRTQTFLGAKLRRLCRHMPKKKAQGAIMRTQLVIAHALLSDPGAEYRDLGPGYYEHRADTRRQARSHIRAIERLGYKVTIEPLAPEADPETGELITRTAS

SEQ ID NO: 404047 - protein, 355 aa, unidentified
MPSKADTAVARTIGIDTGKNTLHIIGLDERGAIVLREKISRARIAARFVNLPPCLVGIEAGMASHYVARELVALGHEVKQVPPAYSKPFRHGHKNDFRDAHAVAEAVERHSTRCVPIKTDGQLDLQALHRVRSRLIGNRTAVINQIRGFLLEHGIPVRQGHHFLRKQLPLILATRTDVLSPRMIRIIGDLMADWKYLDERIERVTDEIEALAHADEGCQQLITVPGIGPIISSAMVAAIGNGAAFCKGRDFAAWLGLVPKQMSTGDRTVLGRITKLGNRYLRMLFIQGARAVLLRPASWVKHSFGSWLTAATRRLHRNVLAVALANKLAQIAWTVLAQGRRYEARVEPRVEPAAA

SEQ ID NO: 404048 - protein, 316 aa, unidentified
MDGTNLTFVGIDVAKASLDLHVLPSGQSQTLPNNKPGRQQLQKLLPAPDACLIVLEATGGFEREAVVDLTDAGYRVAVINPKRARDFAKALGLVAKTDRIDAQVLALFAEKVQPAPSEKTPEKQAEIQQLVARRRQLIDLKTQESNRWDVTHAQAARKSIQAVINTLEAEIRGIEKVIETLLESDDDWQHKIRLIQSVPGLGNVTATTVVADLPEIGKLNRQQISALIGLAPFNRDSGARKGKRSISGGRKSVRCVLYMAAIAARRFNPVIKKFADRLAQHGKPFKVIITACMRKLLVILNSIIKSGRPWLAQTAS

SEQ ID NO: 404049 - protein, 377 aa, unidentified
MLYLGIDQHARQITILLRDDHGDVLLARQVSTHPEKIQAFFQQLTRERLRADESFVAVLEVCGFNDWLIQMLHDYRCHKVILIQPEDRKLRKTDRRDAAGLSELLWVNRERLLQDKPVRGLRQVDIACTADQENRRLTTLRKDAGQARTRLVNKIRHILRRHNLQWQMPTKKFPSKSGLAWLKQLVLPTIDHLELKHLLADLEQLQERRQELEQVIAERCGVSAEAVLLATMPGVSYFTAVSLACRVGRVERFPRAHSLANYWGLTPGCRNSGENNQRLGSITKAGSSMARWLLAQMTVNVLRRDARLREWFKRLKRRRGASIVRVAVMRKLATIIWHMLSKRMAYAACRAIGEAGTKGRQKQECRGTRPGIAAGRV

SEQ ID NO: 404050 - protein, 344 aa, unidentified
MEEITTIGLDIAKSVFQVHAVSVTGTVVIRRQLKRRYVVQFFANLKPCLVGIEACATAHHWGRELEKLGHRVRLMPPRYVKPYVKRNKNDAADAEAICEAVTRPNMRFVPIKTADQQSILMLHRARMLFIRQRTMTINAVRAHLAEFGIVAGIGRNGLIELLHLIREGEKPEIPAEARVCLAALADQVDLLKQRILELDRQIMKWHRAHDLSRKLEGIPGVGPLVATALAASVPDPSVFRSGRDLSAWIGLVPKQNSSGGKEKLGGISKAGNRYLRQLLVVGAMAVIKRAKLLGYARHPWLVSLMERRSTKVAAVALANKMARVAWAIMTRNEPYRALPVAAGN

SEQ ID NO: 404051 - protein, 414 aa, unidentified
MDVLIDRVAGLDVHRDTVVAAVRVPGRGGGRRGEVRTFSTTGAGLARLADWLTTERVSLVGMESTGIYWKPVYSMLEDSFECWLLNAQHMHNVPGRKTDVADSLWMAQLLEHGLVRPSFVPPKPIRALRDLTRHRRTTVEDRTRAVQRLEKVMQDCGIKLTSVASELLGKSGRVMIEAMLAGEEDVEVLADLARRRFRAKIPQLREALAGRPLADHQKLLVRQLLAQIDLCDSAVTELDDRVEVMLAPFSELVERVTTIPGVGRRTAQCLIAEAGMDLTRFPTAGHLASWAGICPGNHSSAGTSKTGRTRQGSTWLRTALTEAAHAAAMTRDTYLAAHYAQIRGRRGVQKAVGAIRHDILIAYWHIVHDNTAYRELGPDWAQRRHGTDAQRKRLVAQREKLGLKVTVEPEEKAA

SEQ ID NO: 404052 - protein, 401 aa, unidentified
MEGPIVSIDVSNGNSHYMCFIKNNKRFGKVKKIDHDIEGFKRLLEDIQKLEAETNEKVCAVFEATGVYTKPLERFLSKNSIKTYIINPLESARKRKEEIHNKKTDKLDPISISKVYYDKEEMMELKKKDGTYNWLRKKNRLYEDQLNHLRKYKVTFQNQLSICFPGYLDLFKDGYSDIPMTILKKYPHPDLLKNKKAETVARYLEKNTCHTHKISLEYALKIIGFAKKTYPGCEKDDVEVEIFKILLDKVIETQRECEKTLNEMITVASTLEEYRYILSIDGIGPNLAARIIAEIGDIEEFKSREALVAYAGLDPHIYQSGDQDGKHLKISKKGNKYLRCLLFLAVGCSIRGAKDNPVNRFYQKKKQQSNPLNSKAAKTACTAKLLKIIYGICKNKTTYER

SEQ ID NO: 404053 - protein, 390 aa, unidentified
MSQSFDASKSLTAFEQDSTLVAVIEMSQSKWLVAAVVPGIARQPLKKLDADAGALLKLLQRWREEARKAGREVKRIVCAYEAGRDGFWLVRWLQARTIEAYVIHAASIAVSREHRRAKTDRIDTELLMRSFLGWLRGEKRHCSMVAIPTMVEEDARRPSRERESLVAEQTRTVNRVKAALALFGIGGFNPRLRKAAQKLETLRTVEGTPLPENVHAELRRDLERLRLVHDQIRTIESERLRRLAQAPAAATGPHAMVRLIAKVLGVGIETADMLVNEVLARNLRDRRAVARYAGLTGAPDESGKRRREKGLARTGNGRVRRGMIQLAWRFLIFQKDSRLVQWFRERTADGRSTTRKTMIVALARKLLIALWRLVTTGEMTEGLKLRPAGT

SEQ ID NO: 404054 - protein, 347 aa, unidentified
MRFYNNQHPFYCGIDLHARSMYVCIVNHDGEIVLHKNMKAAPEPFLKAIAPYRDRLVVAVECIFTWYWLADLCAHEGIAFVLGHALYMKAIHGGKAKNDKIDSQKIAVLLRGGMLPQAYVYPAAMRATRDLLRRRMHLMRKRAELLGHVQNTNSQYNLPEIGKKIAYKANRTGVAARFPDPAVQKSIEVDLALIDHYDQLLMDLELHIVRTAKQHDANTLYRLQTVPGIGKMLSLVLLYEIHDIDRFPRVQDFASYCRLVKCAKESAGKRYGTSGKKIGNAYLKWAFSEAAVLFLRNNPKGQTCLARLEHKHGKGKALTVLAHKLARAVYYMLQRDTVFDMDKFLNS

SEQ ID NO: 404055 - protein, 354 aa, unidentified
MPRASQSASAALSAIGVDIGKDVFHIVGFDRAGKIALRRKIKRSALVETFEALPRCVVGLEACLSAHFVSRTLRQLGFEPRIIPAKYTKPFVKGQKNDYNDAEGIAEAAMRPNLKTVAEKSQEQLDLQALHRVRSRLVSRRTATINQIRAFLIEQGIAVRTGARALRNSLFAILKNRESEISPRMTSIIIGLYEDWLSLDKRIECVTLEIEKISEVETNCERLMSVPGIGPMISTATVAAIGTGEAFDRGRDFGAWLGLVPRQYSTGGKPILGRISKQGNRYLRTLFVQAAHIILMRPKNWLKFSFGQWLEQASTRMHKNKLATALANKLARIAWSILRNGGTFSTHIRTAEAI

SEQ ID NO: 404056 - protein, 372 aa, unidentified
MKQNIIHIGLDVDDTQYHGTAFNKETGEVIEFKSRPTLKGLLQQLDRMARHFKGHKIKLCYEASYVGYCLQRDLISNGVHCDIVSPSSIPSPRGKAIKTDRIDAGYLAQFYANDLLTIVQPPDEEQEQDRDLLRSRQKVMQQRNQLRKHLQSVLRRSGLHYKAETGNKSHWTKHHYCWLARTIDGLSGSLKVNLDLLLRQLKALNEVLTGYGQQIDVLANSPRYQSAVQSLTCYKGVKNVFALTMITEIGDIKRFSHPRKLVSWVGMDIREYSSGGKYNRFGITKHGNRYIRTAFVEANQRGYRTAKIGQDLKSRRKHIAPELVNIADRCLRRLNKKGNRLLLAGKHPNKVKVACAREMVGFVWESLNKAAA

SEQ ID NO: 404057 - protein, 344 aa, unidentified
MNVLKQVLGVDVAQKELVVTLGRLNQQLEVELYSHRKFANKETGFAALLKWLKKNTIEGVSLRVVMEATGVYHQKFAYYLDDHQIDLTVVLPNKISNYMRTLSVKTITDDTCADAITLFGLERKLENWKRPKKIYRILQQLTRERDQIVCERVVIKNQIHAEKAEAAPNTRSISRLTQRLRLMNKQEKEIKLDIEECLRSDQSVKDIVDTICTIPGIGTLTAVIILAETNGFELIRNKKQLTSYAGLDVKEKQSGTSVKGKTKISKRGNRHLRKAMHFPALVAIRHDEHYKELFARLVSRHGIKMKAATAVQRKLLELTYILFKNQSVYDPEKSNLNKKEWQLQ

SEQ ID NO: 404058 - protein, 352 aa, unidentified
MTMLTEALDHVIGVDPDRDRLTIAVIDTATTGVVARTVVGADPAGYRQALAFAAVHSSVDRRVWSIEGAGSYGAGLAQVAATAGEQVVGFDRPEGRAAKDGAKSDALDAVRAARELLGRERWAQPRARGAREAIRVLLGCRGSAQRARTAAINELKALVVTCHPELREQLRHLSVARLVTAIDQLRVPEGDVELVGTVQAMSCLARRITHLRREVHDLDRQLSGLISQEAPQLLAEPGVGVVSAAQVLVSWSHPGRCRHEAAFARLAGAAPLEATSGQVQTRHRLSRGGDRALNRALHLVVITRTRCHQPTQAYIARRVAQGKTPREARRCLKRYLARHLYRLMEHPPTDMT

SEQ ID NO: 404059 - protein, 317 aa, unidentified
MSKHTMVCAGIDTGKRKLDVAVVEGSHQLQVANSPDGHTVLSAWLRQRRVKRVGIEATGGYEQVVVTTLRRDGFVVIVFQPAQVRAYAKFHLQRAKNDKIDAALIALCTADAPKIHAPPDPRLAPFAEHLTLIEQLTEDIAHVKTRRESCRDHRIRHHWNDEIARLKRLLRIELKALVAAIRQHNDLATRLDLIASVGGIGLKTAVAILVRMPEIGRITREQAAALAGLAPYDDDSADHVGVRHIEGGRERLRKSLYTAALPAAFHWNPHLNVIYRRLIAAGKPHKVALVACARKLLIYANTVVERGTPWTERPAAI

SEQ ID NO: 404060 - protein, 343 aa, unidentified
MHVTIGIDPHKASHTAVAIDRDETELARRKVRASRRQIDHLLEWAEPFPTRSWAVEGAEGLGFLLSQQLVAAGEVVVDVPATLAARTRVLATGRSNKNDPNDAMSVAITALRSTGLRPVAAVGHSEILRLLAKRNMDLGNQRSRLVSRLHSLLVEITPGGIAKEINASDVDRFLEVHRPTGPVEELRFDLVGELLDDIRRLDTQIKASHKRIRNAIAASGTTLTDIYGVGPIVAAMLIGYSGDISRFANRDRYAAYNGTAPVEYSSAGRTVHRLSQRGNRNLNHALHMVAITQLRQPTTPGRIYYERKREEGKTPREAIRSLKRRISNVAYNHLVADARRASG

SEQ ID NO: 404061 - protein, 336 aa, unidentified
MDANSAVVGIDVSKKKLDVALLVNGKIKSKVVVNSAEGHQQLLVWLAKQQMEPAALQVCMEATGVYYERVATALYDAGFKVSVVNPACIKGFGHGENIRNKNDAVDAGLIARYCIALRPALWQPAPLEQRQLRAWTMRIDSLKEIVQQEQNRLEALSESGMADVAEHVRQHIAWLNGEIAKLNDDVDDHIDRHRGLKHDADLMKSIPGVGNATVMRVLGQVGDLRRFSSAKAFAAFLGVTPRQRTSGTSVRGRTMMSRTGNSGLRAALYMPSMVACRHNPILRQFAQRLLATGMAKKAVIGAVMHKLAHLLYGVIHTDRPFDANYLSKGLVIQDGI

SEQ ID NO: 404062 - protein, 395 aa, unidentified
MNCVGIDVSKGKSMIAVMRPFGEVVVSPFEVRHTASELSELAGLLKSLDGETRVVMESTGNYHAPVAWLLHDAGLYVSVVNAMLVHDYGNNSLRRAKTDKKDAVKLANYGLDHWLTLPRYVPEEDTRLMLKTCYRQYQQYSKVQTMLKNNLISLLDTAFPDANRLFTSPPRADGSEKWVDFVATFWHCECVCGRSEKAFTTQYQKWCRKHGYNFSEDKALDIYASACGRFGVMPKTNTAKLLVEQAISQLQTTSAALAALKQEMQSLAASLPEYPVVMEMFGVGPTLGPQLIAEIGDVRRFHSKKALVAFAGIDAPPYRSRSISKRGSASLRRTLFLVMGVLLQCAPMDEPVYQFMNKKRSEGKPYRVYMMASANKFLRIYYASVKAYLDSLEHD

SEQ ID NO: 404063 - protein, 366 aa, unidentified
MKKISTMQVFGNEIFKEQKLTIGMDLGDRWSFYCVLDEAGKIILEQKVATTPEAMKQTFGKIPRSLIALETGTHSPWVSRLLTELGNKVIVAHAQKVQLITKSNRKDDRHDAGTLARLARIDAELLGPVRHRSAQAQIHLTVIRARAELVRARTALVNAACGLMKSYGERLPKCGTQQVSEKLAEGVSAELRELLEPLLKEIESLNEPIKEYDGRMEKIAKEAYPEVSLLKQVRGVGTQIALTYVLTIEDPYRFSKSREVGCFLGLRPGRRNSGESEPQKRISKEGDRYLRTMMVQGAHYILGPFGEDSDLRRWGLQLAERGGKNAKKRAVVAVARKLAILLHRLWVSGEVYERLRNSQKAMRAVG

SEQ ID NO: 404064 - protein, 333 aa, unidentified
MLYAGIDIHKSVFQAVVLDPDTGELTESRFQPTREQLGDWATEWQGKLASVAIEATTGWRWVARDLAQHGFEVHLVDPGRASALQGRRRRPKTDRLDARWLALLLARQLLSECESWLPPAEIQRLRDKTRLRKTLAGERTGWAQRLHALLTHEGWPCARGRLLTAEGRRWVDALNLEPYVRTQVEVMLAMIAALEQQLELLERELRNFARADQRCQALETIFGVGPILACHLLAEIGDAHRFQRARQLVRASGLDPTVVESADSKRRGRLAKQGSRHLRWALVEAAQHAHRHTSPDHALYTSAVRRCGRGRARLTVARKIGHRAFHVLRAEAA

SEQ ID NO: 404065 - protein, 337 aa, unidentified
MNEIPTIGVDLARSVFQLHGVDASGKPVLRRQLRRSQMLELFQKLPACLVGMEAGASAYYWARELANLGHEVRLMQPSHVKSYVKHGKTDAADAEAICEAVTPPSMRFVPVKSEETQGHLVTHKAREFPVRQQTRIVNAIRAHLGEFGVVMPKGIQNVGRLIEARDQANLPAAAHKALNLLGDQLVDTQKKIADVTADVRADAIANEAALRRQTIPGIGPITASAMVASLPDVSDFRSGRDLSAWLGLTPKPHSTGGKERLGRISQMGNRYLRRLLYLGAMAQVSARRRGEPGDDWLWKIIQRTKPKQAAIALANRMARTVYALLRSGTEFQVARAA

SEQ ID NO: 404066 - protein, 477 aa, unidentified
MAVVVAEMPEKDVLLEQDSGVVSHCLVIEEDVVGQGTRLSAADRRRNARLERLRELVPVENAILGIDLADVKQHAVLCDHDSRVVKRWKVTAKAWQLEALLDRSVEQAQRAGFASVTVACEPTGHRWQIVQQLAAERGLPMVCVQPLMMRRAREQEDYTTEKTDAKDSVLIARQTARLHCYVPEQVDELWGQLRHAGIRRAQLVVEATRQRQQIRDLLECVWPAVLGAAPKCLFDSATWLACLHVVLSRCDGRPERLRRAGLEAFAAAVRGELARFGGLRLQRYTIRAVWAALTDPAGVRTRRAGALHRVGWILDDFVATRRALDEVETRMVDTLNQLGLTDLVCSIPGLKPVGAAAILAETGDPSRFSHARAVVKHAGLAPRAHESGEYRGTTRLTGRGRPRLRLAAWRAVFGALHHNPALHQRYQHLTTRTHNPLSDGQARASLAATLLRWIHVIVTQRLPFHALTTTRHLTPAA

SEQ ID NO: 404067 - protein, 422 aa, unidentified
MSNNSLPRKSKQKANIVIVDHRNVVGIDIGKRKHAATAVTPKGAVIASLSVFENNKAGVDLLEKQVLVPATDRSKPMIALEATGMYWCALHDELQRRGYDCVALNPIQTSVRGLKKIRRTKTDRIDSETIARTVLAGDAQSTIVPEEPMYELRLLVRHRWRLIRSQNTILLYAISLVDRVFPESEGVFSKPFLKSMRTLIREVGFTPNKLNKNKAKVREVLEKASRKRLTPETINDLLDRAKVSIGTRQGEGVVNDQLRMIVDYLDFMDDQVEQINKELKCRMELLKSPVMSIGIGPEIAATILAESGAIERFAGPREYAAFCGLDPSVQDSGDSIRGVSHISKRGSPLLRWAFYTAAIAVYRKHRDFAKVYTRQTKRQPKGRRQKGHRYALIAVAHKVARVVWRLMKDGRKFSKNPPKREN

SEQ ID NO: 404068 - protein, 377 aa, unidentified
MQETMIQSVKADKLFIGMDLHKNTSTFVVKDKDGKLINSAKVLTDKNDVTRYINSNKRNSDGRDLSLAVEPVSQWYYYADLIENLGVDVHLAHPLEVKAIAHAHIKTDKIDAGVLADLLRTNFLPEAYFSPAEVRSWKEQCRFRASIINLRSQVKNKIHAILFKHSLKHNFSDLFGKGGRRWLASLELKEPFQGNLNKYLILIDQLTEQVVQAEEIITNTVINCPQAKLLISIPGISYCSALTIMAEIGEIDRFISVKHLQSYAGLIPSTYNSGDKQIHGRITKRGSKWLRWIMIESAYHQMNCKRIPGFGAYYNGIKIRKGSKTAAVATARKLLAVVWRLLKDNRPYEVADPRCWKSRPIASKISSVSTVINTTED

SEQ ID NO: 404069 - protein, 345 aa, unidentified
MSKVIGMDLGDKRNVIVVFDEKGNEYPAERIANTSAAIQRFYAKHPGAHVVIEAGTHSAWISRLLHEMGHTVCIGNPRRLRAVWDADDKSDERDARILGLMYRLEPRLLHPVTHRSQEAQAALAILKGRDQLVCVRTKLVNHVRGTLKTLGLTLKGCTPLNIHRNAPDQIPAELWPSVSFAIETIEHLSGQIKELDREIDRLCADRFPETRFLLQVPGVGPKTALAYILTLEQHERFKKSRDVGAFVGLTPRRDQSGKIDKQLRITKAGNPMLRRLLVNAAQHVLGPFGPDSALRRYGERIAERGGKRSKKCAVVAIARKLAVLLHRLWADQLTYVPFPQPSKAR

SEQ ID NO: 404070 - protein, 355 aa, unidentified
MSLEKYIGMDVHAATISAAVKNAEGKLLMECVLETKAATILEFIQGLRGILALTFEEGTLATWLHDLLKPHVSRLVVCDPRKNALMRDGNQNDRVDARNLAELLRTNQVHPVYHGKHGTRALKELGRSYLTLTKDSTRVMNRIKSVYRSWAIPCAGTSVYSRRHRAEWLAKLEEPGVRIRAEHLYEQLDCLQPVRQAARHELLRDSRKHEAVKLLRQIPAIGPIRSALLVALLQTPHRFRTKRQLWAYSGFAVQTYDSGEYRFVRGKLQRNRERITVRGLNHNHNHDLKNLLKGVAISAIERRGPLQDFYAALVDKGMRPSMARLTLARKIAAITLTMWKKGVSFDPKQLQRQAA

SEQ ID NO: 404071 - protein, 388 aa, unidentified
MGPVVGLDVSKGASVLQAFTERNKPYGRCKRIAHTPEGFEQLGELLKELEKSTGFEPAVVLEATGHYHRSLVAYLEREGYQHFIVNPLQSKRAKGTHLRKVKTDAMDAWHLAEMYYRGDLKPHRTWSEALTELQHLTRQHEFICPMLVQAKQNARALLDQVCPAYETVFDNLFCSTSLQVLRQMLSSTPVTAETIQAAAGSSHGQAWVQEKLERIQALPPLSQSSKAQQMALLGVLNMVLTGQEQLRQLEKAMEELAMMLPEVELLRTIPGVGDKLAAVLAAEIGDASQFETPKQLVAYAGLDPGVHSSGKFTASSSRISKRGSKRLRRALYLAAQCGIRNGVNERLKAYFEKKRKEGKPCKVAVIACANKLLHHVHAILVKGEPYKA

SEQ ID NO: 404072 - protein, 356 aa, unidentified
MEQINKLDFSGQSIYVGLDVHKKSWSVSIFSKQCEHKTFTQPPKADKLVHYLKRNFPGAAYQAVYEAGFSGFWAHDQLREQGVNCLVTNPADVPTSDKERTRKRDRTDCRKLARSLRSRELKGIYVPSRPKLEDRSLVRTRQSMVRKQTRCKNQIKALLYFYGINLPEEVVESHWSQKFLHGLENLRMERTSGDMALKAHLDELHHLKRIIASLNRSIILLSREAEYGQRVRLLRTVPGISTLAAMIFLTEIGELARFASLDKLASYVGLIPDFESSGEIEHIKNITHRRNPQLRALLIEAAWVAARKDPVLLLAFNEYCHRMKKTRAIIKIARKLLNRIRYVLKNQVEYVPGVVQ

SEQ ID NO: 404073 - protein, 339 aa, unidentified
MTPITRIGLDIAKGVFEVHGVNAQEQVVVRRSLRRNQVLTWFGKLPPCLIGMEACGTANHWARELSALGHTVRLIPPAYAKPYVRRNKNDAADAAAICEAVSRPSMRFVPLKTIEQQADSVTHKARQLLIKQRTMAMNSFRSLMAEFGIIAPQGPQHIGKLLTILADPEDTRVPAVARTALNTMSEMLSVLEKQVEALDKDIKVRIRGNATARRLDTIPGFGPILSSAIAAIVTNPRHFDSGRDFAASLGLVPRQDSTGGKTKLGPISKRGNGYLRRLLVNGATAVLNGKNARNDPWQAKLLDSKPKKLAAVALANKMARIAWAVMTRQEDFRPRAVAA

SEQ ID NO: 404074 - protein, 456 aa, unidentified
MIYVGLDLGKRTHAVCFLGADGREVARPLRVPHTGAGVRRLEEQLARLPGPQRVVMEASGASWLGLDRRLRADGLAVQVVNPLQTAGLRKVGIRKTKTDATDAKLVAELARIGRARPSSVPDDAVLELRELVRFRWHLADQLGDAKRRVLGVLDKVFPEFAARFSDPFGATGRELLGRCAGAAEFAALELGDLAATIRRASRHQLGRAKAEALRAAAADSLGVGCLEGVARLQIRALLAQLRLLERQIARADALLERRVARRAPHLLTVPGVRGLLAATILAELGDVARFGRVEEVVAFAGLDASVFASGDFEGTRQHISKRGSPHLRRALYLAAFKAIETDPELAAFFRRKQAEGKPYRVALVAVSRKLLARVYRVLRDGRPYRPASPTSPGKRATTRPRRKPRTPSGPTGAAGRTSLLGASGTSSRRCRRGRRPSRSTSPNSAGGRRRARSSSG

SEQ ID NO: 404075 - protein, 353 aa, unidentified
MSKQFRESKTDICVIGIDIGKNTFHAVGFDKQGAVVLRQKWSRRQVGLRLANLPPCLIGMEACVGAHHLARKLVALGHDARLMPAKYVRPYSRGQKNDFNDAEAIAEAVQRPTMKFVAIKTAEQLDLQAMHRIREGLVSQRTRIINQIRAFLLERDIAVRQGLRFLRAELPIILATRGDVLSPGIIRLIEDLAADWRRLDERIAALSEEIEALARHDACCTRAMTVPGIGPIIASAVVSAIGDGAAFAKGRDFGAWLGLVPKQISTGDRTILGKISKRGNRYLRKLFVQAAWVVLIKPQSWGRHGLKPWIEAARKRLHHNVLAIALANKLARITWAVLTRETAFHPRIQPHAA

SEQ ID NO: 404076 - protein, 419 aa, unidentified
MKNSTTKKLKSITEGTLLVTIDMGKMKHTGYYRFSDGTEGKPFEFFNSRNGFEEFWWRVCQARRSGNLAKVVVGFESTGPYAEPLLHFLRNRDVHLVQVNPLHTKRLKELQGNSPSKTDQKDPKVIADIIELGHALTVIIPEGTVAELRRLTQARERSIQRMSMLMSQLQDLIFLIFPEFMTVMKDITIKSTQYLLKNYPTPQDIVQQGVNGLAHILKKVSRGRLGKERAEALYEVAVESVGIREGRESIVFEIKEIISVIESIERFVKEIEKHMSKHLKDVPYSRCILSMKGIGEITTAGLIGEMGDFRKYRTISEVIKHAGLDLFEISSGKHKGKRRISKRGRPLLRKLLFFASINVVRKGGVLHKQYQHHLEKGMPKIKALIAISRKLLSIIFALVRDHSMYIAQYSKTQQLKEAA

SEQ ID NO: 404077 - protein, 360 aa, unidentified
MPMYQLGIDVSKNTLDLCLLREGIKGRIKTRKLKNTADAAKVVAEWLKKQSCELGEVHIIMEATGVYHEPLAYGLHFAGARISLANPHRTREFARGMNILTKNDKVDAWMLACYGSLKEPEAWTPPPESVRYLRALLRRRDALVADSTREKNRLEKSVFTDSPDAVRASIENMLQELSNEIEHLDVLIQEHIETHPELNQDFRLLTSIKSVGYLLGLNMLAILKSHSFESAEQAAAFLGVVPVERRSGTSVKGKPKLSKIGPPEIRTKLYLAALCGLRFNPAMNRPGFPGEYFICELRLPDHYFRWKHNKLFLLLPEEYGPAFPAIVDCYTSPPTLVWPVPLLHGFSSSYGVLPPLCKDH

SEQ ID NO: 404078 - protein, 282 aa, unidentified
MKIVGCDFHPAWQQVAVFDPETGEITELKLLHGDGEAERFYRVLESPALIGIEACGNSQWFIELAESLGHVVWIGDAAQIRASYVRRQKTDRRDAGHILKLLMESRFPRLWTPTAAQRDLRQLLIHRHKLVEIRTRIKNGLQHLALNRGVQKKSALWSVRGRACLEKLPLAGWTARRREDLLRLHGELDRHVNELDVAVNLAAKEHPQARLLMTQPGVGPITSLGFVLTIGDVSRFRHSNQVSSYLGLIPREHSSGGKQRLARSPSRATGSCASYWWKRRRV

SEQ ID NO: 404079 - protein, 430 aa, unidentified
MAAVMIGVDPHKGSHTAVAISPAEECLGELRVRASVAQAERLLAWAAAWPQRSWAIEGAGGLGHLLSQQLVAAGERVLDVQPKLGARVRLLATGDTNKNDPNDARSVAIAALGSPSRQEVTADDHAAVLKVWSKRHRDLGRTRTQVACRLHAVLCELIPGGVSKEITAGHAAQVLEAITPGRAVEATRCELAAAFLDDLRRIDAQLRDVKKKLDVAVRASGTTLIQIFGVGPVVAATVIGAVRNVSRFPGRDHFAAYNGTAPIEVSSGSRKIYRLSRRGNRRLNHVIHMAAVTQIRYRHSGGRAYYDASWPKARPRKKLCAPSSAASATLSSPGCKPTPAGLPEPRAQGAREGSRGTTLSPARPAHTPRHRLFGQATPGPATTLRPSQPPRPRRPARRPNRRFTAPLDTKRHRYERLMAGAGRGSGHPEW

SEQ ID NO: 404080 - protein, 413 aa, unidentified
MQDLLEICCGLDVHKENIVACLLTGATDVKPTSEIRTFSTMAHGLQELKEWLFECNCYHVAMESSGIYWIPVYETLESESHPMHLLVVNARHMKNVPGKKTDMRDSEWIATLLRAGLLRSSFIPEKRIRELRHLTRYRKSIVCDVTTQKNRIEKFLQSIGFRLSVFLSDTFGASGRNIMRHLIAQGSINLEELDLCLKGQTRRKIKNILVSVNGTMSEHQQHFLAISLDHLEVLEAHLNQIEQAIEKETEKFESAMAILTSIPGIQKIAASSLLAEIGTNMSCFPTAEHLSSWAGMSPGNNESAGKRKSAGVNHGNPYVKSMLCEIAWVVAGKRDSYLSKWYWKLKQRKGAKKAIIALGRKLLVMIYAMLKKGTSYDEDYFEQRRKQLENKRVSRMVSELHRLGYQLSSPAAL

SEQ ID NO: 404081 - protein, 370 aa, unidentified
MKKNSTRTQSPKRAAARNTGPITIGLDLGDKTSRYSVVGDHGELVSEGSVATTRKAMAQRFGGLKRCRIAMEVGTHSPWLSRMLTGLGFEVIVANARQVQLISASSRKNDRMDAHLLARLARVDPELLRPIRHRSERAQANLMTIRVRAELVEARTRLVNAARGFTKALGERLPACDTDSLGMEKLEALPPALREGLQPLLEQIEALTAQIKKLEGKIEQIARIEYPETQLLTQVHGVGTLIALTFVLTVEDRERFQKSRDVGCYLGLRPKQSESGQSQPQLRITKERDRYLRTLLVQGAHLILNRRGPDTDLKRWGLKLAQRGGKNAKKRAIVAVARKLAVLLHRLWVCGEVYEPLRNSRPAATSNQAA

SEQ ID NO: 404082 - protein, 320 aa, unidentified
MDVVLGIDIGKAKFHVTLLFSDGTRRRKACVNSPAGCTELLAWLARHGAARVHGCLEATGTYGELLATTLVEAGHRVSILNPAIIHHYAKSRLSRAKTDPVDADVIADYAAKEHPPLWTPLPRDVRELQGLVRRLDALIGMQTDERNRAQAGALTPAVQHSIETVLAHLEAEIEAVRQQIRQHMDQHPGLRAQRDLLTSIPGIGEATAALLLAELFNKAFTSARQAAAFAGVVPRPNDSGLHEGRRVMCKLGPARLRKGLYFPAIAAIRFNPSLQPLARRLRTAGKPPMLIIGAAMRKLIHLAFGVLKSGRAYDPDLAKA

SEQ ID NO: 404083 - protein, 342 aa, unidentified
MQIATIGLDIAKNVFQVHGIDVAETVVVRKRLRRSQVLAFFKALPPCLVGMEACATAHYWARELTKLGHTVRLMPAKDVKAYVKRNKNDAADAEAICEAVRRPTMRFVQIKSPEQQSRLMQHRARDLLMRQRTQVINALRAHLAELGVTAAQGVEGLKELLTIIASDEDERLPADAHASLVVLAAELQAVQTLIGSIEKRITVQHRSNEASKRLETIPGIGIVGATAIAATVTDPKVFRSGRDFAAWIGLVPRQDSTGGKQKLGHISKQGDRYLRRILVVGAIAVLQRARQQPKKYPWLTQLLARKPFKVVAVALANKMARTAWALLAKGGTYRAPKLTAAA

SEQ ID NO: 404084 - protein, 416 aa, unidentified
MNAVGIDVSSRKSTVAVLRPLGEVVCLPFDVTHDIAGLASLVEKLKALDGETRVVMEHTGRYYEAVEKALHEAGLFVCAVNPLLIKEYGANSLRRVKTDKADAVKIARYALDNWADLRDFTPMDAIRYDLKTLNRQFQLASKQRTASANNLIALLEQSFPGIRKCFDSPVRSDGTQKWVDFAHSFWHVDCVRKQPFAAFCERYRKWCKRHAYLFKLSNAEEVYALAKRAVVLTPKSKVVKVLVQEAANQLISISRSVEVYRAEMDRLAAMLPEYPVVMAMYGIGKSYGPQLMAEIGDVRRFERKQALVAFAGIDPMPNQSGDKNVRSNKSSKRGSPYLRKTLFNVIRTYLQCAPQDEPVFQFLNRKRAEGKPFYVYMLAAANKFLRRYYAKLRDFFASLDTLQPVAPIPTILKATL

SEQ ID NO: 404085 - protein, 356 aa, unidentified
MVIVGLDLHVRNSFLSAMDLETGELLDQRRIPNTREAIRGYFGQFADQEVKVTLEATTNTYPMVSLLRQMPKVQVVVVHPRKMRIIAESLCKTDKVDSEVLVELGRGPYRLPTSYIPNAAVHELRCELRTRARLVAMRTELKNRVHGLLSGEGFFEHPPELFGKRGRAWLAEVELGELARGRLERLLRLLDQFEAELLEISQVLREQYAKAPLWAEDVELLTSMPGIGLLTALTILSELGDWRRFSHEESVVNYAGLVPSLDESNHKSHYGHLTKQGPRFLRWILAEAAQVARRKVPRYGRLYDRVARKRGAGKANMAVARKMLEHAWLMLKRREKFHYEVTEKMVLGGEPVNCMV

SEQ ID NO: 404086 - protein, 341 aa, unidentified
MAIVAGFDVHRNQITFDALEASTGEVTRGRIDATPTAVRSWVGRFPGQQVEVAVEACTGWLFVCEALSAAGATPHLAEPAETSARRGKKRRAKTDREDARWLRQLLAEGRLPEAWIPPAHVREWRTRTRLRKTLVDERTEWLQRIHATLFHHGVAQVPERLLSSRGRAFLARLELPAAACERIEVALAVIEALDRQLAPIERELRALARRQRGCQALMRHFGIGELTAPVILCELGDVSRLSASRKAVRMAGIDVGVHSSDRRSRVGRLTKQGSPELRWALYEAAQSATRATSPDHGAYLALKERGLSHTRASLTIARKLARRSFHTLRELGPQALEPVID

SEQ ID NO: 404087 - protein, 332 aa, unidentified
MEEITTVGIDLAKNVFSVHAVGSRGEVVLRRTLSRAKLSELIAQLPPCLIGMEACSGAHEWARRFAASGHTVKLMAAKFVMPYRKSGKNDGNDAEAICEAVARPNMRFVPVKSLEQQSDLTLHRVRQGFVEERTATLNRLRGLLTEFGHVLPLRASEVHRRVPQLLGKLPTRVAACARDLLEHAARLQAKTLEYEHEIKIHVRSNALACRAQTRLGIGPITASALVATVGNGHDFKNGRQFAAWLGLVPRQYSTGGRTRLGHITKRGDPYLRTLLVMGARAVLQRAASLTDPLSRWALAVRERRGYHRACIAIAAKNARVAWALLAKEPVAA

SEQ ID NO: 404088 - protein, 323 aa, unidentified
MEQKLPTTPEAMKETFSRIPRCRIALETGTHSPWVSRLLTPLGHEVIVAHAQRVQLITKSSWKDDRHDAQTLARLARVDPELLGPVRHRSVQAQIHLTVIRARAELVSARTALVNAARGLVKSYGERLPQCGTYQVSGKLAEGLSAELREVLVPLLREIESLNERIKEYDERMEKIAKEVYPQVSLLKQVKGVGTQIALTYVLTIEDPYRFPKSREVGCFLGLRPGRRNSGKSAPQKHIRKEGDRYLRTMMVQGAHYILGPFGEDSDLPRWGLQLAERGGKNARKRAVVAVARKLAILLHRLWVSGEVYEPLRNSQKAMRAVA

SEQ ID NO: 404089 - protein, 422 aa, unidentified
MLEEDPQLEEIVARVAALDIGKAELVCCVRVPDEGKPGRRLQEVETYSTMTGSLLAMSDHLRCLGVNRVVMEATSDYWKPVFYLLESQGLEVWLVNARDVKHLPGRPKTDKLDAVWLCKVAERGMIRPSFVPPPEIRRLRDVTRYRIDLVGARTAEKQRVEKLLEDAQIKLSVVASDIFGVSGREMMAALVGGQTNPKALAQLARGRLRAKLDTLEEAFTGHFTGHHAFLLGRMLARIEGLNADIAELETKIEEMVAPFAAAVQKLDEIPGVGPTAAHIILAEIGLDMSRFPTAAHLSSWAHLAPRVKESAGKKKGKSSTGRGNRYLARVLGEAAVAAGKTDTFLGERYRRLARRKGKKRTIVAVGRSILVIIWHLLSDPEIRFHDLGSDFYHNRTGPERTKRHHIRQLEALGYKITLEPTA

SEQ ID NO: 404090 - protein, 413 aa, unidentified
MPKIVYPVCCGIDVHKSFVVACIATTDEMLVTTYSKSKRFSTFTGDLRRLASWLAQNNCRDVCMESTGKYWIPVYNILEPTCNVVLAHPKYLKAIKGKKTDKRDAKWIADLFKHDLINGSFIPPADIRQLRDLARYHAKLTSYTTGEKNRAQNCLTVSNIKLDDVFSDVFGRSAAAITTRLLENPGETFDVAPFVDRRCKKPIEEIQAALDGVMCAQQAEKLRIIRSHMDFLELCKACLESEILAVAEKYLPQIDLVSTVPGIGGPLTAIRIMAEIGADMSVFETSRNLCSWAGLAPQNDNSAGKKKTTRVSRAGVYIKPLLVQCALAAIKSNKHTEIKNRYHAIKKRRGHKKAVIAITRMLLTAIYNILKKSEPYNAELYRQSNKPPVQREVTVEQAIFILQRRGYLVTAST

SEQ ID NO: 404091 - protein, 346 aa, unidentified
MSSYTVGVDIAKRVFQVHVVDANGEVQAARKLRRSEFLGFLSKLPPSLIGMESCSSAHHWARELSAMGHEVKLMNPMYVKPYIKRGKNDAVDAEAICEAVTRPTMRFVPIKSVDQQSVLMVHRTRSLLIKQRTMLVNALRGHLAELGIVAPVGIERIAELVDRVTGREGDEVGIPPLVRSLVEVFAQQISTITEEVRALEKSLRSWHRTSEASQRLATIPGVGEITATALAATVPDPSYFQSGRAFAAWLGLTPRSNSSGGKERNGRITKAGDRHLRTLLVLGATSVIRRVRAGQPTPIYSWVNRLLDKKPARLASVALANKLARIAWAVMARGTDYQPQRAALAL

SEQ ID NO: 404092 - protein, 411 aa, unidentified
MKKDNNSRKKSEPTSKRAKTRGPMRRDTKEVLAELVGKLKEKLDPKKVAATSAGEEHPRGELRPNLDRLTVGVDLGDQWSHYCILGLEGETLAEGQLRTKQEDIAEFFQALNAARVVFEVGTHSPWVQEVICGCGHEVLVANPRLMEGSKRRKRKNDRIDAHKLARLGRVDPQSLHPMQHRSREVRQDLVVLRARDALVAARTELINATRGLVKSMGSRLPKCSSPSFAQKVEETVPVELRDALLPLVRMAAALSDCIQGYDEKIEKLGREKYEHTALLRQVKGVGPITSLAYVLTLENPDRFVKSRDVGPYLGLVPKQEDSGESQPQLGISKAGDTMMRRLLVGSAHYILGPFGPDTDLRRYGLRLCERGGKNAKRRAVVAVARKLAVLLHCLWVLGKYMSRCARACPQR

SEQ ID NO: 404093 - protein, 343 aa, unidentified
MDHFAGLDVSVKDTSICIVDDTGRILREVKVASEPDALVAVLTNRSYHFKRIGLEAGPLSQWLFSALAEADLPVICVETRHMRAVLKAQINKTDRNDARGIAQMMRVGLYRAVHVKTLRSQKLRMLLTHRKLLQSKAIAVDNDLRGTLRNFGLKVGIVGAAKFEVRIRELVEGFPDLAVLIEPLLIVRRVLREQIGILHRRVLSVVRDDEVCRRLMTVPGVGPVVALTYRATVDVPARFRKSKSVGAVFGLTCSRHQSGERDRPGAISRCGDEMMRTMLYEAAQSMLVRSTRWSWLKAWAMQIAKRRGIKRAIVALARRLAVILHRIWVDGTEFRWTRDAAAA

SEQ ID NO: 404094 - protein, 345 aa, unidentified
MAEVSTIGLDIAKTVFHAHGADARGQMVFSRRLTRAKLLEFFAAQPRCVVALEACGGAHHWAREIASLGHEVKLIPPAYVKPFVKRNKNDAVDAEAICEAAQRPSMRYAAIKTEAQQAAGMVFRTRDLLVRQRTQLINAIRGHLTEFGWVAPKGPSHVSVLASLLEEGEEIGASLAEAARSMFLVMTGQLEHLNEQIKLLDKEIARRAREDEAARRLMTIPGIGPIAATALLALAPPVEGFARGRDFAAWLGLTPRQHSTGGKERLGAISRMGERTLRRLLIIGSSAVVLHASKRGAPRGSWLEQMLARKPRMLVTVALANKTARIIWAVLMKGEDYKAPVAAAA

SEQ ID NO: 404095 - protein, 312 aa, unidentified
MAMLSFCGIDVSKDRLDVVVLPEGWFFSVSNDTAGWTELVARLRPLAVCAIGLEPSGGYERGIIRALLAAGLSVRRINPNKLRQFARARGVLAKNDRLDARLIAEYVAIIPTRVVQRDAAVERLAEIVTMRRQLCDEHVAAENQAAHLEDAMLRRLSKRRQMRLEADIRLLDKRLAEMVAANVALAQRYELLISMPGVGPVLAFTLIALLPELGKMTRKQIAALVGLAPYDFDSGKLKGHRSIYGGRMPVRNVLYMAALSASRYSPALKAFHKRLAAADKKSKVIIVAVMRKMITTLNAMLRDSAAWQPRSA

SEQ ID NO: 404096 - protein, 417 aa, unidentified
MKVVYPVCCGVDVHKSFLVATIITTTKGIQPYYKKKRFSTYNGQLRELAAWLKENECTELCMESTGKYWVPVYNILEAEGIHITVANPKWVKAVKGNKDDVKDSKWIGELFRLGLVPGSFIPEKPIRILREFTRYRTKLKSIASSEKNRFQNAFTVCNVALDSVVNDMFGVSATKITNYLMSTSSYDPAYCASLIHYKMKDKTEAVLASIDGYLIEPEQKFRMKIIRKHLDQIDTLIERLDKKIDSMVRKYEIAIALLTSIPGIQRRTAITILSEIGTDMKQFSSSKKLCHWAGLTPGNNESAGKKKSVKITKAGVYLKPALVETAHAAVRCTEQPYYKQKFERISKRRGKKRAYIAIARMLLTAVYHILSTGVMWCPTDLKKTENVIANMEGISVKRAIALLKRKGYSVSQIENTA

SEQ ID NO: 404097 - protein, 384 aa, unidentified
MQKPNDLNQSRIVLKQDSTLIAVIEMSLSSWLVAGIVPGVERQPLKKLAVDESALLKLLNRWREEAEKAGRRIERITVAFEAGRDGFWLARWLRARGIEAHVIHASSVAVSREHRRAKTDRLDTELLKRAFLGWLRGERDHCKMVAIPTTKDEDAKRPNRERQSLVGEQTRIVNRMKAALIRLGIRGFNPKLKKAAGRLEDLRTPEGEPIPPNTLAELHRDMERRRLVSDQIRQIEKARLERMEQAPGDGPHAMVRLIARVIGVGIETADMLVHEVLSRKLRDRRAVASYAGLTGAPDESGSKRREKGLAKAGNARVRGGMIQLAWRFLLFQKDSALAQWYRTRTEGGRNRKTIIVALARKLLIALWRLVTTGEVPAGVVLRAA

SEQ ID NO: 404098 - protein, 349 aa, unidentified
MTDQRLSYVGQNVYVGVDVHKDTYTVTCIHNKRIVKTATVHADPVGLAASLPRWFQGATLSSVYEAGFSAFVLHRALTKGGITNIVVNPASVAVAANDKVKTDRRDSKKLAIDLADGRLQGIYVPTEEEELARLLPRTRAQIVEHRATIARQIKAKLHQFGLIAPASRRLLSNRYLREIAAWSLPPELRVSLALLAEQWRFATRQLIEMRRLLREQAQAQQEIEKVYRSVPGIGEVAARTFATELGDMTRFANERALFSYTGLTPSEYSSGASVRRGHMSRQGSSRVRHLLVEIAWRAMPRDVVLKEIFDRIAATRGKKRAIGAIARRLTGRIRACFRQGTTYAVGTYA

SEQ ID NO: 404099 - protein, 418 aa, unidentified
MEVLHERCAGLDVHKNTVVGCVRLAQGGRVEKEVRTFKTTTGELLALAEWLDGHGVNHVVMEATGVYWKPVWHVLDDGERQLVLANAAHVKNVPGRKSDVSDCDWLSDLEAHGLIRPSFVPDNQTQELRSLLRTRKQLVRERTSHTLRIQKTLEDANIKLDSVISNIVGVSGRRMIEALVAGESDPAALACLADRRIKAPPEVLCEALRGRVTKHHRFLLGLHLGHIDAIDEAIDKIDQEVAASLQPFCAAVGLLRTIPGVSDLAAQGIIAEIGLDMSRFETCGHLISWAGLCPRSDESAGKRRSTRIRKGAPWLKTLLVQSAWAASKTKATYLHAQFLRIRSRRGARKAIVAVAASILTAAYHMLKTATPYRDNGPQHFDSRHNQAQITKLLTRLRNLGVVADFDTLKRPDQAAVSC

SEQ ID NO: 404100 - protein, 348 aa, unidentified
MDAIYVGIDVSKDRLDVAVRPTGESFAVARNGAGIDELIERLVAISPRLVAIEATGGFETIVAAGLAGAGLPVVVVNPAQVRAFANALGKRAKTDPIDAAVIAHFAEATKPQLRQLPDEMTRLLADLVARRRQIVEMIAAESQRARRVSNPRLKKSMARLHKALEKELSELDSDIGDHVRGTPAWAEKEELLASVPGIGPTIARSLIAEMPELGTLDRRQIAALAGLAPWTRQSGQWRGKSFIGGGRASVRRVLFMGAMVAARFNPTLKLFRDKLVAAGKPKLVAIIAVARKLLTILNAILRDKAPWQPKTLERKDSRSPHVWRGGSSHTSGVRRREKAEPRLCDIGR

SEQ ID NO: 404101 - protein, 368 aa, unidentified
MTKVVYVGLDVHKETITIATANEGREPAREFKTILSDDARALKVVRLLTPKGGKAVVCYEAGPTGYGLYRRFREADIDCRVVAPSLVPIKAGHRVKTDRRDAVRLAHFLRSGDLTDVYVPDEADEALRDLERARDDAKRAERTARHQLGKFLLRHAQHFSETRNWTVRHMEWIRRLKFEHMAHQRVLKDYLKTVEDATERVDYLTDDIKELVESSALAPLIKALQAFRGIALVSSTTIACEAGDLRRFATAGQFMSYVGLVPSESSSGERRRQGSITRAGNSHLRRILVEAAWHYRHLPAMSKELRRRNKPVSDGVRQIAWKAQKRLHRRMYHLIHNGKNKKTAVIAVARELAGFIWAVAQEPELLAP

SEQ ID NO: 404102 - protein, 396 aa, unidentified
MSTAHELNSNPSSVATLYVALDLGWGEWNLAFTTGVAQKPRLRTIRARDLHALQLEIARAKDRFKLPADTAVISCYEAGRDGFWLHRYLLSKGVQSLIVDAASIEVNRRKRRAKTDRLDAASLVVMLIRWHLGERKLWSIVQAPSPEAEDLRQLHRELISLKGERTEHINRIKGLMASIGLALAVDRRLPERLDGLRQWDEKPLPADLRTRILREYDRWLLVDNQICSLETEQRRQIRDDATPGVETIRQLIGLKGVGLQGAWLLEREFFGWRSICNRRQVASLAGLTPTPYGSGQLEHEQGISKAGNKRLRWLMVELAWCWRRYQPTSALSVWYQRRFAEGSARMRKVGIVALARKLLVALWKYVSRGEVPEGAEEVPWRQKLSHRKRAEVSVAC

SEQ ID NO: 404103 - protein, 319 aa, unidentified
MNSIVYVGMDVHKESYTVCCYSFDTDKIMYQQKMPSDYKLILKYLEQLGNRFTEKIDFVCGYEAGCLGYSLYHQLTDHGVKCIILAPTTMAITNNNRVKTDKRDAGNIARCLAFHTYSEVYIPTDEDNSIKEYIRMRDDQKLNLKKTKQQILALVLRLGKKFEGGKSYWTITHMKWLKSLNLGGVSQETLDEYLITYEYFIEKIERLDQRIEELASGERYQEKVKKLGCLIGVKTHTSLSMIVEVGDFERFAKPEKFAAFLGLVPSEDTSDEKRSQYGITKAGNSHLRRLLVEAAQAYTRGKLNTVISRYKTVEFTADH

SEQ ID NO: 404104 - protein, 509 aa, unidentified
MAYAGCLRPHSYTVADTMRQRQPSPTQAPAPQDTPVHANPPPRPVGRPRRQPAVPLVVRNPDAAGIDVHSDMHMVCVPANDLAAPADSLAGGLPANVRKFGANSCDLLAIADWLTVCGVTTVALESTGVYWIPLFELLESRGFEVYLVEPGQLSRCGARPKTDVLDVQWIQRLHTYGLLRPSFRPPDSIMALRGYHRQRQMQIRYAASHVQHMQKALEQMNVKLTEVLADITGLTGRRIIAAIVAGERDPFVLAALRNVQCHNDAEAIAKALQGTWRPEHLFALRQAYDLYQFHHQQIAQCDQMLQAELAKLPNRAGDKPFERKPRNGGRKQNDLTFEAGGPLFKALGVDLTEIEGIDVSTALVILSELGVDVSRFPTEKHFASWLGVCPRQYESNKSKKKRGPRKGKNRIAIALRMAAQGLGKTKSPLALFYRRIKSRIGGKGAITATAHKLACLVYRMLKYGKEYVKQSMEDYERKLKQQLERSLRRKAAALGYELVAKPAAATAPV

SEQ ID NO: 404105 - protein, 317 aa, unidentified
MSNPESFVGIDVAKGWLDVAWLTGETLRIDHAEKAIAVLVERLRSQPPALVVMEATGGLETGVASALAAAGLAVAVVNPRQVRDYAKACGRLAKTDRIDALILAAFAAAIRPQVRELPDEHTRALGDLLARRRQLVEMRVQEKLPLQRASNVQRASLREHIVWLDERIGRLDIDLTHALRSSPAWRDKDDLLKPIPGVGSLTRATMLALLPELGTLSRRQIAALVGVAPFNRDSGQHQGGRVIWGGRAQVRRTLYMAAVAAMRCNPVIRSFYQHLRSQGKPAKVALTACMRKLLVTMNAMLKHHSAWSNRLDTQHSC

SEQ ID NO: 404106 - protein, 344 aa, unidentified
MDHYAGIDVSLECSSVCVVDASGKVVREAKVVSEPEALIGWFGSLGLELARIGLEAGPLSQWLYAAMKQAGLAVELLETRHVSDAFKAMPVKSDRNDARKIAQLMRLGWFRPVHCKSTTAQEIRAMLTARKLVQSKLLDLENSLRGILRGFGLKVGKTTRTKFAGRIEELVKGHPNLQTIGQALLRARAVLLAEFNGFEKRVRAMSRLHDKARLLMSTPAVGPIVSLTFACAIDDPSRFTSSKQAGPHFGLTPKKYQSGETDYTGRISKHGDASVREALYEAAHLMLTKPIKGCSELKSWAMRIARRAGTNKAKVALARKLAVIMLRMLKDNVPFNPAAKAATA

SEQ ID NO: 404107 - protein, 325 aa, unidentified
MKTMSGSSVMVGIDVASAHVDVACLGAVLPSELAHVSNDAEGHSALADALAKLQPGLVLMEATGGYEAALACALQAAGLRVAVINPRMARDFARAMQRLAKTDRIDAATLAEFAAVLAQRPDCERFVRPLSEPEQQDLAALVTRRRQLVAMQLSERQRLRLARPVTRPSIDALLEAIARQLDDVDAEMVRHVEQHHAVMAKLLQSVAGIGRIAAATLIAELPELGRLNRRQICALVGVAPYAKDSGSSRGRRRITGGRFEVRRALYMATLTATRFNPAIRAFYERLLAAGKLKKVALIACMRKLITHLNAITRDHLNAHNQPFTA

SEQ ID NO: 404108 - protein, 410 aa, unidentified
MNPIIDGCAGLDVHQATVMATVRLRDEAGGRRSITAEFSTTTLGLLTLRDWLHAYGVTQVAMESTGVYWKPVYYVLEDDFSLLLVNAQHIKRVPGRKTDVTDSDWIAQLLECGLLRASFVPPRPIRDLRDLTRYRKHQIRDRAREVNRLHRVLEDAGLKLSTVASDVMGVSGRAMLDALLHGTTDPAVLADLAKGKLRRKLPALREALQGHFRAHHAWLVGQILAKIDFLDEMITSLTGEIDRLVAPFAPMLANLDTIPGVDRKAAITILAETGGDMSRFETDHRLCSWAAICPGQHESAGKRRSGKTRKGNPYLRTTLIECGLAASRANRTALQACYRRVRRNRGHKKAVVATGHQILRIAFHVMHRNVSYHELGADYLDQRQRDRAIRRHVRQLEQLGYKVLLVEPAA

SEQ ID NO: 404109 - protein, 350 aa, unidentified
MYFAGLDAHLKYVTVAVLDRLGTIVLETTVSTREPERLLAVLAPFRPLEVVVETCPFWPWLYDLLVPAGIGFHLAHAKRLRAIATAPQKNDRVDARLLARMLLSGLIPEAYPRPGDQRELLRLLRHRTTLVRFRTRLAGRIHSQLHQQRLLLPREQLLRQATRTWLRETAWPHLTTEQQAIVTTHLELIDHLTPLIQALERRIDTAAGANPTAALLATIPGIASYRSLLLAAELSPLSRFPRVEHLASYAGLAPVTRSSGGHTRHGSIPQGANRWVRGALVSAIPSHVRWAPTSPVTRAYGQLTARLGWRVARVAAARKLLRIVYIMLRRGEPWRGAGRVEADVRDEVHA

SEQ ID NO: 404110 - protein, 365 aa, unidentified
MKSTTLWVGMDVHKESISLSVLEGGLRDARPTVTVRNLPSELKRVFGRLRKEGEVRACYEAGSCGYEVQRLLASMKLDCEVIAPSLIPVRAGDRVKTDRRDAEKLARLFRAGELTSIRVPSEAEEALRDLVRCREDVREDVLRERDRLLKFLLRHGQIFSGTKNWSQTHWSWLRALRFDEPTTQTVLVEYLARLEGTLMRLKALDQEIVAAADREPYKEAVGRLRCLRGIDTLSAVILVAEICDFHRFEHPRELMSFVGLVPSEHSSGAKQRRGGITKTGNAHARRVLVEAAWHYRRPPRRSATIEARWEGQPGPVVAHAWKAQERLHRRFFRLTSRGKSSQVAVVAVARELCGFVWAAATQPAP

SEQ ID NO: 404111 - protein, 342 aa, unidentified
MKIMTGIDLHSNNVLCGLMDESGRRVLHKKLPCDLSVILQVLEPYKARITQVAVESTYNWYWLVDGLEDHGYPVVLANPARMKQYDGLKHTDDVSDAFFLCELMRLGILPTSHLYNRQSRPVRDLLRRRMLLVQLRTSLILSFKSLNERTLGERVPLARVKAMSIEQAQARFTAPADQLLSGEQVGLMGQLQKSIAKIEKHILATAGEWKTFQRVQDVPGIGKILGLTIALETGQPQRFASAGNFASYCRCVKSLRQSNSKKKGENNRKCGNRYLAWAFVEAAHFACRHDERCRRFYERKKQQTNPVVATKALACKLAKASWHVMHGDVPYDPQRVFGGGTA

SEQ ID NO: 404112 - protein, 311 aa, unidentified
MTLPQTYIGVDVAKDWIDVCDPASSRQERIPTDRRSLRSFAATVGSSIVVLEASGGYERPVMSALFEAGRLATCVNPRQAREFARATGRLAKSDRVDALVLVEMGRALQLAPASPRSAERQRLSELTAHRAGITTMIVAEKNRLRTAQDPWIRRNISQHIKTLQASLAKAEAEMEAVIQGQGDLREQAARLRQVKGIGPVVSATLIAQLPELGQLDRRRIAALAGLAPHANGSGHRRGKRSIWGGRGTIRRTLYLAALTASRFDPRFRAFKERLLAAGKAKKPVIVACARKLLTVLNAMIKTGTAYRDAIV

SEQ ID NO: 404113 - protein, 490 aa, unidentified
MAGGSGKVDHSLDKPKLLTCLTRSVRGGANKWALHSPWWGAAIARDRGSRKLRHTLCSRQEERMYRIAGIDVHKKKLAVVVSDVEVHGEYQFERRWFGANPEQLRFLSQWLAEHQVEEVVMESTALYWKPVWGALERYWQPICQKREGAGATSGILHLAQAQSNRGPRGRKKDFRDAERLVKRLVADELKLSFVPDWEQRLWRTLTRRRYQLTRARVQLQNQLEALLEEAHLKLSSLVSDLLGVSARRMLQAIADGETNPEALAGLADRRLRATPEQLSDALGACTELHAVYRRLIKMMLGELKVIEEHTAELNQELATLLRPHQDAVERLAEVPGLGVDSAQQILAEVGTNAAVFASDKNLCSWVGVCPGDEESAGESSSHRSPQGNRQMRRLLNQAANAAVKTKGSIFEIVYRRLVPRLGHNQTIGAVAHRLCRLIWLILRKGVRYEERGPAVSQRSRQNRTSKMIRELRTLGYRVEFLNAVPSNPMP

SEQ ID NO: 404114 - protein, 354 aa, unidentified
MNSTQNERINQITSSTLIVGVDIAKFKHVARAQDYHGVEFGKPITFENDREGFEMFVSWFRKLATEQGFQDVIVGMEPTGHYWLNLVHFLREQHVTCAVVNPLHVKKSKELDDNSPTKNDIKDAKVIAQLVKDGRYALPNLPQGIYAELREAMKIRDHLSTDLRVVQGRVHNWLYRYFPEFLTVFKDWECKSARQMLGLCLLPHELASQSEESLLSHLREVAKRGLGIERMRGLKAAASRSVGIREGTELAKIELKLLLTQYEMLESKFEELEVKLDELLEQIPHVKPLLAIKGIGRNSIAGFLAEVGEIERYQHPKQIIKLAGLNLKENTSGKHKGQTKITKRGRKRLRAQHN

SEQ ID NO: 404115 - protein, 321 aa, unidentified
MTAILGIDVAKNKFDVALLRSGKYKSKSFENKQSGFESLAVWLKQHDVVALHSCLEATGSYGDALARFLFDAGHVVSVVNPARIKAFGESELQRTKNDKMDAKLIARFCEAMRPVAWEPDPPEVEHLRMLGRRRDALVSMRTQEGNRLGVIDPTVNSSIQKVISFLDDEIEQISKLIREHINGHPDLRKKRELLDTIPGVGDVTIEAILSEVNAFAGFETVEKVVAYMGLSPKEKTSGTSVKGKSSLCKIGNARLRKILYMPALSAIQHNPLVRDLYNRLIAKSKNGMIIACACMKKLVHIIYGVIKNGKPFDPAYNIKTA

SEQ ID NO: 404116 - protein, 343 aa, unidentified
MKHTTIAVDLAKSVFQVAVSHRPGRVTKQHRLSRARFLPFFSQQPPATVLLEACGSAHHWARRLRSLGHTPVLLPAHDVHRYLHGNKTDSADAKALLEAFRNEQVHPVPVKSIDQQALTALHRLRSASLATRTARINTLRGILREFGIVLPMGAKRVLPALRVILDDHSSVLPLPLRIELEEAGLEIRSLEERALSLERHLQTLAASLPAVQRLLTVPGIGRLTASALVAFVGDVRRFPSGRHFASYLGLTPREHSTGMSRRLGRITKRGDVYLRMLLIHGARAVLWAAKSKKDPDRLRAWALNIERLRGHNKAAVALANKMARIAWAVWKREQNFEEVSIAA

SEQ ID NO: 404117 - protein, 366 aa, unidentified
MGEITTIGVDIAKHVFQLHGVDVSGEVVLCRRLPRGRVAAFFAALPPCLIGIEACGTAHFWAREIAAFGHDVRLMPPGYVKPYVKRNKHDAADAEAVCEAARRPSMRFVPVKTPAQQAALIVHSARDLLVRQRTMLVNALRGHLAEFGIVAERGIHKVEELTAVIGDEADERIPASARSALRVLAAALAAIELRITVLETEIVARTRADAVARRLATVPGIGAIIASRITATVPDPSIFRSGRDFAAWIGLVPRQNSTGGKTRLGGISKRGNGTLRRLLVGGAMAAMFRSKILQHHPWLCRLRARKPAMVAAVALANKIARVAWAVMRHHENWRPAGASASRSHEPAAVLAAVKTMPPSAVAFGQS

SEQ ID NO: 404118 - protein, 422 aa, unidentified
MLEETHDNDQIIQRVAALDVGKAELTCCIRVPGPGKSGKRLQEVTTYQTMTRWLLVMADRLAELGVTRVVMEATSDYWRGVFYLLEAHGFQTWLVNARDVKHLPGRPKTDTLDAVWLCKLAERQLLRPSFVPPQPIRQLRDVTRYRADLVAARTAEKQRVEKLLEDAQIKLSVVASDIFGVSGRAMLAALIAGERDPKVLAQLARTRLRAKLGPLVEAFTGFFTDQHAFLLAKMLARVDALDADLAELDAKLAELIAPLAGAVERLDEIPGVGQTAARLLIAEIGADMTRFPTAGHLVSWAKFAPGVKESAGKRKGSGSTGHGNPYLARVLGEAAVAASKTDTFLGERYRWIARRRGAKRAIVAVGRSILVIVWHLLADPTARFQDLGAGFYDTRINAERAKRNHIRQLEALGYKVTLQPAA

SEQ ID NO: 404119 - protein, 409 aa, unidentified
MLFIGDDWAEDHHDIEVEDEQGRRLARRRLPEGVAGIEALHALVADHLPDDAEANQVLVGIETDRGPWVQALIAAGYTVYAVNPLQAARYRDRHGVSGAKSDAGDAHVLAELVRLDRAHHRPVAGDSAIAEHVKVLARAHQSLVWSRQRQNNMLRSMLREFYPGALDAFAGELDGRDALAVLAIAPTPADGRRLSRARVETALRRAGRQRYLATRAAEIVAALRADQLPARAGVEDAYGASVRALVAVISELRRQTLALAGAVEAGFGRHPDVEIYLSQPGLGPVLGARVLAEFGDDPARYADAKARRNYAGTSPITRASGKSSAVLARHVRNRRLADALDQQAFAALQASPGARAYYDARRARGATHHQALRALGNRLVGVLHGCLRRHQRYDEARAWQQHAVVPRAA

SEQ ID NO: 404120 - protein, 322 aa, unidentified
MSGAVVGIDIAKRKFDVALFLKGKFKHKACMNNKQGFEDLSRWLKKQGVEHVRVCMEATGTYGDELATYLYDAGHLVSIVNPVRIKGFAQSELLRTKNDKVDAGLIARFCVAMNPGTWTPPPPEIRRLQSLVRRADALIDMRTQEQNRLGTTHETVEPSIKEHIGYLDQEIEKLKRQIAEVIDHDPNLRGKRDLLDSIPGLGETTIAVILSALHVFEGVKCVQKTVAFIGLAPKETLSGSSLKGKSRICKIGHARLRKALFMPALVAMRYNPVMIDFYRRLKEKGKNGKVILCAIMRKLVYLIYGILKSGKPFDQNYKQNFA

SEQ ID NO: 404121 - protein, 410 aa, unidentified
MNPLYVGIDVASHSNVAYLMKPDGSKHSVFPITNSKAGCQQLVKRIVSAMTGNGLSEMKIGMEATSIYGSHLVYTLKEDFSLSAYTKEIHVLNPKQVAKFKESYDDLPKNDYVDAYVIADCLRFGRINNEVYLGDYRYEALKKLTRARYTAVVNLSREKQRFLNTLFLKYSTFAQEKVFSDTFSTTALAVYEEFESADQLALMDLHELTEFIKEKGKNRFPDPDAVAKAIQKAARSSYRLPKTVNDSVNQVLSISISSMRALEASIKQYDKAIAEQMNAISNPLISVKGIGSVYSAGIIAEIGDIHRFKNQASLAKYAGLAWKQHQSGGFEAENTPLIHTGNRYLKYYLCEAVMSLVRCDTEYNSYYHLKYKEVNRAQHKRALVLTARKFVRLVYCLLSENRMYIAPEER

SEQ ID NO: 404122 - protein, 316 aa, unidentified
MNTLNQNEINIGIDTSQTNLDIYVRPLGLYKSFGNNTEGIKEAIKFIKQHVPIRVLIESTGRLEMDFVCAGHKVCLPISVCNPAHVRSFAKATGRVAKTDKLDAEDIAHFGEAVKPEPTTLKPEKLRHVSDLLTVRSQCLEMSTMQKNRLKRMPKTVHKPINNILKALKKELAVIDVQLEKLIKEIPEWQERVDQLTSAKGVGKVLAYTLMSELPELGRLNRKEVAALVGVAPMNRDSGSYEGKRYIRGGRSKVRTVLFVSMLSAIQCHPKLKPMYQRMVAAGKPKKVAIVACMRKQLIILNTMVKNGTHWDENMV

SEQ ID NO: 404123 - protein, 367 aa, unidentified
MSKCIMLGTDVHDATLVVKMAVDTEKPETQRYDNNLRGRRQLWRALKAIVKKQGCDRVVMAYEASCQGFGLYDEAREEGLECYVLAPTKIARSVQHLRRKTDEEDAQRLFEVVRGHVLAGNELPTVTVPDLTTREDREITRARQDVSEKMTSLKTQVQTLLKRHGLCRPKVSGKGWTKSFEAWLQGQAGESSALPYGVRVALATLLRQKEAIEKEIELLDREVEILSGQKRYAGPVEALIAVSGVGVLTAMLLLTELGDLSRFTSRKQIGAYLGLVPSSNESGKSGDRKGHITHQGLWRVRRALCQCTWARVRTNPEAKAAYARIVARNPKHKKIAVVAMMRRLAVLLWHIGLDAQQRNACFAREAV

SEQ ID NO: 404124 - protein, 374 aa, unidentified
MGCQVGVESSKLTTVMKDKKAETTKSYDTIKLGIDAHSKWYYVARQLDGATPQPVQKMEIDGLLHFVAKQQKLAGEVHTCYEAGAFGYYLHRKLEAMGVSNLVVQPQDWDERGKGVKTDRIDALALCQRLDRYVRGNRKAFSVVRVPSEEEEGERAISRQRGQLVRERQRLQAMGRSLLAMHGIHVTGKWWTGKTWAMIGSDAPAWVVERLKIYIKLIEPVEAEERKLTEQVQEAARDQKIPKGVGSLSFEVLRREVGDWSRFNNRREVSSYTGLCPREHSSGGKRRGGSVNKSGNPRVRAMLVEMVWRMIRWQPEYHALRKWMPVLGDAKGSATARKKAAVAVARQLAVDLWRLFTGQTTAENLGLIYMPDAA

SEQ ID NO: 404125 - protein, 360 aa, unidentified
MEVGQEVVLHPVVGGVDTHKDLHVAAVVDELDRVLGTRCFATTRQGYRQMLAWMRSFGQLRCVGIEATGTYGAGLLRSMQNAGVEVLEVTAPDKPDRRKRGKNDDLDAQNAAHAAFAGKRTVTPRSRDGMIESLRVLKACRKTAVAARRIALQMIQNTIVCAPDGLREALRQMTRMQLVRTLAAWRPDLTDYRNVDSAYRISLKSLGRRYVELHDEIADLDVMIAAIVDELAPNLVARNSIGHAGAAQLLLTAGDNPERLHSEAGFAALCGVSPVPASSGKTTRHRLNRGGDRAANSALHIIAIGRLRTDPRTKAYMAKRVAEGHSKLEVIRCLKRYIAREVFTLISHRQKEINQARITA

SEQ ID NO: 404126 - protein, 482 aa, unidentified
MKKRNIYQNQSQELLSLFEAVGSSAKVMCVPMDYAKKDHLVMFCNGHGDILRKPFSVKNTPEGIKYLIDQVTRSCRRRGIKKEHVFFGGEDANSFAENFVSTLRFKGWLVAGVNAHDAKKQRANLQASTDRIDLIGIATLLLNCRANCCPAQSGIYRNLRTLVRHRRKLVVMLTEVKNRVHGIVDRLFPGFLNEKNSGIVPFTQSSLYLMEDRFSPRQIRRRRRQKLIEILRRFGTSKAEETAFKLQQYAAQVLHIPVEYVDTLQLSLAQHVKHIRCLQEGIAQLKKEIAVNLAQTQGAFLTSLRGIGIVLAAGVSAEIGDPYEQRPLSNVVSYSGIIPRVKQSGGVDGKTYTGPVAKRCNRILKDYVVKSAHHLGLYGPQDLMADYKRRDVSGQHANFGIGRRYLRMALSLMRTSQVYLPPRLRKTDVTLQERAGYYLMSWPFLRDKWKKAGALEAAFAKDRPLGLWRQIIQELYDIKLKL

SEQ ID NO: 404127 - protein, 340 aa, unidentified
MSEITTIGLDLAKHVFQVHGIDAEGTTVLRKRLRRNQVLGFFSRLPRCVVGLEACATAQYWARELGALGHEVRLMPAQYVKAYVKRNKNDAADAEAICEAVQRPTMRFVPIKTAEQQAAQLLHRGREQLVRQRTMLVNALRAHLAEFGMVAAQGLRNVAQLIAIVRDAGDLRLPDVARQVLQVLAAQLEHIEAAIAALEKQLMAWHKANAVSQRLASIPGIGPIIATAVATTVADPNMFRSGREFAAWLGLVPRQNSTGGKTRLGGITKRGNRYLRRLLINGASANLLRSKATKADPWVIGLRRRRPPLVVAVALANKTARIAWAVMLRQTEYQPRAVAA

SEQ ID NO: 404128 - protein, 403 aa, unidentified
MEGPLISLDVSKGKSNYRFFENGTDRKGKKGVIRHDIQGFDSIRDEAEKMEKRLRIKPSVIFESTGVYSDVVEKYFTDKGFDVYVISPLLSASMRKEGVRPAKNDSLDTLSIAKVFYSKDDLRKCSEKDKKAERLREMSYELDMMNRRIRPMKCQFLRLLDKVWPCLDEVSDYSSRFMLDFIIAFGHPENIKTVKGVLSVIRKSEMGTAGRKDKIAQDLFDYCHTHLSAVSKDSSYVELLKRMAIELKAMAKKKSELIDRMAEEARNKDEFVRLLTIPAVAKTTALKIMARVGDISRFRNAEALVAYCGLDPRVYQSGKMTGEHRTITKKGDCILRSTLFLAVKLMVMLYPDTKVARFVAAKAKNGLSYKQAVVAGSAKLARIIYSMLTHHENYVEFNADIVA

SEQ ID NO: 404129 - protein, 360 aa, unidentified
MSFNGTSVGLDVHALSVVAHAVDEETGRVERARLCPDHGEILGWLGQLRGPVRVAYEAGPTGFGLARALADAQIDCTVAAPSKLIRPPGDRVKTDVRDAAHLTRLLRLGEITAVVVPEREVEAARDLVRAREDARADLMRVRHRLSKLLLRQGRVYSGGQAWTGLHETWLRRQRFVDPNTAAAFDHHFDAVLNATAARDRLDEQIVEVAASLRWANTVDRLGCLRGISALTGLALAVEIGDWSRFTGASIGAYVGLVPTEYSSGTSRVQGSITKAGNAHVRRLLIEAAWHHRAAYRNPGPTMRARWAKVDPALKARGHAGNRRLHQQWCRFNERKKHHVVANVAIARELAGWCWSLATLT

SEQ ID NO: 404130 - protein, 344 aa, unidentified
MNISIVGLDLAKNVFQVHGIDGTGKVIVRRSLRRRQVMPFFGKLEPCLIGMEACGTSHFWARALQALGHEVKLMPPIYVTPYVKRGKTDAGDAAAICEAVTRPTMRFVAIKSAEQQSILALHRTRTLLVRQRTQLINMIRAQLAEFGFVLATGIQHALKLVDQLVEGVTPDIPALACKIVISLAEQVRALQARIGMLEEDMKTWFSGNDLAKRLKTIPGIGFITASALAASVTDPHQFTSGRQFAASLGLTPKADCSGSKERMGRISKMGDRYLRRLLVSGMTSQLQAVRRKPEAHPWATRLLASKPNKLVAVAMANKAARIAWVVMTRGEVYRARYSATEATA

SEQ ID NO: 404131 - protein, 373 aa, unidentified
MGEDRTVCVGLDTHKAKIAVAVAEPGREGEVRFHGEIANQPEAVRRLIERLADKHGRLKVCYEAGPCGYGLHRQVTALGHDCTVVAPSLVPRRPGDRVKTNRRDAVALARLHRAGELTAVWIPDPVHEAMRDLVRARTAAMEAVRRARQQLQGFLLRHERVFTGRKTWSPAHRRWLAGLRFAHPAQQIVLQEQIDTIEEAERRRDRLGQQIRELVPDWSMAPVVTALQAMRGVAFLSAVVLVAEVGDFRRFTTPRQLMAWLGLVPSEHSSGAKVERGGITKAGNGRARRVLVEGAWSYRFPARVTSPIQARLDDVPEAVRAIAWKAQVRLCARFRRLVAAGKNVNVVTTAVAREMAAFAWAIACQVQPKEAAA

SEQ ID NO: 404132 - protein, 449 aa, unidentified
MSDIPTSSTQPEFGALIGIDWGDKKHAWALQVGDSTKIEKGDIEHTPEAIQQWAVGLRQRFPTGRLAVALEQSRGPLVFALSKYEHLTLFPIHPTSAAEYRKIFRPSGAKSDGPDAVLHLDMLARHRDKLRPLNPDTPETRALQLLTEDRRQLVNERTRYSNRLTANLKSYYPQVLQWFDDLYAPVTLDFLDQWPTLEELQKAKPGVWSEFFQEHNCRDAKTQQRLAAIPMAVTATTDFAVVTAGRAGVCAAVRLLRNLNQAIQEYDRQIDQLAKGHPDFAIFQSLPGAGKVMVPRLIAAFGTQRDRYQRAADIQQYSGIAPVTEASGQQLWVHWRWGCPKFLRQTFHEWAAQSIAQCDWAAAYYRVQREDKNKSHHAAVRSLAYKWIRIAFRCWKDRQLYDDSKYELALKTRAKATPEPKQPSAFPLPLRWISCAGFQKLAEKNGENT

SEQ ID NO: 404133 - protein, 358 aa, unidentified
MNYTQNQKIEQVTESTLVLGVDIGSSEHYVRAFDYRGRELTRKVFRFSTDINGFNSFYDWVTQICIKHGKNEAMIGCEPTGHYWYTFYQFVKDHGMKLAFVNPASVKKAKELDDNSPKKTDLKDPKTIAKLVIDGRYSFPYVPEGIYAEIREVTSSRDRIMKELNAASNRIQRWLKIYFPEYLTVYKKFDTTTGMMILEEVPLPTMVTALGVDNIIKIWREHKVRGKGASFNRAKTLVDAAHDSVGKSGGQGAVMEIQMLLEDYKVKKQQLEMVTSVMEELIMQIPNAEKMLSVDGVGLVTVAGFISEVGDISRFKNPKQIQKYAGFELVENSSGKHKGRTTIENMKVPGTLRNQFIK

SEQ ID NO: 404134 - protein, 394 aa, unidentified
MSMFAGIDWGGAHHQLAIVDDVGDVKVNQRFAHTSDGVDELLAVLDAIGTATPVAIERSEGVLVEALQLAGHAVFPVSPRVSARARERYQSAARKDDRFDAFVLADTLRHEHSRWRPLAIPSPTLAELRVLVRDRRRILENQRGVESQLRSALEAYHPAAAKLFSSVDRSITLAFVRDYPTPETAAHVGPARMQRFLDRHGYTGRVAAEILVERLHTHLLTARAGSVEGHRFGALALVDQLELLNRQLKAFDARIADVFAAHPDSAIFDSFPAAGPVIVASLLAEIGEDRHRLPTVDVLLAEAGLAPVTHASGKVTRVRLRRACNLRLRDTFNWWAYTLERVDEPSRVTYLAALDRGQHSHRALRTIGARWARILWRCWQDHATYDPDRRTATA

SEQ ID NO: 404135 - protein, 318 aa, unidentified
MSDSVFVGIDVSSQTLEVASSSQAKTWQVSNDTAGLDPLVSRLLDVKPALVVLEATGGYEFEAACALQAAGLAVAVVNPRTARDFARAMGALAKTDALDARMLAAFARVLHQHPERERFVKPLADAELQRLQALVLRRRQLVQMITAERQRMRVSHVAARPSIERVIEFLKAELADSDAEVAAHIERHHADLGAALASVPGIGAASVAVLLAELPELGKLDRRRVAALVGVAPLNRDSGQMRGQRSIWGGRADVRRTLYMATLTAVRHNTVLKAHYEHLLAAGKRKKVALVACMRKLLTMLNAIAKHGTKWDPTLHNA

SEQ ID NO: 404136 - protein, 428 aa, unidentified
MQNYSSTTPLYVTIDVGKNINVFAAYQGQELVEINKPIEVRNNLKGYQCLSYAIHEWLASNQYAPVILGLEPTGVYHEPWAYAIQNDFGDRLQFRLLNPYQTKQQRRKMDSGRNYKTDAVDVKAMAYCLRDGLGNPAWLRQGVELQFDVWAAAYRQVNAELFRLHLSLLSQIDRLWPGAIVDVKAFEKAHPTLEPPVPFVLSRPIERRLIQAVFSNEPNPYTWKGRSSDQIQSTIRQFGVRCGPKTAQTILQLLDEALFVPEPMADLLATRMKMDFAQYLALQERMQEIQLQAEMLVPNTIAAVLTSIPGISNFLAAQYLAYIITPFRFSHPDEIWCLAGFDVNRDDSGDRRKTGRISKRGDPGLRRLLFQIGLNTSVHCSPIAAAKRRALSHGKDRIGAILHAAHKANRLCFTLLKAQTLYDPLRHC

SEQ ID NO: 404137 - protein, 399 aa, unidentified
MASMASEIPPAQPGQVFGGIDTHKDLHVAALLDSAGGLLGTAEFPSTRAGYRRLLGWMQTAGPVARVGVEGTGSYGAGICRELTAAGVQVLEVNRPDRSLRRRRGKSDTLDAAAAAEAARGSNRIAIPKTRDGQVEAARMLRLTRASAVKARTQALQLLRQHIVTAPNQLRDQLRDLSRMELIHTCAAWRPDPRDAADPVVATRIALKKLARRYLHLDEEISDSDVLLDGLVAELAPQLIATFGIGTETAGQLLVTAGDNPDRVHSEPAFAMLCGVAPLPASSGHTKRHRLNRGGDRQANRAIHVIAATRKRSDPRTQAYLNKKTTEGHTPREATRCLKRLIAREVYHLLNPAPHTPPAPPSRPDRRRASAVKVEPPTRGTTLTAPSTGTPSKMEEPAP

SEQ ID NO: 404138 - protein, 372 aa, unidentified
MGEDTLFVGLDVHKETIAVAVAEGIRGGEVRYLGEIKNSHEAVRRLVAKLGKHEAIPRFCYEAGPCGYVLHRQLTDLGQVCIVVAPSLTPARPGDRVKTDRRDAVLLARLHRADELTAVWVPDEGHEAIRDLVRARTSAMENRRRARQQLAGFLLRHGRIYRSGLNWTKKHRLWLSTLRFGHPAHQIVLQEYVDAVDDADKRLSRLETQIKMLIPEWSLGPVVQAIQAMRGVRLISAVTIVAETGDINRFDTPRQFMSYLGLVPSEYSSGGSTRRGGITKAGPKEARRVLIEGAWAYRCHAAVGSEHSGRLEALPKPVRDIAWKAQIRLCARYRRLSSRGKVQTVVTTAIAREMAAFIWAIARHVHPAAPAA

SEQ ID NO: 404139 - protein, 369 aa, unidentified
MEDRITYVGLDVHKEGIVVAVAEGGLRGEVREYGRIANTAAALDRLMRKLGSTGVRLRFCYEAGPCGYGIQRHLSARGHDCVVVAPSLIPKRAGDRVKTDRRDAAGLARLHRAGELTAVWVPDAEHEAMRDLVRARLDAVHALRRARQQLSGFLLRQGCHYGRPAWTKLHRRWLAGLKFEQAVHHIVLEDYIAAVEAAEARRGRLTAQIEAMLPDWTLAPVVAALQTMRGMALVNAATLIAELGDLSRFANPRQLMAYLGLVPCEHSSGASVRRGGLTKAGNSAARRLLIEAAWCYRFPARVSRELLLRQEEQPKPIREIAWKAQLRLCARYRRLARSGKPANVVTAAIARELAGFIWAIARRVPPAAG

SEQ ID NO: 404140 - protein, 311 aa, unidentified
MEQLLFVGIDVAKDGLDVHVRPTGEIFRVAHDDAGRAQLTERVAALRPTLVALEATGGYEVTVAAALASAQLPVAVINPRQIRDFARATGRLAKTDTLDAHVIAAFAEAVRPAGRALPDEQARTLGELVTRRRQLVDMYGAELNRRRLVRDPQVQQQLAAHLRWLEQALADLERELQQTIRATPGWREAEDLLRSVPGIGPVTAVTLLADLPELGRLPRRPIAALVGVAPFNRDSGTLRGRRTVSGGRADVRRVLYMATVSAIRRNPSIGAFYQRLRSSGRPAKVAITAAMRKLITILNAILRDRRPWQPA

SEQ ID NO: 404141 - protein, 408 aa, unidentified
MERYYLGVDWADEFHQVWVSDPEGKKVTEKKVVENVEGLAEFGRFLDESRAKEIELWAAIEKPNGRIVDFLLDHGVVVYAVNPKALDRARDRFRMSQSKTDSFDAYVLAQFLRTDHGHLRALKPNSDPAQELKLLTRDQQRLVRQKTRLLNQLTTTLKEYYPRPLEVFSDLETNIALDFLKQYPTPHDLSKLTRRQWNRFSKRDHHLGEQRAQELWEKLNQPQLKVPEHVVRAKAQLLRVLLAQLEPLRNAVESYNERVRSFFASMPAAELVKALPGAKTGTIVATLWAELGDAKDRWESFRHLQAEAGVVPVTKASGKSRVVQFRFSCNKVMRHAAYWLAFVSLNRTEWANHYYRDQRAKGHSHHQALRALGAKWLKIIFVMWRDHKPYDENYHLANIARQQMRQAA

SEQ ID NO: 404142 - protein, 387 aa, unidentified
MAQVNDLSRSLTAFDPISTLVVVVEMSKASWLVSGVVPGVERQPLKKLEPDSTALLRLIERWRNEAMHSGRPISRIALAYEAGRDGFWLARWLIARGIEPHVIHSASVAVSRERKRAKTDRLDAAMLMRVFLGWLRGERGHCGMVVIPTMEEEAARRPSRERENLVNERSRITNRMQSALARLGIRGFKPHLRKAPERLAGLRTAEGTGLPANVIEEFRRDMARLALVREQISSIEKTRAKRLERAPDTGPHAMVRLLARVIGIGIETADMLVREILSRKLRDRRAVARYAGLTGSPDESGLKRREKGLAKAGNARVRRGLIQLAWRFLMFQKDSALARWYRTRTEGPSGARKTTMIVALARKLLIALWRLVTTGEVPDGVELRPAA

SEQ ID NO: 404143 - protein, 302 aa, unidentified
MGVDIAKSYLDAATGNEKRRFANEGVGHRELIKWVKQLKIPVQVICESSGGYERALVQALVGAQLKVSLVQANRVRQFARAAGILAKTDRIDAKVLCNFAEAMQPGTISASQLEQQHLRELESQRRHLTHLLVMEQNRAARVSDGCVRKLNRSLLKQIKKQIEQLDLFIKEHIEASPELSAKAQKLTAINGVGARTAALLLAQMPELGQLNRREVAALVGVAPFNRDSGKMRGKRAIYGGRRPVRHGLYMAALVAARHNPVLRTFYLRLRAAGKPAKLALTATMRKLLIVLNTALKPDLNYA

SEQ ID NO: 404144 - protein, 451 aa, unidentified
MATKRKKRVQDLPVLHPDAAGIDVGASEIFVAVAADRDAEPVRSFATFTRDLNSLADWLQACGIRSAAMESTSVYWIPLHQILEARGIEVCLVNAQHVKNVPGRKTDVSDCQWIQYLHSVGLLRASFRPPAVICAIRSFWRHRDSLIQMAAEHVMHMQKALDQMNLQVHRVLSDITGFSGLRIVDAILAGERDPIKLAQLCHSRVKSSQDTVAKSLEGDYRIEHVFALRQSLAGYRYYQGLIAEVDQEIQRQLADLKTADGDSKPPKRTKKTPYQRYRYEPAGFDLRGELYRILGVDLTDVPGISSVTAHTILCEVGTDVSRFRNASAFASWLGLCPERQISGGKVLYTKSRRVRNRVALALRLGANSLHHANNYLGEFFRRITRKLGKAQAITATAHKLARIVFHLLNTKEAYNESVFRRCEEEALKHAELRLRKHAARMGFQLVSAANG

SEQ ID NO: 404145 - protein, 365 aa, unidentified
MDTHKKEHHVALHYPGQEEILRFTVRNTARDITKMVKKVIKQAPGDVEFCYEAGVCGFVLKRRIEAHGCHCAVIAPSLIPRKPGDRIKTDRRDALKLLTLFKAGLLTEIHTPDKQQEAARELTRCRQAAQENLKRVRHQLLKFLTRHGYLYSEGNHWTGKHLKWLRTLEFEELLLQDVFDNYFTEMQHCVQRLMSLDNQVEKLARSEPYQEIVGLLRCFHGIDTLSAITIITEIFDFGRFSSPGELMSYLGLTCSEFSSGEKQKRGPITKAGNKRVRRILVEVAWHYRHPCNISKVLKDRRKGQPQWGIDIADRAGQRLRKRYRHLTHCGKMPCKVTVAIARELAGFIWSVCKEYEARKSITKAA

SEQ ID NO: 404146 - protein, 446 aa, unidentified
MRQGKRPASRGVARRNAKLMALRELVGRDRAIVAVDLASQRQAAVVCDHDSVVLARRMFRGSAWCIGEILAWAAPVARQAGFTGVVLACEPTGHRWKPLVVTGRAGKIPVVCVQPLLVRRAREGEDFTRSRPDFGDAVIIARLTAELRCYVPYLPEGPWARLRHLGARREGLVRRAVAAREQVRDLLECAWPAVLEAAADPLESRTWRAALAVSADPAVLAAMSEQEFLAALRERLVAPGGKKVWRRIAVAVHAAAADPGGIAAEREAILERAAFAYQDWTCALAAQADIEARMAAVLDELALTALVTTIPGLTSVGAAVILAQTGDPARYDSPRTWVKHAGLAPQANESGTYRGRTPSSGRGRPGLRTAAWRAMFGAVRCNPVYAARLTYLTSREVNRLTSGQAHTALAAALLRQLHVVITRRVPWQAAIASGTSTPATVVMPAA

SEQ ID NO: 404147 - protein, 453 aa, unidentified
MRVMYERCCGLDIHKASITACALITEKGKTQEETRRFGTMTDDLRALAGWLQQKEIRHVAMESTGVYWKPVWNILEPAGLELLLANAQEVKVVPGRKTDQKDSQWIADLHKHGLLRNSFVPPRAIRDLRDLTRTRAILTQEHSSICNRIQKVLEDANIKLGSVASDVFGVSGRAILRALMNEENDAEALANLSKGTLRKKIPQLRRALEGQVTPHHRLLLTEHWDRMEFLERQIADFEIQIADRMKPTPEEMALMMQDATEDAPAPLSPREEAIQLWMEIPGVGWTAACSMVAELGINMDQFPSAAHVASWAALCPGNNESAGKRLSGKTRKGNVWLRRTMCEVAWAASHTKDTYFAAQFRRIASRRGNKRALMAVAHSILVTAYHMLKHKRHYTELGADFFDVINRDKVRDRLVQRLSKLGFDVTLKSKGTLESVDHLADNSHPVVPASPKS

SEQ ID NO: 404148 - protein, 368 aa, unidentified
MLFIGMDVHKDATVFCLFDPAAEPKAQYRHATVPTTREGLESILAPLNRNCRVAFEVGLQAQWVAEIVRPLTTDLQVANPSKMPWLFRDGRKNDKLDARKLATLLYLDQLPRVHLPRAEVSIWRSLINHRRARIKRRTMVKNQIRALLRARALRCQCKSLWTRKGQAWLRSLVFDPVCVHMMQGLLEELALIEGHIDGVEVQLDGIAKTQPAIALLRTIPGIGPRSAEAIVAYTDDVRRFGNRKQFASYFGLTPTQDASGRVDRHGHISKRGPSVVRWVLVEATHQVVLRCPAFRAFFERIVRGKPDRRKRAIVAVARKLLTIAFAMWRDGTPFDPARVSPPAENKKPAPQAANDPKEKPEMTHKPAA

SEQ ID NO: 404149 - protein, 414 aa, unidentified
MKLFVGIDVSSQELEACFMNADGDNFESFTVPNNLHGASHLRDRIVVAADKLAVSEIHIGLEATSVYSWHPAMYFHQDPALRERKTKVFTLNPKLICKFREAYADMDKTDRLDAWVIADRLRFGRLTTTLVMQEQYLALQRLTRMRFHLVHNLAREKQYFLQNLFYKCNAFTTEVDSSVFGHALMEMLSEKFSLDDIAEMNVTDLADYLRDKGRNRFPDPERVARCIQQAARASYRLSKVVEDSIDLVLGTSIESIRSIQKQLKDLDKAIERILDGIPGAQCLLSVPGIGKVYAAGLLGELGDIERFKDQAAVAKYAGLTWRKHQSGAFEAEHTARIKSGNRFLRYYLVEAANSVRLRDEEFGEYYRKKYNEVPRNQHKRALVLTARKLVRLVDVLLRNGQLYTPRRKVNDAKN

SEQ ID NO: 404150 - protein, 435 aa, unidentified
MSIDKIERFNCCGMDVHKDILVATIGITDRSTLITQYIQETFNSFNSDLYRLCDWLASHHCSEVCMESTGKYWIPVYNVLEERGFTVCLAHPKYTKAIKGKKTDKKDSKWICDLYKHDLVRGSFIPPKEIRELRDISRYYHKLIGMNSSESNRYQNCLTVSNLGIGSIFTDVNGKSATRVMEAVLAADDPNDISDEDLLKLVHKSCKKKDQLLDAVRGCRIESDQRFKMREIQKHKEELDQHLTACIAEMIKRATPFFHQFLHIVEIVGISLLSAILIISEIGVDMKVWEDARHLCSWAGLTPGNNESANKKKSTRITKAGQYLKPLLVQCALAAIKNPNGYFGIKYRRIKKRRGHKKAIVAIARMMLICIYHMILTGESFNPSDYDELMNPKPRKPRELTIESAVDFLKSSGADIDAIIASLKEAPPDQITVQS

SEQ ID NO: 404151 - protein, 417 aa, unidentified
MEHFAALVGIDWSDKKHDVCLVDLTTGKREQLIINHTPEALDEWVTKLRTRFAGQQIAVGLEQSRGPLIYALLKYDLLVLYPINPTTLAKYREAFSPSRAKDDPQDAEYLVELLIHHRERLKPWLPDDEKTRTLQLLVEHRRRLVNDRTRISNRVTALLKSYFPQVLGWFDDIRTTLVCDFLLLWPTLELVKKVKRATLEKFFRAHNSVRQETNENRIAAIKEAVPLITDGAVINSSVLMIKALCAQMKTTIESIREFDQQISALCQSHQDYYLFASLPGAGEVYASRLTAAMGTDRERWTTADELLRFSGIAPVIERSGKSARIRWRYFCPKFFRQSFVEYAGESIKHSFWARAYYSAQRTKGKSHQAAVRALAFKWIRIIYRCWQTRTPYNEVTYLESLRKKGSPLLSFAANNPA

SEQ ID NO: 404152 - protein, 375 aa, unidentified
MGDGPMNSTIFVGLDVHKATVSVAVAEGTRGGEVRSFGTVANRAEAIEKLVGRLARDGYRLSFCYEAGPCGYGLHRQLTALGHECVVVAPSLIPIRAGDRVKTDRRDAVMLAKLHRAGELTAVWVPDGAHEAMRDLIRARATAVQVLGKARQHLQGFLLRHGRVYPGKRGWTQAYRRWLTTVRFDHPAQQAVLQDYIHAVTDAEARVARLTRQIEGLVAEWSMAPVVAALQAMRGVAFLVAVTVVAEVGDFSRFANPRQLMAYLGLVPSEHSSGASVRRGGITKAGSGLARRILIEGAWSYRMPARVSRKLYDRIEALPQAVRDIAWKAQARLCARYRRLTAAGKAKVVVTTAIAREMVGFLWAIAREVQPRPAS

SEQ ID NO: 404153 - protein, 316 aa, unidentified
MDHKQAVYGVDVSKARLAIAQYESESVVEIANTPEAIAAWLASVPAGSAVAMEATGAYHRVLAQLAHAAGMVVYVLNPQVLKHYARAIGQRGKTDGCDARMIARYLVHERSKLLPWQPPLPAVDTLSRLLVRRRALVGARQILAQSLTGMSMLKAPRQTLLASFKRTIATLDLLIRRELARVPEMAALHRRLKSIVGIGEVVAAQLVAALSTLRFTRAAAFIAYTGLDPRPDESGQHRGKRRLSKRGPALLRCLLYNAAMSAAKSKVFKPVYARLRERGLQSTEAIVILARKLARIAFALYKSGETFDVQKHLKTT

SEQ ID NO: 404154 - protein, 343 aa, unidentified
MSIVTWHVVFVGLDYHASSVQVCVMDADGAMLLNRKCANDWRAVMAAVHERCGKEVPVQAAIESCCGAADLADELISRGWTVQLAHPGYVARMKHNPDKTDYSDARMLAELQSRGFLPRVWLAPEEVRELRRLVHYRQSLTKERKNLKLQIGAALREARQKAPANANPWTKAWLAWLDASAELSPNARQITHWRLRRLRDLQEDLRRVDKRLERQTREDPLVQKLLTINGIGLVTATTLRAEIGRFDRFRTGKQLARFCGLSPRNASSGKRQADAGLIKAGNNELRALLIETAHRLIRRDERWTALAARLSGRGKPTGVVVAAVANRWVRWLYHQAQPSCLAA

SEQ ID NO: 404155 - protein, 349 aa, unidentified
MDKDITVIGMDLSDRKADLYILDPGKQEGQEERVAMTRQAVTNRFGGMKSSRVIMETGTHSPWLSRLLEGMGHDVVVAHARRIRLIAESDRKTDRSDAELLARLGMADMDLLQPIRHRSAQAQADLAILHARAVLVRARTLLVNHTRGTVKSMGYRLPACSTASFGSRAMGCLPDELRPALQPLLGQIGQLTTQIRALDKDLARVVQERYPQTRLLQQVPGVGPVTALAYTLVIGDPARFSKSRKVGAYLGLTARQSQSGDQDVRSRITKTGNSHLRWLLIQCAHYILGRFGPDCDLRRYGLAIQARGGGIAKKRARVAVARKLAVLLCGIWRSGTVYESLRTEKPVTA

SEQ ID NO: 404156 - protein, 313 aa, unidentified
MAQIAPTVGVDVSKERLDVALYPAEARFSVSNDSAGWRELCRRLRPIGARAIGIEPSGGYERGVIAALLDAGLPVRSVNPWKLRQFAKAAGWLAKNDRLDASAIACFVATLPTRAVQHDPTRQHLAELVTARRQIVDLRQELSNQLEHLSDPELRRMQERRIRQIDADLVRLDRRIAQAIAAVPALAGRHDLLRSMPGVGPVLAATLLALLPELGSITNRAIGALVGVVPYDFDSGRMKGLRCIFGGRAAVRCVLFMAAQAAAMCNPVLKAFKQRLLAAGKKPKVAIVAVMRKLLTTLNAMLRDRQEWRAADA

SEQ ID NO: 404157 - protein, 448 aa, unidentified
MAKKGKKTKPMPDNMLIIHPHAAGIDVGAEEHWVCVPADRDAQPVQKFSAFTCDLHRLADWLTACRITTVVMESTGVYWIPLFQILEARGFEVALVNARHVKNVPGRPKTDRFDCRWLQKLHTYGLLAPSFRPPEDMCQLRSLLRHRENLIRMTVKHIQHMQKSLDQMHLHLHHVMSDITGVTGMRILRAIVAGERDPRTLAQYRDYRITSSADTMAKALAGDYRAEHVFTLTQSLALSDFTQQQIAACDQEIERVLATLDSQVDPDEHPFPPPTTTHRPPQRNDPAFDLRTHLYRITGVDLTQVPGFQAPTIHIILAEVGLNRHKWPTDKHCASWLGLCPDNQIRGGTVLATGSRRVQNRASRALRMAAQSLRTSPSSLGAFYRRMRSTLGPAKATTATAHKLAKILYHMLKEKTSYRERGAEYYLHRDQERKLKQLRKQAKHLGFD

SEQ ID NO: 404158 - protein, 355 aa, unidentified
MSQEKYIGMDVHQATISVAVIDAHGKLIMECLLETKASTLVEFIRGLHGTLSLTFEEGTSAAWLHDLLKPHVSRLVVCDPRKNALLKDGNKSDRIDARKLAELLRADQLHPVYHGEHGVRTLKELGRSYLTITQDVTRVMNRIKALYRSWAIPCAGTTVYASRHRAEWLAKITEPGVRVRAQRLYQQLDLLQPVRLEARRELLAESQKHSAVKLLRQIPSIGPIRSALLVALLQTPHRFRTKRQLWAYSGFAVETHDSGEYRSVRGKLQRNRERMTVRGLNDNHNRDLKNLFKSAAISASTRPGPLRDFYVARVEKGMRPAMAHLTLARKLAAISLTIWKKGVKFDSQQLHRQAA

SEQ ID NO: 404159 - protein, 363 aa, unidentified
MAKSIKQTIQSKHEVVTSVGIDLGDRSSEYVVFGSSGAAIERGKVATTSGELKNLMKRLPPAVIAIEVGTHSPWVSRLIEANGHRAIVGNGRKVALISGNKRKNNRIDAEMLGRLARVDEELLFPIAHRSEAAQRDLAILRAREVAVRTRTRLINHVRGASKAIGKQLSRCSAEAFAGRCLKELPAVLVDALGPLVKEIASLVKLIRVYDKTIDKMAGRYPDAKKLLQVRGVGALTAMAYVLTIDRAGRFSRSRAVGAYLGLVPGSDDTGDMHVQKRITREGDVFLRRLMVSSAQYIMGPFGKDCDLRRHGMGIAARGGKNAKKRAVVAVARKLAVLLHKLWISEVPYDPLFNTKQHEQQAAA

SEQ ID NO: 404160 - protein, 314 aa, unidentified
MAELLAAGVDVGQRFLDLGLAPGGHTHRYRNEPDDIARLVARLARTGVARVVLEAIGSYAQPLVLALVEAGLSVGVVNPRRIKAFREAEGGRAKTDRLDARLIARFARAMPEAIRPLPDADARALKELSTRRQQLVAMRAVEKTRLKQAREPAVIASHQACIAGLDAACAAVEAELDSRIRAQAARREAQRLLVSIPGIGARVASVLICDLPELGQRDRKSIASLAGLAPHVSQSGNAPPRAMISGGRPCVRTALYMSALVAVRHDPQFRASYRALRDQGKPAKLALIAVARRILLTANAVLKTKTPYQSQITP

SEQ ID NO: 404161 - protein, 332 aa, unidentified
MFVGMDVHRNRTQVCVLDRKGNEVRNRNVVNDRQSLRKELAGLRKGTPVAFEAAYGTGWIAELLGDLGFEAHLAHPSGCRAIADAKLKNDRVDARTLANLLRTGYLAEAWLAPKEVREQRLLLRERARLVRIRTTAKNRIRAQIADEGVPAPSHGLWTKQGATFLDSLDLSPMHRWVVTDCQVLIDVLESRISLLEAEIRRQAKPDKRVDALMAIPGIGLLSAMTLVSEIGDVTRFATARKLCAWAGIIPSMRNSDRTVHHGHITRAGPGAVRHVLAEAAQVAIRKEPFHSDFLATKRRRGTGIALVRVSRKLLTEAFYVLHALEDEQRQCS

SEQ ID NO: 404162 - protein, 416 aa, unidentified
MKLFIGLDVSSQKLDTCFLTDSKEILFEGSLSNDLIGASEIKQRILDYQETFGFCQIVIGMESTSVYSFHPAMFFYLDEDLKLLPVEVTVENPYRIKQYSRMFDQDKTDKIDAQIIADYLRVDLHTLSPIKEEVYVGLQRLTRSRYQLVTQMVEAKQHFLENLTYKCNTLSKELANEDNKTSIFGASIMNLLTEGITLDEFSEMSLEAAVELLQKLGKGRFKNPEQLVKSIQKAVRSSYRLGKVTKNSIDLVLGIIANEIKFLKKQIKEIEKAITALLETIPEAQCLLSVPGLGAVYTAGLIAEIGQIERFDDQSKLAKYAGLTWTKNQSGNSQSENTPLNRSGNRYFRYYLIEATNRVRSTLPEFKEYYQKKRNEVPKHKHKRALVLTGRKFVRLIDALLRNGQFYQPAKVVIEK

SEQ ID NO: 404163 - protein, 367 aa, unidentified
MAGGTEDKEHAMSQKLDTSPAVIGIDIGKNSFHIVGQNQRGAVVLRQKWSRGQVEARLANVPSCLIGMEACVGAHHLSRKLQALGHQARLMPAKYVRPYSRGQKNDYRDAEAIAEAVQRPTMKFVATKTVDQLDLQALHRVRERLVSQRTGIINQIRAFLLERGIAVRQGLRFLRLELPGILATRADVLSPRMMRVLEDLSGDWRRLDTRIEGLTSEIEALARQDQHCERLMTVPGVGPIISSAMVAAIGTGDVFSKGRDFGAWLGLVPKQLSTGDRTILGSISKRGNRYLRVLFVQAAWVVLVKLGPEKWERYGLKSWIEAAKKRLHHNVLAIALANKLARIAWAVLNKGRAFACIKTDAMASCPA

SEQ ID NO: 404164 - protein, 424 aa, unidentified
MNLTQNERLNQVTADTLVVGVDIGSQDHFARAFDWRGFEFTKRAFRFSNTGVGFLSFVRWLNELQNKTDTKKVIVGCEPTGCYWLTFQRFLKDHDIQLVTVNPYSVKKCKELDDNSPEKSDLKDPKTIAGLVREGRFSTSYLPSGVYAEIREASVCRDMIIKQHIRLANQIQGWLQKYFPEYLECYKDWDSTSGLMLLKYAPLPQDIIKLGAGGINQIWRDAKVRAAGMKRAKTLVEAAQGSVGLEGGEAARLEIWILVNDYTSKMEQLARLDEYLNEKVMEVPNVEKLLAIKGVGLSTVIGFVAEVGDIGRFTDPRQVQKLAGLEITKISSGKRKGQPGISKRGRRKLRRTMYESARSLINWNPAFLDVFLYYRNRERRPLGSMQAKIAVACKAIRVFFVIMRTGCDFDEERFRKDILRPEVA

SEQ ID NO: 404165 - protein, 409 aa, unidentified
MHPMIERCAGLDVHQGTVMATVRIPDGQGGRQVITETFGTTTAALLTLRDWLQAHGVTHVAMESTGVYWKPVYYVLEDGFTLLLVNVQQLKQVPGRKSDVRDSAWIAQLLEWGLLRASLVLPPALRDLRDLTRYRKHQIRERAREVNRLHRILEDAGIKLSTVATDVMGASGRAMLQALLAGTTDPTVLADLAKGRLRKKLPALREALAGYFRSHHGFLIGQILAKVDFLDETIVSLTEEIDRLVAPFEPILAKLDTIPGVDRKAAVTIVAETGGDMSRFATAGHLCSWAGMCPGQNESAGKRRSGRTRRANRYLRGMLVESALAATRANNTALQARYYRVKRNRGHKKAVVAVGHQILEIAFYIMGNGVTYDELGADYFDRRHAERAVRRHIKQLEALGFHVTIEKAA

SEQ ID NO: 404166 - protein, 344 aa, unidentified
MKYFAGLDVSLAETAICVVDEDGIVVTEGKTASEPDDLVRWLVATGLTITRVGLEAGPLSPWLHTELRAAGLPAICIETRRMKGATAAMAVKTDRNDARAIAHAMRVGWFTVVHVKTAESQELRLLLNNRRTLLEKRVAIDNEIRGTLKAFGLKLGAVTVAAFEVRVLELLAKRSRLLAMVRPMLAARAALRQQCDVLHRMVLKAVRASAVCRRLLSVPGVGPIVALTYATGVDDPARFIHSRDIGPHFGLTPRKYASGEIDRNGSITKAGDGAVREVLVQAALTLLTRVQRWSALKAWGMAVAKRRGLRRAIVAVARKLAIILHRMWADSTMFNWKRETVALA

SEQ ID NO: 404167 - protein, 347 aa, unidentified
MRFYTKQHPFYCGIDLHARTMYVCILNQESEIMLHRNMQASPETFLKAIAPYREALVVAVECIFTWYWLADLCAQEGIPFVLGHALYMKAIHGGKAKNDKIDSHKIAVLLRGGMLPQAYVYPADMRATRDLLRRRMYLTRKRAELLAHIQNTNSQYNLPEFGKKLAYKANRDGVAERFPDPAVQKSMEVDLALLGYYEPLLRDLELHIVKAAQQHDPNTLYLLQTVPGIGKILSLVLLYEIHDIQRFPRVQDFVSYCRLVKCAKESAGKRYGTAGAKIGNAYLKWAFSEAAVLFLRDNPAGQKYLTRLEKKHGQGKALTLLAQKLGRAVYYMLKRQKAFDMDKFLQG

SEQ ID NO: 404168 - protein, 310 aa, unidentified
MKEEKTFIGIDVSKEKLDVGVRPQADFMTFANTEEGISLMTDFVKSKQPELIVLEATGGLEMAALRSLAVAGLPAVCVNPRQVRDFAKAMGILAKTDKIDAHVIARFADSVRPEIRPLKTEETEMLDAFNTRRSQLIIMLTAEKNRLTTASKWTKKDIKKSIKGLEKALDKINREVENLIKKSPHWRHMDKILQSVPGVGPVMSLTILADLPEIGTMNRRQIAALVGVAPLNRDSGKYKGRRAIWGGRARIRSVLYMCIISGICHNPKIKVFYNRLISSGKKHKVAITACMRKLMIILNTMIKNDACWNE

SEQ ID NO: 404169 - protein, 385 aa, unidentified
MQKRESYLYVGMDLHKKTHTAVLLNCWNEKLEALVIENKPVEFEKLVKRVNRKALTLGLTPVYGLENAYGHGRSLAVFLLEKGCVVKDVNPALAYDRRRSAPTMKKNDEYDAYCVAMVLIDQLHTLLDAKPADNYWTLSQLVNRRDTIVNDGIRLKNALHEQISTAYPSYRKFFSEIDLKSALYFWKTYPSPMHMSNKTAEDLTAELRTIASNISKSKAALIFGCVQNDGDTLRDYQSSRDFITQSLVRDLERQQSELTQIDAEIEKMLETFDCKLTTLPGVGSAIAGKLIAEIGDIRRFPNADKLASFAGIAPKRFSSAGKGRDESNKQGNRALHGLFYFLAVSMVCVPKSGKPNNPIFYDYFCRKLGEGKTKSQAAKSAENKA

SEQ ID NO: 404170 - protein, 316 aa, unidentified
MEKPPVFVGIDVAKEYVDVAVRPSAEHWRTPLTEEGIVGLTARLRSLAPTLVVMEATGGLEAKLLAALAVAMPVAVVNPRQVRDFARATGRLAKTDRIDAMVLAHFADAIRPPKVQPPSEERDAIVAQLARRQQLVEMITAERNRHGAARVASVREDIESHIKWLQQRLKDVDKGLDQTLRQSTVWREREELYRGVPGVGRVLAVTLVAEMPELGTLDRKRIAALVGVAPFNRDSGTLRGRRMIWGGRSSVRSVLYMAALVATRHNPVLKAFYERLLAAGKEKKVALTACMRKLLTVLNAMARSGRGWDSAFAEAR

SEQ ID NO: 404171 - protein, 338 aa, unidentified
MKLYGGIDLHSNNSVINLLDESDKVVYDKRLPNDLSTILSALSPYQWEIESLAVESTFNWYWLVDGLMEEGYDIHLANTAAVQTYNGLKYTNDAHDARWLAHLLRLGILPTGYIYPKEERAIRDLLRKRMQLVRMRTTNLLSIQNLYTRNTGESISGDVIKKLSAEDVALLLPHEDHALAMSCNLSVLQQCQEQIKKVERAVLKRTRLRPQFQSLLTVPGIGRILALTIMLETGDITRFNKAGNFASYARCVGSNKFSNGKKKGENNRKNGNKYLAWAFVEAAHFSIRYSDTIKGFYQRKSAKTKNVIAIKAVAHKLARACYYVMRDNVEFDVKKAFS

SEQ ID NO: 404172 - protein, 402 aa, unidentified
MSYYVGCDWASTAHQICVIKAHGQIVWQNEVPHTAEGCAALRRRLQRFGAPADVPVAIERPSGLIVDLLLEWGHPVVPIQPNALKASRSRYRISGAKSDASDAFILADLLRTDGHRFRAMNPVADETRALRTLVRTRDDLVATRIGLANQLRAVLEGFWPGAAQVFADIDSPIALAFLERYPTPEGAEHLGEKRLAAFLGRNSYCGRRTARELLERLRRAPTVIVGEANTEASGEVVRALVTVLVDLVAQIQKLTSAIAQAMRVHPDGAIVMSFPRAGCTNAAQILAELGQERLRFPSVERLAAEAGVVPVTVESGKHRGVTFRWACNKRLRRAITIFADNSRRASPWAAQIYQRAQARGCDHPHAIRILARAWLRVLWRCWQSSTPYAVSNHGSAQRLSVA

SEQ ID NO: 404173 - protein, 437 aa, unidentified
MKGLTVLDPRAAFVDVGSEHMHVSVGGDEPAVFGTVTSQLHALRDWLKSQGVRSVAMEATGVYWLALYGVLEAAGFEVHMVNGRQTRSTPGRKSDIQDCQWGATLHMHGLLRAGFVPPADIRRLQDYLRLRADHVASAGSHVQHMQKALERMNIKLHHEIASLAGMSGLAVVRAIVAGERSPDALLALCDVQIRRAKAEQVKEALRGTWEQEHIFALRQALQSWDHYQQQIAECDRQIQAVLPPHDPKQPALPRPKTPKRGGVNSPDIPKLRELLAQMNGGRDLTQLPAHTHYSVLQIVGEVGTDLTKWATEKHFTAWMGLAPGNHDSGKRKGHVKRGRNRAGQLFCMMAQSLVRSKDIALGGFYRRMCARRGGLIATMALARKLAAWYWRVMVKGDDYVEQGLARYDAQVLQTKQRALKRLAKELGQQLVPITQPA

SEQ ID NO: 404174 - protein, 386 aa, unidentified
MTQHPHVTASNGLDYDRTLILAVEISNRSWVVAAQVPGLRQKGAKQQLAPRADALMAAVEGYKRRAAAAGMAVDRVIVAYESGGSGFWLARWLQQRGVEVHVMQPSSVPVDRRMRRAKSDRIDADMLLRTLLAWLRGEPRVCSMVPVPDEATEDARRPIREREELIRARVAIVNRIEAVLTVLGAGEYNPLRRDCRERLGQLRTALDQPLPPHARAQIERLLDRLDLIRQQVADLEAQRDQAVEGDAAGQAERMIQRLARVRGIGVQTATVLVHEAFVRQFRNARALGSYAGLTGTPYSSGGTHREQGISKDGNRRLRATLVELAWLWLRYQPACALSRWFHDRLGGSRGRLRKVMIVALARKLLIALWRYLQDGAVPQGMELKPV

SEQ ID NO: 404175 - protein, 358 aa, unidentified
MRTTIKQLDYSGQNIYIGLDTHLRSWKTTIRVGDTYFKTFSQDPSAKILFEYLKRNFPMANYFSAYEASFSGFSAHRELTKLGIKNIVVNPADIPTTDKDRKQKEDARDSRKIAEHLSSSSLQGIYVPSIEAEGDRALQRFRKVLSKEIGRNKNRVKSFLYYHGISIPPQFTDKSYWSKRFTVWLQEVALPTKSARTTLSSIIEIVTFLREKQYQTLKSIKELSQTKGYKENVDLLLSVPGIGLITAMTILTEIEDISRFKTLDKLCSFIGLVPMTNSSGEKESVGGITKRQNKALRSLIVESSWMAIRNDPALMLAYQELIKRMKPTRAIIKISKKLVNRIRYVLKNKKLYVSAVVQ

SEQ ID NO: 404176 - protein, 343 aa, unidentified
MHTTKQDALYGGADLHGRNVLISLCDAEGETVYSRRVKADIDSVCEALQPYQGRIERLGVESTFNWYWFVDGVSEAGYVVDLGNPAKMEQYSGIKETNDLSDAAWLAEQERLGIFPACYIYPKEIRPVRDMLRRRQLLVRQRTQSLLSLQSLLERHGISAPNAQTLKKWTGREIEKTALDSHVQHQLRALLGSLKANDREAMLLEGFALEFALSTRDFKLVQLVPGIGKTLGLTVLLESGEFSRFPSAGDYASYCRAVKSRRMSNEKKKGSNNRRNGNKHLAWAFIEAATYAHRFYPRIHAWYERKRQRKNVAVAKKALACKLSKAVWHVMNGKDYDEKMLFG

SEQ ID NO: 404177 - protein, 361 aa, unidentified
MFVAGLDAHTRYVIVVVVDRMGELVLKSTRVRMGDAERLLTVLAPYRPLDAVMETSSAWPWLHEVLTAAGIQFVLAHARRLRAIAEANYKSDDIDAELLARMRLARLIPEVFPTPAAQREWATLLRHRATLVAHRTALVNRLHGQLHTRGLHLERGRLLTRAGRRWLRTEAWSHLSAEQRAVARSHLRVIAGLRPLIGAVDRRIAGVAVAIPEARLLMTIPGIGPQRALVVCAEALPVGRFRTPGHLASYAGLVPRSKQSGERPVRHGGIPAGVNRWLRGALVRAVVSHVQHQPASTLTAYYQTQKARVGWPVARVAAARKLARVIHAMLRTGTPSTTPSTTGSLGPNGVSSTNRMPHPTA

SEQ ID NO: 404178 - protein, 313 aa, unidentified
MMIIGCDFHPSWQQVSWLDTETGETGERKLVQSSGDAERFYRQLPVPSLIGMEATGNCHWLVDLLAEIGHELWVGDAAQIRASCVRQQKTDQRDAEHILKLLVEGRFPRIWMPSSEVRDLRQLLLHRHKLVTIRTRVKNELQHLCLNQGVQRKYKLWSKAGLQVLRELPLKPWATRRREDLLGLLAMLDQQIEPLDRAVKEEAQRDKMALLLQTQPGVGAVTALAYVLTMGDVSRFARGKQVASYLGLIPREHSSGGRQKLGAITKQGNRMLRMLLVEAAQMAVRCDPGLRKEYLHRCHQKPKAVPRWRQHES

SEQ ID NO: 404179 - protein, 410 aa, unidentified
MPLYCAIDWAGQSHYAVLLDAAGRILHQGAFAHTQAGIAGWLATINTLRLGQPVAVIYEATKHGLIDVLLEIPWLELIPVSPMKTKMLRQLDGEARGKSDARDALLLGHYLRAHYEQLRGRFIETDPAHRQLRERIDQEEALIARTTEGRNRLHAQLRRLCPEWDALVEDIDHAVYRHFLLHYAPWDRPGEKTLRAFLGTHNVRGEEAVARLIALARQARALGTNRRFQELLLDQIRSEVRLLEAVFRELEAVTADLQALLAALPAAPIYHSMPGIGPKLAPRLAAFFGSQPARRFPSKPQVLAYAGQTPLTQQSGTARSVHKRVSCDRHARHICFLWARSCQMLKATRWQREYLTVCKQRGDSVPTRYRKLGAKMLGILYRCLCSGQPYDESVFLQHRFHAPTLSPASA

SEQ ID NO: 404180 - protein, 320 aa, unidentified
MYSIGLDVSKSTINCYISNGEIDLVITNDEKSLNQFYLKLKKIYKKDIDKIVFIFEPTGSYSNLVKRFCTQKNIKAYIVNPKQSHNFAKAIAQRNKTDKIDAQVLSKMISIATNSDIKVPVHDENIENIKDYMSYYKFVVKELVQAKNILEAMKHNQTNKYILNSLEKKINTFQKESLKIIEKIKEIISQDQFLLQSFNNIKTIKGVGDITAIVLLHLFLKYPAANQRQIISLTGLEPIAKSSGSSIKSKPKISKAGSKLYRGTIFMSALSAIRFNPKITQFYNRLKDNGKQSTLAQLAVMKKLIIIPHSLYKNNQEYIY

SEQ ID NO: 404181 - protein, 339 aa, unidentified
MIACGFDVHRAQITFDLVDHETGELRRGRIAPATRERLRVWLAGMDSVRLVVAVEGTTGWRFVAEELEAAGARAVLAEPGETRALRGRKRRAKTDRADARWLRELLERGELPISWIPPAHLLELRCRVRLRQTLAAERSAWLQRVHAQLFHHGVPVGGELAAPARRGWLDGSELSPAAEAVIDTALATVDFLDGQLTALDQQLRSFARAHPATRALARLYGVGDLTAVAIYAAVGDARRFSSARKVIRLAGLDVTVHESDRKRQPGRISRQGPPMLRWAAYEAGLAACRPSSPDHADYLALRERLGHKTACLTVSRRVLRRAYHALVAVGDAALEPLPS

SEQ ID NO: 404182 - protein, 462 aa, unidentified
MKKEQKEAKPERWKAIQANKLDTLEQLRPNAAGLDLGVEEVYAAVPEDRDERPVRSFPTFTGDLQALAQWLKECGVTTVAMEATGVYWIPVYDVLEAEGLEVYLVNARHLQNVSGRKSDILDCQWLQQLHTFGLLRNSFRLREEVRAVRSLVRHRENLIRYRSAHIQHMQKALRQMNVLLDQVVSDITGVTGMSIIRDIVQGKRDAEQLAKHRDPRCQKSEEEIAHSLQGNYRPEFLFELRQALELYDLYSDKMRDCDREIEQLYTLLNQALPEEEEPPSPPKRRRRGNAPAFDLHTQLYRLAGVDLTRIDGIDVLTAQTLLAEIGADVSAWPTEKHFASWLHLAPNHRISGGKILTRSTSSGVARASLALRQAAQSLSHSQSALGAFYRRIRAKHGPAHANVATAHKLARIVYRMLKYKEEYVDPGPEQYEQRQKERAIRALEKKATQLGFTLQPNQPLPT

SEQ ID NO: 404183 - protein, 344 aa, unidentified
MDTIGLDLHKCETQLCVLTTDGEIRERRIATTRERFTAVLGDRPCARILLEASTESEWVARHLESLGHEVIVADPSYAPMYATRSRRVKTDKRDARTLAEACRVGAYHAVHRVSDAQRHVRAELTVRDALVRTRTRYVALIKAFVRREGLRLAQGEPERTALKLTAATDLSETTRAELAPLVALLGPLNAEIDAADRRIATLVATDPTVQRLLSAPGIGPVTAAAYVATLDDITRFPGTRQVAAYLGLVPSERSSGERQHRGRITKAGNSRLRWLLVEAAWRILRSTSRDATGLKAWGAAIALRRGKRVAVVALARRLAGILYAMWRDETTYRARRAPEASVAA

SEQ ID NO: 404184 - protein, 345 aa, unidentified
MEFVGIDWSYRRAAWCALGEGGGVVGEGVVPADEDGLARLVIERGVEVRGVVEMMSGAIWVRDRLAAAGWEMQIADARKVRDVAPLACKTDKVDARVLAELCRRDLIPELWVPSLSDRELRERLRRRMHLVRLRASAMNRIFGLLTQWGSRCSLDRLRGPDAMTLLADRGIPAVWQRSIQEALDLIDLLDARIAPLEQELRPLARSDPRVVLLDTIPGIGDLLGLTLASEIGEVSRFASPRKLIGYAGLSPKINQSGDRSRTGALSKAGSRTLRWAAVEAAQHAWRPSNPWHRLYTDLAERHGKNPAKTAVARKILIAAWHVLSRQQPFKPPTVVSASSSRFLAA

SEQ ID NO: 404185 - protein, 460 aa, unidentified
MPVEGRDLSSRQTQYVVKDMEIGQPINSDECSETADGVARESKGVKSCPREAMGRAAEVVAPSSSTRTDGDCPVAQVNDLSRSLTAFDPISTLVVVVEMSKASWLVSGAVPGVERQPLKKLEPDATALLRLIERWRNEAVRAGRPISRIALAYEAGRDGFWLARWLIARGIEAHVIHSASVAVSRERKRAKTDRLDLAMLMRVFLGWLRGERGHCGMVAIPTMEEEDARRPSRERESLVNDRSRITNRMKSALARLGIRGFKPHLRKAPERLAGLRTAEGTGLPANIIEEFRRDMARLALVRDQISSIEKTRVERLERAPDSGPHAMVRLLARVIGIGIETADMLVREILSRKLRDRRAVARYAGLTGSPDESGLKRREKGLAKAGNARVRRGLIQLAWRFLMFQKDSALARWYRTRTEGPSGTRKTTMIVALARKLLIALWRLVTTGEVPDGVELRPAA

SEQ ID NO: 404186 - protein, 352 aa, unidentified
MTELSHSAIAVVGIDIGKNSFHVVGLDQRGAIVLHQKWSRGQVEARFANMPLCLVGMEACVGAHHLSRKLKALGHDARLMPAKYVRPYSKGQKNDFRDAEAIAEAVQRPTMKFVATKTVAQLDLQALHRVRERLVSQRTGIINQIRAFLLERGIAVRQGQRFLRSALPDILATPSEVLSPHMVRIIEDLSGDWHRLEERVMGLSAEIEALARSDCGCERLMTVPGIGPIISSAIVAAIGTGDAFSKGRDFAAWLGLVPRQMSTGDRTILGKISKRGNRYLRVLFVQAAWVVLIKPQSWERHGLKPWIEMAKKRLHHNVLAIALANKLARIAWSVLARGRGFEVNSIPTAQPV

SEQ ID NO: 404187 - protein, 369 aa, unidentified
MADYREAFVAFDVAKIKHAVAVADSGRAGEVRFLGEIENRPVTIERTIRKLAKRYDRLHVCFEAGPTGYGLYRQVGDLGHDCMVVAPALIPKRSGERIKTNRRDAVTLARLHRAGELSAVWVPDIVHEAVRDLVRARQAGAEDLRRKRQQLLSFLLRHGRIYDAGGHWTLAHRRWLARQAFEHQAAQIVFQETSDAIEDAAQRLHRLDEQLAAIVETWSMKPVVEAYQAMRGASFLVAVIFAAEIGDVRRFETPPQLMAFLGLVPGERSTGDTVRRSGLTLAGNRRARRALVEAAWTYRYPARVSEPLRARLEGLPKAVRDIAWKAQVRLCARYRRLAAAGKKPPVIAAAIAREMAAFLWAIGREVAPA

SEQ ID NO: 404188 - protein, 442 aa, unidentified
MDVMYERCAGLDVHKKSVVACRVRMLPDGRKEHEIGTFGTTTAQLLALLDWLQAWECSHVAMESTGEYWKPVYNILEGHMEILLVNAQHVKRVPGRKTDVSDAEWLAELLRHGLLRGSFVPGRPQRELRDLTRQRSTLVRERAAVVNRLQKVLEDANLKLASVATDITGVSARAMLEALIQGEGDPVVLADLARGRMRNKRAALEQALTGRMRDHHRFLVTNHLTHLDFLDEQIEHFTQEIARRITADTQSPTSSPNNGQPGADQPASPSESVPYPEAIELLDTIPGIDRTLAETIIAEMGTDMRRFPSADDLAAWAGVAPGNNESAGKRRSGQTTRGNPALRKGLVQAAHAAARTKTTYLAAQYHRLAARRGKKRAVVAVAHSIVVIAYYMLSRRQPYRELGSNYFDERKRETVVHHLVQRLEKFGYQVTLDLSMAPALAG

SEQ ID NO: 404189 - protein, 329 aa, unidentified
MMNASELFFVGIDVSKNTLELALDNKSDTSCFSNDDKGIAALTAAIKVRSAEDKSKVGAIVLEATGRFERQAAATLCAAGLPVMVINPRQARDFAKAMGFLAKTDAIDARALSHFASTLYQSEKRDSLWMRLPDPEQIALQELVTRRRQLIEMRVVEDNRWFLSSKIQRKSIDKVRNVLNKEIGSIDHTIETQLKEHFADKLRLIEQCKGLGVSTQATLLAALPELGKLSHKAISKLVGVAPLNCDSGKYKGRRFTWGGRADVRSALFMATLSATRYNPLIKTFYQRLLTNGKKKKVALVACMHKLLTILNAIMKSGKPWDNNFSSNFA

SEQ ID NO: 404190 - protein, 338 aa, unidentified
MNLTRIGLDLAKQVFQVHGVDRHEHVVCRRQLKRAQVRDFFRQLPPCLVAMEACGSAHYWARELRELGHTVRLIAPQFVKPYVKGDKHDAHDAEAICEAASRPSMRYVPVKSAEQQAVQSVHRVRSRLVRARTALCNEVRGLLGEFGLIATRRGRAATMALLETVMATEPASLPAPMGELLRELKDELQTLEARIARLERQIQAHVRGDARIQRLLAVEGIGPISASAVAASAGDARQFRTGRQFAAWLGLVPRQHSTGGQQRLGNISKRGDTYLRTLLIHGARAVVRCCANKTDARSRWLQGLLQRRPANVVAVALANKNARILWALLSRETCYRPG

SEQ ID NO: 404191 - protein, 344 aa, unidentified
MSEVTTIGLDIAKHVFHAHGADERGVMVFSRKLTRGKLLDFFAKHPRCVVALEACGGAHHWARELQAMGHEVRLIPPAYVKPFVKRHKNDAVDAEAICEAAQRPSMRFVAVKSEEQQAAALVFRTRDLVVKQRTQIANAIRGHLAEYGWVAPKGAAHLAVLADLLEDGEIGETLPEAARPMFAMMVDMLAVLDRRIAELDKEITRRAREDEVARRLMTIPGIGPITATAIAAIAPPAETFAKGRDFAAWLGLVPKQASTGGKQKLGAISRMGERTLRRLLIIGASAVVLQVSKRGAPAGSWLEGMLARKPRMLVTVALANKMARTVWALLVRQEDYRAPVAVAA

SEQ ID NO: 404192 - protein, 346 aa, unidentified
MKHFAGLDVSLDETAVCVVDEAGTMVREARVPSEPEALVGFFQGSGLVLERIGLEACSLSAWLHESLVAAGLPAVCIETRRAKAAMGAMPNKTDRNDARGLAQIIRTGWYRAVHVKSPACRSWRALLTARRLLLNKMRDLENGLRAVLREAGLKLGTPTRKEFAARVRELTAADPVLSVLAEPLLTIIAAMTRELAQLTKRVLEIVRDEPVCRRLMGVPGVGPLTALTFRATIDQPERFRHSRDVGAHLGLTPKRYQSGETDVQGAISRCGDELARTALYEAAHSLLVRSRRWSALRAWGMQVAKRRGMARARIAVARKLATILHRMWADGTEFRWGKEGTMPAAA

SEQ ID NO: 404193 - protein, 410 aa, unidentified
MEAILERCAGLDVHQENVVACLLYGELERKPKQEIRTFSTTTKGLLALHDWLSDWGCTHVAMESTGVYWKPVWNILEGAFTLILANAKRIKNVPGRKTDIADATWIAQLLRSGLITPSFVPPADIRNLRDLTRYRRKLLRDATAEKNRIHKILQDANLKLTTYISDIFGTSGRALIESVINGEVLVAEEVRNKVKTSLKRKVPELLEALDGRLRKHHRMMLGLHFDHLSYVESQLATVESEIDRLLEPHLTSVELLVTIPGIQKDAAAVILAEIGNDMSCFGGDPQIAAWAGLSPGNNESAGKKKSSRIAKGNKSLKAVLCQAAWAASKSKGTRLASFFYRIQKRRGQKKATIATAHLILRMIYKMLKDKVPYQETGWDYLTSSTSSVEYWIKKIEAQGFNVKLESTEAS

SEQ ID NO: 404194 - protein, 368 aa, unidentified
MSESITSFVGLDVHKDSTAIGEAEAGRETPRFIGTVGPDLGQLLKALKSLGKPEAMLVVYEAGPCGYGLVRELRSRGYACEVVAPGKIARRPGERIKTDRRDALTLARLARSDDLVTVIVPDERDEAMRDLSRAREDAMRARLKARQQLKALLLRHGHRYGVKKSWTPVHERYLASVSFAHPAQDIAFAEYRQAVREGHERMERLTEALRGQSEHWRMKPLVAALSSLRGINFVAAVTLAAEIGDFSRFAHPRELMGFLGLVPSEYSTGDTHRQGHITKTGNTHARRMLIEAAWNYRFPARISRHLQLRLEGQPRAVREIAWRAQLRLARRYRHLLARKLAHNKICVAIARELAGFVWDIARQVKPAG

SEQ ID NO: 404195 - protein, 391 aa, unidentified
MVCVGIDVAKDKHDCCILDSDGMVRADCFTIPNNMDGFKQLLQTIRNCTKKSDKIKVGLEATGHYSYNILGFLLDNDLAVYVMNPLHTNLYRKSLSLRKTKTDRVDARTIATMLLSDVDLKSYTDTAYHNEELKSLTRYRFDKVRERSKLKQSVSRLVTILFPELEKLVPSLHIASVYALLSEYPGAKQISEIHLTKLTNLLATASKGRYGKEKAIQIREAARVSVGSVMSAKSLELKHTIKLIQELTSEINEIEDSIQQIMDELNPPILSIPGMGVNSAAVILAEIGDFSNFSSPDKILAYAGCSPSTYQSGKLTNCYAHMEKRGSRYLRYALYNATKYVCHWNPVFAEYLAKKRAEGKHYNVALSHATKKLVRLIYALQKSGKTYLTAA

SEQ ID NO: 404196 - protein, 348 aa, unidentified
MVIIGVDSHKRTHTAVAVDGNGRKLAEKTVATTTDGHLELVRWSRRWRERSFAVEDCRHLTRRLEGDLLRGGERVLRVPPKLMASTRRSTREPGKSDPIDAQSVARAALRERDLPIARLDGPEREVRLLVDHRVSLIGDRTRLQSRLRWFLVELGIPEPQPRTLGQPTVLARLELDLGGRSEPSARISRDLLTRIRELTTAVNALGREIQALTDLLVPSLLALPGCGHLTAGKLLGETGGIARFRSRAAFATHNGTAPIPVWSGNAVRHRLNRGGNRQLNLAVHRIAVTQLQKAGPGRDYVAKRMVAGDTKVEAIRALKRRISDEVFRRMNADEAARAALLQPARAAA

SEQ ID NO: 404197 - protein, 287 aa, unidentified
MLRTNVIGIDLAKNVLQVCHISRQGELLSNKAVSRQKLKELLAKSKPSLVALEGCASCHYWGRYAESFGHEVRIINPKKVKAYVDGHKTDANDALAIANAALQIGIKYSKPKSMEQQTLMSLEANRQFLSKTIVSLGLHIRGIINEYGIVKAKGTKGLDALVTSTHYESDGLPASLVTTLSMLWHQYLNLKDELSKLQKSMNSTTRQIEPCKRLMALEGVGETTASMLYATLGNGTQFTNGRQASAFVGLTPKQYSSGGKVTMLGIDKFGGVKDLRSMLYLGAMAYI

SEQ ID NO: 404198 - protein, 360 aa, unidentified
MQSKGFSFKGQNIFIGIDVHLKQWSVAIMTESGLIEKFSQVSEAGVLSSHLKKKYPLGDYYSVYESGFCGFSVHYSLVASGINNIVINAADVPSTQKENVNKTDKVDALKLVKSLRAGLLRPIHIPELVTLADRELVRTREAIVKDNVRWKVRIKHFLYRQGIKYPEKFANSKTHWSRRFVQWLEEDVSGRIGNNKESLLQHLSSYKQVRGQLLEITRKIRTMSKRSDYGSKMELLTSIPGIGFHTAISFLTEMGNVERFANERELASFIGIVPTCHSSGEKENTGAMTFRGNKHLRSKLIESAWIATHRDTALAACYSKYCKTMEENKAIVRIAHKLSNRILTVLKRGTKYVNAKNDQH

SEQ ID NO: 404199 - protein, 412 aa, unidentified
MKTIIGIDWSESKHCVHIYNEAGSLLTRLEIPHSLEGFAQLRRRIAAINSEPSNCLIAIETSHNLLVDYLARCGYTLYILVPSVVKSNRGRQGSSGAKDDDRDAQLLGDILRTDRGRLIPWQADGPLVRQMRSLLSWVDDLTAAIIAQHNRLRANLLRYYPQPLVAFSSLTGQLALHFLITYAAPADLEGLTLAQLTAFCRQHRYYQWARLPTMLANLLTPAPQLDEEVVPAYRQQTVFLAQQLLSLSQQKKEAIAQINQLFDQHPDGPIFASLPGAGELLAPKLLVMFGDHRSRYPHRAILPAIAGTCPVTVASGRSRYVKFRRACNHHFRQTAQQFAQASTRQSVWAATYFSQACLRGHSKSHAYRCLANRWLHLIWTLWQTHQLYDEDYHLRQVARHRRPERGLTSAHR

SEQ ID NO: 404200 - protein, 345 aa, unidentified
MGVTIIGIDLAKNVFRLHGCDEQGRAVLRKQLTRGQLLAFVAQVPTCTVAMEACASAHYWAREIEQLGHRVRLVNPRFVKPYLKANKNDASDAEAICEAASRRSMRFVPVKTAAQLEVQALHRVRQQLVKSRTALINQVRGLLAEHGIVIPQGRAQLQRGLARILEDADHRLSGIMREILSESSERLKFIEARLHQYELHIERLFRQDPRCRRLAEVAGVGPLIATALVAAVGNAAEFKHGRELAAYLGLVPRHRATGGRTIMLGISKRGDRYLRSLLIHGARAALWTMARCGDQRSAWAERLKLRRGPNVAAVALAHKNARVLWALLRSGEAYRAAPLSLQAAG

SEQ ID NO: 404201 - protein, 402 aa, unidentified
MDGAHYATIGMDVSDRKAQVCVMAEDGKSPKIAMETVVPTTKEGLAKFLSTQDRSAPVAFETGMHCRWMNEAAEGPGFKVYAANPCRLRMTTESKTKNGVDDARMPARLALSDPGLLHPVKLRGPGRRRMPNLHEMRNLPVKRRTGVIVQMRAIARAMGFRIPKCLTGRFHRLDTSPWPREFRDIAWPTMKNLGQPAVTIKTYERQIRGLAQTPAFKAQVGRPMEIRYVGLHVATGFVAVTGGDVDRFGKPRDVGPWPGLTPRQDQSGDIDRQCRITKAGSPSMRRLPVESAQMILRDGPADTGLKARGRRMCARGAKMAKRRAVTAVARAPAVLMAAMPKRPDAPYVPPSGRCEKEPPAMRATAWAADSGGNPGRRFREQEAEPRRRPQPNPETPERPVRG

SEQ ID NO: 404202 - protein, 397 aa, unidentified
MYIVGIDIAKRKHEAAVIDGEGAVIIKPFSFTNNCSGYNRLLAMLAKAKLPLDEVSFAMEATGHYWLALFTRLQKEGFRVQVINPVQTNSIRSFYIRQAKTDPRDALLIAEVIRFGHFSESTLHPENIYELRELCRGRHAIVSMQADIKRKVVALLDQVFPEYETAFTNLFGDTSMAILQACPTPKELSEMPLEELCHLIEVPSRKRFRTEKAQELQALARNSFGFAMAGDVFSTMIRLYAKHLDFLKQQVREMDRKIAEIMETLDTPITTITGIGPTLGAYILSEIGDISRFSSAAKLAAYAGIDPTMRQSGEYNGVRNRMSKRGSPYLRHAIWLAASSAVLHDPALKLYFQKKRDEGKPYMASVGHACRKMVSIIYAVMRDNKAYTPYIPNEISA

SEQ ID NO: 404203 - protein, 327 aa, unidentified
MSAPDSGVPAQSGLTVGIDVAKATLQVALDLESPTRVLPNDAEGIDALLELLGKQPVRLVLLEATGGLEFLVACTCQLAGYDVAIINPRQGRDFARAMGQLAKTDSIDARVLSHLAQIIDRHPDRHTFVKPLRSNEQQLLAALVTRRRQIVAMLVAEKNRLQQTPQATRKSVTTIIKALTKELARIDADMDNHIRAFFADLSALLSTVKGVGKNTVSVLIAELPELGKLSRREISALVGVAPLNRDSGFMRGKRCVQGGRQAIRNALYMAALVATRYNPAIQPFYQRLVAAGKPKKVALVACMRKLLTILNAMVKANKPWDDSLTTP

SEQ ID NO: 404204 - protein, 314 aa, unidentified
MTEKKWIGIDVSGEELAVGVYPSGEIKTFPYQPQGVWDLLVFVGSFKPERIIIEATGGLEAAVAAELYNSGLPVCVINPRQVRDFAKSIGVLAKTDNIDAVVLGRYGEAIKPQVRPLGTEEEQAIKELVARRRQLVEMLVQEKNRYCRASKKTGKDILKHIKWLEKRIKDQNTDLGDAIMKSRVWAEKASILKSVPGVGDVMSFTLIAELPELGTLGRKEIASLVGVAPFNCDSGKMHGQRRVWGGRGNVRKVLYMGIISGIKFNSVLRAFYERLIAAGKKPKLAITACMRKLLVILNAMIKSKQVWKAELIEA

SEQ ID NO: 404205 - protein, 359 aa, unidentified
MSAEEAHERCVIGGVDTHKDLHVAAVVDDRDRVLASASFAATRQGYRQMLAWMRSFGSLRRVGVESTGSYGAGLLRFLQQAGIEVLEVTAPDAQDRRRRGKNDDFDAQSAAHAAFAGTRTVTPRTRDGMVESLRVLSACRKTAVAARRIALQMIHNTIVCAPDGLRATLRRMTRMQLVRTLAAWRPDLSAYRDVEAAYRIGLKSLARRYLELQDEIADLDAMIGTIVDELAPELVARNSIGRNGAAQLLLTAGDNPERLRSEAGFAALCGVSPVPASSGKTVRHRLNRGGDRAANSALHIIAIGRLRTDARTKAYMARRIAEGHSKLEAIRCLKRYIAREVFTLITRKQQAIRQTRIAA

SEQ ID NO: 404206 - protein, 343 aa, unidentified
MQSVTTIGLDIAKSVFQVHGIDAKGKVVIRQQLRRSRVLGFFGKLSPCVVGIEACASSHHWSRELQALGHAVRLMPPAYVKPYVKRQKNDAADAEAICEAVQRPTMRFVPTKTADQQACLMLHRTRHLFIRQQTALINSIRAHLAEFGIVAPVGRNGVEKLLDVVADPDDERVPDIARECLRALGSQLQGLKVRILEFDRRIKAWHRSSETSRRLDDLPGVGPALATALVASVPDPKVFRSGGDFSAWIGLVPKQHSSGSREKLGNITKQGDRYLRSLFFTGALAVIRYAKIHGSKHRPWLAKLLERRPTKVAAVALANKLARMAWAMMARGQSYKEPVALAR

SEQ ID NO: 404207 - protein, 318 aa, unidentified
MNVIGLDISKDTIDVTLITAKGEMDYIKIGNSHEGFEKMIDWIKTKRVRKIAISMEATGVYYEQAADYLSAVYTVYVINPLKIKDYAKSQFSHTKTDKADSKLIADYAKRHLDKLTPFRPSENPMLYKLINLLQQLKQQKHESQNRLHTAKDPFIRSTHETIIMLLSKKIDETSKRIDGIIKQQKSLNAEYKNLQTIPAIGKDTAAILLRHLTDKTFETANQFVSFAGLSPKIEQSGSSVNKKGRLSRYGHRQLKRALFMPALVAYRINAFPQLVKNLEAAKKPKMVVIVALMRKLAKIAFYIHKAKTPFDKARHQTV

SEQ ID NO: 404208 - protein, 366 aa, unidentified
MREQDEGNRITIGLDLGDRRHRFCALDGKGQVVEEGTLSNKRESLSELSRRYRRALVVMEAGCHSPWISRHLEGAGCEVVVSNPRKTRAIYQHERKSDRRDALMLARIARMEPALLYPVQHGSAQAQQDLLRIKLRDSLVRARVGVINSLRFTLKSLGYAIANPSTERFHKVIQEQVPESVGSVIAPSVQALKELSLRIKLLDREIITLARSKYPETTWLEQIPGVGPITALYFVLKIQDPARFERVRDVGAFIGLCPRRDQSGENDPQLRISKRGDAYLRRLLVSAAQYILGPFGPPSALRQYGLALASGGTPRAKKRAIVAVARKLAVLLLTLWKNKSLYQAFPLSRDGEKMRTSDLERLRCIA

SEQ ID NO: 404209 - protein, 412 aa, unidentified
MRIMYGCCAGLDVHKETVQCCVRRVEPDGSLQETVRQFGTMTDDLLEMVESLKAQGVTHVAMESTGVFWKPIYNLLEEHFSILLVNPAHCKQVPGRKTDVKDCQWLAELLQYGLLRGSFIPPRWQRDLRDLTRERTQLINERTRVANRMHKILEDANIKLGSVATDILGASGRDMLRALIGGEQDPAVLAEMARSRLRDKIPQLRRALRGRVREHHRFQLELQWDHLEQLDQLVARLNEKITQLYQPYEQQLALVDEVPGMDRRMAETVMAEVGMDMRQFPSDSHLCSWAAVCSGNHESAGKRRSGRTRKGNRWLRQALAVAAPAAGHSKNSYLGARFRRLAARRGKKRATIAVAHTILRIIYHMLREGIHFHDLGPAYFDRLNPERIKHYLVSRLERLGFKVMLEPQQATA

SEQ ID NO: 404210 - protein, 353 aa, unidentified
MTDQRSAVVAGVDAHTDEHHVAVVDLQGRLLGAAAFPTTAAGYARLISWLRGHGEVDRVGVESTGAYAAGLVRALLANGIRVVEVNQPHPHARQRLGKSDPIDAELAARAALSGTASAVPKQTNGIVEAIRQLSVARAGALKARTAALHQLDDLIITAPEQLRGELRSGRTLKARATLCLQLRPDSNRLHEPAQAAKLALRSLARRARQLEREIAELDQQLERLVALAAPRTVQLFAVGTQSASQLLVTAGQNIDRLHSEAAFARICGAAPIPASSGRTTRHRLDYGGDRQANRALHMIAVCRLRHCDQTRAYAAKRTADGLNRREILRCLKRYIARQTYHTLRADLQALNST

SEQ ID NO: 404211 - protein, 342 aa, unidentified
MGEVSTIGLDIAKSIFQIHGVDVDGAVVIRKRISRAKLLEFFATLPACRIGIEACPSAHYWSRRLEALGHAVRLMPPSYVKAYLKRSKNDANDAAAICEAVTRPSMRFVARKSEQQQCGLMLHRSRQLLVCQRTMLSNAIRGHMAELGVIAAKGRNGTAELLKIIADEHDDRIPAAARLSLDVLARQYAAVRAEIVAIEKRIHAWHRSSEESRRLEEIPGVGPIVATALVAEVGDWKEFTSGRSLAAWIGLVPRQHSTGGKQRLGGISKQGNRHLRWLLVAGAMAVIRYARQRGTKRPWLARLMERRPIKVAAVALANKIARMAWAMMVRGERFKEPRLLPA

SEQ ID NO: 404212 - protein, 431 aa, unidentified
MNYTQNSKIMQVTEKTLVVGIDIASEDHYARVFDWRGIELGKVLSFENTIEGFNKFSDWIEKIKTISGKTKVIVGAEPTGHYWFGLAGYLKEKEMKLVLVNPFHVKRSKELDDNSPTKTDRKDPKTIAKLVIDGRYSEPYIPQGIYADLRIINEIRLRLTKEMIGIKNRVERWIKIYFPEYSTVFGDWSKKGSMMILNKMCLPDEIKERTSEEINKIWRDEKLRAVGRKRAEALIKAANRSIGIKEGLTSARKDIQLLINEYELKKEQYDEVIKEIEEICKKIKNVDKVLEIKGIGIITIAGFLSEVGDVSRFDSAKQIQKLAGLSLMENSSGKHNGATSITKRGRKRLRQLLFQVVMPLIANNDEFKALHSHYTVRENNPLKKKQSIVALGCKLIRVLYTVLKTGSKYDSSKIIEAIEKKKEYQEMKKAG

SEQ ID NO: 404213 - protein, 369 aa, unidentified
MTDSTATVVPVAALDVHAASIRLAAVHRDELLDERTLPFDHQLVARELRRLGVGRVCYEAGPTGFGLARHLLAAGIHCDVIAPGLVPWRSSDRVKTDRRDARKLAVMYQGGMLQPIMIPGSGQEAVRDLMRAREDARHDRMRARHRIGKFVLRHGRRMPTSGWTLTRRQWLGSQTFEHAAQQAAFDDYLLACDLIDRRIETLEQQIDCWAKDDEFRELVGWLRCLRGVDTLTALGLVAEIGDFSRFKTAPEFMSYLGLVPSESSSGQQRRQGAITKTGNTHARRLLIEAAHNQRRRPARSGTIERRQHGQPARVVARAQHAQTRLHKRWQRMSSRGKHSNKIAAAVARELAGHIWAIANDQPLRPTRPD

SEQ ID NO: 404214 - protein, 370 aa, unidentified
MQRKQISFKGQKIFVGIDVHKDSWRVAIAPEIGVVKGHSQNPSAKELFDFLKKHYPDGDYHAVYESGFSGFSTYYALTDIGIDCIVMHAADVPTTQYEEFMKTDRVDAAKLVKSLKAGLLTGIYIHERDNIDARSVVRLRKTTQKMLGGCKSRVKHLLHCNGVVLPERFSRPGTHWSKAFIRWLKEEVRLISSTRDSLDILIEQVESLRKTLLGATRKVRRLSRSDRFKPQYDLLTSVPGIGISVAMSILTEIGDISRFRNEREFASYLGLIPTSHSSSGDKVSHGEKTFRGNKKLGPQLVEAAWISIYRDHGLGCAYMAYKKRMEPQKTIIRIARKLSNIIIAVLKTGEPYEPYQWIEKERHTDRKTTS

SEQ ID NO: 404215 - protein, 346 aa, unidentified
MEIKTIGIDLAKNVFQVHAVDSRGKVVLRKQFRRDRVATFFANLSPCLIGMEACGSAHHWARKLESLGHTVKLMAPQFVKPYVKSNKNDAADAEAICEAVSRPSMRFVPVKNVEQQSVLSLHRVRQGFVKARTAQANQIRGLLSEFGIVVPQGIAYVTQRVPQLIEDASHELPGSFRCLIDRLLEHLRLLHHQVEEIEAQIQAWHRENALSQRVEKIPGIGYLTASALVATIGDAKNFDNGRQLAAWLGLVPRQHSSGGKQNLLGMSKRGDAYLRTLMIHGARSVIYRVVQKADPRSWAFSVAIRRNKNVAAVALANKSARIVWALLAHDRSFRPDYAVASAAVAV

SEQ ID NO: 404216 - protein, 342 aa, unidentified
MTTTTIIGMDISKYSFELCGIDQRGRHTLHKRLHRDKVSLFFANSPACTVAMESCSGSQHWARQLKGLGHQVMLIPAQHVVAYRQGAKNDRNDAAAIAEAATRPNLRAVPVKTTGQLDIQTLHRVRERLVHHRTALINELRGLLLEYGIVCAKGMTRFLIWLREDFAARVAELSPMAHETFHALRDEFRALEERLAAINQRIKAIFDSHPVCQQLATILGVGVLVATAIIASVAEPQRFKNGRQFAAYLGLVPRQHSTGGKPKLLGISKAGNRYLRMLLVHGARSIIYHHRTKDDPRSRWVQKLVERRGFHKANVALANKNARVVWKLLTTPGERFSLPLAA

SEQ ID NO: 404217 - protein, 433 aa, unidentified
MNSAPSDLVIGLDRADQKADLCLINTRTGTRRSELIATAPEALAEWLAQLRQQHPTARVGLCLEQPAVHLVPFLETYAWITLHPINPITLQKYREAFVTSRAKDDTKDAESLADLLLNHHAQLPVWAPQDRATRAVQQLVVHRRAVVDERTALSNRLIALLKQYFPQALVLCGEDLWRPLATAFLLKWPSLGAVQKAKAATVKQCYHLHGSRSTTLLEQRLALIAKAVAVTDEAAVIASFVLRVQLLGRELQAVQRTLTEFDRQIATAYSAHPDHGIFASLPGAGPVLGPRLLASLGADRERFATSAAQLQCYTGVAPVTKRSGGSERIHRRYCCPKFHRQSFHEYAKESILWSRWAGAFYLQQRSKGCAHHTAVRALAFKWQRVIWRCWQDRKPYEEAKYEAALRKSGSPIVALWDRVELGKSPWKHPAKKN

SEQ ID NO: 404218 - protein, 372 aa, unidentified
MAQYIFVGCDLHDRNLVLQWAVDADDPQRCSFQNSVRGRRALVVWLRRVKRSVLATTVAFAYEASGQGFVLSDQLTAAGFWCHIVPPTKMERSPHDRKNKSDAGDALRLLRMLRNHYLAGDKLPSVWVPDLATRDDRELTRGRLDLSRQLTAAKAKVRSLLKRHGIEKPESAGKTAWTKKHRRWMHSLVGSSTDLRQWGAFRLESLLRQVEQIEGELALFEAAVEALAHDERYAKAVAEITKPKGISLTTAMVFLTELGDPTRFANRRKLAAYLGLVPSKHDSGERTEHHGHITHEGSGRVRHVLGQAAWASVRLNPGVRRVYDRLVAKNPKKRKIAIVAVMRRLAIHLWHRALEAHGEPTPAPAPAAASQA

SEQ ID NO: 404219 - protein, 355 aa, unidentified
MKYYAGIDLHSSNNYIGIIDETDKRVFGKRISNDLPDVLSVLEPFKNNLDGVVVESTYNWYWLVDGLQNHGYRVHLANPSAVKQYEGLKYTDDRWDSFWLAHMKRLNILPEGYIYPKQQRSVRDLLRRRLLFVHQRTSQILSLQSMFSRTLGARISAREMNKLTDEDIDRMFEANQAFMAKNQLSTIAFLNKTILNIEKQVLAQVKLKKEFSLLQTMPGTGKILALTIMLEVGDISRFKKVGHYSSYCRCVKSEKTSNKKKKGENNKKNGNKFLSWAYVEAANFAQRYSREAQRFFQKKKAKRNGIVAVKALSNKLCRASYYIMRDQIPYDEAKLFAEFGCGREPTVGLALNQQA

SEQ ID NO: 404220 - protein, 355 aa, unidentified
MKKNTILATTIPATTIGLDLSDRTLQFCELNASGEIVGEGQCKLDRTTLRRYLAAKSAGTRVALETGGHSAWVRELIEEMGHEAVVANARDLEAVTGRSHRTDHHDARQLARLARVDASLLNPVELRRTAEQADLFVIRARAVLVEARTMLINFARGITKTLGHRLPASDTHHFAERVRAAVPNALQPALLPVLNVLEEIAGQIEDFDQKIEALAEQRYPQTRWLKQVPGVGTLTALTFVLTLGDPERFAHSRDVGPFLGLVPRRRQSGEQDPHLRISKCGDRYLRRLLVQCAHVVMGRFGPDCALRRWALAHAQHSRTAKKRTVVAVARRLAVLLHRLWHRQEVFRPFPLAVAA

SEQ ID NO: 404221 - protein, 392 aa, unidentified
MIYVGIDVAKDKHDCFITNSDGEVLFKSFTIANNREGFETLFQRIQSVSDDLTKVKVGLEATGHYSYNLLGFLLDNGLPTFVINPLHTNLYRKSLSLRKTKTDKVDAHTITSMIMSDVNLKSYSDTSYHNEELKSLTRYRFDKVKERATLKSSVSRLVCILFPELEKLVPTLHMASVYALLSEFPSASAIASAHLTRLTNLLSESSKGRYHKDTAITFREAARNSIGSHMPAKSLELKHTIKLIRELDAEITEIENEIKIIMDEINSPIVTIPGINYRMGAMIIAEIGDFSRFDSPDKILAYAGMSPSTYQSGQLDNCYAHMEKRGSKYLRYALYNATKYVCHWDESFSLYLAKKRAEGKHYNVALSHATKKLVRTIYAMEKSGQTYNSKSE

SEQ ID NO: 404222 - protein, 405 aa, unidentified
MAIIGMDIHRSFAQAAFLQDGQVKREQRVDLVHDRLVRFGKSLSVEDEVVIEATGNSAAVERILRPFVKRVVVANPRMVRAIAYARVKTDKIDAVILARLHAGGFLPEVWVADDNTQRQRRQTVERMGVLEQVVRTKGRIHAILHANLIPKYSGHLFGKAGKKWLAGLPLPEEEKAIVGRLVDELERNSDQLAKLDMTIIGEALENPRVVRLMTIPGIGPVVASTVLASIGDISRFETPEKLSCYFGLTPKVRQSGDRPARHGRISKQGNTHARKMLVEAAWSAKTAPGPLRAFFQRVQRNRGAPAAAVATARKLAVMIWHVLTDGTEYAYARPAFTAMKLRKAALKAGAPREYGKAGPGRDYWIKEIREREADYVRRAEQAYERMVAAWKEKPPTAPAMTATPG

SEQ ID NO: 404223 - protein, 337 aa, unidentified
MSTIHILGIDLGKHCFHAVGNNHTGKDVIRRKFSRSQLLRFLSVLEPTIIAFEACGGAHWLARKCEAYGHRVRLIPPQYVKPYVKGNKNDFIDAAAVAEAASRPSMRFVSAKSEEAQVIAAIHRVRDGYIKERTACMSRIGAILLEFGLSFPKGHAKMKALFQWLAEQDIKLPPSLVAELLSIHEHYKYLNEQVSTQDRKLKAITENNENAELLKSIPGIGDLTATLCVANISSPSNFGGGREMAAWLGLVPRQYSTGGKSKLLGMSKRGNKHLRALFIHGARSVLSRIETTGKVFGDWLVNLRATKPFNVVVVALANKLARIAWAVLYHRQAFKAV

SEQ ID NO: 404224 - protein, 343 aa, unidentified
MEFYVGLDVSLKQTSICVVDQTGSVVREGVVDSDPEAISVYVKSKAPDAVRIGLETGPTSTWLWTELKRLGLPVICIDARHAKAVLKMQINKSDRNDAIGIARIMQTGWFKEVHVKDIDSHSVRALLASRALLVKIKRDLENHVRGLLKNLGLVIGRAKFNVFAVRAEELIEGRPELIAAIRPLLEARTAVEQQVSELDRKVMKLARHDAQVRRFMTVPGVGPITALAFKATIDDPARFARSRSVGAYVGLTSRRHASGEVDWTGRISKCGDAMLRSYLFEAAGVLLTRVPKWSAVKAWGVRLAKRNGLRKAKVAVARKLAVILHRMWIDGTEFNWSKQEIAA

SEQ ID NO: 404225 - protein, 339 aa, unidentified
MDKRDFSGMEVSAQELVVSLEREGRRAPLQSFANDSKGHQAVIRYLRRPGRTVRICMESTGVYGLDLALALARAGFEVMVAHPRAVRHFATALMQRSKNDGLDAVVLLEFAQRMPFQAWVPPRPMVLQLHALSRRLEALKDTQEAEKSRLHAALVTDTTPAALRRDLERSLRSLRRAIARLSTEAVKIIDQDPGLKLRFDLLISAKGIKETSAIPLLAELAVAPPDLDVRQLVAYAGLDPREHSSGTSLHKKVRISKHGNAHLRRALYMPALVAIRHQPNWRAFYEHLRARGKLKMVALIAVMRKLLHAIFGMFKHQKAFDGAKVYALPEPKISLEVAA

SEQ ID NO: 404226 - protein, 460 aa, unidentified
MSFARLFSTRSFEEAAMRAIGLDIHRDFCEVAIAEGGRVRAAGRVGTAPAEIEAFAGGLGPGDTVTLEATGNALAIARLIEPHARVVLANPKATRAATRLRAKTDRIDARTLAQLLASGFLPEVWTGDEATHALRRRVGRRVHLVRQRTKAKNQVHAVLLRTLAGRPPVSDVFGTRGRAWLERLVLPDDERETLEACLRTVDFLDTEVAALDRALAPLVLASPDMRRLLTLPGVSATTAATLLGVIGDIARFPTPGRLVAYVGLDPRVSQSGNDPAHHGRISKQGASEARHVLVEAAWVATRTAGPLRAFAQRLAARRGWNIAIVAVARKLTVIAWHMLTRGEDYAFARPVLVRAKLREIELRAGAPRARGRSIGVAPTVAERELERELAVAAEVAYERLVKDWVPSRKQVREPQAGRASHDAERQPARQGSAPTLRFGSASLPHQGDYAPDSGQRQDGT

SEQ ID NO: 404227 - protein, 361 aa, unidentified
MGGSLSHPWDRLDPVPQRKSRPQFCVPNPNSCQGRASVAIPQDKEGNFVIMTEPVLGVDIAKDNLDAHLILDGRDLRVANDPAGHAFLIRLACETDALVVFEASGGYDRALSAALDAAGVAYRRVNPRQVRDFARACGVLAKTDRVDARVLARFGRVMKGAPDAPVAPDRETLKALVTRRSQLVEDRKRLKTQFHHAARDSIPVVIEEMQASLKNLSRQIKAYDARIHAAQTASPPLHDKARRLKTIPGIGPVVAASFTAFCPELGQLDRRAIAALIGLAPMACDSGAYKGRRRCWGGRKQLRGLLYMAALQAKKKGAFRDLFERLINNGKPFKLAITAVARKILITMNAMIKNRQDYKYA

SEQ ID NO: 404228 - protein, 482 aa, unidentified
MKKRTIFSNQSQELLRLFERAGSGEKVMCIPIDYAKKDHMVMFCNGHGRILRKPFCVKNSPEGIDFLNDQVRRSCLHRGIDSKHVFFGGEDVGSYAENFVNTLRSGGWIVANVNAHDAKKQRINMQASTDCLDLMGIASVLINRRANCSPAHSGIYLNLRHLVRHRASLVEMSTQVRNRIQAVVDRLFPGFLDDKKSGISPFSKSSLYLMTNRFSAPQICRRRKPKLIELLHRYGTAKPEQAASKLLTYAQQVLVTPNEYINSLQCSLSHHVKHFECLEANIGQLEKEIAIWLAQTQGAFLTTIRGIGIVLAAGSTAEIGDPYEQGPVNNLVSYAGIIPRVKQTGGSEGHSKTGKVAKRCNLILKNHVVQSGSHLGLHGPSDLMADHKRRDAAGQHADFGMGRRFLRMAMCLMKTSQVYIPQRFRNNGIEPEERAGYYLSIWPKLREKWKRLDALEVAFSNDNPLGRWRNMVQELYEIKLKL

SEQ ID NO: 404229 - protein, 411 aa, unidentified
MFTVKYPRCAGLDVHKRQITVCRLQPGAEGGLQQEIRTFGTTTSQLLVLADWLAEGGCTHVALESTGVYWKPVYNLLEGLFTLLLVNPEHVKALLGRKSDVQDAERLAHLLATDQLRGSYVPDRPQRELRELTRYRTALIRERAAEANRLQKTLEGANIKLAAVAADVQGQSCRAMLAALAAGETDPEVLAAHAKGRLREKLPALKEALRGCVGEHQRFLLGQQLAHLAELDERVREISAEVAQRLAPFEAELRQLEAQAGVGRRTAETIVAEVGTDMRRFPTHRHCAAWGGMCPGQRETGGKRKRCPTRKGSPWLRAALVEAARAAARVKDSYYAAQYQRLARRRGANRAAMAVGHSILVSSYYILKGAPFVDLGGHYFDERDREQIKRRSVKRLQQLGFEVELREPATA

SEQ ID NO: 404230 - protein, 438 aa, unidentified
MSNKVIFNFDELFISVGIDVGADFSWMSIALPNQQLVGKPYKILHSNMHSLTTAVSKIKEAEELYSLESRIFLESTGIYHYPLFCYLRDKGFNCSVINPIITKNSTNMNIRKVHNDRFDSKKAALIGLKPDLKVSLMPSDLALNCRNLCREYYDLMDNRSAYVNKLQAELRMAFPQYLGIFSKVTINTSLTLLEKYTSPNAFLEADKQEVIDTIKSTARFGLTYAHNKYNAIIQAAKDANEFGYIIDSNIKRIRLYISFIRKYDEEINGILDSMHELVNANEDTDFVKQIHLIETFKGAGFLSAISLMGEIGDFSAFSKPKQLFAYFGLDPAVKQSGKFEGTKIQMSKRGSAIARRVIHTLTLQSISTSRTGDAKNPVLRYYYLKKCESKPKLVAMGAVSHKVCNMIFAILRDNKPFEIISPEEHIKQYNAVKCDIAA

SEQ ID NO: 404231 - protein, 374 aa, unidentified
MQSIIYVGMDVHVENYTFASYEFGKSPFAQNQVKDADWKAVIKYLESIQNNRPGEEIHFVCGYEAGCLGYSLYRELMSAETDLSLECVIMAPSTMAVQGSKPKTDRRDAVMIAQNLANGTYSGVYVVDEEDNGVKDFIRMRDDTKVRCKAIKQQILALCLRHGKQYTDSGKWTLKHRDWLKKLNLGEKNANRALEEYLHQLSQVEEDLERYDHEIEEIASGERYAEKVGQLRCLRGIETYAALAFLSEIGDFKRFESAERFTAFLGLVPGEHSSGGSVNRTSITKQGNTHLRKLLVEAAQSYSRASIRQKSKNLKAKQRGQEQQIIDYCDRGNLYLGKKYHRLINRGKNANVARTAVARGLACFIWGLMTDRIS

SEQ ID NO: 404232 - protein, 410 aa, unidentified
MDVIVERPGALDVHNASVVACVRLPGEKGRRDEQVAEFSTTTRGLLALHDWLWAHGVRQVAMEATGSYWKPIGAVREDDFECVLVNARHVKQVPGRKTDLKDAQWLCQLLEAGLLKASLVPPKPIRTLRNLTRYRKSQIRDRQREANRLHKVMQETGIKLDCVASDLLGKSGRAMLDALVAGTTDPALLADLARGQLRKKLPALREALTGRFSSEHSLVVGRILAHIDFLDESIAQLSEAIEQQIAPFAPAVELLCTIPGVGRRAAEVIIAETGGDMSAFPTAKHLTSWAGVCPGNDQSAGKRRSGKTTKGSKWLRGTLIEAAKAAARTKDTYLQAQYARLRVRRGASRASVAVAHSILTACWHMLQTGELYNDLGGDYFARRDPERTTKRLVAQLERLGHIVTLEQAAA

SEQ ID NO: 404233 - protein, 330 aa, unidentified
MIRNKPRGATVYGIDLGKNIFHVVGTDPAGNVVQRVKFRRDTLRAFFERAERAVVGMEACPGSQWLARKLQAMGHTVRIIPAQFVKPYVKSHKNDTIDAAAIAEAVTRPTMRFVQVKQPEQVDLQSLHRIRDQMVGSRTRLICQMRAFCLEYGVAIRQGAGLFKSDLPRVIADECNDLTPTMRRLLNELFEDLMRLEKRIAQVTREIEALAARDEKARRLMTIPGIGPLGATALLAAAGNGQQFKKARDMAAWLGLVPQQYSTGGKTQMFGISKRGNRYLRRLLIHGARSCVMHLDRSRDRLGAWLRQLHSRMHVNKVTVALAAKVARIA

SEQ ID NO: 404234 - protein, 429 aa, unidentified
MTRISAGVDVSKNRSTVCIMDQDGKVIMRPFLVWHSTEELDFLADTLKRLNGEVRVIMESTSIYQYPIALHLKEKGIFISIVNAYKVKKFANIDFRGGKTDKKDSRTIASYGISYWDKLVEWQIPKDTYFNLDLLNRTYMNAKKHRQIILQELQHYIDCAMPGMDKELHSLNLSTKKDFMLDFVEKFWHRDEIVNMTEAEFTEVFTAWAKKKGYRPVEGKAAKIYAIAKSCIPYYPANPTVKTILQCIVDKLSGVNRTLVTIVTQMIEEAKKLPEYQIVREMPGVGDPLAARFFGSAGDIRRFKNSKALVAYAGIDSPPDESGDFSSTHRHITKKGSKVFRDTGYEIMMALRAQKRTWEKVRKNPDVYDYMLRKEAEGKPPKVAKIAALNKFLRIIYARIKELYDNMALAERAKTKTRSKTRAKTKVTA

SEQ ID NO: 404235 - protein, 343 aa, unidentified
MQTISTIGLDIAKSVFQVHGVDASGQVVVRRQLKRRYVLAFFQKLPPCLVGIEACASSHYWSRELQALGHSIRLMPPAYVKPNVKRHKNDATDAEAICEAVSRPNMRFVATKTAEQQSCLTLHRTRHLFIRQQTAVINVVRALFAEFGIVAPVGRNGVEQLLEVAADSNDKRLPDVARACVTALGAQLRMLKVQILEFDRMIMAWHRSSEASQRLDDIPGVGPALATALVASIADPKAFRSGRDFSAWIGLVPKQNSSGGKDRLGSISKRGDRYLRSLFTTGALAVIRYAKIHGTKHRPWLTALLARRPTKVAAIALANKIARMAWAIMAKGERYKEPAALAA

SEQ ID NO: 404236 - protein, 389 aa, unidentified
MGKSYMVIYNEQKQCVFESEIKHSKPEYKKLKEKIHELTDKTGELPKIVFEATGIYSRQLERFMQDNQYTYCLLNPLEAKLQWDSLRIHKTDRSDAHRLALTHFKATRRVFTGTDNLFYQLKSLSRLYSELSIIRGRMHKVIQLTFPELERMFTSKSDLFLNFVQLFPHPDCILGLSKIIIKNRIRANTNKKNIKYYSGKKAIQILEIAKTSYPAVSQNDVLCDQLKLYAERYQELLQQKECCINKMVYIAEQRAEYNIILSLPGIGPNTAVRLMAEIGGIIRFNNNKQLNAFAGIDIRRFQSGKTFFKDKINKRGNKHLRKLLFLIIQNMIKQRLYGQNHIVEYYDKLKTQPYNKCHKVAFIACVNKFLKLLFHLITHDIHYDYRLTA

SEQ ID NO: 404237 - protein, 413 aa, unidentified
MMSALVYRFYVGIDWATEKHRVVVLDAERRVVREREVCHEGAALESFADWLTHLAASAVETVAVALEVPRGAVVDVLLARGFHVFALNPKQLDRFRDRFTVAGAKDDRRDAQVLASALATDQPAFRRLEPEHPLLLELRELSRLEDDLQEELGRLTNRLREQLHRYYPQLLHLVPAADEPWLWTLLERAPTPSVAQHLPRATVRTILSRHRIRRVDTDAVLATLRAPALPVAPGTVQAAQRHLAVLLPRLRLIHQQRAECATQIEGLLERLGESQEHRDVPILRSVVGVGRVVAATMLAEASRLLAARDYHGLRAQTGVAPITRQSGRRTLVCMRYACNPRLRQAAYHWGQSAARHDPVSRAHYERLRARGHSHARAVRGVVDRLLHVLIAMLTAGTLYDPARRRLPVGEAVA

SEQ ID NO: 404238 - protein, 414 aa, unidentified
MIDLELQAQRCAGIDIGKEEVVVRVHTPGPNGGRSRQTRTYATMTRDLLALRDWLVAEGVTRVGMEATGVYWKPVFYLLEDVIAECWLLNPLHLKQRRRGRKTDVIDAGWICQMTEYGLVAPSLVPPPPIRVLRQLTRRRATLIGERTREKNRLAALLEDAGIKLGVVATDIFGVSGRHMIEALIGGERDPHLLADLAVGKLVRKHPALIEALTGRFDEHHALLARQILDHVDYLNTAIGQLDTRIEAETMPFRHVIDLLITLPGVAGRTAQVIIAETGGDMTVFPTAAHLASWAGVCPGLNASAGNKPAGAPKANKWLRAALGDAATACARTSTHLGQRYRRLAARRGRNRAKLAVGHSILTAAWHMITTDSPHHDLGPEHYLHHHDPTRRRRQLTTQLEELGYTVTLTPTAA

SEQ ID NO: 404239 - protein, 386 aa, unidentified
MSPPRMIKGRPLGVVWVAVLSSQPKSKEERPVNSVKYVAMDVHPGTSLVVVRDTEGRVVAESVLATEAATILDFIHGLRGTIYLTFEEGTHSAWLYDLLVGHVDRLVVCNPRQNALLKAGNKSDRIDARKLSELLRAGLLSPVYHGENSTATVKQLACSYSALTEDTTRVMSRLKALYRSQAIPARGTKVYGKRHRQEWLVRIQGPGLIRRAQHLYRELDSLQALRREARRELIAECRQHADVKWLRSVPFLGPIRTAVLIARVQTPHRFRTKRQFWAYGGLALETRSSSDYQLVKGQLVRNPKGVRIRGLNLNHNHDLKDVFKGAATSASTHSGPWRSFYEGLLAKGMQPALARLTLARKISAVTLRIWKKGERFDAEQLKPQTA

SEQ ID NO: 404240 - protein, 402 aa, unidentified
MNCVGIDVSKGKSMIAVMRPFGEVVVSPFEVRHTASELSELARLLKSLDGETRVVMESTGNYHAPVAWLLHGAGLYVSVVNAMLVHDYGNNSLRRAKTDKKDAVKLANYGLDHWLTLPRYVPEEDARLMLKTCYRQYQQYSKVQTMLKNNLISLLDTAFPDANRLFTSPPRADGSEKWVDFVATFWHCECVCGRSEKAFTTQYQKWCRKHGYNFSEDKALDIYASACGHFGVMPKTDTAKLLVEQAISQLQTTSAALAALKQEMQSLAASLPEYPVVMEMFGVGPTLGPQLIAEIGDVRRFHSKKALVAFAGIDAPPYQSGQIDVRSRSISKRGSASLRRTLFLVMGVLLQCAPMDEPVYQFMNKKRSEGKPYRVYMMASANKFLRIYYASVKAYLESLEHD

SEQ ID NO: 404241 - protein, 364 aa, unidentified
MEQITRGECGRVVVRVGVDLAKRVIQVHAVDAAGQLVLGRALARDRFIAWCAQLPGGCVVAMEASSSAHHWARKLCSLGLDARIIAAHLVKPYRKQGSSGKNDANDAAAICEAASRPSMHFVPIKSVEQQSMLCVHRLREGIKEERTACINRVRGLLAEFGLVFAQSPKVLRLALADTIEDASNEMGTLARLTLQRAHAQWRELDEHLAWCDERIAEHTRTNEQVKTATTLLGVGPLTASAVVATVGDFRQFRNAAQFGAWIGLTPKQHSSGGKTRLGKITKRGDTYLRTLLIQAAKSAVLTAHRRSDRISNWLCTLRERSGWQIAAVALANKNARILWALMTKGEAFDANHLSIKPGMSSQQT

SEQ ID NO: 404242 - protein, 365 aa, unidentified
MKNNLKVEQQMIAAPMGNSTIGMDLGDRWSRYCVVDAVGTIGKEDRVRTTSEALEECLGRIPSTRIVIETGMHSPWVSRLLEKLGHQVIVANARKVRLIYESNQKNDRLDARMLAKLGRVDVSLLAPVQHRSAEAQTDLVVARGRDALVAARTQLINAVRGGVKSTGARLPAGTRAAFATKVAPLIPATLKSALGPLLKSIESLSEQIQHCDHRVEELADKKYPQTKLLRQVKGVGPLISLAYVLTLEDPTRFRRSRSVGSYLGLQPKQSQSGDSEPQLGITKAGNHFLRRLLVQAAQYILGPLAPDSGLRRWGLELAKRGGKNSKKRAVVAVARKLAVLLHKLWVSGEVYDPLYGMTPVSAPTT

SEQ ID NO: 404243 - protein, 340 aa, unidentified
MGDITTIGLDLAKNVFQVHAVDQAGNVVVRKRIRRGQVLAFFSGIPTCLVGLEACATAHHWARELIALGHDARLMPPNYVKAYIKRNKHDVADAEAICEAVRRPSMRFVPLKTTEQQSALMMHRARDLLIRQRTMLVNALRGHLAEFGLIEAQGLHKVARLVTIVVDEVDERVPEMARQVLKVIVNQLKDIQTGIADLEKQVLVWHKNNPVSQRLATIPGIGPIIATAIAATIADPNTFRSGREFAAWLGLVPRQNSTGGKARLGGISKRGDSYLRRLLVNSAHTVLLCSKAAKADPWIISLRGRKPRLVVAVALANKTARVAWAVMSRQETYRRIAAPA

SEQ ID NO: 404244 - protein, 402 aa, unidentified
MKASKKYLRFCGIDMAKHKHVACIVDRNGRTLLKPKSISNNTDGFQQILNCLKQTGRAKSVLVGMEATGHYWYGLHDFLTRNNYDVAVLNPIQTALQAKQAIRKCKTDKYDAFHIANLLRTSQHKPAIVPCELAMSCRQLTRIRYRIVRQISMTKQLIHSRLHPAWPEYDGFFSDTFGTTSMKLLKTVSTPKELLEANFNDISEVVRKASRGRFGHVHTQKILESAKNSVGMQRGHYGISTAIKFLLEQIETLEPVRRNLDGEIEKLATQMPQYLFTLPGATDLTIVSLYGEIGSIEVFEKPSQLVAFAGLDPKVFQTGQYDAPRRQVSKRGSPYLRRTIWLMAHRAVCKEGDLRDFWRRKRRQNKHHLVAVTAAANKLCHVIWRIMTDRRDYIPKGYETKS

SEQ ID NO: 404245 - protein, 382 aa, unidentified
MISIGIDIAKEKFTACALEQGSKIIWKPFDVNLNKPEVEGFLNKLKDLNQEIKIVMEATGKYHLPILYELKKQGYFVAVINPLKMKQFCRVLNFRKAKNDNIDATQIAEYGLMYWKELQEHKVDTENFRTLKELNRSYQHYMDLRINQMNFIDQTISQTFPGIKKLISHGSKDFSKDKLLDFLETWWHKDLVLEKTEEKFIEDFKNWAKEKRYHPNADKAKSIYKLAEESISTQPSNSSYIKMNLQEGIELIKHINQILYNILSQMIEIAEPLEEYQEAKKFSGISDKLAVQITAEFGDLSKFKNKKCLISFVGIDSPPYESGNFKADQRKITKRGNAILRKIGYQSMKCMMSVKNPENEIYLYMLKKEKDGKAKKYVNLQA

SEQ ID NO: 404246 - protein, 419 aa, unidentified
MKPQASKAFAAFIGLDWADAKHEVCLQAAGTAQREFRSLEHSPEESNAWVQTLRTRFNGQPVAVCLELTKGPIVSALRHYDFLGLFPVNPLTVAKYREAFTPSRAKDDPTDAELQVEILLKHRDRLMPLSPQSPTMRALVQLVEHRRRLVGDKVRLTNRLTSALKNYFPHVLRWFQDKDTAIFCDFLSRWPTLKAAQLARRTTLESFFRAHHVHSADVITTRIEAIKSAVALTTDEGVITPNALLVQALVAQLRVTLQVIADFDNAIAQRAQEHPDFSLFDALPGAGAVFAPRLLAAFGEQRERYASAEELQKYAGIAPVTERSGKKTWVHWRLQCPKFLRQTFVEWAAESTRHSFWAQVYYQQQRAKGKAHQAAVRALAFKWIRILSRCWQDRTPYDESVYLQALNRRSAPLLHNLAH

SEQ ID NO: 404247 - protein, 338 aa, unidentified
MKAYAGIDLHSSNNFVGIIDENDQRLYSKRLPNRLDNVLLALEPFRDNLEGVVVESTYNWYWLVDGLQDNGYQVHLANPSAIKQYEGLKHTDDKWDSFWLAHLKRLNILPEGYIYPKQHRAIRDQLRRRLLFVRHRTANILSLQSMITRNLGFKMPGSDIKKLKQQDAEGLFDCPNLVFMAKNNIMTIEFLKKIIKDIEKKVKSQVKLRKEFEVLLTIPGIGDILGLTIMLEVGDINRFEKVGKYSSYSRCVSSNKYSNGKKKGENNKKNGNKYLAWAYVEAANFIRRHCLKADRFYQRKKAKTNGVVATKALSNKICRASYYVMRDQVAFDEDNLFR

SEQ ID NO: 404248 - protein, 379 aa, unidentified
MKKTGTGKIGRVKEDTLIVTIDIGLEMNRGYCTTTDGRDIKPFRFDNTRAGLDRLWSMIVVNKNRFRCDEVIVGYESTGPYGEPIGHYLSKKPVTVVQVNPMHTKRVKEINDNSPLKTDDKDPRVLADIILLGHSLSIVIPEGDAAYLRRLNNSRERHVGERTALLNQLQQLVFLLFPEFRTVIKDIQLKTALYILNKYLTPEIIGGLKKEELGEEMRKRSRGKFRESHAEMLIRLAKDTIGIREGAAGLSMDIRHILIQLELVNRLIAEIENEMEIALGRIPYSSKLLSIKGLGTVTVAGLIGEVGDFKKFRTQSEIMKLAGLDLYEVSSGKWKGRRSISKRGRSLLRKILYYGVLSTGQTLPAEYILTSETVSFILK

SEQ ID NO: 404249 - protein, 320 aa, unidentified
MTILGLDIAKKTFHATLFIGGRTVRRTCANSESGFADLADWLTTHQAEPGHACMEATGVYWEPVAAWLHAQGWTVSVVNPLRIKAFADTDLTRNKTDQVDSFLIARFCQEKQPDAWTPPSPAMKTLQVLSRHLDALEKTLTQQRNRLEACRDPLVRDSLQRLMTAIQEEQATMRQQIEQRLATEPDLAHRRDLLCSIPGIGAATAIILMAELPTLEAYASARQIAAHAGVTPKQHQSGTSVHGKPRLSKMGNARLRKALYFPAMVAIRHNPIIMALAERLRARGKTEMCLIGAAMRKLLHLVYGVVKHDTKFDPNFASAS

SEQ ID NO: 404250 - protein, 467 aa, unidentified
MAARKQNQRRMSAQVAGDEDYQLRYEVVAGIDVAKESAVVCVRMPPAEGKKHRTSHLQAVPATVPAITELAAELKAAGVQMVSMEATSDYWRVWFAVLEEAGLAVQLVSSSQARNLPGRPKTDKEDARWIARLTEMGMLRSSFVPPPEIRALRVYTRHIWDLTADRTRYWQRLEKLLEDAPCKLSAVVSGLAGHQTARAVIEAMIAGERNPRVLAALGQGRMRNEKLPALAGALSGMRFGPQHAHAAASLLRAIDLLDAEIRELQERVTEHLAAIPASWGADADGVTGPDAGRAGGAAALPAAERLDEIPGLGREAAAALIAEIGLDMSRFPTPQALVSWAGLTPTARQSGPRKGRGKKGRGNTYAKRIAVLAAYAAANTGTFPGERFRRLAARPGGGGRKKAGCAAGRSILIIVWHLLNDRAARYQDLGPDWHARHTDRSRKARNARRQLEALGYDVIITLREDAA

SEQ ID NO: 404251 - protein, 363 aa, unidentified
MTSMTTTTADVTGGVDTHGQTHHGAALDPVGRQLGDREFPTTPAGYRALVNWLQTYGHLERVGVEGTGTYGAGLTRQLRAAGVTVVEVDRPDRKARRAQGKSDPLDAYSAARAALAGKATGVPKTRDGRVEAIRLLRVARSSAVKARSQATNQLKALLVTAPAELREQLRTLSNTKLIATCARLRPAGNIVDPEHATKTALRRLAHRHQYLSEEISAADTELRTLVTAAAPRLIALPGVGTEVAGQILITAGDNPDRLRSEAAFAHLCGVAPIPASSGRTHRHRLNRGGDRQADNALYIVVLGRLRYDSRTRAYAARRTTEGLSKPEIIRCLKRYVAREIFTILTARTTVDQPHTDHAMSTAA

SEQ ID NO: 404252 - protein, 387 aa, unidentified
MTIPAQVFEIIPRHYEIFGGLDVDKKNMAVTFTDHEGLMRSLRVPYSSGHLLHYVRKHFPDRRVAFVYEAGPTGFGLHDDLVTAGYRCLVVAPSMVPTAPGNKVKTNRLDSRKLSVQLRGGQLRGIHVPGPRYRELRHLVQLRDTQVGQLTATKCRIKSLLLCEGLAFPPAPESSQWSARVLDELHELPCSQAVRFKLDQLIGTLHFHFNSAAAAQKQIRYFCQNDPELRQSISLLNSLPGIGVIVATHLVARLGDWREISNVRQIAAFLGIVSSEHSTGEKENRGPITRAGDSRLRNKLIQSAWTAIRKDPELRAFYLRIYHRHPKKVAARKAIVAVARKLTTRIYAVLKEQRPYVLRPENFADPLTAEETVGPRERLDSPQNEQP

SEQ ID NO: 404253 - protein, 323 aa, unidentified
MQGQKSPERSAQPGVYVGVDVCKDWLDVYLHPIGQKLRVSNTPQGLKALKRRLAELPVELIVMEATAKFHRQAHRTLHAAGFAVAVVNPLRARLFAEAVGQLAKTDRLDARVLALMGQTLEPSALAPAPEALEALQELARARAAAKAEETALSNRRGASQTAFLKAELGRRLKVLAGHIERLEAEIERRIGADPALKRRYDIVVTIPGVGPVAAVALVIGLPELGACSAKAAALLAGLAPLARDSGAKAGERHIWGGRAFVRTGLYFAAVAAARCNPQLRDDYKRLRDAGKKAKVAITAIMRKLVVLANVLIKEDRAWKPIQP

SEQ ID NO: 404254 - protein, 412 aa, unidentified
MEPIYTSCCGLDVHKRSIQACVRRLDKEGRVHQEVRAFGTMTRDILTLSDWLTEQEVTHVAMESTGVFWKPIYNILEGKFTLLLVNAKHVKHVPGRKTDVKDCQWLSQLLQCGLLKASFVPGRPQREFRDLTRHRAQLVTERGSVANRIHKVLEDANIKLGAVATDILGKSGRDMIMALIEAKITPDEMADLARQQLREKIPQLCLALEGNVTDHHRFVLKHLMDHLDYLESQIETFSRRIEEISRPFEGAIEAVAKLPGIQSRSAENIIAEIGYNMEQFPSDEHISSWAGISPGNNESAGKRKSGKTTKGSRWLRSALTQAAWAASRKKGSYFQAQYRRLAGRRGKKRAVIAVGHSLLVSIYHILKNKTDYKELGGDYFDKINSKRLVPYLVKRLENLGYEVDLSPRQKAA

SEQ ID NO: 404255 - protein, 388 aa, unidentified
MFFLGIDVGKNTHVASLLDEKAKIIFKAYSFANTLDAAEALLVKLEPYKDSLAIGMEATGHYWLSLYSFLAEHKFIVHVLNPIQTDGWRKGIEIRKRKTDVIDSVLIADLIRYGDFLETSLADEDILSLRNLSRFRVYLVNSVSDLKRKAIAVLDQIFPEYASVFSNVFGQTSKELLKSLSLPSDYENLSATKIEEVLSNITQKKKASKTISTLSDKARRSFGIAFCKDSFAFQLKLIVEQICFIEEQISSVELEIEQLMSKLGTNIKTIPGVGSVIGAVILGEIGDIERFDNPSKLVAYAGLDVSVSQSGEYESSSGKLSKRGSPYLRKALYMAAQRAEFCDPVFHAYYEKKRNEGKHHLVATNAVARKLCHTIYAILKKDIPYEVQ

SEQ ID NO: 404256 - protein, 403 aa, unidentified
MTDAVLGIDVSKNTFDTNLGAGTKARSKSFANSPSGWHHLIAWLGEHKIGQVHACLEATGRHGLGIALALHEAGHVVSIVNPAQIRDFARTKLGRNKTDQVDAVHIREYAELFKPRPWTPPSPAMRRLCELQTIRAGAVAGLTEWKNRRGSGIMDDLALSLAKTTIQHFTSQLEAVDQAIAETIDNDVELSAKRDLLVSINGVGEALAGIVLAELPGPDILGSSAAVTAYAGLNPQQHQSARGEWLSRERPSARKGNGEGLSKVGAGLGLAPRGLGIGGDHADSQRYKSQEECHEALERARCEGDHTTGPPRAAFVGARLRRGCRSIRSLGSRRGRRGAHLVHMVRRSPCPLMAPALRHGPMRSRRCGGGRCSGAGGRLVGLGHGPKGRQGDDGAEADCGDLD

SEQ ID NO: 404257 - protein, 383 aa, unidentified
MRAVCGLDVHKDTVYLCILCDDGEIFEKVYGVLTKELQLMCSDMRRRGVTEVTMESTAMYWIPIWRVLEPHFRLKLVNPYFIKQLPGRKSDVKDAQWIAECTQKDLIRGSFVPPERIQQLRQYDRRIFDLDVEIVRKLSKLDAVMQRCNIRLSNYVSNTDTKSYKDVVDDLCNGVTAPEELIKHIHGRIVNKHGRETILESLTGVVSDAEKDTMRQLRAEIALAQENKQECHQKMVKICQTYYPKEFKRLMTIPGIKERAATSLIAEIGVDMTKFQTAAHLASWSGLKPRNDVSNGKFKSRSITHGNVYLRKTIIECAWGASRTKDCFFSRFSYHQTVVRKKNKMKVLVAVARKLLIAVWHVLHDEKDYVDFNPDCKSPATNG

SEQ ID NO: 404258 - protein, 428 aa, unidentified
MNCTQNEKLNQVTPHTLIVGVDIAKFKHVARAQDDRGKILGKALTFTNTKEGFDAFFAWLEEMQHKHEKADVLVGMEPTGHYWLNLAYTLKERLVSFGVVNPLHVKRSKELDDNSPTKNDIKDARVIAQLIKDGRFSYPRLPMDQDAEVKAGITIRNQIVGDLQALRGRIHNWLDKYFPEFLTVFKDWGGKMALATLEHIPLPGQLNQTTPERVAEIWSTYGGVQRPSHKRIQRLQEAAARSVGLTVGLQMAQREIATNIKRYKMLKEELHALEKQLEDLVLTLPGIAEMLTVPGVGMVTVIELYSELGDIKNFENPRQILKYAGLNLRESSSGKHKGQTRITKRGRSKLRALLFRTVMPLVRHNRAFKALHQYYTTRQENPLRKKQSLIVLCGKLVRVLHTVGQKQCPFDEERMIRDIPHLSLALGA

SEQ ID NO: 404259 - protein, 355 aa, unidentified
MNDAKYIGLDVHQATISVAVLDSSGKLVMEAILETKAETILQFLRGLRGSLHVTFEEGTWAAWLHDLLKPHVTRVVACDPRKTGLGKVRNRNDRNDARELAELLYRNKLDPVYHGEQGLRTLKELARSYLAITRDLTRVMTRVKAIYRSWGIPCAGQQVYAFRHRTEWLAKLSEVGVHRRAEFYYQQFDALAALRQEARRELLVESRKHSAVKLLRQIPSIGPIRAALLVALLQTPHRFRTKRQLWAYIGLALKTYTSGEYRFEGGQLKRSKKTLAIRGLNRNHNHDLKNIFKGAATWAASNSGPFRNFYEACVGRGMKPHMARLTLARKIAAITLLVWKKGARFNAEYLKVQAA

SEQ ID NO: 404260 - protein, 312 aa, unidentified
MSEVVFVGIDVSKKELEVAERPTGQHAVFSNDESGVASMVAFVMSFSPSLIVLEATGGLEIRAVGALAVKGCPVVVVNPRQVRDFAKATGRLAKTDSIDAQVLAHFAEAVRPEVRPLKGAEAQMLDAMSTRRRQLVEMLTAEKNRLFASSFCVRKDIEASIRWLESRLSKLNDDIDQFIKGSPLWREKDNILQSAPGVGPVLSMTILSDLPELGTLNRKEIAALVGVAPLNRDSGMFTGRRSIWGGRSCVRSVLYMGALSAIRFNPVIKKFYERLKEAGKCHKVAMTACMRKLLVILNAMVRQSRCWSATCS

SEQ ID NO: 404261 - protein, 347 aa, unidentified
MERTLNHHWCVGIDLHKDTLTACVFCGCCGEVSFQKIPCKCRKQIAAYFADLPRPHTVAIESVGFYRWLWEMLEPIAQQLVLADATQARALAGRRLKTDREDALNIAQLLAAGRLPTSYAPPMEVQILRDLSRHRNGFSRQHARVLCRVKSIMNANNRPGPARIGSDGLIRYLKAQGEKLPTRHVAMLWQCVDQLALSERQIAQAERTIGELVRRDLFHEVYEILTSFPGVAMVTAATVIAEIGDFKRFPDAKAIGRYAGLNPRVFASGGKQRLGHIAKTGPSDLRWILQQAAWTAIRTDEHVRRVFLRIAKRSGRKAAAVAVARKLLTWMHSAVVKGEPYRTRVAA

SEQ ID NO: 404262 - protein, 428 aa, unidentified
MNDVDRNRLEEFRQLKQEIRHSEQYLIVGIDVAKDRHHAFFGTANGKTLLKNAVFDNTYEGFRRLLDQTEALRVRHGLSKVVYGMEPTANYHKPFGEGLIELGRNVVVVSGLMAKRNRESLDGRWDKHDRKDSANIADLIAQGKCLFYDYPVPELRGLRNLIALKRRLKKQEQSYAIRIRNQLIARYFPEMDRDYRGLGAEGLPIVRWCLPASEIAQFEVDAFVERVSSKRIRPEKRRRLEALWEKAAESIGCEPVPGLDHEAKLMVEGLKQIREMIQETEQKIQEICKSFSSYGYLLTLPGFGPDISAKVMAAVGDPERFVKGRQVLKLAGLDLGADRSGKNSDKAIPEISKRGKADLRQALYQAALVASRRNPEFMRYYRSKIRGREKEQGIHRKMLVKLSAKMLVIAWTLMKKQEAFNPAFIKVE

SEQ ID NO: 404263 - protein, 461 aa, unidentified
MKKPKGRAAAKVDPGSRLGVIQSDVAGIDIGSREMFVCAPAGRGEDREMVVFATTTQQIQECIGWLKQKKVRSVAMESTGVYWIPVLEMMESSGLEVLLVDTRPLSRVPGRKSDAEDCQWLQTLHSHGLLRGAYRPNEQISELRTIVRQKAVLVREQADWIRRMHKCLDQMNVRVHHAVSDTKGATGMAMLRAIVEGERDPRKLAQLRDRGCQKSEAEMVELLTGNWRSDHVFNLKQHMTMYDNAVQQIAAYEQEIQRRMQEITPAGRRDLQAPPLANLEKRKTMKKRDQEGKRQALYRAMGEDLTTIDGVGVEIVEVILSEYGTEMSKFPGERQFVKHVALAPHRPVSGGKVLRSKRNKQKGTRTAEALRQAASSLKHSRSALGAYYRRIARRKDSGIAVFAVARKLAGLVYRMLRFGQQYVDIGQAEYEKRYQETRIRALKSTASQLGYNIVRQEPVTA

SEQ ID NO: 404264 - protein, 326 aa, unidentified
MSTSVYRFTTVIGIDISKAKIDIANNQSKTVKTIGNRKSELVRWIKTIADPVSTIVVMEATGGYESLLVELLHQRHIALAVVNPRQVRDFARGIGRDEKTDPIDAAVLVRFGEVVQPEPQLPKTREQIELRALVDRRRQLLDLIIQEQNRLKQTREKGIRDSIKTVLKTLGNQVKLMDKQIAASVKADQANARKVEIMDSAKGIGMVTISTSLAMLQELGTLNRQQISKLTGTAPINKDSGQSTGRRKTKGGRSDVRRTFYMATLTACRHNPRIKAFYDRLIARGKPPKVALVAAMRKLLTILNALIKKNMLWEDPPAAAATQAAS

SEQ ID NO: 404265 - protein, 344 aa, unidentified
MLIIGCDFHSGFQQIAIFDNQTGAIEEKKLRHPGEAAEYYRLQQGPVRVGMESGAPCQWFRRLLGECGHELWVGDATRIRAAEPRKQKTDRHDAELILKLMVEERFPRIWMPSEEERDVRQLLMDRHHRMRARTQVKNQLQALALNQGLQKGRKLWSQAGREQLRELPMMEHAARRRDQLLLAVLELDRQIVELDVLVRQEAEGREDARRLMTHPGVGPQTALAMVLTLGEVSRFASAGKVASYLGLIPGEYSSGNKQRLGHISKQGSSLMRFLLVEAGQTAVRGDEQLRRAYARLAAKKSRSVAKVMVARRLAVRLYWMLRRRWTYAELARHAGEPGSSCGAR

SEQ ID NO: 404266 - protein, 423 aa, unidentified
MSQNQPEIQYAAFLAIDWADQKHVWSLQEANSSTCERGEVDHMPEAVEAWVAQMSQRFAGRPIAVAVEQSRGALVFLLSKYEQLHIFPVPPAMTANLRKAFYSSGAKNDPSDADLLLDLLQRHREKLRRLSPDTEATRRIQNLVEERRKLVDEKTAQSNRLEAHLKIYYPQIPRWFGDVDSPLVCALLERWPTLEALQTARPDTLRSFFRKQHSRKEELIENRIKAIGEAMPALKDRAVVEAKVAVVKVSVQLIQVLHEGIEGLNRQIQEAAEAHPDFFIFDSLPGAGAVMAPRLLAAFGSQRERYQDAAEVQILSGIAPVSESSGKSSWVHFRFACSKFLRQSFHEWAALSIPQSQWARAYYELQCRRGKKHHAAVRALAFKWIRIIYRCWKEQVAYNENVYLAALAKHNSPLVAATKAVAL

SEQ ID NO: 404267 - protein, 333 aa, unidentified
MSEITTLGIDLAKQVFQLHGTDVQGRVVLQRRVRRGQLLTCLSQLPRCTVAMEACGSSHHWAREIRALGHEVRLIAPQYVKAFCRGQKNDRNDAEAIGCAVRQPQLPQVAIKSVEQQALLALHRLRTQLVRQRVALTNQLHGLAGEFGIVLPRAPQKLRRQLLQVLDQGRVPLLLHPALTSQLEHLTQIERREQALTRQLEQLARDSEPCRRLMRRRGVGPLISTAFVAELADAKSFRNGRQVAAWLGLVPRQHSSAERIRLLGITKHGNSYLRQLLIHGARSALQTASRHEDAVSRWSLAVAQRRGANRAAVALANKLARHLWATLRYAEAG

SEQ ID NO: 404268 - protein, 362 aa, unidentified
MGKLITSFVGLDVHKDSIAIGVAPAGREVPHFVGTVAPQWSALSKALGRLGKAKELQIVYEAGPCGYTLARELRSHGFACEVVAPAKIARRPGDRIKTDRRDALLLARTARAGELVNVMIPDERDEALRDLSRAREDAVRARLKARQQLKALLLRHGHRYTGKSSWTAAHERYLAGLTFAQPAQQIAFAEYRSAVREAHERVERFTEALRGQLEHWRMRPVVEALMSLRGIDLIAAVTLVAEIGDFQRFARPSELMGFLGLVPSEYSSGSTRRQGAITKTGNGHARRVLVEAAWNYRFPARLSRTLQVRQEGQPKNVRTIAWKAQCGTQAGAQQNLRGDRTRTLGLRLGHRPPGQAERLNVW
